United States Patent Application Publication US 2024/0301345 A1 - sequence listing, part 10

SEQ ID NO: 1406 - DNA, 43407 bp, Unknown
  R257_15m  MAG No. k141_9084
ccggcccgaacccgcacgggcaccgggacctccccgcatacccatgagacccacgcccgggaccattcccggccagccccgacggcgaggccgaacggcgcggcgcgtccgcgaccgtgggagcccgacgcccaggccccccggtccgccgcgcagacagctcccctccagaggggagccagaaactggcttggttatggggtcgctctacactggcttctgctatgcattacttcacccctaaacgttgcgccacgtcgaataaaatcatgtaccacgataaggcgcaggctcagcgtgccgctgatcaaagcctgatcgagcgtggagccgagctatgggtgtaccgttgcgaatattgcggatgctggcacctcacacatcgcgatccacaatccagttaccggcatgtaccgctgaaccagcaactcaagccacacagtcgtaaaaagggctacaagccacgtagacgttagcgtcagaagctccacaggcctcgccaacgccgtatctgaggcaggttacggtccaaacacgccaggtcgtaggctgctaagcgttcagggcgctcggacacactccgtccaacactcacatcaccttggtgctttcaaggttgcggataacccaatcgttgaagcgaattaccggcttgcgcaacataagtcccaacagcaatgagggaacaaggaacagtgccagtttgcccatggaaacccagtattccatgccgaatgagcccgccatggccgaatgcatcgcatccaccgcataggggaacagtagccatttagaaacgacctggaagaacgtcggcagtgtttcaatggggaatgtgccgccggaaccggctacctgcataaccagcagtaccacggcaatggctttgccgatatcaccgaacgatagggccagcgtatacacaatattcgagaacaccagtgcagacaaccacccgaccatcaaaaactgaatcggatgctcacactgcacgccgagatagaacatatcgcccaggcacaccagcgtaccttgcagcaaagcaaggaaaccgaaaatcatgtatcggccgaaatattcgtggtgcaagcgtaaaccgaactgccgcgcattgccggaagactcggcacgcggcttcttcagcacatccaacgcggcggccggtccggcaatccgcccggcaatcatggcctcgcgaagacccactcccgaaccgagcggcagatcattgcccaaccctaagatacgggccttctcatggtcggaaatcgatactttcaacatggcgaccagaatgatcgcaccgacccagatagacagaatcgtgtagaacggagccatcgcggaaccatagttggcaacgggatagagcgcgatgcggtcgaccgctacgggtgccgccagcatggaagcaatggcatcgggcttcgcagaggaaatcacagacaggtcgttggtgccgccactggtgatagaggcgagttgggaagacaagttgtcgagtttcttcgccgaacgggtcaaagcgctagctgcgtcagtcaaggccgactggatatccgtcaggctgtctgaaacgccgccagaaagacctgacacgctgctgacggtcgacgcaagcccgtcgattacggaacttgcctgcgtggccacttcgtccatggacgaggtcagattgttcagttgcggtttcagcgtgctcttgtacgtgtctgaagcctgagtaatcgattgtttggcggcggcgatttgtgatttcagatctcgacgcgctgtatcggcatcggcagtaccatttgctatgtgcgtggccgcatcgcccaacgcggtggcggcttgctgcatgctctgctgcgcctttgtggcttggtctgcagccgcgttcagttgagcggcaacggtatctccgcccacgggcagtgaagccgcttgtttggcgagatctcgtaaagcggcggcatactttccaaagctgtcggcctgagcctccactttggattgcatatcggtcagcttgtttgatatctgcgaggattgtgagcccacatcggcaaaagcggcatcgatctgcttggcaatggtgtcgtaggatgaaccggcctgctgcaatgccgtaccgacgccatcggtggctccggacaatgccttgtcgaggctggagacgccgttgcgggtctgtttcaacgcctttttggttgtggccgcagctgagcctgttgatcccagcagcttatcggtggaatcaatgatgctgttggcggccccgagcagattggcataggaatccatctgcgacgcagtgccggtcaaacgagacgacatggtggcaatatgactggaggcgttgttgacgtactgctccatttgcgggctttgcgcgtaatcggccacgttggaaaccaaatccagcgccacgctcgccaaggtcttcacaaatgtctggtcgatggtcgtggccacggtggtagcaccctggtcggtgatatgcggagcgatcggattgattttctcattgagatagtattcgagcttggcgtgcttgatcttcggtgaaaacagcgtcatcatatcggagctgaagctctttggaataatcagcgcggcatagtattcgcctgagttcacgccatcgatggccttagcacgatccacaaactgccagtcaaggtcatgattggccctgagcgtattggtcacggtttcgccgacgttgatggtgatcggcatcagatcggacttatagcccttatccacgtttgccacggcgaccttcaaggccttggtgttgccgtacgggtcccagctggcggcgatgttgtaccaggcgtacagtgccggcacaatcaccaatcccatagccacgattacggcgatcacattgcgggtggcttggcgcacgtcacgtacgaatattttccagataagcttcatcgtgcgcctccttgcccagactgaccggactgaccggactgctcgaactgtgcggtgtgcgcagtcggctcggcggcctgatcgccgaacagtgtgagtcgttcagtggtttcgccgatatccggattgctgcccatcgccgcttcgtgacgtccgtggccgtggaaacgccgccacacatatccgttgagcatcacattgcggaactcgtcggcactcatggcactgacgccaagctgcatggcgtaggtttcgcgtgcgtattcaaccacaatgagataggcgtcgataagaataatcgacagaatccaggaggtcagcatggcgattttctcttgggtgacgaacagcagtaccaggaatacgaacgggagtacggtcagcaatgtcagaccggcaacgatcatctttgggtaccgcgcgaagaaccggtgcgcgcgatgagcgatgatatcgcgcagttccttgctgtcggacaccgtgcggaatacggagttcaagctcacctgttcgttcaccatgctgttgtgctcggtgatcatcaggtcggtatctcccaaacgatggtcgaacagcgcgttcaggttcatcgcataccggcgtacgacaagtcccacgaaaagcgccgccggcagataccagaacaggtgcagcatgtcgagccagtaatggttcgcgtacaggccggcgatcgggccgcgcatcgcgttgatgccgtaggtaaagggcagccatgggtgcagttcgcggaagaagttcggcatcatttcaatcggatacaggccggaggcaccgggtatctgcacaatgaccagaattacggcgatggctttgccgatatggcggaacgccacggccagcgcgtaaataatgttgatgtagacgaacgaacagaagattccggccaagatgaacagcagcggatgctcgcattggatgccgagcaccagatcgccaatggtggcgatgatggcttgcaggaatccgatggtgaccagcagcagccagcggccaagatatgcttgcgtagcggtgatacggcgaatgcctttgcggtcgacctcaagcttgtagatggcaatcagcacgaaaccgcctacccacagtgccagattcgtgtagaacggggtgactgcggacccgtaattgtcggtggcgtacacgactttcgtggtcagggtgacgggattgcccatgaactcgccgaatcccttgtcatccagatgcagcgtatcccggattttctggtaagcggcggaactatcgagcgtggcgatatcggtgcgtacggtggcgacatcgctggccgcctggcgcagcgaatcctgcgtgctgctgatggtggttttcgtttggttcagggtatcgacaagctggtcgaacagcccgtcggcctgatccaaggtgccggacaacgaagtcaacgtgccatccagcgtgccgttcagggcggcgaaactgttcaatgatgaggtgagcgacggcattacggtgccggtcagcgagccgcgcgcggtattcagcgccgcgatgccgccggtggtggtgttggtcatggctccggaaaggttcgtggtggcgtctttgccggagctgatgaactgtgtggtgtcggtatggaaggtgttgagctgtgtctgctgtttgctgatcaatgagtcgagcgcatcgatttgtttccagatgttctggccgaccgggtcggtggtgtctttgccgatgccggctttggtcagcgcgtctttcagatcgctgattgacgtttgggtggcgttcagtggggccgaaagtgtgttggtgatggtgtcgacggagttctgcgcgctgttgaaggagccggtgatgctgccggcggcgttgttgacgtggatggccagtccggagagttgtgctgaactgctgtcgagcgcgccgaccagtgtggtggagaaggcttgtgacccggcctgtgtttccaccaacagtgtgccggactggcgggaggcattctgcgcggccgcgacggtctgcttgagtgaggcggtggtctgtttggcgtcggcgagaatcgtgtctgattgggccagcgtgtcctgtaagtcggtgagtgaatcctgaacggtgttcagcgtggacatcaccgtattgagatcatcgatcgtatcgtgctggactttgccagtggcttggccgagatcgtctccggtttcggaaatggccgaggcaacggtggtggctaccgtggtgacgaaggcggagttgatctgctcatcgatggtggtggcgccggtgtcggtgattttcggcgcgatcgcgttcttcttctcgttgacgtaatacttgattttcggctgtttggaggttccggtcaccgattcgaccaagctggcgctgaaatccttgggcagcacgatggctgcatagtatccgccggtctccacgccgtggacggcctgttcctcattgtctacgaagcgccagccgagttcgtcgttctgcttgagtttcttgacgacctgccggcccgcatcgagatggccgaccagatcgttggtggtgccttggtcttcattggctacggccacttgcagattgccggtggctgaatagggatcccagttggcgagaatgttgaaccatgcgtacagcgagggcagcattgctacgccgagcgtcaccacaacggcaacgggattgcgtaagatacgtctgcaatcgcgtagaaagacttgccaaaccgtccgcatccagtccctcttttccggttcgtagtcattgcggccacatgcagtctattcccaccactggtgcggatactgctggtttggcgggttttcttgcaaaactggccgttggttgtccgcataatgggactgatatgtgaacgtttgttgatggtgcgacaccggcgggatggttgtgcaattttgccggtatccggtgatgaaatgttgaggtgttggaactgagtcgtcgcagtgctgagaccgagacgactcagtgacgagcctatccgaggctatctcgttggttctggtctcactgatccagacggaagccctgagcggcggccttgtcgagcagtgtctgatggctgacatcctgccgactgatcgtggcgacctgatcgctgaaagcgtccaccggacggtcggcttggcgcagatcgtagtaccggtgaacttcctcgtcgaaggcgggcagctggtcgagtacgccatcggcgtcagccgggtaggtgttctcgaagaactgcatcgtgcgcggcatgcgcggcttgacggtcgggttctgatcgggcttgccgatggccagacccagcaccggatacgtgtattccggcagattcagcacgtcgataaggccggggatgttgttgagcagagagccgagaatcacgcagcccagtcccagcgaataggcggcggtctccatggcgtgcagggccagcactgcgtcgttctgagcttgggtgaagcgatagctgtacttgagatggaattcgtcggaagcgggatcgatacccttgcgttcggcgatgcgtgcgttgcggtgctcgtcgatgacgaacacgtacagcaacggcgcggtggcgatatacggctgatggccgaattcggcgagcttggctttggtggccgggtcggtgatacggatggcggaccagtcgttaaggaactggctggacgcggcatgttgggcgacggtttcgagcgtggcgcgggtatcgtcgtcgatggcctcgtccttgaacttaaggatggagcggcggcccagaagagcctcgattgttgcgttggtaaccatggctttattgtcgcacggcagacgccggacgccacggtggattacctcacagtgaaatgccgatattgtgtggcggaactgtgctggactgatggttcctgtcgattgactgatggttccttgacgaaattccagcgatgagtcatcagtcagccaacagaaaccatcatccaaccgggggattagcggctgggcttgcgatggcggtggtcgacgaacgccttggagccccgatccgacagctgcgaaaccactgcgccgagtgcggccgaaacggcggcgaatgccagactcattgccagactttgcggcgcgtctgccgccagtcccttgcgcagattgcgtttgcttgtgcccttgtcccatatcatctggaatgctttgccggcaaccaagcctgccagcgctgggactgccgacttgatgagcttgtcgcccagagaatcagggtcgttgagccggtcctcgcgcagcctgttgaccttctcgtcgatgcggtgcaggctgtcgaccgcgcggtcggcgctggaggggaagtcggtgttcgtttcgtcgctcatgactctcagtctaatagcatctcaatcatctcagcgcaaaagatgggcgttaatggtggagtcatgaacgagcgcagactagagtggaggcatgagcgaacagaacgtgaacggcaccgttgccgtcgagaactctcgtggcggcaatggatttttggtgttgctgcgccacggccagaccgtgtggagcgaatccgggcagcataccgggcgcacggacatcccgttgaccgcggtcggcgagcagcaggcagcggatgccggaaggcgcctgcgcgaggccttccccgaaggattcagccagagctgtgtgttttccagtccgctgaagcgggcgtgccaaaccgctgaattggctggttttgcggaccacggtgtgttggacggcatcgctgaatgggattacggccgagccgaggggcgtacgcgccagcaggtgagtgaggccagcggttttgaatgggatgtgtggcgtgacgggccgcgctcgctgacgcccacgctggagggcgactgggtcgagaccttgccttcgggcgaacaggtgccggtccatgccgggcctggcgagacgctggaagaagcggcggcacgcgccaagagcgccatcgacgagattacgccgctgctgaaagacggccataatgtgctgttggtggctcatgcgcacatcctgcgcatcctcacctcgcaatggctgggcgtggacccgcatttcgcacggttgctgcgtttggatacggcgcactactcggtgctcagcgtctataagggagataacgtcatcgaacggtggaacgcctagccccggttgcgctgcgattgcgctggcctgcccgctactgcgggcgggcctttattatttgtggcgggaattgcggtatgtcgataaatgatttgcaaacgatagcgtcggcgtgttgttttttgatgggtataagtggcaatcgattgccatgaaagatatgttagcgctctcatgattgcgaacgcttgcattgcgataatgaggcaaaaatgactgaattaatgggatatttgttgacaatggcctgaaaatgatgatttatgacgcgccgatattgctatcgtttgcaaaaagaagcaaaccgttgcacaatagtgcatgtcgatagtcgtaaaggtgcgtgctagcgtacctgtcccgaccggggacggccgggtcgacgatgaaagagaaaggttcgatgatgaatcgtacagtcaagtcagcagtcgcgatggcggctgtcgctgcgatgtccctcggcgctttggcggcctgcggaagctcgacctccggcgatgacgccaagggcaaggtctactacctgaatttcaagccggaagcggctgatcagtggaccgctctggccaaggaatacaccaaggaaaagggcgttgaggtcaaggtgcagaccgcggcctccggtacctacgagcagaccctgaagtccgaaatcgccaaaaccgaagccccgaccttgttccaggtcaacggcccggtcggctaccagaactggaagaagtacaccgccgatatgtccaatacggatgtgtacaaggagctcaccaaccaggatgtggccctgaaggatggcgacaaggtggtcggcgtgccgtacgtgatggaaacctacggcctgatctacaacaaggacatcctcaacaagtacttcgcgctggatggcgccaaggccacgtccatggacgaaatcgacaacttcgacaccctgaaggccgtggccgacgacatgcaggcccgcaaggacgagctcggcatcaagggcgcgttcacctccgccggcttcgactccagctccgactggcgcttcaagacccacctggccaatctgccgctttactacgagttcaaggacgacaacgtcaccgagcagccggccaagatcaagggcacctacctgccgaactacaagaagatcttcgacctgtacatcaccgactccaccaccgaacccacccagctgagcgccaagaccggagatgatgcgaactccgagttcgcgctcggcgaggccgccttctaccagaacggcacctgggcctggaccgacctgcagaaggccggcatgaccgccgctcaggtaggcatgatgccgatctacatcggcgtcaagggcgaggagaagcagggtctgaccaccggttccgagaactactggtgtatcaatgacaaggcctccgacgccgacaagaaggccaccgaggacttcctcaagtgggtgatcacctctgataccggcaagaaggccctctctcaggacatgggcttcaccaccccgttcaagaccttcgatgacgtcaaaagcgacaacccgctgaccgaggccgccgtggaagaccaggagtccggcaagacccaggtttcttggaacttcaccatgatgccgtccgaggaatggaagaacaaggtcggccaggcgctgctcgagtacgcgcagggcaccggcaagtgggatgccgtcaagaccgccttcgtggacggttgggcttccgaatacgaggcctcgcactgagtctcatagagtcccatagccgataagcaacaatccgcggcgcccctgcctttccttctccaggggcgccgctttgtattgctgagtctcgcacaaaatcgtccgccgcagaaaagtgtgaggcacgcacccgctcaatcgcacgctgtggggccatgaatcggcgatttttcgccattctccacaatgtgcgattgagcgttattgtgcggttgcctcacgctttttctatggtgggctttgttgtgtgagcctacttaacgcgggaggtggaggagcggaccttcagctgggccgggaacacgatgtagggttgctcaatcggcttttcgtcaatgagatcgagcgtcatgcgggctgccacgcgggccatttccaccggatcctggcggatggtggtcaggccgatatcgccggtgtagaaactatcgtcgtagccgaccagcgagacgtcgccgggcacggagaatccattgcgctccagctggaacataagcggcaaagcgatgccatcctcctggcatgcgatggcggtgggcatctcgtcttggctcatgagttggtcgaccacgtcgctgatttcataacgtccatcgtcatcgaccttgcagacgatgacctgcggctcgatgccttccctgcggcagcaggcggtgaatgagtcgaatcggctttgcacggagaagctcagcgacacctcgcgattggtgctgatataggtgatgcggcgatgtccgagattgataagatggcgggcggccagcgtggagccctgcacgtcgtcgatattgacggcggcggtaaagccgcgggcttcgggctcgactgaattgatgccgacgatcggcacgccgaccgaagccagttgcgcgatttcgttgttgtcgatatcgaaagacgccacaatcacggcatcggcgttacggcgtaccggcaacatctcgaagaattccttgcgctcctcgatgctggaaatctggaataccgaaatatcgtagccctgcgtgtgcagcacctcgttgagcccctcgatgaccgaggcggtgaaccacaggcggatatggccgctcatcagtactgcgatgcgcagggcgcggccggatttcagggccgcagccgagcgggagagtgagaaattgagtttgtcggcgatggcgagcacgcgctcgcgggtcttggccgacaccagatccggcctggtgaaggaacgtgagacggtggagatggagacgccggcctcgcgggcgacatcctgaatgctcgtagccattgcagcccccttgcgttgaatggaaaatcgcaatacacatgcacaactgactacagtgtacatgctgattgattgatttgcggcgatgacaacgattgtattacaaacgtttgcaaagtgtctatgacggcgtcagattggctttatatagccattatcttagttgaaagaagattgctggagctggagtatgctcgagattgaaacgctgaaaatgacaacgtttgacatataatgattcgacgtttactatgaatataggcttgaacgagaacaggccgtgcatgcggttctcgatcggcaggctcgcattgagttgaactccgcagccggcgcacgatgcagtgtcgcaacgcagcggactcaaggaggaggaaaagtcatgatcagcatggctggcaaggcgatacgcagatggtgggcgctgttcgcgctccccacattcgccgcattcatcatcgggttcctggtgcccttcatcatgggcgtctacttaagcttttgcgaattcaccaccgttaccgacggtgaatgggtggggcttaagaactatggcaaagcgttgaaagacaaggaattcctgcatgcgctcggcttctccaccgcgtttaccatcgtgaccaccatcgtgatcaacgtgatcgccttcgccatcgcctacatgctgaccaaggcgatcaagggctccacgctgttccgctcggtattcttcatgccgaaccttatcggcggcatcatcctgggctacatctggctgctgctcctgaacggcgtactggcccactggggccgcgccctgacctataaggcgtcctacgggttctggggcttggtcatcctggtgtgctggcagcagatcggctacatgatgatcatctacatcgccggcctgcaagccctgcccaccgatgtgctggaggccgcggccgtggacggcgccaacggacggcagaccatgttccgcatcatcatcccgctgatgatgccgtccatcaccgtgtgctccttcctgaccgtgaccaacggtttcaagctctacgaccagaacctcgcattgaccaacggtgcgccgagcaacatgtctgaaggtctggcgctgaacatcacccgcaccttctacggccgtatgggctgggaaggcgtcggccaggcgaaggccgtgctgttcttcatcctggtcgcggtcatcgccctgattcagaacaagctcaccacgagcaaggaggtggcagcctgatgaacgagaacaagcctgtgaagcatggcgcattatggaccgtgctgtttgccgttgtctccctgttctggattttcccgatcgtcctggtgctgatcaactccttcaagcagaaggcgtacatctccaagaacgcgttctccctgcctgccggcaaggcgttcgtgggacttgagaactatgtgcgcggcatcgagaccacgcagttcttcgcctccttcggctggacgttgcttatcaccgtcggctcggtggtgctgattctggtgtgcacctcgatgtgcgcatggtggatcgtgcgcgtgaacaactgggccgcgaagctgctctacaccctgttcctgttcaatatgatcgtgccgttccagatggtgatgttcaccctctccaagatcgccgacatgctgaagctcaataccccgtggggcctgtgcatcgtgtacctcggtttcggggccggtctggccgtgttcatcttcaccggcgtgatcaagggcatcccgcaggagcttgaggagtccgccatgatcgacggcgcgtcagtgccgcgcatcttcttccagatcgtggtgccaatcatgaagccgtcgatcgtctcggtggccatcctcgaagccatgtggatctggaacgactacctgctgccgtacctgacgctcgacctcggcaagtacaagaccatctcggtcgccgtgcaatacctcaagggcggctacggttccgtggatatgggcgccatgatggcctgcctggtgctggccatcatccccatcatcgtcttctacttggtatgccagaagtatatagtctctggtgtcatggcgggagccgtcaagggctgacgactcgcgtcgtcagcccatggctggaagcccagtgggcttccagcaggctccaggctgagccgcgacagcggcgaagctaatgatgagcctcgtcgtaggcgagtccgtaattgcagggccgaaggcggagcggtcaagggctgagctccaccaatccggctcccctctttgaggggagccgtcggcggaagccgactgaggggagtatcctgagctccatcaagtctcccctcagtcatctgcgatgacagcgcccctcagagaggggagccacaggcgacacaaggagtagttgatgaactggctggcaccggactcgaaattcatgcgcgcgtggagcaatcttgttgacggcgtatggatcaacattctgatgctggtcacttcgattccgctcatcaccatcggtgcggccctgaccgccggccatgatgcttgccgccgctccatcgagggcgagggcaaaggcgtaaccgccaactacttcaagtcattcaaagccaacttcatcaaagccacactgctgtggctgccgttcttggtggtgctgattgcactggtctggtcatggatcgtcctgcagatcacgccgctgctcatcatcaaattcgcgctgaccatcctctggcttatcggcttcgaatgggtgttcgcgcttcaggcacgcttcgagaacaccgtggccggcaccttgaagaacgccttcatcttcggcatctcccacatcgcgatgaccgtggccctggtcatcgtggatgccgtgttcgtggcgctgctggtggccagctggttctacatgcccggtggactgttcctgctggtggttcttggttacggcaccatgctgatgctccatatccccgtcaccgagcgtgttttcaatccatatctcattgactaggcgggttctctcgcgaatatgcggcgatcttcgaggtctgagcgttctctgtccacgcaagcgcggtaaagataacagattgaggctattcgctgtttgtggtgggtgatggtcaagtggtggtgacggctttgaggtcgagtctgccgcaggtcaggtagatcatggtggcgaagtagtccatgtcgcggaagcctctcgcccgtcgtttgacgttctggatgacgctgtcggcgccctcgagcacggcgttggtgtacgggtgctcgaagtatgcgacgatctcggcgaagtggcgtcggatcatgcgggcgaagtccttcatgggctcgagcctcgagtgcatcatccatgagcacaggcgatgcaggcgcacccatgcctcggacggggtgcggctgtccgtgtggatgtcctgcaggacctcgcgcatccggcaggcgcggccggtcttcaaccgttgcctcgtcaggttgcgcttggtctccacctgcagttcggtcaggctttcctcgttgcgcagccacaggtacttggtccgtttgagcagcgggttggagcggccttccgtcttcctgaccttgtcgacggcctcgttggcgtgcctggccacgtggaacttgtcgacgatccgccgcgcatggggcagatgctcacggatgcccttccggaagcccaggctcatgtcgcaggcgaccagacgcacatattccgggaccccgttgtggtccatgaaatcacgcgagaaccgttcgaccgtggtcgagtccttgcccggcgtcacgttgatgacatcgtgctccacgagatcggcgaccacggtgatgtaattgtggcccctgcggctggtctcgtcgatgccgattggcccgtacccgcacctcgtcacagcttgtataatcacgattatactaatcgtgatacaataaatcgtgatgcgatagaaatacgccggcgtatggcataaaggaggcgggcagcatggcattcatcggacgagacgatgacctcaagcaactgcaggaatgtttcactgagcgtagggcacagcttgtgttcgtctacggccgcaggcgcgtgggaaaaacagagacgcttattcaactcgcaaaagacaaggaaaccttattcttcgcggcgcagaatgccactaaagatgaacagctggcatcgttctcccgtctcatgttcgaggcgggtgccccgggcaaggattatctgagtcaatatccttcttgggaaagggcgttaaccgagttaacccggctgccagagccgagcgatggcggccgcaggcttgtgatattcgatgagtttccttatctggtcaaatctgatccgtcattgccgtcagtgctacagaatctttgggaccacacgttgcgtcatgcaaatctgatgattgtgatttgcggcagtgccatgagcttcatcgaaaaggagctgttgggagaaaaatcgccgctatatggtcgtgcgaccggcatcctgaagatgctgccgatgccatattgggatgcagcgcaattcttccccaactatagtagcgaggataaggcgctggcctacgcaatactgggcggtatcccgcgttacctagaggaatttgacccagatgagaccatagacgcaaatgtcaagcggcatattctgagacgcattgctccgctatacagcgaggttgaatttttgttgcacgaagaactgcgggaaactgcgaaatataacagcgtgatacgggcgatcgcgctcggcgcaacttcgctgaatgagatcgcgacacacacgatgatggcaaacgcaacagtatcgtcgtatctcgccaatcttatggaactggggattgtggaacgtgagttcccagtcacggcgaagcctaaggagcgggcgaaaggttcgcgtgggctgtatcagctgagcgacaatttcttccgattctggtattcgtttgtctttccgtatcgttcggaattggagcggggcgatgtggaaggcgtatacgagcgtcatatcaagccggtattacatgattttgccggcaaaccgttcgagggtctgtgccgtgaatggatgtggcgtgagagtgctgctggacggttgcccttccgtgcgcgtgcggttggccgttggtgggatcgtcaggatgagatagacgtgatggccgttgacaatgcgtctgatgctgccattgtgggcgagtgcaaattccgcaatgcgccggtggaccgttccgtgctgaatctactgcgagaccgtgctgcgcgaaccggtatcggccagcgaacatacctgctgttttcgctcggcggtttcgatcaatcactggtcgacgatgctgcggcgtctcaatccgacgttcagctcgtcggcatcgatgagctgtttcatgaatgaatcccatttgcgaatagctctcactgagtgctcatcagtgagagctattcgcaaatggagccttacttcttcgcctgagtgagctggtaggcggcgaagaggatggccagccagatcacgccggcgatgacggcgatgcggtagctggtggagaagcacatcagcaccacgaccagcgccaggaacgccagcaccacccacggggtcaccttggcaaacggcagtttgaagtgaatcgcgtccagtgcctcctggccgctcagaccggccagctcggaatcctcgggagcgccgcccgcggcgaccaccttacggaacttcatttcggtgagcatgatcatcgtccagttgatgatgccggcaatggtggcaatcgacatcaggtagttgaacgcgaactcaggccacacgaacaccacgaccacggcgatggcggtgatcgcggcggacgtcagcacgccggccactggcacgccgcgcgagttgagcttgcccaagtaagcgggcgcattgccctgcttggccagcgagtacaacatgcgggagttggcgtacaggccggagttgtagacgctcatcacagcggtcaggcacacgaagttcaaaataccggcagccgcgtgaatgcccacggaatcgaagatctgcacgaacgggctggacttgccatcgatggtgttccacggcactacggccatgatcacacccagagcgccgatgtagaacacgaggattcgccaaataatatcattggtggcgcgcggaatcgtggtcttcggatcctcggtttcgccggcggtgatgccgatgagctcggtgccgccgaagctgaacatcaccacaaccagtgccatcagcaggccggtccaggaaccgtcggaattctgccccatcaggccgttcgggaagaagccgttacccacggtgaaccagttcgcgaagcttgcgcgcacgccggatgcggtgggcaggacaaagatgatgacggccaggccgccgataatcatggcgatcacggccacaatcttgatgatggcgaaccagaactcgaactcaccgaatttagagacgcccagcaggttggcggcgcagatgatcaccaagaacacggccgccgacacccatgtcggaatcgccgggaaccagtagttcacaaacgaacccaccactgatagctccaccatcgagacgaggatgtagttgaaccagtagttccagccggaaataaagccggcgcgcttggaccagtagcgggtggcatagtagctgaacgcgcccgccttcggatcctcaacggacatttcagacagtgcacgcacaatcgcgaaaatcgcgaggccgccaaccaagtaggcgagcagaatcgagggtccggccagcgcgatggattcactggaaccatagaacaggccggttccgatggcgccgcccagcgcaatcagctggatgtggcggtttttcaatgacttgcgcagcgtggccggcaccggcacgtcgtcggtttcgcgcggcttcttaggcgcatcagtagtactcattgtgctcttctctcacgtttcttgggtttggcgcacgcggggcttgccgtgatgcgcaacgttcgttattctatgccgccgtatcgtctcagaaatggtcaatcgtctatttgtgcgctattgcaagcgcgggcgtgggcgcggccggtgagcaggcgaagctatagcgagcgatgcttatgaaaccgcacgcttcactgagttcactgagttcactgagttcactgaattcactgtgctcactgcgtggcaggcatacacatggtgaagatggtgtgggacaccgattcgggagaggccgcgagatcggtggcgagccaatattgcaaaagcccaatgctgccggacacggcgaatcgcatacgcatctgcgcctcggctgggtaacccgccgaagattgcaactgttcgcctacaccgcgctggctgtaaatcaatcccagcagctgctgctggaaaccgatatccgctttcgggctcatcagcacttggagatgattgcgattgtcggcaatgtactggcagatgcgctcaataacatgctcgatgccggcaggatctggctgggcgagtagctgttcgagtgcggtggtgacccaggccatggtttcgtcttcaatgtcgtgcagcagttcctcgatgctcgcataatgcgcgtaaaacgtggaacgattcacatcggcccgctcgcacaacgctttaacggtgatggagccgagcggctgatcgcgcagcaactcgataagcgcgtcctgcatggcacgtctcgtgtagcgggtgcggcggctttccgtcaattctttggccatggccttctccccaagttccgacaacccacaatccaactgttggttgcagaaccgacacagtgttgttttacttgagtatagcaggaagttctggcggggcctatggggctaggtggctgccacgagcgcgttggaggtgtgcgatggcgtatatcgaattcgaccatgtggtcaaggaatatccttctggcagcagtgtgattcgcgcgctcgacgaggccagcttcaccgccgaacaaggcgaattaagcgtgattctggggcagtccggtgccggcaaaaccacggcattgaacattctgggcggcatggataccgccacaaccggccgcgtagtggtcggcggacgcgatattacgggtctgcggaaaaaggaactggtgacctaccggcgcaacgatatcggcttcgtcttccagttctacaatctggtgcctaaccttaccgcgctcgaaaacgtggagctcgcctcgcaaatctgccctgaccatttcgatccagaggaaacgctgcgcaaagtcggactgggggagaggatggacaacttccccgcgcaactgtccggcggcgaacaacagcgtgtatccatcgcccgcgcgattgccaaaaagccgaagctgttgttgtgcgatgagccgaccggtgcgctcgattacgagaccggcaaggaagtgctgcagttgctgcaggatatttgccaaacacaaggcatgaccgtaatgatcatcacgcataattccgcgcttgcaccgatggctcacaaagtgattcgcttccgctccggcaaggtgaccagcgaggaggtcaacgcaacgccgcggcccatcgccgatatcgaatggtaggtgattggcgatgctcactgcaagacactctgtgaaacgccccgtgaaacaagcgaggcgattcgtgaaacaacctgtgaaacattctgtgaaacggcggaacctcgacgatagcggcggtcgaggagcgggcgtttctgcggtatttgccaaagatgcgttgcgttgctggctgcgcagctggaagaggttcgtctcgatcgccgtcatcacgctgcttggcgtggccgtgctgaccggcatctacgccggatgccgcgatgcttttctggcggccggtcgtttttacgatcagcagggactgcatgacctgcaggtgctatccacatacggcctgaccgatgatgatgcaacggcactgcgccgaatcgacggtgtgcaaaccgtgcagcccgaacgttctcagacggtgaccacgttggtggacggcaccaagaaaaccgtgaccatgcaggaaatcggtaccgaagggcttgatcagccgtacatacggcagggcaaactgccgaacaaggccggcgaagtggcggttacgcagcaattcctgaacgatagcggactcaagattggcggcaccattactgtgacgccacaagacacctcttcatccgtcatatcggtagcggccacggagactgacgattccaataatgccgatacggtaggtgtcgccgccaatgcctcggcatccgatgcgaagtccgacgccaatacggacgccgacgccgagcaatccccgcagttccccacgaaactcaccatcaccggcgtcgtactcgacccgcgcgacctcagcaatccagacggctattcgggcatgacctccttccggtccacctcatccgaggactatacgttctttgcacccggcgacggcgtgaccggcaatatatacactgcgatatcggttgccgtcactggtgcgtccgattttgacacgttttccgatgcctacgatgaagccatcaaaaccgtggccgaccgtatcgaacatcagatacaggccacacgccagaaagcccgtcgtcaacagatcgtctccagcgcgcagcgcaaactggatgatgccaaagacgaggccaacgagcagctggacgaagcccagaagcagatcgacgacaactgggccgagctggaagccaacaaaacgacattgcaagatagccgtaccgaattggagaacaacaggacaaccattaccgatggcgaacggcagctcgccgatggacgtgcgcagattgcatcggcccgtcaacagatcgcgcaaggtcgccagcagatagccgaagcgcgcacccagctcgaatcgggcaaagcgcagctcacctcggctcgcaaacagctcgatgcggcgcaaacggaactgactgccaatcgcacgaaaatcgaacagggcattacccaaatcgaccaaggcgtggcacaaattgatcagatgctgtccatgattcaacaggccgacaatctactggcgcaacttgacccgaatatcgacttcaactcacccacatggcaggccatcaagcaactgctcgcgcgccttggcattaccctgcctgaagtgccgtcaatcagtgagctgcggcaacagctggccgccaagcaaacggaactgcaaacgcagcgagacagtctgacccagcagaaagccgatttgcagcgcacattaaacgaaaccattgcccccgcacaatccaccttggaccagcagaacgcgcaactgaccgccaaggaacaggaagcggctgcaggagaggcacagctcaataccaaatccgcggaactcgaagcgaatgccgcaaccctcgaaacccagtcggcgcaacttgaagcgcaggccgcccaactggccagcggcaagcagcggctcgaagaaggcgagcggcagctggaagaaggcgaacaacagctcgcggacggcaaggcgaaactggatgatgcgcagtctgaactcgatgcgaagcgaagcgaagcggaaagcgaattcgccaagcagcaacggcgcatcgacgatgtggccaacgcacgttggtatgtgcagacgcgcgcttcgatcgacggattcagctcgctcaaatcagacgtcagttccatcgaatccatcggccgcgcattcccgattgtgttcctgctggtcgccgtgctcatgagcctgaccaccatgacccgcatggtcgaggaagaccgcggacttatcggcacctaccttggactcggctatggcggactcgccgtgtccagccggtatctgctgttcgcgttgctcgcctgcctggtcggcggcggcatcggtctgctggtcggattccttggcatcccggcattcctgctggtggtgattgagggactgtatatattgcccggtgtgcgactcgaatacgactggctgtacggttcggccggcatcgtgctgttcgtggtcggcgtgggcgtggccaccgcgctcgcctgtcgcgaggagatgcggcacacgcccgccgcgctgatgcggccgaaggcaccgaaagcgggcgctcgcatattgctggagcggattcgcccggtatggagccggctgaacttcctcggcaaagtcaccgcgcgcaatatcttccgattcaagtcgcgcttgattatgaccgtgggcggcgtggccggttgcacagcgttgattatctgcggatttgcgattaatgacaccgtcgacacgattggcgtcaaacaatacgagcagatctaccagtacgacctgatggtcgtggccaatgacgatgacgccaccgcgatgcgcaagcaggtggcacaagatggccaaaccaccgaaacgctgaatctgcgcgtggatagcggcgaaatgagcaatgcggcgcaggaaagcgaaaccgtgcagctgatgaccgtgcccaacgattcgctgaatatcttgaacgatatggtcacgctggaacaagccggcgatgatgaatggttcggactgcccaatatcttcggcaaagcgggtggcggcactgtagcgctggacgatagtggcgtgattgtatcgcagtccgccgccaactcgctgaatattcatgccggcgacaccgtcacgctgggcaatggcggcagcagccgggccaaggtgcaggtcacggccgtgacgcgcaatcttattggctctgatgtgtacatcagtgagcgactgtacgaccagaagtttgcggccggcggtgtgacgtcttcggcttcgggagatggcactgcctcgaccttgacgtggaacgcgatgctcgccaagctgaaaggttccgagaccgaacaggccgaatatgcggatcggttgggcgaggaatcgtcggtgctcaaggccgtgagctgtgcgcatctggccgccacgtttaagttcgatttgatgggtgccgtggtggcgctgattgtggggctcgccggcggcctggcgctggtggtgctgtttacgttggccaatacgaacgtgtccgaacgcatccgcgagatggccacactgaaggtgctgggcttctatgaccgcgaggtgcacaactacgtgaaccgcgagatgatgatattgaccggtatgggtgtggtggttggtctgccgcttggcaggtggataggcggattactgactgctgcgttgaatatgccgtcgctgtatttcgaagtggaagtgcactggtacagctatgcgattgccgtggtggcgacgctggcgttcgcgctgctggtgcagctgttcaccaacccagtgctcgatcgcgtagacccggtcagctcgctcaagtccgtggaatagagacagaagttcaatttggtgttggtgaattgaactttttggcggaatatttacagcatcatcgcatgtattcttgagctgagcgttttcgtgacatatttcggtgatacagtccgaacttgttttgaacgagtatcgcgtccggtacgtaacaatcgggcggcagagaagagaaatgaaatcagtatggccgatacgaatgtgaatggtggtacacggcaggctacggacaaactcaagtctgtcgaaagcctggaccggaccaacgagatggagcgtggcctgagcaatcgccacgtgcagttcatcgccatcggcggcaccatcggcaccggattgttcctggggtccggcaagtcgctggcgctgaccggtccctcgatcgtcttcgtgtatatcctggtcggcgtcatcatgttcttcctgatgcgcgccatcggcgagatgatgtaccgcgaccccagccagcacaccttcatcaatttcatcacccgctacctgggcaacggatgggggcatttcgccggctggacgtattgggccgcgctcgtgctgttgggcatgaccgagatcacggccgtctccacgtacttcatcaccttcttcgacacgttcggcatcgacctgacccattggaaatggctgatcgaactgtgtttcctggtgtcgctggtgtccgtcaacctgatcgccgtcaaggtgttcggcgaggtggaattctggttctcgatgatcaagatcacgctgatcggcgcgatgatcgtcaccgccgtggtcatgatcgtgatcggctaccattacccggccgcgcggattcatggcgtggatcatgtgagcccggcgggccacgccggactcgacaacctgttctccggcttctcgttcgccccgaacggctggatggccttcctcatgagcttccagatggtgttcttcgcctatgagctgctcgagttcgtgggcgtcaccgtctccgagaccaagaatcctcgtgaggtgctgcccaaagccgtcaacgagatcatcgtgcgcgtgctcatcttctacgtgggcgcgctcgtggccatcatgtgcatcgtgccgtggacctcgttcaagccgaacgaggacggctccttcgcctccccgttcatcatggtgttccagtatgccgggttgaactgggcgtccgccctggtgttcttcgtggtgatcaccgccgcgtcctcgtcgctcaattcgctgttgtattccgccggccgccacctgtaccagctgtccgaggtgtcgccgaacccgatgctgaacaagctcggcaaggtgtccgaccgcaaggtgccggcccgcgccatcctggtgtccgcggcgctgatactgctgtcgccgatcgtcaacgccatccccggcatctcgggggcgttcgtgctgttctcgtccgccagctccgcggtgttcctgttcatctatatcctgacgctgctggcgcatcgcaggtaccgccgttccgccgatttcatcgcggacgggttcatcatgcccgcgtggaaggtgctcaacacggtggcgatcgtgttcttcgtgttcatttacctgacgctgttcctggcggacgatacgcgcaattccgcgattgccggcctggtgtggcttgtgggcttcggtggattctctatgctgcgcgaacgctaccgtagccgcgatttgaaggccgcactggaacacaaggagtgattggacgggctgattggctggcggctattagttgggtggctgttggctgttggcggctgactggctagcggccgatagccaatgactgggctgatcgtcagccaatcggctgcctataggtctcattgatacattcggtcatccgattagtgcatttgcgcggacaattagtgcattcgatcatcggattagtacatcagtgtgcaattattagtacaattagctgcctaattagtacattaggacataaaacaatgtcctaatgtactaattagatgctaaaatacgataagtgccatgtcctaatgtatgaattatcgctatgaagggcggaatgcgatgacgcaggatgaacttatgcaagtgctgcaggccggtgaatcatctatggtcgagttcaagcgctgcagcgaattgcctcatacggatacttttgagactgtatgctcattcgccaatcgttctggtggcagcatttatcttggcgttgacgatgacggtcaagtgctcggcgtcgattctaagcgcgttagtgagatagagcgcaacgttgtcaacgtagtgtctaatcgtaagatgttcgaaccggctccaatggtggaaacggaacatatcgagtacgacgaacggattattgttcgtatttgggtagctccgagttcttcggttgtgcggttcaagggcgcagtgtttgatcgcattgctgatgtggatacacacatcgaaagcggtatccagattagtcaaatgtatattcgcaagcagaactactattccgaacggcgaattttccgttacgtgactccgtttgatttgcgtcctgagctgattgcgcgaatgcggcagctggcggtcgctcagcgagctgggcacccttggggaactatgtctgacgaagaactgttccgcagcgccaagctatacgatcgtgattacacgaccggcgaagagggctttaatcttgctgcagtgctgctcttgggcaaggatgaagtcatttcctcggtttgcccagcgtatattactgatgccgtggttcggcgagacaatattgaccgatacgatgaccgacttatggtgcggaccaacttgttcgattcgtacgagcaactccgtgaatttactgagcggaatctgcctgaccgctttgtgttaaagggcgataagcgagtgagcccgcgtacgatgatcgcccgtgaattggtggcaaacagcctcatgcatcgggagtattccagtccggtggtggcgcgtgtcaccattgataatgaatccatccggacggttaatgcttcgcgctcattctttgaaggtcgaatgaagctgggcgagttcacgccaatgccaaagaatccgattatcgctaatgtgtttgtgcagaccggcatagccgagcagctgggtagcggactgcggaatctgataagagcgtcccggcaatatactgagcgagagcctgagttccgcgatggtgacatattcgaggcgacgattcctattgttcctgcgctgaagaccgtggatggttctggttttgctagcgtgagatctgtagttgagaaagatgccgaagagggtgcgaggctcattggcggggaacgtgtggatggtaagaaagcagatgcaaccgcatcgggtgaaattgattcgcgggcagcgatgctgtcggcgatgaatcgacgcttgacagaggttgactatgtgactgtacctgaactcgccaagataacagagctcgataacagaacagtccgcaaattcctaaacggtttagttgcgcaaggaaagctgattgctgaaggcaacacgcgtggtcggcgttatcggaagggatagcgggcgcgatatctcgatgcagtgggattcacttaagggctacggcaaatatgattcgtagcgattgggccagcgcaattcgaatggctcatgactttgtgcgtcgtttgtggtctctgaagttgtttgctgggtgacggttttgtgataaaatcgctcatatcaaaatgtttgcgtaaacattttggctgcgccgaaagaaggagtcgacgtaggtcatgtatcaggcaaagaggccggcgcagtgaagcaaaggccgatttttccggtataaggcggatagcaggaacactaaggagaccaatgaaggtactgagcaaatcgcttgctgcaatggttgcggcggcaacactagtgggaggaggggcgtttgcggttgccggcactgcgtatgcggctgataacgatgccattaccgtgaccccgaacccgtggtatgccaacagtttcgatggctggggcacctcgctggcttggttcgccaacgccaccggcagcctcggcgaggaatcggccatcaccaccaatctcggcgatgacgcttccaaggctaaggctgtggaatacggcaaacagctgcgcgaacagttctaccagtccatcttcggtgatgaaggactggacctgaacatggcccgctacaacgtgggcggcggcaatgcctccgatgttgcctacggctacccattcatgcgccaaggcgctgccgtgcctggcacgtggaaagatgacgccaccggctccggcacgtatggcaatggcgtaaccaccaagcaggccgacaaagacaagctggctgcggcattcgacccgactgacgacaaccagtatgacttctccaagtccgccgcccaagactggtggattgagcgcggtgccaccggcgataaccctgacatcaccgacgtagaggccttcgccaactccgctccgtggttcctgaccaacagcggttacgccactggtggacgcaactccggtagcaataatcttgcaaaccctgagaaattcgctcagtacatggccaagaacgtcgagcacctcgaaagccttggcgcaaacgttgacacggtcgagccgttcaacgagtccgagaccagttactggggcactccgggcgacatggcttcgaagtacaccgatgagagcgatgacaacaccaagctcattaacaactactgggataagtactactccgacaaagataagtccgtcaccccatactccaacgcgctgaagaagccgcaggagggtatgcatgtcagcaacgcccagcagcagcagacgattaccgcactcgctgaggcgctcaaggacaatgatgacaccatcatcgcagccaccgatgccacgaactccgccgacttcgtcaagtcgtacaaccagtacccgcaggcgatcaaggaccttatcggccagtacaacgttcacgcctactccgacagcaaccagatgcagtcgcgcgatatcgctcaggcagacggcaagaagctgtcgatgagcgaggtggacggctcctggcagtctggctcctacaacccgtacggtttcgacaacgcgctgggcatgatgagcaagatcagctccaacgtcacccgcctgcagtccaaggacttcaccttctggcaggtggtcgaggacctctacaacatgcagatgggctcgaatgtgaatccggccggtgagaacaccaactggggcaccgtgctcatcgacttcgactgcaccgtggctggcatggacggcaagctctactccgagcgccgcgtgaacaacaacggcggtaccaccgatggacttgaaccgtgcacggttattgcaaacgccaagtacaacggcgtcaaggccatcacccacttcatccacgcgggcgacaaggtcatcgccaacaacgatgaagacaacaacatgactgccacctccgacgatggcaagacacagaccgtcatccaccgcaactccggcacctctgaccagaccttcgtcatcgacctgtcgaagtacggcgagattgccgacaacgcttacggtgagctctacctgaccaccgaaacctctgccgaagacaagaacgcgggtgtcgattccgccactccggaagtcttcgccaagaccagcaacgtcaagcaagctgaaggctctgtgatgattgacaaggctgccaagaccgctacggtcactgtgcccgcccgttctatcgcctccatccagctcactggcgtgaccggctacgccaaggatgctgccgtcgagaccggcgacacttaccagctcgttggtaagcagtccggcaaggccgtggctgataccacttctggtgattccgcgctgtccctggccaacgtcgcttccgatgccgagaacgccaagaagcagacttggaccgttacccagatcgagcagcccgccgactccgagcgccctgatctcaaggcttatgtgattactaacgccgaaggcaaggtgctggtgtccaaggatggcacgaacgcgctttccaacgaaacggttgaggccgctaagtccgacccggctgccaagtggattctcaacacttccgatggttcgacctaccagctgctcaatgccgcgactaagacgaacctcgatgtggataactctggtaccacagtcggcacgaaggttggcttgtggcagtcaccgagcggcacttcgccgtccgccaaccagacatggactctacgcaatgtaacgccgaccagccagaagaccgtgaacgtgcagaccgccgttaacgagaaggccgcgctgccgaccgaagtcacgctctactacacctggggcgaaggcaaggccacggttgccaactgggatacttccaaggtcgatgtggccaaggaaggcacctacgaagccaccgctaccgccaccgatgtgtacggcaacgagttcaatgtcgccgctacggtctacgttggcgcgctcaccgtttccgatccggtatcggctacagtgctggccggcaccagtgcgagcgaggcgaaggccgcgcttgaggctgcgccggtgtatctgcacgtcaaggcatcgcctgcattcgagggcgatgcggctaaggttacgtggaacttcgatgggcttgataccaagctcgccgatgccaaggctggcgacaacattgccgtgaccggtacttaccagctggacgacgcgaccacgattgcgctgaagggcgcgatctatgtcaccgccgccacgcctgagaatgtggccgacactgcttccagcctgaccgtgaccaaccagcagacggaatacagcaagggcgatcagtggaagaagctcaccgatggtgacacgtcagctgaagcctgggtgacgtggaactctgctggtgactattccgccagcccgaccgccacgattgacttcggctctgagtgtgagcttagcagcgtgaccattacgtatggtgacaaggctccggcttccgccaaggccgagtacaccactgatggcgagacgtggatgcaattcggtagcgatgttaagcctgccgcaggccagacggtgacgttcaaggccgataagggcacagtgaatgccacgaaggtgcgcattgtgaacaccgtgaacaacgactacatgaacgccaccgaaattcaggcattcgtgacgccggttcagggtgctgcgaagaacatcgccgcggcctctggcacgaacttctcggtgaacttccaggagggtgcctccgcttccaaggccatcgatggtgacactacgtcaaagggttggtccacttgggcttccaccgcctcgacggtggacccggtcgccacgttcaccttcgacgaagctcagaccatcaccgaagtgaagaccttcttctactacgatggtcgtgcgtcttggccgaagagccagacgctggaataccaggatgaggctggcgaatggcatggagtcggtaccaaggatggctggaagatacaggccggcgatgccggctctggctccgacggcatcaccgccgccgataccccgaccgttgacttcgtgctcggcaccccggtaaaggccaaggccatccgcctgactaacacattgcaggacaccaaggtgtacatcaacgtggctgagatccaggtgttcgcacaagacagcacggtactcaccccgcagccagcatccgatgccacgctgggcgacctgcgtcttgacggcgaaaccgttgaaggcttcgacccggccaagaccgactacacggttgatctgccggtcgacgccgaggcaaacccggtgctgcaggccttcgccaccgacaatgccgccgccgtcaaggtgactggcgacgcggttgagaacggcaagcttggcggcaaggccgccattacggtgacctcagccgacgagtctgagacgaagacctacacggtgaccttcaacgccttcactttggcttcgctcaaggtgatcggacccacgaagactgagtacgccatcggcgacaagctcgataccgccggtctgaaggtgactgccgtctaccagagtggcgacaagaccaaggaagtgccggtcgctcttgacgacccgcagcttgcgattggctcgttcgactccaccaccgcaggcaagaaggcgattaccgtctcctaccgtggtgtgaccgcgaccttcaacgtcacggtcaaggccaacgcagtcgcccctggccctgaagaacagaagcccggcaacaccaacaagcccggtgccaccggcaacggcaacaagaacacggtggccaacaccggttccagtgttgccgccatcgctggcgctgtcgctctgctggccgctgccgcgggtgcactgttcatgctgcgcaagcgtgcatagcaccctcgcgcagtaatgggtgaaggaacaagccggcaatattgactattgccggccggttcctccgctctttgaccataattggtccgacaagttgaatactgagttttcagtatcggtatattgatttgtcgaaccttttctggcttcgcggatagcgacataactgtttgttcaaaaaaccgttatcatcaatcaaggaaccaaatcaatgaagataaacaataagggcaagggcgctcttatcgcggcaattaccgccgcggcaacgctattgtcatgcgggctggccgctgcaagtgccagtgcggcaggtgtggattacctgcctaccatcggccaagtgccgacatacaccaagttccagcccacagccgatccgggcaagaacgctagcgattacttccagccatattggtatgccaagaacgccaatgataatggcggcacacacatccaagcgcacggtggccaagtggtcaaggttggcgacgcctactactggtatggcgaagaccgttctaacggttacgacaacagccccggtgttcatgcttatatgtcgacagatctatacaactggaccgatcttggtgtggcgctgcgtgcggtgaccagcaaatctcagttgacggataagagcaatgccgattacgcctacttcgacaaggcctacaacctgaccaagtccgacggcagtgtggacgctgccaaggccgacgcaatcttcccgtacctcaacaccaaccccgatcaggatggtgatggcgcggttgattccgtacagggcattttcgagcgtccgaagatcatctacaacaagaagaacaagcaatacgtgctgtggtggcattccgatggaagcaccacgccgggcggttccaactatgcacgtgcacttgcgggcgtggctgtttccgacaatccggcgggcccgttcactatggtgggtgcctatcgtttgcctaaccagaacaattggaaagaagccgcaggtaaccccagctggggtgagaacggtgacagccgcgatatgactgtgttcgtggacccgaaggacgacagtgcctatgtactgtattcttccgaagccaatgccacgctgtacatcgccaagctcaacgatgattacaccaatgtagtcaagaccacgaatgtggaccagtccgagggacaaaagcagtactctgctgacgggcagtacccatacattcttgcagacgctactacggatgccccggtgcgtggcgaagatttccaaatcgtcaaacaaaatggttcgctggaagctcctgccgtattccaatatgacgggcgttacaacatcatcgcatctggtgcaaccggctgggccccgaacaagcagacctactacaccgccgactccatgctgggaagctggacccgtggcgtggaaaaggacgatgtcaacgagaacacgtggtacaacaacatgccggaaggcgcggatggtctgttgtccgtgggcgatacccgcggcaccacattcggttcgcagtcggctagtgtgctcgcagtagaccaggagaaaggtcacttcatctaccttggtgaccgttgggattccggtaaagccgattccacctatgtttggctgccgctgaccatcggtgagaacggcaccatcgaaatgcacaatcctgctcaagaaggcgagcccgacggttgggatctgagctattggggcaaccatggtagcgccaagggcaagctggtcaactggactgtggaaaccggcgatgatctcccgaagaccgtgaacacgggcggaaccgttactctgccggacaccgtcaacgtcaaggaaggcgacgataccattgctaccaaggtgacatggaatgtggaaggcggtacggcagtcagcaagtcgaccaaggctgctggtaacacctacgcattcaatgtgccgggaacctacaccattacgggcactcttgccgagagcagtaacttcaatccgggccgtacattccgtagaaccatcgatgtttcctgctccaacccgatttccggaagttggaaggaagctcattggaagggcggcagcgcgtgccaggtttctgcgtccggcggtgcttatgacttcacgattacggacaacgccaatcggggcgtctggacggatcgcaacgagggcagtgcggtgtaccagcctgatgccctggacgtgaacgaaacgctggaaaccacggtcaagccgctcgacttgggcggtaatggcgatccgcgcgccggtctggtggtccgtaacggtcttactggcgctaacggcggcaagggatatgccacgttacttgccagcccaagcggcgtttacatgcagtacgattccaatgccgatggctacatcgataaggaaacatcgcatgttggtaccggcttcggcgaccaagtgcagctcaagctggagcgcacctcaaccgatactctgaaaggctactggcgtgcttccgcgaacgatgaatggcaggatgtcgctacggtaacgctgaccggtgcggacgtaaccgggctcgatgccggtgctttcgccacgtcgaacagcaatgccggcgcattcaccgtggccttcaacggcactgcgttcggttcgcagactgctgctgtggagtccatcgcggccaagggccctgaagccactatcgccaagaggcagacgctcgcgcataaggacgtgacggttaccgctacgctcaccaatggcaagacgcgtgtactggagccagatgaatacacgttggaaggcttcgacaccaccaaattgggcgagcaaaccgtgacggtacgccttgtcactgattcttcagtaactgccacgctcaccgtgactgtggaaagcaaccttgcccggttgttctgctcgtccgccgcagcctcgaagtatgagccggccagcagctgggcctccgcttctacggccgacctgacttgcgacaacaatctgagcaccaactggtcgaactggggcaccggcgacacctcgccatggctcagctacaccttcgataaggcatatcagctgggcaagctcagcgttgcggtggataaggccaagggcgaggccgctccgaagagcttcaccgtatcgtacctagctgaagacaacgccacgtggactgatgccacgctgccggcagtcactgtgaatggtgctgctggagccgtgacggaagccgatgtgagcgctctgcccgccaccaagggcattcgcctcaacttcacctacgccgatggcaatgactatgccaagatcgctgaagtacgcatcgccgaaggtgaagcaacgccaaagccgcagccgtctagtaacgccaatcttgctgatctgactgtggatggcaagacggttgacggattctccgcggatatcaccgaatatgccggtgcgctggccggagacgctgcttcttacccgacggtggaggcgactgctgctgacgcgaaggctacggtgcaggtggagcaggcttcgaccgagaacagcggcgtggccacggtgactgtaactgctgaggatggcacggcggaaacctacacagtgacattcggcgaactgcctcagttggccgagcttgctgtggaagtgaccaaggattcctatcaggtaggcgataagttcaacgctgccgatgtgaaggtatccgccatttacaaagtcggcgataccgaaacgctgcgcaagctgattgatccaactgatggtgatctgaagttcactggctttgattctgccaccgcaggcacgaagaccatcaccgtctcttatcgtggcgtgaacgcgacgttcgaagtcacggtcacggccacggaggtcactcccggccctggagagcagaagcccggcgataccaacaatcctggcaacactgctaagcccggtaacactgccacgaataagccggctgctaatggcgctgcgcccctttcgaatacgggtgttgccgtggctgccattgcggtcgtggttgtggtgctgacagctgcggctggtgccttgctcgtcatccgcaaacgccgcgcataaccatggcaactgctgagtggcgtggattgcgttgctattgagcgatctgcgattcacgccactcagcgagtgcacccgagtgcgcccgagcttgcgcaatgcaggcgcaatacagtgcaaacagtacaaagcaacaataatggccggtctgagcccgctgctccatgcgagggcagctggctcagaccggccattgtgtctgcaagtacatgcaattagagcatgaacatgtggaagccgttgagcgttactggttgttttgctttgttgttgcgctcagcagtgcgacggacgtccgtccgcagtgtagtgcagcgctccgtgaaccagcgccgatgtgaaatgcatgttgcacatgcccgcttcttctgcttcgtgcgtgcagccggcgatgctgcataggttcataccccgaatcatggtcataccccctctttgggatggcatccgtgccgccatctgccttcagagcatagcggacaattgttgcattgcctaggcggtacaacgctttctgtggcctgtatcacatccttgccggcgttctgcggcgtggttgggcgtgtacatgtgctcttgtgcggttttgttgtgtgtgatttgggtatacggatagagtttcttctctgcagtggcaagggcctctcggccggcgagccggctgatttctcccatgcgttgctcaatgatttccgttttgcgagtctgaacggcaaaatagctctggagaagtgccacttcttctttctttggatcaccgttttgagcaatgagatagcaggcgtatcgggtgagcttgacgtccgcgatggagcgggtggcaccgctgccgaaagtcacgtctcgcgtagtgtcacggaaatgggattcaacggatacgccggaattgtcgcaagcttgcttggctcgtgtaatagctttgctgaagttttcccatctgtcgtaccccatataggtcattagctcgcgtgcataccaatactcaactttggagtcctcggtggtgtgtgcgatagtgctgagttcgctggttttgcgtgtgatttcgtctcggttcatgggtgtgtccttatgtttttcatgaccattttcgtgactccacgaaaatggtcaaagccaataattgcaatggttttgaggtatgggcgcgctccgcccaactggtctgtcttcgtccgccttttcgaccagatacctcatggagcacaatgccaacgtcgctaccgttggcccagcaaatattcttagacgacgccccgaagtgaatatctatgcggctttcagaatatcaaagagcgtggagtgtgtgcattatgcgttccaaaaatagtttctagtaatgaattgtttacggtgtgagatattcttgggggtgtttgcggcgctctgccgtgtggcgaatgggaatggatggtgctcttatgggatttgagcaggaagcagttagtgaactgtatgccagcgtgtggggcaatcgttcgacaatgcagagggaattcactcgtggagcccatggtgagcagttcgtgctccgggagctgtccatgaaggggacgcaaacgccgtcgcaattggcatcggcgctgcaggccagttccggccgcatctccactgtgctgtcgtctctggagaaaaaaggctgggtcacgcgtgacattgattccaaggatcggcgcattattcgcgtgaatctcactgattccgggcgcgagcagtctcatcggatgatagaggaaatgcgttccgcaatttgctggattttctcgcaaatgggggagcggcgcacgcgcgaattcgttgacctggtgtctgagttcaccacatatatgtcgatttgccatccggggcggcctcggccgacggctgaacaagtgcgtgaggcattcgtggagcgggacaagcgcgtggctgaacacatggcagctaagcgcgcggaggctgagcgagactagcttcctcccgctggcgggtctctccctccgtcactgctgcgcggtgacacctccctcgtcagaggggggtaaaggtaattgaggacgctcacagcgaacatacagaagtgcgtataatatctcacagtgtaagtaatcaaacaatggaaactattaagacatcgtgaaccgataatcaccgataacccagccaacttaagaaccaatcgccaataaccaataaccaacccaaccaacacaaggggaaaccaatgtttcgcatcatgaaatacctctccaaagcggagatcggtcagatgctcatcgccctggtgaccatcgtcgggcaggtctacttcgacctgaaactgcccgactatatgtcagacatcaccacgctggtcgagacgccgggcagcgacatgaaggacatctggatcgcgggcggcaagatgctgctcatctcgctcggatccgtggcgtgtgccatcatcaccggctacatcgctgcgcgcgtggccgcctcgttcacccagcgtctgcgctcgctcgaattccgcaaggtcgagtccttcggcccggccgagatgagcaagttctccaccgccagcctcatcacccgttccaccaacgacgtcacgcaggtgcagatgttcatcaccatgggcctgcagctcatcgtcaagtcgccgatcatggccgtatgggccgtgtgcaagatcgccggcgaaggcttcgaatggacgctcgccaccggcatcgccgtggcggtcctgctggtgtccatcaccgtcatgatggccatggtcatgccgaagttcaaggtcatgcagaccctgaccgacaacatcaacctcgtggcccgcgagaacctcaccggcctgcgcgtggtgcgcgcctacaatgccgaggactaccaggaagccaaattcaccaaggccaacaaggacctcaccgagacccagctgttcaccaaccgcgtcatggcgttcatgatgccgttgatgaacaccgtcctgaacggcctgatgctcgccgtctactggatcggcgcttacctcatcgacgccgccgggctcaaggacaagctcaccgtgttctccaacatggtcgtgttctccaactactccgtgcaggtcatcatgagcttcctgctcatgagcatggtgttcgtgctctggccgcgcgccgacgtgtccgcgcagcgcatcatggaggtgctcgacactgagccaatcgtcgagaacggcaccaaaaccgccgccgacgtggccaaaaccggccagaggggcaccgtggaattccgcaacgtcagcttcacctacccggattcgcgcgaggcgatgctggaaggcatcaacttcaccgccgagcagggccagacggtggcgttcatcggctccaccggctccggcaagtcgtcccttatcaatctcgtgccgcgcttctatgacaccagccaaggccaggtgttggtcgacggcgtggacgtgcgcgactacgacccgaaggccctgcgcgacaagatcggctacgtgccgcagcagtccgtgctgttcaagggcaccgtggcctccaacgtgagctacggcgatcagccgggcgacccggcggaggtcgagatggccgatacctccaccccggccgggcgcaagcgcgaggccgcgttgatcgccgctggcgaggccgcggaaggtgccgatataccggccgagcagctgaatcgcgtcaaggccgccgccgacgtggcgcaggccagcgagttcgtggcgcgcatggacggcgggtattccgccgcgatcgcccaaggcggatcgaacgtgtccggcggccagaagcagcgcctgtcgattgcgcgcgcggtgtaccgtcacccggaaatcctgatattcgacgactcgttctccgcgctcgacttcaagaccgaccgcgaagtgcgcgacgcgctcgcccgcgaggccaaggattccaccaagctcatcgtggcccagcgcatcggcaccatcatgaacgccgaccgcatcgtcgtgctcgacgacggcaaggtcgtgggtcagggcacgcacaaggaactgctcgacaactgcgacgtataccgccagatcgccgaatcccagctcagccagtcggagcttacggcgtaggggggggcggcagcggtagctccccatgtcaggggctgagccgtaaagggaacagcccagtgggctgttcccaggcgaagacgagctgataagcgagcgaataaaacagcacagctgactgaggggtagtcgcgtacggcttctctccctccggcgcttcgcgccacctccctcatcagagggaggtcaatacggacttttaaggagtaaaacaaatgccaagaggaccaatgggcggcaggcgtgccgtcgaaaagccccatgatttcggcaaagtcatgggcaaactcgtgaactactgccgcaactatcttcccgtcatcatcatcgcgctcatcctgggcgcggccggcaccgtctgccagatcgtcggcccggacaagctcaaggacatgaccaacgagatcgtcaaaggtctgcccgccatcgtcaacggcagaccggtgatgaactcggtagatttcggcacggtgggccacatcgcctggactttggtggccctgtacgtgggctacgccgtgctcggctacgtgcaaagctggatgatggccaacgtcacccagcgcaccgcccagcgactgcgcgagtccatctcggtcaaaatcaacaaactgccgctcaaatacttcgacaaggttagctacggcgacgtgctgtcgcgcatcaccaacgatgtggacgccatcggccagacgctgggccagtcgctcggctcgctgattacctcggtgacgctgttcgtgggcgcgctggtgatgatgttctacaacaacgtgatcatgaccctgtgcgccatcggtgccagcctcatcggcctgatcatcatgatggccatcatgaagtcctcccagaagtacttcgcccggcagcagatggcgctgggtgacgtcaacggccacgtggaggagatgtacgccggtcacctcatcgtcaaggcatacaacggcgaggccgattcgattcgtcgcttcgagaagtacaactcggacctctacgagtccggctggaagtcgcagttcctctccggcctgatgatgccgctcatgaatttcgtgggcaacttcggctacgtggtggtgtgcgtggtgggcgcggcgctcgcgctcgacgggcagatcgagttcggcgtgatcgtggcgttcatgatgtatgtccgcctgttcacccagccgttggcgcagttcgcccaggccttccagaacctgcagcgttgcgcggcggccgccgaacgcgtgttcggcttccttgaggagccggagatggaggacgaatccggcaagtccgctttgcttgggaccaacggccacgaagtgaagggcgacgtggaattcagccacgtacagttcggttacgaaccgggcaagccgatcatccacgacttctccgcctccgtcaaggccgggcagaaggtcgccatcgtcggcccgaccggtgccggcaagaccaccatggtcaacctgctcatgcgcttctatgagatttccggcggctcgattgcgattgacggcgtggacaccaagtccgtgccgcgctggaacgtgcacgaccagttctccatggtgctgcaggatacgtgggtgttccgcggcactgtgcgcgagaacatcgcctactccaagcccggcgtgaccaacaagcagatcgaggatgcgtgcaaggccgtgggcctcgaccacttcatccgctcgctgccggacggctatgacaccgtgctcgacgacaagtcgtcgctctcccagggccagaagcagctgctgaccatcgcccgtgcgatggtgcaggacgcgccgattctgattctcgacgaggccacctcctcggtcgatacccgcaccgaagagctgatccagaaggccatggacgcgctgaccgtggggcgtacgagctttgtgatcgcgcaccgcctctccacgattcgcgacgccgacatgattctcgtcatgaaccacggcgacgtgatcgagcgcggcacgcacgacgagctgctggcggcgggcggtttttacgccgacctctacaacagccagttcgcactcgctgactgacggattgtttcctgcgttagcggattagcggattagctatactcggctcccctctccgaggggagctgtcagcgtagctgactgaggggagcaacccatcggtccacccgagggatgtgatactgatgatttcgtacattagtgtgtgaaaaagccgccgggaaaattgggggattgggcggcggtgcggttggcgttgagaatggcgcattcgaaggggaagtgagcgcgcagctgggtggccggggtggtgaacagggcggtggcgaggccgtcggccagtgtgacagggacgtgtgccgcaacggtgttcgacgaatcgtcggtatcgcggtttgccgttgtcgaggtattgctgccatgcgtcgatgtcttcgtggttatggcgctcgatggcggcgtgacggccacccatgtggcggctacatcgtcaaccggtagtccgtcgatggcgttgagcagatggtgaagttggtgacctgcggcgtcagaccagtggcggcggctgggggagctcgcgcagaatgcgccgtggctgatttcgaccgtacctacggcgttggccggatcggcaggatcttcaagggcgatggtgattggttcgtccgtgtacactagcaaatcacccccggcgtcaatgacgtattgaatgggttgagggtgacccgcgccatcacccaacatccccgcaagcaaatccaccaaataccccttaccgcacgcgccaaaatcgagcgcgactggtccgcgcgtcaccagtgtcgtgccatgccgctcgacgtcggctgaccaaatggctcgtccgtggatcgcgcctgcatgttcagcggcatctggcgcaggcgtaaacgaatacgactcgtcatagccaagccgaatcaaatcctcgcccacgcatgggtcgatggtcccattagtcgacgcaaacagctggtcgtacaggccaaataaacccaatgcccagtcaggaaaatcgaacgtgccgccatgcgtggccgtgcgcatccggccgaccgtcgaatcatacttgaaccgggacaatgcggcttcataggtgctgatgaacatatcgatgcagttactgagcccgtcatccagcgcgacatcggtatgcagcagcaacccggtgcccagcgcttcggggaaagcggcgacgtgcggtagtcgttcggccagaccagtcatggctctcatcgtagagcctgcggatggctgaggggaaggcggctcggggtgtggattgtggtgtgcggttttgccctgcagggaattgagtgtaaaaccgttgtagatgactttgttttagcttgtcgctagagcgaagtcatctgcatggcctcgttgccgaggccagctccaagactcacacggcttacgccgtcgcttggttcgcgtttcacaggatgccgcgttgcccgacgcg

SEQ ID NO: 1407 - DNA, 9168 bp, Unknown
  R257_15m  MAG No. k141_9220
cggaccggatgtaaaacgaccaccccacaaggccaaatgttcgttgttctcagtcatgaaagctccttgacaagtgaaaatagctgtgtttaagcgtagcaatgtgttcaaacatacagttgcccccgctggcgagggctgtcacatggagtgtgactgaggacagtcctttcaaagaccactcccagtcagctatgccgacagcctcgcagcgggggcgactgagtaagaatcactcgacggtgttcttcgggacctcgatgccgttgccgaacttgacgtcgcgggctgcggccacgcgggacggcaggccatagatgtcgatgaagccgttggaggacctctggtcgaaggtatcgccggaatcgtaggtggcgagcttgtagtcgtacagcgaggagtcggaacgacggccggtcaccacggcgcggccaccgtgcaggaccatgcgaatctcaccggacacgtacttctgggtgtcttcgatgaaggcgttgagcgactgggttgccggggagaaccactgcgcatcgtaaaccagctcgccccagcgcttgtcgatgtcgcgcttgatgcggtgctgttcgcgttcgaggcagcagttttcgagttcctggtgagcggtgatcagagccacggcacccggagcctcgtacagctcgcgggacttgatgccgaccaagcggtcctcgatgaggtcgatgcggccgatgccctgggctccggcgcggcggttcatctcttcgatggcctgcagcggggtgacgtcacgtccgtcgatcttgaccggcacaccttccttgaactcgatgacgacttcatcttcgaccggcgggaaggccgggtcgtcggtgtaggagtagcagtccttggtcgggccgttccacggatcctcaaggaagccggtctcaatggcgcggccccatacgttctggtcgatggagtacggggacttctcggtctgggtgatcggcaacttgtgctccttggcgaacgcgatctcgacatcgcgggtcagggacaggtcacgaatcgggctgatggccttcagcgtcgggtcaatggaggcaatggagacctcgaaacgaacctggtcgttgcccttgccggtgcaaccgtgggagatggtgtcggcgccgaactggtgggcggcgcgcacgaggtgcttggagatcagcggacgggagatggcggagaccagcgggtagacgccttcgtacatggcgttggccttgagggccttcatgcaatattcgttggcgaactcgtcacgggcgtcgaccacgtaggattcgacggcaccgcaggcaagggcacgctgcttgatggtctcgaggctttcgccgccctggccgacgtcgagggacacggccacgacgtccttgccggtgcgctccttcaggtacgagatggcgacggaggtgtcaagaccgccggagtaggccagaacaatgcgcttgttatctgccattggttccctttcattcaaggtctgaaaaaacaaactgatgcaagtatatacagaggactgtatatttatgcacggcgtgttggttatttggaagcgaggcttagtagccagtcggagcgggagacggcggtgtcgtcattggtgcaaatcaccatgacggtgtcgtctccggcgatggtgcccagcacgccttcgatcggctgcctgtcaatcaccgaggccacgtattgtgcggcaccggaaggcgtgtgcaccacaaccagatttccggcggcggccaccgaggtgaccagtccgttcagcacgcgggacatctgtgcctcaccgcgctcccctacatcctcaccttccgaagcaacgacgctgcgacccaccgtgtaggccaccgtgccgtccttcagccgggtcttcaccgcatgcatctcatcaagatcgcggctcagggtcgcctgagtcaccgcaatgccctcgtcgataaggattttggacaactgtgattgcgaggtgatgatatgcgtggcgagcgcctgttctatggcactcagccgcgccgccctggtggcagggcgctgcagggacggaccggtttcactcatgcgagcaggctttcgtctccacgggccttgccggtcaaccaagtcagcaacgctttctgtgcgtgcagacggttctcggcctcatcccacaccacggactgcgggccgtcgatcacttcagcggtgacttccttgccgcggtaggcgggcaggcagtgctggaagagcgcatccggcttggccaatgccataagttcggtgttgacctggtaattccagaacggtttggagcggatggcgtattcggcttcctcgcccatggagacccaggtgtcggtgaacacgcagtcggcgtcctgcaccgcttccttggcatcggtggtgaccaggatggagccgccggtctcggccgcgacgcgcttggcgtcggccacgatgtccgggcggggcaggtagccgtgggggccggccacgcgcacgtccatgccggccacggcaccgccgagcaggtaggagttggccatgttgttggccgcgtcaccgaggtaggcgatggtctggttcttcaggttgtcgacgccgcctcggtgctcggcgatggtctggaagtcggcgagaatctggcagggatggaagtcatcggtcagggcgttgaccaccggatgggtggagtacttggccatttcttcgacgcggtcctgaccgaaggtgcgccacaccacgccgtaagccatgcggtcgagcacacgagcggtatcggccacgggctcgccacggcccagctgggagccggacttgtcgatgaccagcgggtaaccgccaagctcggcaacgccgatggagaagctggaacgggtgcgggtggagggcttgtcgaacagtacggcgacggcctgcggaccggcgaacggctgcttgtagaagcggtcgtggtggaacttgatggcaagttcgagcacctgctgctgttcctcatggttgaggtcgtcgtcacgcagcatgtggcgaagttctggggtcatgatgatctccttggatcggtggggcggcagtgacggagagaaatcagtcgtcgggcaggtccgtaggcacatccttgaggatggcaagtgcctgatccacgtcttgagcggttacaatcagcggcggtgcgaaacgcagcgcattgggagccaccgcgttgacgatgagcccgtgttcgaggcagtagttcatcaccgcgtgggagcagggatgcttgagctcgacggcgtccagcaaaccacggccgcgtacggaaacgaacagcggattaccggtggccataatgccatcgcgcagctgttcgccgcgagcttcggcgttggccaccagattctcgtcttcaatcacgtcaagagtggcgagtcccgcagccgcacccagcggattgccggcaaaggtggagccgtgggaaccaggagtgaacagagccgcaagtttctcgccgaaagcgatcatgccgcccatcgggaatccgcctgccacgcccttggcgaaagtcaccatatccggcgtcacgccgccggacagatcgtcacgctggaatgcgaaccacttgccggtacgtccgataccggtctgtacttcatcgatgatgagcagcgcgtggttgatatcgcacagttcgcgcacgaacttgacgtaatcggcgcccaacggctgcacgccggcttcgccttggataagttccagaatcacagcagccaccggacccttgccatagcggccgagaccggtctgtgcaaaagcgtcgtgcagggcgaccttgtcgccggcgcgtacgaattcgatgttcggcaccagcggatcatacggcttgcggataccgggtttccatgtggcggacagcgcacccatcgtacggccatggaagccgtgagtcattgcgagaatgcgtgcgggcttgccgccgatggaaggcagggcaccaggcaaggtgcggccatacagcttggcaagcttgagggcagcttcattgccttcagcaccggagttgccgaagtagactttggagccttcaggtgcaccagccagcttgaccagtttggatgccagctcaatttgcggctcggacgcgaaatagttgctgatatgagccaccttggcagcctgatcggcaaccgctttgacccacttggggtgggcgtatccgagggaattgacggcgatgcctgccaggaaatcgaggtattcgttaccgtcaacatcccagatgtgggcaccttggccgtgatccatgacgcgcaacggcgtaccgaacacattcatgtggacctgagagtactctcccagccacttgctgtcttccgtacctagtttttcctcatgctcagtagccataagagctcctcatttccagtccttcatcgggcataaccatggtaccgatgcctgcggaggtgaatatctcgttcaaaatcgaatgcggcttgcgcccgtcgatgatatgggcttggggcacgccaccgtcgatggccctgacacaggcctccatcttggggcgcataccggattccaggtccggcagcatatcgcgcaggttttccacaccgatccggccaatcagagaattcttgtccggccaatcggcgtacagaccatccacatcggtcaagataacaagcttgcgtgcgcccacagcggcagccaaagcggcggcggcggaatcggcgttcacgttgagcacttcagtggcatcttcttcgttcggagccacggaagagacgaccgggatacgaccggcggccaccagatcctcgactgccgaggcatcgacggaaaccacatcgccgaccaagccgatatcggtgggcttgccattgatgatgggcctgcgctgcatggccgagaacaggccgccgtcttcaccggacaggcctacggccagcgggccgtgcgcgttgatcaggccgaccagttcgcgtgacaccttgccggtcaggaccatgcgcaccacgtccatggcctcgggggtggtgaccctcaggccgcctttgaattcggatttgatgccgagggccttgagcatgtgggagatctgcgggccgccgccgtgcacgacgatcggatgcaggcccacctgacgcaggaagaccatgtcttcggcgaagcactgcttcagatggtcatcgaccatggcgttgccgccgtatttgacgacgatacgctggccggcgaactcctccagccatggcagcgcttcaataagcacttctgccttctgatcggcgcgcaaatcggtgtgcacgtcgaaatggaacccaggtcccttcaattctgtagccaatttttctcttttctgcgacgccggcgacgctatcgctgccggctgctacaaacagcccactgggctgtttgtcagctttcgtagtcggcgttgatgtggacgtattcgtgggtgaggtcgtcggtccagacggtggcctcggcgtccgagccggtgttcaggtcgatgtcgatgtggacttcgcgcggggtcatgtcgacctcgctgcggtcgcggccggcgccgccgttctcgcagatgcgcacgccgttgacgtccacggtcaccatgttcgaatcgtaaggcgcgacttcaggcggcacagtgcccagggagctgacgatgcggccccagttcggatcgttgccggagatggcgcacttgagcaggttcgaggcggcgacggcacgaccacaggcaagtgccgcgtcttcgctggtggcaccggtgacggtgatacggatgtcgtgggaggcaccttcgccgtcgccgatgatctggcgggacagggatgcgcaggcctcacgcaccagcttgttgaattcgtccttgtccggttcgacgccggaggcaccggaggcgagtagcaggaccgtgtcgttggtggacatgcagccgtccacgtcgatgcggttgaacgaatgttcggcggccacggcgagtgcggcctgcatctggccggcggagacgaccgcatcggtggtgatgacgcacagcatggtggccagctgcggggcaatcatgcccgagcccttgaccatgccgccgatcttccagccgttggagccggtcagttcgaccgttttcggcttggtgtcggtggtcatgatggcgtgggaggcgtcggcgccggcttcggcggtggcggcaagagcctcatgggcactcttggcaccagccagcacgttgtccaacggcagcagttcaccgatgagaccggtggagcagacagccacatcattcggttcggcgccgatgagaccagcgaccgtttccgcggtggtgacggactgggcgtaaccggcctcgccggtgcaggcgttggcaccgccggagttcagaatcacggccttgacgtgaccgtcggcgacgaccttacggctccactgcaccggggcggcacagaaacggttcgaggtgaacacgcctgcagccgcgtcgagcgggccgttgttgaccacgagggccaagtccttcttgccttcgacggatgaaataccagccgccacgccggcggcggagaaaccttgtgcaaatgtaacgctcacggtgctactccgatcttggtcaggcccgcgtcttccggcaggccgagtgcgatgttcagtgattggaccgcttgtccggcggtgccacggttgaggttgtctatggcggcaaaagcgtagatgcggccggccttgcggtcggcgacgacctgcaggtgggctgcgttggatccgatgatgttgccggtggcgggcagtgtgccctcgggcagcagcaccatgaagtcctggccttcataggccttggaccatacggcgcgaatctcctcatcgctcagcgccttggccttgtccgtcatgcgggcggacacggtggcgaggatgcctcgggacatgggggcgagaatcggcgtgaagccaagcgtgaattcgctggcttcagccgcgctcttgccggccgcgtgggcgaagttctgcagaatttcgggaatgtggcggtgcttgccgcccaccgaatacggcagggcggattgcagggcctcggcggcaagcaggttggtgcgcttgagattcttgccggcacccgagtatccgacgaccagatcggccacgatatcctgcgattcaaccagtccttcggcgatgccgggctggagggccagcgtggtggcggtgacgttgcagccagggcctgcgatgcgcttggtgccaggaagcgccgcgcgctggcgggtgtatgagccgtccgcggctttgccggtgatgagctcgggcatgccgtaggtccaatgctcatagaaatcgccgccgtagaactcatcccaagcggcctgttcttcgagacgatggtcggcgcccaaatccacaaccacggcattcggatcgagctgcgaggcgagcttgcccgaagcaccatgcggcagtgcgaggatgataacgtcatgcccgttcagcacttcgggcgtggtatcttcgacgaccagattggccagttggggaatatgcggcatgtgcttggccatcgactcccccactgaggaatggcctgccacgcaggtgatgtcgaagtcggggtgcgcggccagaatgcgcagcgcttcaccgccggcatagcccgtggcaccggccacggccactgtatatttcgccatactcatctcttttcactgatgtgtcttgggatgagtatacgcgattatgcagactattgcatatttatgcagtgggtgtgttggtatgtgaacgctacttatgcggagatggagtcggaggaggagccggtgccgccggtgagttgctggagggcttcctggtagaggctcatggcgtcatagccattgaaggccatccagatgacggcgatggtgtacagcacgttgatcaccacggcggccacagccaaaccgaagcccttcatatggaaggtgcgcgtgcgccacattgccaccgcgcccatcagtgccgagagcactggcaccgggaagaacagggcgaggataaaggagatgatcgcatacgaatcccagtgcccgtagagtgggttctggtttggatcgttcaggtcgatgccgtggtaataatgcggctggtgaggctgaccgttcggctgttgaccatacgactgcccctgcatgcccgggtacccgcccggatatgcgcccggaccggactgttggccgccttgagcatacggccagccgcccgcctgctgattgccgggccacgccggctgctgaccgtacggctggccggcctgctgggattgcgccgcgccaccgttgatgccagcggctgcggcggaatccttcttggtatccggctcgggagcgccataaatatacgggttgtaattcggcccgtattggccagacatagcaccatattcaggctgctggtactgcccgtatttcggcttgtcctgctccggttggctcatgacgctcctcgattcggatgatcggttgggtcaggcgcgcagctgggcgccgatttcggcggcctcagccacgatggccttgcggatggcgtcgctgtcttcggcggacagcgtcttgctcggtgaacggaacaccaccgcataggccagggacttcttgccctcgcccacctgttcgccggtgaacacgtcgaacagttcgatggattcgaggttcgcgccggcggccttgcgaatcacgttctcaagctggcctgcggtcacggtctcgtccacggtgaaggccaaatcctgcttgaccggcgggaacgtggagatcggcttggcctggacgggcttgccggtcagcgtggcgaacagcgcggtgaggttcagctcgaaggccgcggaatgggccgggaagccgagcgcctcgttgacgcgcgggtgcagttcaccaacccagccggtgaagacgtcgcccaccatgacgcgggcgacgcggccggggtgccattggacgggcacatcgtcggcggcgggctggtcgagttcgattgcggcaccgatacggccggcgatgcggcgcacggcctcgacggcgtcggaccagtcgaccgggcgcttgccacccatccagccatcgtcctcggccagaccggtcaggatgccggccacatggtcgggctgttcgggcagaccggcgtcaagcgcggcgagctggtcgtcggtggggcgcacgccgccgggca

SEQ ID NO: 1408 - DNA, 3682 bp, Unknown
  R257_15m  MAG No. k141_9692
gacttggcggtggccacgaagatgttgcccgggccggtgatcttgtcgaccgggtcgcacagcacgtcgccgtcctgcggctcgctgcccttggcgccgtaggcgaacatggcgatggccgcagcgccgccgaccgcgtacacctcgtcggcgccgaggatggcgcaggtggcgaggatggtcttgttcggcaggccttcctcattgtcgcgggcgggcggggtggcgatggccagcgattcgacgccggcggcctgggccggcacagcgttcatgatgacggagctcgggtagacggccttgccgccgggcacatacaggccgacgcgctgaatcggaatccagcgttcggccacgcgggcgccttcggcgaggtcggtgtagaagtccttcggcacctggttggcggccacggcgcgggcgcggcgcaccgattcctcgatggcggcgcgcacttcggagtcgagcgtggtcagggcgtccttgatcgcctcggccggcacgcgcaggtttttcgggcgcacgtgatcgaacttctcctcgaagtcgcgcagggccgcggcaccgcgttccttgacatcgtccagaatcggacgcaccagatcggtggcttcggaagtgcccattgcagcgcgcggcatcgcggcgagcagttcggcacgggacaggttctgaccacgcaggtcaatgatttgcatcatgttctcactcataacgccccatcgtaccaacgtgcggggcctaagcggcgaggaacgcccatgttcacccgtatcgtgagattatcgtgcgtgatgtggattcgtgatgcaggttattgacgcacgccaaatgcccgagcggtctcatcgataatcggcatgtcatgtacggcgacgtgactcacttcggaccatcgcggaccaatggctaattgctcaaccaaggcttgcactgcgtcgctactgccttgtgcttccagctcaaccgagccatcgcggcaattgcgcacccagccctgtacaccaagtcgacgtgcctgagtcaccgtaaaataacggaatcccacgccttgcaccagtccggtgaccgctatatgtttgcggaccaaattcgctgattgcctcatgatgctcagttcctaatccatcgttcgcagcatcgggtagaggctcaggaatcgccggtatgcgtcggcatatgtgcgtgcggtgtcaggattcggctggtatacagtgcattcgcatactgattgcagcaggtctggtacattgaataccaacgaggccattgccactgctggcagaatatcggcattggcgaacacttcgatgggatgctccaacacatcggccagaatctggcaccacgcattttctctggctccgccgccaatcaggaaaatctcgattcacgaagacttcttccacaccaaatgccagattcgcagcaccgggcttgccggtgaacggttcgcgcgaaacggtggcgatccaacctgaggtgccgatattgatgttgtattggccggggcggctgacaccgctggccagcgtggtggcacccgcatcgccaatgcccgcgtataccgcagttccggcggagaaaccggtgcgttgtgcagcggattccgtcactgtgccaatgttgtcttgcggattgtgcaggtgtggcaacatggtcatgtcgattcctgcggcctcgcacaattcggcatcccattggccattacggatattcatggcaccggctgtggaacaagccgccacatcgcccacgcattcgccggtcaattgggcgatcaagtagtccttggaactgatcaatacatgacgaatgcgcgcgtacgtttccggctcgtgttcacgcagccacatcaacttgggcaacggcaagcagccttcgagccggttgccaacggtgttcaggaaacgttctactccaccctgatatgtcttggcgagttgcttggcctgttcctcggctcggccatccgaatacagaatggcattgcggacgggattgagctcgccgttcaaagcaataacatcctgcatctgaccgctgaaaatgatgccacgaatgcgagtcacattgaattctgactcggattgccgcgcctgctcaatcatgtgcctggaggccgagcagaaagcttgccaccattgatcggggctctgttcccgatagtcgccgttgataataaggttaagctcactactcgcactggctacgatacggccttgcctatcaaccaaggcacccttcaacgccgtggtccctgcatcgaatgcagccacatattcctctgccacgtgctctccccttcaatctgggttgtgattctactggttattatcgtagccgcttactcgttgcattcattaggtcgatttcacgttcattaggtcggtatgccgtaagacggctcttcaggaatggcgtaatgactgggttctgatgccgaagaccctgggcccattgacctaatgaatgcaataatgacctaatgaacgagaatcacaccatcattacgcaattctttgcccgcgaaacgcggctcattgcatcgtcttgtttctaaaataggaaattgaatgaacactacgaatagtgaggcattatggcaattcaatcgacaattatgctgaacaacggcactgtcatcccgcaggtgggcttgggcgtattccagacaccggatggtgatactacagtgaacgcggtgcagacggctctggagaatggctaccgccatatcgataccgcaatgatttaccgcaacgaagcctcagtaggtgaaggtattcgccgtgctggtgtgccgcgcagcgatttcttcttgaccaccaagctgtggaatgacgatgttcgcgcacgccacggcaaggatgcattccaagaaagcctcgaccgcttgggcgtggattatgtggatctgtatctgattcactggccggcagacggctggcagcaggcctgggatgacttgcaggagatttatgcctctggccgtgccaaggccattggcgtcagtaacttccaaaagcatcatattgatgagctgctgacccacagcgatatggtacctgccgtagaccagattgagtcttccccacaattcaccaatcaagagctcattggccagctgcgtgccaagggcatcgcaaccgaggcttggagtccgctcggcggtaccggcggcaacctgctgagcaacccagtattggccgagatcagtgccaagtacggcaagtcacctgcccaagtggtgattcgctggcacatccagcgcggtatcgtcgtgctgccgaaatccactcatgccgagcgtatcaagcagaacttcgaggtcttcgacttcaacctatcagtcgatgatatgaccgccatctccgccatcaacaccggcaagcgcaacggtgctgatcctgacaatttcaatttctagacctttatcggtccagatacgcaaagagggaactctccgtcatttgagggttccctcttctatatgctttcgattcggccacaccctaggtgcgagagcctatgtcttgttggttccggatatagggaaagccccttggggcgtgtgctccgaggggcttcctgtacgtgtggtgcggcggcgtgctactctcccacaccctgtcgggtgcagtaccatcgccgtgccaggccttagcttccgggttcggaa

SEQ ID NO: 1409 - DNA, 26524 bp, Unknown
  R257_15m  MAG No. k141_9712
aatgagattgagtcatttgaagtacatgagatttaaatagttgctgttatcttgacgttgtgcagcgctgtgaaaagaggagtaatgaccacagatagacctgtcttctccgtgtgttcgggggtgttggcggcttctttgttgttggtgttgtcgccgtccgcgtatgcggatgatatgggtggcttgtggccggtgaaggacagtgcggttgtctcggcgcatgaggctggtctggatggttcgggtgtgaaggtcggcatgtatgacttccaggttgtttcggattatccggggttgtcggacgcgaaggtgaagtatcaggtcggttcgttcgtcgatgtagagaatgatggaccggccaagtgtgtgttggatgatggtgatttgcaggcggccgtcacgtccaaggagagtggtggttattcgtcgcacggcacggccatgctcacgtggctggtgggcaatggcaagagttgggatgggagccaggggataacgggtctggtgccgaaggctgatgttctgttcatcactggtgggcgtggcaacgtgcttgaatcgaatgacccatgccaggggatggtcgggcagaatgccgataaggatatcgatgccatggtcgattggggcgcgcgtgtcatcaacatgtcgaacatcggtgctgtgggcgattatggttatgatgggatgcttgatgcgttgcgtcatggcgtgattatcgtgtcgggccgttcgaacgacaaggagacggatgcccttgtcaatggcagtagcacggatgtgatgaccggcgaccctcggttctggaattcgtttcccggtgtgatccgtaacaacgaggtcggtcctgatgggcagatcgccggcatttcggatgttgctgatgcgaacgtgaacattctttccccgggtgatcaggtgcttcgtccgtccgataattcgacacacatttcggtggatacgggtggtacgtcgactggttcggctgtgttgtctgggtatttggcgttggctgtgcagaagtggcctgatgcgacgggtaatcagattctgcagtctttggtgcgtaacacgaagggcaatgggtcgggtgaggcgaagctggatccggggcataagaggggttatggccaggtggatgttgccaggctcctgacggtggatccgacgcagtatccggatgtgaatccgattttggaggcgcaggtgaccgcggcgtcgaagctgtcggatgatcgtgcgaagtggtatgcgcaggattgctctaagaaccccgacggcgtcggcgacctgctcgacgccgactcgtatcccgttccttgccaggccggtgagatcggcagggagtatgagcgtcagaaaaccgcgtggaagaaggtggagcagtgcaggtctgatggcggttcggattgcatgaagtattccgccaccgcgaccgcggacgagactgaaggcaagtctgacggcaggaccgtgctgccggataccggtgacggcagggacggcgtgaagtcgtccggtgtgccggtgtgggtgtggctggccgttggcggtgtgggcgtcttcgttgtggctggtggcatcgtgcttgccgtggtgttgtcgaagcgcggaaagcagggtcgtcgtccgttgccggatgccgctgccgctggcccgtcgccgtatgcgggtccgcgtcagcctgtgccgggtatggcgtatccgaaccgaccgtattcgccgcagtatggcggtcccgggtcccggcctgtgccgcagtaccaggctccgggcccggctcaggtgccatcgcagtaccgacggaatgtcggtccggtatctcctcggtatgctcagcctcagcagcaggcgaatccggttccgcagaatccggttcagccggcccaaccctatcctcagcctcccgccagtcaggttcccaatgtcgcaggcggctatggtcaggaacagggttattccccacaacagtatccgccacaatccgatggtcggaataagcccggccagggccggcatgcacggtaaaccatagagagagtattaggaagggaaaggagacatcgatgtctgacaaggataaagacaagaatgttgtcgagcaattgcttgattcagtgataacaagttctgattccaatataggtcccattgagcagcgtctcaatgaaattgccaagagcccgaactgggagttacagggaaaaattctgtctgttgataatgctgaacaagcagaacaagcagtgaaacatgtggttgaacgtgtatccgatactgatgttttctctggtcaaactgcgcttagtgcaaaacagcatggagaagatctgcttgccgtaaattatgcggatggcctatccagtcaaattgaagcgatgcagagcatcattgataacgccaatgatgctcttgagtatgtgaggaagcaaagggagtcattgccggggaaccagcttgatgctgtttcatctactgcgatacgtatagcagatgtgggtgcgactgttctcttgccttttccgcttgctgctggtaaagcaactattcagattcttactggttggacagatccggtaggaaaaataaatgaacagttgcgcgcgaacagggagaacaaagctcaggagctacttactgatttctataagtacttacgtcttcatgccactaacggtgcatatgaggtaaaaccagtagtctccaagccgggagatgttcaggatattggtccgacggatgttgatatttgggatcagtctggtgttggtggtcgtgttcctggtcctggtacgtatttgggtgatggtgcgtatgatctcaatggtgatggtttgccggattattacgattacaacatggatggcgtgccggacgtgtgggtggattccgatggggacggcattccggatgtctatgatacgtatgatccgaatgacgcggcccagaaccggaagtatgccgaggcttttgaccagataagccggaaccgccggaccagtccgtacaacaacgatcagggtggcaatggctctggtggccaggacgtcgatgatcgtccggggtatgtggttcctgatgattctcgtcgtcccgcgcctccgagcccggactcgtacaatccgtatggtccgtacgatcccaacgacccttatgatcccaatgatccgtacgatccgtcgattccgattccgtcgcgcaagcccaccgataacgacgtcgttgacgtcgattccgatttggatctgtcgccggttccggttgtgccgaggccgacggtgtccgcttccggtttgggtggttcctccgcggggctgggcgctggtgcgtcccttggtggcgttggcggtgccggcgtcggcatcggcgcgggggtgtcgggtggctcgttcttcacgaacgcgccggtccatgcgcaggtggtgccgggtggcatctcgggcgccaccggcatggcggccggtctgaagtccgctggtgccgcttccggggcggcggcttccgctggccgtccgggcatgatgggtgctccgggtgccgccggttcgaaccagtcgaagaacaagcgtcagggtttggggtacatggctcccaagctcgaggatgatgacatcgcgatcaggtccgtgggtgccatggctggccatcgtgccaggccggccggcgactgacgcccggatcagctaggggaaaggagcgctcatgagtgatcagattcaggtgagcaaaagcgcgcttgccaatttggccaagggctacaatgacgcggcctcggggttcaccaaaatggggttcggcttgcaaagcaaacaactggaccccagctttggtttggtgctgcagctggtgaaaggcgattacgacagtgccaaggagaacacgctggattatctgtccagtctgggttcgctgatgagcaccatgtcccaggacatcaccgatgccattgccgcctataccgagggcgaccagaagaactccgattccattcaggacctgctcaacaagatcgagaaccttgaacagcagaacaggcagttgagcgacaaggtcggtgaactggaggagaaggtcggtgaactggagcagggccagacatccggcggcaccggtggctattcgggcggtggcggtggaggctattccggtggcggttccggcggtggctccggatattcggccggtggctccggtggtgcggcgagcgctccctcgatgccggactatcagatgccgagtcggccggcctatcagcaggatgcttctgggaattaccggaatgatgctcccgttgatgtggattccgatatggcgggtgacattggcggcagtctcgacccggatacgaatgccaccgatattccggatattcccactccgcccagccatgacggcaccacgattcccaagccggaacgggtggacaccacggaaagcgtggatatcgatatggatggcgatggcgtggtcgattattcggtgaatgccgacctggattccaccggtgtgcgtttcaacgatgacggaaccgtgacgctgagcaagaacggtggttcgttcggtactgattccgcgcagaccagtggcatctccttcgacaccgacaacgatggcgccaatgatgttcatctggagctcaaggacggtcaggatgccagcgtgcgtgtcgttcccggcgccgagggcagcagcacacgatacgttcaggtggatacggatggcgacggtatctatgagagtagctatgccgtgcgcgacggtgccgcagcatcgggtgatgcgggctcgggggtatcggacggtgcttccgccgcgactgggacaacggccgaggacagttaccagaccgaggtgagcaagggcgaggaacaggcttggcagacactggccgagaccgacccgttgcaccgatccgttgacgagctcaaggaactgttcaacagacgcgaagagatcgagctgccggaaacgaattcgctttcggatggcgtctggggcggtgccccggcaaatggctcgatcacgattacgtttggtggtaacaagggggtgacggcatgaacgaatggctgaggcatgcttcggctcgtgtggtgttcattgtcgcggcagcgaatggtggcggcgatgtcgagcacggtaacctgtacgagaaccaggattacaatccggacgtcatcgatattggagacaatgacaacactggtaccggcatacaggccaacgagggggacttaatatcttctggatacaaattggctgaggccggtgagaagttccagtccggcaatattgccgatattcgtgacggggttagcgatcttctgggggccacaaatattcagagtatgaatagctctcttgatcgatggtgggacaacagcacatctcccctgagtatcgcggctggtagaacgcaggatcttcgagatggcatgagccatggtttggtgagtgctagaaatgtcactcgatatttttctagtggtttgtcttgggctcgtatgggtattggtgtgatcgacacggtgtgcaatgtcttgcatatcacgaaccccgtcgatgagattctgcgcaagccgttcggtggcgattgggatgaattgtcccagtccgctcaggattggcgtggcatcgccaccaatctggagacgatgcatacgggattgcagcaggcccagcggcagatccggacatcgtggaagggcgaggcattcgaccggtattcgttgtgcaacgaccagatcggtcagatgttcgagggcggtcccgatatctgccgtgagatcgcggatggtcttgatgcgttggtggatgtggccaagaagtgcttcgactatgcgctggatgtcattgaggagctcatcgacctgtgcatggacattgttgaatgggcgtggaccggtgtcggtctagccgtcgtggcggccaagcatgcaggacctgtcatttccctcattcagaatggttacgatattgttcagggcttgtatgatgccgcgcagtcgttcaaggcggttacggcggcggcttccccattggcccagcaggcgaaatcatttgctaccagtcttgaacgcacctgagccacggagcagaggaggatatacacatggcttcacaaggatttgaacaattcatggcgcaggtccggcagctgagcacgttggtggataccaagcagaaggagctggatgagctgcgcaagaagaatgccgaggaacgtgaggagcgtcggaagcagtacgccgaggaccgccgtgcgggcaagcagggccgtgcttggcaggtgctgcagcagcgcatcgatatggggcagacctgcgagcgcgacatcatcatgggcttggatacttctgccgaggcacgtgaggtgcgtgcccaggcggccaaggcattggatgccatgcgcaccgcggtcagcgagcttccggaggacgattccacggcgcagcagctccggcagcttcgcgagcgtcagcaatcacgctgattccattgtcgtcgataaaggtgatggtatggatgttgttgaggtttgggatcggtccatgcgggcttgtgggtgggtgccgattccgtcttggccgtggacgttcgataaggtcctgttgcatgatgccatcggcatgcgtgcgccgaagatgccgcgtactgcgaatacgcagtggttttacgccaaggggccttgggtcacgttccagttgaatgtgatggacaatctcagttggtggacgatgtactccgcttggtcgttgcagacagtggtgttgccggtgcgttctcggatgtcggggtatgcgtggtgcaccactacggatttgaagggcaagccgaggcctcagacggtgggtggcttgtctcctgaggtgttccgtatcctgtcgtcgtctcctgcccgtctcaatttgttggtggcggatgggctggcgtatttgtggacgccgattagcgttcatcgtcttttggaatggcaatatatgaccccggaactggagtcgcagatgctgccggtggcgcaggagttgtgccggtacgtgtgatggcgggctgtccgtgctgctgaccgtatgattccctcacgaaacggtatggcgtattcttaggaggagcagccgtttcgaggggtttcggagatgaggagaacggggagaggggcatggctatggcagcgcaggatgcctatgagcgccaacgggtgaatgttgccgtggcatgggctgtggccgcctcgttatgcgtcgcattcgcggtattcggtttcgatggtgtaatgcgtggtcgtgccgcatccaccgattctgccgtgttccagggtttagtcagtggactcatcggtgtggatgcctccgctaaagatgccgtgaccgtaagcgccgttgtatttaatgcgttcaccgccacagtgttggcattactgtcctactacgccgcacatgtgacggtgaggaccgactggcatcgaagcgtcgattatgccggctccttggccacggtcgttgccgccgcgatagctgcgggcccagcgcttgcccgtattgcgcagattatgtcggttactcgttctgcggcactggcggtcttcctctctgcgacccttgtggccgttatggcggcatatatccaatacgcggcttcgggccgcattacagtagcccttgcccgactgctcatcaccgcagccgttattatcgcgctattcattatcgcagtagtaatattcgccattcccgcaccggtaatcgcagcggcctgctccgtgggcggtgcatggtatgtgcatgcccaagcgaatgtgattttgcgggtgccggaccggtacctcatcgaatggcgtcgatacatgtcccagcgttggacggttcgaggcgcggttccggaaaattcacgtccgctctatacccatgacatcagcgaagacatgactattttttctgccgaatacaccatgggtcttgtggttgggcatctatatattgctgccggatatgttgtgctatgcctcactgtgcctgccgaaccggatctcttcaccactatcggcttcggcgcatattcggtgttattgccctgctatctgttgctccggccgcgcaccgcgggcagtgcgctggaacgtatgcttatgcgttcatgcgcggtattattgcctgcagcagccctgatcacgctgaccaatcatgacgattggcgttggctcgtgacatggttggtattcgggctgatagccgtgggcatagtgatagccgccgccacattggcagtatcgggcggcttcaagtcgctgatgttgtctcgtgtcggcgactgggtcaccaccggtagtcttgcattgatgggaccagcggcgttcctcgcctcaaacgccatggatatgattcgggggtttatgtcatgactgcagcgcccatgcccattgcttcccaagctcctgcaccacgtcccggtccgtccgtgacccatcccatggtgggggagggataccgttatgctacggtcgggcgacgtatgctcgcgctgctgattgacgtagcatttgtaacagtggtgggcggcgtcactttggcgctcagccgcaacgccatattggccgtcttgtgcgcaatacaggctgtcgccctgaactgggggtgggaggcttgccgcggtcgtaccatcggcaaggcaatactgggcttatgtgtggtgcgcaacactgcggatatggggcagccgggcgctggtctgctacctgccggtccgtggcgtgcgttggcgcgtgtattgatcacatcattgggctgtttggtggcgattgtcgccgcatttatgctggaatggacctcttcactagaccaggtacgtcatcgcggattgcaggatcggctgtccggcactgccgtaattgatacgcgtgtgcagtatgtgacggcaatgtctgatacgggtaatgccatcaccgataataccggtaccagtaccagcaccagatttgactctacttttgatgatgaggatgaagatttggaggcgatggtcggcggtattcttccgccagccactgcgcccacaccctccggccgttcggattcattcagggctttgcgcgcggtacctgctgccatagagccgtcgtccgtacggcctgcccaggtgcatgccgggacattgcaatcatcgtctaccgccatacaggtgcagtctgtgcaaaccgaatccgttcaaccggtgcctgcggcccccaccgtctctccagcagtgcccagccctgtaccgtctgttacttccaatacagcaaaacctgtaattcctgcagtgtcccagactgccatgccgcggcacagcagtggtgctgcaacgattgccatccccacgccggcgggcacgacttcagcgcgagtgcatgctgtgccgcctgcattgccaaccgtcggaacaagcccggtcgtgccatcatcttcggcggcaccaatacccactggaccactgcctgttcccaaggccgttcctcaggctgtgccccagcgtcccgtgccggcaaaaccggcagctgccaaacaggtggcggtattgtatttcgaaaacggcaatggtgtgcatctggatattcccagccgtgctctgctgggtcgccaccccaccagtagcgacccaaacgacgtgctggtcagagtaccagacaccaccggcaccatatcccgtacacacgcattgttggagattgcgtccggccggatgtgggtcactgacttggaaagcaccaacggcacggaaattttgaccgaagacggtgccgtgaaacatcttgaggcgggcgcgcgtaccgaaatagcgtttggcacacgtatattcctaggaagcaccgccataagtgtgagcctgctgagaaacagggagaaaaaataatgagtgagataacgccacaggtatcctcccgcatagaccagcccaaagtgcctcacggcaaggtggtgttgcaggccccgcctgaattggagccgagcgacggtgtcaacagtctgttgaccatgctggtaccgctgttgggcagtgtctccgccattgtgatgatggtcatgtccaattccggtctgaccggttttctgaccggcggcatgttcatgctctcctccgtgggcttcgtactggttaacggcgtgcgtcaacgttcgcagcgcaaagcgaatctcacttcgtcccggcgtgaatacttggcatatttggctgaactgagaaaaaccgttcgtaccgcggccaaaaaacaacggcgtgcggaactgtggaattctcccacaccggattccttggtggccatcgcgcaggaacatgtacgccgctgggagcgcatcccatcggatgatgattttcttaatgtgcgcatcggttctaaagacgagccattgtgcattaccttggaggcgccggagctgcctccgctggccgaactggacccggtctccgcttcagcggcgcaccggttcatgatggcccatcaaaatctgcatgatatgccttgcaccatcgacctgcccaagtacaagcgtatcgaaatcctcggtgacgctgatcaggcgcaatctttagcccgcaccttgatatgtcaggcggcggtctggcatgggcctgaatatctgaagatcatcgtgctggcggcccccgaacagcagcacgcgtggcgctggatcggcgagatgccccacgcatggagcgacgagtccaaagatccggcgcttggccatggcgaagtgatgctcgctggcagcgtggaagaagcgaaccgactgattggcgaagacattttgcatcgcagccggtttaccggcaccgggcaatcgactctgccgtacattctggtggtacgtgatggttcagtgccccagggtgacgcgaacaacagcgatgatgatggcttggtgcgccgcgacggatttgacggcgtcacccttatcgatcttcctgaagagtggggcgatcttgaagaagagcacgtgttgcgcgtcatcttctcccaatcctccatcgaaatgggtctgaacgtggtacgcacttccacggtgaaccagattgagatcatcacatcatcggagcgcgtggacacctgtgccccggacagcctgagtattcaggaagccaaggccgtggcctccagactggaacagttgcccagcgaagaggagaacggcgacaacaaggaacaagcctcccacgccaagaagtcctccgaattggccgatctgctgggcatcgcggatatccatcacatcgacttgaaccgcctgtgggcatacaaaaccggcaaggaacgactgcgtgtgcccatcggcctcaacgcggacacctccatcacgtacctcgacatcaaggaatccgcccagtatggcatgggcccgcacggtgtgcttgtcggcgccaccggttccggtaagtcggaggtgttgcgcacgctggtgttgtcgttggcgttgacgcacagccctgatcagctgaactttgtgctcatcgatttcaagggtggtgccaccttcgccggtatggaaggcatgccgcatatctcctctatcatcaccaaccttggtgaggaagcctcgttggtcgatcgtatgcaagacgctttgaccggtgaaatgacacgcaggcaggaactgctgcgcaaggccggcaacttcgccaacgtatccgattatgagaaggctcgtctcaacgggcgtaccgatttggaaccgttgcctgcactgttcgtggtatgcgacgagttctctgaactgttggccgccaaaccggacattgtcgattccttcgtgaacatcggccgactgggccgttctctggaagtccacctgctcatcgcctcccagcggcttgaggagggcaagctgcgtggcttggattcgcatttgtcataccgtatcggcctgcgcacgttctccgcttcggaatcacgtgtggtgctcggtgtaccggacgcctacaccctgcccagcatccctggtgtcggttacctcaagccagacccaagcaccatgattcgcttccgtgcatcctatgtgtccggagctccgaaaggcgagccggacaccaatccctcgaacttcgacgtggctgtggatcagatgcgtcgtgctggcggtaagcctgcacatcaggtatggttgccgccgctgaatgtgccgaacacgctcgacgagttcttccccgacttgaccgccaccgcgcagtatgggctgatttccccctcccgacgcaaggcggggtacttatccgtgccagtggcgttggaagacaagcccaaggaacagaaacgcgaggtattgagactcgacctgtctggagcgggcggccatgtggctatcgccggtggcccgttgaccggtaagagcacgttcatgcgcaccatggtggcttcgcttgcgttggcgcatagtcccactgaagtccagtgctatgcgctggatctgggcggtggcacgttcgccggtatggaagacctgcagcatgtggctggtgttgctcttcgtggtgacgatgagcgcgtcaaccgtatgctcgctgaagtggtgagcatcatcaacgcccgtgaacgttacttcaagaaccataagatcgattcgattggcacttaccgccagatgcgagccaagggccaagcggatgacggctatggtgaggtattcctgttcatcgatggatggcagaacttccgcacggaatatgaagacctacaggccaaggtattggatatcgtctctcgcggcctgacgttcggcgtgcatgtggtcatctccacgagccgttggatggatctacgagccaacatcaaggatcttatgggcactcgtctggaactgagactaggtgatccggctgattccgaaatcgaccgcagagtggccatcaccgtgcctaagggcatgcctggccgtggtctggcttccagcaagcggcatattctggtggcattgccgcgcatcgacggcgatcataaagccgactccatggcggacggcatcaaggatctcatcgccaaggtcaatgccgcttggaagggccccaagccaccaaagctgcgtcttctgcccaccatgctgtctcgcaacgccttcctgaccaccgtgccggaacagactcgtaacagtcgtttcgtactcggcgtggacgaagccgacttgaagcctgtgttgttcaaccccgtgcgagcgccgcatatgtatgcgttcggcgactctcgctccggcaagtcctcgttcctgcgtctgattgctcaggaaatcgagcgcttttacgacgtgaccggcggcaaggccaagatcttcctggtcgactatcgccgcgctctgcttgatgaggtgaatgacaagtaccttggccagtatctgaccaatcatgaggaaaccagtcaggcgatgaacgatcttgccgccttcctggccacacgtattccgggctcggacgtcaccgcggaacagttgcgtcgacgctcgtggtggaccggctccgacgcttacgtgctgattgacgactacgatctggtctccacttcacgaggcaatccgattcaaccaatcgtgcctttgcttgcgcaggcttccgatatcggcctgcatgtattcctgacgcgccgcactggtggtgccagtcgatccctgtatgatccggtgctgcaatccttccaggatctggccgtcaccggtttgctgttctcgggcgatccgaatgagggacagcttattggcaaaaccaagccgaagccattggtgcccggtcgtgtgcaggtggtcagtcgagatagcggcacattcctggcacagctcgcctacgcgccctccagcctgccgcccatggcaccaatgaactgattggcctgaatgtttgattaccgtctagggattgtcattcatctgcgctgtgcttcgcgtctttggcgatgcgcaaagcaatcagcgtgatgatcaccagaatcgcggccgcacctactacggccaagacagcacttaccgtgccatccgaatgcatggtggcctcgaccttaagatgttgtgcctgctgggtgcgaggaggcgtgtacggctcatattgtgtgctgcctggaccgcgcatgccgttggccagcgtgatggtgatggctccatacgggttgatttgcccccacccgcgattatcgtcgcgtgcgtcggggtccgggcggttgccggaagcttcgattcgctgcagccattgcaaggcgttttcatcgggatgacgctgcgccaccaaagccgctacaccactggcatatgcggtggcgtagctggaagatgctgattcggcggaaaagacgcaatccacgcctctcggaatcgtggacagcacggattccccgggggcaagaatgtctacctgctcgccactgatggaatcggatgacgcatggaaggacgtgtccgcagccgccacgcccaacacgtccttccatgcggcagggtagcgaagcccatcctgcgtggacgacgaggtgttgcggttgcctgcgctggaaaccacgagggaacctttggcttgtgcgtattgcacggcaagttgcaaggtgccactgggagccacggtgctttgcgagatattgatgatctgcgcaccatgatcggcggcataccgtatgccatcagccagcacgtccgggctgggaccgccttgcgaatgactggaggaattatcgatggagttatacacgcgcaccggcaggattgtggccttgggggcaatgcccatcagagaagagccttctatttttctggcggcgatgatgcccgccacaaccgtgccatgcccgtaattatcagtgcggccatcctgaacgttgtctcccgccagattgactccaggcagcactgcgtcgccagccagatgcgggttgttggtgtccacgccggaatcgaccacggccacaatgatgccttcgccatccgccagagaccgcaccgtggtcatgccgagcgcatcctcggtccatggtgtgctggtgatgtagttggttttaccgatttcacagctgttctgatcggcccatgccggtgtaggcgagagtgccccggctgcaagcgtgccacatgccagagcagtgcatgcggcagctgcgatgccggtgcgaatacggtgggttcgtgaggtgcgtgttgtcatcgtcatcattgctttcgactggatgccgaagagtcggatgagctgttcgcgtcgggtgtgccctcggtgcctgcgctagtagcagaggattgtcctgacgacgatgttgccgctgcctgatcctgcgctgaaatctgtagtccggcgctattgctgctcaaagccactccggcggagaatacgttgatccaggagcggggtattgcggtgacatcatttttggtaaagcccagtcgcttcaatgtttcttcggtatcgtccggaaccgggtaggccacaccggtgccatcgaccacatacaatgcgccggtggtaccgccggcactgtctaccgtgcgcagcagcgcaccgctgccattgatgatggtggtaccggaatcagtacgttgcgggcggttcttgtcgtcactgatggtcgccaaggtgatgccggcagcggcattatgcgtggtatcggtttggaatttggacggttccaacgcagcgcaagtgccattgccggaattcatcggcgttaactggccatcgggccaatcatcgggaacgatggaatcggtggcattacggaacccggcctgctgctgttcctgtgcggtcatggtaatggtttgcgcaccggcaccgaggctcagctgatacatttccaaggccatgccattcaatggcgagagtgtgccatcggcaagcaccacatatttggtgttgtcgttggaggggtcggcaatcagcgaaccgacggtgtatgatgtaccgcccaccgcgacttccgtgcctttgcccctgacatccaacactccgagatcggaaccgccggcaaacaagtccagccattgcaccggagccttgggagcgttatccaacgtgagttggccgacgccgagaatacgaagcaccgcatcgcgaatcaggccttcctgcggcagacgatgtcgcagaccgttgacaatgaggtatccaatgccatctacgttgaccagcattgcctcattacgactggccggggtggtcacggcatcattggtgatgagattgttggttgaggcgcgctcggtgtcaagacaactcaccaggaatttcgatacgagcctcgaccggttgggcagaatatccggtgcgcccacaatgcctacgctggagccgatgggaataccttcaagttcgttgtcgtctacggtgataactcggtattcgtctgaggggatgagcagacgtgcgctggtggtgttgattaccggatgcagcacaccgttgacgctgatgaatcgagatgcggtgtttttgcccacaatgagtttgttattgctccagtctgaaggcaggccagggctgatgatgccatagaacacactgatcagaaccatgatggcggtcaggccgatactgaccatcaccggcgtcaggcctttcttaggagtcagctccttgccatccggcataccggaagtgaaggcagtaatgagcctggcccgcgaatagttttgtgcgtcctgcaggtccttcttattcgccatggcccctcctcacaatcccaatgccacgtaggcgagcggcagggtggccaccacacagattacgttcgaggcgtcagccagacgggtcatggcgatggaatcgtgcttggacagctgtgtgccgatgacgcacagcaacgctcccagtgagaacaagcccaccaccaccgaagcccacgtggggtgaaacaccgtgcatgcggcacaagacaggcagatgccggcacctgcggtgataacggtgatcagcatttccgattgtgcatagatgcgcctggaatcaagcagcatggctgcgaacagaaccaaggtaagtgccacgcctgctgggcttgcactggaaacagccagaggcgtgccgaacacgatcagtgcgctggtggcagcgcgcaggtcgaacagcagcgtggagccgatacggtacttattacgcacttcgctgatatcgatgttcttgggcagcgcgaaaatctccgattcgctggtggggctgtccacagacaatcgtgcggaagacaggctgagccacggcagcgcattggcagccagaccgagcagagccactgccacgatccatacgcgagtggaccagtgcggcatcgttacacacacaatgccgagaatcaccagtgctgcgccgataatgacaggaatcaacgcgtacagtctgttcactgtaagcagcaaacatgaaatgccgccggccagcagtaaaccagcaccgataccaacggccgggaacccgtagaacgagggattgaacagtgaacccatgagatgatatccggtcacgccggccaaaagcgaggcgactagcgacagtgccagtgcctgccgatgcatatggcgcgaagccagtaccgtggcaatcgccagtaaagcggctgcggtaatgcccgctacgccagcattgatgatggatagtggggccaatgccagacaaatcgctccgacacccagtagcacacaactgaccaccattgtggtcactgtggtattggcactggtccacggtcgatgagaacgctccaccgaatcggccaccgcctcaaccacatcgtcgtagacgatatcctgatcgcccaaggcgttgacctcgagtttgagacgttcaccgtctcggatggcctgatcggccagcgaagcgggattattgatggcggtttcgtcgtcacgggtcagtcggtagccggcatacaccagagtcggatcgaacacacctagtttcttggcgatatcaggcagcagttcagctaccggaagtgtcgacggaacattgagtttcgcggagcgtttgccatacaccacagtgatggccacgcgcggggatgatgcggaaggcgaggactgattggctggcactcccatcgcaatcgaaggtacgggcgttggcgccggaacgtgtggtgctatgcgcggcggtgccggcatcatggacggtccggcgggcgtgtggcgatgcgacgatgccatagggtgcttcctcttctcaataaactcccaaaggtctactgtattcttgtattctctcacacattgcgggtatcgggaatgccattgtctggtcctagagcagattccgtggcgttttttgccgagtcgggtcctagggtggagcacaacgactacgatggtgcgggtaacgcgatacaaggagtggaacttcatatgccgaagatgtttggaaccgatggtgttcgaggactggccaatagggatttgaccgcacgtctggcgttggatttgggcgatgccgccgtgcgtgtgctcggcgacgccggcacccaagacgatcagcctgagggacgccgccgcgcgctcgtgggccgtgacacccgcgtgtccggtgattttctggcttccgccctgtccgcgggcatggccgccggcggcttcgacgtgatcgatgccggcatcatccccactcctggcgtggcctacctgacctccgtgctcaacgtcgaaatgggtgccgtgatctccgcctcccacaacccgatgcccgacaacggcatcaagttcttcgcacgcggcggcttcaagctgcccgaccagaaggaagacgacatcgaggccgtgctcggccaggactgggaccgtccgaccggtgccggcgtgggccgcgtgagccacgaccagaccaccgccaccaacctgtacatcgatcatctggtggccaccatcgctccgctgaacgatgacaaaacccagcccaagccgctcaagggcctgaagatcgtggccgactgcgccaacggcgccacttccgtggtggctcccgaagccctgcgccgtgccggtgcggatgtaatcgtgatcaacgcctcgccggacggctacaacatcaacaagaacgccggttccacccaccccgagcagctgcaggccatggtcaaggccaccgatgccgtgatgggcgtggccttcgacggcgacgccgaccgttgcctcgccgtggacgaagacggcaacatgatcaacggcgaccagatcatgggcattctggcccgtgccaagcagcgcgaaggcaagctcaaccacgacaccctcgtggtcaccgtgatgagcaacctcggtctgaagctcgccctgaaagacatgggcatcaagaccgtggaaaccgccgtgggcgatcgttacgtgcttgaggaaatgctcaagggcgattactcgcttggcggcgagcagtccggccacgtgatcaaccgcgaattcgccaccaccggcgacggcaccctgaccgcactgaccctgtgcaacgaggtcgtcaagtccggcaagagcctgaaggagctcgccgccgacttcccgcagctgccgcagaccctcatcaacgtgccgaacgtggacaagaaagccgccgccaccaacaagcgcatccaggatgccgtggcccgcgaggaggaactgctgggagacaccggccgtgtgctgctgcgcccctccggcaccgaaccgctcgtacgcgtgatggccgaagccgccacccaggcctacgccgacgaagtctgcacccgcctcgccaagatcgtcgccgaagaactcgcgctgtagcacccttccctaaggaaaagcaatgtttggaaagaacgccaaagtcgacctcgaactcaaccgtgatgtcgaacaactcatcaaaaccggcggcaaggagaagctcctgcccatcgtgcaggctggcgaaccggtgttgcgccaacggacggtggcctaccatggccagctttccaagcgtacgctcgccaaactcatcgatacgatgcacaccaccatgctggaggcgcccggcgtggggctcgccgccacccagatcggcttggggctcgcgctcgccgtggtcgaagaccacgtgcgcgacgacgaggatgatccgcgcgaaatcgcggaattccccttccacgtgatcatcaatccgagctacaaacccaccagcgacaaaaccgcctcgttctacgaaggctgcctgagcttcgacggataccaggccgtgcgcaagcgttggctcgacatcaccgccgaatgggatgatgaagacggcaagcaccacagcgagccgttgcacggctggcccgcacgcatcttccagcacgagaccgatcatttgagcggcgaactgtatatcgatcgcgccgaaatccgttcgctgaccaccaccgaaaacctcgaggattattggtgcgacgacccggtacccaccgaggccgccgaagaactcggcttcgcactatgatcgaccgcacatggctggacgccgccaagggagacattccccaatgggcggcgtccatgcccaaagacgccgacggcaccaccattgactgggactgggtgcgttcgctggacctgatgcatggcatcagcgtattgctggcgcttgctgcagatggtgagcaatatggcgaaaccgcagcacagcctcagctcgggttggaccaactggaactgacgccacaagctatccacgacgcattgaagatcgattacgccacacgcgagcatctggaatcaatcatcgcccaatgcaacagcacattcatgaccgattacgatcgattcatcggctcctatcgtctgcctcgcgcgctcgcctacgccaatcgtcggctcaacgacaacatcaacacgctgttgcatctgggcgaacagcaacacctatgggtggtcagtcgcgaacggcgggggaggactaccgttgccgtgctcaggccgtactccggcagccgcccatcgaacgacgaccaaggcatgctgaatctgagcggtgaaaccgatgacgcatctgccggaaacactgctgccgaaaacagcgatgtcaagttccccacaacagtcgccttggacgatatccaagaccgtacggcggcgattcttgacgcacgcgccgaacgacgtaaggcccagcgcttccagaagcgtgcgggcgatgcggcgatggcccgcgccaatctctccggcgcgacttcgccgggtggtgccgcctcgtctggcaacgctaccggccaccatcccaagcccgactggcgcgacgcctatctgcccggccgcgacgtggacgcggtgatgggcatcgacatcgaaaccaccggcatcgatccggcgcgtgactacatcatcgacgtcggcttcgagttcatgaacatggccagtccgcgcccggccggcgaacctgagacatacgcctatgagcagggctattacgccgccggcgacgcctacggccagtcccgtctcgcttttggcgtgccgccggaaaacgcggcgctcggcaacgccctcatcgccaaactcaccggcatcgatgtacgcggccgcagcagcgaggccgggtaccgactcttcgacgaatggccccaagcccaggccggcctgctcgcgcggcttacccagcagccgtacgtggcgcataacgccaccttcgaacatagctggttcatgctgaacgtcgccggatacgcggaaagctaccgtgccgggcgcatcaccatcatcgataccctgccgatgagccggcagtgggaccccggcgcggtacccaccaacgagcatccttacggagacaacacgctcgacgcctacgccaaacgtcagggcgcgcttgattccgcccacaacgaacgccacttgggccttgaggattcgcacatcatgctggtggccatgaaacaccatctggcggcgctgaaagcgcaaaggaaagggccgtgggggcccgccggcagggctggcgtcggcggcaagtcctgcggtcgtaagcggtgagtacactattggtctcgtgagtaactatcaggacggccgacagcagcgtgagaaccgccgccgcaccatcgtgcgtgtggtgtgtgtcgtcatagctgtggccatgctcggctccctgatcatcccggcgatttacgcggggctttgacgttgccttcgcatattcgtgcccgcagttgaacacgtctgatgcgagggatttgtgaggtcgcccggccggctatcggcaaggcaggcccggaaccttctggcagcatggattgcaggcggatgcgtgtgtggcgcggcaatgcccgccaacgccagaggaatgtgcgaaggctgtcaacaaggacgtgacttcccaaagaatctcaaagaatcaacagtaaggtaaaccacgatggcagaatttgactttacccaggcgatcggcgaagcccgcgccaaatacgaatccatcgccaaggcgctggacgtcgaccggctcaaggccgatatcaaggatctcgaaacgcaggccgcggccccgggcctgtgggatgatccggaaaacgcccagaagatcaccagccggctgtccgccgcggaatcgcagctgaagcgtctgaactccgcctcccagcgcatcgacgatgtggaaacgctcgttgaactcggccacgaggagggcgaccaggactctctggacgaggcgcaaagcgaaatcggcgagattcagaaggatctcgaccagatggagattcagaccctgctcgatggcgaatacgacgaacgttccgccgtggtgaccatccgctccggtgccggcggcgtcgacgcggccgacttcgcgcagatgctgttgcgcatgtacctgcgctactgcgagcgtaacggcttcaaggccaaggtcatggacacctcctacgccgaagaggccggcatcaagtccgccaccttccaggtggacgccccctacgcttacggccgtctgtccgtggagggcggcacccaccgtctggtacgtatctccccgttcgacaaccagggccgccgccagaccagcttcgccgccgtggaagtggtgccgctggtcgaggccaccgaccatatcgacattccggatacggacatccgcgtggacacctactgttcctccggccccggcggccagggcgtgaacaccacgtactcggccgtgcgcatcacccaccttcccaccggcatcgtggtgaccatgcaggatgagcgttcgcagattcagaaccgtgcctccgccatggccgtgctccagtcccgactgctcgtgctgcgccacgaggaggaggccaagaagaagaaggagctcgccggcgacatcaaggccagctggggcgatcagatgcgctcctacgtgctgcacccctaccagatggtcaaggacctgcgcaccggctacgaaaccagccagactcaggccgtgttcgacggcgacatcaacgcgttcatcgaggccggcatccgctggcgccatgaacagcgccgcgccgccgaaaccgaggagtaaacagcattatggcactgatctcactggacaatgtgtccaagatctatcccaaaggcacccgaccggcgcttgacgacatcaacctcgatatcgaacgcggtgatttcgtgttccttgtgggtgcgtccggctccggcaagaccacgctcttgagcctgctgttgcgcgaggaggaggccaccagcggcgagattcgcgtggccggcaacgatctgcggcgcatcaccaaccgtcaagtgccgcagtaccgccgttcgctgggcttcgtgttccaggattacaagctgctcaataacaaaaccgtatgggagaacgtggcgttcgcccttgaggtgatcggcacgcggcggtccaccatcaaatcgttggtgcccaaggtgctgaataccgtgggactcaccggcaaggaaaagaactatccgcatgagctctccggtggcgagcagcagcgtgtggccatcgcccgcgcctacgtgaatcacccgcagattctgctggccgacgagcccaccggcaacctcgacccgaccacttcgctgggcatcatggaagtgctggacgccatcaaccgcaccggcaccaccatcgtcatggccacgcataacgaagagatcgtcaactcgatgcgcaagcgcgtggtcgaactgcacaacggcaagatcgtgcgtgacgaggctcatggctcctacgattccgccctgttcttcccggatgccgaagtcgaagccaagtccgacaccgcccatcatgtgctggcggcggcgaccaaggccatcgagggcagtgacgagccgtctgaaggcatcgcccgtttggccaattccgtgcattccggccgcaccggccgctatggcgagacgtttgcgccgctggaagacacgctgacctggggcaagggcatttcgttggatgagcaggccgccgccctggaaagcacccaggcgttcgacccgttcaaggacgagtccgccgcgaccgccgcggttgccgatacgtccgtgtcatccgccgccgagccgccggccccgccggagccgcccgcaccgccggaaccgcccgcaccgccggccaacgagcagtccgccgccgagcagcctgctgacgagcagtccgccgcagaccaaacatccgacgatcaacccgctgagggcgcgaaggagtaagggggatcatcatgcgagcacgattcattctgtccgaaacgtgggccaacctcacccgtaacctgtcgatgctgctgtcgctgacgctggtcaccttcatctcattcctgttcatcggcgcttcggtgcttactcaggcgcagatcaccaaagccaagggcgactggtacgacaaggtcgaggtcgtggtgtggctatgtcccgacggcaccagccagtccgcgaactgtgcttccggcaaatcgccctcagccaatgagatcacggcactgcagaaaaccattcgcgatgaactcaacgacgtggtctccaacatcgactatgtcagcaagcaggatttctacgacaacaccttcaccaagcagtacccgaacggtgaattccaaggccgtacgctgaccgcggacgatatgcaggactccctctggctcaagctcaaggaccccaccaaatatcaggtggtctccgaagtgctctctggcaaggagggtgtggaagacgttaccgatcagcgccagatcttcgacccggtgttcgccgtgctcaaccgagccacggcggttacggctgtgctcgccggcgtgatggtggtagtcgccatcctgctgaccggaaccaccattcgtatgtccgccgcatccagacgaaccgaaaccgaaatcatgaggtacgtgggtgcctcgaactggacgattcgtctgccgttcattctggagggcaccatcgcctcgctgatcggctcggtgctctcgtgcctgatgctttcggctatcgtcaacgtgttcgtcaccggctggctggcgaaatccgttacatggattccttatgtgaatcagctcacggtactggtgatatcgccgttcctggttgtgggcgcgatactgctgtccatcatcgcttcaaccatctcgttgcggcgttatttgagggcgtaacgcgaccggcttacccgcgagaaatgtgatgacatcgtgtgcaagcctctcaggttcgcatgttatggtattggcttaagtgagcgaaaggactattcacatatgacgaacgtacgtgtgatcaagcccgcactggcggcactggtggccgccgcggcctgtgtgggaggtctggcgttcagctcggcacagcctgcccaggcagacacctattccgacctgatcaatgcgcagaaccagcacgccgcgtcggtacagcgcgaggccgaactcaagcagcagctggccggtgccagccaggacctggcgaataaggtacttgagctggacgatctgaccaacaacaagattgtcgccgcgcaggccaaggtcacacaggccaacgaggatgccgccaccgctcaggacgaggccgatgccgcatccggacgtctttccgccgcgcagaaagacaaggagacgcttgaggagcggatcaagcagaccggcaaggactacgatgacgcgcacgccgccgtggcccagctggcccgtgacgagatgcacggctcgaatgcttccgacgtgatgagcgtggtgacgggtgccaccagcacacaggacttcgtcaactccatgcagtcccgggacgcgttgtcccgcaacgaggcgaatgcggcttcctccgccgcgacctcactgagcacgtcgaagaatcgtggcgagcgcttggcggccatcgaaaagcagatcgctgtgctcaagacccaggccgatgagaaggccgcttccgcacagaccgccgccgaaaccgcgcaaagcgaacgtgacgctttggataagctgcgccaggaaggcgaagcaaggcgtgacgaactgtcttccatgatcgacagtctggattcccaatccgccaagcaggcggcccagaccgtactgatcgcttcccaggtcgattcctacaatcgtcagtaccagaaggaacagcaggacgccgccaaccgggtggagaccggtaaccagggcggtacgccg

SEQ ID NO: 1410 - DNA, 11323 bp, Unknown
  R257_15m  MAG No. k141_9861
gaagaacaggtcgaacacgtccccgccgaccccgtcgcgcgcccagaccacgcggtgacgctcgtggtcgacgaccaccgtcaggtacgtgtggcctttgcggtggctggtctcgtccacgccgatcgccgtcagaccgtcgaacggccgagggcatcgacgtcctgagccgttcggcgaccctatgggcgatgtcgcccgcggtacgccacgccacgtgcaggaacccgctcaccgtcttctggctggcgacgctcatcagccacgaaaacagcaatagcgcctcttattatcgcgcttcattccaaacgatgtttgcgagagagccgtctttgtcacccgcatgcggtcagtagttgatcatctccagctctaaccccatgtcctcggtctgggtcaggccagtttcgtgaaagccgatgtgccggtagaagccttgcgcgttcgtattgaatcccgcgacccacagggcgagccggtcgttgccaatcatctgctgtccggcgtccacaagcgcgcgtccaatgccgtgccggtgcctgccggacagtacatacagcgaggccagttcagccgcctcgggtcgactgatcggaggacgcggcgtgtgcagcagttccgcgaatccgatcacatgaccgtcgtccaacgccaccagcatggcctgaccggggtcgcttgcgtggcgttgcgtaagccggagcgcgaattccggcgtgatcgcatcgacgatctcctggctgatctttccctggttcagttcgcgccacgtacgcgactgcaccgcggacttctcctcataccaacgcggctcgatcggcctgacatcgatagtcatatggctcaaggtagacgggactcccctcgtactgtcgattcgttcggttacagcctttcggcgatggtgaaatgctccaacaccacgagcgtatcgtcgtcgagagcgaaatccgggtctgcgaacccggcacggtactcgtcggagttccagaacgtctcgtgcgtatgccgccattgcgccgcggtcatgtcaccctcgccctcatccaacgcctgacggtcggcgacatcacccaaccgggtcacggcgacatcggtggtagccaatactgccacgccgcgcccatcggaatccaccaatacggacctgtcgccgacgtgcggcaatggttcgccgctttccgtatagtcattcagcagcgccgacgtggcggtcttcacgccatcgagaatgagcgcgaccagccggtcacgctccggcccgggcatcatgaactccgcacttggcagatcctccggttccggagattccgagtccaaccacataggacgtgaatcagcggatggaatgtttgactgtcggctcatacgtgatgaatatactctatccgagatcgattgcactgcagagaagaagaagcacatgtgaagagaagcctgccgtccatcgccgcccggttcatcgcgggattgccgcacggcgcgttcttcggcaccggcacggtgatcgcgaaggcgctggcggacaagggacgcgaaggcaaggccgtctccgtgatggtcaccggtcagacactcgccaacatgttcggcgtcccggcggctacgattcgcgtctcgtgccgccgctgatgatgctcgccggattcggcatggtggtcggcggcctgtccggcgggcacatggccgatcgttggctgcactccgcgaccgccgcggtggggcagacgatttccgccctcggtctgcttctggtgttcctgacgcccggcaacacagccacctgcgccctactgaccttctgaatcgcgttcggcctgttcttcatcaacggaccccagatgctgttgatggccgaagccggcaagggcggcggcgaactcatcggcggcgcggccgtgaagatcgccttcaacggcggcaacggcggcaacgccgtcggatcattggtcgtcggcatggcgttgaacgcctccgacatggattaccacatcatcggtctcgtcggcctgccgttcacgatggccgcggtggcgttgctggccacgttcgccctgcggttcgaacgggtcgggcgacgctgatcggcgtgccatggtcgacctgaccatgacacgccggagacatgcctgatcctccgcacggagactattccatgatcgcatcgacgccgtcgatgacagcgccacggaacccgtccttctccagcttcgcgacaccgcggatcgtggtgccgccgggagagcagaccgcgtccttcatcgcgccgggatggtcgccggtcgccatatagagcgcgcccacgccttcgaccatcttcgcggcaaggcggtaggcggtggcgcgttggagtccgtatttgacgccggcgtcgccgagcgcctcgatgtacatgtcggtgaaggcgggggcgcatccggcgacgaccatggcgatgttcatgtgcgcggcgtcgacgcgttcgatgaggctgatcggggagaacagcgcttcgaaggtttccgtttcctcttcggtgagcgtgttgtcggtttcggtgacgagtacgcctttgccgacggccataggcgtgttcgggatggtgcattggatgtggacgggcatgtcgtcgccgccctgcgttccagtgaacagggtgcggtatttcgcgaggtcccatccggcggcgatggatacgacggttttgctgggtttggcgagttcctcggcgatggggccgatgaccgtttcgatttggtagggtttgatcgcgatgatgatggtgtcggccgcggcggcgacttcgagtgcgttgtgcagcgggcgtacgccgaggcccgccgtggtcttctccagtttgtcccagtgcgcggcgcaggcaacgatctgccgtccgcgtacgacgcccgcgtcgacgagtccttgcgcgatggcctgtgccatgttgccgtatccgatgaatccgatggtgatgtcgttcaggtccgtcatggttgcgtgttcctttcgttgccgtttgtttcagaacagttcttcgaggtcgccgcggttcagcgcctcgtcccataggtgtttgaatacgacggtgccgtgcaggccgtcgtgttcgaattcgttggtggtccagtagtggctgttgccgacgcggctgagcgtgtcgagctggaggccggagtcgacgtacatgtcgtcgaagtagacggccgcttggaggggtacttcgttgcgggcgagttggtcctcgtcgtagatgacgccgaagcgcgtgtcctccatgagcacgtccatggccggtttgaacgggcgcagtgcggcttcctgctcgaacatccaggggaacatggcttcgccggtgaaattcaatggtcgcacgtccgggccgaattccgccttggagtcgcgcacgcgctgggcggcccagcgaatcggctcctcgagttcgccattggcgtagatgaactcctgcaacggccagtagagcggacgcgacgcggtggcattcatcaccttggcgaggaactcgtcgggaagcgcagcatccgcgcaggacgaaccgtccgaagtcaggaaggcatcatccagaatccagtgcacacgttcgaagctgggcttcataccaaaatcggaacccaagcattgcagtcgctccactgtcagcggatcgccattgggcagcaatgggaaaccatgggcagccatgccggcaatcaatcccagttgatggtcgacatcggtttccgccatcgaaccgagcacggaatcgctcagatgaccagtgaattcggcaacgtccgccacggtcggcagtttgtccgccaaggtttccacacgctcgatatcctgaggataacgctcatagaactgcttggtcttgcgggccatgcgcgggaaggtatgctcgtacacttcagtggcgtcggccggcacgtgcgggatgccgcccgtggtgaagctggcaatcacaccttgtgggaacagggacagtgtggtcagggtcaggaagccgccgtagctttggcccatcgtcacccagcgtcgcccgccgaattcagtcaaacgcaagtgttcgaaatcacgcacaatggaatcagcgaggaacttcttcagaaaatcagcttgagcgcgggcggcaccggctgcatcatcctcgtgagcggcggctaatcgcgccatcgtgtgcgtatccactcgggaggagcgtccagttccgcgctggtccggaaggatcacgcggaaatgcttggttgcctcttcaatccacccatcggaagtagggctgttcaaacgcgggccggcaccgccgggaccgccttgcaggaagatcagcaggggaaggtcgtcatgcacgtgttcgggcgcggtgaccacacgatagaacagtttgatggcttcgccgtcgaacgcttgtcctggctcatggccggaccaatcgagaggaacgtcaatggaatggtcctcgatggcgaggcccggtacatagtatttgctcagcaatgtcatggctcaaactctaacccacaaatccgcctaaagggtgatgtcagcttgttaacggacacgctagccttgggatatatggaaatggtcgcgcacgtgagggcatggttcgctcggaagccgagtcacaccctgctatgggacaccctgctcgccgcagtgctgacattcggactcatcccgctcatcagttccaccagttcctcttcgactcctggactattgttcgtgtcgaacaattattcattgttgttctggtcgctaccgacgttcgttccgctgatgctgcgacgataccagccggagatcgccgcttggttgttcgtggctctgaccgccgcccatctcgtcttcggcccgtcgatggcctacggcgacttctatgcgctcatcatcctgtattcggtgctcgtgtacggcaatcccaagcattccttgcgattcattatcaccgcctttgccatgggattggccgcggctgcggtctgggcggcgtcgatgaacatcggcccgctgttcaaaagcggttcctccaatgcttggaccgcctggatcagctggctgcccaccgctgcgaccatgcccacatgcccggcctctcccggcctcatcagtgaaccgagcgtatccaactgcggaatcaaaatgctgcgggatacgggcgtgctggcgctgtgcatggaaatcagcgtgctgagcattatcatcatggcgttatggcagcgtgcgcgcaaggccacactcacggccatgcgcgaacgcaatgcttccatcgtggcccgggaagcagaggagacgcatatcgcggcgctggccgagcgggcgcgcattgcccgcgatatgcatgatgtggtggcccatacgctgtcgacgatcatcgtgcagtcggatggcggccgatatgcgggcgcgcatgatctggccgtcgccaagcatacgatgagcacgattcaccatgaagcggaacgcgcgcagcgtgatatgcagcgactgttcggcgtgttcggcacggatgatgccgggtatgcggacatcgattccctggtcgacggtcatctggtcgtatcccggcgtgtgaccggcaagtcgcggtcggatcgtttggcctccgatgcggatgccgccgtgttccgcttggtgcaggaggcgctgaccaatacgcgcaagcatgcgggcgagggcgcgaaggccaccatcgacgaggtgtggtcggatgacgggcttgcgattactgtgtccgacaacggccagggagcggcatccgccgccgacgggcacgcgcccggctacggtctgatgggtatgcacgagcgcatcgaatcattgggcggcagcgtccacgccggccctggaccgaacggcgggttcatcgtgatggctacgattcccctctcccccgaaatcgcgcaaaccgacgccgagccgtctgacgctttgcccgtcaccatcacacgactacggaaactcctggattcgatacgctccaaaccgctcgaccagggagataccggtgagtcgaattgggtggcccgcttcgcacaatggaccgaacggcattatctgctggtagatattctcatcaccgtggcgctgatcgcgatgttcagttccgtgacacgcggcgatctgcagatgatgacggtcagcaatgacccagttcaacccaacactgtgctgaccatggcactgaccatcatcatgcttgcccctctggctttccgacgtcggttcccggagggcagcgcactggtcatggcgattctgtccgccgtgcagctgctgtttctgccatccatcctgaccgtcaacatgttcgcattggtgtccgtgcatgccgccgtgctgtatggccgcgaacatgcgtggcgctgggtcagtgtggcactggttgcggattcgtggctggccggcatcaaggtaatatccggctggaacggatatggcatgctgattcagatgctgctacccctcaacggcgaatcggcgatgtcccgctggctactggtgttttccggcctgataccgggtggcgtggtgatgctgtttggctttgcctgcattgcgatggcccggtggagccgttcacgcggttcgaacgcgctggtgctcatgcaacgcgaggaagcactcaaagccgagcaggagcggcagaaggtgctggccgccaatctggagcgcaatcgcatcggcacggccatgcaggccgaggtattgaatacgttggaatcggtgatcacgcaagccgatgatgggctggccatgctgaactccgaaccggctcccgatagcgagcagattatcgccgcattcacggtcatcggggaacgcgggcgtgcggctctggcgcacatgcggcaattgctgacggtgctgcgtgaaaccggattcagcgacaagatgcatgaaggcgcacaacccgacatgcaactgcgaccggctgctcctctgtccagccagatgaggcaggcggaatccacatctcagacggattcgtccacgaacatgaactcagggaacaatcagggtgtccatggagcggcactcgaataggaatcggatacagtgaagagcatgaacgagagcagaagcattcgcgtgatcattgcggacgaccagaagctggtgagggccggcttcgccatggtaatcggctcgcagcaagatatggaagtggtcgctcaggcgtccgatggtgccgaggccgtgacgatggcagagactctgcaccccgatgtggtgttgatggacgtgcgcatgccgggcatggacggcatcgaagccacccgccgtattacctcgctgaccgccggcacggatggcacgcagccgacccgtgtgatcatcctgaccacattcgatttggatgaatatgtgatggccgccatcaatgccggagcttcgggttttctgctcaaagacaccgaaccggagacgctgctcaattcgattcgcaccgtgttccggggcaatgcgatcatcgcgccttcggccaccaagcgtctgatcgagaaaatgatgcaggacggctatgcgcagcatgggtcgttgagtggcggcgtttcgaacgcaagtttcaatggcaatgctggcggcgtcgccgacactactggaacggtcggagctacgggtgccgattcaacgaatggcattggcaccgcacgccccacatataccgatcccgagctggaactgctcaccgaccgcgaacgtgaggtgctggtggaaatcgcccatggcctaagcaaccaggagattgcagacaagctctttatttctctgcccaccgtcaaaacccatgtggcacatattctggccaaaatcaatgcccgagaccgcgtacaggctgtggtctttgcgtacgacaacgggttggtgtgacctccccaatacgcacgatacggcaaaacgagcggcatctgccttaaaagaggcacattcgcctttctgtaaagaaacgactgtacctccttcaaggcaggtaggcctattcgcagcgcacgaataggcctacctcgttgctcttagactgtgaccgagccgctacgcctcagccaaagcctcgacaggcggagtcttgacggctcgtctggccggagccacactggcgagcaaagcggcgagtgcggccacgccaagcacggcaccgttggtagtccactcgagggggaacacggtgttgccgtacaggctgaacaccatgtaggagccgagccaaccaaacagggtgccgagcaccacacccaccacgccggagacgagcgaaagcagcaaagcctccactgccagcgagcgccgcagttggccgcgcgtcatgccgatggcacgcaaggtggcggattcgcgtgtgcgttcgatcaccgacagactcagcgtgttcgctacgccgaccaaggcgataagcacagccaccgcgatcagtccgaccaacaatgccatcatgccgttgatcatggtctcccattgtgtacgttcggccaccggaccggtcacggtaacaccagcactggcggagaacacattctgcacgttggtgaatacgtcgttcagcgcaacacccgcgccctcggcgtcaatacgcataagcatgatatgcccgtcggccttgattccaccgttggtgaagtggctggcgtccacgaaggcgaccgcggcgtagttagaggcgatgcggcgatagtccaccttccgcggtttgagcgtcagcgtctgtgtgccgccggattgtccattgccgttttcggcgctgccgttcgcatcattaccggacggaccattggcggcatcggcttgtgcttcggccgctccagccgtgaacgtaacgctcttgtccagcggaatatccttgcctgtagcggcggaatacttgggcatcagtacggaatcgccatcaatggtcacgccggacaaatcggagcgcaccaccttgtgcaacacgtcgacgccatccacgcccacgaccagcacactcaggctcttgccgtcggcatccttcatggtcatcatgcgggtcggcgcgtagacactgctctgaacgcccttgactttggctgcctcgctggcctgtttgccagtcatatcggcgccagcggcaatcatgtcgacgctgtagcgcgtggtcagcgcctcgttcatggtttgcttggcgctggcggcaccggtggcgatggtggagaccagcgtcacgccgataagcagtgcggcaccggtggcggccacgcggcgcgggttcttctgaatgttcgcatgtgccactttggcggacggaccggccagtgcaaccagcgcgcccacgccgcgcatgagcaccggtagccagaacgtggcggaaagcaccagtccaaggaagatcaatgcgcatccgatgatggcggcgagcagcaccagcgaatactgcttgtcggccattgaatcacgtccggcgattttctcggacatctgccatacagagaatgcgcacagtgccacgccgcccgcaatcagcagcatggaaatcacggcgcggaccacaccggcccgtcgcgtgtcggtcagttcgatgggtcgcaacgcttccagcggggtgacggcggtagcggaacgcgcggagcctagcgaggcaatcaccgtcataatgatgccgaatgccataggcaccgtgaacaccggagcggatagtaccagtcgcatggtcatgccggtggctttcatcaggcccgactggcatagtgcggccatgagtccgatgcccaggcccactcccagtgcggaggcgatcagtcccagcacaccggcttcaaacagcacggagacatacagctggcttttgttcgcgccgatggtgcgcagcagggcgagtgtgcggcggcgctgtgccacgagcacttggaaggtgttggcgatgacgagtgccgcgaccagcatggcgagcatgccgaagctcagcaggaagatggtggtgatgctggtttcgcccgagctcatgcttttgacggattcctcgacgagcgcggcacgggattgcacgctgaaatgcttagggagcagtgtgctgacctgttttacggtggatgccgcggccgtgtcgctggcatcgtcgatgtcgagatagacgaggtagacaggcaggttgccgaaatcgttgctgccggccattgcggtgatgacgttgtcggaaagcacggaagcgccaccgtagtaggcgtaggcaccgttcgggtcgtcggtgaggccgaccacgcgcacggtcatgccggagtcggcggccgtgtcggtgccgtcggatggggcggacgcgccggacgcggcatcggaatcaccgtcgtgcgagctcgtgccatcggcgttctgggccgactcatcaccagcgtcaccggtattaccggccgaatcgccggtcttgcccgcatactgcgccgcctgcgagttgacggtcacacggtcccctaccttgacgccgagctggtcggctacggacttggtcagggcgatctcgttgctgtccgctggctggtctccttgcgtgatggtgaccggcagcagcgtgcgctttgtggcggtggtgatgacgtagctgctggcatgcttgttgccacgggttacggtcacggaacccgcgtagccggcacgtgcgtccttgacgcctttggtggcgcggatgcggtcaagctggaagtcgttaaccgtgcgcgtgtagatgtagtcctggtccttatcggtcaggtccttgccgctatccgggctgatcacgtagttcgcgccgccgagctgggcggtgttttgggcggcaagcgcatcgttcatcgcgttgccgaacaggaaggtagcggcgatgaacgcagtgccgatcaggatggcgatgcctgccggaatcagcatcctggcgcttttcttcataagtttcagagtgatggaaaacatgggggtatcctgtctctcgctttccggctcagcgagtgtgctgtgcggcggcgcgggcatggcgtatggtgccggttctcccggctgggggcaatggagcgtcggtgatgggcaggttgggcacatcctctacgccggcaagacgggcgagcgtgtcggcgcgtgtgctggtgacggcagtgcgcgtggcgcgttcgcgttcggccataagcagctcggtcatcgtttcggcagtaggagtcgcctcgtcggccacgatctgtccgtcggcgaatacgatggcacggtcggcgtaggaggcggccaccgcatcgtgcgtgaccatgacgatggtttggccaagctcgttgaccgaacgcttcaggaagccgagcacttcggcgctggaaacggagtcgaggttgccggtcggctcgtcagcgaacaccagcttcggcttggtaatcagcgc

SEQ ID NO: 1411 - DNA, 3027 bp, Unknown
  R257_15m  MAG No. k141_10547
ccagttaccgaggttcaccccattgatctgctcgccaatgcccagcgtgcccagtgccattaagtcacccgcgctaatcgttcaatgcttcgccgtaacgagcgaccaacccctgatttgcacgctcaaactcggggatgtaatcagcgatgatggcgtccacaagacgccgagctcgttcttcatcatagatatgagcagaatcattgcgatcgcgcagcatgcgcagccacaacgattcgtccatgaaatcgtaatattggaaagcggttttgagcacatctcgcggagaatcggaagcggaaacagagtctccctcataagccggcagcgccttgaacagtttccaaccaagctcaaactgcaactcgaacttgtcaatgatgccgctctggatgaaatcattgccgagatcctgttcgggagccttgcgcagcgaattcaatgcggaaacgtaattctcatactttttcatacagcacctttccgctacgctcaatctccgccctcagcgatgaagaaatcggctcatccagattgatgacatcaactttaagcagtgaccacagattgtcctgaaggttctgctccaagcgattgaaatcgggacaaccggccacggcaagatcgatatcgcttttaggccggttcacgccctttgcgcgagaaccgaacagcacgaccttgcgagcgccggcatcagcggcaaacgcgcgaatctggtcgtacacgtgctcgataggaaccatgacacctcccgccgcatccaacagtcccggaccaatcccggaccacccgcgcttccatcatacggccgcggcccactcaccgcacggagcccgaaccacccgaacgcggcgacgtagttgcgggaggcgggctggcgctgtagggtgtgcgggaagttcctgacgtctacttttcaggaggtgaatcctcatgttcaccacgttttctctggccatcattctcgactgcaccgtacgcattgtgctcggcacggcattgggcgcgctgatagggctcgaacgccagttgcgcgcccgaagtgctcggcgtgcgctgggatgtggagcacatcaccacgtccgactgaaacgtccgactgacgctgaccagcaacatcgcaacagtacaacaagccaacaagtgggatggggcatcgagcctcatcccactttgttattatccggcgattgtcagactcactcacgccacggtgaacgtggtgcgcttcaggtcctcacggcgcgaggagtggccgatgagcagttcgaattcgccgggctcgacgatgcggttggcgtccgggtccacgatcgtgcagttcgccaccgggatctcgaaggtgacggtcttggtctcgccgggttccagtgcgacgcgctggaacgccttcaattcgcggtcggtccagctgtaggaggtcacgatgtcgccgatgtaggcctgcacgatctccacgccggcgcgctcgccggtgttggtgagggtgatttcggcacgtacggtgtcggtttcggcgaatgtgccgtcggcgttgcttgcgccgcccgtaatggtcggttcgccgtatgcgaacgtcgtgtagctcaggccttcgccgaacgcgaacgccggatcctgggtgaggtcggcgtaccggtcgccgtgctggccgcgaatctggttgtagtagactggcagctggcccgcgtggcgcgggaaggtgatcggcagtcggcccgacgggctggtcaggcccaggattatttcggcgatggcctgaccgccgcgcatgcccgggttcggcgcccacaggatggagccggtgccggtttcagggtcgctgacgcgcttggcgaacacgccgtactcccccacgatggaggcgggcaacacctgcggcttggagctgatgagcacggtgaccatcggcttgccggtttcgcgcgagacggcggcgagcgcgtcgagcagggcgttctggccaccgagcagttcgagcgtggcggtggagcaggtttcgccgaccagctggaccacgtcgccgaccacggccacgatcagatcggactggcgggcgttggccacggcttcgtcgatcattgctcgatcgacggcggcggaaacgccgattttcgggcgaggctggccgtccgggtagaactcgccggcagggtcaggcacgaggtcgatgacgttcgcgccgcgcgagtagaccactacgcaatcgtcggaggtgagctgggtcaggccgtcgagcacggtggtaatcatgcctcgaggctggccatccggcatccaagagacctgaccggagttgccggtccagtcgccgagctggttctgggcgtcgtcggcaagcgggcctaccacagcgatgcgcttggccttgtttgcggcgaacggcagggcgccgtcgttgcgcagcagggcgacggattcgcgggcgagttccaggttggtctgctggtgttcggcggagccgatgaccgccttgatgcgttcggcatccggcaggcgcgggtcttcgaacaggccgaggcggaatttcagggccaggatgcgggctaccgcatcgtcaatcagggattcgtcgagcagaccggtttttacggcttcgatggctccctcatagaactgtggggtggtcatgaccaggtcgttgccggccttgaccgcatcggctgcggcgtgcacgtaatcgggcttgacatgctgttcccataccgagcggccgacgttgtcccagtcggtgatcagcgtgccattgtattgccatgcgccgcgcagcttgtcggtcagcagccatttgttgaacgtgaccggcacgccttcgatggactcgtagccgagcatgaacgtgccgcagccttccttggccacgcgttcgaacggcggcaggaaccaggattcgagcttgcggtgggagaggtcggcttcggaggcgtcacggccgccctgggtctcggagtaaccggcgaaatgcttggcgcaggccaggatcgcgttcttcggcagggcctcgccggccttggcgccgcc

SEQ ID NO: 1412 - DNA, 35776 bp, Unknown
  R257_15m  MAG No. k141_10587
cgtatgcgccggcgggctggccgtattgcggctgctgctggccgtagcttccggcggcgggttgagcgtatgcggcgggctgtggggcgccatagccctgcggctgccgtgcggcatcttggccgtacgacggctgtgccggctgtgcaggttgtgccggctgcggaacactgtccgaaccgtacggttgttgttgattatcagtcatgtgggtctatcccttctcaatcgggaacggcagtaccttcttaccgtttctgcacaacatcatctcacgttttgcctaatagtaaaacctgccgcgctacgattgggccatgaaaagtttcctgaccagctggttgattatgactatcgccgccgccgtcatggtcgcggtgactcccggcatgaccccggtgggggagcctccgattctcggcatcgccgcgttcgctttgttcatggcgctgattaatgcgtcaatcaagccgattgtgcatctgatcgcactgccgtttgcgattctgtctctcgggctggtcaccttgattatcaattggctgttcatgcgactcgccagctggctggcggtcagtctgttcggcgtgggcgtcttcgtacacggtttctggtggtcggtactggggtccttggttctgaccattgttgcgggaatcgtcgggtccatcttggatcagtgacggtgctcgctgggcgaatatgagtaatggcggttggaatcggactgattccaaccgccattactcatatcaagctacgggatcgagcagagcgaacgctactcgcgcaccaagcggatatgctccacatcgtcgcgccgggagcgacggaacagcacgaaacgattgccgatggactgcaccacttcggcgttcagctgctcggcaagctcggcggcggcttccttggcggtcaggccagaaccgtcctgcacggcgcacttgatgagctcgtgcttctcaatggtttcatcggcctgattgacggccgactcggtcaaatcgttcttgcccacatagaacaggggcttcagcgagtttgccatcgcgcgcagctgcttgatttgcttcttggtcaatgccatgggaatttccttacatctttcgtataaccacaccagcatagcaaccggtgctgtctgtgctgtttgccgccctacagcgcgatgatggcggcgatgtaggcgatgacggcgacggcgaacacgagatcttgcgcggcgatggtcagggcacgccagtgggtgcggcggatgctctcctcgtagcagcgggcgtcaagtgcgaggctcaggttgtccgcgtgacgcaacgtgccggcgaaaatcggcacgataatcgcgctcatcgccttgatgcgctgggccagcgaaccggtttcgatggaaccgccacgcgcggattgggcgtcgacgatggcacgggtctcgtcggtcagcgttggaatgaatcgcaatgccagactcatgaccaacgcgatctcctgggcgtggatgccgagccggttgagcgggctgatcagggtgtcgaaggcgtcggtcatggcggtaggcgtggtggtggtgaggaacaccgcgcccagaatgatcaccaatgcgaaacggcaggcgtacagcacggctatggccacgccctgatcggtgatgctcagcgggcccagcgccaccaccggcgtgccggtgcgtaccacaaacagattgaccacgcccatcagccccagcaggatcagaatcggatgaatggattcgagcacccgtaacgggttcaggcgtgccgccgcgataacggccagggtgatggcgatgcccagcgcaagctggaggggcgtgttcaccgcgaacatcgtgaacatggcggccaggaaacccaccatcttcacgcgcgggtcaagtcggtggatcaccgagtgcgcgggtttgtcaggggagacggactcggcggggaaggcagtctcggttgccgagatgctctcagcaccagccgcgccggcaatcggcatacgtaccacgcgatcggcgatatgcttggcctccgctcggtcatgggtgatgatgagcacggtgacgccgcgcgatttgagcgtgcgcaacagctcatggatgcgctccttggcctggacgtccaggctcgcggtcggctcgtccatgatgagcacgtcaggattgcaggccagcacgccggcgatggccaccaatcgctgctgtccgccggacaggtcgaaaggggagcggtcggcaagatgcccgatatgcagcaggtccagtgattcgcgcacacggtcggccacctcggcctcggcgagcccctggttgcgcgggccgtacgccacgtcctcggccaccgtgtccgcgaacagctggtgctccggatgctgcatcacgtaacccacatgccggcgcaattgcgccaattgcctgcgattcgccggcttcggacgcgcgttgcgaccgcgtttgccggtcgaggccaccggaacgccggccacctcgatgctgccggcggtcggcgcggccagcgcgcacagcatgcgcaccagcgtcgacttgcccgaaccgttcacgcccatcagtgccacggtttcaccgcgcgcgatggtgaacgacaggtcatcgataaccgcccgtttggccgaaggatagcgataggtcagatgcgagacgcgaataatggggttcgtcatatcaccgatgccgtcggagagcagcggcagttcggagccgtcttcgcgcttccgctggcgggggctgtcgttcgtaggacgactgggggcggcttctgtgccgataccaccctcggtctcgctttgcgagacagcctccgctagcgggggtcgattatcggcggctgcagtgacaccaacgattcgcccggcctccatgtgcacgatgcgatcggcatgaacggtctcatccggatgatgcgtgacatgcacaatagtggtgccgcgcgcctgcaaatcatccaaaatgcgcataacttcagcgcgtgcggattcgtccagcatggcggtcggttcgtccaataccagcatcgccgggttcatggccagcatgccggcgatggcggcgcgctgctgctgtccgccgctcatacgggtcgggtcggactgacgcaagttcgccaaccccacggcctgcaatgaatcaacgatgcgctcgccgatgagcccgcgctccagcccgagattctccgggccaaaagccacgtcatcctccaacacggtggtgaccagctgatcctcgggattctgaaacaccataccgatgccgcggcgggcagcgcgataggcgtcggcattcgggccggctgcgtacacgcgctgttccagtagcgtcacttcgccatcgtccggcgcggtcaatcccgcaatcagacgggccaacgtggacttgcccgacccgttcggaccgaccaagcataggcgctcgctggcatggaccgtgagcgaaacgccatccaaagcccatgaagtgccgcggtcatagctgaaacgaatgtccttgagtacggcggcggggggagcgggctcggcggaatcgtggaactcgtcggcgtcgaaggaatggggtgcaacggtcatgaaacagcaatccgtaactgataggcgaaaacgcagaatcccggcaagggccggagttctgcgttcttgttctttgagtggtcgttgagtggtcgttagtcgtggcgggcataggcccgtctcaggccggtcactgctgcttggacagcaggttggagaccggcttgtagatcaggaaggtgatcacggcgtgaatcgccatcttagccacgttgaacggcagcagaatcggcagaatcatcgcggccacagcctggtagggcatgtgcgcgtaaatcggcgtgatgatgaggttgcccaccagcgccaccacgatggccagcaccgcacccaccagaatgccgatggcggcacccttgcgcgtacggatcttacggtagatgaacgcggccggcacagacaggaacagcgccaccagcacagccatcagcgaaccccacgggtcggcgaacatgtgcggcacaaagccgagcacagacacgattgcggcggcggccggaccgtacgcaaagccggcgatcaggcagacgatgccggacgggtcgtacttcagccaagtgaccggcgtaatcgggaattcaatgaagctggtgaccatcgccagcgccacgaacagcgcatacatggcgatacggcgcgtggaccagtggccggaatcggccacgccagtggtgtgcgagccaagtttggcgttggtgctggcggtggacgcgctggccgaaccctcggcctcgggcgccacagaacgaacaacttgcatgcggatacgcgaagatacgctcataatgagccctcgtttcttccatccggactataccgttggctccggaatctcaccggatcagccgcttgcgcgggtcgcgggcttcccgccatccccgttatgaaacccggggtacaggttaccgccagtaaggaattgcaccttccctgaaactgacaggcttattcatacgccatgcgccggacgtacgcaacccgcgtttcactgtgcagaaattcgtcttgtgccggtcaagtgcaacaatgggagccatggctgaagtgaagaaacccaacaacaccattgacaagcttgccctgatcgtcaccacctacaaacgtcagcagctgctcgaggtactgttcgattcgattctggcgcttgagcaggcaccgtggcgcattgtcatcgtggacaatgagcagtccgatcagacggcggacatggtcgctgcgtttgccggcaaggtgaccggccagtggggcaccaccgtggccgaccagtccggcaacgaagagcgcgtggtctatgcgccgcagaccgagaacctgggtggcgcgggcggtttctccgccggcgtggccaaggcgtatgatctgggcgccgcatggttctgggtgatggacgacgatgtggccgtgctgccggacgccattgccaagctgtccaagtggaccgacaagcacgaggtgattcagggatcccgattcgattacgatggcggcccgttctactggcagtacgacttcattgtgccgctgggcatcccgaacccgatcgcgcccgccgcattcggcccggccggataccgagtgatggacacgctgtgcttcgaaggcggcctgttcaaccgccgtgtggtcacggaaatcggtctgccggacccgcgcttcttcatctactgggatgacacgatgtatggctaccgcgccagcaaggtcaccaacccgattgtggtgcccgacgtgattttgcgccgtacgcgcgaaatcggcaactgggatatcgccggcgttctccagctcaactccacgtccgacatgaaccggtaccacatcatgcgcaaccgcggctatatggcccggtacttcatgacctacggcgacttccgtccgctggtgtttggactgggcaccgtgctcaccgcggccaaggaagtcattcgcctggtgatggtggatcgcgagcacctcaagaccggtttggtgcagattgccaagggctggtgggactcgcgcaagctgatgcacgaccccacctggaagcccatgccgtcgcttgagtgacggccatgccccggcccgtccggcgcgtccgcgtgatggtcgcgttagactgggcgcaaccctacgaactgatgaaaacgtatggaaaggaaggtcaacgatgattgaaactgcacaggctttcggtgttgacattggcggttccggcatcaaggccgcacctgtcgatctgaccaagggcgatttcgccgagccgcgattgaagattctcactcccgaggtctccacgcctcaggccgtggccaaaatcgtcaagcagcagctcgaccacttcgaagtgcctgaatccgcacccgttggcatcgccttccccgcgccgatcaagcccggccagaagctcgacttcatggccaacctcgaccagtcttggattggcgtggacgttactgaagtgttctccgaagcctgcggccgcccggtcgtcgtggtgaacgacgccgacgccgccggcctggccgaagtccagttcggtgccgccaagggccaggatggtctggtcatcgccaccacactgggcaccggcatcggcaccgccttgatctacaacggcgtgctcatcccgaacaccgaactcggacacatcatcctgagcgccaagcatctggacgccgagaagtatgcttcctccgcgattcgcgagaacgaggaactgggctacaagaagtgggccaagcgtctgaccaagtactacggccttatggaaaagtacttcaacccggacctgttcaccgtcggcggcggcgtgagccgtcagagcgaaaagttcctgccgtacgtggatatcaagaccccgattgtgcccgccaagctgcgtaaccaggctggcatcgtcggtgccgcctactacgccagtaccaagcagcagtgagctgagttatttctgctggcgcaggagccgtattgaccatatgtaaggccgtccaagtatttcgggcggccttttttaatgagtaattcgttcattaggtcgattatgtgttcattaggtcactcccattccaaacctgaattgcaatgggctcggaatggcggcgtttcaagcatcaacaattgtgaggctcgactagcagtgacctaatgagcgcgaaaatgacctaatgaatgtagctaggccgttattcgatgtggattgaagtcatagtatgtctgacgactccgctgccatgccgcacgattgtcgtagtgctggatgctggtggatatgaggcctcgatatacctggctcggcaggggtggttttatcgtggagggtatgagcgtgcatttctcttctcgtgtggatatttctgcgccgaatcccattgcggcggccgaggcggcagccaaggcaaacggcatcgcactcagcaaactcaacgattccaatccgacccgccacgggttggcacccgaattggtgccgagcgtgtatacggccgacccgcgtggaccgcgtgcggcacgagaatcattggccgcattcctcaatacggcaaacgtggtagacgcaagcagccctcagttggcttcgcccgccgccggcgagggcaggaacgagcgccatgccgctttcaccaatgtgaataccgccatcgagggcgccgacccggacgccctgtacctgctgagctccacgtccgaggcgtattcgtggctgattaagttactttgcgatgccggcgacgcggtgctggcacccaaacccggctatccgctgattgagtcgattgcacggcttgaatgcgtcgatacggtcgaataccagttgcaattcgacggctcctggttcatcgacatcgccgaactcgagcggctactcagcgagcccggtggcgaacgcgtcagagcattggtactcatcaacccgaacaatccgaccggttcgtacgtaaaaccaaccgagcgtgcacgtatcgtgacattgtgccgtgagcacggcatcgcccttatcgccgatgaagtgttcttcgattactctctcgaacctttccccggcgacgcacggctcgcgggggagcgcggcgtgctcaccttcgccctagacggattctccaaaatgctggccgcgccgcacgccaaagtcgggtggattcaggtgtccggacctgccgaggacgttgccgaggcccagcgtcgactggacgtcatcgccgacgattatctgccgatgggcgacatcatcgccgaacggattcccgcattattgaacgccgcgcccgcacagaccagacgggtgggggagcgcgtgcgcaataacctggccaagttgcacgagttgcttgacgccgatcccaacgggctggtcagcgtgctacgggccgaaggcggctggaacgtgctgttacgagtgccttccgtcatcgatgagaacgaactggtgttgcggctgattgacgagcaccaactcaccggacagcccggctacttcttcgacatgacctccaatggatacctggccgtttccctgctgcccgaaccggacgaattcgagcgtggcatccgcgccgtgctcaataccgtcgccgctttgctgcgataggccggtgtttgccggcaccacacctgtactccacgtacaatggcggcatgggattcttgtttagaccgaaagaactgccacacccggcatcgctgacgttcactttggaacaggccgggcatacgtatgatgatgggcacgtgggacttgctcccacggacatcaccatcagcgagcggcgggtggccgtgatcggactgaacggcgcaggcaaatccacattgctgggtctgctggacggttcgttgaaggccaacgccggcacggtgaccattgcgggcggtgaggaacgtcttgacccggctgtgaagaaggacgcgaagcgcatcgataatctggtcggcaaagttcgccgcgaggagattccgaacagtttctaccaagcggcgaatatttccgaggctgtttccgaagcgttgaaaaagcacaaggtgcccgagtcagaacgtcatgcgcgcatcggtaatctgttcgcgcattttgatttggcgcaggtctccaaggccaaggccggcgaattggactccgagaaacggcacctgctggctattgcggccgcgctgagctttgagccgagtgcgattgtggcggatgagccgagcaagggattggatgagattggcaccgcgcatgtggccaaggcgttgttcagctacaacaagcaggtgattttcgccacgcatgacacggatatgatccgccggcccgaatacgccatcgaccgcatactggtgctggacgagcacgcggtcgtgtttgacggagcgccggctgaggctgtggcgttttatgaggatctgattcgccgccgatacgagactagagcatcgtgaaccaagactgaacctgatgccagagcgtcggattgttgtcgatcatcgaatcgctgcgcgactgcacgaagcagctcagtatggctatgcccagcgcccacaatacggccagcaccacgacccagcgcatcagccaacgccacggagtgacgcgggcgatgccatcgcctgaagcggcgtcgttggcccccgccaatgaccggctcggttcgcgcccattgaccagccacagtagccccggtatggacgccagcgagatcagccagccgaaatcggcggaataccgccatcccaaaccgccgacgcggctgtcgaatacgaccagcaccgccgccacggccaagcaagacatcagccatggccgcatgccgtgtgtttccaatctgcgcagcaggggcagcgccaaagccatcaaggtcagtggcgtggccgtgaaaatcgcgccgaccatcacctcgtaataaccccattgcggcatcggggcgggagagcccgccagccacgggaaacgatccatgaagcgcagcggcaggaacaggtaataccagatgttggcgggcatatccgcggacggggtggtataccgggtcatatcggatatggagaactgatacgcattgccgaaattgaacggggaatcgaaccgaaccatgttccacgccatcagaggcgtcacgacgagaatggcgggaatgattaccgccagcggcgcgcgcaacgcctgcaacggcttgatgcggcgtgtgcgcagaccggtgcccagcgcgcgaatctgcggccagaacagggggaacgcaagcaatgcggccaaggtgaacgtcggtcggcatccgaaattcgccgcaatgcacaaggcgcccaaggccagtcgtggcagggagagaggcttggcatcgcccgcctgccatcggtccgatggtctcagcggacggcgggacgtgtccgcgccgagccatagccatagtcccagcgacgtcaacgtcagcgatgcggcgaacggtatctgatagaagttcgtgcgatacagcaaataccccacttgcgcgctcaccaacgatgagaccactactaacgacgcggccgccaccgaagtcttcggcatcacacgatggatgacgcgcagcaccagcaaggagaagaagatgatgaacagcagcacgagaatatactcggcggcggatgtcggcagattatgaccggccagcagacgataggggacgaacagcagcactgcgggcaacacgccaaaataggaataccagtgaccgtcataatacgcgtaatcccagtagagcggactggctccattggcgagtagctgggcacgtgtggctacgtcataggggtgctcggtggcggccagttgttcgggaaccggcaagtcgagccagggccggccggcgaccagcgcatcggccacatgcccatactggtcgaaatcataggtgtaatcgccggaaacgtggaagacgagcgaagacgcgtaccacagttcgtggatgatggatacgccgataagcagggtaggaatcgccagaagccccgcgaaagcaagtcgttgccgagtgctggacgggtcaagcgtgatacgccacaggcgcgatcccggcctccagacggcaatcatcagcaacaccaaggccatggcgagcacgcgcatccaattgatgacgaacggtacgcgcacgttggcgcgggcgtcggtgaccggtacgatcgcgccgcgctcttcctgaatccaaatacgcacgatgccggcacccggcgccttgacataatggctgcgaatagcgtcgggattcatcgactgggccttgccggtgatgccatcgacatccgcgcgcacatgaatggtcgccagcggtttgaagacttccttatcgtcgttcgctttggattcggcctcggcctgctcgcgggccttatcgatgaccttgctgctctcggtatcgatgcgtaggtaatccgacgtgccgtccgcggtcagttcaagataggccttggtcggatcggtgacggtcaacatgccatcattccggcgcgtgagacccgaacccagcgtgttatgcacggcgttcgtatccgtgctcgctccgagcgtacgccagaacggcaggttgaacacgatgcactccatggcggcgatggcggcgacggcggccagcaaggcgatcagcaggcgcaccaaacgcagccggtgccgggtatccgggcggctgggcaggtgccgttcatgattcgacggcatcggacggtctgcgcgagtgtggtctatggaatgcacgcatttattctataggctttattcgggcttgatgtcgggcaaacaagagacaatgtgaatcatgccaaaacgtacatcggaccatgggaagcacaaccgcacgccactgctgggcgggctgaaggattcgatgaacgcgctcgcggccgatctgggactgtccaagccgaagaagcacgatacgaatccgttcggcgatgccttgcgggagaccagtgagcgtaaaggcggcattatcgacgaactgactcgccatgcagtggcgctgagtcctgtaatcaagcgacgcaccttccccgaattggagaacgtgccggaagggctggtgcttggatgggcgcagctgccctccaccagaggccgtggcttttcgcttggcattttccccgaccgcgatcattttgcgcaggtggcgttcgccgatacgcatggccgcgtattcgtgggcaccgaccccaacatggacgtgcaggatatgcaggcgcgattcatgttcggcaaggaaaaggaagtgactctgccggacggtgagcggctgggcgaaagcgacgagccgcgttcacgttccggtttctcccgtgcaggccatggcctgggaagtgcgctgcatcatgggcgtggtttggggcgtggccttggtcatggtgctgacggcgtgaaggccattaccggtggcgtggtggggcgtgacgacaccggacgcatgacgtggctcgcctcatggctcaaggccggcaaccggtacacgcttgagcagatgcgtgccaatctgccgcctgtgatgcgtcatgatttggaataccgcgatgccattaccatcgcgttcttcgccacgtatatgttgccgcagatcaatggtctgctcatcggattcggttccggcaatatcttccgccgcctcaaccgtgaggcgccaatcggtgcgattcgccgttcggtgcgtgacactttggcggcacgagcccacggcatgcgggcctccggtctggaggatcacttcgccgatctgatgcgcgaagccggcgccctcgacaccacgccgggactggaagcggtgcatggcgccgaaccgttgcacctgtacacctcgacgtattcgagcggctatttctttacgtgggataagtccttggcattcgggcaggcgctgaaatccttgaagatcgaaggcaacctcaaccgattcgctgcggtgagcgcttggctggagcgcaacgcttccttggggcgcaaccctacggaagatacggtgacccgtgccgaggccgcgcaaatcgacatgaaactcattgagaaccctgcgattatggcgcttgacccgtatgatggcgagcaggagcgtcgggccgtgctgagcctggtcgatatcgccgcacgcacggctgggcagattcgcagtgaattccctgatcctcgagatgtgctgacccagcagaacgtgccggattcgggtgtgacgaatgctgcgggcgctgaaagtactgagagtgttgagggcgctgtagagcggaccaataagagcgacaccaacactcaagccgctcggccttcgtattcgccggcgaggagcgacgaatgggtgtatcgtcagaccctctcctcactgttgcgccggttacggttgccgtatcggtttgatgtggagttccggtcgcgcttggattcgggtgaagtggccattggcttcaccactgccggcacctcgatgatgcccgatagccggtatgacaccactcgccgtacgtggcgtgcgctgagcagcgccgaacgcgcgtcgatgagcgccgcctacaacctgcgtgtcggcctgatgatggcagcgctgagtttcggcaccagcgaatccgtgcgccaggtgtcgttgcacatcgattccattggtcttgaagaggcgattgccgaacaggattccgccatcgaggcgatgatgagcgaggccctaagcgccttcgaacatctgcgcagtggcgatttggggcgtgtgggttccaaagccgaccccaaagatggtgatttccatggcgacccgacccgccccatcacccatgaggagacgttcgggcaggcggcgtccggtgacgaacgcggcacggccgggggaataggcaacggtaccggaccgtctgcggatgctacggatcaggccgcggccgaatccgctgacgccgatggcgccgcgtccatcgattcgcagttcgaagacctgatgaagggcgtcgatatcgacgaaatggcgttcggcatgccggacgataccggcgcaggcgacgacctgggcggtatcggcggcgagggcgtcggcactgacgatgctgatggggccgccggcatggacgatgatccgatgagcgtgctgcgccgcaatcccaccgtgcgcaatatggtcaccgtcaccttcacccgtgatgccttcctcaagcgactggacaccgatgggcttgacaatcccgaggaaacctaccgcatgttcggtgccgtgatggacgtggacggcgaaggcggtctgaaacccatcagcgccgacttcgacttggcggacagccggttctctcccaccggatcccaggaggagcccgaactggccgaccgtcaattcagcccggcgaccgctcacgtgctgggcgcacagaatagtgccggactggctatccagcgagtggacttactgcagcatggcgtcaacgaattccacgatatcgccaggaacacgtcgctcggctccgtggaaaaggcccagcgagccatgcagatcatcgaatcgatatgcgatcccgaactgaccggtttggcctctcaggtcaccagtgcgttgatcgatggcaaggacaccccggacttcacgttcacgcttgccgacgatcttgacaaggagcgtctgcgcgcccgagacatgctgttctcgggccaagccgatcaggccatcgaagcggccgaagcggctgtggcccatttggatcaggtgtatgcggcaggccatggcgtacctcgatacttcaactcctatgccgagcgcgtggtctacaaccggctgttcgccacattggacgagcgtacggtgctcatcccggacaatctgttctacgcacacatggagctggctgacgtgttgagccagatcaagggtgccgaggcggccatcccgcacctcaaccgtatggtggcgtacgcgcccgcctacccactctcacatctgaagcttgccatccaactggcccgcaatgaggattgggattcggcacgcgccgcctgcctgaatgctctgcgcgtggccttggaccgcgacgatgccgcgttcgcctactaccggttcgcgtacgccgaatggatgcttgaccggttcgacacagccgccgcagcctacattatgagcgatcacatcgctcccggggccattggctcgctggagagcgaactgcaggaactggtttcccgtgcggactcgcagtgcatgccggtgcctgaatcggtggagacggccgcccatgtgcttgccacgcatgatctgccggtctggccgcatatcgaagtggccgacatcgtgcgtgacgccgcccgcgtgtgcgtggatgagggcatgttcgtgccggcccgcacgctctcggtggccgtggcccgcatgaatgacggtgaaggcgacaacatcgacatcatccaagcccagttcctgcgctcgctatccgcgtagccgcctgaggggagttgacggtatagccggccgaggggagccgagcccgctaggatagacaaccatgagcacgaatgaacaactggcatgggatttcgacgatggggatgtggccgaggtccggcctgataccggtattgcacgttttgcccctggctccgaacaatggatagccgcactgcagcccactgacgacgacgcgatacgcctcgaccgtttcgacgtgaacacgatgaccgctgaggccgccgcccgcctgtgggctcgcgtggccgcatgggtggaatccgatcagatcgcctactacatcgacgactcacccgtcagctccgacgccgcctacgacgcgcgcatgcgttgcctcgaacgactcgaagcggcgttcccctcattggacaatccacagtcgcccacccatcgcgtcggcggctccttctccaacgacttcgcctccgtgcgccaccccagccgcatgatgagccttgatgacgtcttctccatcgaagagctcaaggattggtacgattcggtgattcgcgacctcgattggcccgaatccaagcccctgcccatgagctgcgaggtcaaaatcgacggcctcgccctgaacctcatctatcgcaacggcgtgcttgaacagggcttgacgcgcggcgacggcgttaccggcgaagacatcaccctgaatgtgcgaaccatcggctccattcccgccaacctcggcggccccaaggaagacgttccggacttcgtggaaatccgaggcgaagtgttcatgcgctgggatgacttccacaccctgaacaacgagcaggaggacgccggacgagcgcccttcgccaacccgcgcaacgccgccgccggctcgctgcgtcaaaaagaccctcgcatcaccgccacccgtcgcctgagcttctatgcgcatggtctggggcagctcacctggggggcggaccatccgcgcggcacccatgatgtggtcgccgaccagtcgcaggcctacgatctatacaccaggtggggcgtgccggtctccccgcacaatcgtgcggtgacctcattccaggagatcctggacatgatcgagtactacggcgagcatcgcggcgacatcgagcacgcgctcgacggcattgtcgtcaaggtcgatgacctgggcctgcagcgcgccctcggtgccacctcgcgcgcgccgcgctgggccatcgcctacaaatacccgcccgaagaggtcaacaccgaactgctcaacatcaccgtgcaggtggggcgtaccggccgtgtgacgccggtcgccgtgctcaaacctgtctacgtggccggctccaccgtggctcgtaccacgctgcacaacggatttgaagtcaaacgcaagggcatcctgatcggcgacaccgtggtggtgcgcaaggccggcgatgtgattcccgaactggtcggcccggtgcttgaacggcgcaaagggcgtgagggccagctgcgcgaattcgtcatgcccgagttctgcccttcatgcggcgcgaaactggcacccgccaaggagggtgacaaggacatccgctgcccgaatgtggaaagctgcccggcccagttgaccgagcgcgtgatttcgctggcctcacgcaaggcgttcgacatcgagcatctgggtgaacagtcggccatcgctctgaccaacccggaggagaaccggcctgattcggtggcgacctacgcgccgaacatcaccgaggttctggtcgcccccggcgaagagcctgacccgtacgagccggtggaggggctggaattgccggccgcgcagaagccggtgttgtccaacgaatccgggttgttcgacctgacctccgccgatctgcgcgacgtgcgcgtgtggcgtgaggccgcaatcgtcgaagtgcatgagacggtcgatgcgaacggtaagaagaaaaaggtgcgtaagcgtgtcggcggctctggcctgtggcatcaggtgcctgccttctggaccgcgcccacgccggccaagaagctcacggccaagcagttggccgaacgcgcgcaagaagaggccgcagtcgaatctgccggaacacagggaggtgccgccagcgagacgaccggcgcacctaccggggctgaggctccacttggtactatgccgggctttgccgcagcctcctatcccgagtatgacgtgccggccgatgcggtcatcgtgcgcgtggaccacaagaccacgcgcaccggcgtcacggatgtgccggtgatcattcggcccggcgaaaacacgcgcaagatgttcgacgaaatggacaaggcccgtcacgccgacctgtggcgtgtgctggtcgcgttgtcgattcgccggctcggtccgcctaccgcacgcctgatcgcctcggcgatgggcacgctggcagccatcgaaaacgccacgattgaagatctgacggccatcgacggggtgggcccggaaatcgccgaatcggtggtgaactggttcgccgccgcccgcgagcccggcgactggcgcggcgcgacttggcgtgcttggcaggccgccggcgtgggcgtcgatgaggccgagaccagttcgctgccgcagacgctggccggcaaaaccgtggtggtcaccggttctctggagggctattcgcgcgactccgccaaagaggcgattatcgagcgcggcggcaaggcggccggttcggtgagcaagaagaccgattacgtggtgatcggcgcaaacgccggctccaaggccatcaaggccgaggaactcggcatccccatgctgggcgaagcccaattcgcccagctcctagccaccggtagcatcgactgacttggctcccctctctgaggggagctgtcgccttgcgcgactgagggaagtagtcgtccgcaaaacggatgcgggaatgggagaggtacatccgcagcgcgtgcgcagtgtgacttactccactccctctggcatgccgccgcatcacacgctagggtagaacaggccctaaaggaggatacggatttatgagcgacgcacgtcagatcgaagccgacatctacgaacgcctgagcaaggtcatcgaccccgagctcggtcgttcggtcaccgacctcggcatgattgccgccatcgaagccgcgcccgcatcgtcggacgccggcacttacgacgtcaccgtgcacgttgagctgacggttcccggatgcccactgagcgagaccatcaccaaccagatcaacggcgcggtcagctcctatccgggcgtacagctgctgcctcatatcgaagtcggttcaatgagtcgtgacaagctggccgatctggtcgccgacctcaaggccgaacgcaagcggaaccccttcagcaagccgggcgtcaagacccgcatcttcgccatcgcctcgggcaagggcggcgtcggcaagtcttcggttaccgcgaacctggccgccacgtttgcggccctcggcttcgacacggccgccatcgacgcggacatctatggcttctcactgccgcgcctgttcggcgtgcacacgcagcctaccaatctgaacggtatgcttatgccggtcaccgcgtggggtgtgaaactgatctccatcggcatgttcgccggtgccgaccgggcgattctgtggcgcgggccgcgactgcagcgctccttggaacagttcctgtctgacgtatggtggggcgagccggacgtcctcttgctcgacttggctcccggcaccggcgacatggcgatttccgtggcccaggcgctgcccaacgccgaactcgtggtggtcaccaccccgcagccctctgcctccgacatcgccgtgcgctccggactcgtggccctgcaggtgccgatgaaggtgcgtggcgtggtggagaacatgagctactacgagcacaagggcgagaagctggagattttcggtgccggcggcggtcagcgcgtgtctgaacagttaagcgcggcgcttggctatgacgtgccgctgatggcccagctgccgctggaacccgaagtgcgcgagatcggcgaagcaggccgtcccgcggtgctggatgtcgatggcgccttgcgcacggatggcattggccagaccttccgagggttggctgaacggctgttggcagtgtgagcctgcgcagcctcacacttttgtaggcggcgctggcgtttaagtccggctcgctgctggtgggcgaatcgcttgaccacagcacccgcgacctggtggtcgaggcagtggagcgcactgccggcgtggataggctgcattaacctgcaggccattcacatggacgaggacgccgtgccgcgctgccttggtatgaatgggggatctacgtcgagcccgatgtctggcgggcacctcgcggtaaatagcggcatagcgcattatcggtgcgatgctaagaggtaatggcccatgagcggttccaatcggcgagattgcgttgccgggacaccacgacatgggccatctcgataaaacgatgccgcgtgtcggctgttctcaggtcatccgcagtgacgagaatggcgatccagccgagcagttgcaatgcgtttcgctttgccgcgtcaattcgcatttgtgccggatcggcgtgataggctccctgatattcgaacgcgacgcggcagtccggatatgccatatccaatatgacgtatgagttgccgatattcacgcgatagttggcggtggggcatcccaagcccgaatccttcagcatcccaaacagcgtgttttccggcggagaatccgtgttctctgtcatgtagggcagtgcctcgtggcatttgttacgacctatgaaccgcggactgatttccaagtaagtatcgaaatccttgcgagtggccattctgcgccgtttatcgcggctcatcaaagaggctccaatggccgcaagttcctccaatgtggagtattgggccatctgagcccacatcatgaccggcgaggcaatccagaaatgttcgtagtcctttttgcggatatccagttttcccttaaacacatggaagaccacgcctttgattcgtctgcgtttgttggcactggaaacacaggcgtgcacggcatcaacagatagcgtgcaatgtcgggggatgggcgcgccgtagtagttggccgcattgatgtatcccaccagcaatggaccttttgaacggcgcgcagcatcattgcaacgttcacgttctgctcggcgtcggccgacaatatcctcatgcataaaagagctcatgatgcgaccgtaaagctgatttggacttgaatgcaagccaggcagggcaatgtggttccagcttatggagttatccacattgtctatttgcgcagagaacggttctcagtagtatctgtgcgctcaaatgaacaagaacataacaatctcacatcatcgcaaatggcgacatggcagtgattagggcatattccatgtgcgcttcgggcgtagagaagtgcgcacagatattattgagaaccgttctctgcgcgcctactctccggtggagcctctggccacgacctcggtgggcaggaacaccgtgcgctggaacggtcggccctcgatctggtcaagcactagggtggccaagctgacgccgaatgcgtccattggctggcgcacggtggtcagctgcggatgcagggctgtggcgtcggcgctgtcgtcgaagccggcaatggcaatatcgtcgggcacacgcacgccgcggtcgagcagataattcatggctccagcggcgatgcaatcactgccgcatatcagcgcgtcgatatgatgctcggcgaggagctcgggcacgctggcatcggcgccggcaagtcggctacccgacggctcagccagcgagtccagcagccgcacgacggcgttgcggccatcgggccgggtccagccgtcggaccgaatgaccagtgccgggtcgaaatcgccggccatcgcatcctggaatccgagcagtcgttcgtcggaacatggcaagtacggcggtccgatgatataggcgattcgccgatacccgcgccccaacatatgctcggtgagcttgcgtgaagcgagtcgattgtcgatatcgacggtggggaaggggatggcgctgccatagccgacgccggaaaaggcgaccggcacgctgatattggcgaatctctgaaatagcgggtcatctttatggaacgtgttgagaatccatccgtcggcgaatccgctggaggcgagtctggcgatgcgtgcgccggccgcaggggagtcggagatcagcgtgatgagttgataatcggcattgccgagcgtctggttggcgttgagcaggatggtgttgatattggggtcggcgattagcgaatccggctgcccgtgcaccacgaacgccacggtttgcgtgcgttggcgtaccaatgatcgggcggcgttgttcggcgtgtagttcacctgcttgacggcggcggcgatgcgctcggctgccttggccgagacatgcggattgccgttgagataacgggagacggtggcgtaggagacgccggatgccgcggcgacgtccatgatagtggccggcttacggggtatggccatgcccgtctccttcctgtcctagggccattcacagtgattgtaccgcgcgattttcctgatgattccgcatggcccatgtccggtgcctgtggattgccgtgccggcgtatgaaagtcggtaaacattctctgccgtaagggtgtacgaagtaaatagtaaaagagatttaccgatattaagtgaagtacgacacgcacatgatatttgtaaacctttacgtgagtgttatactccttctcgtaaacgtttacaagaaatcaccagtcaatggagacggccagatcaagcgagccgcaacggttcacaactggacgggaaggaacatcatgaagcagcagcacaacgtacgccccgccatccgcagggtgctccaggccacggccatcgtcacggcagcggcccttaccctcgccggatgctcgatgggcgcaccatcctcggacaccggttcgagcgatggcaagctcaccgtctgggtcatgcagggcgatcaaagcgaggccaccatcaaggccatcaacgaccagttcaccaaagagaccggcgtcgaggtcaacatccagaaccagcagtggaaggacatcagcaccaaaatcaccacggctctgtccaccagcaccccccccgacgtgctcgacctcggcaatacgcaggtcgccggcttcgcggccagcggcggcctcatggacctgaccgaccacgctgacgagttgcgccagggcgtcacctggctctccggtctggaagagcctgccaccgtggacggcaagctgtacggcattccggccctcggtgccgcccgcgcagtggtctacaacaagaagacctgggccgcggccggcatcaacgagccgccgaccacctacgccgagcttgaagccgacctgcagattctcaaggacgcgcaccaaggcgaggacttcaccccgttctatgtgccgggtgccgattggaagaccgccatccagtgggtgtgggacgccggtggcgactacgccgtgcagaaggacggcaaatgggtcagctccctgtccaccaaggaatcggtgtccggccttgagcagtggcgtgaattccagcacaagtggtcatccgaagcctcccgcccgctcgacaccgatagccccgacaccagccagctcatggccgaaggcaagatcggcgccgtaatcggcaacagcgcctccatccgcgtgattcaggaatacaacaaagacatcaccgccgacgaactcggctccttcccgatgcccggcctgagcggccagaaccagccgtcgatgatggccggctccgtgtggggcgtggcccagaagagctccaagcaggatctggccctgaagtggatcaagatcgcctccagccctgacatccagaacgactacgtgttcgccaaggacggctacctgcccaacaacgtcgaaggactggacaaggccatggcctccgacgacttcccgaccgccctgaccggcttcttcgaggccgccaagcgcaccaaggccacgcccgcctccccgcagtggaccaccatcgaaagcgacggctcgctgaccctgttcaaggacatcgccaccgacaccagcaaggccgaggcctccgccaagaagttcgacgaacacgccaacgagctgtatgccaagtgatgggttggaccatgacaagctcaacgcaactcgcgcacggcgaggccccggcctcacggccggctaagaaacgcggcaatcgcgccccggcgtttctgctgacgcccgccggcatcgtcatcatcgcactggtggtcatcccgctgggattcatgatcttcacgtccttcacggatttcagccagcgcacgctgttcaccggcgaattcgacttcgtcggcctcaagcaataccaatccgtactcaccgacccggccttctatgcggccctgctacgcaccttcggcttcaccgcagccctcgtggccggcagcgtgctggccggcatgggagtcgcccagctgatgaccaaactcggcggtgtgatgcgctacctggtcatcttcgtgctcatcttcgcgtgggccatgccgaacgtcgcatcctcggtggtctggaagtggctgttccagcccggttacggcgtcatcaactggctgctcacccagctgcacgtcttcggcgacatgaccaacacctcctggatcgacaacacctggctcgcatttctggagatctggctgctcgtggtctggcaggccgtgccatacatcgccatcacgctgtacgcggccaccacccaggtcgaccagtcctgcatcgaggccgcccagctggatggctgcagcaagctgcgctgctactggcagatcgtcgtgccgctgatctccccgagcatcatggtcatcaccatgctctcgattatctgggacttcaacgtgttcaaccagatctggctcatctcgcagggcggcccacaggacacgaccgccaccatcggcatcttcacctataagaaggcgttcgtcagcttcgaaatcggcaccggttcggccgcctccgtgctcgtgaccatcgtgctgctcgcgctgacctccgtgtacatccgttacctgctcaagtcaggagaggacctatgagtacgtcaatgagtgcaagtcctgcacaggccgtatcgcaggccgcagcgcagtccgcatcgccccgccgccgaaccaaccccggcaagatcgcgcgccgcgccggcaccactatcctcgccctgctgttctgcgtcgtatggttcttcccggtctactggatgattatcaccgccgtaaagcctcgcgatgagatcatgaccacgacccccgtgttctggcccacgcacctctcgttcgacaacttcatcgttgccgtgacgcagacctcgttcctgaccaacctcaagaacagcgtggtcgtgaccgccatctcgatcgtcctgtcgatcatcgtcgcgttcttcgcgtgcgcggccctgaccctgtaccgcttccgcggccgcaagccgatcatggtgttcgtactggccatccagatgacctccggcggcatcatcccgcagttcatcatctacaaccagctcgggctgctcaacaaatacagcggtctgatcttggcgtacatcgccatggtgctgccgttcgcgatctggaacatgcgtgggttcttcctgaacatcccgaaggacatcttcgaatccgcggccgtggaaggcgcgaacgactggcagatcctgtggaagatcaccttcccgctggccgcgcccggcatcgtctcgacctcggtgttcgcgttcatcaacgcctggaacgactacatgatcgcctatacgttcatgaaggaccagtcgaagtacacgctgccggtatggctgtcgtccttctcgacacccaccatgggcaccgatttcggcgggcagatggccgcttcggtgatcttctcgctgccggtggtggtgttcttcatgctcatccagcgtaacatcatgaagggcgtgacgaccggtgccgtgaaatagcgtatgccgccgtacctcaccaacgattcgtccgctgatggcggcgcgaccacgtgtcgcctgccattagcggacgaacgataataaaaacagtatgaaaggaacagctgtgcccacattcgaatatacagtcgatgccgcaacgctgtgtctcaccctgattcccgctccggtgacattggaatacacgcatggcacggctatgatcgggtccctggtgacgatcgagaaacgaattcccgaatatgccgccaccgaaggtgccgatgagacttgggaaacgctgccgattgagcagctgtccagcgagctcgagcgttactgcggcgtcaccgtccgtacgcgccgtgtccgtgcagccacaggtgaagacgacgccagcgccaatgccgccgaagatgcgcgagatgcgcgtgcgggtgcgccggcagcgatgaacggcaccgtcatatccctgggcctggattcacgattggcgcatgacgaatacacgctggatgtgttcgcctcagataccatcgccgtgcgtggcggcggcgaaagcgggctgcggtacggtctgcagacgctgcggcagatcatcgggcagacctcgcgtgccattccctgcctgcatatccaagacaagcccgcgttcgcggtgcgcgcctacagtctcgacgtgacacgcggacgagtgccgacgatggagttcctcacctggttcgtcgaccagctggccttatataaatacaatcagttccagctgtatgtcgagcatgccttcgcgttcgtcgagctcagcgaggcgtggcgtggcaccgatccactcacggccgccgacatcacgtatctggacgagtactgcgcgcgtcgcggcatcgagttgttgccgtcgttggccacgttcgggcacatgtacatgaatctgcgcacccgtgagcatcgcgggctgggtgagttccccgaagacgccgaccgcccgttcagcttcatcgaacgcatggagcatcacacgctgaacgccgccgatcccaaggcccatgatttcgcctcgcgcctgattgaggaatacgcgccgctgttccgttcgaagtccttcaatatcggcggcgatgagacgttcgacttgggacgtggcaggtccgcgcaggacgcgccggaagccggccgcgatgaactgtatgccggtttcgtcagggatttgtgcgaaacgctcgcccgccatggtcggcagccgatgttgtgggcggacatcgcgctcgaaagcccgcgcacgatggatctgctgcccggcgacatcacgatgctcaactggatgtacgagccgcagatcgacgagagcaacatccagaccatcgccgcgcagggccgtcgccagttcgtgtgccccgcggtgcgggcttggagccggttcttccccgattatgcgggtgcctggctgaacacgtatcacatggcattggcgggtgtcaagtatggcgcggaaggcatggtggtcaccgattggggcgattacggccacgtcaacgatccgcgtctgagcgtgccgggcctgtgttatggcgctcagaatgcgtggaatccgattgagattgatgcgcatgagatgaaccgtcggatctccgttctggtgtatggcgacgagtccggtcgcatcatggattgcctcgtccgcatcgactccgatggggtgtcattcccctgggaccttgccgtgcaggtgctggagctggaatacggttccggcaccggcatgctgaatacggatgtggcatcgtatgtggaacggtcgtgcgggggagagctcgtgtttgaccgtgcgctgggatgcgccgatgcgcgccgccggctgctcctgcggaaccatgcccgactcgaacgacgccgggattgcgaccgggcgttgatcgattgcggcagtgcggttgttgcggtgctcgatggctcggcacgaggaggattgaacccggaactgctgtgggtgatgctggatgggcagcggttgttcaatagactgggcgaggaactgctggtactggctggcggcgaggacgcctgtgacaccaaggatgtgaccggccgtgcgctggatgcctcgcgccgcgcccgtcttgccgccgatctggagttgtggttcgaacggtaccgtgtgcagtggctgtccatcggccgctacgccgaattggcgcgtatcgcccatgtggtgtggtcgtttgcggacatattgcgtaggggagcgctatagggagctcacagaaattcggtcctgctgagaacaaggtgaggcttacgcgccgtcaaacgcacatggtgatttcaaaaaaatggcgaattgctgccattcttgcacctgtgcgtttgatgagaaatgtgcgtatgcctcacattttttgcataaagcatgaaaatgtggcccgttgtctatttgaaagtgcgacaccctttagattggagattgtccagataaccagtgaaagggtgtcgcgccttgggccaagtgtattcgcacctgtcggaagaggaacggcggatcatccggatagagatcggcaacgggacgagcatacggcggatcgccggcctgatcggcagacacgcctccacggtcagccgcggaatcaaacgcaacacatggttcccgtccaacgagaacgaatcctaccggccgtaccggccggagcgtctcaagacggggccgtggaccggccggtgccacatcgccggccccgcgcacaggaaggccggacgccgccgcgccaggcccggcgtcacgcacgacaacggcgccgagttcgcccgccacgcggaactgcgcgaacggctcggcatggccgcctacttcaccgccccgtacccgtcgtgccggcgcggcggcaacgagaaccgcaacggcgcgatccgccgctacctgcccaagcgcacgcgcgtcgacccgtccatggccgacgagatacaggccatcgtggacgagaccgacaaccgtcccatgcgcgtgctcggctaccgcaccccggccgaggcattcgccgacgaactgctatcattaaccgaacaacaaggatgttgcacttctaaatagacaacgggcttttgtgctgatatagggatttgtgctagtcgaatccgcgaaatgttcagtaaatgttcacgtcgcgaaatcggcatagaatgcgagcaaacgcataacggcacggtgctgttcctgcgtacgccaacgccaggcgaaccgccggaaagaaggggtctccatgattgagacagcggacgatatcaagacgattgcgaacgtcggcacgggaacaatgggccatgcgatcacgttgcagttcgcgctggccggatatccggtgcatctggtcggccgcagcgaggcctcgctggagaaggcgatgaaggcgatccgttctgatgccgaggacttcgccgaagccggactgctcaaggccggcgacaccgtggacacggtgctggcccgcatcaccggttacgccgactatgcgagcggcgtggcggacgtggacttcgtcatcgaatccgtggccgagaaccttgacatcaagaagtccgtctgggccgaagtggagcacgccgcccccaaggacgcgattctgtccacgaacacctccggcctgagccccaccgcgctgcagtcggtgatggggcaccccgagcgcttcgtggtggcgcacttctggaaccccgcgcagttgatgccgctggtcgaagtggtgccgggtgaaaagaccgatccgaaggtggtggacatcaccttcgacctcatggccaagatcggcaagaagccggcaaagatcaagaaggaatcgctgggctttgtgggcaaccgcctgcagctggccgtgttgcgcgaggcgttctacatcgtccagcagggcatagcggacgcggccaccgtggacgacgtgatgaagtacagcctcggccgccgctggaacctggtcggcccgatcgccagcatcgacctcggcggactcgacgtgttctacaacatcagcacctacctgttcgacgacatggacaacggcaccggcccgagcccgctgctcgccgaaaaggtcgaggaaggcaacctcggtgccaagaccggtcagggcttcttctcttggcagggcgaggacggcaagcgcatcatcgaaacccgcaacaaggccctgctgcgtgcgctgaaggacgatgccgcggaagcgtaaagcgcgagcgacgaattctcgcgtaacgtgtgctacgatggaaggctcccttcggggagccttcgttgtgcttgcgttgttcttcggtccaacttttcgacatgcgtatacgttgttgatagcgacaattgcggaaaacgcttacagtatgatgtgcacacggacaacaagccgatgattgcaaggagcggtgacgacgatgacatccacagaacacaatacgcgagccgacatgttggcccacatgggtagccttcagcaggccgcctacgtgcgcccgatcgagtaccaggagggccgtgcccacggcctcaaggccatcgaggtgaagaacggcccgctacgcttcgtatccatggctgaccgcgccctcgacgtctgccagttcgaataccgcggcgagaacctcaccttcctgtccaagccgggcctgaacggccgcaaccagttcgacaccaacgggctggaggcgcagcgctccatcatgggcggcctgttcttcacctgcggcttcgagaacatctgcgcgccgtacgtcacgcctgagggcggcaagtacccggccggcagcttcccgatgcacggccgcatccgcaccacgccggccgaacatgtgagctccgacgcccactggaccgccgaaggcgactacgtgctcgaggtctccggcgaaatgcgcgaggccgaactgttcggcgagaatctggtgatgcgccgcaagatcaccagcgtgtacggccagccgtcgatcacggtcgaggatgaggtgaccaacgaatccttccgcgacgagccgctgatgtggatgtaccactgcaacttcggctggccgttgctcgccgaaggcgccgaagtcgtgatccccagccgcaaggccaccccgcgtgacgagaccaccgcagccgacaccacgccgtggaacgaaatccaagcacccgaggcgaaccgccccgaaagcgtgtacctgcacgagctcgccgccgacgagaacggccgcagcttcgccgccgtggtcaaccgcaagctcggacttggagtcgtcatcgacttcgacgccagcctcttcccatacttcatggaatggaagtcgatgggtgcgggcgactacgtggtcggcctcgaaccctcgaactccagcgtccacggccgcggctggcacgagcagcgcggcgacctgcacaccatcgccccgcagaccagcgaacgtaagtccctgaccttcaccgtcatcgaaggcgaggccgcgattgacgggctcatcgcccgccgcgacgccctgcttggctgaattgtgagataatatcggccgatatgtgaacggctgattagcgtggggagcatggttacccgggattcggaacagtatctgcgattcaaacgggagcacacgctgccctcgcatgaggcgattatggactggtatcgcggcaccggcatgcgtccgtatctgcaggcgcttgacgacgccggccgcaagaagttcgaggccgaagtgttctcccaagtccgcgaggaataccccacacagtcggacggcagcatcatcttccccttcccgcgtttcttcttcctcgcgactcggtagaagctcgccggattcgtgtactgggcggcgcgacctgtttcccgcgccgccagctgtgggttgacctcgctactgggcttgcggtgatgccgctggctgctgcgctgcttccgattgcgatggcatttgcatatgcggtgcgatgctggggagtgtgccgtcatgcatgcactgcttcaatatgaggtctcgctgggcgatgaggtcgtcttcgatctggtcacgcacgtcgcgcacggacgagaaatacaggtagaacgtggcgtgattgtagccggcgagttcggtgatctgacgcaccgagatcttctcgatcggcttggtttcatacagcttccagaacgcctccttaaggcgattgaccgtctgctgcgtaagttgcgggttcttcttgattgcgattcgcggtatggtgatttcgcataagacgcacaaccccatcgattcgtcggtcaaattcgtgaccttctcgatgcgatgctgtcgctggtggtcacgcaggacgtgctgttggaatcccagggaaccgcgcacgcggcgcaatcctcgggactgttcggcatcgggctcggcgtggtggccgtgatcatcggcctgtggatgttgctgagacgtaagtggacggcaacggaataggaatagtgacagcggaatagcgcgcgtgatattggtacgcgacgtatcgtaaaagcggctacaatgtttacggcaaaagtctttgcacgagaaggaagacatgactgagcggcgtcgagcacggatgaggattcgtcgtcaacgaatttacgttgtacggcgcattgtggttgcggtatgcgcattgttgtgctgcgttcttgccgtcttctcgacgattgacgcccaacgggtgtggccccgcggtgagtcggtcgcacaggggcaggcagaggttcaggggcaggcgcagaaggtgagtcaatccgcgcaacagtcggcatcgcgagtgtctgcatcggcctcatccttgagccgccagcaggtaccggtctttaaccaggcgattcaggagcagcgtgacaaggaagcgcaacgtgcgcgatggacgaatcccaccggcaagcagcctgatttgtcgcaatactccgatctcagcgtgaaagtcagtatcgccaagcaggaagtgtatgtgcaatccggcggtgagaccatctacacgatgatcgccagcaccgggctcaacgatacgaccccgcgcggcaactatgttatcgggatgagaggcgatcacttctacaatcccgcagaaggcatgggtgctgattattgggtgcgattcaacggcccgttcctcttccactcggtgccgaccggggcgaactccggcgagtatatggaagaggaaggcaacaagctcggtcagccggcctcacatggttgcgtgcgactcactgtggccgatgccgaatggttctacaaccaaattccggaaggcacgccggtcaccatcgcctgaggcttggcctgagatcgatactgaggctatcgtgctttaggcgtctgatattggtcgtcggtagtgaagcaggtgcgatagaccatggccatgatcagaccgtcggccagcaaggtcagcgcggcgatggcaccgaagaccacgaactggtatttggcggcgttcagcggatctccgccggctatcacctggcccgccatcatgcccgggatggtcacgatgccgctggaggccagcgaagcggtggtgggcagcagtcccagccgaatcgacgagatgatggatgggcgggcggactcccatgccgtcgcccccaaggccagcatcatatccacctcgtcgcggcgttcctccatgctttcatagaatcggctcagcccgacagcgagcgcggaaacggtgttgcccagcagcatgccggtcaggggcaccaccagctggggcgcataccatgggtgtgggcgcacgatgagttcggtgaccaacgccagcatgagcagcatcgtgatgaccaggctcaggaagatcggtccggcaagacctttggggatgccgcgcgcgcgggatatcacgatctgcaccgccgcgaccagcatgaccgtcatcagagcgaacaccatccacacgctgttcgaacgaatcacgtagctgatgatgaatcccatggcgcacagctgcacgagggcgcggcatgccgaccacatcagggtcctgccgatgcccatgtgcatgagttcgctgacgatggccgccacggccaccatgcccaacgccagaacaagaccccaggtgtcgatgtcgtaggcgccgttcatgggcgcacctccttatcccgcgtcagatcggtgagccgtcccgcatcgagcatcagcgtgcgggtggcgcgtccgtccggcggacggtgtcggatgcggatgatcgccatgccgtgtgcggccgcgtccgccatgatcgcggccactttggatgcgttgtcgtcgtcgagtccggcgtccgcctcatcggccagcagcaccttcgggtcggtgagcagcgtgcgggccaacgccacgcgtgccgcctgaccgcccgacaggtcatgtggcgcgcgcgccaggtcgatgtcctcgcatcccatcgcgtccagggtcgtgcggatacgttcgtcgggcagcaaccgtgcggccctgccccccttgcctcgaatcgcgagcgtccagggcagccggatcgcctcggccacgtccttgccggtcagtatcggtttttgcggcaggtaggagacgtcccgccgccactgctgtgcgctgaattcgtcactgcccacgccgtcgaggacgaacgtgccgtgcgcgtgcgggttgagtcgggcgcatgcggtcagcagactcgatttgccggagccggacgggcccaccaggtcgatgatgtcgccgcgttccatgctgaaggacaggttgtcgaacaccgtgcgttcgtcgtccgccggcgatcgcgcggggacgacgcaggacacggatatggcttcgaagaaggatcgcatattcatccagtctagtcgggggtcacgtgggaaaccccagcgcccggattcaatttgtaagtgcaacgctcgtgcagagcaaggcaacggtcatctgctgttcctgtagtccacccaactgcgcgaagccgcagatactttccgcgcccaaccaagcgaagaacgaccgctgatttcgcgcaccgacgagcaagccatgctctccgacgcaatccaccgatgccatgaacgcttcattattcatgtcaataagccaggaaatgcatatagcaaatccttcgattacactgaattcatcaaaaccgtgcaggctatcgcgggcaatgccctgcaatccagtgattacgcaagcgcatgcgaaaacttacgattgtgcatacacgaagtccacgcgcttctgctctcgtccgaaaacgatgatgattccgagcctttgctcacgcttatggacggtctggcgatgcgcgtgcgatgctatatggagaatgtggcggaattcgccgactcccctaccgccggcaaagcattgaacaccattgcacaggcaacgaatgacaagaacatgcggcaatgcgaaccattgaacaacatgttgctgatttccagcgcgctcgccttcgcccaatatgacgacaaacgcatgtgggcctatgacgtaatcgagaacgcgataacgcgtaatctggaatactcgttcaacgaagagagcgaagaaagcgacgaggacgacgaggatacgaacgaggtcgatggcgagaccgacttcttttctgcaacgacaaatccgacacccattacgtgggtaagctgcgcaatctgttgcgcatatacggcggtctcagcgcggaagaatggcacgacgtggctattgaactggccaaagattgcgtacgaaacatcatcgaccgcatcaagtatcagccggaaatgaccaccaaaggcggcacacagcgccacaacagctggcgcaatcccgcttacgagaagctcatcgtggatgagcggctttcggacgcggccctgacctattgtcccatcgtagattacccgccgctgccattgctacgccccgggttctagatagaagcgcaacacctgctctatggttggaagtgttcaagtccacaaccggagagaaagtgctgcgctcgatatgaaagcttattcccacctgtcggcagaggaacggatccggatcgacgaattgcgcaacagggacgggctcggcgtgcgccagatagccctgaggatcggccgcgacaaggccacggtcagccgcgagctgaaacgcggattgtggttcgcgtccaatgagaacgactcgtaccgtccctaccggccgaggaaactgaagaccggggcgtggacgtgccgtccgttctattcggccatgaccgcgcagaggaaggccgagacgcgcgcccgcaggtcgcgcaagcccatgcgcatggcgtacgacccgctgctcacgtgggtcatggacgccctgaggaagggctggacgcccgaacgcatcgagggacggcccgcggtcgaattccccgacgacccgcacatgagggtcagccacgagtgcctctaccagtggatctacgccaagccgcagaggatcctggatctcaggcagtacctgcccagaggcaagcggcgccgcacgcgcgccaagggcaggaggtcgaaggggccgcgcatcccgatgcgcgtgcccatcgcccagcggcccaaacgtgtcgactcgcggcatgagttcggccatttcgagtccgacaccgtcatcggcacggccccctcgaaacggtgcatcgacacgcaggtcgaacgcaggagccgcaggctgttcgccaggttcggccccgacaagagcgcgctggccacggcgcgcgccgaatacgacatctacaaggacatccccgcgcccgcgcgcatcgaccgcacctgggacaacggcaccgaatcc

SEQ ID NO: 1413 - DNA, 5015 bp, Unknown
  R257_15m  MAG No. k141_11281
aacagactcaccccgcgacgggccgtgcaatacgcgttgcccagccaggtatggcgggaattgggccagacagctcccagtcgcggtgcgttctggctcatccagatgctcggcacgcggccgtctgcggagcgtgagccgagcagattgaagccgttcttttccagcagccactccgggtgctgggtggcgatggccaagccttcctcgagggtgagcggcaggcgttcatcggagtcgataagcttgcgggccacgtccggctcgcgattgatatagcacgtgccggtgtgcggattgacgaccagatagaacgggccttccggcggcatgaagccgtcttgaggcaggaagctggcgatgtcacgcggcggcatggtggtgaagccggccatgcgattgatggaggttcgtgcgatcagtgactcaggcgaaaccagttcgcgcgtgggcaccagcaggatgttcgatcccaaatcggaatgctcgagcgccccgatcaggggtcgggccagcgagcggaatgcggcggcggaaatatccgccacatccggatagccgagagccacgatacggtcgagctgtttttgggcctctactgatgcgatagacatggctaccagtgtagaacatcaccttcgcttcatcgggcagtcaccatctgggaagaccgctactgttgttccgcacgtttcatacaatgtcattgttttacggtcacccgtatgacggccgtccgaacgcaagtaacccatcgaaacctagaggtcatagaggtcatcatgtccgaaaaattgaaggtcggcatccttggtgccaccggtatggtcggtcagcgttttatcacgctgcttgagaatcacccgtggttcgaggtggtcacccttgccgcttccgcgcacagcgccggcaagacgtatgccgaggcggtcggagaccgttggaagatggaaaccccgatgcccgaatacgtcaagaacatggtggtcgtcgatggcgacgatgccgagtccgtggcctctggcgttgatttcatgttctctgcggtaagcatgccgaaggaccagattcgcgccattgaagagcgttatgccaagaccgagaccccggtggtctccaacaacagcgctcaccgttggaccccggacgtgccgatggtggtgccggagatcaacccggagcacttcgaggtgatcgagcaccagcgcaagcgcttgggcaccactcgtggtttcatcgccgtcaagccgaactgctcgattcaggcctacacgccggcactggccgcatggaaggaattcgagccgcgtgaggtggttgtgagcacctatcaggcgatttccggcgcaggcaagaccttcaaggattggcctgagatggtgggcaacatcatcccgttcatctctggtgaagaagcgaagtccgagaaggaaccgctcaaggtgttcggccatgtggacgccgaaaagggcgagatcgtgccgttcgacggcgacctcaagatcacttcgcaatgcatccgcgtgcccgtgctcaacggtcacaccgccaccgtgttcctgaacttcggcaagaaggccaccaaggaagagcttatcgaccgtctggtgaactacacgtccaaggcttccgagctggagctgccgcacgcgccgaagcacttcatccagtacctcaccgaggatgaccgcccgcaggtcaagctcgacgtggactacgagggtggcatgggcgtttccatcggccgtctgcgtgaggattccatcttcgattggaagttcgtgggtctggcccacaacaccctgcgtggtgcagccggcggcgccctcgaatgcgccgaaatgctcaaggctctaggctacatcactaagaagtagttgaatctcgttaaaatcgcaaaagccctccgcaaggagggctttcatcgtattaggcgcggaattcgcggctcagcggccagtaccgccgtacaccacggcttcgatctgatcggcatcgagaccgtatgcagtgtgcagcgccttgacggcgtcgttgagctgatcgagcggcacgagtgcggcgatacgaatctcggaagtggagatcatcagcacgttgatgccctcatcgctcagggcctggaagaacttggcagccagaccggcgtgggtcttcatgccaacacccaccacggctaccttgccgacgttggtgttcacatcaaaggagtggtaacccagcacttcctgcttgtcgagcagcgtgttctgcacctgcttgacggccgattcgggcacggtgaaggagatgtctgcagtgccaacggatgcgccggcctgcacgatcatgtccacgttcacgtcggcggtggccagctcggtgaacaccttggctgccatacccggctcgttcggcacgccacgcacggtggccagcgcctcggaacgatcgtgggcaatgccggaaatcaccggtgcctcggggcccaggtcagggaacaggtcgcccatggatttcgcttcttcttcagtcatgtcttgccttgtcttggttgaaattacttacgattattgttcgctgtagccgcgctcagtcgaggttcggcagcgtgcgcgggtcaatgccgtcaggcacaaccagcgtgccggggcgacgggagaacgaagagcgcacatgcagcggcatgttgaaacgctgagcgtactctacgcagcgcagtgccagcaccttggagccgcaggaggccatttccagaatggcttcgtagccgatggaaggaatacggcgggcggaaggcacgatgcgcggatcggcggtaaagatgccgtccacgtcggtgtaaatctcgcagatgtcggcaccaagggccacagcgagtgccacggcggacgtgtccgaaccaccgcggccgagcgtggtggcgtcacccttggcgttgatgccctggaagccggcaacgatggcgatgtctcccaatgagagcgcgttcttcacgcggtccggtctcacggccttgatgtgggccgcgccgtaacgggtgtcggtgaagaagccggcctgctgaccggtgaaggagtgggcgcggctgccttcggcgtgaatggccatggccagcaggctcatggaaattcgctcgcctgcagtcatcagcatatccatctcgcgctcgggcgggttggagtcgatgctcagcgcctgatcgataaggtcatcggtggtatcgcccatggcggagaccaccacggccaccttattgcccttcttctccgtctccacaacgcgcttggccacacgtttgatcgaatcggtatcggcgaccgacgagccgccgtacttctgcacgatgagagccactgctgtcctttgttcttctcttagggatttgtttggtcgatattctacgcaaacgcaacgattataagggctgtcgcgttcaccccgcgaccccgcgccggcatgcggacacgggtatggcctacgttgttcagcaaatattcaagttttcaccggtggttctttgagacagccgcatccatcctttgagattcgagcggttaactatcaattaccggcaaacgaaagcaaaccggcgaggtttccgcagaaccccataactgaataccttgtcatgggcgaaactttgggctacaaagtggaccgcatttcggtgattttgccggatgacacgtcgaagctcaagattgtgccgggtgaggaccgtgtcaccttgatgacctgtacgccatacggcgtgaacacgcatcgactgcttatctccgggcaccgcgtggcaattccgatgccggcccccgagccgaatgacgtgcttgacgcgcgcaatatcgcccttggtgttggcctgggcatactggcggcaggactgttcattatctggttggcacgacggcacaaggccgcgcgcatcatccgccacggcgcattctggccgtggatgcgccgcaagggcgaaagcgccaatgatacgctggcctaggcctcacgccgaccggccagcgccctgcccagcgtgatttcgtcggcgtactccaagtcggagcccaccggcaggccgctggcaagtcgggtgaccttgacacctacgggtcgcaatagctgggtcaagtagctggtggtggcctcgccttcaatattcgggtcgagcgccataatgacttccttgacctcatcgccttctaagcgtttgagcagactgggaatacgcaggtcggcagggccaacgttggccattgggttgattgcaccgccgagcacatggtataggccgcggtattcgcgcgtgcgctcgatgctcatcacgtccttgggctcttcaaccacgcagatcaccgaacggtcgcgtctcgggtcggcgcataccgggcaggggctggattcgcacacgttgccgcaaatatcacagaagcggatcttggccttgacctcctcgatggcctcggccaaatcgcgcgcttcatcttcgggcgcggacagcatgtagaaggcgatacgctgcgcgcccttcggcccgatgccgggcagccgcccgaaagcgtcgatcagtcgctgtattgcgccgtcataagcaagtgccatgggtattcctcgttattcgtcctcattattcatccgagtgcttcttggcaggctggatgttcttggggttcttcggatcatctgccgcgaattgctcgacttttttgacctcgaatagctttttcagatcgtcaagattcatggccgtcgcctcgccgagcgactggtcgttcatcgagtattcgtcgtcctcggccgcgacttgcggttgcggctgcggctggctattccacgggtcggcattcggcgtcggctgtgcgggctgcggttgattccacgggtcatcgccggcagccggctgcggaaccgattggggctggttccacgggtcatcgccggcagccggctgcggaaccgattggggctggttccacgggtcatcgcccgacatattgcccgacactgtctgaggaaccgaagaagccggagtctgggactgc

SEQ ID NO: 1414 - DNA, 14013 bp, Unknown
  R257_15m  MAG No. k141_11551
cggcgaccagccgcgacccagccattcggccacccgcgcccacaggcgttcgcatgacaggcggtagcgcttgcgcggtttggcgcgcctgcggtcggccttgcgccgcggcggggccggcgatgtagtatccgcccgtccatgggcccgtcttcagccgtttcggccggtacggccgtcaggactcgttctcgttggacgggaaccacgtgtcgcgttcgatctccctgccgaccgtcgaggcgctgcggccgagcatcagaccgatcctgcggatgctggtgccgttgccgatctcgatccggatgacctggcgttcctcttccgacaggtgcgaatatacttctcccataggtgcaacatcccttcggactggttatccggacaatctccaatctaacgggtgttgcactttcaattagacaacggggcgcctgacatttcaccaagggcggcttataatggtggaatcagcatatagagattggggttacaggagggtgattgtggaaaacaaaggttggagaattttccaaatcattcaattcatattgttcttatgcattagtgtattcctttttataagaacagtggacgggcatggaactgtacagacactaggagtaaagctgattagtttttccgtatgggcgcttttctaccttggtatcttagccatagagtggttgatttactgtattgtccgacatgctaaaaaataaattgatgtacgaatttgctgaactaatagaattcctttagtctctaaggggataacgaccgaattcttgcgcatttttggattccggccttgatggaaaaggacatgggccgtgccgggggtacgattttcagtcgccagacaatgaaaaaccgcgattggaaagaggcatggagccatgtccaaggaaatcatacagttcgaccaggccatgttcgagagcaagctcgacgccatggtgcgcgagaaggtcgagcggatcgtcaacgcgatgcccgacgcttcaggcgaacgagatcgccaacgccgcgagatacgagcgttccggctgatggtggccgaccggtgggtgggaatcagtcgagattattcttgggtgcctgtgggtgcctcgtggagaaacgagggtaatcggtaggtttcccaaaaatcgaaagccttggaacaaagccaaaaacagttggctaggattatcatgcgaggtgcgcatgatgatggtagccatggttccaagtgtctcatgggcttgagaccggcgatggtgcgattgcgggaatggcgcggagagccgtggactggccgcggccgatagccgggaagccgagccgcagcgtgaagcgtcatacgagttgtctcgcgatggccaacgcgccggcaacgaccatgagcgccgagaagacacgcagaagagtccttttgcgttctcttcccggtttttggatccgatcacgacggatatcaggaccaatccgacggccagcggcaccaaggccagcggaaacagcggtttttccatggcatctcatctcgaacgctgtggttcagatttttcgatgttcggtttttctgcgcttgctgacaagagccatggagcagcatgtcgatacgcacagattcactatgcaggtcgctgctggcagtagccgtatgaacggctgactgtagaaatcgaggacatctggatccatagatcctgagtatatttcaaaaaccggatatgatgcgagagccggcgccgaactcacgaggaacagtatccaaatgacgggcaatctcaggatggatactgttcggcctttccgatggacttctttcgagaacatgaaaagagcccaagaggtcactgcgattaatgcacccgcgcaatacaacagaccagggaagtcgctacgcatgattccgtcctcacttcagtcgcaggtaatttggcttatcgatcttctggctggttcgagattaccatacctgacatggcagtcgaattgcccgttgtctattggcagagcatccgactgttaatcggacggtcgctggttcaagcccagccgcaggagccagacaaaaacccggaacttcggttccgggtttttgttacccgccccccgaaactcctttatcaaggaatcatccataagggatgccgcagcagacggtctccaaggcgtactacaccgtgctcatccccatggacgacggcaactggcacgtcaccgtgtactgtcccgcctcgctggatggcccactgctcgacaaggattccaacgaattcgacacggacgacgtgaaacccggcgacaagtcgtacaccgttgccaatccattccacctggatcacgcacccggaacagacggtttcatcttcggccctgacaccctccgacgatagcgatggactaaccattcaaccgcacgcgtaggaggagcgcattccaaccatgaatgaatgacatatagacgtcaagggcttgcgggcatcgtgtccgcaagcccttgacgtctcaatccaacgaaatatcgacttttacccgtttgtcggattcaggctttcgcgcaagtccggcgatgaggagggccaccagcagggggatcgtcgtcagtgtaccccaggaaatcgagaacgtgtcggcgatgtagccgcacagcggggtgacgaccgcggtgaaggccatcaatacgagcgatcccacggagaacgcggtcgcgcggatcgaatcgtcaatgctctcgtgcaagctgctggagatcgtgttcgccacgtacatctgcgcgcaggagaacacgaagaacgccaggatcctcaccgccggcatcggcgtggccgcaagcaccaccgccgacacgatgagcacgaggatcgcaatgtcgccggaacgtggatgcagccgcagcatacccagacgactgccgacgatctgcgcgatattagtgaacactaggccggcgaactgccaccagaccccggtctggtggcccatcagcagcagctgccagaacgtcagcaccgacaacgtacccagattgaacaccaccatattccatatctccggcttccgcagcagcacggccgcggccgccacggtctgcctgacatgatccaacaccgtcagcgaggtcccggactcgcccggctcggcggatccatcggattcgacggacgcctcggcctgccgttccgtcgtcccgctcccatccgtcgctgcggccttggtgcgcgacccggccctcatcagaccgagaagcgggatgatcgccaatacgtagaacaccgtcgcgcccagccagatcagctgggagtcaagcaggaacagcacggcaccgaccgcaccgccgcatatcgtgcacgcaccgatcatcgccgacagtcttgacaccaaggtcttcatacccagcgagggatcgtgcttgcgggcgtattcgatgtacagcgaggacgccgcgccgctttcgaccgcggccccgatgccggccagcacgttggccaggcacagcacggcgaagttcgcggaccagaacagcatcaatatgaatcccgcgacgcggcacaacacgccgatgatcagcgtccgttcccgggaccaccggtcgaacagcacggacgtgggcagctcgctggccgattcgctgacgtcgaacaccacattgacgatggagatcagcagcaccgacaggcccacatcatgataggccaccatatagtagaccgaaaaacatccggcaccaagataaataagcgcattatacaaacaggcaaaccgaaccatcaatcattcccttacataaacaaagaaccggtatacgtgggactgtctctcgaagtgtgtaactggccttaactggccggtcgtgtggccggtcggaaaggctggtggacgatgtgtgctgggacaatgggaaacatgacaccgacgaagaagccggacgcggaaaaacgcaacgccgagcgggaggcggcgctcacattcgtgcgcatggccaaggaaaaaggactggacctgacagggcccgacggactgctcaaacagttcaccaaaagcgtgctggagacggccctggacgaggagatgaccgagcacctgggccgcgccaagcacaagaaatccaaggacggcagggccgcgaacacgcgcaacggcaccaccgccaagaccgtggtcaccgattcggtaggtccggtcgggatcgaggtgccgcgagaccgcgatggctcgttcgagccggtcgtcgtcaggaaacggcagcggcggctgcccggggtgggcgaggtggtgctgtccctgtatgccaggggcctgaccaccggcgagatcagcgcccacttccaggagatctacggggcggacgtgtccagggagaccgtcagtcgcatcaccgagcgggtcgtagccgagaaggacgaatggtgctcgcgtcccctggatcgtgtgtacgcggccgtgttcatcgacgcgaccgtcgtcaaggtgcgcgacgggcaggtcgccaaccgcgcgttctacgtggccgttggcgtggatctggagggcgaccgcgacgtgctgggcatctgggcgtcgcccgccgccgcggcggcggcccgcgacgcgatgctggacaagtgggaggcgagatatcccgcgatccgcaggctgtggatggacgcgtgggaacggttcataccgttcctggactatgacgtggagatccggcgcgtgatctgcacgaccaacgccatcgaatcgctcaacgcgagattcaagcgctccatccgcgcccgcggccacttccccgacgagcaggccgcgctcaagtgcatgtacctgaccgtccgctcgctggaccccaccggcaagggacggatacgatggagcgcgcgccggaagcccgcgctcaacgcctttgccatcaccttcgccgaccgctggccaagcgagggaacacaacaatgaaaacgccagttacacacttaacgagacaggcccgcgtctgggccggtggccggcgatccgctggtgccgctggtgccggtactggttgaagtcgatcccgatggatctttttgcgtcgagccggtgccggtgccgttcgaaccggtctggctgccgccgacgccttggctggtcgggtcttcggtggtcggattctttgaggtgccggtgccgttcgaaccgttggcggtgccgtcggttttcgaatccgaggcgccggcgccggtcgaacccgaggtgccgttggcgtcgaggtcggtggagggggcgtcggttttcgaatccttgctggttcccttcgaatcatcgccggtgcccgtctggggcagagcgttgttctgatcgggggtgcccgttcgcgtgccggtgtcgttgcgcgcgggcgtggtcgtggtgggggatacgagattgtccgtgccgcgtccctgcgtggccagcatcacgacgccggccgtcaccgccacggcgagcaggccggacaccaaggtgacgatcatggcggtgtgcttcgaagcgcggaagcgggacttgcgcagctcatcgaccgagtacgtcctgccgttcgcccggctgaacacgatttcacgcggtctgcgtgtggaggaagcatcatcggcggtcacgcccatcgccgtatcgggctcgtcccgaacgtcggtccggctgccggccgttcggggggtgccgccatcggcatcgccgttctcggcgtccttcgtgatcccgttgccggaggacgaggccgattggagtttttcgccggaggcggtgagcacgttctggtagatcttggtggccacggcggagacgacgtaactggccgccgctccgatcaccgaaccgccgatgccgatcttcgatgcgagcaggaacgaggtgacggcggcaagggtgcccgccacgatggatgagagggagattccttcaaaaaacttcttcacaatgcacgaccgtagggtgtcgggctgacaggttgcctgagactcgatggaagcggggcgaggcctacacgagaccttcaaaatcggccttcgtgcaggtccgacacgccctgcagcgcacacacgtgcgtttcgcgtcgccgcaggccgcgggacatcgtcaattacgatgtagcgactgcccggtcggtctgatcaccgacatcagtacggcggcgaaaatcaaagcgaaacccaccagtgagctccacatgatcctctcgccccagaacaaagcggaaaacgtgacggcgaacagactttccgtacacatgatgattgacgcctgcgaggcaggcacgtgagccagaccgatgttctgcatgatctgggcactcatcgtggcgccgaggaacagatagagcacgctggccactactgagggtgccagccagctggcgttcggcatgggttcggtgaacaacgcgccgatgatgaacaatacgccggcaacgccgaactgcacaaaagtgacggcgatagggtcgaaccgtttggtatagatgcccaggaaagtcaggttgaacgagaagatgaccgcggtggcgatggtcagccagtcgccggcgctcagagacagcgaaccgcccggcttcaacgagacgaagccgacgccggccagacagatcacgccggcgaccaggttgatggccttcggccgaatcttcgaaacgatccatgtggcgaacggggtgaggacgcaataggccgccgtcagaaacgcgctgcgcccgggttcgatggtctgcaacccgacggtctgggtgaccatcgtgccccagtaggtcagacccaccacgagcgccggcacaatgatcttcggcgtcagatacggcacgatgtgcttatggaacaaggccagcatgcacaggcaggcgcctatcatgcgcagacccatcagccattggggcggaatcgcctccatggcgaatttggcgagcagataactgccaccccataatgcggcgcagcccagcaacatgagtcgggcgagattcgggggaaagctgcgggaccagcggctgcgcagcttgctgaaacgttcgaccaaacccatggtgcacctcaggacagttaggaaaacttgtggctctctcggctcacagattacgggaactaccggccaaaatcgaccggtcgatgggcgtcgggtgtgtgacaggtgtgtggctggtgcgcggccggggcgcggcatcgccaagcaggtaagaaccggatgaaagctgtgcgaaggtgaggttactcacagcgaacatccgggctagtcgcgctcgaaaccggtactctggaaagagtaaaaatacgttgtccatagcaatcatgaaaggattcgacatggcagtcattactccggaaatcaaggaattcatcaagaacaacctcggttggatcaccaccgtctccaaggacggcgaactggacctcggcccgaagatgtccctgttcgtgctggacgacacgcacatcgcctaccacgagcgcaccgccggccagcactacgagaacctcaagaacggctctccgctggtcatcgccttcgccaacctcgagaagaagcagggctaccgcttccgcggcaacgtggtgctgcacgttgacgacgacatctacaacgagcaggtcaagatcgccgaggaaaagggcaccaagaagccggccgtgattccggttctcgaagtcaccgaaatccagaaccttgcttccggtccgaccgccggcaagaccatcgccaaggactgattagctgacgtattggtggcttcctcgtcagagggagccactttttcgcttttcagtgcgcagtactaggtgatggcctttgaggtcggtggtggcgaagaggtaggtgttgccgccgtccttgagtttgagttttttgcgtagctgggccacggttagggggaaattgcgtacggcgatgttggcgtgcgtgagatcggccaatagctgcttcagttctctcttgttcatggtggcgatggattcgatgacgaatgatctgcctgggaaatcggcaataggttcggccgccacgaacaggtggctattcgggctgatgtgatgcacgacgaagcgctgttcgagaacatcaaagcacccggccttcatgattgaggcgttgggttcgtaaaggtacttccaatgcgaggaatcgaagccgttcgcgctttcctcagccgggaaatcctcggtattacaggtattgcgtgcaaccaaggcagaatcgctgataggggtgtgattgtcgctgttatcgccggccgtgtacgacagcacctgcccgtcattgacgcataccacgagcggtgaggcgcaacggccgcgccccaacaccaacaacaattccttgcattcattcccggtggagacgatatgcacctcatgcaccgcgccggcgaaatcggcgacggtcttatgccagtcgagcatgggggagagcttgaccatgaccgtcggtgccttggccagcagcgtatccttcagggtcagcacatccggcgtgcaatcggcaatcgcgtaggtacgcgagccatgatcgtcacggcgggccggatcgaggaagatcatggagactcggccaagcgtatcaagcactgctgttgaatcatcattgatgacttcggcgtggccaaggccgagtatcgggaaattatggcgagcgataccacataaaatggattgttgttccacatatatggcatggtcaaacactcgggacatgtaagaaaagtcgacgccgaaaccgccggtcagatcgactagggatgtcggggaatcgtcgtcgactgcttccttggccaacaatcgctgtgctaaccgggctttgtattgagccgtgaactggctggaacattgttccattgggacttgcggcgggaaaatcagcccatcatgggacgcccagtcaggtagcttgagtgaagcgcgctgccagccggcaatctgctccagcgcgaacggcacatccacgtcgccatcatgtttggcgtgcaaggccacatcacgcacatcttcacggcggtgtttggcgatgaacgcccaggtcgactcagaaatctccatgccgccattctaggggttgtgctgagatgagtatggcaaaccgcaagagaacgaggtggcgaaaaccgatgatcgatgaagtgatgatgctgcgtcatggccgtacgcaatacaatctcgaacatcgcttgcaaggccagatcgatgtgccgctcgacatcgtaggccaatggcaggtcgaccagaccggattcgcgctcgcttcacggtattactgggccaaggtgaaccgacttgccgagcatcccgaagccatcgcccagcccggtcctgacgccgccgaacgcactgatacgcgacagttcgaggaggctcccgccgccggccggcgcatggtggtgatgacctccgacctgttccgtgcccaacagaccgcacacgccttcgccgatattttgggattgccggtcacctgtgaccaacgactgcgtgaacgcagcttcggcgagtgggaaggcatgacccgcgccgaaatcaaagctgtggcagccgacgactacgcctcttggaaacagcacaccgggggcgaaaccaagcatggtgtggaaagccgtgccgccgtgggccagcgaggtgccgatgccgtgcgcgcactggtcaccgactccgcctattcagacagcatgcccaccacgctgatgctcgtcacccatggctcatggattaccgccaccatctccaacctgctcgaactcgacccggacggcatgaacgcactcggcggcatgcgcaacgcctgctggtgccggctcaaagtgcgccacagcgtcaacggcacccccaccgaacagcccctgtgggagttggaggaatacaacaaggctcccgccatcgccgacagcgccgactgggagaacgggccgaccgatctgcgaggaccgcacatgccgagttggcagccaatcgtctggtgacggtcgctatgcgaaaccccgctcgcaaattcgaacggtgggtctagactaatctcggtttggaaccgtacagcgatagaacagtaagaaagcgcggaaggcgggtgaggcgacatgctgagaatcttcagctcaatcaatggccaagtggagcagatcgagaaaccggaaaacggctcctggttatgtttgagcgaacccactgatgtggagctcgccaccgtcgcatcacagaccggcatcgacctggccgacctgcgcgcccctttggatgacgaggaacgttcacgtgtggacgtcgaagacgattacacgatgatcatcgtcgacatccccaccgtggaggagcgtggcggacgcgactggtacgagaccatcccgctgtcgatcatcgtcaccgaaaacctcatcatcaccgtctgcatgcaggacacgcccgtgctccacccattcatggaaggcacgatccgaggcttcaacaccttcatgcgttcgcgcttcatcctgcagatcctgtaccgcaacgccacgatgtacctgcgttacctgcgcatcatcgaccgcgaaagcgacaagcttgaactgaagctgcgccactccatgcagaaccgcgagatcgtgatgctcatggaactgagcaagaccttggtgtacttcaccacatcgctgaaatcgaacgagatcgtgatggagaaactcaccaccctgcagcgcatcaagcagtatccggacgatgaggatctgctcgacgacgtcatcaccgaaaacaagcaggccatcgagatggccaacatctacagcggcgttcttgcgaacatgaccgacgccttcgcctcgatcgtgtccaacaacctgaacaacgtgatgcgcatcttcaccatcatctccatcaccctgtccatcccgacgctgattttctcgatgtacggcatgaacttcgacggcggcatgatgggcatgccgttcaccgacaagccttggggcttcctgctcatcatcgtgatctccatggtgctttccggtgtggttgcctggttcctcacacgttcgcgcatgttcaagtaaggcgtttgacggttatgcaccactggtcatcgttcgtcagccgtagcatgctccgcgcccgccgcccgatgcggcgcggatttcgctcccggctgatggcaggattcgccgcggcctttggcgtgatattgccattatctggtctggccggttgcggccaaattcaagtcaccaccgtctccggagcgccggagggacccaccatcgccattggggtcgcagccgacgaaccatcggtgggagcatggcatgacggcacataccagggcttcgacatcaccatcgccaaatacgtggccgccaaactcggctatgcgaacaagcagatcgtcttcaagcaggttcgccccgaaaaccggcgctccatgctggacaatggacaggtcgacatggtcgtcgcctcttggcctatcaccgatgggtccagcgcgatcgttgattttgccggaccatacctcacgaccagcgtcggtttgctggtcaggtcggatgagcgtggccgattcaccaatgacgcaggttcggtgggcgacgtaggcgacggcacggtgtgcgcagtgaaaggtgacgagacagtcggcatcttccgcggcaaccacccgcaggctcggattcaggagcgtagcagttatgcgcagtgcgtcacggccgtgcaagtagggtcggcggatgccatagcctccgatatggcggtgctttccggtcttcaagcggccaacgggccccagtatatggacgtgattgcggacaagggcgaggtcagttatggcatcgccgtgagtcaaggcaccagccaattggcgcagaaaatcgcggaagcattggaagacatggttgaggatggcagctggacggccgccaaggatacgttcacaagccaaacaaagctcatggtttcgctgaacggtgaccccaaagccatcgtctcggatgctgaataacgattgacgacgtgtccagttgcgaggctaccttgctgatttatgagtgacaacgagaagagcacgcaaaccgaagagcccaacttccgctacaacgccgcactggcgcaggacatcgaaaacaagtggcagaagatctgggatgagcaaggcaccttctgggcggccaacgtcaacggcgatttgaaggacggcaagggccgcaacgccgaggggcgcaccgcctacttcgccatggacatgttcccgtacccctccggcaagggtctgcatgtgggccacccgctgggctacctggcctccgacgtggtgagccgctaccaccgcatgaagggcgagaacgtcctgcacgccatgggctatgacgccttcggcctgcctgcggaacagtacgcagtccagaccggccagcatcctcgcgtgaccaccgaggcgaacatcgccaacatgagccgccagctgcaccgcatgggcctgagcttcgacaaacgccgcacgttcgccaccatcgaccctggctacgtgcgttggacccaatggatcttctcgcgcatctacgattcctggtacgacgaggacgccaccaacccgtccggctccaagggctccgcacgcccgatcgccgagctcgtggccaagttcgaatccggcgaaaaggccattccgggccacgagtccgatggcaagcagtggtccgacctcactgacgccgagcagcaggatatcttgaacgacttccgcctggcctacatctccaagtccccggtcaactggtgcccgggtctgggcaccgtgctggccaacgaggaggtcaccgccgaaggcaagtccgagcgtggcaacttcccggtcttccagcgtgagctacgccagtggtccatgcgcatcaccaagtacggccaccgcctcatcgccgacctcgacggcatcaactggcctgagaaggtcaagctcatgcagcgcaactggatcggtgaatcccatggtgcctccgtgcacttcaccgtggccactgccgacggtgacaaggacatggaaatctacaccacccgtcccgacacgctgttcggcaccacgttcgccgttgtttccccggaacatcacctgctggagaacgtgcccgccgaatggccggccgatgtacccgaagactggaagggcggctatgccaacccggtcgaggcggtgaaggcctacaggctcgccgccgaagccaagaccgccaaggaccgagtggacgagggcggtgagaagacaggtctgttcaccggcctttacgccaccaacccgatcaccggcgcgaagctcccgctgttcactgccgactacgtgctgatggactacggcaccggtgccattatggccgtgcctggtggcgaccagcgcgattacgactttgccgtgaagttcggtctgccggtcatctacaccgtcaagcctctgccggattccggcgacgacttggccaactacgaaggcaaggcgccgttcgtctcccatgacggcatcgtgatcaactcccacgtcgaatccacgtacgctaagggcgacgcgctgtcgctcgacggcttgcgcgtggacgatgccatcgccaaggtcaacgcctggctggagaacgccggcgtcggcaagggcgccgcgagctaccgtctgcgcgactggctgttctcccgccagcgctactggggcgagcccttcccgagcgtgtacggcgaagacggcaccccgcacctgctgccggattccgcattgccaatcaacctgcccgacgtgcccgactacgagccgcgcaccttcgatccgatggacgccgagtccaacccggaggcaccgttgagccgcaatgaggactgggtcaaggtcgagctcgacttgggcgacggcaagaagacctactaccgcgacaccaacaccatgccgaactgggccggctcctgctggtactacatgcgttacatcgacccgaccgacaccaagcacatggtggagaaggacgagttcgactactggatgggcccgaaccacaacaagtactcgggcgacgagggcggcgtggacctgtacatcggcggcgtcgagcacgcc

SEQ ID NO: 1415 - DNA, 25216 bp, Unknown
  R257_15m  MAG No. k141_11604
tagggacgcaaaccgggcaatttgcgtccctaagtgcgcggacgtgtcatttcggcgcgcactaaggaacgctttcgcgctctgatggctctggatcgttcggagccgtgatgtttggcaattggattccggttaccagtgacgttcctacgcaaattggcgactattgtcatcgtccggtgacaatagtcgccaatttgctgcgattaccggtgcgagaccgtgcggattctcgcgatggcccgctgcgccacgtcccgcgaggatccggcaccggctcctttgacgccgaacagcacgatgagcacctgtatgaacacgatgaacgcgctgactcgcagcgtccactgcgtgccgaagatgctcgcggcgattgcgtcgcctccatgcagttgaatcagcgtctccatcaggatgaccagcacgggggctccgatcgcacccgcgatctgccggatcgtgttggtgaccgccgacccggctgacacctccgtcgggtcgaggcagttgagcgaccaagtggtgatgggcatgatgatgaaacccatgccgatctggcgcacgaactgccatatcgatacccaccagatccacgtgttgctgtcgatcagactcatcatgatggtgccgaacagcagcaccagcgtgccactgagcgccaccggcctcgccccgagccggtcgagcagcttgccgccgaagaactgcgagatgcacatgccgaatgcgccgggcatcatgaccagtccgctgatggtcgccgaatagccgcggtcgttctggatatacagcggcatgatcaccatgatcgaactgaatgcgaagaagctgagtgcggcgcagatcgtcccgacggtgaaactgcggttgcgcagcacgccgaggtcgagcagcggcggttcgggagtggtgcgttgcgcggtgtccgactcgtccacggattgccggacggccaccgtatacgccttcgcgcggcgcacctgccgcaccacgaaccacacgatgccgcacagtccgacaagcatcgcgccccacaccatcggattcgacggcgcgtacgattcgatgtttgtgaacccgaacatcaggccgccgaagccgagcaccgacatggccacggagaagaaatcggccttggcatggtcgtcggtcgtcccgaagttacgcagcccgaagatggacagcagcaggcagaacacgccgatcatcgtgagcgtgaagaaaatcgaacgccagccaaaactgtcggtctggaagccgccgaaagtcggccccagcgcgggggccacgctcatggccataccgaccgcgcccatggccatgccacggcgggatagcgggtagatcgagaagacagtgatctgcagcaccggccacatcacgcccgtgccgacggcctcaagcagtcggccggccagcaccaccagaaacgtcgggccaacccatgccagcagcgatcccacagcgaacacggtcatcgagacgatgacgatttgccgggtggtgaagcggcgcgtcaggaacgcggtgagcggcaccatcacgcccatgaccagctggaaaatcgacgtgagccattgcccggtggtcacggagatgccgaattccgatacgatggtcggcagcgcggcggacagctgcagctgcgtgaagttgccgacgaacgtgatgaacgtcaagatggcaagcgaagcgagagccacgcgcgaaagatggccgttcacatagctttcgtcgctggagagcggcgtggacagcgtggatacgcgtttaccgccggctgtgccgccgcgctttgcgagggttttcttcgggttcttgccgttcgtgctggtttccgtgctgctgtcgttattgtcgctgcgattggtcattgtgccgtattctcctccgttccgcctcatgcgcctgtgtatgcgtcatccctgtttcgctgcgtagggattgttgtatatgcatcatttctgccgaccaatacattactcctacaggtgggcaacccgggtggaggcgtggggagaaggttgggggagaagggcgcggaggaaaaaatgtagggaaggccacggaggggtggaatggaagaacacagagaggagggcgcaaggaagcggaagttgagtagggggagacggaaatatgagcactcagatattggcggcgcggagatgcgacggtgcggaagtcgcgccgccgcatctccgtcagtacgagccggtgccgcgcacgacggccaccacggtcttgagcaggatcgcgatgtcgccggtcagcgaccagttctggatgtacgacacgtcgacgaattcggactgctcttgcgtcaggttgctgcgtccggacacctgccatggaccggtgatgccgggcttcaccagcaatctggccgaatacagcgtgccgtagcgcgccacttcctccggcagcggcggacgcgggccgacgaggctcatgtcgcctttgagcacattgaagaactgcggaatctcatctatcgaggtcttgcggatgcaatggccgattcgcgtgactcgcgggtcgttcttgagcttgaagacgaaccggtcctccataccgtattcctcggcgagctgcttcttgatggcttcggcgttgacgttcatggaacggaacttgtacatcgtaaatggcttgccgtagatgccgatgcgctgctgccggaagaagacggggccgccatcctcgtgcttgatcagcagtgcgacgaccagcatgatcggcgaactgatgatgatcgcgatgagcgagaagaagatgtcgctcaggcgcttgaatattctcgtgatggtggagtactgcgtgagctgcgcggtgagcaccggcatcaggggattgctgcggaagtggagctgcgcggcgttcaggtcggccagcgacgcgggctgcgcgagctcgatgcccatggattccatggcgagcgatagggcacgcatggtttccgaatcgcgggtgagtacgtcggcgatgagcacggtctgcgctttcaggtatttcgcggtgatcggcagatgggagtccagcggcagcgcgatcagttcggcctcgtcgctgtcgtctgcggtgaaggggaccgagaggagccgtcttggtgcgtttggcgtgttgcctgcgctcgccttgacggggcagaccgcgatggggatgtatccgagcgacttgctgttgcgcagctgcacgatggtgtcgtgaatgctctcaggcgagccgatgatgatcgtcggatatccgaagcccttgccttcacgccggtggcggtgcaggaaccggcgtgcgagccaccgttcgatgatggtgagcatcagcgtgagtatcgggatgagcgcgttgaagatgcgcggctggtcgagcttgaacaggtagttgatcgtgcacagcatgatgaaatccatgaacgatgctttgacgagcttgttgtatagggcgtatccctcgcccatagtgtgccgctcgtagcagtgcgtgctgcacaggctgatgatccatgagcagcatgcgagcagcaccatggtgatgacgccacgaccggcaccgcccagcgatttcgtgtactcgtacgcctcggggtagagcaggctgatgatgaccgtcgccaggatcgtcatcagcaggtcaagcaggacgagcgtcgtattgaacaggtaacgccaccgcggcacggtgtagctgaagaatgggtggggggggggatttagtttctgcatagttgctgccgggcctgacgaagtatgatccgttgaagaacttcgtctgcgatgttccttcctgtgatgttccttcctgtgatgtccctgtctcttccggaatttcgttgtactgcctgacgtcctcatggtcatcgaggctacgatcgtcgtgtgagtgcgatgccatagtacggcttgcggcagcactttcgaccatagttgctcgtcccttctccgtccctctatacgaaaaaccatttcattatactctggtgcgtgttaacggcgagttctgtcccgtcgaatagtgtatgacactgtacctgatggctgagtgtgcacaccgtatcgttgcgttgcgatgatatagatgaacagccagaacgcatagaaggcgtacgcctcgaactgcgcgtacaggtacgcgagcagtatcagccagcataccgtctgcttgttccacatgtggtaacgcgcgatccaagcgagcgcaagcagaaggaacgcggcaagcagcagtacgccgaactccgcgatgaacgtcgcgaaaaagctcatggtgaatgcctgcgtggtgggcggcagccatggatcgggcgtgtcaggcagcttgccgatggattcgatctccgagttgacggagcctccatgagcctgcgtccaggcggccgcgggagcgtagccttcgcgcagcaccgacgtgagattgcccgcgccgaagccgaacagcaggtgcgggatgttgttcagaccggcgagcagcggggcgatgatgtggaacatgcgtgagttggtggagaagtcgccgttgagcagtccctgcgacagcacggaacggaaccgcgggcgcgtcgcgacccatgtgcagcctgccaccacggcgacgaggccggtgccgcacacggcgatggtcttcgcacgattcttgcggaaatcgaacatgacgatgaagcacagcacggcggcgacgagcgtgtccagcatgatgcgcgagccggtcttcataaggatcgacccggcagcgaacgtgcagatcagcaccgcgagagaacgcctgcgggtgagccagtagagcggcagcagcacgccgaacaggtgcataccgatatatgagggctcggcgaacaggaactgcgggcgaaccacgaaatactgcctcgggaacagcagtccttcgaaattccacagcttgggcagtttccagtggttcatgtcggtgaggtattgtccgacacctacggcgaacgcgatccagtaggcgatgatgacgacggtgagcgcggtctgccaggacacgtgtttgccgtggaacgcgatgtcgagggtcatcaggcaggtcagtgcggtgatgatgccgctcaatgtcatgaacgtgccggacgggttgaacccgacggtcagccagttgaccacggataccgccagcagtatggcggcgaatacgaagaacagcatgaaccggcggaaggtggccgggcagcggcggcagtttagtagtgcatacagcaggaacagccacggtgaaatcggcgtccagtaggtcatcagcgggccgagacgggtgccatcggccggcagggtgaacagcgcgaggtaaaggacgatgtcggtccaatcgaccagtgccgcggtccgggcgggtgcgcccgataatccgtcagacgataagtcgtccgccgaagcggcatcggcggcgctcgccgacggtatgtcgttcccggccggacgcctgtgcgacgtcgcgtgcctggcggcccgctgcgccatgtggctcgctgtcgcgcggtttgccgctgtgtgatttgctgccgtacgttttgccgcctgcaatctcactgcaaccatgtcatcatgcttcccatcttcgacagacattgcttgatttcgatgtacgcctccacgtagacgaccggctcctgtcgaaacgggtcgacgatctcctccgcacgcggcatgcgcggccgcaacagatgcatcatcgtcagcagttccgccaggcgtttcgccggcgggagggcgaacagcgccggatattcggaggcgtgctcgacggctgtgtcgcaggcgttcgcgaaatcggtgatcagcatggtcttgtgcgccgcgccggaatccacggcggcgattttgctcaggtgcttctcctcgaagcacaggatcaggtcggatgcttcggtgtgatccttggtgagcggggtcgaacggtagtcggcggcatcgatgccgtctcgccggatgagcgcggcgcatgtctcatcaatcggacgggaggggatgtccagcgtgccggcgctgtcgacggtcacatcgtcgatgccgagtcgggagagtttcgctcgcagcagcagctcggccatggcagagcggcagatgtttccggagcagaccatcagtacttgcatgggacatccttcgtgttgtgtttggtggtgcggccggctgcacgcgccgacggtaccagcttagcggcgaccggcgaatgacgccgcgtccgtcccattcgcggcgtcggcgcgatgccgtctgatccgttgggatgcttgagctgatatggaggacagggcatgaagatcaaggatggattcgtactgcgtgaggtcgccgggcagaccgtggtgatcggtgtcggcgcactgagcgagcagtttcacgggatgatccgtctgaatgacaccttagggtctgtgtcttatgctttaataaaccgctgtatatgcgcgttccgagcttgatgtgcgcgagtgttttgaagtgtttgggagaaatttcatgactgttgccacgttgctgaggatgctgaagaagtatctgattcttgagatggttattgtggtcgcttttgccgcgatggggtactggcagtcgaagaacacgccgcccacatatagggcgagcgcgcgtctgatggcgctgtaccagtcgccgcaatccggcaacagcggggacaatggcagtttcggcagccacgacggttcttcgtcgaacggcggcacctcgtatgccgagggcgggctgctgtccagcatgtcgtacatgagccagcagcttgatgtgctgcaggagctcgtgcagaccccgcaggtgctcgacccggtcatcaaggagctggggctgaacgccaccgccggcgatctgggcggtgccgtgaccgtcaagcattcggatggctcgctgatggtcgacgtctccacgtccggcacggatccgcagtacatcgtgaacctggtcaatgccgtatcgaagagcctgagcaaggtgatgagccaagagttgggaaccaccaccaagcttgaggtcgtccgcgaggcttccggtgccagacagatcggcccgaacgtgcgcggcgacacgttccggggtgcgatcgagggcctggccgtcgcgttcgtggtggcgctggcgctgggcttcctggacaacaagatccgtgacggcgaggacgtgaaggacatcaccaagtcgccgatcctaggcaccatgccgaaggatacgagccttgacggcagcgaggcgcccgtggtcgcttcccggccgaacggccgtgtcgccgagcatgtgcggcgcatcgctacgaacctgctgttcgccacgaagaacgacgtcaagggcgcgaacgtgatcgtcgtgacgtcgggcatgccgtcggaaggcaagacgaccgtggcgacgaacctcgcggtcgcgttcgccgagaacggcggcaaggtgctgctcatcgacgccgacctgcgcaacccgtcggtcgccaagcagcttggcgttaacggaacggtcggcctctcgcagctgctgactggcaaggcgtcggcgcaggagtccatccagcagtactggaagccgaacctgcacctgctgtgcgtcgggcatcgcgtctccaacccgagccttctggtgcgttccgacctgatgaaggcgctgatcgaccaggtcgaggaccagtacgatcaggtcatcatcgataccgcccccatgcaggtcgccaatgacgccgcggtgctcggccagcagggaggcggcgtgatgctcgtcgtcgcgcagggcaaggccacgcgcaagtccgtctccaccgtgcacaacgagctgaagatggttgacgtgccgatcatcggctccgtgatgaacatgacgtcgctggagaagcagaagaagtccgactattactactatgcagaggacacccaagcgggcgatcagggtgccgatgccggcaagcgcgctctgttcgcccggttccgcaaagccgggaagactggcgacggcgagggatccaaggtcgaccgtgccgacgatgcctcctggcgcgacggtgccgagccgcgcgtgcgtcgcgcgacctcgcaccgccgcaacgcgtgacgctgcgtcgtcgctcggatatggacgaggatagggcatggtagtcaaacgtcgcgtgctgttcatcatggagtcgatgggcgggggacgccggcatgtggtcgatctgatcgatcacatggattcggcgcactacgacatcgcgttcatatacgggacttcgcgcatggatgcggcgttcctgcgtgacctgccccggctgaggcgacgggtcaggatgattccgtgcaaccatctggtgcgtgcgatcagcccgaaggacgagctcgccgcgctgcgcgaggtacgccgagtgatccggggattcaaaccggatatcgtgcactgccatagctcgaaggccggcatcatcggccgtctcgccgccaagatggagcatgtgccgcaggtgttctacacgccgcatgcgtactcgttcctggcaccggagttcggcggccgcaagcgcaagctgttcatcactctggaacgttggttcagtcgccacgccaccacgcgcacgttcaacgtgtcggcgggggagcgcggtgccgcgctgcgggagcgccttgaccggcccgcgaaattccgcgtgatcgtcaacggcatacccgaggtcgcgctgccgagccgtatggaggcgcgggagatgctggggctggcggccagctgcccggaaggcgtgaagctggtcggtaccacggctcgcatggccgagcagaaggatccgatgacgttcgtggccatcgcgcggcaggtcgcgcgcgagtacccggacgtgcatttcgtgtatatcggcgacgggccgtacgaggagcaagtacgcgaggccgtacacgaggcaggtctggatgaccgcgtgcacctgctgggagcgcgcgacgacgccgatatggtggtcgccgcgttcgacgtgtacctgctgacatcgctgtatgaaggtatgccgtattcgctgttggaggcgttgcgggccggtgtgccgatcgcggcgacccgtaccaccggcaacgatgaggtcgtgaacgagaccggcgagctgcgcaacggcgtattgttcccggtcggggacgcggccgcgggggttcgcgcggtggagcggttgcttgaggagcctttgagcgccgagcaggttcgctgcagttatgagcgtaagtatacgctggatcgcatggtctcagccatcgaggacgagtacgagcatgatttcggtgatgcgcgtggcggtaagggtcggaaaaacgcgagggccggagcgggcgcgaaagccagcgcgaacgcgaaagtcggagcggcaggggaaaggcggaggccatgatactggtcaaactgtggtactacttcaccggcatgctgctcaagacgttctatcacctggcgtacgggcgggccatcagctggggcaaggccgtgcacatgcgcaagggattccaggtgacggtggaacgcggaggccacgtggcgttcggcgatcatgtgttcttcaacaacggatgccgcgtgcacgcgatggaatcgatcagcatcggtgaagagaccatcttcggcgagaacgtatgcatatacgaccataaccatcgcttcgccgacccgacccggcccatcaaggaacaggggtactcccacgcgccggtggccatcggctcgcactgctggatcggctcgaacgtgaccatcctcaaaggcgtgaccatcggcgacaacacggtcatcggcgccggatgcgtgatcgacggggatgttcccgccgattcggtggtgaaactggaacagtcgcggcaggtgacggcgatccgcaagccggcggtggcggcggccggcgagcgcgaggggatgaaggaatctgggatggaaccgggcagcagcgaggtcgagtccgcggcggccgcgagcggcgacaagccggtgcgtgtgctggtactggacacggtcatggaccgcggcggcgccgaaacgatgatgatgaactacctgcgccacatggaccgcagcaaggtcacgtacgatttcctcgtcaaccgcagctacaaggccgcgtacgaggacgaaatcgcgcagctgggcggcagggtgtaccgcatgtgcccgatgtacccgcagtatttcggccggtacaagaaggagttccgcgcgttcctgaccgcgcacccggaataccggatcattcattcgaacctggaggagcgcagctacttcgggctgcggatcgccgcgaagctcggcgtgccggtgcgtatcgcccacgcgcacaaccgcccggtcggcttcgacctgaagtccgtggtgcgcgagtacttccgtctgcggctgccgaaatacgtgacgtacatgttcgcgtgcggcgaggaggccggcgactggctgttcggcaagaagaaccgcaagcgtgtgattcaacagcgcaacgccatcgacaccgcgcagtaccggttcgacgtggccgtacgtgagcaggtccgcgccgaattcggtgtcggcgaaggaacgttcgtgctggggcatgtcgggcggttcttcccgcagaagaaccacgcgttcctgatcgacgtgttcgcacaggtgcatgcccagcggccggacagcgaactgtggctggttggcggcggcgagctggacgacgcgctgaagaaccagatccgggccaaggtgaaggcgctggggctggccgattgcgtgcggtttctgggggttcgcggcgatgtgaaccgcgtgctgcagggtatggacgcgttcgtgctgccgagcctgtatgaggggctgccggtcacgatgatcgaggcgcaggcggcgggactgccatgcacgatttcggaccgcgtgccgaagcagtgcgatgtgaccggcaatgtgcaggtcgtgtcgctggacgccgcgccggccgagtgggcgaagcggattttggcgggggctggggtcgtggccggggcgaccgccggagtggatgcgaatgccgcagccgcgcgtgcggcgtacgccgatatcgtcgccaaagccgggttcgatatcaacgccaacgcgcagtggctgcagcggttctatctgaacgcgctgcagaaggcggaaggagccaggcgacatggctgaaccgtcctcctcccgccgtacgcaagccgcggcgaagcagtccgacctgctgggcgagtccgaatcccgttgggacgatcccgaccgctacaacaactcgatcgccatcctgctgctgttccccgtgatgttcgtcgccaagttcctggtggatcatgtgctgggggataagtacttctttgacaacaaccgtattttgcagatgacgctgggcgtcgacacaggctgggagggcagctaccgcgttgcctctgatttgttctccaaactcaatatcttccatttcaccacgatggcggaatggtccaccacgctcggtgtgattttcacgttcgtgttgctgattctgatactgcgtatgccgtcattggatttgctgcagctggtgtttctgttggcgagtgtcggtctactgaacatctatgtgttcaacatcagcaaggacatcatccagttctcgttcttctttgcggtgtacctcgtgctgcagtttccgttgaaacggccgattatcagtgttgcactggtcgcggcgatattgtattacgagagcacgttcttccggtcgtactatattctgatcgccgcgttcgtcgtcggcgtgtacgtgctgctgctggtgttccgacggtacgttaagcgtttttctgcgctgacggcgctggagatcgtggggtgcttgttcgtcatggtgttcctcgcgctgctcgtcgcccagagggttatgccggacgagtataagcaggtggtgagtgtgcggtccgacactacgagtatccgtgaaggggacacgaccgcttcgaatacgctgattaccgatttgctgccgggctctggcctaccgggtttcatgctgaactatgtagtaaacgcattccgtatgatgattcccgtcgaactgttgaccaaaggcgcctactacattccgttcttcctgtttcagtgcatggtgacggtgtacatcatcaatatgctgcgccagattaacgaggtgcatgacagcaagcagttcatagcgatctgcgtgtatatcggttatgctttgggatcgttcatcttcgaacctgacttcggctcttgggtccgccatgagacagccacgttcccggtgcttcagctattggtattcagcacgaatcagcacttgtcttggagtgctatgaagtccggaacaaaggcaatggttgataaggcgcaggtggcggtgggcatgtcgagggggtgacgggggcgacgttgtccatcgtttccttggtgttgtttacatgacgttcatgagtttgttgcttggcatggtcgctgaaggggtatacggtaaggcgacagacgggggaagtaagcagcccgtaacaagtctgtgaggaatctaacccgtggcccgttaatctcttccaccgttctgcattgctgtctggcagccccaacgactcgaccggtcactggattccggagtgccgcgttaagtaagcctagtcttgctcccgctggtgggagctgccggcgtagccgactgagcggtcaatatcaaatcggcaacccacccaaattgaggggtgcatcacacgatgcgcccctcaatgtttattcaagacatccgcatcagcacccacgaatcgcgatataatagccgccatgcacatctgtttcttctcaggggatatcacgcgctcgggcggcaccgagcgggtttccgcgatgattgccaacatgctggccaagtccacggattataagatttcctttgtgagcctgtttgaggaagcggataagccgttcttcgccatcgatgatgccattgatcggcatgtgatttatccggttcccacgcatggcattcagcactacttcaccacggtgaaacggctcaaaacattggtcaagcagctgcgaatcgatgtgctcgtcgacatcgatggcattctcgacatgtatgcgttgccggtgaagcgatccaccggggtcaaagtcatctcgtgggagcatttcaactaccatcagaaccccggcgtaccatatcgaaagctcacacgccgctgggccgtacgcagggccgatgccatcgtgacgctcacgcaagccgacaaggtgctgtatgaaagcaatctcaaactgcgttgcccggtggtcgccatacccaaccccatcgaacctcttgcgggtgagagccggccatacagcgccgattcaaggacgattctgagctgcggtcgcctcacctaccagaagggcttcgactacctgatccaggtcgcgaccaaggtgctgcctgaacatcccggctggacgtggctggtgctcggtgagggcgaggatcgcgaacagctggagcaaggcatccgcgagcatcatcttgaagggcgcgtggtgcttgaaggtcgcgtggacaacgtcgaggactattaccgcaagtcggcgttctacgtgatgacctcccgctttgaggggctgcccatggtgctgctcgaagccaaatcagcgcacctgcccatcgtaagcttcgactgcgagaccggccctgcggagattgtgaaggacggcgtgaacgggtacttggtgccatgcttcgacacggacggcatgacaaagcggatcggtgagctgattgacgatgcggagctccgcgagcggttctcagcgcatgccatggatgacacggagaggtacgctatgagaactgtggccatcaaatggattaacctattcaaggtatccctgagataacatgcggatatctgcgcggcattgggaatagcgatggattggtgtccgaaacgctaaatgtatggggtgtactgttttgagatgtagattgtggactgttatgattagcttttgctaaaagccaccaatgcctctcatagaagcacactagggtggcatttttcttatcggaggattgaatatggctggtcgctcgggaccgcgaaattccagtgtggagctgctgcgcatattgtccatgctgatgatcgtcgccagccattgcgtgatgttcagcgatatgaacttgcttgcgcagccgctgggcgtcaacaagatcctgatcgagacgttcctatacccaggaggcaagattggcgtggtcgcgttcttctccatctcggcttggtatctgtccgaagccgggggagtacgcgccggattgcggcgggtgtggattctggaacgagagatgctgttctggagtctgacgctgctggcggtcaccgccgtcgtgaatcgctcgctggtcgggccggaattggctgtgcgctcgctgatgcccatcacgacctcgctgtggtggtatccgaccgcgtacgcggtgttcctgctgttcttcccgttcctcacgcaaggattgcgctcgctcggcaaaacggcacatggtgcgctatgtacgatcatggtcgtgctgtacacggtgctggacatggtcatgccgctctcggcggttgggctgcccggcggcaatgtgcggagcttcatctacatctatacgctgatcgcctattatcgctggtatatgaaaccgttgacgacagcgacggcatggtggacgctggccggtggatatgcgctgatcgttgtgggcgctctcggcggcgggctgctgtaccagcacaccggcaaattgcagacgttgcaggtctatctggacaaagtggagttccgtttgccggtgctgatggtcggattggcgatgtttgtgctgttcgagcggcacgaattccacaatcgcgcggtcaatgcggtcgccgcatccacattcggcgtgtacctgatttcggaatatcccacggtccggcagtggatatggagcaatccatggctcgacttcggcgggttgtaccggtctccggccgcgttcgtgctgatcgtgctgtcggtgtgcgcggtgttcgccggatgcgtcgtgctggacgcggtgcggagattgctgttccggattacgatagataggcgccacggacggtggttcgatttattgtgggaacacttgcgtagaaagttgcgccatgctgattacaggactgagcatattgagaaccgttagcaatgatggtttatagttgagcaggggaagccggacggaggcgggaaccagagaaatggccaaacgtaattcaagcattgaactaatgcgcctcgttgcgatgctgatgattgtaggagcacaataatgcatgatgaatcagctgtgggttcgcaggaacctctagtcagcgttattatcccggtgtacaaggtcaaggaataccttgatacttgtgtgaaaagcatcgtcggacagacttatcgcaatcttcagattgtcttggtggatgatgggtcgccggactcttgcccgatgctatgtgatgaatgggcttcgcgcgatagtcgcatcagcgtggtacataagcgcaatggtggtctcgggtcggcgcgcaatgcgggcatgaaggtatcgactggtgaatacatctggtttgtggatagtgatgattttgttgacctcaatgtcttggaacaagtggtgtctgccgcacagaggaatcaatctgatatcgtcatctttagcaatacgaatgatgtatatgctgatgggaaatattcaatgataggggagaatcccgttattgaattcacggccaatgacaatgatgagttcaaagatgttttcggtcgccttaccgatgcgtatctggctattcccgcatggaacaagttgtacagaagagcgtttctgcaagagcatgatgcttggttcaatgaaaacgtcaatgtggccgaggaccaaattttcaatatagctctatatccccatgcccgcaaagtctcgggagtcgtcgtgaggggatatcactatgtgctacgtccggggagtctaagttccaatacgtttaaccctaagaccttggagagtcgtctgagagcatatcgacttgttcatgatgtgctttctgactggaatcccgatgccttgaatttttaccgtaatgagttgcttatgcagataagcgttattgtcgacagtctttatgtgcggcatggtggattgtctgcagcagatcgattggatattatcaatgaaatcatgaatgacgatgatgtctgcgaggtggcgagagaagctaagacattgtctcatcgtaatggatatatcgcatggtgcgtccggcacaggttcgtaattggcttgaaggtatatggtcggattgttgccggcatgaagaacctccgacgaaaataaaaggcagatgcaatgatgaatgacgatgatttacacattgagcctctggtgtccatagtcgttcccgtctacaacgttgaccagtattgtgatgattgcctgcgatccattattggccagacctataggaatctcgagattattctggtcgatgatgggtctacggatgactgcccctccttgtgtgatcaatgggccgcggtcgatgatcgtataagcgtgattcatcagcggaatcaaggactttcgggtgcaaggaacaccggtttggatcatgcccatggtgagtatgtgctgtgcgttgattcggatgatgtcattgattccacattggttgagcaatgtatacgctcgtgcacgaaacgggggagcgacatggtcatgtattcctatgactgtgtgagcgagaacggggacgagcattgggcgcctgtggaagcgagctttttcccggcagctgatgtgctgcctccggatgatgtacttaggctactgctgactagtaagttgacgtatttcgcatggaagtttattgctaggcgttcgctatatgaggattataaggttcgtttcccggtcgggcacaagtttgaagatgtgggaacgacttataaaatcgtctccgctgccggaatcgtatcgttgattaatcaaccgctgtaccattatcgtcaacgttcagggtcgattctccacgaacgcaaggcggtgacgccgatgtatcgagatgtgaggtatgtgacggatggaatggtcgaattcatgcgcactgagcgtcctcatttggctctgctaagtgagacatatcgtgctgtgttctttatacgactggcatggtcatgcttgttcggtaaggaaagacctgaagattatgacgatgcgatacattatttgcgggctgcgttacgaagtacgctgcccattcgcatgatgccgcatattccgtataagcagattatccggttaatggttgtcatgcttatgatggtcaaggagtcagtaaggttgaagctacggagacataggtcagcacaatgagaaaatgcgcgtttatcttgccgtattatggataacgtccgaattcttgtgcactttcggttctggctctgatgcgggagggcacgcggctcgtggaacggacgtttccttggagatggttccgcggatattcgttggcggtaccatctccagatgctggcatgttctgtttacgtgatgatatatcgcgagaagcggcccttgccctcatgctccagtttgccctcatcctccattttcttaagtagacggtatgcgctgatgtagctcaagcccagcagattcatgacctctgaggaagtcacttcgccgccgttcttctcggccagctcaagtaccaaccctcgctgacgtgtcgctgagatattgttctgcctgacgtatgccggtaatgcatcgtctgccttgtacaccttggaactcaggatgtacgagcgggatatgccgctgccggacgcctccacaacgccagcctccaccaaattctccacggcaccagctacccgacgtttttccaatcgggaaaactcgtgaagctgcgacatagtcagacgacgatgctctttggttgcatcagatcgttgatcttgtcgaacatatcaaccaacggcagcacagaaggatcggtattgacccgcggtgtcgtcccctccatgacttggaacgtggctgaggcagtgggcacacacagcgtttgatggattcggtagtgccgatggtcaataacccggcgatggtgggaagctcttcgccctcattgccggataccagtccaagggttctgtcggaatccatatcgtcgaaagtcagtagcgaattgtttgcgttggtctcacgaatgcgttggcgcaaacggtttcgggcttcggagtccagatctgcgagtgcgcctcctggagccggcatgccactgtaatcataactgcgttgttgtgagagtcggctgatgaattgtgagacgaataacggcactacttcgggagtgccgtcggctttgagtcagcgttgcagagttttgccgctgcttgtggatacgatctgttgactgttatctacttctattgctaccacttggcagccatgttcgtgaaaagactcgattcgggtgggtctgctgcggtacggttttgttgaatatgaaggccgcgagtccattgatattgggatgctgctcggagacgccggcgacagtgccgttatcttcgattccgaggtagagcgtgccgccttgtgtgttcgcgagggcaatgatgttactacgatttcatcgtctgattgcgggcggcgctgttcgcttttgaattcaacagtcagagatccccgatctggtaacatcgctttcctttcataacctttcataattctaacatgtaagatttacctcttacatgttagaattatgaaagataggtagggaaggtcagattcctatagcaaggggaactcatcgggtattagctgaatcggccagcgggacagctggttgttttttccgttcacaagctctgtcccacagcagctcgaaccagtgcccgcgacgccggtcgatggtgacggcgaacagtgcctggcggatgaagtcgatcagggtgcaggccgcgtagatcgccagcaggatgccgaggatctgcgggatcgcgaatggttgctggtagaggtcttgcaggttgaacagccgtgcccagagcagtttctcggaggctgcgtagtcggtgatcaggtacacggcgaacgcggattgcgcgattcggttgatggttcgattgtggaaggtgacgcggtcgaacagcaggaacatgccgaagcccaccatgatgacgggcaaccgccaatcgctggtgatgtatattcccatgtcgtgcccgagcagcgacaatgttatggaggcgcaggtgtacagcaggaagaatccgagacctgtgccaatcatcagccagacctgtctggtggtgaacggttccatgtaccacttataagcagaaatcagaatgaacaggtagatgaacccgaggaaaccgtcgctgatcctcaccattccggggatgaagctggtcaatccccagatgaccagtacggtcgtggccagagcgaggtggtattcgcggccgagcgccttcaatcccttggccaggaaggggaggagcgccaggaaaatggcgtaggcggtggcgtaccaccacacgcccatgctcaacggcatgacgctcttcaccatgagtttcatgccaaggtcggcccggtcgaacacgaggtagaacgttacgaggataaggctccagaacaggagttcgcgttccatgatccacacgcgtttcaggttggatttgatggtctgttccttgtcgaggaagaaccatgcggagatggagaagaagatgacgacgccgaccttgccgccgccggccatgacgagttggaagaagatccgctccggccccaaggggagtttcagcacgtcgtagccgttatggacgatgaagtgatgggcgaggatcatgaacattgcgatgatgcgcagcagttcgatgttggagtttcgccccccccccatttgcgattcgggaatgggcgggtgcgccgtgtttggcgtttacgcggttgtcgttctccgcgtcctgtttctttttgttcacaattctactgtagtctgtggtccctcttccctccgaatcctacacacccaaaccgactgtgctatcttacgaaaagataaaatcgaacaaatgcttgagtgtgtggtatgccgccgttgaggattagataggtgtgagtcggagaatggggatattgtctcggcggggaaggatcaatgcatgaactatattcggcaagaggttgctggaatgattaaaaccattggaacttttttgaataccgaacatccggggcttaccaatgtttcagacatattcacggttggtatttccgtgatttccatcgttgttgcttttatgtcatatgcctatgtgaagaatcatgaccggcagattgccaaatttgaacaagcgaatgagatatcgtcttgggtggtacatgattcgaaaggcggcgttcagatggtggagaattctccattaatgaaggtttccgtcaataatggttcgaatcagccgatctatgatgtcgttttaacttctggaacatatcaaggggctggcgccgattatttgagcgggacaaataatactgtttgtgtaggtaccgttcctcctgggagattcgcttttgaaaccaggctgtgcaacaatgaatccaagcaatgaatcaagcatttcgggatgctctggagttgttcgatcttctccgccccaagtttggaggttgttatgcatgccttccagcagaagctgaacttgtagctcattgagtgtatgaatagctttaaacgttggtatatatcatcacgctgataccaattccttgccttcgcaaatgctttaacgagagacgtacacagcttgttttgcaaagattctcttgtcatacaccaatctacaattttagctgtaatttgatcttcagattcattttcggcaacaggctgcgcttgacatcctcccaaaggtccatagggatcttggtacacgccgtttagtttaaatcgcattgccagaactttgtcttcagaacgacctagcatccatcctatttcttggtcgcaccaagtgctagctttgaatgcctctcgatcggtgagaaacgcaatccccgcatcacaactcgaaagagcatctttaatttcagctgaccagtcttcactaatgcgtatatcagcatgcgccacaaatagtttaataccccagttccattttaaggcatcagatattttggcctttcgctgtttggtgtgggtgaagcgggttaggcggtgacggtgttgaggtcgagtttgccgcaggtcaggtagatcatggtgccggagtagtccatgttcctgaagctgcgggagcgggttttgacgtgctggatgatgctgttgagtccctcgaggatcgcgttggcgcaccgatggtcgaagtaggccaggatgtcctgccggtgccggcggaactgtccggcgagggccttcatcggtttcagccgcgaatgcatcatccacgagcacaatgccttgaacccggcctccgcctccgtgcggctggcgctgtcggcgtagatgccctgcaggcgttcgcgcatcccgcacgccctggcggtcttcgaccgccgcttcgccagattgcgcttgacctccagctgcgggtccgtgaggttggactcgttcccgggccacaggtacttcgtgcgtttgagcagcgggttctccctggcctcggccttacggaccttgtcgacggcctcgttggcgtgtttgatgacatggaacttgtcgatgattttggccgcgttgggcaagtggtcgcggatgcccttggcgaatcccgctcatgtcgcacgtcaccaggcgcacgcggttcgggtcgccgttttgcgccatgaaatcgtccgcgaaccgtttcatcgtggtcgagtccttgcccggcaccacgcagatcacgttgcgctccgtcaggtcggcgacgacggtgatgtactggtgtcccctgcggctggtctcgtcgatgccgatcgtctccacgcccgtgtagtcctcgtacaggcgcgcctcgtccacgtaatggcggatgaaccgccacagtctcgtgtcgtgctcgccgacctgttcggcgatgtccgcgaccggctggcttttcgccggttccacgaccatcgcctcagacaggagcgtgaacccgctgcccggacgcgcccacggcaccgtcacagtcctcacgccgtgctccgggcacgccacccgtggcacggaggcgtggatgaacgccttgtactggaagaaattcaggtgacgccacgtgcgttccatcgtgtcatgtaccgggcaagacgcctccccgcatcccgcctcgggacagtggaaacgggagccgggcccgtatccaatcgtgatgtgcagctcccgcccacccgcgtcggtatcgcggaactccacctcggtgacgcgccaggggtcgacgagttgcaaggcggcggcggacagcatcgtggtatccatgccaccagaaccaccctaccgtcgtcaccgcctaacccgcttcacccacaccaaacagcgaaaggccttcatggattttgaagaggcagcgtatgaaagctgccatccagttgagaaaagacgtacacacggatcgcagacgtttcgcagaggcttatgcggctcccgcatgcgtctctcaaatgcaatttggcttcgtggactcagatgattatgctggcacagattatttcgagaaaatgctctcttatgcggatgaaaccgttgcgatagtctacgctgaagctaatagaaccaatgctgatggcagtgtggctcctttcccgtcaaagggaatcgttcgagacgtggtcgctaacaatgcttgcgacttttcctctcagtattcgcatgagggtcgtttgagcatgtttattcagaacttctgagttagggaaaccggtttgaaatggatctgtcaattggtgaggatatggtctcttactataggtgtctcattgctgttgacagatgtaggtatactgattgggcaggatacaattatgtgtgaaatcttgaatccattacgaaaggagcaattatttcaaacgtcttatggatgggccttccgcttggatgagaatatcggaagtgtttccgtttaaagagccaaaacagacggctgcaagcattgcttcatggaaactgtccagtgcagttttgcatattggcttcagctatgaattataatgtagcgtatctagatacgcggctttttaactcaggggcgaagatggctttgtcaatgaaagatggggaatgttaattgcaatcaatgctttcgcatttaatggttctgatttcaaacattgttaagtagaagtttttgtttttttaaaataagttgtctttaacaagtgggttttaaaaggaagtctttgggtcgaaccgaagggaaagttcgatggaattgtatcttggattagaaagtagacgatgtcaaatcagctgaagcagactcattccgtgaagttcaacgcggtgatgaacacgttgctgaccgcgtccagcatgctggtcaacgtgattacggtgccgtatgtcacccgcgtgttgtcagttgaaggatatggggacgtgatgttcgcccagaacgtgtcgcaatggctctcggccgtgtgtctgatcggcgtgcccacgtacggcctgcgcgaatgcgctcgtgtgagggacgacccacgggagatggcccgggtcgtgcgcgagctgctcgttatcattacgatattcaccgccgtggtgctggcaggcttcggtgtctcgatcctcattgttccgagatttcggcagatcgcggccctgatgtgggtgttcctggtgagcaccctgctgctgtcgtatggtgtggaatggttttttcaggcgatcgagcagtacaagtacatcacgatccgcagcatggtgttcaaaatgctttcgcttgtggcgatgctggtcttcgtgcgcggcgaggacgattacctggcctacggcgtgatattggcgctcgtggtgtgcggcaacaacgtgctgaatctggcccgcatgctgcgcatggtgtcattctccggtctcggtccgatgtgtatcggcaggcatctgaagcctttggcgtcgtatgcggctttgtccatcgcgtcatccgtgtatctggcgttcgacagcatcctgctcggcatgctgtcgccaagcaatgttcaggtcggcctttaccagcttgcttcaaaactgaaaggcatctgcttcagtgtaatcaacgcaatcatcggcgtgttgatccctaggctttcctactacgcaaaaaacgatccggaaaagtatggggcgctgctgcgaaggggatggggattcctgttgaacctctgtctggggatcgccctgtatctcctggtctacgcgtacccgctggtggtgctgatctcgtcggagaagtacgcggacgcggtccttcccgtgcgcatcatcggcctggtgaatctgctctcatgcatgagctacttcttcggtctgtgcatcctctccccgttggaccaggagtcgaagctcgcgcgggcgaacctcaccggcgctcccatcagcctggtatgcaatctgctgctggacggcacgtttggtgcgactggtgccgcgatatcggtatgcctcgccgagctggtgattttcctgatgcagctgcatgattgctggccggtgctcaaaaagcatatcgacgcatccgatgtgctgcggacgtttatgtcgcatatcatggccgcggcggtcgcattcgccgcaagcctgccccttgccggactgaacgtggcggtccagttggtcgcgggtttcgccgtgtattccgtcgtctggcttgtcgcggccctgatcatgggagaaacaaccgcgcgatgggcattcggaaccttgcgaggattcacgaaaaggagataatcggaaagccgaaaactttttttggctcagtactccgtgtgtgctctgctagagcattgttctgccttcgagaatcaaacttcgtcagaagtctttctttcttactgggcataggtgttaaaagcgatttacctgcaattcaggataacgcccgtcttcttggataacgcccgattttttgcgcactttcggattccgggtctgacgtaagagggcatggcccgcgtcctgtgtacgattttcattcgccaaaacaaaaaaccgcgattggaagccaggagacggaaccaagaccctcgaaca

SEQ ID NO: 1416 - DNA, 13030 bp, Unknown
  R257_15m  MAG No. k141_11882
aaccagtcattcgacgcgtggcggcgctaccaacggttcatcctgcccggcgtggcgttgtgcgaccgtgcggcatgcgaacgactggatcagcgttattggctggccgataatcccgaggaaatgctcggcacatatgcgtgtccggtgctcatcgtcaccggcaagcaagaccagatcgtcggatacgaagaccagcaagccctgttgccgcactatcccaacgccaccttcgtgactctggataatgccggtcacaacgcgcacatcgaccaacccgaagccgtcatcacgctcgtgcgcgaatgggtggctcatatggcgttcgttccgttgagctgacggtctgctgacagtctgccgaagcctatatgcatatgagcgaccaatgccggttgacgcaatacgccttgcaaggtatatcgtttttcgatatagtcatatcgatgttcgcggtgtcgccaaaaacgtcggcacctgaaaggaccgggctatgaaaaactacatgaaccgatgggtgttgctcgcgttgaaagccatcgtgattctggtctggctggcctgcctatggggccaactattcgccgtaccgggattgagcggcgcgctggccggcctctgcccgagacagacgtcgatgcactggtcatatctcattatgggcgtgctattcctgctctgcatcgaagcggcgttcgtggccgtatggaaactgttctccttgtccggatcgggcgcgaacttgagcaggtgatttgagatgacgattcgcatcaatctcgacgtcatgatggccaaacgcaagattggcgtcggcgagctcgccgaacaaattggcatcacgcccgccaacgtgtccattctgaagaacggacgtgccaaagccgtccgcttcaccacattggacgccatctgcaaggcactcgactgccaacccggagacatcctcgaatgggaagatgtcgattgatcgacacgccaccggctcgaactcatggttcaacttgtagtctctctcaaaatcaatgatgccctatcatcctgcaagacgatagggcatcagcatgtgattatgcgcagctgatatgtcgcgttgttatcactcggcgtccgcggccggtgcctccttgggcgcggagaggaagtgctcctcgctgggcagcacggcgttcaggattacggccaccacgaacgacacggcgatgcagttcgaggcgaagatttgttgaaacagtgccgggaactgcgcgaagatgtcgctcacctgggtgaagccgatgccgatggtcagcgaaagcgccgcaatcgtgatgttgcgctgcgtgaagcccgcttcggcgatcatctggaagcccgaaagaatgatgttgccgaacatcatgatcgtgcagccgccgagcaccgcctgcggcagcgagttgaacacctcggcgatggccggcacgaagctcgccagcaccagaatcagtccgccggagagaatcaccttgcggttgacgaccttggtcatggccaccaatccgatgttctgtgcgaacgaggtcagcggcaggcatccgaacaggccggatacggtggagatcaggccgtcgccggcgatggcgcccgcggtctcgcgttcggtgggcgtacggttcaggcccaccttggtcagcgcggcggtgtcacccagcacctcgaccgaggagacgacgtagagcaggccgatggagatgatcgaaccccagtcgaactcaggcttgaacggcatgaactgcggcacggacacaatagcgaggttctggaaaccggagaaatcgaccttgcccatgcagatggccgccacatagccgaccaccaggccgaacagcacggacagctgcttggccgtgcccttcatcaacagctggaacgccaggcaggcgaccaaagatataagcccgagcgtcaggttctgccagcttccgaagtccttggctccgctgccgccgccgaagctcgtggcacccacgttaagcagcgagaagccgatcgacgtgaccacgatggcggagacgatgggcggcacgaaccgacgccaatacttggccgtcaaacccagcacgagttccagcaggccaccgaccattaccgcgccggccactgcgccatagcccttgtctgcgcagatcgccacggcggccgccacgtaggtgaaggagatgccggtgaccatcggcagacgcgagccgatgagccacgcgccgtacagttgcaggcaggtgcccaggcccgccaccagaaggccggcctggatgatggtggccgattgggccggggtcattttcgcggccgaggcgacgatgaagatcggggcgaggttcgccacgaacatggccatcacatgctgcaggccgaacggaatgcccttccagaaggatactggcgcgttcagcgaagacagcgcctcaaaggatacggaattcttggttttcttctctgacatgattcttttcttctctctgttgctcccgctggcgggagcagtcaatgtgctcagtgcctaaatgtgatttcgccggtctcgggattcatggactcgacgatggccagcgaatccacatcgtagccttcggcacgcagcgcgtcaccgccgccctggaagcccttctccacggcgatgccaatgccctcgaccgtgacaccggccgcctcgcacaggtcaatcagaccgcgcaacgccttgccgttggccagaaaatcgtcaataagcagcacatggtcgccggcgttcagatacttcttggccacgatcaccgggaactccttctgcttggtgaaggaatagaccgtggtggtgtactggtcgccgtcaaggttgatggactgcgccttcttggcgaacaccaccggcacattgccgaaatgctgggccgccacacacgcaatgccgatgccggacgcctcgatggtcagaatcttggtgatgtgcttgccggcgaaatgagcggcccatgccgaacccatgcggtcgaacagacgcacgtcgcactggtggttcagaaacgcgtccaccttgagcacatcacccgccttcaccgttccctcgctctggattcgctcctcaagttcctgcattagacctcccattgctgtatgtcagtgaatgatatggatacttgtaagtgtacgttgtcctgcgctgacccgtgcatgtggtaaacatgaatgtcgcgattcaaagggaggcaacagtgtacgacgagccggaagtcatcgcacgcagcgcgcaggaactcgtaggcgatctgaacccgcagcaggcggaagccgtgcaataccgcggtcaggcgctactgatcggcgccggtgccggctccggcaaaacccgtgtgctgacccgccgcatcgcctggatcttgagccagttcggcgcatggccgagccagattctggccatcaccttcaccaacaaggccgccgccgaaatgcgcgaacgactcggctcgctgatcggcccggtggcccagcgcatgtgggtctccaccttccattccgcctgcgtgcgcattctgaggcgcgacggcaagtccatcgggctcaagtccggcttctccatttatgattccgccgactccgagcgactcgtcaaaatcatcgccaccgaattcaacctcgacatcaagcgctacactccacgctcgatcctcggccatatctccgacctcaagaacaatctgaccggttggaaggaaaacctcgccgttcacgcgcccgacttcacgcctggccagcgcggctaccagttcggcacggtgggcgaccttgaagccatctatgcggtgatctacgccgaatacgagcatcgcttggccctggccaacgccgtcgacttcgacgatctgatcggccgcacggtcgagttgctgcgcaccgacccggccgtcgccgagtactaccatcaccgcttccgttacattctcgtcgacgagtatcaggacaccaaccacgcccagtacgtgcttgtgcgcgagctggccggcgtggacacgggggagaaggccatcccgggcgcgccgaacgccggcaagtccggccccgcctggatcaccgtggtgggcgattccgaccagtccatctacgcgttccgtggcgccgacatccgcaacatccaggacttcgagcaggacttcccgaacgccaagaccatcatgctcgaacagaactatcgttcgacgcagaccattctggacgcggccaacgcggtgatcagcaacaacgagggccgcaagcccaagaaactgtggaccgcgctcggcaagggcgagccgatcgtcggctacgcggcggacaacgcccagcaggaggcccagtgggtggccaccgaaatcgcgcgcctgcacgccgaagagggcatctcctactccgacatggcgatcatgtaccgcgccaacgcccaatcccgctcgctcgaagaggcgctgatcaacacgaatcagccgtatcagctcgtcggcggcaccaagttctacgaacgtcgcgaaatcaaggatgcgctggcctatttgcaggcgctcgtcaatccggacgacgatgtgaatctacgtcgtattctcaacgttcccaagcgcgggcttggcgaccgcgccgaaggcgtgctgctcgcctacgcgcgcgagcatggcaccagcttcttctacgcactcatgcacttggatgagatcgaggtgccgacccgcaccgccacctcgctacgagcattccgcgatctgatgggcgcgctctcgcagttcacgcacgcgcacgactccaagcccagcgagatcgtggccgaagtattggagaagtcgggcttaagggccgaacttgagaaatccgtggatccgcaggacgcctcccgtctggagaacctctcccagctgcagtccaccgcagccgaattcgaacagaacacgcctgacgccacgttgtccgcattcctggagaccactgcgctcgtggccgactccgaccagctgcccggtgaggcggaggactccggcaaggtgacgctcatgaccttgcacaccgccaagggcctcgaatacccggtggtgttcctgaccggcatggaacagggcaccttcccgcattcgcgttcgatggaagacaccactgaactgcaggaggaacgccgactcgcctatgtgggcatcacgcgtgccaagcagagactgtatgtcacgcgcgccgccgtccgctcccagtggggccaggccgccgatatgatgcccagtcaattcctcgacgaaattccggattcgctgattgattggaaacgccgtgaagccggcgtggagcgtatgcgcgccaactgggagaccgatggattcgccgacgatttgggcggctgggatgatgacgatttcggcggtgccacgtttggtgggtcgtcgacgttcggctcgcgtggttcgtccggttcgggttcgtcctatgggtcgcggtcgcggtatgggtcgtcgtatggctcgggttccggctcctcgtcgtatggttcccgttcaggttcttcgtacggttcccgttcatcatcatatgattcccgctccggctcgtcctcctacgggtctcgctcccgttcggggtcgtcttacgggtcgcgttcccgttccggttcttcatccggttcatatggcggcacccgtggcggcaaggtcaccacgcgccgcaccacaccgaaatccggttcgaccggctctgccgtgcccagctcgaagctcaccaaggacaatggcctgaatatcgccgacttcgccgtgggcgacatgatcagccacgaccagtacggtctcggcaaggtcaccgacgcgcaagacaagggccgcaattcggtaatcaccgtggacttcggctccgccggcgtcaaacgcctcatgctccgcgtagcacctattgagaagttgtagatagattggcccctctgacgaggggctgagttatataccaaataaattcacaaaaaacaagacttgtgttcttcatcactatctgggcataatgcggaggttgcgcctacgagccctgggaacaggggagaggaaaaagtagttatgaagaacaagctgtttgcatccgtgcccaatattctgttcggcgcgctgatcaccatcgcgccccagacctttgcgcacgcctgcaccggccatgacatgccgggtgcctgccactactcgcagcaggcggccaccggcatcggcgtcgtcatcctcgtgttgggcgtcgtggctttgttcgtcgccccgcagattcgcatcggcctcaatatcgccgccgcagccaacgccctgctactactcgccgtacccaccttcctgatcggcatctgcaagggcgcgatgatgcactgccgcatggttatgctgcccacgctcatcgtgctcggcgtgcccaccatcgtgttcgcggccatcgccatctggctcgactctcgcgccgccaagcgcaactgatcgagcagacggccggagcccagccattccgaacgctggactccggtctcgcttattgcaaccgcactataagcaacataaggactcatcgtgccatcccatatcgcattgcgcggccttccgattgaaaacctcaaacgcaagccgttccgcaccggcgcactgctctccgtcgtcaccatcctcgcgctgacgttcttcggcggcaccatgctgaccatgaacctcaacaccggaatgaccagtatggagaagcgcctgggcgccgaccttatggtcgtgccgcaaaacaccgcgcagaaggctgaagcgctgctcaccagcggcaatcccagcactttctatttcaccaaagacatcgccgacgaggtcatgcaggccgacggcatcgcacaggccaccgaacagacctatatatcatcgctggccgccgcctgctgtgccgaaaagctgcagatcatcggttacgacccggacactgacttcgtcatcgaaccatgggtcgcatcccagttcgaaggcccccttgaagacggtcagatgattgccggcgcaaacgtcaacgtgtccaccgacggcaccatcgaactctacggccataagtggccggtcgtcgcccagctcgccaacaccggcaccagcctcgacaattcggtgttcatcaaccaaaacaccgtgcctgatatggtcgccgcctcggccaaggtctccaagcaggtcatgcccgccgaatatgcaggcgaagccgtctccaccgtgatgatcaagacgcagcggggttacgaagcgcagaccgtggctgaaaacatcaagcgtcttgactcccggttcgccgatttggggtacgtataccccggcggcatcaccgccaacaccagaacttcgctgaccgcgcttgtcacctacctcaagattttcgtggcggtgatctgggtaatgggcgtgattgtgctgctcgccgtattcgcctcgtcggtgaacgaacgcaaacgcgaattcgcgtccctgcgcatcatgggcgccacgcgcggcatgttgaatgccatcattctgaaggaatccgccatcatcggtctgatcggtggcgtaatcggcgtcggcgcggccagcctggtgattttcccattcagttcgctgatcggcaaacaacttcaattgccgtatctgcaagccagcccggttgcggtgatcggattcattgccgtgaccattgtgtgctctacggtcatcggcatcatcggttcgctggccaccatgtggcgtctcggccggcccgaagcctacctgaccctgcgagagggggagtgatatgactgagacaactacgccgactcagctgaccacggttgagccgaccaagctccagccgaccacgccagctcagccgaacgcgccgactgcgccggattcgccgcacgtaaccgagacgccctccccggaccatctgctgaccttgacggacctgacccgccagttcgtccgccgcggcacgccgttcgacgccgtcagccacgtgaacctcaccgtcgatgccggcgaattcatcgccatcgtcggccggtcgggcaacggcaaaagcacgctgatcaacatggtcgccgggctgattcgcccgacctcgggaaccgtgagcgtggctggacgcaatgtggccgacttgggcgataaagcactgtccgtgctgaggaatcgcaccatcggattcgtgacccaaagccagaccctgctcggcaacctgaccgtgctcgacaacgtgattctgcccgcaacgatgtttccggagccgctgccgtttgcccaaaacgcagaagcaacggatgccgttgctcaggtggacgctgttgcgtcgaccgatgccgtggcacaagccgctgccaccaatgatgaagcagccgccgacctgttcatgccggatgtcattgcgccaatcacagaccgggaaaacacgccgtcaaacacggctgcgagccgtccggacctgttcgccacccgagctcgcatgctgctcacccagcttggtgtcgccgatctggcagacagctacccgcgcgagctgtccggcggtgaaatgcggcgcgtctccatcgcccgcgcgctgatgaaccagccgagcctgctcatcgccgacgagccgaccggcgacctcgaccaggagagcaccgacatcgtaatgcgtctgctcagagaccaagccaacaacggcacggcgattctcatggtcacccatgatcccgatgcactcgaatacgcagaccgggtgtatcgcatggacgccggagtgctgtccatagcctcggtgtaatatggtctgctggtgtctgccaacaggtagataccgtctggagtcatagcccatcagcgggtcggcggtaggtgatcgcaagaaaaccaacccgttcgtgttcgttcacgacgaagcgctggggaggcccggctcagcgcttgccaggcatatgcaaggcaagcgttccgttcagataacgacagaaggattaatccaatgacgaacgttcagcgttctcgccgtcaggtgcgtctgtctcgcgccctcggcatcgcactgacccccaaggctcagcgcatcttcgaaaagcgtccgtatgctcctggcgagcacggccgtgaccgccgccgcaccgagtccgattacgcggtgcgtatgcgcgaaaagcagcgtctgcgcgctcagtacggcatctccgagaagcagcttcgcgccgcttacgagaaggccacccgtactgccggccagaccggtaacgccatgctgaccgacctcgagacccgtctcgacaacctggtgctgcgtgccggcttcgcccgcaccaccgcccaggcccgtcagttcgtggtgcaccgtcacatccttgttgacggcaacatcgtggaccgcccgtcctaccgcgtcaagcccggccagaccattcaggtgaaggccaagagccagaccatggttccgttccagatcgccgccgaaggcgtgcaccgtgacgtgctgcctgcggtccccggctacctcgacgtgaacctgccgtccctgaaggccactgtgacccgtaagccggaggtcgaggagatcccggtgcaggtcaacatccagtacgtggtcgaattctacgcccgctgatccgggccctctggtcaacaaatccaggacataccgctcgaaccccgcgcttctttcgagaagccgcggggttcctgcgttgtagggcgattactggccgcacaccgcctgacgaatcatcgtcgcgtacgcataggcaccggtcatattcggatgaatgccgtcatcgttgaggtattcgctatgaccttcgctatacccatgccaatcgatgatgcccacgttcttgttcttcttggcggcctcacgcagcatcgtattgttgttgttctcctgccacgggtatggcatacggatggtgatgaagtatgtcggcttgccgccggtcaggtcaatgagctgttgcacttcctgctcattcgaaatcacgccgttcgtgccgaggccaaacaccaccacactgccactgcggccggcagcggtgtcctgctgatacacatccaccgcctgcggcatctgacggttcggcaggccatcgataaaagcgttcgggaatgcggcctggatggcgtccgaagtacccgacgtcactgaatcgccgaccatcatcatatccgcgttgcagctttccgttgccggatcataggcgtacttcgaaatgtcaagattgtttggcaccttttccgcaatcggtttgatggtgggcggctgagaatccgaaccgttcttattcgcgtcagcggtattggtttcgccgttcgcggcattcgtggcagaagactcgggctcgggcttcgccggtttcttgaccggcttggcgggtgccgcgagttcggggcgcagctgaatggctcgcgcttgagcgatgccattccaatccaccggtgcccacgtcagcaccacaacggtcaccaatccgataaccgacatgacccacgcgcccgggcgcagctggtagccggctttcggcagcggcttggcatgttggctgcgaggcatctgcaccgatttacgggccgcctcgaccagctggtagaaggcttccgacgccgtcaacaccacgatggcctcaagaacccaaccccaccacggcaacgcctgcgttcgtgtcgccgggttcatgaactgcagcagcggataatgcatgacgtacagcgagaacgatcgcgacccgatatagcgtaggggagcgcaacccagcacgcgcgaccagattgagtcattgttcacggcacaggccaaggcgcacaacgatatgaacgcggtaatcaggtacccgccttggtacatgtacgacagatacccgttggcgaaccagaatccggccagcagtgccgccaaagccgcggtgccaagaacattgcagacgatagtgagacgggcgcccgtcttgtcgccggcctgacgtccgatctgcactgtttgcgaagccgctccagcttccgcaacttccgtacctcgcgaggaaggcgcaatccagatagccaacagcgcgccggcggccagctcggcgagacgagtatcggtaccgtaatacacgcgggaggtattggccgggtcaaacagcagcaccatggcggcggtggaagcagccatgatgacaagaatcgccatggagcgcacccatttggacttggtgattttgccgagcaccaccatcagcaacggccaaatcagatagaactgcatcgtcacgcccaagaaccacagatgggtcagaggagaaggcaatccggccgcctcgaaatacggcaccttgcggaagatgtacacccaattgctggcgaacaaggcgctcggcagcgaatcggaaaccactttctgcaacaggctgggagcgaacatccaagtgagccaaggcaccacggcaatggtcgccagcatcaccggccataaacgagtaatgcggcggatcagatatcggccatatccaaaggacccggtgcggtccaccatgttcagtactgaacgtgtggcaagaaaaccggtgataacgaaaaacatcgtcacgccaatgaatccgccctgcaatagcgacgggcgggtgtggaatgctatgactccaagaatcgccagagcgcgcagtccatcgatacccctgaaatgggcaggctcagacgattgagatggtgcaggtttcgaggttatgctcatagtaccctaagtgtactctcaggaatcgtcaggtatactacccggattacgcatatctcaggtagtgacctatgccgttatgacttatgacttccggcagcccgcaccgaaaccgccggaatggtgacataatcggaaccatgattcttcatctgcatttggtccgtcacggacagacctatttcaaccgatacaaccgtctgcagggatggtcgaattcgccgctgaccgagtcgggcgtcgctgatgccgtcaaggccggtgagcgactgaaaggattgacgttcaccgccgcctactgttcggacaccacgcgtgcccggcagacggccgagaaaattctcgacatcaacgaagccgcgggtaacccgcgccccgcactcgtgacggacatgcacttccgcgagcagttctacggctactacgagggacttgacatggccatggcctggtacgccgcgggagcgcctcacggcgccaaaacctacaaccaaatcgtcgagaagttcgggttgggggcctcgcgtgattttctcaaggaagccgatcccttccacgatgcggaatccgatgaggaatattggacgcgcgtcgaaggcgcgttccgtcttatcgccgacaacccgaatctcaaggatggcgacgatgtgctgcagatttcgcatggcaacacactgcttagcctcggccaccggttcggcggccctgacctcgatctgaacgaacgcccggccaatggttcggtaaccgtgctcgacttcgacaccgacaagccgttcggcgaggccgtgaccatcgtttcgtacggcaagtagcaaatagcaagcaatacatatcgaatagcacgtacggtccacggcggcacgccgcaaacgaaagcgtcagcaggacacctttcgcctatagccgcatgcatccacgcgcacggttttcgccctgcgcgtgcaatggtatgccaagaaatagggaaggagtgctacccttaggcgagtaagtgtgaccgcaaggaggaaacaatgggagtcggagagatcgctggcctgatcgcggccatcgcgttcgcagtattggccggtttcatgatctatccgctgatcaggctgggcaagatgtttgatcagatatcgcagacggtccgggagtccggcgaacacgccatccccgcgctggacgaaggcgtgaccaccgtcaagcaggtcaacaagtcgcttgaagacgtgaacaagatttccgccgcggcttccaccaccgccaacaacgttggtgcgttgactgatctgtatggctctttcctcggtaagcccatcatcaagatcgcttccaccttctacgcgctgaaaaccacgggtcagtccttcct

SEQ ID NO: 1417 - DNA, 22718 bp, Unknown
  R257_15m  MAG No. k141_12136
caacaggaacgccgatcccaaaggagtgcccacagatagggcgataagcgcgtaggaaatcagcatggtctcgtccatcgagacggacggaagcaatgcgcggatgatcggttcggggaacacaatcatggcggcggcgaagaatatgatcagcagccctacgttgttcagcgcgctcaccagatcgtgccgtgcctcatccagattcgcagctgcgacagaacgggagattttggggaacatagccgtggataccgatacggcgatgagcgaatagggcaggatgaacagtgtgtacgcattctgataggtcgcgttgcctgccacgctgaacaggctggcacccgtcagttcgtgggcgcgctgcggtgcggatgtggcgatacgggtaaggataatgccgcagatctcgctggtgaccaccacgcccaaagagcctaacgccacgggacccatagacctgagtccaaagccgccaagcccgaagctgggtttgtacttgaacccgatacgggccagtggcaggaacagtatcagcgcttggaaggccacgcccaaagtccaggtgcctgcggtaagcgcaatcttgtcggcggtccagaattcgaggggctgttcattggccttgctgaacagcagaataaaaccagtaaaaccggcgcaactaataatgttggcaccggttgagctccacgcatacgtgaggaaatggtctttggcggccaggatctgacccaataccgtatacaggccgtagaagaacacctgaggcatacaccacagggtgaacgaggtggtcagggctatcatctggtgatcgtcgctacccacgtacaggcgggcaagcagagggctggccgccgccatcaccacggtcatggccaacaggatgccgatggccaacgtaaccagacgattcagtcgttcttgggcgtctttttctttcaacgtgcgcacgatctggggcaccagcacggcgttgaagatgccgccggacaccagcgtgaacacggattggggaatcatggaaccggcctgataggcgttggccgccaatccagtggtgccgatggccgcagcgagaagaatcgtgcggagctgaccggtcacacgggaagcagcggttcccgtggccatgatcagggaattacgacctacggttgaactcattcgtcggggtccttcttccgatggaactgccgccacaggccgataatgcacagtagcacggcgaagccgatgataatgaaaccgctggcatcactgacgcgcatcacactggtgatcgcggtatcctgcgtgttgccgaagctgttgccttcccggtcgctcagcgacacatgggccgtcgatgagccggaagtggaaacgcggatggtgaaggtcacctgagcgtcgctatgcgcgggaatatcgatgtcagtggttcgcgaggtgacgatctgcatggagtcagtcagcgagttgacctgcacgctgacggcataaggaaggtcattgctgacggtgattggcattttcgcggattcgctgaacacggatattgattccgatgggttgatgcgtacgccgttcagaagatcgctggccagtgttttcgcggctctgaccatggcttttcgcgtggctgtcggctggggggagccagacatggatcgcagcgccatatcgtcatgcagcaccagcaaagagccaatccattgcgtcggatcgttgctgtgcgagacggtgtcattggcatcctgccgggccagggcctgcggggccaacgacgagacctcgtcggaatcaatctcgttcttcaatatggaggtggccatgcgcatgatgtcatgccggctgtcggccaactgtctcaatgccgaccgggtattggcggtgttggcatcatcggccttgtcgggattgaccgaatcgctgacattgtacggatcggccttggccatggtcttcagatccgtcagattcaaccaggacgcctgctcgaaggcgctcatcacctgatcgatccagccggcctccgtggtgcgggagaacgtcataagcaggtatcgggatgtatagggctgttccatctggtagaacgcgctctgagcgaccagtcgggccaaccgaccggcatcgctggactcggcctgcgcgtccgtgctggtgggttggcccttggccagcatgcccaaggtcgattgctccttcagcacggtgacatcgccggcaggcgtatccaccacgtaggtgcctgtgtgtacggcttcagtctggtcggcatcgaaagaggcatcggcaatcaccgtgtcatagccctgctcgcgtgccgcggtcagcgcatccaacgtccaacagttgttgccctgccatgcgtacgcggagggtgtttcggagtcgcctccggcggcataccatgcggccgcctgcttggcgttccactgttcagtggtgatgcctgccttttcgtaggccgcggtatcacccagcgcggtataggcggtgatgtcaaagtcggcgggctgcatgatgccggcaatggacggttgcactgcggactgacgccaatacagaggatccgcgatcacttgcagcgagcggtgcttggcgaatgtctgcccaagggatcgcgcggtatcggcatcctgctcggataaggatatggcttgcgtatcagtggctttggccgcgttgccggcgtcggcgttatcggacttgtcggccttgtccgtgctgttggacttggacgatgttgatgtcgaggaagtggtggtttcggcaatgcgattgctgatggccttgttatcgacctgccagccgctggcggtgtagggcatggccacggtcaggttcatggccggtgtcgtcgcggtgttgagcccatccgaagatcgggtcagaaaactcggcaaatcggcgagtatctgattgccgacgatatacgacagcatcagcggcttcggcccccagctccctatggaggcaagggtctgctgattggcgttcacctcgatggtgacggtggcagtgccgccggcgggaatcgatggcacgtcaacggaacccaactcgttgggggtggggatgggggcgttgttctcggcccaattctgaatatcggtgcgcgagacaaaggtgaacagcgtattggtggtcaggtgcagtgtgccgcttgacgtggccgtgctgtccgtattgctgatgaccgcggtgacatgatagcccgatttggaggtgacgatgggggtgctttgcgtgatggcaatgctctgcttgggctgattctcggtctgattgcccgttgcgtccgtcgtatcggatgaatcagtcgtgtccgtcgtatcgttcgcgtaaacggtcaatggagcggccagcatcgccacaacggcgacgccagccgccagtgcgtgtgccagacgtgtgcaatgtcgtaagactccgggtaggttcactcgtttgcctgcctgttcttcttcctggcgtagagccacgcgattttgcgttcgttgggatagctcaacacgtcatccaaatcttcaaaacgtacccagatggcgtcttccgcctcatgatccgggtctccttccaccgtcagttcgccgccggtctgtttgagcgcgaagtgatggaccagcttatgcacgcgctgcgtggtgccggtgaaccagtagtcgatggtggcgatggaatcgatcacctcgcccaggatgccggtctcttcatgcacttcgcgcacagcggtctgctgcggggtctcacctttttcgatatgccccttcggcaagcaccattcgagatggccggagcgggaatgacgggcgataatggccacgcgattctggtcatcgaaaatcagaccgcctgccgaatattcgcgtacgaccggcagttcctgggcatccagtgaagcgaatgtggtcggaccgtccgacgtacggcgttgcggcatcatggccggagtcgggctggatggcgtcaccggttctactggcactgccggttccggcgaggcaacatccgcggatggatgccggccgaagaccgtggccggcgtgggatgcgctgacgttgcgggcctcactggtgctgcagacggcgctgagaccggcatggtgaccggcgttgcggccggtgcggtacgtgccgcaggcggcatcagcacgtcgcgcggagtcggtatcgctgcggtatgcgcggcggcggccttggcgaccgcaacggcagtatctacggccgcgtgggcggtcgccgcggaatcgttcgtgacgatggttacggacgtttgtgccgtggcgatgatcggctcgacctcggcaatcgtctcggcaccggcctcgccggcgataccatcggcctgcccctcgatagtgccgctggtagtggcgatggtgacggtggcatgcatgccgaagacggtggccggtgtgggcatcatcggcttcggtgcgggcatgtcgctggcggcgtccgatatttcggattcggatggtgcgggcgtgacgggcgttgcgggcgtgccgggcacaccggaatgttgcgcagtcggtactgcgtctacttcgtcttgatgaacggcctgattggtggagtggctcgcggtgccgtcggcatcgggagaatcgcccgaatcggcggaatgatgcggagtttcggacgtatacagcaggtggtcttgggtatggctatccgccgaatctggtgtttgccccagtatgcgggcaaggtcggcgggcgtaatcatattctccaccttactcaaccccgtgtgcaggtggggtaacggtatgctggtagggcagaaaaacgtcgcacgcgggaaggtgcccattgaatttcgaagtatggcccgaagccatcgaacttggtcgactgttcgccgaacagggttacgagctggcattggtcggcggcccggtcagggatttgctgctccatagaaagagccacgatttggacttctgctcatccgcacggcctgagcagttcgagccgatactgcgccggtgggggcatgacggcttctgggacatggggcgcaagttcggcacgctgggtgccatgcgccgccgcccggacggcaccgaggtcaaggtggaggtcaccacctatcgctccgacatgtacgatccggactcgcgtaagcccgaggtcaattatggcgacacgcttgagggcgacctgtcccgccgcgacttcaccgtcaacgcgatggccctgcgcgtgcccgacctgcaattcgtggacccgtttggtggtgccagtgatctgtccaagggcgtgttgcgcacgccggtggacccgcgacagtcctttgacgacgatccgttgcgtatgatgcgcgccgtgcgattcgtggcccagctgggcttccgtatcgcgccggacgcggccgaggcgattacctcgatgcgcgaccgcatcgacatcgtatccgccgagcgcgtgcgcgacgaactgaccaagctgctgctctccgaccgtccgcgcgccggccttgaggcgttggtcgaatccggtcttgcggacatcgtcttcccggagattccggccctgcaattgcagatcgacgaacaccaccgccacaaggacgtcttcgagcacacgatgattgtgctcgaacgcgcgatcgccctggaaaccggcccggacggcccggtgcccgcccccgacctgacgctgcgcttggccgccgggatgcacgatatcggcaagccgaagacccgccggttcgagccgggcggcaaagtgagcttccaccaccatgacgcggtgggtgccaaaatgacccgcaagcgtttgaaggcgctgcgttttgaccaccatctggtcgaggacgtctcggaactggtgaatatgcacctgcgcttccacggctatgtggacgagccgtggaccgactcggccgtacgccggtatgtcaaggatgccgggcacctgtacgagcggctgaacaggctcacgcgcgcggacgccaccacacaaaacaagcgcaaggcgatgatcttctcccaggccatggatgagatggaggagcgcgtccgcgaactcaagaagaaagaggacttcgacgcgatccgcccggatctggacggcaacgaaattatggagttgctgggcctggagcccggcccgatgatcggccgcgcctacaagcacatgctggaataccgcttggataacggtccggtggaccacgatgtggccgtcgacgaactcaagcgctggtacgccgagattcagtagtccgatactagtccgataccaaaaaaccgtacgctgaatacgtgtcagcgtacggtttttcgcgaagatgaagctgtatgcgccttactccgccgtgtatgcgtcgtgtttggtgtcggcgggcagcttggtcatgctatcggcggccttgcaaccctcgatattggtgatggtcttaccggattgtggggaggatttggtgtcctgcagatcgttgaacgtggcgccgatgaccacatcgatgagttgatcctcgcgagccgtcatgatcatggtggcgtcggtgaaattgccgatcagcgtatacgcctgattaatggcgttcttgccgaagtagatggtggtgcgttcaacgccggtgctggaatagttatcgattttctgcacgctgaatccacgattggccaaagcctcacccacggccttggcgaattggccgtgagaggtgccgttcatcacgcggatgccgaccgaagcgttggacacgtattgcgctttgccgctgctgtccttgaccgcgcacggtgccgcgttgccgtaattcggctggcgggccggagtctccacttcgccgaggccgaaaacgtggaaattgaacagtagggctatgaccagcactactgccaataccgcgccgctgatggaaaagacgatggtctggcggtggcgcacgtacgccttgcgggcttcacgttcatcaacctgatacgtcatcggtggacttctttcatgggtcgggtggctggttgctaccttagcgtcactgtctgacgccgatattggggtgtgcgggagatttggctcgaataatgcgatcgaccacagccgtatcgcgccacacatcgataatgcgttgtgccgctgcctcgtcggcggcgaaagcgaccactgaggggccggatccggagacgaatgcatggctggcacccgcctgcgtggcggcgtcgatggcctgcccgctgcggggatgcaggctgattgccgcagcctgcagatgattgcggtcgccttctgcggctcccacgaggtcaaaggtgtggtagacctcaggagtgctgagttgcgactggtacgcgccgaccaatacttcgccgctgaatccctgttctatcagcgccagctcatcgcggctgccgggggcgatatccgtgatgcgttcgccgaaaccggtgccgtatgcaaggccaccggtcaggcagaacggcatatccgcgcccaacgtggcggcaatggtgcgcagacgctctataggccagttcagctcccagagacgattgaccgccagcatggtcgccgcggcatcggctgaaccgccgcctagtccggcacccacgggaatgcgcttggtgatggtcaacgccacatccggctcgcgctcggccgcctgggccatggcgaagagggccagtaccgcatggttgcggcgcatgtcgctgcgtgaggaggccaagtcgcccaagtaagcgccttcgagctccagagagaatcccgctccgggttgcttggcggttgcggtgacggtgtcgtatacgccgattgcacagtaggtggtgtccagttcgtggcgtccgccccattcgtcgtgagcaggtcccacttccaaggtgagattggttttcgccgggcaatccaccgtaatggtgatgggggagagctcatcgaactgatgtcgggcagcggctgggcgtggatgtgagattaccggactcattgtgcctcatctccatctccacacgattcgatggccttggccagagcggtgaattcggcgatggtgagcgtctctcctcgacgggtcggatcgatgccggcgatggagaatgcctcggagggcgcaatggtcttcaatgccgcgtgcagggtcttgcgacgctgaccgaacgccgcatcaatcagacgaaatacgagttcccgttgtgcgccgccgtcggccgtgctgttcgaggctgccggggcggccgggtcatcggcctgataccgggtgaatctgacgagcgcggaatccacattgggagccggccagaacacattgcggccgatggtgcccacccgttcggcggtgccataccaggcgagcttcacgctcggcgtgccgtagatcttggaaccgggcttggcggcgagtctgtcggccacctctttttgcaccatcaccaagaacgagccgaggttgtcgaaacgctccaacagcgtgagcagaatcggcgtggccacgttgtacggcagattggcgaccagcgtaaacgatgcgtcatcgctgaaatcaggcacgttctccggggtgacggttaaggcatcccgattgacgacggtgagtcgtgacgtggcttcgggcatgaattcggcgactgtgcccggcagtcgttcggccaacggcggatcgatttcaactgcggtcatggtggcgccggtttccagaatcgccaatgtcaacgatcccaggccggggccgacttccatgacatgatcggcagcggtcactcccgcctctcgtacgatacgacggaccgtgccggggtcgatgacgaagttctgcccgaatttcttggtggggctgatgccggcatcggccgcgatacgacggatatcggcggcgcctaacaggtgaccggtggcgggaatggtgtcgttcataagcgtgtgttccttgtgggcttcgtaaccgatcagtaccaaccgatttgttcggaatgttgccatgccttggacgggctgccgtaggcttgtgcgatgtaccacagaccccaatcgatctgtacggcggcatcgtcacggtaattggcgccgaacgcagccattttgtctgctggtcgcgactgaggaatgccgtaggcaccggagctcgcgttttcggcataccacagccatctggactcgcggttccatagtttgaccaggcaatcccagtcgttgcctgtccacccgcgctgcgcggcggcaccggcggcataggcctgagcctgggctacggtggcgtgccagagtcggccggagggcgtggtggttgttcctgaatcggagccggaagagccggaattgttgttcgtaccgctgccggtgttaccggaattaccggtgttgccggtgttgccggtgttgccggtgttgccggtgttgccggtgttaccggagttgttgcccccggtgttgccggcattgttgttggtatcggtgttcgtgttgttgccagagctgctgttgttcttgtcgcctgtgttgttggcattgttaccggacgactcgtgctgattgttggaaccggaatcggccttgccgttatcggcggagtcggattttttgtcggaacctttatcggaacccttatcggtatcagacttggcggcgcctacggcgatgatctggtcgatggccatcgtggtgacggtttcggatttcagcgtctccgattcggccacgccatcgacatacgtgacgttatacacctgggttttctcgccattgacgccttgctggcggatctccgactggccttcaggaagattggagtcgatgatggtttgtgtggagtatggcactatggctgtgcgcgtttcctcgccatgcgtcacgcgccgtacgcgcaggatagtggtatcgccgtccttttcgacgctcacacggtcctctttgttcagcacgatgcctttggagtcaagaatggaggccgcaggcagtttgccgttgggggccacggaagtcttgccgtccgcaatgacggtgaccgggccatcctgattgatgaccagtccgccggtgagctggttgtacacattgtcgatgtcgacggtgatttttgtggcgttgttctggttttcctcgaaaaatcccagcaactggtcggcactggtggccacggtccagaagggaacggacgcgccgtcgatgttgatagtggtctggtaggcggactgtacggtgaccacggcatgattggcgagttggtcgccggacgaggtagtgacgatatcgtgggtcttgatatccaccccttgttcctccagaagacgggtggccgtcatcgcatatgtggtgacttgggtggtttgcccgttgatgttcagggctacggatttacgcgcggtgaacgcgaatgatccagccagcgcgatactggtcgccgcgatacaggcgattacgcggatgcgacgcagtgtaacaaaccgctgcggggtccaacgccgtgccattgccatactcttcctgctggatgaacgattacgccacccatcgtaacggttgttccggcccgtactgcggtttcaccggccaccgtcaccattcctgctcgtcagattgttctgagctcaaaaaaagaaaagaaaaagggggcgggagagaaggggatgttcccgcccccctgaaggcgcggagctggttgggggacgctccgccctcattccaggaagcccatagttgggggaaggctcctggagtacttacccaaggtaagaattatatgcgtagaaaagtctacgtatcatataatacgccacttttctacgcgtcgagcctcttgtcgggatcgaaccgacgacctgccgcttacaaggcggccgctctggccatctgagctaaagaggcgattgttcttaacgcgtaaatcgttttgaacaaatctctagtataccggtagttctcgagtggtcaattcaggccgagccgcgccggtaattaatcggccagcgaaatcggcttcttgttggcgccgatcgatggcatctggccttccacgcccacctgatcggagtccaagccgatggacttgaggaatccgtccaccatgctggtgtccgccagcgtgagctgcttcagatcccagtattcgccattgatggtgagcgtgggggaggagaacgcgccggagctgttgaacagttcggggcgtaggatcgtgtagttgttggaggcggtgagccacttgacgtattcgttcttaccactgaatgccgcggtggccacattctcgctcacgccggcattgacggcctgcttctccagcttggcgttgcttaccggctcgtaattggacaattcgcccggctggaaatcctcagcgtagatgttggagaggtagctcatgaggtgatcgggattgtcatcatgctcggcaatgtagatggcaccgttgaacgcgcggttggagtagttgtcggagctcttgttgtcctggaaattgaggaagtgcaaatcgatgttgagctggccggcgttcatcagcttgacgagcgtcgggtcaagctggcggttcaccgaggcgcagccggggcacagcggctccatgtagatggaaacggtgggcgccccttcggccttctgaccgtaccccttgctcgagatcacgaagccggccttgtcatcggcgttggccggctgggtactgactttcttgagcttgctataggcctcgtccacggtcatgttgctttgctggctactgctgctggtgttggacggccgcatagccttgtatacggcgaatccagcgatggccaccagcaccacaataatggccaccacaatgcagccgatgatggtctgctgcttacgttccttagccgcctgctcggcccgtgcctgctgggcggcctcctcggccgctcggcgctcagcgcgtgtggcacgcttggcctgacgcttcggatctgacatagctatccccttgcaatcgcttcaatgtttgggccccatcataatgaccgggcctgaggaggactgcgcccagagctgatctgaggtgaattccctgtaaaagtgtgacggaacgaacgtatcggatacacaacggccatgtgtgcggatggctgatgtgtgagattccgccccgctctaggcgaacggcatccagttgatcggcatgcccagaatcggcatcgcgcacaaggccacggtgatgatggcccatatggtgaacagcacggtgccgcgcccgccgcccttgggcgccggcgccactggagcaggtggagccccacccacttcggtggatggcgcgcccgccgggcgactgtgtttgagcccgcgcagtacgccgccccccagccgaatcatcatcgactgtggggcgaacacagtgaccagccagccgatggccatgaaaccgcccagcgccagcccggaagcggagaacggcacatcattgagcaacggcaccggaataccccaatccgcggtgaaataccaggagatggtgtgaacgggcagtgccagagccgcggtggccacggcggttcccgccatatagatgatgactagcagcagtatgcggggaatggccagcagcagggctttgaccagatgccagggaaaagtcgccacgcgaatccacgaatcggagtttttgcgctcgccgccgcgtttgccctcgcgctcaagctggggttcggtgttataggccagggtgagcagtagccacaacaacgcagtggccgcgatgatggccacgagcggagcatttgccgccagtgccgccagcggcgccgccagcaggatcaatggcagggtgccgcgctgcagatattcccctcgcttcacgtccaccggattgggcatgggaggattttggaccatggtttcggtgggggccgcttgggcggtttggtcgatgatgcgctgcaatgccgggcgaatggcggggtccaccgctgtgggctggttgcttgcgggatcccagctgctctgggcggtgccggacggggggaatgatgacggctgcggcgtggggagtacggtggtgcgctcggccagcggcgtggtcggggccggagtcgaatcggtgttggtcattggtgtggtggcgccggccattggtgtggtttggtccggcatcggtgtggtcgcgccggtgagtacctgtgtgccggcgtcgtcggtgaaatcggcagcagcgtcgggcaacagttgcgtggcctgctccgcaccggccggcggacgtggcggcatatcggctaagggcagcgtggcggtagcggcgccagccggcgagaatacggcggtttcgccatcgccgttatcgcccttattgtcggagaacacggccatggtgggagcctcagcggcttcctcggccgcgcgccagatggttcggggattattgcggtcaacgccgccggccgcgccaaaagggggcatcgcctccgcggcttcggcaacgatcgcagccggttgtccagccacggctcccgcggcgaacggtcccgcctgctcgccctgccaagcgttgggattcaacgcatccaaggcgatggcattcagcaattgatccggcgtgcaacgatccctgcgatccgggtccagtgcagaacggaaggcagccaatgtgccggccggtagtccggaaagattcgcgttgcccgaggcctcgcgctcaagtaccgccatcatcggcttggtgccgaacacaggcgcgccggttgcggcaaaagcgagcacggacgccaccgaccaccaatcggtggcgtcgtcggattcggcaccgtcaataatctcgggtgcgatgaatccgggtgtacccatcactaggccggtgcgggtcacgtgactttcgccctcgcccatcgcgataccgaaatcgaccaataccggtccggcggccgacaccatcacattggtgggtttgatgtcgcgatggacgatgccggccgcatgtacggctttggtggcttcgatgagcttgcgggccaagcgttccagatcgtcgcccacataccggccattggcggccacatcatccttaagattcttgccctcgatgagttcagtgacgatgaacgccaacgtatcgtcgagttccatatccacgatgccgcacacacccggatgattgaccttcttcaaggccatggcctcgcgccgcaggcgctcgcgcggcgtgacatcgggcttgaggtcggggtcgtgcagggccgtggacgcagagccggagcctgccactgactcgtcggtcagggagtcgcgcagaatcttcatggcataggtggtgccgccgtcgtcgcgcacccgccacaccgaccccatagctcctgagccgagccgggagatcagcgtatacccaccaaccacttcgccgggctcaagattcaacgcgttcaaatcgctcatgccctccatcctaatgccttgctggtgcattattctggctctctcctgggaggccgagcttgatatttcttggctcccctctctgagaggggagccaagaataagtgccgtttacgtattgagaagtgccgtttacgccattaaggtcgattgccctgaccggatgtggtagcaaattatgcgctcgaaatgacaggataggtgcgtgggcaggtgcgccagtcgtgaatttgcgactctataaccatcggcatcaaggatgtgtcggcggtgacccaaaggtgagccagccgggcacattcaacagtggcacagcgatgcaagggcagtatcgtgagccgctgatcgaatcgataacgatatcagattcgaatgccgcgacttcgccggtcgtaccttcgaatacttctccgaagacggctacctgttcggcgtgatggcctcccagcaggtcgctggcgctccggtcaaggcctgaggtgtgtctccgataactgaatagctaaatagaatggacggcctgctgagtgctactcaacaggccgtccattgtgtatctgaatgcgaaaagtcattatatggaacggaatatatcgatactgtgcattgtgccgattactgattccgacgcaagtattcgcgcaggaagggcacggcaaaatcgacttcgcctcgttctgtttcgcggataacgaaggcgtcaaggaggcgtttgcggtaggtggcggcatagttaggcgttttgcccatgcgctgtgcaacattcacggtgggagagggaccatctgacgctgccatggcttcgagatactcacggtcgtttttggataagccttgcaactccgggatgcacacggcgttatcaaggtcaatacgtgcttcctcgatacctgccgtaacatcagcgtcgatgatggtatccgagtcccgcatgtctgcggcatcccagatatggtagccaaccagttgaatcatataggggtatccggctgtcacattggctgcagtgcttaattgagcgtcggtgatggacatgccggaggcgcggaatgttgtggcgaaagcatcgcgcacttcatcaagaggaatatctgtgagcatgttcgttttcgcgcgacgtaggaacgtgatgacttcgtcattgaacaaatcagaaatcatctgtgggagaccggcgaacacgatggcgatattgcgtcgttccctgatttgatgctgtatggcagtggcgatggcaatcatgtcggatcgctcagccgcttgagtctcatcaatggtgataagcaacccagcatggcgcttctcaagcgcatccaaccgtccggcaatggcacttctcaacgtttcgggcatacgcttcggggatagttcggcttctccgaggccgatgcccgctccagcaaaagtcaacgatggtcggatagtgaggtggtcaagggcccctcgcccggttcgtaaggcatcaacaaggcgttcgcatagtccggcagaggccgtttcttcgatgacatcccatctgcgcgctttggcccggtctccgaacacagtgagcatcacggtttttccggttccacgagcgccggtgacgagcataatgcgccctggggcaccgactccgttatcgagacctttctcgaaatcgcggataactttgcctcggccgatgagcaggggcggttcccctcctgccgttggcttgaatgggttttcctttgccttcatgtggaccgcctcctcgctgaatcaacctaaaataaaaattatcaaaagtatcaaaaaaataaaaattatcaaaagttgggttgagccgactgaagaaaacagccgtggcgacaatgattctgccgcaatccgcggtgacaacaactgacgcggaccttcttggcagaatcgttgtttgtcccgcttcgccaatcaacgtcgctcaagttcggtgcgcagaccggctaccgtagcggtcagctcacgcacttcctcgcgcaataggtcgatttcgggattggctgatgttgcaatagcctcttgcgcggcttccttggccacttccttctcccgagcgtcctcgcgccgatccgtctccagattgacctgatccacgatccacgaagccagcgtggccgtcacaataccgatcaacgcgatgccggtgaacatcagcaccaccgcaatgatcttgccttggaaggtgaccggcgagaagtcgccatatcccacggtggtcacggtcacgaacgcccaccacaacgccgtgccgaagtcggtgatcgtggatccggacgccccgcgctccacggaatacacggccagcgcgcccacgtacatgagcattcccaccgcgccgaccgcgtatacggtgatgcgcccgcgcaccgccatgccggaggtgcggttcagcacgtgcagcacggtcagcaaacgcaacagtcgcaagggccggagcatcggcagcgcgatgatcagcagcgtgaacaggttgtgcttgaaccaccgccagcgatcgtcggccaaccacagcgagaccacataatcgacgacgaacaccacccagatcacgttgatgacggtttcacacagcgcgatatgcgtgcgggagagaatttcccacgaatacaccaccagaaacaccacggacagcaccatcagcggccagtccgtccacttcttccacgtcttcagtcccatattccgattgtagtggcgcgtccgctgcgccactgcggagcatgactccggacatcagtgttgtatacgttcgtatacatttcacgttgtgtacgaacgtatacagcggtatttttcatctcgtatttcccctatgactatcaccacagtgatataatcaagaatatgtaaggagagagaaggagccggccaatggagaccgcatcgatcgaactgtggcatggctcttcgcatgtcatcaagcatcctgaatacgggctggtcaagccgaacaacgattatggccgcggattctattgcacgcgcagcgtcgagctggccaaggaatgggcgtgcgcgggaatggatgacggtttcgcgaatcggtacacgttgaccacggacgggctcctcttcctggacctgtcccagccgccctacaccatcctgaactggctggccatgctggtcgaaaaccgtcgtttccagccgaccaccgccgtcgccgcgcaaggcatcgaatatctgaaacaagtgtttctgccggatgccagtcaggctgacgtcatcgtcggatatcgtgccgacgattcgtatttctcgttcgcccgcgcttttgtcaataacgcgatttccatcgaccaactcgctgaggcgatgcggttgggcgagctcggcaagcagatcgtactcaccagtcctcaggcattcgcggcactgcggttccaaggctgcgaaatcgcccgcgcttcgacctaccacgtattgcgcaacgagcgcgaccgcacggctcgtgaagcctaccgtcgcaacagcgctgaagccgatctcgacggcctgttcatgcacgacatcatccgcgagaaagtgaccaacgatgatccccgcctatgatgagacatacttgccggacgccatggccaacttggccggcgccttcgattatgcgctgaacgattgcgggttgccggtcggcctattcatggacttcttcgccacctccgaggcggccgcgcttttcgggcgaggcacgcccaaatacgtgtgtggcatgtccggcgaagagctggtggccgaaatcatgcggcaaaccggttgggcgcgcattctcgatatgccgccagccgcactgcgcgccggctcaacacccgaatactgggccggctgggcgctcgcatactgccaatggaccaggggagtgcggttctcggacattctcgacgtgctgccgttcggcgatatcgtgcgactgtacccgactctgcacgaagccgacgaaagccgattcgtcgacgtgtacgacgagcgggccgcccataatcgcaccgagggcgactcccggctgcacacagtccgcgtgcgcgccggactcagccaatccgggctggcccgccgctccggcgttaccctgcgctccatccaaatgtacgagcagcgccgcaaagacctcggcagagccgccgtctccaccgtgctcgctttggcccgcacgcttggctgccgcatcgaagatctgttggagccgtagggctgacagcgccatatctttactcccgaccgattgtgcgtgcgaaacgacaggttgtgtaatacgggcggcgcggcccgggcgaacctgattcaatcaaactagcgatggatcgtgcgttcgcggactgccacatcggcctcggccgagtcgggcactgcgccgagttggcactgcacagacgcggtgcctgcggcgtgacgcaacggattcgtcagacagccgtacaacagtgcaagggagaacgatatggaacttgaagaactatcggtcgccgagaaagccgcgatgctctcaggtggctccgaatgggattcccgcggcaacgagaaggccggcatccccagcttcgtgatgagcgacggcccccacggtgtgcgccgccagctcggcgaaggcgaccatctgggtctggggtcatccaagcccgccacctgcttcccgaccgccggcaccgttgccagctcctgggatccggcgctcgccgaagaaatgggcaaggcacttggcaacgaagcgcacgatctggacgtgaatgtgctgcttggcccaggcctgaacatcaagcgcaacccgctgtgcggccgcaattttgagtactattccgaagaccctatcgtggccggtcgtatggcagccggtctgattcgcggcattcagtccaacggtgtttccgcctgcccgaagcatttcgcggtcaacagccaggagctgcgccgtcaagcctccaactccgtggtcgatgagcgcacgatgcgcgagatttacctgaccgcgtttgaaatcgccgtgcgtgaggccgcgccgatgaccatcatgacttcgtacaacgagatcaacggcgtctacgcacacgagaacaagcacctgctgcaggacatcctgcgcaacgaatggggcttcgacggcatggtcgtctccgactggggcggctccaactccgccgtggccgcggtcaaggccggtggctcgctcgaaatgccgagccccggctacacctccgtgcgcgaactcgaaggcgcggtcaaggccggcaccttgtccgaggccgacctcaacgctcgtgccgccgaagtcgccaagatcgcacgactgaccaaaaccgagggcgtaggccgagacgacctgctcaaagatgccgtcgccgctgcgcaccacgaaatcgctcgtaaggtggccgagaactcgtccgtgctgctcaagaacgcttccgccacgctgccgctacagtccggcactcgcgtcgccgtaattggcgacatggccaaaaccccgcgattccaaggctccggctcttccaaggtgaatgccactcgcgaagagaacatccttgatgagctcaagaacgccgcagcagccaccggcgtgaccgtggccggctacgcgcaaggctacgaccgccaaggaaccaagaaccagacgctcatcgacgaagccaaaacgctcgccgccgccgacaccactgatgcggtgatcgccgttgtcggcctcgacgagcgcagcgaatccgagggcctcgaccgttccaccatggcgatcccgcaagtgcagaacgatctggtcgacgccctgaccgccaccggcaagcccgtcatcatcgtgctcgtggccggctctccggtcgagctgccatggttcgacgccgtgtccgcaatcctgtacgtcggcctgtccggccaagcgggcgcatccgccaccgtgcgcgccctgaccggccagatcaacccatccggtcacctggccgaaacttggccgatcagttacgtcgactgcccgtccgccggctggtacccggccatcggtcgcgacgccatctaccgcgagggcccgttcgtcggctaccgctactacgaaaccgccaacgtgcccgtccgcttcccgttcggctacggcctgagctacgcgaccttcacctacagcaacctgaccgccgacgaaaccggcgtccagttcaccgtgaccaacgattccgacgtgcccggcgccaccgtcgcccagctgtatgtgaccggcccgtccgacggtgtgctacgccctgcccgcgagctcaaaggctttgccaaggttcagctcgacgcacacgaatccaaaaccgtgcgcatcgaattcgaccgctacaccttccgccatttcgacacggcagccaacgcatggcgtactgaatccggcgtgtggacgctggctgtcggcaccaatgccgaagacctgccgctgacctgcgaattcgcgatcgccggcgacgtggacgccatccccgccgaccctgcgctcggccactacctgaccggtgacgtcaagcacgtgaccgacgccgaaatggccgtgctgttcggtcacgaggtcatcgcccccggcaaacccacgaccttcggcgtgaacgacccgatctccagctgggtcgattccaagggtctcgtcgcccggaccatcgctaaaactttgaccaaccgtgaggccaagacccgccagaagaccggcgcaccggacctcaatatgctgttcatcctcaacatgccccccagggccatgagcaagatgacccagggcatggtcgattcggccatggtcgacgccatcgtcaaaatcgccaacggccacaccttccgcggcctcggcggtatcatcgcgggctacttccgcaaccaatccgccaacaaacgcaccgcaaaggagctgaacaatgactgacaccaacgccgcccccaccgaggagaagccgactggccccatccgccgttggattaagaatcatccggccatctgggagttcatcctgttcaatgtgctgtccaacatctctacaatttcccgtttcgtggtcacgtggattggcactgcgattttcgtctccgcaatgggcctgaccgcgccgttccacttcctgattttcaactacccagaaagcggcaatggcctgggcggcttcctcaccttcctgtttgccgaggtcatcgcgcaggtagtcaacttcttcgtgcagatgaagtgggtgttcaagtctgactccagcttcaaggatgccgcttggaagtacgcgatcctcgccgtggtgatcgtggtcgtcaacctggtgctgccgggctacgttacctctctatgccagggctggggcatgaacgccggcgtggccggtaccgtcgcctccgtggtcaacactctgctcgccgtaattgtgagcttcccgctgctcaagttctggatcatgccgaagaacaagtaagcccccgcgaactcacgatttccccgtgatccttttctggctcggccggatgcccatgtggacattcgaccgggccttttggcgttatgcggagtgacaatcgcgagattgtgggtttcaagggtcaaaacagcccctcgaaacccaagatggcggttgcagggcggttgaggatcagtcgaagagcggttcaaacgcaaatgtgaacaatgccacatgtgattgggcgggtcgctgcacgccgattttcggggctgcttaggaatggcgaaatatcaacgaaatccctatatctaggttttttgtgtgacacacgccactacatatagtgccttgatttcaaatcacaccgctgtaatatggccttcacttcactgttcatcagaaccacatcaaggggagtcgccatgaccatcaccgtgttcaccaagccgcattgcccgcagtgcgatgccaccaagcgccagttcaccaagctcggtgtgccgtttgaaaccgtggacctgacgcagaacccctccacccttgagcagttgcaggccgccggcttccagcaggccccggtggtcatcacgccggacaactcctggaccggctaccgccccgacctgattcgcgaagtcgcccagcaggtggccgccgacaaccgcgccgcagccacggtatccgcgtgagtctgagccagcccgaattcgcggccgacggcaagacgatcggcgcattggtctacttctcgtcggcctccgaaaacaccgcacggttcgtggctggatgccgtttgcaggacgaaggcatcaacgtctatcgcatcccgttgcgggccgccgacccggcgctgaacgtccgcgaaccgtacgtcatcatggtgcccacctatggcggcggcgtggtcaagaaagcagtgccgattcaggtcaaacgcttcctcaacgatccagccaaccgcgagtggattcgcggcgtcatcgcctcaggcaacaccaa

SEQ ID NO: 1418 - DNA, 12798 bp, Unknown
  R257_15m  MAG No. k141_12204
aacaatgcctcgttgatcggcatgacgacaggtcctttcagcggcggattcggtagtgcgaacaccccaaccttagcccatgaccggcatgaacaaaaaagggaaggaacccgagagttccttccctgtgtgccgtatcagacgcgatacgcgccgattatcaggcggcgaagtattccacgccggcctcgaagatcggctggtacttgttgccgggcacgttgacgtacaggccgttgccggaacgctccgagtgacccatcttgccaaacacgcggccgtccgggctggtgatgccctcgatggcgagcagcgagccgttcgggttcacatctaggtccatgccgggggtgccggtctcgtccacgtactgcgtggcgatctggccgttggccctgagctgggcgagtacctcgtcggaggccacgaagcggccctcgccgtgggagatggccacggtgtggatgtcgccgaccgaagtcttggacagccacggggagaggtcggaggctacgcgcgtgcggaccagtcggctctggtggcggccgatggtgttgaaggtcagcgtcgggcaggcgtcggtcatcggcacgatgtcgccgtacggcaccagacccagcttgacgagcgcctggaagccgttgcagatgccgagcataaggccgtcgcggttcttcaacaggtcacgcacggcctcggtgacggccggcgcgcggaagaacgcggtgatgaacttggcggaaccgtccggctcgtcgccgccggagaagccgcccgggatcatcacgatctggctcttgttgatctcatcgaccaacgcctgcgtggattcggcgaccgcggccggtgtcaggttgttgatgatcagcgtggtcacgtcggcgccggcgcgctcgaaggcggcggcggaatcatactcgcagttgttgcccgggaacaccgggatcaccacatgcggcttggccacggaagagccgacgtacacggtcttcttcggcgcgtggaagtcgatggtctcgacggtcgcgcccttgtcctcgcccttggaacggtacgggaacacggattcgatgccggactcccaagcttcctgcacagcgttcaggtccagcgtctcgccggcggccttgaacacgtactcggaggtggtggtgccgatttcgccgatctcgaccaaattggagacggccggaagcttggcatcgtctgccagctcgacgatgaacgaaccatatgccggggtgaacaggtcgtccacggcgatgctgtcgttcagagtcacgccgatgcggttgccgagcgtcatcttgaacagggcttcggcggtggcgccatagcccggcgtggagacggccagggcatcgtggaagtcggtgagctcctcgatcacggagaacacctcaagcagcgcatccttgtccggggtcagaccgtcggccaggtagcgcggcgcgatgcgcacgatacggtgatcggcgtccttgaattcaggggaggtggcgcgcttcatgttgcccacggccacggcgaaggagatcagcgtcggcggcacgtcgagatcctcgaacgaaccggacatggagtccttgccgccgatggcgccggcgcccaggtccacttgggccatcagtgcgccgagcacggcggccgccggcttgccccagcgttccggctcgtcgcgcagcttctcgaagtactcctggaagctcaggtaggccttctcatgctcgaagccggccgcgaccagcttggccagcgactcgaccacggacaggtaggcgccggtgaactggttcttggacatgatgtacgggttgaagccccacgccatcgccgaagcggtggtggtctcgccgaacaccggcagcttggcgaccatggccatgttcggggtgagctgacgcttgccgccgaacggcatgagcacggtgcccgcgccgatggtggagtcgaagcgctccgaaaggcccttgttggaggccacgttgatgtcggtgaccagcttgttcatacgctcggccagcgtgccctcgccccacggggtctcgtaggactgctgtgcctcgacatgcacggtctggtgcttggaagcgccgttggaggccaggaactcacgggacagattcacgatcttgtcgcccttccaggtcatcaccatgcgcgggtcctcggtcacggtggcgatcaccgtggcttcgaggttctcttcgcgggcgtagatcaggaactcgtccacgtcctcggcggccacgtccacggccatgcgctcctgggattcggagatggccagctcggtgccgtccaggccctcgtatttcttgggcacggtgttgaggtccacgaacaggccgtcggccaactcgccgaccgccacggacacgccacccgcgccgaagtcgttgcagcgcttgatcagacggcaggcatcgccgcggcggaacagacgctgcagcttgcgctccaccggagcgttgcccttctgcacttcggcgccgtcgagttcgagcgattccacgttatgcgccttggacgaaccggtggcgccaccgatgccgtcacggccagtgcggccgcccagcaggatgatcttgtcgccgggggccggggtttcgcggcgcacatggtcggccggagtggcggccacgaccgcacccacctccatgcgtttggccacgtagccggggtggtagatctcgtcgacctgaccggtggccagaccgatctggttgccgtaggagctgtagccggcggcggcggtggtcacgagcttgcgctgggggagcttgccttccagcgtctcggagaccggcacggtcgggtccgcggcgccagtgacgcgcatcgcctgatacacgtaggaacggccggacagaggatcgcggatgcagccgccgatgcaggtggccgcgccaccaaacggttcgatttcggtggggtggttgtgggtctcgttcttgaacaggaacagccagtcctcgtcgtggccgttcacgtcaaccttgaccttgacggtgcaggcgttgatttcctcggactcgtcaaggccggtcaggacgccgttcttcttgagccacttggcgccgatagtgcccatgtccatgaggcagacgggcttggcgtcgcggccgagctcgtggcgcatcgccagataacgctcgaaggcggccttgacggtggcgtcatcgatggtcacttcgtccagctcggtgccgaacgtggtgtgacggcagtggtcggaccagtaggtgtcgatcaccttgatttcggtgatggtgggctcgcggccctcctcgctgaagtacttctgacagaattcgaggtcggccagatccatggccagaccgcgctcgtcgatgaacttctggccggcttcggcgtccatctcgttgaaaccggcgatggtctcgaccttgccgggcaccggcacctgggtcttcagggtttccttggtctccaggctggcctcgcgggcctcgaccgggttgatcacgtaatgcttgatggtgtccacgtcggcgtcggtcaggtcaccttccagcgcgtacagcttggcggagcggaccgtcgggcgctcgccctgggagatgagctggatgcattcggcggcggagtcggcgcgctggtcgaactggccgggcaggaactcggtggcgaagaccttggcgccggcgaagtcgggcaggtcgtaggccacattgtccacctgaggctcgctgaacacggtgggcacggtctggtcgaacagctcctgggagatgccttcgacgtcgtagcggttcacgatgcgcagggccttgaggccggtcagtccgaggatcgtgcgcagttcgcccgcaagctgctgggcttcgacatcaaagccgggcttcttttccacgtacacgcgaaaaaccatggaaatcctttcttgaaattattgaaaaattgaagaagtgcggtaaaagaacttggctcccctctccgaggggagctgtcagcggagctgactgaggggagttgtcatggcggtgaacgtcttgacctcccctcagtcgcctatcggcgacagctcccctcggagaggggagccagctgtatgttctgctacctgcacctaaacgacttattcggcgacttcgatgccttcggacttggcgagtgcggcgaggcgctcctcgatctcttcgtaggccgggatgatgctgccgagaccacggcggaacaggtccttgtcaaggtgctcgaccttgccggagtggtccttctggtcccacagacggcaggaatccggggtgatctcgtcggccaacagcagcgtgccgtcggtggcgcggcccatttcgatcttgaagtcgaccagcttgacgtcgatcttggcgaagatctcaatcagggcctcgttgatcttgcgggccagcggggcgatctcggcgagatcctcgcgagtgcatacgtcgagggccaccaggtcatcgtcgttgacgaacggatcgtgcagatcgtcgttcttcaggaagtactcaagcaccggctccttgagcggcagtccttcctccacgcccagacgggagcagaagtggccggcggccacgttgcgcagcacgatctccaacgggaacatgttcaccttgcgtaccagctggccggtgtcgttcactcgcttgatgagatggctgtcgatgccgcgcttcttgagcaggtcgaagatgatagtggtgatgaggttgttcaggcggcccttgccggtgaagtcttccttcttttcaccatcgccagcggtggcggtgttcttgtattcgacccacagaacctcgggatcgtcggttgcgtacagttgcttggccttgccctcgtagagcttttccagcttctccatgactcacctttcaggagtggaatttctgggtgaactaacggtaaaagggtaccaatcgagggctacaacaacactcggcatgacgctacgatgcggccagcgcatcatacgtcgctgcatcgaacgaccatacgctgttgggatggcggaggcggatggtattggtccgacaatcgactcattgccggtcgcatagtcgttcggagtaacagtatctacgcaagcacgcggacactcagatgttcgtcaatagacaaaacgtgagtgtacggccgcgcacgcacgataatgggagtgacgaaatggtgcaaggaggttcgtcatgatcgatcatattggtttgtttgtttccgacgccgcacagtacgcggatttctacgagaagctgctggccccgctgggttacgtcaagaaagtggcgtacccgaccgccgtgtgctttgccaatgacgaggatggcgacagcgtttggctggagtctccgaaggacggcaacccggtggtgccgtctcatgtggcgttccgcgccaaggatgaggccgccgtcaaggcgttccatgaggccggtctcgcctctggcggtaccgacaacggcgctccgggcccgcgcccgaactatggccccacgtattacgccgcgttcatccacgacccggacggcaataatattgaggccatgctgagctgatcaggccgtggactactccacggtaatcgtcaacgcatcggcaacacggccggccttggcacgggcgtcggcttcggactcgccgacggccagtgccacggccatacgacggtggccatgcacttcgggcttggcaaaaatgcgcaggtccgtgccgggttcggccagagcagcggccacatcggtgaactcggcctcaccgtcgccggccaccacaatcgcatggcttgccgccgccgagccggccggaatcgtgagcgccacatgctcgggggtgatcggcaggccgagaatcgcgcgggcgtgcagcgcgaactcgctcagacgctgggaggtcatcgtcaccataccggtatcgtgcggacggggggagacctcgttgaacagaatcgagccgtcggtgagcacgaacagctccacgccgaatacgccccaaccggtttcgccggtcgcctgagccttggccaccaagccttcaacggcggtacgtgcgatgtcgcgcgcccgctcggcctcgccatcgggctcggtagccggctgccaggactcgcggtaatcgccggactcctgacgttggccgatcggcgcgcacgtcacaatgccggcggacgaagaaacggtcagtaccgtcagctcacgctccagcggggcaagcgcctcaacgatcacgcgcgacacatcgccctcatcggcggcgcggcggccctcctgcgcttcggtccaagcggcatcgatggcgtcggcggaacgcaccaccgactggccgtgaccagacgagctcatcaccggcttgaccacgcacggatagccgacttccgaagctccggcgcgcagctcttccagcgagccggcaaaacgatacggtgtagtcggcaagcccaattcttcgtgggccagtacgcgcaggcgctcgcggtccatgcagatcgcggcgatttcggcgctcggcaccacctgggcgcccgcggccgcagcaccggccagcacatcggtggcgatggcctctacctcgggcacgatgatgtccggcttgatttcatcgaacaatgcctgcaattcggcggcattcgccatatccaacgcgcggtattcatgcgccacctgctgggccggagcgccggcataggagtcagcagcacacacccatgcgcccagtcgcatgagttcaagtgtgacctccttgcccagctcgccagcgcccaaaaacagcacacgggtggggtgcttgcccagcggtgtgcccagcgggtggttggctgcgcgagttgcgggggagacggcggaagtctcggcgggaattgcgggagaggaggcggaagtcacggcagtattcacggcgttctcagtcatacccacattctgccatgacgcgatgatttcggtatgtcgcgtgagcggagtgcctcgcgcggcaaaattacgggcggaatatccggcttcatggggcggtaaattccccatggggcggcaatgagtccatggggcggtttgttggttttgtgaaaccgcggaattaagccgttttgccttaccgccccatgggaatttcaccgccccatggggtaaataccgccccatgggcaggttgccgccccatgaagattcagatgcccgtaacccgccataaatactgcgtatagacacgccattgcgtgtgtaacagagccgtcgtaccttagcaattaccggccgatgaagtatggggcggtcgggccaacattttgggatgcgacatatagcgaatagcggcgtgccggttccggcgtttcaggctacaagccggcacgctggcaatagtcgaagtacttaacgattccgcctatgcggggctcgaattcggtgacgtacgctcgctgagcctgctggagactccgggcgcgctggacgtggcgctggaacttggctcgctgtccaaaatgtatatggtggccggctggcgcggtggcatggcgattccgccgcattcgtggattggctgctcaacacggccggcgtggcgctgatgccggggtctgcttcggtcaggtgggcgaaggctgggtgcgcatcagtctgctcaagcacaccgccgagttgttccaggtcgtggcccgcgtcgatcgtgcgctgcgaagcgcgtgattcaatattaggcaaaatgcggcagcccataccatttcacacgcgttcaggcagcgcggccgacgccattgcctcgcggtggtttaggatgaggcaatgcgcgaaaacgggattgaagagagcattgatcgtccgctgactatcgctcttgtggtcgatacggtgggcaatcagggcaacggcacctccaattcggctttgcaatgggctgcggaattggagcggcaaggccatcatgtgaggcttgtcggtataggggcgcccgaatatccggcgcgcgtgaataaggtgccgctcgtctcgtgggtggccgccaagcagctcatgcaattcgccgaacccagcgacacgttgttccgcaccgctttccaaggcgtggatgtggtgcatatctatatgccgttcaaattcggccgtcgtgccgctaaagtcgcccaccaaatgggcattcccgtgactgctggattccacctgcagccggagaacgtgctgtattcggccggcccgctacgtcgcattcccggtatttccagcttcctgtactggctgttcaagcactggctgtacaagcgcattgaccacatccatgtgcccaccgaaatgaccgcgagcctgttgcgcgcgcacgggtataaagccaagttgcacgtgatttccaatggttattcaccggtgtattcgccgaagaagccggccgatccggatgcctcggctcccgtgccgttccgtgtcgtcgcttccggccgactggccagcgagaaagatcagattacgctgatcaaggcggtgtcgatgtcccgccacgccggcgatattcagctggtgatcgccggtactgggccgctcaagcagtatctcaagttccgcgccgggcgtttgctggcgcgcaaggccgatatcggattccacaagcacgccgatatgcccgatttgttgcgttcgggcgatttgttcgtgcattgttcgattgccgacatcgaatcggtgagcgtgatcgaggcgatggcgtgcggattggtgccggtgatcgccgcgtccgaattgtcggcggccggccagttcgcgctgatcgacgagtcgttgttccccgtgcgggacgcggccctgctggcccgacgcatcgattggtggatcgcacatcaggccgagcgcgccgaatggggcgagaaatacgccgaatacaccaaggcgcattattccgtggaagcctcggtccacaagttcgtggatatggaacgcaaggcgataggggagtaggagccttctcgtttgcggagaggttttccctcagtccgcctgcggcggccagctccctcatcggcgggagctacgaaaaaacctccctctgatgagggaggtggcatcgcgaagcgatgacggagggagggattagcgaagggttttacaacaactcaataagctgatcgacttcttcaggcgtggtggcccagctggtgcagatgcgcatcacggtatgcgtgtcgtcggccttctcggtgaagccgagcttgacctcgcgctccagacggtcgatggtcggctgatccatcgtcacgaaaatctggttggtgggcgcttcgaaagtgagcatgtagcccttggcgcgcagggcctcgcgaatacgatcggccgcctcattggcgttgcgggcgatcttgaagtacaggttgtcggtgaataaggcgtcaaactgcgcgcccagcacgaagcccttggccagcaaggcgccgtgctgcttgatgcgggtcaggaagtgcttcggcgtgttgtgcttggtaaacaccacggcctcgccgaacagcgcacccaccttggtgccgccgacgtagaacacgtcggcgatggtcgccagatccgtgagcgtcatgtcggaaccagtggcggtcagcgcgtagccgagtcgcgctccgtccacaaacagcggcatgtcatacttgtgcgccacatcggcgatggcctgcagttcggctttggagtagatcgtgccgtattcggtgctttgcgagacgtacacggatccagggaacaccatgtgctcgtagttgccgtccgcatagaaggtcttgcagaactcgtccagttcggtcgggtccattttgccgttgtgttggggaatcgtgagcaccttgtggccggagaactcgatggcgccggcctcgtgcacgttcggatggccggaggcgaccgcgaccacgcctgcatacgccggggtgatggtgtcgatgacgacctggttggtctgcgtgccgccgacgaggaaccacacatccgcgtccggctggccgcaggcctcgcggatcttggccttggcctgatcgctcagttcgtcggacccgtagcccgaatacagatggttgttggcttcagccacggcttcaagcactgcgggatgggcggcgcgggagtaatcgttctcaaaagacagcatgacggaccttttgtccttgtgttagatgaattggatatgcccgagtgtacaacgtggcggttcccggcaggagcggggaattcatggagaaaaacaaaacccttccgcgaacggaagggttttactggggtggccaacgcggctcgaacgcgcgaccttctgaaccacaatcagatgctctaccaactgagctatggccaccatagtgtcgtattcagcaagctgaattcgcacaacaggtgaatactatacacaactttgcggatgtgtgctcatcggtgtgtcgcgatggaatcaagtggttggtttcattcttggggccaggctgtgggttgtctcaaatggtgggatgtggacgagtgggtcttgtgtggcgattgatgaaaagtcagggcacacaacggcgtgatggtgcgactggggattgcagagatgattacgtgagcgttcacaatgtgagcattatgtttcatatcaaccgcgacccgcctagtttcatgcgatgttacctacaccgaacaagggaagagaaacaccatggaaaaggttaaagcctttgcagattggctgaccaagtggtttacggtcatcgtcatcgtctgggccgtcttcaactacttcgtgccggccgccagcctgtggggcaaggcgtacaccggctacatgctgggcatcgtgctgttcggcatggggctgaccctgacgctggacgatttcaagcgcatcctcacccagccgatgatggtcatcgtcggcacggtggcccacttcgtcatcatgccgctcgtcgccgtggccctgtgcgcgatcttccacctgtccggcccgctggccgtgggcgtgattctcgtcggctgctgcccgtccggcacctcctccaacgtgatgagctacctgtcccgtggtgacgtggccctcgatgtctccatcggcatcctctccaccctgtgcgccccgttcatgattccgctgctgatgcagctgctggcctcccagtatgtgagcgtgccggtcgaatccctgttccttaacgccgtcaaggtggtgctcttcccgatcgccctcggcgtgatctgccacatgatcttcggcaagaagatcgaggaggtcacggtcgccctgcctatcgtttctcaggtggccatcctgctgatcatcggtgtggtcgtcgccgccaacggtccgaagctgttcgtggccagctccctgatggccatcccggtggtcatcctgcacaacctgtgcggctactcgctgggtttcggcttctccaagctgatgtacaggatctacccgaagggcttccgctacgcgcagcagaaggccatcacgttcgaggtcggcatgcaggactccgccctgggcgccacgctggccctgacctccttcgcgtccaacccgctcgccgccgtgccgtccacgttcttctccgtgtggcacaacatctccggctccatcctgtccagctggtggcgcaaccatgacgaccggcacgagattcattgggattctgacaacggcgagaagggctccgccaagagcaccgtttccgtggcccacccgttcgacgccgacaaggccgccaagatcgctgcctgaaatcctgaaatggtgagaaaggccgggtaaggcacgactccagtcagtcggtcatccacttttcctaccccgcataacatagccgctcccgcttactcccgattgatgtatcgggcgtttcgcgagggcggttttgctataattagtaatgcagaaagcggcaaggtaatacggcaaagaggccgggtcgctagaggttcccatcggatatggaagagcacgagggtgtgctggaaacagataacacagaagcggcatgtggtgaaaagaaacataatgtaacctccttggcggtgcccccgtgtgacatagtctccgcgggggcacctgctgtgtggcgttcgcttttttgcgacgcattcccgggaatattgcgttgggagggcgtgtgtgcgtgtgttgtgcgacgtattcccgggattgttgcgccagaaggagaggaaaagtacagggcgcggattgtcccaagctaatgagtcgaggcccggcgcgtcgttgtccggcggaatcgtagtatagatattcgtgtgtgccagtagcacgccttatgtaacaggcgagcatgctgggatatccttcaaaccgctgatcgcacgtagtaatgcgccgacgggaggggcgaaggccatcgggccggtggactgggctatcttttccgattcgtcgggtgtcgccaacaggcagatgccaagcgagtgtgctgaaaagtgtgggcgcagtgcggcggtcacacaaaagcaagagaaaccactgaatcggagaattcaagttgcctactattgaacagctcgtccgtaagggacgtcaggcaaagccgaagaagtccaagactttggccctgaagggcagcccgctgcgtcgcggcgtgtgcacccgtgtctacaccaccaccccgaagaagccgaactcggctctgcgtaaggtcgctcgtgtgcgcctgtcctcgggcatcgaagtcaccgcctacagtccgggcgagggccacaacctgcaggagcactccatcgtgctcgtgcgcggcggccgtgtgacggatctcccgggtgtgcgttaccacatcgtgcgcggcgcgctcgatacccagggagtcaaggaccgtaagcaggg

SEQ ID NO: 1419 - DNA, 48328 bp, Unknown
  R257_15m  MAG No. k141_12622
gccggcttcagcggaaatatgttctgccatggcccatctccttaactcttcccggctcacgccgtcattggtcgattacgccgaggagcttcaataaaagaaccccctacaagaaactaagcatactcccacattctgttcagccaaagcccctgtcattgtcaagaaagggaacaaggacgagcagcagatgcccaggcccggcaaaccagataccggaccggacatgacgaggcccccaacgatgccgtacagactgtacagatggcgtgcggcatactaaaccggcggcgtccagcccagctgctcgcgccagccatcaggcgggaacgggtccgtgttccacgcgccagtgcccggaacatcattgagcagtatcccccgatccgggccgaacagccaatccgcaagccccgcacggcaacgggccgcgcgaaacccgacataatccatcgcagacggatccaaccccgccacaccaccgcgcacccggtcgaacagcatatcgcgatgttcctgcaataacggcacatacttggggttcgcggcatcggacgcacggaacacggactggcagaacgtacgattgcgatccgatatgctggagctgatcatcgattcggcccacccatgcagaccgaccgtgaaccactggtccaacagccagaaagcacccagatcacgcgcgatcccatccaacggcgtggcacagggcaacttccgctcccacttcagcaatgacctgtacgtgcgccgggcacccaccggcatcaacagcgaatccggccgatcgtaacaataaatacgagacggaccatacttgaaaatatgacgcgtgggccctgacgacctctcaaagaacggcatgacaccaccatacgaccagcatcgccgcgtacgcaatacacatcacacgcggccggcaagaaaaccgcacaactcctgcgccaccggtagcatctgcgactccaaaccggggttcatgaaacggtcgtagatattccacctatcgcacagggacacccacagatacgcccgccccgaagcaacaatcacattggagtgcaacggatgagcggacaatacctgcaacacattctgcggcggccccaccaactgtgtccgaaccgcatgccccaacaaatcgcttaccgagcaccacgcataccccctgcgaacgagccggcacaggcaacaccaccacctgcatataccgcatggcgtaattactcaaaaagccattattgtcatacacattcagcgtgaacgtcagccacggtcccttgctgtagaacctgttcacccgcatattacgcacggcttcgccacgaagcaccaccgtgcttccagcatcgacggtccgtttggcctgccaatcacgcgcatggaccgaatacgtgaccgaagaaactccgggagccggctcataacggatctcaaccagcacaggaaccccgaaaccacggaaaaagcccaacacatcatcgcaatgcaaacgcacgccaccacgaacgacgcgatgacgccgttgcgataccaataccgccacgtcggccacatgcgctgcctgacacggaccatacgccagccgagcaacgaaccagccaccacgaacacgcaccagacaacaatgccgtaccggaaaaccctacccacccagaaaggaaaaccagatttatcagcattcagcagccacagcacgccgacgaacaccacggcctctagcatgtaccacggccaatccaactgccgacgaacaaccgcaccggcaacagcatccacacgatcccacatcatcaaccttctctcatcaaaaaccgcttcgtaaggcaaccatacagtcagcagtacggacaacaagccggctatcacacgtaccagcacagctcctgtgccacacaagcagcatctgcgactccagcgccaggggccatgtaccgcgaatcattgtcgcacacattgatcggcgtccacaggcaagccaggccattcgtcaccttcatgctgtcatgatttccgtggaaggccggggtgagcgctgcagaagcgcagacgatggccagtggggtctgttcgtccgtccgccatggacagtggccggccgaatacagcctcatgcctgtgggacggcacgcggatttggccggtttccgcgcggcgtcccgcaggaacgtgggatggtagagaaatcaatcgtttgacgttcgtggcgttccacactatcaaccgccagaaccgcgcaatcacgccaatccccgttacggaccataatcatcccccgggctctctgcgggacggcagacgaaaaaccgcgaaatccgcgcgtcgtcccgcacttcgcccggtccacgaacaggacaagcatcaccgatagaccgaacacacatctacagccgcgacaagaaccccaacagctagccgcccgccctggatatcgccgtccaatagtaaatcgagcccaaaacgcaaacccaaagcactgactcagataataaaactcggattttccaccacagacagcgagaaactctcccctataccaagtatcgtacgtgccaccttgctcgatagacgaacaatgagaagtatcggttaacgggcatgccgggcaggtcgatgggctctggcgcgggaacgaagacggcgtaccagcacgaatgggccggcaaacgtgatcgtatacaacacgacggcgaggaacacgctgagccatgcggtgaacatgcccaacggcatctcctctaccggagtggtctcggctatgcatgcaacgatctatcactccgatgttgtggtcagtatgcgcggcagttgttcgtcacggttgaggaaagaacgcgtttggcaacgaagtagcgtacgccggccttcctcagtgcgggtgtataccatggtgcaatgcgtcaggcagcggtccaactgtcggcgcagtatttcggcgtcctgctggcggcgggcaaatatggacgggcatgggaagcttacaccgtacgtgcgcacgccccattccttgccgatgatgacatatcgcggattgttgatgggcgcgagtagctccttcataacgccggcgaacagcacctgctcgcgccgcgaaccaccaatcagcatggcacgcaacgccgtgaatctgcgacgtgtctggcggatcgaggaagtcactcacctctttgcctaccgcgttggtttctaggcgctcaggttccgcagtcgccaaatgccagacattggccaccttatcggggtctgcggccacgctgcggttggcggccatgctgtatgcttcactgcatcagtgtaaggcatgaatcaataggttttgagccccagatcgatggtgagaatgatgccggcgattacggcggcggcgcgcatgatgtttgcgggaatcttgcgggtgatgggcggggcgatgtacccgccgatgaagcagccgatgcacagcatgatggcggccggccaatcgaccgcgccttggatgatgaataccactgaggcgctgatgttcgcgcctgtgccgatcagggttttcaatgcattgatcttgtggaatgggccgattttggcggcatcaagcatggcgagagccagggtgccggcgcccgcgccgaagtagccggagtagatggcgactgccaccacgcccagccatacccaccaggaatcctggctcatgggctgcacgagttgttccggcgggcggtgaggtgcggtaggggtggttgcgcgcttggcggcatcagtggcatcggtggcttcagtggcttcgatgtgcttgagttgcgcggtggcatccgcggcggcctgcttggcctgcatgcggccgcgcggattgatggcgatgatcagcgagctcagcaaaatcagcactggtgcggcgaattcaaagacactcgggtcgagtttgagcaacagaaacgcaccggccaccccgccgaacgcgccaatgaccacatacgtaatggagcgtaccgcttggcctttgagttctttgcgcgcgcccatcacgccaccgatgcccgtgccgaccacgccaacggtgttagaagcgtttgccaatacaggcggaatgccgaacgcgagcaaggccgggtatgagaccagtgacgatgcgcctaccgcatagcccacgaatcctgcgccgattccggccaacagaatcagtagtaatgaagttatggaaaagcccgcaatcattccccgtatccttgtcgctcatcgaccggcacattgccggccttgagcgagaatacgctgttgaggattggttgcgggttttatgttggaatgtggacgtagctcctcgcggaagcgattccctcagtcgcctgaggcgacaactcccctcgcacccgaggggagccagaaggaaatcagagcgcttcgttgtattcgcgaaccttgagggtgcggtgggaggatgccacgttttcgacgatcagacgcttcagggcgttgtcggcggcaatgtgctcgtccagccaggcgtcaccgagcttgaccagcgtggcgggatcggcgtaacccgggtacaggccgttgagcaaagcctcggccatgtgataggtcttgttggcccagacccagtcaacggtctcgaagtacttggcggcgaacggctcggccagatcggggcgcggggtggcggagaagccacgggccacggcttcgagctgggagttggtcagctcgtcgttgtggagtgcctgatcccaagcccattccttggcttgcgtcgtggccatggaggcgcgggcgccgtaggcgaactcgcggttttccgtggtctccttcttggcgagctgcgcgtccacgtcgtcgttggtcatctcgttgacggaggtgagcgcttggacgatggtccacgtgaagttgttgtcgatttcgaggccttcaagacgcacggtgccgtccagcagaccgtgtgcgttggcggcgaatgcggcatcgccctcctcgccatagcccaggtaggcggtggcgagctggaactgggtgtccgagccggctccggcggcgttggccagggtccacagctcggcggccacgtggcgcagcacatcgtcgcggcgggctggcgccacgtagtggtgggcggtggtgctcatgcaggccagcgcgtaacggaaggtggtggattcggtttccgtggccagaagacgcagggtcatgtccacgaagcgttcggccgggaattcgccgtcacgggtcatatcccagaaggcgagccaggtcacggcgcgggccagggcatcgtcgaaacgatgcaggttggcttcggcgaatgcctgagattcggcgtcgaaacgaatcttggtgtaggtcaggtcatcgtcgttgaccagcacgaatgccgggcgcggcttgcctgccgcggcctcgacgatggtggtttcgccgtccacgtcgagttcgaactgctcggtgcgcacgatcttgccggtttcggcgtcttcgttgtagaagccgacggccaggcgatgcggacgcagcaccgggtgttcggccggcgcgctctgggtgagcttcaattcggcgatggtgccgtccgcgtttacggtcaggccggtggcgatcgtgttgatgccggattcctccagccacttggcgctccaggccttgagatcgcggccggaggtcttctccagttcgctcagcaggtcggccagggtggcgttggagtaggcgtggcggttcaggtagttgtggataccttcgaagaactgcgtgcggcccacgtagaatgccagctgcttcagcacggaggcgcccttggcgtaggtgatgccgtcgaagttgacgtaggtgtcgttgaggtcgttgatcggggcgacgatcgggtgcgtggtgggcagctgatcctggcgcaacgcccagctcttctcaccggagcagaaggtggcccaggcgtcatgccattcggtggcttcggcagtggccagcgtggaggtgaattcggcgaaggactcgttgagccacaggtcgttccaccacctcatggtcacatagtcgccgaaccacatgtgggccagctcgtgcagcacggtcaccacgcggcgctcggccagcgcgtcggtcaccttggactcgaacacgtaggagtcacggatggtgaccatgccgatgttctccatagcgcccgcgttgtattcgggaacgtagatctggtcgaacttggcgtacgggtagggcacgccccaggtcttggcgtagaacgcgaagcccttcttggtgatgtcgaacaggtagtcgacgtccttcgcgaaggccttggccaacgactgtcggcagtactgggccatcggcacggtgcgaccgtcttcgttcaggtattcggtgtgccattcggcgtacgggccggcgcagatggcggtcaggtaggagctcatcaccggggtcggctcgaagtcccacagacgggtgctttcgttcggcttgtcgccgagggtgccgtcgagggtttcgcgcggatcgtcctcgatggtggcaaccggcatgttggaggtgacgatccagctggcgggagcgagcaccttgaaatcgaaggtggccttcaggtcaggctggtcgaacacggcgtagacgcggcgcgcgtccggcacctcgaactgggagtacaggtagatgttgccatcggacgggtcgaccgagcggtgcaggccctcgccggtgttggagtaacggcacttggcttcgacggtgacctcgttcttctccttgaggtcggtcagttcgatgcggttgtcctggaaggccacggctgggtccagggacttgccgttgaggtcgatggatgtcacttcgtcggcaatcaggtcgaggaaggtcgacgaaccaggcttcgcgttgaagcagatgagcgacttggaaccgaagttcttcgcgccgaccgtcaggtcaaggtcgacgtgatagtgaatcggcgcttcgataacggccttacgttcttcggcttcaatacgagtgagattagaaccgggcatgacttcaattactccttacggtcgtccctggataatccggactacttggtttctacggtttcgacgtcctgggcgatgtcggccacgacgggcacgatcatcggcttgcggtgcagctggcgcgcaacccagctgccgagcgtgcggcgcatggtctgctgcagcttgtaggtgtcacgcgtgccctgcatcatctggtcgttgagctgttcgacgatctggtgacgcaccttgtcgaactcgctttcgtcctcggccacggcgttcaggtagatcttcgggccggtgacgacctcgtggttgtcggtgtcgaccaccacgaacgcggatacgaagccctcggtgccgagaatgcggcgcttttccagctcgtcatcggtcagctcgccgacggaatcgccatcgacgtacacgtaaccgcacggcacggagccgacgaccgcggccttgccgtggtacaggtcgaccacatcgccgtcttcggccaagaccacgttctgcgggtccacgccggtcttgacggcgatcaagccgttggccaccaggtgacggttctcgccgtggatcggcatggcgcacttgggcttgacgatgttgtacatgtacagcagctcgccctcgttgcagtggccggacacatgcacggcggcgttgtcgcggttgacgaccttggcgccgagctgcacgagcttgttgatcaccttgtagacgccgtgctcattgcccgggatcagggagctggcgagaatcacggtgtcgaactcgttgatgtggatgtcgcggtggttgccgtcggcgatgcggccgagtgcggccatcggttcgccctgggaaccggtgcacatgaagacgagcttgtcgtcctgaatgtcgttggcctgcttcaggtccacgacggtgccttcggggatgtgcaggtagccgaggtcggcggcgatggacatgttgcgcaccatcgaacggccgacgaacacgaccttgcggccgtacttgtgggcggcgtccaccacctgctgcacacggtgcacgtgggaggagaagctggcgacgatgatcttgcgggtggcctgggcgaacgcttggtcaagggccgggccgatggaggtctcgggcttgacgaagccgggcacctcggcgttggtggagtccatcatcagcaggtccacgcccttttcgccgatcttgccgaattcgacgaggtcggtgatgcggtggtcgagcggcagctggtcgagcttgatatcgcccgtgtcgatcagggagccggccggggtcttgacgtagacggccagggcgtccgggatggagtgggtgacgttgacgaattcgaggtcgaaggggcccaccttgagcttctcacggccggcaacctcaaccttggtggggttctggtggtgttccttgcacttggcgtccacgaaggcgagggtcagcttggagccgatcagcgggatgtccggacgcagcttgagcaggtagggcacgccgccgatgtggtcctcgtggccgtgggtgagcaccagggcgtcgaccttgtcgagacggttcttgatgtagctgaaatcgggcaggatgagatccacgcccggctgctcctcctcggggaagagcacgccgcagtcgatgagcagcaggtgaccgttgtattcgatcacgttcatgttgcggccgatttcgcccaagccgccgagcggcgtgatgcgcatggagcccttgcggtacttcggcggggcgatcagcacggcatcctgctggggtgcggtggcctgccgggtggcgttgatcttacgggacggcgtacggctgttggatccgttggcgttgcggccgcgcgcggaaccgcgacggcgagaattcgtgttcttgcttgttttcttttgttcttgtgccataacctttttgggatttctgttgtggtgcctctgctctgtcatgcaggggcggcgggctggcaacccgtatgcagcgtttcgggcttacagcagtccggcagcgcgcatgccctcttcagccttgtcaagctgagtggcgtcgggaccgatgttcggcagacgcatggtggtggaggggataacgcccttgaccttgagcgcagccttggccatgacggcctgatagccgtcgccattcaacgcgtggacaaggggggcgagctggttggcgaggcgacgggcggtggtgatatcgccgcgatcgaatgcctggacaagctgctgcatggggttggaggcgacgtgggcaatcaccgaaatgatgccgacggcgccgatggagaggaacggcaggaacaggccgtcatcgccggaataccaggcgaggccggtgcgctgctgcttctccactgcggctgcaagatcgccggtggcgtccttgacagccttgacgtgttcaagttcggccagtcggtcgtaggtttcgaccttgaccttcaagccggtacggccgggaacatcgtagacgatgatcggcttttcggcggattcgtcgacggccttgtagtggccgacgataccgtcctgcgaggggcgggaatagtaaggcatgacgacgagcaccgcgtcggcgcccgcttcctgagtctgttcgaccatacgcacggtgtgtgcggtgtcgttggagccggcgccggaaatcaccggaacgtcgacgacctccttgacggccctgaccagctcgaccttctcatccatatgggtgacgggcgattcaccggtggtgccattgaccaccagaccatccgcgccatcggcgacgaggtatttggcgagcttctgcgcggcggcgaaatcgacgctgccgtcggatttcatcggggtgaccatagccggcagaatgcggccgaaaggtgctggctcaagaaggtgcatgtcatgctcgctcatagtgttcaccgtacttcccattgtggactcttatactacgtaccttgattgttgctgaatgcgtggcattatggccggagccggtggcaatgccgtgatgcgcgtcccggcgcgcttccctgcctgaaatgcgggggcgactactggtcgactgcgggtcgattacaggtcgaggaagtggtcgaggccgatggtcaggccagccggagcgtcgccggcgagcttgcgcacggcaagcaggacgccgggcatgaagctggtgcggtcgaagctgtcggcccgaatggtcagctgctcgccggcgttgccgaagagcacttcctcgtgggcgttgaggccgcgcagacgcacggcgtgcacgtggatgccgtcgaccacctggccgcgtgagccgccatcggtttcggtggcgtccggcacgggggcgagtcctgcggccttgcgcgcttcggcgatgccgtgggcggtgtgaatggcggtgccggagggggcgtccaccttggtggggtggtgcagttcgatgacttcggcggattcgaagtatttcgcggccttggttgcaaagtagtcggccagtacggcggagatcgcgaaattaggtgcgatgaagaccttctgggtttcgggcttcgggccgttggcgatggcggatttgacctgggcgagtttctcgtcggtccaaccggtggtgccgaccaccacgtccacgccttggccgatcagggtcagcacgttgttcaggctgacggacggcacggtgaattcgacgaccacatcggtgttgtcggtggtgacctgggtcaggtcgtcgccggcatccaatgcgagcgccagctgcgtatcctcggcgttgttcaccgcttcgaccacgtgcgagcccatgcggccctttgctccgaccaccgaaaccttgatcatgtcttcttccctgtctacccgtacctgcccggcaatgtacccggaacgttttccaatcggcaatcagcctatcactgccaagccctcacgccaatatcccgtccacagaatcgagctccctctgacaagccgaaccgtgaagtcgagctccctctgatgagccgaaccgtgaagaaaacgccggaggcgtttttaggtgagggcgaacgacagtgagcaataattcagttggctgaaagccatcatctaattgcgttcgagctggccgcgaagcggactgagggagaggcccccggcgaagccgccaaccatccatcaggcgtagcccgattccgtttcacccacgccgcttggccaaggcccatccggccaacgccaatggcacggacgccagcgtgaagatgaatggcagcatcatgcccacatgagggttggaggcgtcaagcacaatgccggccacggacgagccgatcgatgtgccgaccgtgcctgcggtggttacccagctcagtccttcggtcagggattccgccggcaccagatccttgacgatgaggttgccggtggcgaacgtcggcgagacggtcaggccggcgaggatttcgaagacgcccagcaggatgagattgtccattgacagccggaagaacacgtagccgacggtcagcagcgataggaacatcaccatatgcgcccaatgggagcctttgagtcggcaagagccgaacaccagcgcgccgatgcacgagccgaccgcgaacatcgccaattgcagaccgaggaagggctcaagtcccatggatttcatggtggcggtaatggacacgtcgaaggacgtgaagctcatattgaacacgatgaacacagcgagcaacggcagtacgccggcatagagcaatacgctcttgggcttggcgccgctgcgtttgagctggcgcagggtcagctggtcggcatcttcgcttgcagcagggctgccgtcatcgtgcgcggccacggtgacctgttccacgataaccggtggctgggtggatttcagcgagaagaatatggtgccgccgataccgcatgccacggtgggcacgaacagttgggataccggatgcacggaggtggccagccaagccgccagaatcggccccagaataaagacgatctcgtcaatggcggcttccatggcgtaggccgtgttgagcagctgttcaccatcttccacaccgcgcaacgcataggaccagcgtgttcggaccaatgcgccgaatgagaactgcgtcagacccatgatgatggccaggacgaacagcagcggaatcggcacgcgcaccaacgccgcgaaggcgaaggcgagcatggccacgatctgcacggcgagcgcaagccggcccacgcgggcttggccgaaacggtcgaaggcgcgggcgtagaacggggtgacgcagctcatggccagcacataggcggcgctcatggtgccggcgatggtccaattgtcgtagagatggttgagcgccagaacgatgccgagactcatcatggagatcggcaatcgtgccaccgcgccggacaggcagaacgccttggctccgggcagcatgaacaggcgctggtagggcgagtgggcagcggacgacttcgaaaccgcgcgagtcgtggacacaataactccttactggtgcgttgtccggcacgtgcgcccgcccacacgtgccatccgagggtagcggttccctagcaacgtcacgcggtgcgtttcaaccgcggaccggtacgtggccagtcgtcttcatcgtcggagatgccttgcgatgcataaggtctctccaccggtgaaggccgtccgatgctgtacaggtcatgagcctttgggctcagtcgttgtcagattgttcgggaatgccggagctcaactcggtaaggatttcctgtttggatttcgcgcgggcgtgaagctcgcgcaagccctcgtcgggctcactgacatagtagagagtggcgtcgatactgtccaattccacaccttcgaccgctgccagcagcagtcggtacatgtcgagctgggcaagtttgcgggtgatgtcgtctggcttggtgggccgacgaccggttttccagtcgaccacggtaaagcgtgcggtggtgctggacgggtcaagtccaccgatgaataccgcatcgagtttgccattgaccaggcccacgcccggcacgtccacgacgatggcacgctccgtccacgccgggatgcgcttggcccacgatgattcggccagtctgcgctgccacgccaccagcttggactcggtggcattgtcgctgcttatggaagtggcggaggcgacggatgcgacggaggcgacggatgcgacggatgcgacggatgcgacggatgcggattgttgagccgtgggctgtgggacagcaggctgccgtgtggacggcttgcggcattgccgctcccgttcggccaaatcggccaacatggcttcccgggaaacgaatcccgcatcctgacctgtatgcggcatacttggttcggcttcatatgccagtaccgcttcatccggcttaccggcattgatgaattgctcggcccacgcatggaactgcgtgccggcctcggccgccggagacgatattcgtggaatcgggcggataatgctacgccagtagaggcgctcctcccgttcgctcatgccacctacgcgggcttgcaggcttgtcacgttctggcgtcctgcggccagaacgcgttgcgccttggctttgactgcctcatcaagcgactggccgctggcggcatcggccatcaaatcggcgtcgtccaccagcaattgtgcccgttgcaggagtgggccggtgtcttggtgctgctcaagtggcgaggaatctgcggctatgacatcgatgccacgtgacagctgttcatgcactgcgtcgctgagggtagccggccacggcaattcggcggcggcattcgtctgcgtaatcggcgtttgccacgcctcccccaccacggcgtcaccgtatgccgcggcatgctctccgataaagaacccttcgggagtggcaatcgcttcgccttgcgccgagatcagcatgggcttcccggcattggcggcttgcagccgttccacacagtcctgagccgatatcgcatgctcatgggtttggagcgcgtcatgcacttcaagccagaaattggatggctgagcggcgtgagagcctttgggcaccactgacgggtcccgcccggattcacccgtataggcgcaataggtcatcagggcatcttcccgtgcacgggtaagcgccacatacatcaatcgacgttcgtcggcatgcagccggcgcccatattcctccgcctgcgtcaaataccagccggatgcatccacttcttccacgccatcgccgaattcgcgcatggagccgaacacttcatcatcgataagctccacatcatccaaagccgccaacgatgcgatggggtcggcttccacatcggcatcatgggggaatcgcggcaaaatgccggcatcggcgcgcataggcacgggcacggcggtggggttggtgagccaggagtcggcggtctcgtgatattcgggtgcggtccagtgaccttgctcggtgcctcccgtatggtgttcgtccagcacgatcttgagatggtcgccctgattgctggggaatccgccggcggtaagccccactaccgcaacggcatcccattccaaccctttggactggtgtacggtcatcagttccacatccaccggagcgtcggggagactggcggcttcatcctccaccgaagccagatgatccacccatgtgatgaacccatgcaacgagggagtttgctcagcggcaatctcttgcgtgtacgtatccaccaaatccacaatcgcatccataggcatatgcgccaaagcgggattggcgcggtgctgcggattatgcagcacaccggccaatacggtgtcgatgtcaagatccaacgcttctatgccggcgcgaatcacgtcgcccagtggccgcccgacggcatcatgcacctgacggagcatcaccgcggcccgggttatggcgttgcgcccgtgtgcgctcaaccgttcaagcagttttaccaggtcgccgcgtagcaatacgtctggcaggaataccgcattggccacctgatcgcggtactcacgcaccacagccgcccattcattcgctggtgtatccggttgggcaaggccggcctgcaccaatgcttggaagcgttgttccatgttctgttcttcagcaaaacgggccaacatggtcaaatccgctgcggacatggtgaatcgtggcgtggccagcaagcgcatcagcgatcccgtatcggtgtggtcggcggccacgtgcagcaacgccatcagatcgcggatttccggacgttccagcagcgcggaatagccgaccacgaatgtggtcaatccggcctgttccaatgccgcctgatattcgggcatatgtgatttggaccgaaacagcacggcgaccggcgctttctgttcgcccggcatctgttcctgttgttcggctgcggaacggtgccgtgcgatggccgtcttgcagaaacgcactacggcgtcgatctcctgcccggccgtggcgaagcccagtactcccaatgttccttcgggggcatcaggcatggggtcgagcgatgagacatcgacctcacgcatcaatgagctggagggacgcgacggattggagcgcaacggcagcgtgagattattggcggcttcgagcactatacggctgttgcgcctggtgacggacaacgggaatggcttgtatccggcaggcaggtggaaatcttgctggaacatacggaatgcaccagggctggcaccacgccatgcgtaaatcgactggaacggatcacccaccgcgttgacggcggacctccgtgacgcatccacatggaacagtgctgccagcagagcggcctgcgtggtggaggtgtcctgatattcgtcgagcagcacatggctgtacctgcggcgcgtgcgctctccgatggaggggaagcgctcgataagctgatacgcggcaatggtgaagtcggagaattcggccatattgcgttcccgcttggcttgggcataggcctccaccagctggagcagaatatcgcgtttgcgtgtggtctccagcagcgcaccgcaatgataggcgcagcgggcgtgcaaatgttcggcacggtcatcgagcttggcttgccagctggcgtcggtatctttcttcagtcgtttgatcttggggattttcggctcgtcctcgggcatgggttcgtctacgacggcttgctgcaatcgattgatgaatgccgaatcccattgccgtacttgattgatcgcatcatcgaagctggtgcagccggcaccgatcatggcactgccaatggcatccgacaacgccagaacacggttcgccaaactggagaaggcgccaaaatcctcactgaacgccagatccatgtgactgtcgatgacttcggtggccagttgaagcgctccggctgcgctcaatggttgcgtgttctgatcgaatccgacaagcagtccatattggcgcacgatggtctggaagaaggcgtcatacgtgaaaatggccggcttgaggaatgcccgatcagacaccgtggcggtcgtagagcccgccatatcaccggccactgcggcggagacgcgttccagcagttcgcctgcggccttgcgtgtgaaggtcaggccaaggatgcgttcaggtgccacacctcgattgataagcgcgatgatgcgttgggtcatcgtaaaggttttgccggaaccggcaccggcaaccaccagtacgtcagcatcgactggcgcatcgatgatggcggcctgttccgcactgggagtgaacgtgctcatgcttgcctcgtttcgaaaatcgtgtcgatctggcccgcacaggcagggcagacgttcttcatacggcagaatccgatatgggtgtcttgcggatgggcctcgatgatggccgacctgctggccgccgcggcatagaatacgcgggcgatcatggtcagcgaccataacgtctgcgtaccggcgagcgcggcgaattgcgcccacgcttcggcactcacaccttcgggaggagtagccggatctatggcgggtatgtcgaagaaacggttggggtctttataccagtatcgtggcgtgaacggttcggcattcaacgaaccatcagtgaacagcggcggctggaaggcaccttccggggcgtagcttctggctggtgccgcattctgcccgacatggaacagcgcgctttggctgatatgcggcattgcggcaagtgccttggcaccgcgcggcccgtcttcggggaacacgaggccaagctgatagcacacgagctgcagatcattgaaaatctgtttgaccgtgggcgttctgcctgttttgtagtcaatgaggcgaatgcattcgccgccgtctgcgagtacgcgggtttccatacggtcgatgcgcccggacagtctcacggtcagatgctcgtccatgccttccggccaccctccgaccagtgctcccatcagacggaccagcatgttccgatcgatcgggtgcatgccgggcacggcattgtatgcgtcgagtatgtcacgcacatcgaatcgtgcggcaaactcccgttcgcattcggcaccggccaatgcgccaatgctgaagttgctggagttcttgccaagatacgtttccggatcggcgtcgctgcgcacaaagtaatcggcgatgttgcgcagggcatctgccgcggactcgtccttacgggtggcctcatagcggttccgggtgtcggctatggcattcggatcggggcgtttgctctgatagatggcattaagccgtgccgtgacagcctcgatgcggcgttccgtgccggccgtggagtccaagcccagtgtggccaacgtctgggcattgtgggaaagatggtccagcccttcctcgctgccttgctgtgcaaccgcatggatgagggttccgaagctggtggccacggagctggggcgaggaccggcgaaccggttctccagcatccagcacaccggacatgcccataggctgtcgaccgccgatggagacagggtgaccatgggtgcggcctgcgcatccgtcttgcctttccccgtttggataccgtcagactgtacaccgccagatgacgcgctgtcggatgaggcactgtcggatgaggcactgtcagatgaggcaccgccagatgacgcgctatccgattgggccggcgattccacgaacgcccagctctgcggatttgcggcgcgcacaccatgctccgacaggagtgtcaacgcaaccgcggcgtcctttgcggcagcctgctgcggttgagcagtggccagaaccgcgcgggcggcgctgaccaacccacgtgggtcggcgtccaatccggccagatcatattcggcggatcctgtatgcgcccccactgtggtgaaaggcgcctgttgccggttgcgcggatagtattccggcagatacccgaaaagaaagtccgaggggctcatgctgtcgttccataccgcgctgatcatgattcgccgtgcacgggtcagcgcgaccaggaaacccttcttctcgcccgacagcacagccgcgaaccgcggatcatgcccggttttgtcactttcttcaagcgctcccctcagcacgagctcggcaaggtcttcaccaccgaacatggtgttgcgcccggcgaggttcggccacacgtcttgctggaccaccggtatccacgcatatccccagtggcgtccggccgcgcctgccggcgtggtcaatgtcacagcgtcttccaccggccctatgtgggccaaggaatcggcctgcacttccatgccccgaacctgtgccatgaatgacgtgatgtctcggctggcggtggaatcatcggcgaactggaacaggcgcattgccgcgtccagccggtcattggccgtgcgcccctctgccgtgttgaataatgccgcacgctgccagaccggtgccagaccggtggcgttccaggcaacagacagtgcataacgcggctgtacgcgctggcttgccggcagccgctccaagccggaagcaacgctgcccaccagatgccacaggttcgcaaaagcgcgggcctgagggtcgttgccaagcaccgcatggatggatgcgagcgcagcctgcgccggcgcggcggcatcatcaacggcaagcatcacgtacagcgcgtcaacgccaaaggccaagtcatcgtcggacggttcaccgagtatttcgacagacactggcgacggaaccactgatgaggatgtttcacgacctgtttcacgccgtgtttcatggtatgtttcacgcaatgtctcccatgccgtcgtcagagaggtcagcatggcatcatccgtggcgagatgcgccagcgactccagcgcgctcatggccgattcaatcggagcgagccttgcaggacgcccttgaccgggtctgcccccggcactcaccaacgggccgttcatcaacgtggccactctagtccttatatatgccgcgcaggaagccaacgtcatctggcattccgccattccctcggcacgcaatcgggcaagctccacaagcgcgaacaatccctgcacgaaagtctcgtccttcaaaggacgggtgaccgacgaataccgcaccggcacgccatctcggcgcagtcgttcgccgaacagccgcacggcggcattgtcgtgggtgatgaccgccatgtcgttccaccgaatatgccggtcaagatgcgtccgcttgatgcgccagaccacatcatccagctcctcacgtgaggatcggtacaggccggcggtcaccgtgccgtccgactgataattcgctgcatcgactccgcccagcatggcggtcagcttgccgggacgctcggccggaggcagcggctcgtcttccggcgagggaatcgacagcgaaatacgagacgcgatcacatcagccatcgtcatgtgcgactgatcagcgccggtactgccgccaaccagctgttcttccttggctttcagccacccttccacggcacggcgcatcagatattccggatacgatccacggaaggtctgcaccgattcatccgggttgccgaccagcaccaacttgacgccggcattccccaactcctccaagaagcgcatgccggccagcgtggtgtcttgaacatcatccacaaccagcagccggggcaagcccaacgcctccatacgcataggccggtcggaatcatccgcgtgatcggcggcgaatgcctcatgcaccacacgagctcctgccaccagcaaatacgaggcatccaaacggtattgccccggatatgccgcgctttgggctgcaatatattcacggcgcaacgcgaaagccaaacgccattgcaccgacaatcgcgcgtcctccgtcacggcgtccaagagacgtggctcttcgtgaacgcctacaccgagctcgtccaatcgggccagcatatcgcgcaactggctgataaacgcatctgaaataccgcgagtgaacctatccgcgctggtcgagccgcctgccgacgtcggagacagcgaatccgacccttgttgcgagagacttgattgtgcggaagcggccgagccgggcatctcgccggcaccggcatcgcgtatgagtttcgcccagtcatcctgggcaaagtagacgcgtagcaaatcacaggtgccgcaatcatctcccgctacggcatggcgcagatgcacggccatgacttgacgcagcaaagcatcctgttccgcaccgttcaacaatcgaggcgacggcaatccagttccctcgcgcgaagctgatatggcccggaatgccacggcacccagcgtggtgaccggcctggcctgcacggaaaacccgagctcacgaatcacccgattgcccaatgcgtcggcggccacacggccggatacggccatcaccgcctgcgtgccaccgtagcggcgcagccccgccatcaacaccgataaggcgaattcggttttgccgcttccaggcgtgccgacaatcagcctcgccgctccatcacggtcgatgccgtccagcactgttccaggttcaagtctcgtcatcatggctccagcctaaacccgaccgtcacagagggaaaaattttaccgaacccgacgaagaatcgtacccttgacggtatcctgtagaacgaatgcagggagagcgcattttccaaggagggagggaacagatggccaatattccgatgaggccgccgaagctgcccggatatgatttcgtccagatgttgggaagcggtgccaccgccacggtgtacctatataaccagcgtatgcccgcacgcccggtggcggtaaaggtcagcgccaaaacccttgacccacgggccgctgccctgttcaaccgcgaggccaacttcatggccaagctgtcatcccacccgtacattctgccggtatatggtgccggcgtcacctccgatggccatggctacattgtcatcgaatatgcgccgggcggcacctacaacagcatcatgaaggcccggtccatgacctgcgagcaggtactcgacctcggcatcaagctgtcaagcgcgctgttcaccgcgcatcgcagcaatatcatccatcacgacatcaagcccagcaacattctcatcacctcgcagggtttgcctgttctgggtgatttcggtatctccaccgatgtgtatgaccgtaccgaaaccggattctcgccgccgtgggcaccgcctgaagtgcttcagcatctgaccaatggttcggaagccgccgacatctattcactggcggccaccctgtacgccatgttcgtcggctgctcgccattccagcacgaatatcatccacgttcgcaatcggaactgatttcgctgatcgtcaatcagccattgcctcgcctcaaccgccccgacgtaccggccgatgtggaagcggtgctgcgccgggccctgaacaaggaccccgaccagcggtactactccgcgttggagttcgcacgtgccatgcagcgtgtgcaattcgcatatttcgggcatgccactcccgttaccgtggaagggatgccggcctaccccaaagacatcgagcgtcggcgccgggccacggaccagcgagatcagaccacccgttcgtcacggcgatgggtcaaaccggtgggtattaccgtcggtatacttgcggcaatcaccgcagcggcactgatattcgccttcgtggtcgttccccgcatggacagcgccaccggatcagataccaaacaggtggcgacgcccggcaccaaggatgatgacaacaaccgcaataatcaggatgacgtgatcaccgataccgcgaacgcccagattccttccccggagaatctgaacggcacctatgcggcggatgggtcatccgtgacgttcacctggacgaatccagacccgcaaagcggtgatacctatacgtggaccatagtgcagggcagcaataccgaccagagcgcgcaaaccgtcacaacgtcagatcccacggtgaccgtcaacgcgcaggaaggctcgcagacctgcattcaggtgtccattgtgcgcaagaaccgccagatgtccgtcagccccgccatcgcctgtgcggccaagccgcaagagtgatccgctcgccactgccgggcataccaccttggcattgcgtatcgcatcaggcatgcgcccggcagtggcgaattcaccaaatggacaacaggaacggcaggtattggaaccgtaaagcgttgtcattacactagcaaccagagaaaccagggttcagggagttcagatggccacatcgtcccagtcatacgatcgtcgccgacgcatcagcgcggctttgcgccgccttatgccctccggagggcatacgtggacggttcccgtaatcacgctcctgctgcttctgggacttgttgccggcgcggtgatcatgagcaccgtcacgcgccgccatgtgcaactggacgatggcaccgtgtgggtcacttcgctgaagaaccagaaggccgcacgattcaacgtaaagaacaaggaggccgacgccggcgtctcctcctccgccccacgattcgacatcgcgcagcataatggcgacaccatcctgaccgaaacgaccaaagcctccaccatcaaggcatccacggtcagcaccggtgtcaagaccgacatcaaagccaacaccaccactgtggtcggcggggataccgtagccctgatcaacgagaagaccggcaatgtgtggaccggcttgtcggaaaaccttgattccgtggcccccaccacttccgatccgaaaatgaagctgggcgagggcgggcgcatcgtagtaacccacgatggcaaggtctacggataccgtccatccgatggtatggtgctgcgtcttgacaatcccagcagcgccaaggccaaaaccctcgaatcgctgaccgacggcaagcagcagaccgttgaaagctttaccgtcatcgggagcacgccggtaatcacaaccggcaaaaccgtcatattcaagggcggccgcgtcgatgtcgacacgaccggcaccctcacccttcaggagcctcccaccgatgacgtacagtccgattgggtggccgcggcatcaccgagaggccttgcgcttatcccgttgaagtccaatgccaaggcgaatttcatagccaacgggggcaaggcgaatccggcacgaccggtatcgtccaagggctgcgtgtactcggcttggagccagaaggccagcaactacattcgcgcctgctcccccgcggataccagcgtcaagccgcaaaccctcgaatccgtcaatactacttccgaattggtgttccgcaccaaccatcgccttgtggtgctcaacgacacggttaacggcaatgtgtggaaccctgaggattccaccaaagtcatcaaaatacagtggaacaaaatacaggccgagcagaccgagaaagaacagcagaacaacgactcggccaacaaccaccacgacttctccaagacctgttccgcacaatccggccaaatcaaagccgaggatgatgaaatcggcgcacgagccggttcggaacagattctcgacgtgctgcgcaatgacgagcagaccgattgttccgtgctgaaaatcaccaaggttggcgcaccaaacaacaaagacgtcaccatttcgccgatttacgacggccggtatctgcaactcgatgcctccgccacatccgcaggcaccgttacctttacttacgatatttccgatggccgcggccagacctcttccgccacggtgaccgtaaccctgaatgatggaggcaaccacgctcccgtacagttcgacactcctcccgagatcgatgtggagcagggagccagttataccgccaatgcgctgagcagcttcaacgatccggatggagacccgctcactctggtctccgctgtggcccagaacaccgaccaggtgcaggtgtccacccgagccgacggccagcttacgttcaacaccggtgcgctggcgtcgggacgcgtgggcgtcgaggtcaccgtctccgacggcacggcgaccggcaccggcatggtgtatttctcggtcaagcccgcgaacaccttggccgcggtcatcgacccggtagcgaaaaccaccgttcccaacacggataccgtcgtcaagctgtcctcttacgtgcatggcacttccttgcagccggcacagctgactcaggtggatacgcccaacggcgcttcgacgaccaccaatgcggcggatatgtcgttgacgttcaaggccaccaatcccggcacctattatgtgccctacaccattactcaaggctcgattccggccaccggattggctcgcgtcgaggtacagcccgccaccggcgaggccgccaaaccggttgccgccaacgatgtcgccctgcttggcgcggataataccgccattgtggagccgctcaccaatgacgtcgatccgatgggcggcgtgctgtccgtcaccacggtgagcgcaccggccgactccggcatcaaggttggtctcgtcagccataagcgcgtgtatatcactgcgcgtcaggtgcccacgaaacccgtcgcccttacctacaccgtggccaacgcctccggaaccgccaagggcaccatcgtgttgcagccaccggctctgaccacctcgaattcagtgcccaaggccagcaatatcaatgcccaggtgcgcaccggcggcatcgtgtccgtggatgtgcttgaccatgtggcctactcggatggcaccacggtcaagctcaagaacaacctgcaatacgacaaggagacgttcaagggtctggccttcgtctctggagacacggtccgctaccaagcatccagcgagaccggcaacttccccatcacctatacggttgaagacaatctgggtaatgtggcttccgccaatatcaccattaccgtgcataagagcgacgcagcgagcaaggccgcgccaaccccgcatgacgccgaagcgcaggttgccgccggacagaaggtccgcatccccatcacactgaccggcatagacatggatggcgacgacgatcagctgttgggtctgggcaacaaggcacccacgctgggccgcatatccgaagtcggttccgactacttggtctatgaagcgtatccggattcgtccggcaccgacaccttctcctatgccgtggaggattggaccggtcagcgcgcacaggcgcagatccgcgtgggcgtattccaaggatcgtccgactccggcgtatacgccagggatgacgaaatcacgttgaggcccaatacggccgcaaccgtgccggtcgcgcagaacgacatctccggcgacaacaccaatctgaccgtcgacaagcatgtcgaggtccaaggtctcgacggggtgagcgcgaaagacaacatgatctccttcaccacgcccggcagcgccaccaccgcctatatcgcctacacggtcaaagacaaggccggcttgtccgatacggccaccctcacggtaaacgtggatccgaatgccgccatcgagccgcctaccgcctacgactatcgtgtgccgtccgccgccaccatcgataagaagtccgtggatgtggatgtttcccagtggatcgccaatccttccggcacagccaatgagctcaaggtcggcgtgcatccctccgccagcgctcacgctcacgtcaagggcggcgagcattcgaccaccatcaccgtcgacctgacgtcacaggcgcgagccgtgccttacacggtgaccaatacgaaatacaacatcacctccaccgcgttcatccaggtaccggcctatggtgtctttccgcccacgttgcgtcccaaggcaccggaattgaaggtcaattcgcgtgagaccattgaaatcaacatcaatgactatgttcgcgtcggcgccggcaaggaaccgtatatcgaaagcgctgattccgtcagcgccaccaaggcttccaactccgatttctacgtgaacgacaagaccctgaagttcactgcggcaaaagactacgcaggccccgcctccattacctttaccgctgtggatggcaagcagggatcggataagaccaagatcatcaattccgcagtgatcactctccagatcacggtgataggccgcgatgtgccgccgcccacgttctcgtcctccactattgatgtcgaggcgggcgcggcccccaagaccgttgatctgacggcgctcacccatgcaccgtccggcgtgtatgacgacgagaagcaatacacgtattccggcggaagctcatcgtccgggcgaatcaccgctaacctgtcccgttccggcagcttgcaggtttccgccaccaaggatgccgctcctggcaccaccgcgtccattcccgtgcaaatcgcatacggcgcgggcaccgtgaatgccggtgtgaccgtgcgcgtagtgtcttccacccgtccgctggcacgcgtcggcgacaagacgctgaagatcaaggccggtgccagcgatgccgtgaacgtgcttaccggcgcgtacaatccgttccccgattcctcgctgaccgtcatcagctgcaaggcggatgacgccgccaaactcactatcgccggatgcgatgcctccggaaacgtcaccatcgccgtcgcatccgatccgggtgcttccacgaacaccgtgctcgtcaccgtgcaagacggcagcaagtccaaggatcgtgaagtcaccgcatcgattaccgtgtccgtgatcgacaagcccgagccgccactgctctcccccgtagccggggaaccgcaggacagcgcggtcagcctcacatggacgcccggtgccgccaatggcagcccgatcaccaactacaaggtcagttggaccggcgccgccaccggagagaaggattgcggtgccgtcacctcatgccaggtcacgggtctgaagaacggcaaaacctattccttcaccgtcgccgcgcgaaatgacgtcggttggtccaaaccgtccaccgccgtcgaagccacaccggacaaggtgccgtccgctcccaccgatgttacggtcacaggtggcaataaaaccgccaaagtgacgtggaaagcgccgagcggtgatttcagcgccgtcgacaactattcagtgaccgtcaccggtgcaggtgctccgcagaccaaggaaaccggcaatacggccaccgagctgtcgtttacgttcaacaacaacgacatttccgatggcaccgccattacggcgaccgtcaaagcccataacaaaatcaattggagtgccgagtccgcctcatcacagccaaaggacatctggggagacccggatgcgccgaccattgcgctgtcgaacgacgacaccacaggaacggcgaaagtcactctcggcaacaaccgcaatgccggctgccggcgaatttccttgggaggagacatcaaggacaccatcgattgcagtgacggtggcgctacgttcgatatcaatgagaacgatttgaacacccgggaaatcaccgtaacggccaccgtggtgccgcagcgcgatgcttccgccggcacaggcaagagcaggtttgtcccgcagtacaatgtccagccgcccactgacgtctacaccaccggatccggcagtacatgcaccgtgcattggaccaagcaggggcatgcgcagtcctacaacgtgactgccgatggcatcgattccggtacagctactaaccggaactcactcgacttccgaatgagtccttgggccaaatgcaataccgcatcggtgcaacaggtgttcaacggcgctaccagcgatgccgccaccggaggcccgtacaatggcgctccttacacctatgagaagaaggctgtaatcaacaaaccgcaggagctgcgctggtcagacaacgctcacgtcattaacgtcaccggcggttcggttgaggtctatggcaagcaggccaccgtacaaatcatcatcaatggccaaccgttcacgtggaaccccggccagccattggacgtcaccgacttggccgtggccgccgatggcaactacacgtggagcgtcaaagtcaccggcgggccgggatactccggtctcgacaatacggcggacggcagcagcgtcgcgggcacacgcccctctgattcctcggaggggaccgagtcgctcaaatccggtaccgatgtcaccactttggccaagaacccttggattcttggtttcggtaataccccaatatcgtcaaccaccattcacaagcagtaggagaacatccatgagcgagaacatcgacgacgcgacgcagctgtctgacagcacgcagctatccgacgccacgcacttgtccgatgccacacatctggcatcggaaccgcacactggcaccaccccgaacaccgagacggcacagcaacccgttgcgttgcctaacctgccgcagcggccgtcacaagcgtcgtcagaaaagccgtctcctactactgatgccgcctccattcctgcgggcgatgacagcaccgtgctcaagccacgcaaggacgcgacgccagccatcccgcagcaggtcggcatgccggcaaagaccagcacgcccaaagtcgcgcttccgcacttcggacgtaaatccggcaagcaggccgctactgcgaatgctgcccccgccacccagacctcccgtcaatggacgaccacaaccgccggcaagaccgcaacatccaacgccgaaaccgtggctggtcgcgggccggtagccaatcagcaggccgccgcgcaatcccagccgcaatcccagccgcagcgtcagtcgagcaaagccgcgcaagcagccgcatcggcactgcccgccagcatcaattccggactactgccccagcccacggctcaggtccgggatttccagcagtccttcaatgcgctggtcgagaatgtctccaaggtggttatcggcaagaccattcccatcaagcaatgcgtcaccgcactgatggtcggtggccatattctgcttgaagacaaccccggcaccggtaagacccagttggcccgaggcttggccaactccatttccaccggtttcaagcgtattcagttcacgcctgatctgctgccttcggatgtggtgggtgtgactttctacgatcagaagcgcggagaattcgagttccgcgagggcccgattttcgcctccatcgtgctggccgatgaaatcaaccgtgcatcgccgaagacgcagtccgcacttctggaggttatggaagagcagaaagtcaccgttgacggcgtcacccatgatgtaccgcagccgttcatcgtgatcgcaacccagaaccccatcgagcagctcggtacctataagctgcctgaggcgcagatggaccgcttccttatcaagacgtcgattggctacccgggccatgatgtgtccgtcgatatcctcaagcaggtcgatatcaccgaccgtgtgcagaccatttccccggtgctgagcggtgacgatgtcatgcggctgcgtcaggtggccaccgaaatctatgtggatgatgcgattcgtgaatacatcgtcaggctcgtcgaggcgacccgccacaacgagaagatcacagtcggctcctccatgcgtggcgctttggcgctgacccgatgcgcccgtatctgggccgcggccgatggccgtgcctacgtggtgccggatgacgtcaaggaccttgcagtggccgtgctcgcacaccgtatcacgctgactccggaagccaccttcgatggcgcgactccggaaagcctgatcgcacaggtgctcgaagacgttccctcccccaccatcggttcctgatagggcctggaaaggtatccgaccatggcatctacatccgccgcattacgccgtcgccggcgcgctgaacgcatgttcaagcgcgcggtaagacgcatcagacggttcttcgcatcctacgtctcgcccttgggctgggcggtaacgggcgcaggcatcgcatgtcttattgcgttcctgcctctgggctggtatgagctgctcgtattcggcatcgtggcgatggtgatgatgctcgcggcaatcgcgctttccctcggcaacacacgcttccacgcgtccatcgccgtatccgatcatcgcgtgaccgtgggagacaccatatccgttatcgtcggcatcgacaacaccggcaaaacgccgacaaccacggcacgcggatatctgccaatcggcgatgcgcatgaacgattcaacatccccatgctggctcccgggcaatccaagcaaaccgatgtggagttccgtacggtatcgcgcgcaatactgcccatcggaccattgcgcatccgcaagggagacccgttcggcctggtgcgtcacgaaaaggagctggccgaccgcatcatcgtattcatccaccctcgtaccgtgcgtctcgataccttgaatgccggcgtgccccgcgatctggaaggccaaccatccggccagatcgtggatgatgatctcgacttctacggattgcgcgaatacgagccgggcgacgacgtgcgtaacgtccactggctgagctccgcgaaaaccggcacgttgatgattcgccaatatgaagccacgcgccgcaccgacacctcggtgaccatcagcgtgaacccggatgagtacgtcaacggcgaggaattcgagatggcggtgtccatccactcctccatcggcgtcaaatgcctgctgcaggatcgcccgctgttctgtcacgcgggcaacgcgcacggccagccgcgcaacgccatggagttcctcgacaacgccagtgccatagagcctgatcgtgaggataatccgaatctcgtcgagggcacgctgaagcacagtcctgatgcttcgttctattttttcactgttggatcgctgaaagacatcgagcaaatcaagcgcatgaccttggccttgccccgatcggccagctgcgtggtattgcaggccagcgccggcgccaatcgcggcatcagaagattcgccaacttcacattggccaccatcggcgaactcgatgatctcccactgatcatgggggtgctcgcatgaccttcgaccagtccagtatcaccaataccaataccgctgcgtacgccggatcgagcggcacatacaccggcacttcctccggcacgtacaccggaaccgccaccaccaccggctcctgggccgactccacacattcggttatctggatgaccagaggcaatgtgcttcgcggtatgggcctcagtcgccagccgtggggcaaacgaatcgccagcctcgtactcatagcggcgatgatgttgctggcgcaagccaatctcatcgacgtgtacggcggcgtggccacttgggcgatcgccgccgtaccggccaccttgctgggcgcgatcatcgctctggcgggcatgttgccggcgttgcgactgtggtggcaaatcgtgtttctggcgtttgcccaattcatcatcggtccggtggtaacgctgagttccaccacgtcccattacgtgattcccaccttgaagaccttgagttcaggttgggaaatgacgtttggctcgttcaagtacattatttccgtcgatccgcctctgggcacgcaagacggcgtgctgatggcggtatggaccatcggcctgtggcttacgttcctcaccggcgtgtttgccattaatgccaacgcatggttgtctctggtgggagtcctgccccttgcggcggccgtggccgtatgtgctctgctgggtacggacagcggctggcaacgtgccatctgcggcattgcctttgccttgctgctgattatctggctgtcttggcgtcttgaactgctggaatgggggcgctggatatccgcgctgatcatcgtcgtgctcgctgccggccttgctttcggaggcacgttgctggtgccgcaggaccgtttcgtgctgcgtgaccgctacgatccgccgttaagcccctacgattacaccagcccgctcagcggcatgcgatcctatatcaaggaccacaaaaaagacgtgttgctgaccgtccataatctgccggccggaacaccagtcaaacttgcggtgatggatcgattcgacggcacagtatggaacctgtccgattcttccgaagccacggactcctcgaattatcatcgcgtgggcaccacgatcaaggcggatgagcagggcgaatccttcactgcgaccttcaccgtcgatcagggattgaccgacacctggctgccgctggcgggagcggccactggcgtgagcttcgccaacgatgccgacaacggcaatgacacgttctactacaacacggataccgattccgccattattcccgccggcacgcgtaaaagcctcacctataccgaatccggcattatcgcccgcaagcccaccgataagcagatcagcagtgcggccgcggcccgcatcacccaaccggaagcccaggatgttcccgattcggccagcaaactggccacgtccattgccggcggacagtcctcgggcggtgccgcagccacggcgttggccgacacattgaaagactccggatggttctctcatggactcgaaggcgattatccctccgatgccggccatggcaactaccgtatcaacaagctgctggcaggcacggccatggtgggcgactccgagcaatatgcctccgccatggcactgatggctcgtgagctgggactgccctcccgtgtggtcctgggcttcctgccgaaaaacgaggatggcgaaatcaccgatgcccgcacggagaagacctcgggcaatggcaccaaaatcgaattcaccggcaacgatgtcaccgcttgggtggaaatcaaattgcagggcctgggatgggtggcgttctatccgacgcccaaggagaccaaggtgcctgatgaaaaccagaacctgacgccgccgaatccgcagacgctggtccggcaaccaccggtgccgttgaccgatccgctgcgcgatcagacgcaagccaggggccaaagctcattggcaggcgccgacgccgatgattcgccgaccaacctgttctgggtgcggttctggcgagtgacccgcaaggtggccctgtacggcagcccattgtggaccctactcatcgtctgcggtctgattctgatgttcaaggccatgctgctggcgcgagcgcggcggcatggcagtccgaaagcccgtgtggcagcaggttggaatgccatacgcatgcttgccgagcaaagcggcatcacagccaagggcactcgtcgagatcaggccggtgccatcgcccgtcaactcggcacagatgaccaggctttgatccagcttggccgggaagccgactacgccacgttctcggggcaagacattgaatcgggccaagccaccacatattggacaggagtcgaccaattgcgcaaggcaatgctcgcttctttgccgcgtttcaggaggatacgtacacgactttccctgaaaagcgtggctatactgtcaaatagacacgcagccaagtcgcacacgacgcatgtcaagcgcgcgcgtaagaaggggaagacgtcatgaccacaggctccatccgtatcgcgatgaccagtgacgtgggtcttaggcgcaagaacaaccaagacaccggattcgcccaacagggcgtgttcatggtctgcgacggcatgggcggcggcaaaggcggcgagcaggcaagccagttggctgcccagcatttcgcgcagctggcttccatgccctcgcgcacccgccatgacatcgacgacaccctggcacaggctcagcacgacattctcgatttgggtgaccgtctcggcggcgtggccggtacgacctgctccggcctggttttgccccagccttacgcagatgccatcaatgcccacagcgcagctccgtttgacgacgccgactccccggatttctcggaccagacctatgtggtcaatgtcggcgattcccgaacctaccatctcagcccgctgccggatgccgatgcccccgccacggatatcatccccgtgtgggacgcctcctcgctgacccgcatcacgcgggatcattcccaacgccaggaggctatcgattccggtcagatgctgccggaagaggcggaggcgaccattccacgcaacatcatcacccaatgcctgggcgatccggacggcatagtgcccgacgtatatgttgccgatctgaccggccgtttcatcatctgttcggatggattgcacggtgaagtgtcagacgaacagattgcggccatcgccgcagcgcattccagtccgcaggaagccgtggacgccttggtggcggccgcgctcgatgcgggcggaaccgacaatatcactgtgattgtggccgatatgccactgaccgaacccgaacatcacgcgttcagcgcttttaaactggacgagggcgaggacattggcgccattgaagacgcaacactacaaacactacggaccatacgttcggcataaccgagcgaacataaggaggtaatcccatggttgattatgatgctgcggtcgctgccgtacaggatccgaacgcggacccgattctgttggcaaaaatcgcctacgagaatccggaattcggcgcaaacgtcgccgtaaatccgcgttgctaccccggcttgaagcgttggatcgccgagttcggcgatgagcgcgcccgcgagaccctggcgcaatacgggttcaccgccgaggcattcggcggcccggtccaggatcaggaagccccgtcacaggcggccctgcaggctgccgagcagcagcctgcagacgcttacgccgccgaccagtacgcagcccagcagcccgcaactgaccagtatgctgccgctgcccagcccgctgccgaccagtacgcagcccagcagcccgcggctcaggcggcattcgaggagcctgtggccaccaatccttatggcttcaccgccgaacaggccctgaccaccaccgaccagatgcaaatcgcccagattgcccaatacgcgcctgaactacgcgcctgcatcgcccgtaatcccaacacctatccggcactgatcgaatggctgggccagctcggcgacccggcgatcaacgccgctttggcttcccgtcagtgaaaggacggcatcatcatggccaaacttccctaccctccagcacctgaactgggttggtattctgacgatccggtggaaggcaccccggattccgcagttggcacagccgaaccgcagaacgactacgggcagcccagcaccgcggaagcggcaaccaatgccgcttttaccgcagagcccgccgccactgccgccgctgagcccactgccgctccggtagacaccacaccgcacgccgccgaaaacgacatcgaggattgggacagcaccgtgctctcctcgtcgttcacttccaaggcaccgaagaaaacgtatctgctgcataacgatgtcaccggccagaccatcgtgatcgacaagagcacactgttgggccgcaagccatccatggatgtgccgcagggtgccaaggccgagcgtatcgaagacccgacccgcaccacgtcccgtaatcacgccgccatcagcatcgataccgatggcgcgttgtggatcgaggactatggctcgttgaacggcacctacatcatcgccgacggccaggagacccaagtcaccaagggcacaccgctcaagctcagcgcgcctgccacggtgcgtatcggagaccagttcttccagttctccgaacagcagtgacctctggactgtacaggccagcgataccccccagatatcaataaaccgcaggtaacgtaccaagcaagctgtgagaacaacttgtacccgtacggtacctgcggtttattgttgccgttggcgggcggtcagtgacggttgctcggctatgcctataccgggctgggcggtcactgaccgctgaacgcagtagttacttcttcgagtctgacttgttatcgctggatgagctcgacgaacttgacgagtccgactccgagtccgacgaatccgaatcactctcgctttgcgacgaactgttgctcagatccggtgcggggtcgcccggggcctgaccgatggtcacaatcacgtctccgctggattccgggctccacgccatccattccatagcggcatggtcgcacaccgtggaatcatcacccaatggcaattgcgtgtacttgcccacggacttgccttgcgcatcaacgatgatctgctcatccgtggtcttcacgtatatggtcttggtcagatagttgatgcccttgaaactgccgtcggtcaacaacagacgaccccactgcggcccatccaacacttccgtgggcttcagatcggacgacagcaggaacacgcgtttgctttcgttgccgttaccatccgtctgcacgtagagggtgccgtcggagaattggtcaatggccttgacgtcctcatccttgctcagtcccagcacgtcttccaacgattgccgtttgccggtcgtgctatcgatgacaaacttgccgctatacgaatcatcggtcacatacatgttcttgccgagataccgcattcggctcaaatcacaacttgagtagtccgtatcgcagtaattcaacgggaaactcatgatttccttgttgtcttcgaccgaatacaggtggtacgaattgtctcgcaccatatatgcgtcgtacaagctcacgccgctcgcggaggcattgacctgtttcgcatactggtacccgccagaatcagtggtaagcacgattttgtcttggaaggtctgcaataccttggcggtatcactgtcatgagttacgcccatcacctgcgtgtggttgatggtcgctgagcgctcgtccttgttagcggtgtatttttcatcgctatgccacgttttcttgatggccaccatgttgcgggactcggcgagcaacgagtattcgtaaccctgctcatagtcgataaggttgtcttcctcggtccgcaaatcgatgcggtcggacaattcgccggtttcaagatcgacctcgtgagcgaacagatgcacgctttccggcgtggtgcccactgccttggttttcaccgcatagaacacgaataccgccggattatcgccgtacgtggcggcgacctggggctcggagtactccttctcccccgattcgagcatggatacgtggatttccttcgattcatccagcgccggcgtccagacgccgaaggcatactcgccgctgccgtccagggaatcatttgaggatctggatgacgaatccgaatcgaccgaggaatccccatcccagcagtggatgacgttcgagaccatcgcgccgccagtccacttccagtcactggcggagttgccgtcgcatgagaaatcggtcatcgtcacttcggtggctgccggcttggcgggctcggacttggtcttctgctggtctttggttgttgtcttagtctttgtcttaggtttcgatttggtggtgctggaggtagttgttggcttggcctcggccttctgatgcgcgttacgccagaatataaagcccgtgatgccgccggctatcagcgccactaccacaataatcgctatgatgattggcacgattttacggggctttttgccgttgttgccggcaccattgccgttgttgggcacgcctgcaccagttggcatgccattgttcgaggtcgggattcctgccggaggaacggcaccggcggcaccggcatacgctccgggtaccgggctgcccggcacctggccgccgggcagtggaccgttcggactggacatgcccggttgcggaatattcgtttgaggcgcattcggccgaggtacgctcggctgcggctgcggcacacccggctgcggaatcccgcgcgatgccactaccgtggcatcctctggcaccggggctccgcaccgcgtgcagaacatcatattgtcaggaaccgcattgccgcattgtgcacatcgtttcatggttcttctcccccgctatcagcgtcatcgcttcggttcttctctgccttctattgtaggagagatcacgaatgtgtcgtcggccagcgtgaaatcgccgccagatgccgcatattcgcatccgccgcttgccagttcgcggccacctaccgcagtgccgttggccgaatgattgtcggtgatgcaaaaacgtccgtcatccagcatgtcaatcaccgcatggatacggctgacgttggtattgccgcccatgtgaatgtccgcggttttcgatcgcccgatggtggctcgtgtggcgtgcactgttattgctttaccgtcgcgcaatcgtgtgacggtaaagcctctggacttgtccgtgtagaggcgcagcatcgtctcgccttcgctgtcgttctcatcggcgcgcagtgctgtgctgacggcgctgacagggaggatagggcgaacgacgttgctagtggcgggaacgcgagcagcatcaacgttgttgacggtgtgagcaacgtgagcggcggcagcagcgttacccgtgttagtctcggccacggcagcagtagcggtatcacccgcggcagcggcagccgccacattggatgccccaccgcgggcggaatcttcacggatatattgttcgcgaacgagattctcacgagcgggctgcgtttcctgcttgcggggaagatttacggcaatcggcattgcaggagccggctgtgtcacgggcgaggccgacgttacaggagtcggctgtgccggtgccgcgtgtgctgccggcattgcaggagccgccggcgttgcatgcgttgacggtgccgcggaagtcgtcggcattgcggcctgttgcggcgtcgtctgaagtttaggcttggagctcaatactgtggcgccaaatcgcgtggcaccgaccatggtgccgtcagacactacggtcgcgccgaattgcgtctccgaaccattatcttcatgagtcgactgcgctgactgcgcttgacgcggctgaacagtgccgggcagcaaatacgccataaaatcatgcagagcatctgcattaaccagtgaattgcgccccaggaactcggcgagcgcacgctgatagccttgcacaacggcatcctcaagccgggtccggcgtgcatcggccaatgtctgcagcaaagtggtggcggtgttgcgatcgggttccagtcccagcgccggcaccaccacgaacagcggatacccctgtgcggagatatacacgcttttggggtcccactgcacgtacgacagcggcacgcgatgctcctcgcattgctccataacggacaataccgccacgagtatgcccacatattggccgccaggcactaccgacctcaacacgccatgcatggtctcgcaatgagtcacgtcgtaatagaagaggatttccgcgccattactttcaaaccggaacggcagcatataccaatggccttcagcaagccattgtgcctgcccaagatccaacgactcgcctcgcgtggtatgtatggtcagcgtctgagcccccgtacgccgatccttaacagtcttcgctctcatagcacttaagtctagtcctgtaccaaggccaatgctttgcggagacgcaaaactcgtcaacacagtaacacaactccggctaagtaactttaccaaaaaactaaaaattggtaagataaggttaccagttttcctcaatattggtaaggtagcattaccgttttcttgaaaggcacattatggcaaatccgatcatcgccgaaaagctgcgcgattttagaatcgaagatttccacccgattgtgccgcgcgacttggatctaggtaagccactgaccccgagagtaggcaatctggtgaaggtcatcgtaggcatgcgccgcagcgggaaaagctaccgcctattccaagagatagaggccctacatacatccggtgtcagctggaaccaaatctgctatatcaattttgaagatgacaggctcggcgacatcactccaagtgtgggcgatgaagtaatcgaaaccttttgctccatgcatcccgaaagcctagacaccggcttgtacctgttttttgacgaattacaggaaatgcagaactggggcgcttggctacgtcgcatcgtagacaccacaaaagcaacgatctatgtcaccggctcttcctcgaaaatgctctcaaaagaaatttccaccgaatttcgaggccgagcattggacttcgagcttttgcctttctcattccgtgagtttgtccgcgcgcgcggtatcgccgaatcagaattgctcagccggaacgaagcagctggatattccaccaaagaacgattaatgctgtcggccgcattgatctcctacctggaagagggcggattcccagcaatcgagggactgccaacgcctcaacgtgtgaccctgctccagtcatatgtgcagcgtgtcgtatcccgcgatgtagtggaacgttatgacatcgcgcgtccaagagttgcctccgcattggcacgacgcttgcttggcagcaacggcaagccattgtctattcgcaagatagaaaacgaattgcgttcagccggactagccaccagccgtgtgctactgggagatttattggaatattttgaagacgcctatctggtgtttcgaatgaaagacttctctatgtcgctcaaagagagcaccacttccacatcaaaaatatacgccatagatcccgggctggccgcagcctcaagcatggcaagcgccagagatgatggccaacgattggaaaacgccgtttatctcgaactacgccgccgaaccgcaggttatcgtcgcgacggcatatcgtcatgccataccaaggaacatggctatgaagttgattttgtgatgggcgatgcactcgaacatgaacaatatgagctatatcaggtcacggcacgcatggatgataatcggaccatcgagagagaaacccgcgcgctctgggaactcatggccgaacaaaagctccatgaaggaaccatcatcgtcggcgatggaatcgagcgcgaataccgcaacagcaattatgtcatcaaacaagtgcccgcttggaaatggttcgttgcgcatgagccccggtaagcttcaccggccatgtcagattcctgagatggcaaccatgatggcaaggaatatgaacagagtctcgacccagatgagttcggcggaataccacatccagaacggttcgacccgcttgctggcgcattgacgggcaatcgccacttcgcttggcagcaccgcccaagccataaacagggcgaccaacaacagcacaaaagaaatgggcacccaaccgcattccaccagcactatcgaaaagcccacccaataagccacacctgccacttgctcttagccctccattgacctgacgcccatctccgcggaaccattcaagaactggtcggcgagacgcacgtatccgggcatatcaccactgagcaacgccaatcccatgttgcgagccgccttcacgtccgcgatccatgtcaacgccaccaccgcagccgccgcactcatatccagcgcctccggcgacgaaccatcgtcacgccggccaccacgacgagccgtcatatcctgccccatgccggccagcatgatgggcaacgccggaaccccgtacccacgcacgcaatcccgacaatccgacaacacccccaacgcctcatgcagcgcctccccatcacgctcgtccaccgcacgcatcaacaacgacgccaaacgcgcgccaacaagcccacgcgccttggaatccacgaaattcctatccagccacggaccggccacaacgttagaacacgcatccccggattccacaccagccagaaccccgcacgccgcttccacatgctcgctatcgaacacatactggcgggacgcacgcaccactccggcatctaatccgatcgccgcatccgacagagcggcatcccatgcagcatcagcaacatccgcatccacagaatccgtggaaacaccaacagcatcggcaaccgaaacagaagaacccgatgacgagccaagaccagcaccggattcacggaaggccagcacctccttcatccgctccacaccccgcgaatcgaacgacaccgacacatacggcatcatgccatccaacacctccagataccgcccctgcaacaacaaatccgcccacacccgcgtcacatcatcatcaagagaccaacgcaacaacacccacgcacccatacggcacaccgcatcaacatacccctccaactcgtcagcactctcctcacccggcaacggcatccgcccctcggcaacacgaccatacgcatccaacaacgaaccatccgcccgccacaacacacgaaacagccaaccgaccattccgcttttccccacgacggatatcaccccatcaagaaaacgcatcgcctccgcacgcgctgcgcccgcccctggcgagaccgtacaggataacgcgaccatatccccgaacgccccctgcccgaacacgtcatagccacgcgccacaaccccatgagccgcacgactcgacggcaacaagccaaccacaacaggcaaaccagccaacgcatccctcaaaccacggacacacccgacaaaaccctcaccgtcaacaaccacagcaacaccctccataccaacatccgaacagcaaacacgccgcacccacatcacacacccgtggcggccgcgtaggcaagcagcatcaacatgacgaaatcaagcaccaggaaaccagcagccacaggctgccacgaggcatcacgcccctccaagacacaacgccggatcgcacgaagctcaccgggaatccagaacaacaccatgccgaccgccatcacggaattcacccagaacaactgattcgcatcggccgggccgacccacaacatgcccattaatcccaaaccggcaaccacattgccacccacacgcacacgcggggaaacacccaccccacgcaacaccacaagcaccacggcaaccaccacggcaaccccagccacaaccaaaccaggcaccaccacagcaggagaactgtcgtaatacagtctgtccggacgtccagtcgtggagtcaatcaaactttcgacatggggaccatacatcgcatacataacggtctttccaatctccgcgcccacggcaccggcgacacactgaacaatcagaacgtccccggcaacagcaatccacggcttgcgcataacatgagcagccagccacagcaatagtcccggaacaacacccacgtcgaaaaagaccgccacaggccaccaatcgctcgacaacgagataccggccatctgcaggaaccacacaccacctctagcggaatcacgttcgaagaacgcataccgggcttgcaaacctacctgcgcaaggaacagcacaaaccacatgatagtccacaaggcaacccccaaacgagtgaacacacgcctgccacccacaggaatgcacatgtcgatgaactcgcccaacgcgccattcgccagaacacgattctcaccgccgacatcagaaccgccagcctcggcatcaccgcccacaccagcggctccacgctcccacggtggccgaccaccacttctcaccatatcaatcacctctccaccataaaggaacgaatcgcggaacccgcataaacaaatccttcaccggcattgttcaccgcatccgccgcatcattcaactgggcaagccccggaatgaacattttcgccacatcccatggacccgatgtctgccgcccgtatcactctcataggccaagcggatatcacgtacacgacgtttcgcatctgcccactcatcgcccgcggtctcgacatggtcgctgtacccgtccagcatctgctgtgcggcttccttcgcctcacgcgcattcctgcgctgcacatccgtggcggcatcgggcaactcgtcaaacaccgcccccgcctgcgtcaatgccgagcgcgccccacaagacagccgctcataccgctccttctcgtcgcgtgcggcgatggcacgttccaactgggttttggcatccgactggaacccgtccaaagactgcatccagccacgcagctgacaggacacctcaccaaagctgtcagcaaatcggccgaaatccctaggaagatcctgcagcttctcctcgaacttgacaacccactcgccctgcatgccggcctttgtgtccagattcttcaatgcggacgccatttcggagaaatcccgcgacaaacacttgtacttccatgccatacgcgcgattccctcggtatcacccgacaccggattgtccggctggcccactacggcccagtccaaataatcgagattcttcataattccccaactcccctattgatccgattcgtccgattcggtttccaccgagactcgcaatgtcgccgtaattctggtaaacagctcgaacaacgtgtcagacaattccacctgaggcgtaatgccggtagcaagaattacctttcccgcacaggggatgaacgtacgcaacatcgccaacctacctacgggcttaccttgttggccatgaacggtttctacagaagatgcctgtaccgcaggaccgagtttattgaatgacgttttgctcatgtgcagttcatcaccttcgggcaggccttcccgctccgtgagcagcgactccacgatggcatccaattcctcatccgctgtaccatacggcacagcggatggaagcactgagaccatgaatgtagccattaccaatacggggctggcatcatcaagttccgtggttatggcgtatcgtacaccagctttccatgattgctcgtaagagttcgccagatatttgcgtaatgccggataaacttctcgccagtcggcgatgacgtgtttcatcggttcaagagcctgccgaatctgccgttcccggtcagcaggatccaacaggatttctctccatccctgtggaggtatcaatgaaatatgtaagaattcagccaacggattctccccatcgccggtcgataatgctcatagcaggcagtcaagattggtgcacggcatcggaaatggccttggcaatcgcctcatcggcctcatcggacccggttttcacgttttccaagaagccacgaagattctccgtcttcttcttgtacttgttcttcgtatcactgacctgatggttgaatgcgaaaaccgcatcgaccagctcggaacagccgacattgtcagaactcggctcggtaatctgctcatccagatttagccgatcacgaatactgttgaaacccctgcatcagcgtgcttactgattcttccacaatcgtcaggttttcggccacccagcaacctccttgttgttcgtgcaatccttcatacagtttcctcggcaacaccaatcaaaccgattctattggcatccaacccgatacggcaagaccttccgaagcgaatgctcacgactcggctagctcgcgaacgtgccgcacatacgactccatatcggcgttcaacaaatccaccgccaacttgcggctccatgaggggtcgggaatgcgcgcgagcagcatggccgccatgctcgagcacaggtcacgcgaggactccaggtaccgcatacgttggtcgagatccgcatcgggccgcagcccgtccgaatcccgcaacgtgcgcgcggcgatgatgggcaacgccagtatgccgtcatcacaaacgattccccggtatatggtaagcagattcaacgcagcctcgagccggtctccatcaccctgctccaacgcggtggaaaccaaaggctccacgattcccgctcccgccaaggtcagcagcttgtcctgcacgaaatccggcctgcgccagggattgccattatcaagctcgccatcaccatccgcatcgccatcggcatggtcgaggaaatagcgatacgcctcgatgacgtggtccgcatcgaacaggtacagtacatcggattgcgggaacggacggccatcatccgcgacgtcaagcccctccccgtcgtcagacgcggtagaatcctcgcctgacgaataatgaggaccgtcttccgccttatgcagcttcgtctccatcgcggcggtctcgccacgccgcatcgccgcggctatggcgcgatcgcgcaaatccgacaccaccaattcggattcgttcgtgttcaacgacacattggagtacggaagaatgcaattgagcgcgtcatcgtactgttcgatgaggaacaacctcgcgatatacgcgctggaagcgtccccttcgccccagccaagaagaatatgggccgccaaccgacatgccgaagtcaggaaatcaaaagtggcgtccagattctccacatccgcatcggctatctgctggcgaagctgcaactccttgccccaaatcatgcggaacagccagccgaacacatcctcatcatcaatcatggagactgaatcagatataaatccctcgccctgggcaaccaaatcctcatcacgggtgcggacggccaaagcgatgatatcggcgggactcgtctgcccgaacacacgataggacctccacgccagatcgtcctcgaagccatccggcaacggaaccagcggattcttccacatccggaaatccgcaaccagccacttcaactcctcgacataccgtcgctcatccaaccgaatggacatccccactcaccctcctttgcactaccatcccagcacacaaccagccgtcacgccatgggcagcgccgtacacacgccaatgacgaacaacgcctcggcggtgagccagaacgcggccggccactcgccacacgactcacgacgattatccacacaaaaatacacggcagccaaatccaacgggaaccacaggaacccaacgaacaacgcaaccagcggggccgccaccaacgcgaaaccgctcacatgacgggtcaacgcgatgccgctggccgcgaccagaccaaccacgccgccaccgtacgatatatagcgaggaagaatattcgacccacgataccgatcctcccggtacaggaacagggaacccgacaccagcagtacaccggccaccaagccaatcacccaccaaccacccgatgcaggctgtgccaaaggcgcaggcagacgatcagacgaccaatccacgaaatcccccggcttcaacaagccagtcgccacataccggtcccacaaccacctacgaccaacctcctgacccacaaacgaaccaaccgcaagcatcgccaaggaaccgaacaaaatcgacaaaccccacagtcgaggccaaataccgccgaacaacaacatgagaaacggggatagcgccatcgacgtgaacacgagagcgaataccacgacgttggggacggccgccaacggccaccaatcatccgacccattcgccttcgccgcatccatgaacactacctgcaccaccacggacaccacaaaaacaaacaggaaccacaaagacttcaacaccacgccacgcattccgaacgcacgacgccccggacgcggaccatgcagatgaggaaccgtcaacgccaacaagccatgactctcatactccagagtcggaccaccattcgccgaggaacgaccccggatatccttctcgacagtcttcaacatatccctgaccacgggattattctgatcggaggcgagaagacgccgacgaagatcctcattcttctcatcctccgaaagctccttccaccgcgcgtaagcctcccgcccacgctcagcagcatccgatttcctgctcatcgtcaatcatccatcctttatagatcactgataccaactcgaatggcattagatgcctcagcc

SEQ ID NO: 1420 - DNA, 13192 bp, Unknown
  R257_15m  MAG No. k141_13119
atccggcatctcgggcgtactacttggcacactgttcggctggctgggcgcatacgtggtgttcagcatgtacggcaaagtggtgttcccgttcgaatggggcattaacggcatcgtactcgccgtggcagccgtggcagcgttgctcgccagcgtattccccgcacgcagggcagtgagcacgcctcctgttgaggcgctcgccgaagcctaaacgcctacacttatatcggaaaaagaataacggcttgtgtgactcgcatatattgtgggtccgcaagccttttttcgtttttcatatttgcgaggattgcgcccttgacgattcatttcattatgaggccagaggagctccggacggaaatgtgaccggcatgtaagcagagaaacgttagcgaaacatggcggcaatgttgccgaaccgggcgtttgcaatggttttccatacctgtttgacataggaatcgtgcggaatgccggaatacggttccactcgaatcatacgaaaaagggagggcgtatgatcatatctcgatttggtaggctcagtgggggactgcgcagattcagtgcacttgccgcggcttttgtcatggtgacagcttcaagcggttgcggatggggacggaccgtggcacagaagaacgctttggaagctagtgccaccgatacatccaacgcctctagttgcgtggacgtctccggtcctacaatcaaaatcggcttcgtgaattcattgtcgggcaccatggcaatttctgagaccacagtgaataaatcgctgcacatggccgccgatgaaattaacgcggcgggcggcgtgcttggcaaacagctcaaggtggtcgatcaggacggcaagtcggagcccgctgttttcgccgaaaaagcgcgtagtcttatcgaaaaggagtgcgtggcggcggtgttcggcggttggacgtccagttcgcgcaaggccatgctgccggtgttcgaggccgacaatgcgctgttgttctacccgttgcaatacgaaggtatggaatccagttccaacatcttctattcaggtgccgctcccaaccaacagatcgtgcccgcgctggactatctcaaagagcagggtcataagaagctgttcctcgtgggatccgactacgtgtttccacagaccgcgaaccgcgtggtaaacgcctatgctgagggtaatggcatggaagtggtcggcgaggaatacacgccgatgggttccactgatttcaccactattgtcaacaagctcaaatcctctggcgcggacgccgtggtcaacacgttgaatggcgattccaatgttgcgttcttcaaggaatacaaggcttccggtctaaccgctgaccaggtgccggtgatttcgatgtcaattgccgaggaggaaatttccgctatcggacttgataatgtcaagggccaactgacggcttggaactattaccagacgctggacagttctgaaaaccagaaattcgttaagaacttcaaggcaaagtatggtgcaagcaagcctacctccgatccgatggaatccgcctacacctcgctctacctgtggaaagccatggtcgaaaaggctaaaagtttcgacgtggacaaggtcaaggcggctgcggatggcgtgactttcaacgcccctgaggggaaagtcaccgtggatggcgaaaaccaccatatttacaaaacgtcgtatatcgggcgcattgaagacgacttgctcattcatacggtttggcaatccgatgggccgattgctccggatccatacctcaagacttacagctgggcaaaatcgctgaacgcaagcgcacagtgacaactgaagttaaaacacgcgcacatatcacacgtatagacgaaaaaccacagaaagaggagagtggacgaccatgaatatgttctttccacagattgtggcgggattgtccaatgggtcaattctgctgttggcggcgcttggattgtcgctgacattcggacagatgggcgtgatcaataacgcccacggcgagttcatgatggccggtgcatacaccgcgtatgtcatgggttcggtcatcgaatcgaagacggtggcgctcgcagtggcattggtggttggattccttgtgtccggctgtttggggttgctgcttgacgtgttgctgttgcagcgcatgcgcaccagacctttggacacgttgttagtgactttcggcgtttcgttggtgctgcagcagcttgcacgcgatattttcggttccacgccagtgtatgccgctgcgccgaaagcgcttgccagcccggtgacggttttcggctacagcttctcggccgcccgactattcatcttcattctctccattgtgtgcgttgcggcgctatatgcggttctgaagttcacgccactgggtcgtcagattcgcgccacgggtgaaaaccgtgatttggcggaggcttccggtatctccagcagaaaggtcgaccacgtgacattcttcctcggctctggtatcgctggcatagcaggcgtggctctgagcctgcttaactccatcagtttcaatttcggcaccaactttatcgtgcaggccttccttgttgttgtcgccggcggtgttggccagcttaagggcgcggtgatcgcatccttcgtgttgggcctgtgccagtcgtggattgaattgccgacatccgcatccattgggcaggtgatggtgtttctcatcgtcgtgctcttcctgcagttccgcccgcagggtctggtcgctgttcgttccaggaatctggcgtaggttcgggagaaaggggatattatgcaacgtctcaacatttccgagttgtataccaagcacaagctgtggattggcgttattgcagcgattgtgctgatctttctggcgcccgccgtcatgaacacctacaatgtggggctcctgtccaaatacctgtgctacgcgatggtcgcagtgggcatcggattggcttggggcgaaggcggcatgctcactttggggcagggcctgttctttggtcttggcgcttatgtgatggccatgcatatgaaaatgtctgatattgggcctggccaagtgcctgatttcatggctcaatacggtattaccgaactacctgacttctggaaactgtttgccaaccctgtagttgcggtaattggtgtgatcgcagtgcccggtattatcgcagcggttctcggattgctggtgtttgggcgtggagtgcgcggcgcgtactttgcaatcctgtcgcaggcgctggtcgcggcttttgcggtgctgctcatcggtcagtccaaaaccaccggcggcacgaacggcttgtctgacttcgacggtttcttcggctatgacctgaccgatcccgcgaacaaggagatgatctactacatctgcgcgttctgtgtacttgccatggtgcttatatcctactggatccgtcactcgttcatgggtgagttggtgatcggcgtgcgcgatcaggagaaccgcatgaaattcctgggctacaaccccgcgtcgattaaggtgttcgtcttttcgctggccgcgatgttcgccggcttgggcggcgcgatgttcgtgccggtggtgggcatcatctcgccgtcggacatcggtgtgacaccgtcgatcctcatgctcgccggtgtggtgatcggcgggcgcaccacgctgttggggcccgtaatcggcacattgatcgtgcgttttgcggaaacgcaactgtccgaggcctatccaagtgcttggacctatatcgaaggagcgatgttcattctcgtcatcgccttcgtgccgatgggcttgggacagttcaagggcgtatggccatggatcaaagacaaactgggattgacggggccgagcgtcaaggcggccacgatgactaaggcggtgaacgcatgagcgagcgtcggaatgagacgacggtgaatggcgaggaacttgagcagttgcgccgtgaggtgcgacgcatgcgtgatgaggccgagcgcatgcgtgatgaggccgcgcagatgaaggcggagatcgccgaggagcgtgaccgtctgaagacacagctggcggcgttggacgatcgcggcggtcagtggagcgattatttggaaatccgtggactacatgtggagttcgacggcttcgtggccgtgaaggacatcgatctgacggtgatgcatggcgatctgcgcttccttatcggtccgaacggcgctggcaagaccacgatcatcgacgcgatcaccggattggttccagccaccggatccgccaccttccgtggtgagcagctcattggcaggaaacccaatgagattgtgcatctcggtgtgggacgcaccttccagacggcctcggtggtcgaagaactcaccgtgctgcagaacctgcagatcgccgaaggattccggaaaaagccgcgtgaactgttcgccaagccggacaaggcctcgcagaatgtggaatacatgatggaggtctgcaatctcaaggacgatgccgacaagttggctggcactctgccacacggcaagaagcaatggttggagatcggcatgctgctggtgcaggacgcccatctgttgctgctcgacgaaccggtggcaggcatgactccggccgaacgcgaggccacgggtcagctgctcaagcgttgcagtcggaaccgcactgtgatcatcgttgaacatgacatggatttcatgcgtcagttcgccgattccgtcaccgtgctcaatcagggtgagattctggccgaaggatcggtcgaggacattcagaacaacgaggaggtcgtgcgcatctacctcggcggaggtgatcagtgatggcgatgttggaagtcaagggacttaattccggctacggtaaggtcaaagtcgtcgacgatatttcattcgatgtgaaagctgggcaatgggtgagcatcgtcggtaacaatggtgctggtaagaccacgctgctcaaagcaattctcggattattgccgataaatggtggaactgtgacgttcgatggcaaggatgtcaccaaagccgctccgaacaaacgcattgcagctggcatggctttcgtgccgcaggggcagcagtccttcggccagatgacagttgccgagaatctgcagttggtggcagaacaatacggttcgcaggcgaggtctcgctatgacgaggcagtggaggcgttccccgtgctgaaggagttcagggatcggcgtgctgggctcctttcaggcggtcagcgccagcagctgtcaattgcccgtgcgctgatcacacgtcccaaactcatcattctcgacgaacccaccgaaggcatccagcccaacattgtggccgacatccaacgctcgattcgttcgatgtccgaggacaggggcattggcgtggttctggtggagcagaaggtacagttcgcggtcgaacgtgcggacttctattacgtgctcgccgcagggcgtttcatcgccgccggcgaaggcggttcggacgcggtgtccgaggccaaggaggccatgagggtgtaaggcgatgtcgattcaccgattggacggggcagacacactatcgtgatccgtcggacgcgtcccgtccatcgtatgtcatcagcggaaacgttaccgtgccagaatgcggactgccatggtgacgcggagccatgagccgcagtggcacgtgaatgcggtgcatgccatacgcgtaaccaaggattaccaaggaatcgaggcaaaacatgagactaacgcccagggaaaccgacaaactaatgctgcatttggcaggcgaacttgccaaagagcgacgtgatcggggggtgaaactcaactatcccgaagccatcgcgctaatcagctccgaagtgatggaacgggcgcgtgaaggtatgacagtggccgagcttatggcctatgggcgcactgtggttacggcggatgaggtcatgcccggcgtggcggagatgattcacgaagtggaggtcgaagtcacattccccgatggaaccaaactcgtatccatccatgatcccgtcgaaaccaccgaggaactagtgcccggcgaatacttgccggccgatggtgaactgacgctgaacgaaggttgtgaagccatcgaaatcgacgtgacgaataccgctgaccgtcccattcaggtcggatcgcattatcacttttttgaagcgaacaagtatttgcgtttcgatcgcagagccgcttatggcaagcatcttgatattgccgctggcacggccgtacgttttgaacctggtgaatcgcatcgtgtgcagcttatcgattttggcggcacccgcgaggtccatggattcgcccaactggtggaaggacgcctggacgacccggtcgtgcgtgaaacggcattcgccaaagcgcgcgaagagcattttctgggaatggatgatggcgatgacgaggagattgcatgatgaaaacgattacacgacgtgattatgccggcatgttcggtcccactaccggagacagggtgcgtttgggcgatacaagtctgatcgtcgaagtggaaaaagactacacgcattacggcgacgaattgaaattcggaggtggcaaatcattccgcgatggcatgggacaatcctcaacgcaattggatgccgaatcgcctgacacagtaatcaccaatgcgttgatcgtcgactacaccggcatttacaaagccgacatcggcatcaaggacggtaaaatcaacgcaatcggcaaagcaggcaacccccagaccatggacggcgtgacaccgggactcgcagtgggatctggcaccgaagcgcttgcgggcgaaggcctgattgttacggcaggaggccttgacacccatattcacttcatcgcaccgcagcaggtgcgcaccgcgctcgcaggcggagttaccacaatggtgggcggtggtacggggccggcagatggcaccaatgccaccacctgcactcctggcgcttttcatatggctcgcatgattgaagcggcggaagcgttgccgataaatattgcatatcttgggaagggcaacgattcatcgcctgaaccgttacgcgagcaggtgcgtgcgggagctgctggtctcaaaatccatgaggattggggagctactccggcagtaatcgacacatgcctgacggtggctgatgaaatgaatgtgcaggtggccatccacaccgatactctgaacgagggcggttgtgtggaagacacgattgccgcgttcaaaggccgtacaatccacacgtaccacacggagggcgcaggtggcggacatgctccagacattatccgtgcggccggtttccctaatgtgctgccgagctccacgaacccgaccatgccgttcacgcgcaacacgattgatgagcatcttgacatgatgatggttacgcaccatctggatcgcaatgttcctgaggatattgctttcgctgattcgcgtattcgtcccgaaaccatcgcagctgaggatgtgctgcacgatatgggcatcatttcgatgatgagctccgattcacaggccatgggacgcgtgggcgaagtgatcacacgcacttggcagacggccgataaaatgaagaagcagcgtggtcctctgcctgaagatgagcatgacggcaaccgcaacgacaacttccgcgtaaaacgttacgtgtccaaatacacgattaatccggcgctgacgcatggcgtcgccgactatgtgggctccattgaagtagggaaaatggctgatttggtgctctggcagcctgcgctgtttggagcgaaacctgagatgattatcaaaggtggttcgatcgcctattcgcggatgggtgatgcgaacgcttcgattcctactccggaaccggtgatttatcgtgacatgttcggtggtatcggacgcgcgctcggctccagttgcatcacattcgtttcgcaggcagcttttgatgatgatatcaaaggccgattgggattgtctcgtacggttttgcctgtgctcgggtgccgtacaatcggcaaaaaagatctcaaattcaatgatgtgctggctgacattcaggtgaatcctgaaactttcacggttaccgtggatggcgaaccggttacctgtgaacctgcagccgagctgccattggcgcaacggtacttcctgttctaattattcctaggcggtggcagatcgagacagatgacggaagataatttcggatgaaaggatctgctgcggttctaagcggccgtgcggctcacaaccttgttgaggtcgcacggccgcttggtccgtataagcgagtttcgtcagttgatcttggaaactttccttacatacgtttgaagttcagcatcatcgaatgcaacaggtttaatcgaccagccgggaagcggcggtgatgaaatcgagagcgtcggctccgcgggaagtgagcagtctggcgaccacgccatccataacacgggtggcgccgaattcaccgggtaagcgcatgctcttggcaaggtcacgtagtttggcgattaaggcatcctcctggtttgcgcgagcggtgttgcgttctgttgaagagagggttgtagcgccatttttctccgtgctattgcacgatggttcgggcagatgaatatacatgagaccgttatgcgtgtaatcacgccacatggccatgtgcgtgtaatcgaaacggcctggttccagcagtgtgtggtctgcgaaggccaaatgacttgttgaatcggttgggcatgtgcggtgtcgagcggtactcggggcatcagtggcggatgcgtgaggcgtctcgtccggttctgagaatgatgttcctcctacaaagaccttgagtttgctggaataacgctgcattttccattgctcgcccatgccggctcgtccgttggctaccacgtcggcatacacgaaggtggattgcggggagatatgagcggtcaccacgttttcgaaattactgttctggaacggtatcaccggtaatggcaggaacaccgttttggcgatgccttgaacggtcagattgatgatacgtgatgctgaacctccggcggtatcgagcactttctcatagctttgcgtgctgattgtggagtcagttccgggtccgaatacacaatccattcgggcttcgtccccagcaagaaaaccgggccctacaaaagacagcatgaattccgtatgacgaccgtcaacgaacggatgcaccagtttgaacggtgcattgaaatacagatcgtcgactttggtgcgttcgtgcctcagtgcggtcgtcaaacggaattcgctatgcatgagtggcctttctgcgcgggggctatttactgattccctgctatagtgccctttgagtaggcgaaggtggaatgatggtggatatgtcttggacgcctctgcttctgtaaaaatgaagatgattacatgtcttcaaaaagcacggattttttgatccagtcaatcacgtcgtccacgcccttgtcgttcatcaaatcggtgaatatatatggtctgccattgcgcattttctcagaatcacgggccatgatatccagattggcgtgcacaagatcggcgatgtcggttttgttgattaccagcaaatcggaacgtgtgacgcccggtccgcccttgcgcgggattttgtcgccttcatcggttgcgatcacgtagattgtcgcgtcggctagatcagggctgaaggttgctgagaggttgtcgccgcctgattccacgaagatgatgtccacatcggggtgtgattcggccatcgcctcgcaggcttcaagattcatcgagcagtcttcacggattgcggtgtgtgggcatccgccggtttccacaccgacaattcggtcttctggcagtcgggaattggcgatgaggaattcggcgtcctccttggtgtagatgtcgttggtgacaacgcagattgagtagtcgtcggccatttttctggtcaggcgttcgataagcgcggttttaccggaaccgactgggccggcaacgccgatgcgtacatatgacatggttttcctttcgttgtgggataactcgtctaactcatataaagacgggaataaagggtttcgtgttgcatggaggcgatatcaaggtaggcgccagaaatgccgaggtcatcggggtgcagtgtgaatgcgaggtctacggcatcaactacggctgggaaactgtcacgaagtgcaatctgccccgcatattggctgataggcacggctttaaccgcgcagacggtgagtgcgctgatcagcgaataacagtaggtgatggccgcctcacgaaggtcgggtgccttatcggcagcgaacaagcccatgacaatggcatgcaaacccaaacaatgtcctgtgtctatcagtgctttataagtgtcaacgtgaggtatggtacggccgacggaaggtgtggacgagacgagatccatggcattgtgccgcatattgaccgtacgccgggccgaacctccatgccgtacatccatgggttgtaacgggttggattccatctggtcggcgagtttgatcatgcgcaagcacattttgtgttggccttcgcggatttctcgtggagcttgaagtgcggttgccagactgtctaattcggtgatttttctagtgaaaccggtggaggagagccgcctgtcgcgtgcgatacgcccggcgattaccatttgtccgatttccttataggcggccacttccaagtagttgtgcaggtagtcggcgaaatcgcggttcgattgaatgatgtcgtgctgcacgaaggtttccatgccgttcgataatgcgaaagctcccacggggaacacgctgtcgcatacttgcagataattgaggcgacgcaattcgatgatgtcggctgagcgtttcgcgtgttctctggcgttcgatgttcttctgcgtggtgtgctcagtgtgtatgccatgtgtggccgccgtcatgtgaatgcgtgccgtccgcgcggtgcagcacgccattgagctcgtatgtttcgtgttcatgagtgtgctcatgattatattgattatgcgcggtttcgtgatgatggtgggcgaaggccgcatcggcttcacgctcctgagcttcctcctccaaatcgccagtggttttgttggttcccggcacgatggttccacttcccgcatgtgctttgacaatcaggaaaccatcgaatccaccttcaataaccttcggttcgaagccgattttcttggtgtattccatcgtcggatggtcataaggcaccagcacgcggtcctcctccaccttgaggctcaggtgacggttgccgagttcgaagcacagtcggcccatctctttcatggaatgtaccggaatttcaatgagctgagcggttttcatacgcgcgtagtagcgtttgtcatccgtttcggcgagtacgtcgccatcttgaatggtttgcccaaccattacgccgatttcggtaccgtcctcggccactttgcgcatacgctttttggacgcttcaaaccattcgaagttgaccggcacattgagcttgccgtccgaaatgggatgttcgatgatattgccggaaatgccagtggcgatcatatccctgctcccgcctttctttcatggttactgttgcgagctgtggtcagagtaagacggaaaagcaaagcgattgtttcccgattgtttcctatgtaacggtgcggcgttaccactgatttacatgagggcaacatgcatcggtagcgttattttcgcgggcaataccgccacatgaagggttattctcgaaaggagcggaatagatggcttgttttctcgtgagtggcgctgaagctgcagccgtgaccgcggtgcgcaggtttgtggagcataaagaaatcgccaaaggcgttgccaggaaagtcgatggcaaggtggttgcggtcaaggaagggcacgtgctgttcagtcgtaagcttggatggctgatgaacatgctgtggggtggtgcgttcctactgcttatcgagcatgtatggcatggtgaggtggttccatggttcccgttcctcactgccatgcgttcgcctgatgagacggttgtgatgctccatgaaatggccatggtgggcgtcggcatggcggctctggttactgtggtttggggagcgatgtgtgtggtagcggattggcttgaagcgcatggtgcggttctcacggcgatgtccgctgaaactgcgggctccatcggggaatgccggtgaggctcgcatgacgctgattattacgggtgttaccgcattggcggtgacggttatctacatgcttatgagatggaatagcgttgatcgttgcaattcatcgcatttgggtatgctgatgttgatgtactggggcgcgacactgatgtggtgcgtagacggcattgcttcgcttgccgaagacaatccatttgttacactgtctgacccggccgttgtggcggatgatagtgcgcttggtttgctggtggtgtttgccggcttcttcgcgtggtctgcctacctgatggttgaagcattacgtgcacggcagcgtgtcgccgcaacgtcacgaaacatctgattggtgatgctgctgattgttgcatctgttcgtgaggggctctccaacggtgagatatgtcgctgctggaagcccctcatttattgttgacaaaggctgttttgttgcaaccgtctaaaatttggcaggtctgttgaagttgattcccgagtgattaaaccagctgggcgtaatcgtcagaccaaatggttttcataagcgaacaccactgcctgcacgcggtcacgcgcattgattttcgacagaatatgcgccacatgcgttttcaccgtaggcaggctgatgaaaagcttgtcggcaatttcctgattcgacaatccatgcgcgatctcaataagcacttcgcgctcgcgatcggtcagctcgtccaattccggatcggtatatgttgaatccgtagcagaagtagttgcggaattttcaggcctaccgacgttcgtagccatgaagtcgccttccatcattttctcgataagacgtttcgtggcggacggtgcgataatcgcattaccttgaaaaaccgtgcgaatcgaattcagcaacgtttccggttccgtatctttcagcagaaaaccggaagctccggcagtg

SEQ ID NO: 1421 - DNA, 52939 bp, Unknown
  R257_15m  MAG No. k141_13580
gactgactgaagtcatgattgcgttcaatggtggcctgaatccattcgcaatggtctcattagcgtccacattgtaaagattcttcactgtggattgtggacttgcgctgactgtcgcgatcacaagcccattgcgttttttcaatagcagggtattgccaaaaaacgggaaaggctgccgttcaagggttacggaatcccacaaagcccccttcggtgtgaacaggcgtaccggcgtgccgaccgtgatgccgtccaatgggatacgccacaacggcatgtatgcgtcaaccgcgccggacagtatcttccctgacggaatggtcgggtcggcggcggtcgtcgcgttcggcgaccccttcaacacggccaactccaccttttccacgccggtcgaggaatcacgattgtaatgcgcgcaaatgatgtcattgcgtttcatgccctgcgacccgttggagatcgtcaccgattccgccgccgtgatatgccagtccaagccttgtatcgacgcgcaacccgtaccgatggtggccttgttcgcactgcccatcgtgcacttgaacgcgtcaccccagtcgaacaccacgtcggacttcgagaacttggcctgatgaataatcgccttgtcctcacttgaaatatgagccgtaccagccttgccgtcaacaagttcgatggtcacttttcaacctccttcaaccatgctccaaacgaagcgtcatccttctgcatgaacgtcatgaacgacgtattgcatttggaacacaattcatagatgtcgggcgtcacatcatccgcgatgcgggtcgccttgccagccgaataccggcgcacggtgaaccattcacgcgcctccgtgtcaccagcggcgacataagcggtcttaccgcacttgtcacacacgtacttcgagtaaccgtcagatttcactagcctatcctttcaaacgtaaaacaaccaagcgaaggcaactgcctccacgtgccgccgaaatccacggaagggttgacaccggtcgtgttctggaccacgtatccgattgggaacacgaccctcccggaagcgccgccgccgacatgcgcgctgatgacaccgtcaacgctcacgatcgtggagccgtccaccctcacgccgcccagcatgtccgtggacgctttcggcagcgtgtaggcgttcgcgccctgttcgaccgaagcgagctttgaccgctcgtcatcggtcatcatgcccgacttggcactgtcggcaacactcttcgcatcagacgcaatcgactcggcgttctcggcggtctggttcgccttgccgatctgcgccgcgaaaccggaagccgtcttgttcgccgcctcggcgacctgtctgacggaatccaaatcctcggaagcgacctccgcgttgatcgtgccgcctgaaatcgacaggccacggccagccgtcaaagacacgccaccaccggtcgaacccgaagacgaagaggaagaggaactcgtgtaattcgaatattccgtcttcgaggaagccgcgtcgccaacctcatacgatacggacaacaagccgccagacagtttcacgatcttcttcaacacgacggcagtaaccgtcagaccagtgacatgatcgcagcccgcaaccctatcgcccacatcaagcgacaagccgtcatgcacagtcacatcgacagcgccagcgccctgcaaatcctgcaactgcttcttcgtctgcttgtccaactcgtccttctcggcggacgaataatcatagactgcggcgatttcgtcacgaccaccgaacgtgcgcgtattggacaccttgccggaaccatccgcataatagtggacgaccagacgattcctcaaatcacccttgcccaagccgatcatatggttggtacgccggtaatccttcgtgatggaaaaatcaaccagatcggaatcaaccgtatcattatggtcaacaatcggcttggcatacatccatacagtgccgtcaacctcctgaaacatgagtttcagatcattcgcggccagcatcctgcggatgccatcatacgcagtgcaataccggtcgaactggaacgttggaatcgttttcgtggaatccgcgcgaaccttgaacacgtcagccaagccaatacgggccaacaggttcgacaacacctgattcacagggccggacaccttcagataatcctgccccgaatccggctgcaacaccttaccggccaacatgccatgccaactacgaccggaatacgttacgacactcacaccgtccgacagttcgtccttcatatgatcgacgatgccgccgacctcggtcccatccacatagacaagaccacggtcgggcaacacggtaccgtcatacaacgtcagttcgaaatcattctcaccagacccccacgcgcaatcaaacacgcaatccgaaaccgcatggaacggcacgccattctcgtcagcgcaaatcagatcaaccaagtcgggtccccattctcctcgacaaccgtcagatcaaaaccgaaaccggaacccaactcaaccacgctcgaaccagccggaacaggttggaaaacatactgtccacgattcaaaccggaacctcgcacaccccacgaaaacacgttccgcaaagaaccatccgcatcatgcagcatgatcgacttcctcaacgagtcaaccaccacgtaagcgccagcgggaacatcaccattcaaccggtacacgttcccgccaatcgtcaacgacggattcgaaacagccccatatatgaccagacgaaacggcatcggaacacgcatacgattagacaccatgcatgacggacgcgaaacagccagatcataacccatgtcagtcggcaaatccaagccagacacagcagacccgggcacaggctgatacgacacggtaacggcatcatgccgccacacaccatccaacaagacgaacgaaagcgcacacaccgggtcggacgaacccggatgcgaggaagcctcggacttcaccgcataacacgattgcgtccaaacctcccccgcaccattcacagcctccaaccgtcccggcttgccaacagccagatcagcgtcaaccgtccgcatgaacgagtcgaacgcagccgcatcaccataatgcacgtcaacggaaatctcccgacgtttcctcgaaacaccagtcaatccaccgttacgcaccgtataatcccattcacggccacgcaactccaacgcgccctcgaaatcaaccgtcgcataatccgacacgtcgaaccgttcaccggtcaaaccactcacatacgcaagctcacctgccacgattggcctccaatacatcacggatgaaatcacgcttgctaggccaaggactgctattgcgactgatctcaccgccgataccgtcacggaagcccgcaacctcacgacgcagatcgttcacggcggacaccagttcgcgatcatcccgtgaaggaatgttgaccgtgacggacgtggccgaatccaacattctctggacactgacaccggaagcgtaggcgttacggctcatgtcacgcgcggaacgcgcatacgacgtgcgagcctgagacaccgccctgtccagatcgccggtcgcgttcaacacgttcaggaaattcgggccgacagtacggtcaagcctgctcgccgcagcagcacgaataacatgctcaccattcgacagccacatgggaatcgaatcggacgtgccagtaccagggccgctgatacgaccaccggtagccgcacgcgcggaaccatcgccgctcttacgagtgatgacatccacgtaacgagtggcaaggacggtgccatccagcgcgctgatactacggaacacactttgggcatcggaagcatcgcccagcacacgaccccacgggcgggaaatcgtcgtaccatcatatgcgttcgtttccatgaacgccgtacgcgcaccactgttgtcgcccagcacacgaccccacgggcttgctatggtcacaccgttgaacgcctgaatgccggcgaacacggcacgtgccacactgttgtcgcccaacacgcggccccaaggctgagccaacgtcacgccgtcatacgctctcgtattgtcgaaagcgttccgggcgctcgaatcatcgccaatcacaaacgtgtgcgcggtcgcaagcgtggaaccgttaagcccctgatatttcgccaatttcacactggcgtcatcatcgttcgcatcaatatcgaacctgacgcccttcgcggcaggaaccttccgcttctcaatatcctgcatcttgccgctcgctttatccaaagcgtcgatgagaatctggatctgagcgtcagtcaacccactgtcacgaagcttctgcttgacggcatccaacttcgggccagcctcatccttggcgagaatatcgatctcagccttcgtcagaccgaaccccttagccaaagccgtagcatccttgatcttgtcagacgcgccatccttggcttgcagaatgatctccacatccctggcgcttgcacctttaagcacagcgtcaacagccgtctgcacctgttcgatgtcggtaatggcaccgctggtgatggccttcatgatgatgtcgtattccttctgcttgccgcccgtaacgaactcgtcgcgcagcagattcaaatattccatgcagtcctgcttcgcctgctgcacatgggccttgaactccgtctgcacctctgtcggcgtgagcgcgtactggtcctgcaaagccttcgcgatgtccttgttgttgaacatctgcatggccgtgtcgtagatcgactggcgcatctcgttgttcttggccgtaacctcatccagcgaagcaccatgatcgatcatcgcgctgatatagctttgcgcattcgatgacaatgtgccgaaggcgttggacgcttcacgtcccgcttcactggtcaggtcgaagtttctcctctgcgaatcccatgcgctctgcccctgcgacatcagctgctgcacgttctcgcacacatcgcccatcgaagcgagggttgaattgtacgagcttccagcggcattcatcgaaatgagggaactctgggacttggacacggcttcggaaagcatcttctcagcgctggcatggttctcttcaagctgagtggcgctctgcgtcgctgccgcgacatcatccagcgaagcgcccttcttaagaagagtctgcacatacgatttgctgtagccgttcgccacagcggtggcttcagcttccttgataacctctttgcgcaactcggcggtacgtttcgtcacatcttcgtatgccctgacagaatccgcgttgcggatggattcgatgacgcccacatccggaccgttcaactcggaattggccgcgtcgagccgcttcaggaacttctgatactcgctattagtgccggacaccgccttggacatgtcggtcatattgaccttgttcgtcctaagtcccttgttcagcctgttgatggaatcagaaacgtccttgaagtcgccggccaaggagccttcagacgctttccccaggaaactcgcctcccatgcggtacgcccggcatctggattcgtcctgagactcttcagaatcgcactaccgactgaaccgagaccgctggacgctttggccgaagctgacgagatgctgctgatcgcgttcgcaacgtcctgcgacacttgctcgacattctgcgcgtgctgcgcataatcggagaacgcgatggtgacagcgccgataccagccatcccagcaacgccggagaacccgcctgccatatcccacaggacagtcccggtatccttcgccgctgtcttcagcttcgagagtttgcctctcgtcggctcggccttgtctccgacctccttcaacccactaccggcatgactcgcattcacaccaagcaagacagcgccatcagcggcaagacgagcctcggcaccggtcttggcgacctgcgcagcagccttctccgccttcgcacccatctgttcgacgcctatggctgaacctgtgagcaatccggccacattcccgtacatagcggcatcaccgctcagttcagcggccttggcattacgggaaagctgcgccatagcggcaacaagctggccgatcttggtcttggtgccatcaatggtgacaccaagcttacggagcgtgttctgatactgcatcgtgctctgaatgctctccaaagcgccgctcttcaacgccatccaagcggacttgccagcacgaccgaacgtcatccacagacccaaagcccccttaacgggagccggaagcttatcgaaagcatccgcaagactgccagtagtttcggcaatcgtcttgataagcggagccgcagccttcaacgatgctgcgaacgttccaccgaacgtgtcggacaattcgccgcccatcgacagcagactgtcgaacatcggagctgcggaatcaacggcacggaacaccttctggaatccctcggacacgccgttgctgaaatccgcgatgccatgcttcgacttgccggcaagactgctgatggagccaatgccggtggacaccatggagcctgcgtcaatgaacgcctgcttcgtcgtgtcccgcagctcataagccgcgtcgccaatctcacggaacgaatcatggaacttgcccgaagcggtcttcgcgccaccggcccacgcggtcaacgtggactggaaacgaacgccgttcacggccttgtccgcacggctcaaagcgtcggagaacttctcgatgccattctcgccctcggccaatgtgccgaacgtgcccttgaggataccgccagccgacttgacgctcgacatgagatagccaccctgctcgatggccttctccatggcctgagtgaccttgccggtacgctccgcctcatcgacccactgcgccatcagcgtcgcgttacggctcacatagttggccatgcgcggcagatacgagctggtgctgtcgccaagcctcacaacggaagcggtgacagcctggacgccagggtcaagcgcgttcacgcccttgaccgtattgccgagaatcgaattgatacgggacacgtattcgccttgggcgactatcttcgcggcgttcgcggctatcttgccttcggcggaggaaacattctccataccgtcaacgaacccgttgccgcccaaagcgtccatcatgtcgatgaccggctgcttcgcctcagaccagaacgagtcggacagtttcttctgcaagccgcccaacttcgtagtggacacgtcgatataatccgcgtaattcttcacggcggaatatccagcgccgaaagcagcggtcacacccaacagtgcgcccggagcggccaaagccgctttgctcatcatcaccagagaggctccggcactgccagcggtacgggacaagttcaacgctccggcgccaacggacgcgaacaccgcgcccagcagactccacttcggcacgatctcatcgaatttgtcgaacatgttcacgagcttctgccactcgttctgcacgccacggacacccgtggcgccagcggtcatgccgctcatgatcttgccgagatcggtgcccttgaactccgcgaagatatcaaccgtgcgcggtctcgtgaagtaagcgagatgggcgcgtgctgcggcggtctccaagtccacgtccatgttgaacgtgtcattggccttctggaaatccttgatacgcttctcggcacgcttcatatccaaatcaagatcagcctcaagctcgaccttgcgatctgggttgcgtttcacctcttcggcgacctgtcgggcacgctcaatcagattcttattgtcaacgacgatatccgcaggaatacgaatacgcccctgctgaagcctacgcagacgcttttcaagcgaatcagccgtatcggtccagaaatcaacacgaatcctaagctcgttctcacgttcgagcttcttcgtcaactcgcctacctgatgtgtgatgttcgcatacttgcggttgaaccgactatcatccaatacgagtctcgtcttgatcggattggattcgatctgcttgcggagcctgttgacggcggcgagctggtcgttcaactgcttgttgacttccgaatacctgccgtacttgttcacgccacgcaaggccttctgcaagccggtcaaccgttgctcctgctcgtcaagcagacggttcgcctctttcacgtccttgccgtacgtgttcatcacgttggaggctgtcttcagattccgcgcataccgtgccgtgccctccaacaggttcccctgccattcggcaccgtcacgccacgaatcgttcagccgctcctgctccatgcgcgcggcacgttccgcattgagctgacggttcagatccttgccgaaaaagctcacgccggaaagaacgttcgtcttgcccatgtcggaggatttgacgaaaccgctacgggccacgctgtcgaacgtcttacgcacggacttcgtatgcgaatccaattcgacaagctgtttgtccaaatcgtgaatccacttcgccacactatcggacttcagcctgtcctgctgtctggcaagcctgttcgtctcgttcgtgacctcgcgcatgttgcgtgcggtggcacggtattcggctcgaagctcacgaagcttgacggtctgcgccttcgcctcatcgcggcgtccaccgccacgaagcgaatcacggtacgcggtaaccttggaaatctcggaacccaactcgtcgtaacgcttccgcaaagcatccaacgtgctcatgttgccaagaatctgcctgttcagctggttccactcgtcgccacgtatcgaaacaagctcgtcacggtcggcgcgaatcctgcgcatcctctcttcggaccggtcaagaagaagcatctgctccttcaaacggctcgtttccgttttcccgaacacgccaagattctcagtgaacacgtcgccgacgttcttctggaccttacgcaactgttcgacacggccgatcgccgtgtccagacccttgacgacaccactgccgtcgaaaaccggtttgactggcttctcataccgtttgcgcagcagttcatcctgcttcgacagttcacgcaagccggacatgtcaacgtcatacgagacattgacgcgagcgtcccgcccattccacttctcatacgtgcgcgaagcggccatgtcatccgggtcgaactcaaccggaaccttcagatcacgaagatcatgcagcttcgccctgagttcggcgaaaaaccggtcggtaagaggaacgacatcaataccgacctcgccagcggaaaaagcgggacgctccatacgtgcacactcctaaaagaaagacccacgaatccaaggggaagaaagaggaaaaagaccccctcggaaacatgggcgaaaacaaaaaaccggcagaatcagccgccgaagcaactacgaacccgagccatatagtcagccagactcgtcacatgcgaaccatccacacgattgacatcacgagacacggcatcaacgccgggcgggagaatcggctcaaagccaaccttcttcccgctccaatgggaaacagccagcgaacgcaacgaatccaacgtgttctgcaattgcagcaacagcatttcggactggccgaaaccaagccaccccaactgcaaccgttcagcacggtcggaaccgccaccggcaccatcatgctccaacagccacgcacgccactgcgaatcgggaatggcctccaaaccatccaacaagtcgcaaagaaaattcggatcatacgcatgaacgtcagccggaagattcagccggtagaaacgacggaaatcggagacaacccctactcggcagtccgagactgctttttcgaggcgcttgattttcccagacgctccacgtagaagcgtgtgagagacgcgaacatgttcaacaggtcaaacaagccacgacccttcgtccactccgcgtaagcgtcagcattgacggcaagccccttgtagaaagggtcagcgatctccacgtattcggccatggcaacggcgacagcatcatccgacacggttttcttcgccttgccgccaaacacgccaccgtcacgcatgacaagcagacgctcgttcaaacgacgttcgaccacggcgaacaatgcggtctgagacggcgagaaagattccgcctgcaccatttccggcaatccggccatcacatcatcgtaaccggccagaccatcccaatcagtcggaaaaacattctcttcaacatcgttttcagccatacaaaactccaatctgtgaaaaagccaacacccgtctgcggtaaaaaagaaaatcccctgatgggcgacagacaggagaagaacacccgtcaggggaagaatcaaaaaccctcagactcacgcgaccttggcgaaatcgtcaggatcatagaaagcgatgctggaagccttgccgctcttggtcttcggaagaacagtggaagtcatgatgttgccttccagcttgaacgtgttgaaatcatcctgagccaaggacggaagctcactataggcgaggctcatgttcggaatccaaatgccgaacatctcgccggtgttcgtgtcctcgacgtagatgaacagcgccttcggctgctcgaccttatccaaggcgactgcggtgccgccaccggtgatttcggcagcgtcgaacatcagtttgaacatttccttgtcgccctgaacgctggaaatcgtgaccttgccggtgacggaatcgtaagtggtgcggaacttgctcttgttccaagtatccttggttgtcgcgtcgccgccgctcgtctcgaaagacggcaggtcggacgcgctcaaatgacccatgttcgtatacttcttggtggtctcgccaacggttgccgcctcaagactgaacagtttcagactcggcaaagcagtattggcctcggcaagaaaagcggcaccgcgaacactggtaaacacggatttatcattgatagccatatgaatggccctccttaacaagaaagccccatccgcaagcggacagggctttaaaatcagaatctttgaattattgggaaaatcagcggacggaacccgcctgcaccagcttcgtgcaggaacgcacgacagcggtcttcgtagtcaccacgtcaccaatggcgacctgctcgaacgcgggattgtcgggaatcgcgcccacacggccaaactcggtaggctcgccgtaaggccaacgggaaatcgtctcgtgcaggaacgaacacaggctggaactaatgtcaggatcacggttcaccacggtcagcgacaacgcgaaccgccaaacccacgccttcacattccaatccggttggaacggagcgccgcaatgccagatcaccacatcatggtccaacgcatacgaatccgtatccgcgatggcacgcggcaacaccacgacattatcgaaaccagccttacggaaatcgacacgcttgaacagcgcatcgatcaatccttcggcatccaacggggcacgcacgctcaaatcagccatacttggcctcgctcatcacgtacatgcccggtaggtgacgttgcgcacgcacattgaaatacccgtactccaagtaggacgcgatctgcgagccgtcacggccgttcacgctcatgaccacgctcgtatgcgagccgtgagcgtgaacatcaatatcaatacggtcggcgacactcgaatgcttcgcccgcatgtcggccaacgccttcgcacgagcctgaaccttcaaagcgtgggggcgagtggccttaccgccgaacgtttccgcgaccctcgcattcaaatcaggacgaagcttcacataccccatgtttcagctcccttcggcggaacgggcggaacgatacggttatgagccaagtcagccgcatacacgcggcgagccggaaactcgtaatgcctagccatatcggacgaatgaggaagaaaaaccggcgaaccgtcaacctcatagcaggagccgtcgaaccagaaccatgaatagaagtcgccatgccattccggtgcgagaaccttcacctgattcatctcgcgattaccgccaaacttctgcggagtcgtatcctgcgcccaattctcactcatgacgctgttcttctgggtacgtccgacaacgcaacagtaaaccttgtggacatcagccgtgtacaggactccgccactggtgatggacggcacgaaaccacccgcgcgaaccacattggaaaccgtggccgggtcaagaaccctaccatccgcatccaaatacttcggaacggtcgtactcccatgacacgtcacccacggggtcatgccctgatagacgatcacgtcacgatgaagcagatccttgggcacatgcttaggagccgtatccttgtcgtaaacatgaccattcttaggtttttcagcataaacagccatgctcaacccccataaccggggtctagacccaaactgatgtggctcgcaccgccaacaggattctcggaacccaacaggacggtacgatcatccttcgagacgaaaatacggggtgaaggagaatagccgggcgggtcagcttgcggagcattccgcgtatacgtgtacgagccattcgtttcagacttgtactgttcagccttcgccaaccgcaacaccatttcgcagacaacttgggcgaaatcctcttcgctcagacggcccttacggagccgcacacgaacgagaggactcacacccaaacaagtcaacgcggccctacggcatcgggtctggacccacgtctcgtcatatggcgcatcatcaccagtgaacaaggcggcatccgcagtggcgaactccgccatgtacttcacccaatcaatatcgtcaatgatcgcagtagacacggatgcctcccgtcaatcaggcggacaggacagttgccttcaaagtgctgttggacttgaccagcacaggcagtgcggaagcgttcacaagcgcctcatagcccggattggtgccggtggaatccaacacgacaccgaccggaccggcatcatattcacgagtgatgccatacacggccttctccttggcctgagcggtcggaccgaaagcggtgtagcccatggaagtgtcgcccaacgccgggatcaacagcacggtgttctcaggaaagaacgacttgaccttgcccggcagttcaatcttcatctgacgcgcgtactccttgtacatgtcgtcaacgatgattacgtctcgaatgtcggtcatctgcacgagcacgtacttgagttcgtcatccttcaacaggttcggcagtgaagtcttagcggtggtcggataatagtacttaatcatggcggcgttcttagccaacgcacgccacaccttcttggtggtgagcatgatgctcggagcgtcaccttcgacggcatcaatcttgtcggcccaatcacgcaagtcctgaatcggatcgccgccatcagcccaagtctgaccagaatccttattgatggtcagagaagagtcacgcgcgtaatcccactcattatcgaaagtggaaccatccttcgggctgatcttcgcgttaacagtagcttcgacacggtacatctccaaagtgaacgccaattccttgccaagacgcacgaacgcctcacgcagattatcggcggcggtaggagtggcaatcacgccattcacttccgggtcgatggtgaagctcggagaagcgacaccctttacgatatcctcttcggacacacggtgacgcttacgcaacggcagcatctccgtatacttcttcctaccaccggcgtgagtctcgtcatacggtgcctcggcatcatatgcggagaactcaatagtgtccacctcgaaacgcggctggttcggaacccagctgacgttgacaccagtcggattgttcatgtcagtcagaatctgaccgaacggcaaagcggaagtggcaccctgataagcgccaagcacgatgccggacgcttcggcaggggtaatgaaatccttgtttaccagagccattaaaaagccttcctatataagggaacccgccacgatgggcgggtttttaaaatgtttgttgtgtgatgcgcgtcaagcgaagatgccggcgctcttaagagacgccttcaaagcggcgacagtgtcttcgcttggagcggagaccttcttcacgccgccaagagcattggtggatgctgcggggagagtgtaggaaccggaagcggtcacggtggacaacagttcgacatcggaaccggagcctgcgtcataggacaggatcagaccatctaccttcgcgctggtgatggccacgggcagctcccccttgtcgatcacggccatgtagcgcagaccggaatcgacgtaccgttccttcagacccttgcgggtgaactcgaccttgacctgagactcaaggaaaccggccaccttgttctgacggccatcatgggcggcctggtcatacgggccgaaattgttgctgttgttgatacgagccagcggaatgccggaatacaggtatgcgacagtgttctcgtcatcgatggacgcgaagtacttcgactcgttagcgccgcccacgaacgtggacaagtcgagagtgaccttcttcacgccgtctgtaatacggttaagcagccacttctgcttatcctggggcgcggtaaggttcaccgtgcgaaccatagcgtttgccataggtttactccttcttggaatcaatcaacgaatgcttaagcccgtattcgtaaccgctcttcgcatccccctgagagggcgcgtgaacatgcggcgcggaattggacaaagcggttttcatggcctgtttgcccgtgttgcgcgaggaatcgtcagcggcatcatgctcacccgtttcaggcttgctcggcatgaactgcacgaacgaatcggcccatttgataatctcgtcagggtcggtttccttgcacaaggcatcgaaagcctcgtccgtaatctcaggatgctgcttctgcgcggtcagcctggcgatacgaacctcagcgtcagcgagacggccttccgtatcggcaagcttcgcttcggcggcattggcacgatcacggttctcatacatcttctgctcgttctcacgggcctgatgcttccacatgcccaacttctcggaaaggtcatccgcaccattcttttgagacgccgtattggcggctgcggtagaagtagcagtgtccttcggctgcgtgttcacgcccgtttcaggcgcattcgtagatgccgccgttgcagcggtattggtattttcatcagccattaggcttgaatcctttcaatagtgttacgcggcctcgccaagcatcgaccgcatctggttgagcatggtcttctgccatgccatagcctgtttcaaattcttggaaggtttgaacgtgaacgtcctaccctcatagcggaaagtcaccggcttgccggccttctgcacttccttgtagcgccggttgaactcgattgcccgattctccatgcgacggcattgagccaacgtggactgacggtcaggcgtatgccaagcgtccgaatccttcgacggaaccggatcaggtgtatcctcagcatcctcagcgagaagcacggggccaagctctccatgagttatcgtcttgaccttcacctgcttcaacgccgatgaactagtgccgccagcctcgtcgtacaagcgtttcaaatccttctgattcaattggaatcccggatcgtaatcactgccggcaggagcgacgccacaatggcagttcgcgtgcaacggcatcagattcgacgtggaataccaacggtctgcggcaaccacacacaagccacaggaaccggtcttggacagttcgggatgcaacaccctgcgatactccaacaccttgctacccttgtaccggtcaagcgtggcgctcgtctgcgccctcgaaacatcctcgtcaacagtggtccgcaaacgattgaacgcctgttccaaccacttatcgacctcttggaacgtttcatcagtcctactgggccactccttcggacgaatctggggagtttccacagcaagacttcgatatgtgtcagccggacgttgcgccacaagccacggatcagtattgtcgcgcgggaacacaagacctggaacgtcacccttcggactgacgcccacgagcctcaacgtctcattcgcataggagacacccaggcggcgcacctgctgaatcaacgccatttccaacaaggccatgcgtgctgcgactgcatacgtcatgccatcgttccaccagtctgagggagtcaacgcattccatatcatgtgcgcttggctcacatactggttcaccagcgttgcgcgagccttctcaagcgtgtcagccaacgtttcaagcgatttaccggccatcaggactcagactcgccttcatcgacaagctcgacatcaacattaggcagaccatccacagcggacttggtttcatcatcccaacccgtagccggttccactgcggcaacaagcttcgcggtacccttatccgactggccggaaacattgaactggtcggcaagacggttcatatcatcctcggcaacatcctgagccgtatagcccatcttgtgcgtgagaatcgtcctacgcgccaacaagccgctctgatacaacagttggcaagcctgagcctgttccagcgaactggtcgtatccatcggcttccacaccatctcgaactcgctctgcgaagccttggagccgtccaacgccaaagccatacgaatcatacggacaataggctcggcgtcaagatcgttcatggtctgaaccttgaacttcaacgtctcacgcttcagttccgcaccactggcggaaccctgcacgtcaggcgaaagaatatccaacggaatgccggacactgcggcaagctgcttcacgtcggaaacaatgatgttctgcaaactaccggtatcggtggtctgcgactcccaaatctccacaccatcaggcaactgccacaatgctgccggacccatagcgaaacgcttcgaatagtcgatgggatcgccaacctcagcaagaccgttgatcacatcggggtcttcctccgtgtaagtctgcggaagatcacctttgacggcacgttggcggaacgcctgcatcatcgtgatgcacaggcggtcgaacacctcacggtcgatacgcttcaacatcggaagatacggctcgaacaagccttgaccgtcaaccgtgcttaaccggactataggcaatgagtcacagtccagagcgtaatcgtattcgtcacccttactatcatcccacttccagttcgttccaggactccacgccttgccttgattgatgaaaacggcaaggtccccatcatcggaaggattgactacagtacgttcggattccctgtacgccacacgcgaatacacacgcttggagaacccgtcatcgtcacgttcgatacggaacaaggtaagagtctcgacaccatgcttgtcatcatgcgaatacatgatcgccgcatcgtcattgtcggacatccacgcttcccaaggactcaacgccttgatataacggtttccctgcccttctccaacgagagcgaacgaacacccgtaatcgcccttgtcaggcagtagatgacggcggagaatgaacgacaggccacactgcttggccatctggtcggcatcggtatccttcaacgaggaatcctcaaccttacggaaaccattaggctgctgccggtcggtcacactctcgctgatacgacgcgcgagattcacgacacccaactggcgcatcagcttgtagacaggagccgcgttcgggtcaacaccctgcggaacgctgctcctgtccaccatctccttgccatccttgaacaacttcaattcggcaatatccaagagacgggaaccccactcctgtgccaacgacgtaatcacgtaagcatcatcgtcatcaatggatgccccgtcaatgattagctgcaactctgccacagggcgcctcttccatcagtagattctcgacggcgcgcgacgcctcttctcctcggctatctccagatagcgggcgcgtgcgcggtatgcgagaatgcccgcgacgcaggcatcgatcttgttcgggctggccggtgattccttgagaatcttgtagccatacgatttgtccacccggcgcggatgccggaaatggttgacgagcctcgggtcggcaagcaacgcgatgctgttcaacgctggctttctgccttccggctcctcatacgggtagcggaaacctgtggccgcgttctccgtggcctgatacatctcgttcttccagttgttcgtatagaacttgacgagatcgccgttcttgcgggggccgaccttcagtttcttcccgtagtccttctcccaagcgcctatcatcgactcgaagaaggccgcgtcggcaaagaagccgaccacgttgtacttgtcgagcatgtctctggcggcttggtcgaaagcgtcacggtcaaccctccacgtggccttctccggcccgtccgggcattgctccagcttgataaggaacagcataccatcggacaccctgcaaccaacgagggctgtggagtccttcgacacggaaccgtcgaagccgagcgttatcggctccttcttggtgacgaatttctgccaagcggtttcgagcttgcgggaacccagataaccggccatctcgtccttgtacaggacatgggattgaatgtcggactccctgagccaagcgttctgcacgctggaaagattgttcaggaagtagcgaatcgaatctgcgggatcggtgtccggctgatagatctggtcaagctgaccatccaacgtcaaccacccgtccttggacgggccaagctcgccatcggtcagcgaataacggccatcggcgctcagaccggtcttgttctcaatcggcacgtcggtaccgtccttgagaatgatatggtccttcccatcagggcttttcaaggattgaccgtaggcaatctcaagagccttggtcatcttcttctcgtccgagaagtcctccacgtccaacgtcgcgtacacatggtcgaagtagatgccggcacgatgcttgattcgtcctgcggccacatcccacgcatacttgtacgacgcttcagcgatactgccctcaccgggacggtacatcgtggaggtctccatcatgaacgtgccagcggtaccggcacgcttgccgaggttacgggccacggtcttgtacacgttccacagcttcggctgcaccataagatgcgtctcgtcggcaagaccacaggtggtcagctttccatcctgactggaagcgccagaagtgatgggcatgatgattccgccctcgggaagcatgatacgggtcgtgcccacatccatgcccatgcccttccaatcggacaaggggccggaatcgcagttgtagtagatggactcgaacacgttgccggcctgctgttcggaattggccaagcacacgacctcgggttgggtgacaggcttgcccacaggctcaccctcgcgatactcgtatgtctcacccatgaacgtgtaggtctcgccctcacgcgcccaatggtcgaaacgacaaggaccgaaaccctcgaacatgccaacaccagcggccttgcccgacttgtcgcgacccttggctcgggaaaggaacagacgattgaacttgcgtttgccattcctcttcaacgcataggcgccgaccatgaactggtactcgtccaaatcgaaatgcataggcaatccgatgccgtcgccacgaccgataagcgtgaacgtctcaatccaccacaccgccagatgaccgagggaatgatcgtactcccactgcgtcagctggggaataatgtcatgcgccaccgttcaccaccctcaactgacggcggcgacggtcaacatcctccttcaccgcctcgccacgggtttccgggcgaccggttccggtactcatatcatcagcctcaatggcctcgatcttcgccttgatgcgggcggcgggcgtgataagaaacgagtcctcacgctgacgaatctcagcggccatcaccgcagaaggcttcgacatacgccagtaatcatctttcagcttcgccaaatccatcagcgaaaaccagtcggcctccatgcccatgcgcggagccataggccccgtctgcatcgacttgtaccagcgtttcgtcaagtcaagccactcacgcccatcaggacgagtcgcgggcaagtccagacccatcacggtatcaggactcttcaaaaccatattcctaccggccttgctacgaccggaatgaccattgccagccatgcttcaaccccattccgcccgttccgggcacgccgaagccaaggcattccgcctacaggcaacggttatggactagaagtcggttcgccaaagtcgcctgacgcgatttctccaaaggaaccttccacttaaacgccggaccatcaggcccgaaagaatcaacatcgaccctcttgccgcacacagcgcacacgccatcgcattccgcgatgacatccgcgtcggtgaacgactccacccgaatatccggctcgatatcctcggcctcgacctgcttgacgaacaagggggtttccggattggggggatacttcacagggtctttatccgacagccgcttgtacttgctgcgatgcctgccggaacagaaaatctggtcaacacgagacggttgaaaataatggcctataggacacaaacgggtacgaaacgggataatcggactccccgcataccggtcacggtcataatgatgacggcacaagccgcgcgcatacaccgtattcccgcagccggccaccatgcatacatagccgctcactgaaacgccggatgcgaataccattgctcttccttccggcgttcacgattcatgcgccgctgctcagcggactcctgcgcggttttctgcgaatgatggtacgggcacaaggcccacagattcgacggggaatcatcatcgggctcaccgttcttcgcgcgaaccttatgatcgacctcattggccgaatagccgcaaatatgctttgcccccgtatgccaatcagtcacaatccactggcatcgatagcggtcccgctccaatatctgcttgcgggtccgctcccatccgggattgaaccgtgcatcacggttggaagatgaccaagccatgatgactccttatatataaggggacggaaccggtgggagcgtggcgagcgagcattccaacggggttaatccaaatacaagggagttggcccacgggccaccggttcctagaggcaatcccgagaatcgaactcgaacctgcgctttacgagagcgccgctcttccaatgagctagaatgccacgcctcccactagagggagcgctattcagttattgccgtacggcatggcgtgaagccgccgccggcgactggcaatgaccgagaagctgtcaccgccaagagctgcctcttctcaaggcatcgcatacccggaaagaatcgaacttccgtaaccggttttggagaccggtgcctgaaccactcggccacgggcatttggggtagtcaattgtttaggctggctgacataccttgaccagacagcggagagagtgggagtcgaacccacacgcccgtcagggcagactgttttcggaacagttgccgccgccaatcggctggcctctccaaatctcgcaacgcattgcacgatcagtatgcaacgatctccgggcgctacccgacattctctgcaaccaaagccgcctaggtgctcagccccagttctctgccagattcttgaactacatcgcgattgtggtgccggagagaatcgaactcccaacgcccgaaggcagcggtgttacagaccgcgcgcactccacgtgctcgacaccgtggaagccatctcagactcccgccgcccagcgaaccgggggcactcctcagccgacgtcaacccacgcgaagcggggagtcggcacacgatgctgtgcggagattctgcacgacgccggttcacgggcggtcaaaccccaaccgacagtcacgaccttgaccggccttactgaccatcctgcggatgatgcaagatttgcacttgcgaaccttttacggtttacggcctagcaagccgccgcattcgtctactctgccaatcatccccggccacgcccccggtccaagaaaacaacaccaacacaaaacggaatcccagagaactcgaccttacaaatcctcgtaaaactgttttgacggtttggttttcaaaaaaggcgtggcctagtcgtgagagagggaatcgaacccacaacacaccgggtttgagccggcgtcctctaccaattgggatatctcacgcagatatgagaaaaccccgcgactgcggggcctcgtcttgtcaggaacctgagcttcgctccattccccgacaatccgtatacacgacattttactcacaacaagcgttgcggcaagcgttgcagtgaagaaaatgtgaaagaacagcactcaccacagaagcgaacggtttttccataatagccccagatcgcatccagcgtcagagctagagtcgcagcggccccgcgtcttgcccgtgggtacccttcccttgggggtggggtgtatgtgtcggcgtgtcgtagtgtggcgcgtggtatgcgcgcggtcgtatgcggttgtgagtatggccgtgtctgtgacgcggctatccgcgttgcctgggtgtgagtgtggcgtggtcgtggccgtctgtgccgttgcctgtctatccgtccgtgtgagtccgtcacgtggtggtgacgtggcctatccgtctgcgtgtctgtgacctagtggtgtgttacgtggggtcagccgcgcggtttttgtgtcgtgttctgtgggtttcgacacgccgaggaatgctagtggctgcaatggttttagtggtggtttgcgatactgatttgcactccgtatggggtgcatgtatagtgatagctatcaaccacggaacaacaagaaaggaaccacgagatgaacaccacggagattaaagccaaggcctttagagcggcggtagacctagccacggtatgtaagccctgcacctatgacaacgtgcttgacctcacggccatgtccctcggtatcgagatggacgacaacgaggaataccccgccgagctataccgcaagtttgacaacgtgtggaatgacctcaacaagtaatcagcgcggccatagtggctaacgctagggtgcaagtccctagtcgcgcacttagtcccctctatccaaaactcatagtgagcggcgggtaatcaggcggacatgctcattgataactaaaaagtgttgccgaaagtcggttgtaatctgcgtagtgagagtacgtcaaacaaggttgcataaatgagttgcgtctaccggcgtctagcctaccgggctagtgaggataagagagcgggtatccggcatggaattgtccccgctatggacgttgccacttatggtggcagacatggagatatctcgatatcttcttgcgacggctaaaccgagcgtctggaattgtataattgggcccaccgatcataagtgaggtgggttatgagtctaagggagctaaggcagaagcgaggatatacccaacgtcaactagccgataaaatcgacggagttggctatgggcgtatcgctgattacgagaatgggcggcgtccgattgagggcatgtcacttggcgttgcgctgaaaatttgtgacgctttgcgcgtgagtaatcctcgcaaactgttagaggctgataagccaaaagaaaacactaacgattagttgttaggtgtgtgccctaatcaatctttgagcgtaggccggttagcggcttaatcaggtgcaaaccctgactacgcactgtggcttagccactacataaatgccccgcaagtgttggcgcacttacggggctgacctttatctgctaatcaatagaggcagtacctagtgtactgcctcacacggaagtgaggaaccatgaacaagaagtttgttgcggctgttgccgcgtttgccgctctgtgcggtatggtgtcagccccggctaacgccgccgaaactgtccagcctatccgcgaagacgtcacacctcacgtgcttgtgccgatacccgtgcctgaccatgagtcggtcagtgagccggaacctgtggatattgacgctctcgccgccgctgttatccgtggtgagtacggtgacggtgaggcgaggcgtgccgctctcggtgataattatgacgctgtacaagcgcgggttaacgagttggtgccggttgccgcgccggttgtcagccagccggttcaggccgcgccggcgcagtcggtgccccaggccgcgccgcgatcctacacatttgaggacgtctacaatcttgccgtcaactcgccttactgcgagctcgaagacggttccgacctgccgcaatgctactggcatgacggtgcaggcgacgggagcgaaccgccttacacggatatcgtctatatgcctgacggttacgggtaccaagctcatgaggacaccatgacggtgagcgtgttcgcgcgtaacccgtggctgtgaccttttacatgtcgggcggcattctccgcccaagttcgttcaatcagtcgcgcggctgtctccgcgcttcatcaattcaagggagattcaacaatgtctattgaggaaatgtgggacgcgctgaaagatgattacggtgtgtccgagcagactttgcaagttgtcaccaatatcaatggctacagtaccgacaccatgcatgacgtgctgtacgcggtagccgccgaacgtcacttcgatggcgaggtggcatgatggcacgctacttctacgcttaccgctggacttacggtatcggcacgacatgggatgatgggtcatggccgggtagcctctacgtgttcgactcgatggctgagcgtgacgcttgggttgccgacgacgtttttgatggtaactggcatcgtgaggccatcacggcaaaagaggcgcgtcatatcatggcggacacggttatcggttgcgacaacgatatggccgtccggtacgaccgtagtcggtcggctgttgaacggtatgcttcgactgtcgaactggtcagggcatggcggcgtgttgacatgcagaataacccggccgcgtattacgcggattgattgccgtgatcgaccactggggactcggctacatggtgcgagtccatcgttaaataattcgtttcggggcatggctcccatgccatgccccgctgttttaaggaaatcatcatgcttagcgatatcgagcttgaggcgatgtgctggaaagttgacgcggaactgaagaagcacgcggccaaccgtaaccctgaatggtggggcatctaccatctgtgggacagtcccaacggcgactttatcggggaagaagactggaataaggttttccgtagtcgtccgttctacatggcttccgcctacatgctttgggtcaacaacggttacgacattcgtgaggtttgtcgcacgtataacgagggtggttttccggcgcttgatagtctgctcgatgaatacatcgacgatgatgatggtaccggctgttattacaccgaggttgtatgcggcaggtgcggcgccggctggacatgcggatgtgactgccgatgaaagcccgtcgtgttctgctcgtggccgtgttgattgtggccgtgcttattcttcgtggcgtcggcgtcgttcagccgactccccaatgttccacgccttacggcgttaatgacaccgtgacttgcgtgtatggcgtttacgcctatcgccgtggcgtgcaaatctgacaatcgattttttgaagtgaggtaaattccgatgaagaaacttgctaatgatccgtcgcgtaacgtgaatgccgtaagcggcatgtgggtacgactacgcaaggacggctcgaaatacgacgtgaggtatgtcaacgctagggtgaaacgagtctggtcgttgtcccaaacgtccgagggtaccgcgtggaacgttcaggccaggggagtccagtatgaggattttctgaacggcatgaagtcaagttcggttgaccttgagcatggctggttgctggtgcctgactcggaacgatgtggaatcgttcgggtgccggtgcctaccggtatggacgcgaaacgtgtggccgccattaaggctgatccgctggttgatatgaactggcgcaatgatggcgaacggttcctgagcggcgttcactggccggtgcctgtacctgttgaagatgagagcaagtgggctggtgaggatgagtttctggatgatgagccggcgccgattactcaggagatacctgaagtcccgcccaaggtcaacacgtttgccgtgtcctacgcgactctgcctgacctgatgatggctaaggaatgcccggaactgcaaggtttgggccatatcaaggcgttccgtaccagcaagggtaaaaaggtggcgtacatcgcttcggccaacggcaaatgcgtagtcgcctaccgtgcaaggtatgagcgtggcagtgacaagcagttagaacaggcggtggccgattacgtggccgttgcccgtgacctgtgggctaaggcggcgtgacatgagcaagctgagagacaaggccacgcgactgttgttgaagtccgcgtgggaaatggctgatgacaacgaagatgagctatccgccgtgttcgacggtcagcatggtttcacggatgacttacgtaggcgtgcgatcgataccctggagggtgtcggctgtatgcccagtacgccgcctgacaaccatgagatggagcgtttgattgctgattccggtttgtcgttggacgtgctggataagagagcgcgtgagatctatgactgcggttattccaccacgtatcagcgttatcagacggctatcgtcatgcttatcgatgatttgctgggggtggattgatggaagtcaagatacctacgagtaagattcgtgaggttatggagtcgtcgggggccgtgtacacgccggataatatcgcggcggtgcgcgccaacattccacggcatacgtctgacctgattttggcggcgttgaacgccaccgatttacccgacaagcggtttgctttgccgctgttctaagttcttgccgcctggcgttttcctcacttccgctggacggcaacccattttttcaaggagatcaaacatgttgaaaaaacttgaactcgcccaactactgcaacagcgtatcgcccctgacgatgatatctcgtacatgacgaataatctcggcatggccgttgatgtagcccatcgcggcgggactttgctggacatagacacgatggtggaattggcgcgtgttctacgattccaggtcagttacgaactgtactcgtatctaaatggccgttacgagtcggatctgatggggctgtgcgaggactataaggaggctcgcaaaatattaggccctatgataatggactatttgaacggcgtgaaatagttcgcttaaccatagtttctatcatttagaaccgcactatgggctttctgtggtgcggttttcacataaatcatcatttaggcggggctttagagcgttctattgttccgtcaatcgttttaccgaacaatacaaaggagttttcaaatgagtgttgcagccgaactgttggacaaaggctatgaccccgacgcggtgcgggatttcgccaagcatggtgtggacatggctcaggcgttgacgttcaccgaactggcgagcgtgttggatgacgtgcttcaacgcacgttggaggattatgacacggcgtcggacagcgacttgtacgtgctgtacggcggttcgataggccatttcaaggatgacgtgaagacgggcgtgctgcgtgccgtactggaggcggaacgatgattaccgcgatctaccgttatgagcgtttcgacccggccacgaacacggaactgtggcggcgcatacccggctggaggttgcgtctcatgtggcttcaggcatgggtaaagcgcgataaggcggctcgaatctcatatcgggcttggctgtacgcgaatgcttcgggcggcggtcaatggttggccgctgacgtgttggactggaatcaggagattgtcaaatgaacgattattacaaattcctcggctacacggccgattatcgagcgcgttacgagcgtatgacgtggtggaagctgcgccggcaatggttcaaggatgttatcgacgcggtgaaacggaaactgacccgtcgagacgatactaatcttcgtgccgttctcgactacaaggaatggcgaagcaatcaggattttgagaacggctactggttcaacggaaacgaggtaatcaaatgagtgaaacgaatgacccggcattagaccatgccatgaactcgttgcgtcggtggtcgcacgcgaaacgtatggagaacgcgctacgcgaagtcttgaaatattacgacgaagcaggggaggccggcgaaaactatgagcttgacccggataacctcgccaagttcgccgccgacctgtgcaaggaatactcaaaatcttgatacacagaaagccataggacttgtggccttctgggaattagcaaccatacccaaggagctattatgactgactttgacacgcttttcgacgcgaccaacaatgagagcggaatcatcgtattccccgacaatgacgtgattatcggcaattggacgtattcggggcatggcgtcccgcgactttccccgtttggtgacgcgctcgtttccaccggcaccattgataaggctgaggataaaggcttgattaatatcaaggcttatctcgccggactggatggtttcaccattgtttatgaccggaataatgattacccgcagatcggggataatgacatggcgagattgtgggagatcgtcaacaatgacgaaaccctacgggtgcttgccccagtcgattggaactagtgcgtgtccggtgctaattgacgggcggttaccacgagtaaaaaaatgcggccggaagattaggcccttccagccgtatgccaacaaaaccattcaacgaatttgaggcgtgcattagtatagcacgcctcacacgaaagtgaggtattatctgttatagaatgacgatgctaataactgataaccataaatgtgggcccgattatacgaaaacatgcttttcattcactgaaacccgtgaagatcaataaaaaatagattttcacgggtttcaagctatgataggcgtgttataagacgccgctgcctctcgtggaagcacactaggacggcgttcttattcccggtaatcgtcgtagatctcaataccgatgggatactctgagtaaccggtgtcctgcacgacgatacggccttcgttcgtatagacggtcaacgggtcatcgtccgtgatccacttcttctcgatgcgggagcctttctcggtgactcctttacttagttggcgttcaaacggttcgtggacttccacgagacgagcgttcttgtaaggcgagtcattaggggaaaagaggtaattagttcggtcgatgatgtagctcattgttcctcttctgttgttttaacggcatcggccaggaactccataacgcagcggaacagttcggattgcacgtatgcgacaagctcatttgagaccgtcatgtgcttgcatgccttggccttgtgccggtatccgagaatctcggcgttgtacaagcccatcgcaacatgcacgcactcatggctgacgatatgcggcagcaggtgttcgcggctcaaatagatcacgcacatgggggagttcccgtatttcaccacattggtctgcgtgtcgattggcgcggactgcatgagggtaattccggctgtgccgttttcgaacgcggcatctccaatcggcctgtcgaggtcattggattcgatggaggattccaccaagtcgatgcaggcggctctccgcatggtttcctcagtgtcgtacacgcggacttccacgctgaccttatgcgagaactcggtcaggtcgatgatgcagcgttcgtagtttttcgaccggttccggctcctccaagtgcagcagtcgtttcagccagttcacatgcccctcaattccatcgactcgttgaacgccttctgaaacgcttcgacagccgtcagttttcccatgtcagtctcctatgtaagtgcttttctgaatatccatgccgtactcggtcacgccgcgcgtggtgacaagcgactgatattccggggtaatgaggtgaatgtccacctcatcgttcctcatattgtccagcgacgtgcaatccacgtagatcacgtagggtctgccgcccaagacaggggacagggccttacgaacgtcggccctcaaatcagggtggcaagtgttcgcttcatcgtccaagtaatcggtcattcgctcaccttcacccacaggcagacgaacaccagcacgagcactgccaatacaaacggcacgtacagaggaagcagcaccagccaccaagcccaatcgatcacgtggcagagcttcaacacgatgaacacgatgcccaacagggcgaataagccgccgccgatattcagattcacatgcttgccggtcattcggctgtctccttttcgtccgggtccacgtccttgacgggtatttgctgtatggcggcgatattgtggaacgggacgataacggataacgggccgtcctccaccagatagttcggcgcgtcatcccattccgtttccgaaagcagcacgcctagttcggggatgatgctcatgccgtgggcgatgatggtcttgcctccgttcacggtggggtgaatcaggctcacgtacacggcctcgataccgagatacgaggggatgtcaagttccttggcttcggaaaacatgtttgccataaattgttcctttcaatcgttgatgctgagagcgggctggttttcgagctgggccttgaactggcgttcgcaccagcggcgatgcaatagtgcgagtccggctcgggtgactcgcaccgtgggcgcgtatgcgaacggggtgccgttcctgtgttcgccgtgcgtgcgatgctccttcatgacgagatggccggcgttgacgtggttttgcatctctgcccacgcattgtctcgacggtagacccagccgagagaacgcatgaactggaacaactggtctcgtccgatattgcccgctccggcgttggtaagctggttggcggcttcggccacgctcatggttccggtcacgttcgtgaaatcgtccaacgccttggctttgggttcaagctccgcgttgcgtgcggcaagctgccggttctcgatctgcgtcttgtccagttcggtgaggataccggccacggccttcggcgtgagcagagccgtggcaagcgccacttcgaaggagtcggtggagtagctgccggtctggcgaatcgatggcagcacctcatgcgtcacccagcgtttgaactcgcgggcttcgggcttgcggctgcgtaacacgagggagtacaagccggactcggacacgaaaacgggtgccttgccgccgttctgggcaatgtccgtagtacggatattggtgatttcatcggcatcgaggtattcccgaatatggttggtggccgtaccgagaatggcgcatacgtccgctccaaggaaccacgggttgccgtgttcatcggttaggacacgcacctgaatgccgttgaagtcgaatggttgaatctggttgctcacttggtgtctccttccttggactggttttgcgaaacctgcatgatctcccacacgtccgcatcctccgacaagccggacgcgagacggtagaagtcactgaacctgtaaagcggattgctgtacgcatcctcgccctgctgaggcaactggcctcgatgtatccaactacgcaaagtgctgcggttcacgcgcatcccgcacgccttgatgatgtccaacagttcgccacgggttctcaccgcctccgattggaggagacgtttcacccgttccgccctgatgagggctaccggcatactgaaaccgcatttcgggcatttcgccgtctccgcgtccgcgtagcaggagagctggcccaagcacttgtcggcggggcatggcccgtacaatacggtttccccgtcatcgtccgtgagaaaacgacgcagcttgcgtgtcagactgtgaaccagttccgcgtacacgggggtgctggaatgctccatgagtttcggatgattggcgatacggtgaaccatgtccgacagtggcgtggactcgggcagattgattttcagactgcgcatccactcgtacaacgtgccttgcaaccccggataaccgtggtcatcgtccgcgtacagcagatcatgcagggcttcgcgcaacggtgcgggagcggtgccggattgaccgccgccaccgttcttgtgcccgtaggcgcggttgatgcgatactcgcacaggtcgggcagactgcggtccaaccatcgcaggtcgccggtcaactggctggcgtgcttgtcgcacaggagattcagattcggttcgacgccatgtccgataagcggtgacggcgcgtcggtgacgatatcccgccagcaaccgtggtagcggcagagcctcgtgttttcaggggaaaaagacaaactgacctagaccttcactcattaagagcttcggacgtgtcagcaaaaccaataatgcacgggcgtctctagttttccaaatgtggttcggcgtgtcgcggcagtatgtcacccaaccccaagtcgcccgcgccgaggaaatgccgtaccggtgtacgccgcttcggcttcgccggctccaactccaacgggttgcgactcgaggccgtgattcgagccgcctcctcgggttgacggcccaacatgcgttgacgccggtacagccacgccgcgtcaccctccaagccccgcgcatcgcactcacgcgcgatctccgcctccgagggcttcgccttattgcgcaattggcgaatcatcgcgttcacatcgccagagcccatccaacggcctgaatcgttgtcggcgtagaagcgtttaacggcctccatgcactcggccaatgtcacgtccgcgcgaagctcctcgtggaacgattcgaccgagagcttgtccaatcgtgcgttgccatgatgggtgttgattttcgccatcaccaaggcggcttcctgcaaagtgagactcattcgattccttcgatttgtagatcatcttgcgtgggctgttgtccgaggtcgtgaatgaaaccagcgttatacatcgcgttgctcgtgactggcggcagctccgcccgcctaggcggcttgggtttgttcttccagcccccatcgcgcagccaacgtgcggcttgcggaatgaactgcggctcggtaccggaattagccagcatttgcgcgccggctatgagggccgtgagcgatggccggtcttgtcgcctgtgcctgacttttctgaaaaccctgatggcggcttcctcgtagtcatgattcggatagacctcccagaactgtttgaactcggcatcggcctcaacgtgaatctcgtcggcctgtatgttttcttcgccgtccccctcctgggggactacagggggtctatctgttcctctgttcctctgttcctctgttcctctgttccgggcggaagttttcggaagattaccgcaattttccgcaatcttcagcaagggcctggaatcggcatcaggacgcggaaaacgaggtttcatcgggtggctgatttgctggtgcttgtcccaattcgttaaatagacaagattaacgtctttgcctgatattttggcggtgtaaatctgcaccataccccgctcggaaaggcttccgaaaacttccgtaattttctgtaaagttccgtaagcgtcgctggcgaggtgcgaagcgaacacgtcggcggcgaaatcgacaacattgtatttgcccactccgttgtcatcgacgtagttcatcagcccaatgaacatcaactggccgaaatcgtcaaggctggtgaagtcatcgctgcgccaaatatcaggcttgattgatcttattctcatttcgttgctcctatcagccagtacgtgtaatcggggaacaccatttgcatgaacgtccagcagacgccatacgttgcggaagccgctatcaatccaaaggagaaagcaatgattatcatcacgtcggcgacttcatcgaatagggatatgccccattcctgaataggtagcggaacacctgtatcccgatgatgaagagcacgaccagttcgatgaaatgcgccagacccaccggactcattccgtctccttcaacagttgacgtagtgagtggatggcattctcatcatgggcttcggccatactgtcccagaaatcatgttccacgccgatagtcgcattggctttcaggtgaatcagagtcacccaatcgtagggggagcggatgtagtcggttagacaactgtctgcgtgccaagggtatgcggcgaagctctctccgttggctttcgctctctgtgcgtaccatagggccttctgtaagtcctccttgggatgccccttgtccttgtggcgccacacgtatttgatcatgttgcccacgttgaaactgtattgttcggccaataggatgcattcgaacgggccgttctcgtaatagtccgggttcactgcatctgccatgatcgtctccttaacgtcttgatgaagttgtggcggcttcgccagtccgagggcgtgccgctcgtcgccgtgagcagcacgccgtcatcgaatatcttccagtggccgctgccggcgcgtaccaccgtgtagccgtgcgaggctatccaatgcatgagtttgcggtcatctccacgcgcggtcatgctttgagcctcatcttcaacgcgagaccattctcatgcacgccaccgttgtcgaagcccatgaaaccgttgaacagttcgtattcgagcagggcggtgtccacgcggaactcgtcgtactgatggtttttgatgcgttccatgacaagcctcatcgatgcgacggtatccctgcggtcggcctgtatgggaatgagatacggccaaagattccattcgcccggatgatcgttcagccaacgggcgaaatcaacgagtttcctatcttccatcatttccccttaggagcgttccctcacgatatagtccgggtgttcccggcaatagtcgtatatcagtttcaaccatgcgatggcgctgtccacgctgccccaatagttcggcggattgtatttgccgcgcaaaacatacaatggttccaagtagatgtctttcaacgccttgtcgatacgggctgcggcctccccggccgtcaacccgtccaggtcatgcttaggatggaccttgtaatcggtgaaaaacgcggatagattatacgtgtagttgaaataatggccatgagcggtccgcacatgctcgccgtcccgttcgcatacgtcaaaccattccggttccggcacatccttgtccactatgaacagatcgtagctcattcttcgtctccttcgatgattccatgtcctgctatcaatgcgagggtctttaagtcggtgagcacgggctggttgtccatgcttgacaacgtgttcaagccgagacccttctgtttgaacacgacgaaccagtaaggtgcgtcagcgttacccgcctcggtacggccctcctgcatccactccttgagtctccccgtataggtgctgtagtttttacactccaatacgaccggctggccgtggatacgcagaccggtgatatcgccctggtctttcgtcccatgcaacacttcacggtgtatcgtctgctcgctgtcacccaaccgggcgcgcaaatagttgaccaccttggattcaagcagtgtgcctttggctttctgtcggctcattcgtccatccaccattcagtcgggtcatcgtgaaactggcagtccacgcagtccccgaatacgttcaagattcctccgcagtacgggcaatgctcatactggacgggcagataactcggtctcataatcagaactccgggttgtctcgtagtcgtttttgcacgtccccgcgcatctgctcgatcacatcgacccaaagtccggtagccaagcgaatctcctctgccggacggttcgagtcttcaatgagcagttgccatgctttacttttcgctttgctcaacatgagcccccttctccaaattagagctgatacgcacccgatagtcggtgatgctccaagtcagatggttcaactgccagacggtgagtccaagaaaaaccagcagacaaaacgcttgaacaatggccatcatcgtattctttgacgtgatgcccaccgcgagggagaacgagcaaaacacgtcccaccccaaataccggtacacggaccataatccgggtttgctgccgtcacgtcgttcgtaaaccgtgaccatatccttgtcactcatttcgattccttcttctgctcctgttcacgccaccccatacgccttgcaatgggtagccgctgattctgtcgtgttgcgccgcgtaccgtgcgcattcgcatatcgccggacattgggcgcaggccttgagcgccaatcgttcctcgctggacgtggttgggaagaacaggtcagggtccatgtcacggcacgcggccttgtcacgccagccgctcaattcaattccttcttcgcgttttgagactacttacgctcatgattcctccttgagcgtggcgacatatgcgatggccttgcgttcacgcttcgcgtacctctcgcacttgcgcttgagacgtttgaggctcatggcgtacaggaagtctctgaagttgccgtcttcgcagattttggcttgataacggccgtagtcgcttcccgcgctgatatgcgcgaccaaatggtctgtaagctgaatctcgttcatgcgttctcctttcgatatgggtttggcgtgtattcgggcgattcctcgccgggcatgggattcatgttcttgacggcttggatatacccttcttcccatgctttttcggctgtctgccggtcatgctccttgagccatgcttgataggcggctcggccttcctcgatggttgactggcctgtaccgaagcaactcaattcgacggcggattggaccaaatcgtcatacactcgtggtttcattcctccacctcggtttcctcgccgtactcgccgtagagttggtctgccgcatccttggtcgtgtagaggcatttcgcgggagcgtgttcgtagtcgtagatggcggctgcgatgacctttcgaaactcctcacgggtgaatgtcctcgccttatagctcatcgtccgtgctcctttcggtcttggagtcccagagtcgttctcaactgttgcaggcagctgatggcgtacagggtctcgcggtccaccttgccggtgggcaccacgctcgaaagcgcctcgtccagttccttcagtctggtctcaagatcctcggtgcgggtccaccggctgatctggtagccgtggcggctgaggatgtcgcacacccgttcgaacgccttggactgtgcctgtatacgtcgtgccttggtgggttcctgcaactgttcgagctgttggagccgcaacgccatcttcgtcccgagcgcacggcctatgcctttcatcgcctctcgctgtgcgacatactcggcggcggtctcgtaatgcccgtaccggtccggccgttcgctggcggcgagctttttcagcagccggtgttcgacctgccgggtgtcaccatgacatgggttgggtttgcgccggtatctcaacgtgcgtttggacgggtcgtagtacatgaggccaaccggctcgggcacctcgctgcggtcgatcatgcgggcggggcagacgagggtgagatcgtccacgtaattcttgtagcacaggtatttcgcgtcgcggaggaaatcgccgcgactcaccttgacctcgaatccgctgatccatgtgtccccgcgccagttgacctccaacgccacgccgtccagacgcagcaccgtgtcattcggctcagtgaccgaaatctccgaccaatacccgtcaccgtcacgccggtaacgggaggcgagtgcgcaattgatgtccatggcagtcacgtcaccgttcatcgtctgcctccgtgaaatcgttgagcgatgggctggcacagctcatatcccttctgggcccacatctccagtgttttgaggatcacgagaatcgacagtgagtcgagcccgtcatcagccagtttgggaatgttgctgtactgtgcgttcagtgtcgtatgcccgttcttgccgctggtgaacgtgaatcccagcatgtccacgggcgttccggtttcctccggcgtgatggtcaaccggaccttgaacttcttgcccaacggcatcgccttgtcactcatcgtccgcttccttgattgcctgttgcagtgcctgcatgaacgactgtgctcaaccttgatgaagctcctcatgtcgctcattcctccgttgcctccatcgggtaattgatgtccacaagcaactgtggggaatagctgatcagcttcacgagtttgaacggcttctgcgatgtcgggactctgaacggaggctcgtactcccaccattcgctgccgtcgtattcctcgcggcgcaggaacccgccatcagtgaacgccacgaccagatcggcggctatctcctgactgccgtatccgtcgtcgtaatcgatgtcgagcaccttttcggcctgactccacggaattcccagcctctcgtcgcgggagcctacgaatcgaacgtcatcggtcgaatgcttgcttcgtgagatcgcactcttggtttcatctaaaagattcattcttccgttgcctttccttggttgacttcgtaaaccgcgcgggcgaagccgagcggcgtcttgcttcggttgttggctctgtccttgccgctcatgtaccagatacgattccggtcaggagccggcaggctcatgtcctggctgcgaggcggcatctggaatccccccccccgtccaaagacaggttttcttcgtgtagttgtcctctggcgcataccgcgtgtaatcacacgggttgaacgtgtgggagggcttgccgaacacgttggagagaaccgacaccgggttctccaccatgtaggggacaccgctcatctcaccgatcacccggcactgctccgccacggaaacggccttcgcctgaaacatgtggtcggcctcgtacttacgggcgaaccattgcgctccactcaccgccatatccgtacatggcgggaacccggccacgaacgcgagccggccggaacggaccagtacgctgatctggtcgaacgcttcctcgatggtgcaagccagtttcaggtaggcaccgtcttcatggtcgcaaccatgctgcgggtccaccaacacggcttgatacccgtgttccacccaagggcgggccatgacaccggtcaggtcgcataggcacagaatcgtgtcacgcatcattcctcgatttcttcgccattcgttgcagatctctttcgcagagccgattcaacacggggtatagccatgcaggcggggtcatgggattccacacggggcatttcttccagtgttttcggctcggggggcatccgtattgcccgcagtagggacatcgacggtttcggcattccaattggccagtgcggtgaaccttgatccagcgtgtctcgcaccagtcacagcactgagtgcttcctgtgagcaggcgtaagacagtttgcggaaacgatggaggttcatcaatgatcgggtggatgttcatgcttccaccgccttgaccgggcggaacggagcagcaagccaagccagagcgctatcagcggaaatccacgatctgtcgaagttccattttccggtaccgatacggatacactggatgcttccacccttgaacatccacgtgttatcgtccttgtccaaccacaggccaggctcgtcgggcagtctcagtctcagcttcagacggagagcgtaggcgaatgactcagagccaatccactctctcacctcaccctcgatgctgacttcgaaaacgggacgcccacgcctcggatcaacgcaccggatgtcatagcggttgccgctcttggcgacaaagatatcgcccttgtgcacgtcctcgatgttgtcgatacgctcgtacttggggtcatccaccaattcgatagactcgatgtcggctttcgggacgaacaggtcatcgcccattcctagggtgagaacgtaagcgctcttaatatcgccgttttcgccagctacgccggttgctacgtccccgttcttgaacgtgaccttgatatgtagtccggccatctccttgcaggtcttgccttcccagaatggtttctcactcattgatagcctccttggctagttgtcgtttacgtttctgattcgccttatactgggcggctttgccgggatgctccaacatccaacggcgatggtattcagccatctcacgttgatgggcggcggcatacttacgagccgaagcccgagcctgagccaaatgctccgaccggtaccggcgtgcatgctcattgcgtttctcacgattacgagcgttccgccgattcgccagatcacgcagatgctgcgcatactcggggtcggttcgacgccgttccctgacacgacagttccggcacatgccatccttgccgacccggtacgtgcagccgcaccaatcgcatttcggatgacgttcagttatcaggccggacagttcgccgccgttccggcaatagtcgatgaactcctcgtcggtcatgtcatcgacgttcacagccacacctccccattagtgaacctgcggaacaacacagggtcgagcttgtacaacgtccgccgaaaactgcgggtcacggcagaacaggatgaacaacaggcttactgcttcggcggttcgcatcgcgtccaacctcccttatcgtctaaaagcacccaaccatgttgggcggtgagaatcggcaccagttcggggtgatcgttgaaaccgctcacgatataccccaagctcatggcctcacgcggatgggcgtgaatccacccatgacatcccgtatcgccactcccacacgccaagatgaggttcgacgcctcatgcagtcccggccacttgtgtgaccggagtctgcgatgatgccggctgaaaccgctccagtggaatggtttgccgcagcggacgcaccggtattggtcgcgtgcgtccaccaaatccttgacgtgttgggatgggttagatctgcccattcccgtattcgtcctggggttggctccacgggtccgcaggctgctgatactgctgttgcggttgctggaagccctgttgcggctgctggaagccttgctgatactgctgctgcgactgttggaaaccggactgctgagactgctgggccttgggtttcgcgctcaacaccgcaatggtgcgggccgcgacatcccaattctcataccgtttcccatccttctccgacacccttttggacaagctgccgttcacaagaaccttcacgctcatgttcggctgggacttcaactggcgaatctgattcaaagcatccttcgcctgattcgacaaaggacgcacgccatagaactgaggctccttgtcaacccactggttcgtgttcttatccgtgtaacccggatggacgctgacgttgagaatactggaatcctgaaaatccttgatctctcccgcatatccggtaagctcgatgcttggttctccggccattgcgcattcctcctgtaattgttcgtcttgtgtttctctatggcccgcttgttgcagaccagcatgtgtgattgggctccggcgcaatcaacggcaccgcatgtggggcattgggggagcgtgatcttgtccccgtgagcccacaggcatctggcgcacttgcagcccggcctcggggtgaaagtcacgaggcctccaccagactcgtctccgccaacggccatagattctgttcgtcggcgagacgtttgaaccgtccgtaaccgtatacgggcgactgggtggactgggccggagaaccgtcatcggtgaacacgcgcatgaggttgttctgcttggcgtcgaaatgccatacctgtttcgcgttatccttgtagaagccggtcctcaacggccatccaaacttgtcgaaggtcctgtgaaccgcatactggaagtcttcgtcatacgcccaccagccgtccaaagcgccgaactcctcggcacgcaggtacagggtctggccgttctcgcagtagggacgtacatcgaccgccgtgtatctgttgccggacttcagcaccaccgtgtccttcaccatgaccttcgtgatgtcggtgatacgctcgccatcatcttccgttgcggcttcgggcttcgactcgtagaggcggatattcctcacatattcttgcggcttgacctcgccatcgcatacccagaacaaggcgaacacggtgtcatcggtatcagggaacaccacgctccccagcacgccgaacgtccggtggtcttgaatcaggtagctgagaaaagtcatatcggtcgatttgcttatatccaatagatttccggcgaaatggccttccggcacacggccattgggctcgtcgtgttcgatgctgtcgaactcgacccacatgccttccttcgcgtccttcaaatcaatctgcttgctcatttggagcctccttctgtgtctcggccttctggccgtcgtccgtctgagtccgttgttttatgatctgcgcttggagcgcctgtgtcgcggtctcgcattccgtgagcgtgatgttattcctgttcacgtcgcggcgtcccacgattcgacgcagctcgttgttgaagtcccgttcggaagccgaagcgaatactgcaagccactgattcttcgtctcgtgcagcttgtccaaatcggtttcggaagccatgagcacgccttcgctgggagccggccattccggtttctcctccttgggttcctctacgacggtcgcctgaacctcttcgacggcatccatctcgtcagccgtgtacaggcccgacaggtcttggggaaaagccttgcgcaaagccagagcctcggcgcatttggcgagcatgacggcgggcttggaagcccacatgctgttcggcacctgcttgcgaagcgtcttgtcgtatcgggtgccgcagtattcgttgaacaacgcgactgcggtgaacaccccatcgccgcgttccacgaccactttcgcggcggagggatggcctgcgcccagccatacgtcatgccagatgccatcctccccgcaccacagggtctccggttccgcgaacttctcacggttatggtcggcggctcgacgggcaatgaggcggaaaccgtcgatggcggtctgaatcgtccacttcgtttcccacacatcgacctgctggccgttctgccactgcttgaccttgttcttacgcccgatcatgtagacctgacggctgaacgggtcaagcccggtacgcttgcactggtggagaaacacggcaaggtcggcgttcggcgcatcctgcactcccatgtgctgcaaggcggcaagctgggtgtccgaccaccactcctgctccttggtcacggtaagatcgttcaccattccggttcacccgcctcgggttcctcctcgacatggcccgacgtgagcagacccatcacgtttgaaggtttcaacgtggcaagcaactcctggtacacgtccttcacgtaggagacgctgatgcccccggctgaacccttgcccagctcgcagccggcaggatattcgccgaccggtttcgtcacctcgccggtatccgcgtccgcgaactccaaggacacgagattgtcgatataggaagcctccaaagcggccttcaccggcaccgtgacggtctcggtcatatcctccttgccgttcgcaagcagccaatccacatacgcttgctggtcaacgcacttgcttttgcccttgcctccaacgcgcagggtgatgtccgcgacatgcaggccgttgatgttgatggaatcggaacggttgttcacgtccatgtcatcctcgatctgggagcgcagtcgttttcctatctccgtgaagccggcgatgagggcgtcggtctgcgccagcagtgtcttgacctgatcgggacgcagttcactcgcgtcgaaatcatccgagataagaggggtgagcttagccattgttcttctccttcgctttgagtacttccttgcccagaaccttgatggtgtcggccaccgagtcgagaaaatcgtcaacgtcctccacgtcgtagacctcgccgtgaagcagggaacgatacgtgcggaactttctgtgtcggacatcattcggggtcaacatgagaacccctcgactgcattgacaattgctcttcacgttccatcaggtgactgtggcgccaagtgcgagccttgccctgcttgtgtgacgcctccgcataatcggccacatggtcacggccaacatccccgacgaccttcgacgcctcgttccaatccgagtacacgcgatcgttcactgccacatacttgtccgcgagataacggacgcaatcaccgagataacggatggctttggcgatggagttgaaatcagatgccatcagtcggcgtcctccgtgttgagtagtctcatacggtcgaatggggtgagttccatgattgtttccctccactgggcttgattatttggtcgtccttctacgccggtgctgacacgtccgaaacccttttattggtttccgacgcaaggacgcgaaggggttaaatttttctgagcgccaagccgggagtcgaacccggtgcaccttggagaagtccatgaccattggaaggcttcgtaggtgcggcaccatgcgcttggctgccaccggacgaggaagtaaaggaataaagaaccccgcccggaagaatcatttgggttggatgagggtgttggagccctcgggtgcgacgatcagctggtcggcattctgcagggcgtcgatgtagtgctgtctgagcacgttgtccgtcagcgagtcattgagcaccttgttggcgtcggcctcgccctgcgccttgatacgtttggtctcggccttggtcttctcgacctcctgctcgttcaacgccttctgcttgtcgatctcggcggcctgcgcctccgcgtacttcgaggtgatggattgcgggtagcggacctcctgcaccgacacctgctcgacgcgcagacccatgcccttccatttcgcggtcaacgccttctgaatggcggcggtgtacttgctgcggtcggtcaacaattggatggtgtcgaacctgccggagacctcgcgtggcacgctgcgcacgtcgaccgccgccaccgatttcacgaacgtggtctgcttgccgtagtccttgtacaggtccgtcgcgtacttcgggtcgagcgaatagttgacctggatgtcgatgtccgcctgtgcgccgttcttgtcgttgacggtgacctgcgggcctcgtgcggagcctccgtcgtagtcctccttgcccttggccacgtagctgatgacgttgttgcgggtgtcgtatttcacggtggactgccacgggagcttgccgtgaaatcccgcgtcggcggaatagccggcgatggagccgcccatgttcttcaacacggtcacctcgcccgcatcctgcgaatacaggcacgcgggaaccatcagcagacccgccacgacgaggggaatgaagccggaaccggctccgtcgccaccgttggcgagtgcgacggctatcatgccgactccgatgagcaggagtattacggcgagtatgaaccagatcatttttgtgttcctttcgacaatgcgaacgagagcatgacgggcgaacagcacatgaagcctgcgagaatgctccacgggcccgcatagggttgcagtgagagaatcaggaacccggtcgccgccaacgtcagacaagtgattgtcttcgtgttctcatgccggtgccggcgttcatcaggtgaatgctgccagccggagcagtgagccccatacgttttcctgttcatggcatgtcctttcctcgtggccggactcggattcgaaccgagaacgtccttgccgccaccgtgtttctggtttctgagagatggatgacgagtcctatggtgtggcggcgatggtgcgtgtccagacaccccgaagggttccggccgatggttgccgcagcagatcgcagtatggtaatacttgtagttcggcatgttcgggttctcgcaacggcgcttcatgcttgaccagatcatgtagaggtgtgagcgactctccttctgagtcatgccgtcacctccaagtcaggcgtctcagcgccgaagaacttctcatgcatgtccactgggatggtgagcagttcctcgaaactgactccgagcgcttcgcagatcatgtccaattcatcgactttgaaggccggctggccggcgagtcggcgggatagtttgcttacatcccatccgagtttcgctgcaagccatcggaggcttttctgtgcgatgaagagtcggtatcgaataccggctgttgttagtttctgtgtgctgctcatgtctattaacttagcatatgccaagtttctgtcaagactagacacgccgtatcgcatatgctaagatttaagtatggctaatccaaatgatttccgcgaaatgtctgcgttcgccttggcatttgcgacggagtataaaaagtacatgaaggcgcacaaagtaaagcagcgtcagattgctgaatacctcggtttcaccgaagcgtatgtcagcgaaagggtcaacggcaaaagggccatcgacaccaacgacgtagatgctcttgccgcattgtcgggcaccaccggccgttcgctgatgatcgaactggctcgcctcaccaaggaaacattgcgccagccggtatccgagacagcctcggtggcgtcccagctcgaaaaggtcataggcaagaagatacaggtggagaaggccgcttatcgggatgagaacaagcaggcggagtccgggcgtgaaaacatggactgacctcaccattgaggcccgacacatgggagtcctcatagaggataaggagttcgacgggacgcagtgcggggaatacgatcccgatacccgcaccgcgtacatcgaccccaccatgagcatggaacaacgggtatgcacgttgcagcatgagcttatccacgcaaaacacttcgatgacgggctcggattactgagccgggagaaagaagaacgcctcacccgtaaggagaccgcgttctctctgattaatcccatcgaatacatgcgcgcggaagacctgtacgggggagaaccctacgcgatggcgcaggaactgggcatcaccgtcggcgtcctgttggactaccggcgatggctgcatgacaatcttgccgtacgggccgcatgattatgtaccttatccgtgtttcttgcaatcagggaacacggttcgtggatacaattagctcaccaaccccaatggagagaagagacaaaaaatgagtgaaccagaacaaccacccgtaccggacccatcgcacaagactgaaagcaagggtaccgtcaccctgaaatggtggcagcttctggttgcggcgattgtcgtggtggcgctgtcggtaggagttgccgttgccgtgaacacagcaatccgcaataatactgatgaagccgcctcgtccaaggactacaagaaaccagaaaaggcaaaacctcagcaaacggagaagcccaagacaagcagccgaggcaacctcatcaaacgaataggcgacactgccagcatctataagagtcaggcagacaaaaccctactcgcttcatggaccgtaaccaacataacccttgacgcaccatgcgtcccggcttacgaaggagctgaaacaagccctgcaaacggtcatttcgtcgttctggacatcaccgttgaaacaacttccgattttgattcggattcctatgggcctttgggactgggcgctcccggctattggacgtatattcaaaatgatggcacccagtggaacggcaatctcgatggaaccagttcaaagataacaacctacacatgcctacccgaaaatcagcggcttccccagataataggccaaggggtgaaggctcaaggcaaggtgctgtttgatcttccgtcaacggatggatacttggtctatggcaatgagagcggacatggctgggaatatcctttagctggacatgccagtgcctgattccacagcataatggcattaatggtcccgtcctcctgtactaaggaacgggaccatttttctgaagccgggaatatgctcacgctttccattcgatctgcttcaaatcgagcccgtcgcctatcgtctccatgccgcgcatcaaatcctccaccggcacggtgcggtaatgctcgctcatggctatgctcgaatggccgacgatgcgttggatgatgccgggatcaaccttcatgtggaacaggagcgatacgacggagttgcggcattcatgcccgtaccggttctcgtagtcgggtatgcccgccctgcgcatgaggtcgcgaaacgaggccctgtcatccaacgcggccaacggcataccctcgcgcgtcctgaatatcaggttgtacgggttcgggatgatattctccgtggcctccagataccggtgcacgacggtgcccaactgggggattatcggcacgaccttgcctctcgcggacttcggcggcgtcaaagcgtaccccttgcacaggtgtatcatgtcgtatccgtccggcaccctccaccggtatcgggggcagctcgaaggccgtttgaagccgcacgggtatcttccgtccctgccgggctccccgcacccgtgctccttgtcgaggctttccagtttccagttcaccgtgtaggtgcctatccatatctcgccgctgtccggggtttccaacgtcttgtcccgccacaggtcgagatcgtccaatgtggctcccagtatctccccctgcctcatgccggtgagcagacgccaccattggcgtgcccccagaaacaggtcgtcggaggacgcttcgagcatgtcctgcatctgctccacggtgaacgccttgcggtcctgcgtgccgctgcgcctgtccgccgacacggccacgggcccgttgatggtgcgccggtccccggccaatcccgtgtccctgcgtttcggccttgccgcgctggtgaccggactggtgggtatcagccggtcggccaccgccgccttgaatatctggttaaggatgttgtagaagccaagctgccggttgtatgagcatggggtgccgtcgaggttgcgcatgttggctatcatgcgctgcaccgccgaggcggtcacttcgcccagcttctcgttcgcgtacttgcacaggtgcacgcttatgaggctcgcgtagttgttgatggacttgggtttcaggtcgcgtcgtttcagctcgaaccagcgttccgcgtactcgccgagccgggtggcgcggtctacgcccatgccccattcggttttctccttgagggcttcggctattttcctgtcgcattccttgtaggtcttggcggacacccatcggccgtccaccttggcctgccagttcacgtatgtctttaccgtgccgtccttgagtgttttccgctgctcgtggcggatggggtagaccgctccggttttccttatcctaggcattcagcatccttcattctccaacattctccaacaaacaatccgtggcgaatggtattccaatggtataccaatcgtatcaaatcgttggaattccgccgttctttccgtgggggccgttgatttcattatacgttactggatgtggaaggtgtgctgaactagcaccttttgtttccgactaagaccccttagaatgtcaacaattccaaggggtcttggcgtattggaaatgttcctggctagagaggtacagatggatttagcaacatttcgcaacaaataatatgatttaggtcttctgcacgttgcgggggttggttatggttcatccagatgagaacaggagcaaacctatgagcaagatgagtgacatgacggaatactatgtttcagcctaccgtttgccgtcaggcttcgagcattgctcgaaactgaagccggtggcagaggcagcgacggcgttgcgtcggtggtgagacaagacatgagcttctggcgacgctgggggatgttcaatgtcagtaatggttcaaggtttggactgctgacgtcgctgagacaccttagcgtcgttaacgggtcaagttctggcgatcaaacgacggtaaaaaggggcttagcgtcgttagctgtacataagttggcacggcaacgacactggagcgcgtgatcgtcggtgccgtgccaaactttggccaacctccgacaaatgagaaggactaacgtcggtggctgctcaaagtttggcgcgctggcgacgctgtaagaaaaaagtgtggagtcgaaccggcaatagcatttattcggtttgttctctagtccaattgcgtcaggcaaggcctgttgtaggctcgggtacgacgggctgtagcgccgaataaggatgaacgggaacagaacgaagacggactgagacgaaccgaagcggtaccagaggggagcggctcatgcaggtggtgttggagaacaacatcgtttttgtggtcatcgagtatttagcaatcctgtgttggggattgtcgggcggacttgccgccattcgcaagggctacgacatcttcaccatcatgctgtgcggatggcttaccgcactcggcggcggtcttgtgcgcgacgtgatgctcggtgccctgccgccggtcggcatcaccgacaaaggctatgtgctcaccacgctgttttccggcattatcgtggtggtggcccacccggagatcaccaaactcaaatggacgatgactgtcatcgatgctctgggcctcggactattcgcagtcagcggcaccgcaaaagctctggcctacggttcctcaggcatgacagccgtattccttggcatgttcacagcactggccggcggcctcattcgtgacatcttcatcggcgatgtgccaatgattattcgagacaaacacctctatgccgtgccctcgttcatcggttgcattctgaccgtgcttgtatggcgtggtgtgcactacggttggttcgacatgtgctcggaaatgctgctcgacgtgctgatcgtcatcatcgtggtggcgctgcgcctgctctcggtcggcttcaacgtcaccttgcccggagccgtcgagcgtcatcgcgtctacctgcccagcgaaagccgatatctcaagcgcccggtcatccatccgcacgccgataccgtcgatcccggcgataccaccaaggacgaagaagacaagcctcaggatgatttaagaccgcctcagggctaactgccttcaaagaggtacatttggccttctgcaaaatgacaactgctttcaaagaggtacctgaagcacgaaacgtcgagtataagcgttgcaatgacggcgtttatacttgggctttctcggattcggtacctttctgaacggagatgtcatttcgcaagaccgccaatgtacctctttgaacggagatataaaaagtcccgcaagccagatgacttgcgggacttgctaaaaccttaagaggcttatgctcacagagcgttgatcgcaacagcgaggccggacttgcggttggcggcctggttcttgtggatcacgccagcgccagcagccttgtcgagcttctgggcggcaaccttgtaggcggcctcggcggcagccttgtcaccggcggcgatggcttcgcgggtggcgcggatggcggtcttcaggccggacttcacagccacgttgcgaaggtgcgccttctcattggtgagcacgcgcttcttctgcgacttaatgtttgccacgtttactccaaacgatgtgtgttataaggacatacaaaaggtagaggatagcatgagccccggaaaaacccgagcaatgccacgccgaatacagtccctcggctacactaggtgaagtttgagtatatgccaagaggaggaatgcgttggtcgtccaacacaatcagccgggttccacggatcagtcggtgattcgcaacttctgtatcatcgcgcacatcgaccacggcaagtcgaccgtggccgaccgcatcctgcagttaagcggcattgtgcccgagcgcgagatgcgcgatcgcttcctcgaccgtatggatatcgagcaggagcgcggcatcaccatcaaatcccaggccgtgcgcgtgccatggacctttgacggcaccgaatacacgctcggtatgatcgacacccccggccacgtggacttcacctatgaggtgtcccgcgcactggccgcctgcgaaggcgcggtgctgctcgtcgacgccacccagggcatcgaggcgcagaccctgtctaacctgtacatggccatcgaccatgatctggccatcattcccgtgctcaacaagatcgacctgccgtccgccgagccggacaagcatgccgaggagatcgcaggtctgatcggctgcgagccgagcgacgtgctgcgcgtctccggcaaaaccggcgaaggcgtggccgacctgctcgaccagatcgtcatgga

SEQ ID NO: 1422 - DNA, 17961 bp, Unknown
  R257_15m  MAG No. k141_13917
gcggagtcgagcacggtgcgggagaccgggccgatctggtcgagcgaggaggccatggcgatggccccgaaacgggagacgccgccgtaggtgggtttgacgcccacggtgccggtcagggcgccgggctgacggatcgaaccgccggtgtcggtgccgagggcgagcggggcttcgaatgcggcgaccgcggaggcggagccaccaccggaaccgccgggcacgcgctcggtatcccacgggttgtgggtggtttggtaggcggagtgctcggtggaggagccctgggcgaattcgtcgaggttggtcttgccgagaatcggcatgccggcggccttgagcttttcgatgacggtggcgtcgtacggcggcacccagccttcgaggatcttggaggcggcggtggtctcaatgcccttggtgacgatcatgtccttgatggcgatcggcacaccagccagctcaggcagggcggccttgtcttcggcggacttggcgtcgaaggcgtcggcctgctcgagagccacatcgccggaaaccttcaggaaggccttgatggacggctcggcggcttcgatcaccttgaggtgggcttcgacgagctcacgagaggtgacgtcgcccttcttgatggcagcggcctgctcggcagcagacagtttgacgagagttgcggtttcgttgctcatcgattactcctcgcttcccaggattcgcggtgccacgaacatgccggcctcggtcttcgggccaccggcgagcgcctcttcctgcgtgagcggggtttcggcgacgtccgggcgcaggtaggcttccagaggaaccgggttggcggtcggcggcacatcgtcggaggcgacttcctggaccttgttgatggagtctgcgatgacgttcagttcgccctgcagacgggtgatttcctcatcggtgagcgcgattcgggccagatcgcccaaatgcacgatttcttcacgtgaaaatgttggcatggccataactatatgagccgtatgtgacacgcagttgtcgggaatcctcattttcccgcctattggagcccttcagcgaatcagaagctcaagccggtcgagcatttgccccgctgctggcttcttcggcggggcaaaaccgttgccggaccgcaagttcaccttactgagacgactcgcagcagagcaaaaccgcgagctggccgatgaaacgccccgctcagccatcccagcaaaacaaaaccgcggtccaaccaataaaacgctccgatgagacgccccgcagcgaggcaacgccacggcccaaccgcaaatgtgccccactgaagtatctgcatggccaccctaataagctcacaatgagcccaaacacacctacatcgaacatatgaacgacaatcgccctgcgcacctcgccagttatccacattttgcatacccacccaaaagaatccacataatcagtccaatacggtcagatgcctgataatcaggcaaaaacacacatctaggcaccgaagctagaaccacataaccccagacagatagacaccatgttcaccattggcataccgtcgaatcatgaaacatcacaaagcagtggacatactcatcacgaaggctgaagcaacgcaacagtgcgcttatggaacaaccaaggcacaccgctcggcgctggctcggcgcgtgcaggcgcgcgaactcaaacgtgtattccccaacatgtacgccgcttcggaatactgggattcgctgcaacccgacgaacgtatcagacatattgcacgaactcttcataacagacatccggattgggtgttcgccggggtcacggcagcggccatccacgattttgaacaccaatggcatcttcatgctggcaccatcactctcgccacaacatcacgaggccccaacgccagcagtgcaaaggtcaaacgcatcttcacgtcaagcagcacgccagaatatgccaatggactcccggtgaccagcaaagccagaacggtggtggattgcgggctgtccgtcgacttccgatttgcactgcccattatcgattcggcgctgcgcaacggcgtcgccatcacggacattctgaatgtgtgcagcactatgcgacgtgattgcacgccgatattccgcctactgcattatgccaatccggcgagtgagaatggtggcgagtcacttggacgaggcaccatcatcgcaggcggcctattagccccagaactgcaacaaaacatcaccgacccgcaaaccggtgctctgtatcgcgtggatttcctctggcggctacctgagaatcggcttatcgtgggcgaattcgatggctatgaaaaatatgtgaacccggatatgaatgaccgcaagggtgttcgtggtgcagttcaagcggagaaagaacgggagacggcactgtaccgggccaaagtcgacaccattgtccgattcacctatgaggaggtgatgcaacaacatcctttactcaataagctgcgggcagccggcatacctcatgctggaacagtgatgggagctggttaagcgcagtgaaccacggtggtcaaatccatggggtcagagtcaccagaaccatggtcactgcagaaccgccaaagccatagccatgacaaactgccaggaccatggccgaaccggcagaactgccaaagcagtaacccgcgttatttgatatctgatatccgcttttccggtgatgatgagaccgccgatccatgcggcggcagcccaggcgatgagaatcaggccggactgccaccattcgggaatccagtagtccggtttaacggcttcggccagtgtggactgcgcggagctgctgatgcctgcggcgagcaggatgccgacgatgccggcggcaaatgcgaattaatgccgcggcgatggatttggtggcgtagatcatgcctctaatgtggcccatattaggcagatgcggcaggattgtcggcgcatggctacacgcctgatacggcgtgttgggcaatccatgcgtgcatggccacggccgccgcagcgcctgcattaatggagcgcacggaaccgaattgagagatgtagaccacatcgtcggccaattcgagggccttctcgctcaatccggggccttccgcaccgaagagcagcaggcaccgcttggggaaggtataggtttccatcggcactgcgccgggaatgatatcgagggcgatgacgcgggcggcttgaagctccttgatgcgcgcatcacaagcatcgatttcggccagcagctcatgaaggtgcttgttgtctccatccacagccacatcatgcgcatggatggcggcggcaccggccttggctcgttcataggcgatttcaccggcgatgcgatgatgccagctttccaccagttcggcgatggaggggtggtgttcgacgtgctggtacagttcggtcatcaacgcgcccttgcgattccacttatgtggaccgacaatgtgtacgcgcttggcctggaaggcgttggcggtgcggaccatggaaccgatgttgaaatcgtgggtccagttttccaccgcaacttcgaagtcatgacgccctcgagcgtcaagatcggccttaatggcagcgacggtccagtagcggtaacgatccaatacgttgcggcggtcgccgtcattcaacagcaccgagtcgaaacgaccgtcataattcggagaagtcggatcgtcgggacgaggctcgccggggtgggtctcagaccacggcccaaggccgatttcacggaattccggttcacctgaagctttggcagccaaagaaatctggttgggtgcgtgcaatctttctcctcgataacgctattcaccggttcctcttagtcaacttcgcggctcagcccggctgactttatgcgagggaagtcaaaggtggatttaccgcagttcggattcgtcgaagacctggatgaaggggagcgtttgctcgtcgccggtggaggggttgaccacattgatgtctttggcaccgccaccgaccagcgaggcgatggccacgaccttggcacccagctgctccactatgccaaagtcgaggctcagctcattgccgttgcgcagggtgaccagcgagctggtctgcacgtacgacttttcggacagccaagcatccaacagcaccacacggcggccttcgatggaggggcccttgatggacgggtagacgaagtccatcacgaatccgtctaggtcctcgccacgagaggcggcggcctggatcatggcggacaccatgggcacagatgctgcggtcaaggcaccaacagcatcgaagtcatcaaccgaatagcccgcatcttccaaagcgtcaatcagtacatggcccatgacggtggcggcatggtggtcgaaagtcaccgcggcaagttcggagaacggacggcccaccacatgctccctcagcaaggtggctagctgttcacgcggctccagcatggcaaagtcattgtggctcttcgcgacggcgaggtccggggtaccagtggggcggaatccagattcagtcatgactccagactatcgcctgaggcagtcagatgagtatcaccttcatcggccggcaccacttcaggggcggacagttcgctcacattgcctttgtctgattcgatgatcggtacttcctcgatgatcttggtcggttcgattttttgcagcttgcgagcggtgggcaacacacggcgttccaaactggacgcgaacttgttgtaagcgctgactgtcttggtgatctgggtgcccaatttgatggcataatcacccaacgtggagaaccgttcgtaaagttctcgggacaaatcgaacagctgcttggcgtcatcggtgagcgactgctgctgccaggcataggccacggatttcagcacggcccacagcgtgaccggcgaggtgagcgccactttgcgagagaacgcatcatccatcagtgtggggtcggcttcgagcgcggcctgcaacagcgcctcattggggatgaaggccaccacaaaatcgggtgccacatcaaaggcattccaataggccttttcgccgagagcacgtacatgctcgcgcaacgccttggcatgggctcgcagcaaatcatcgcggcgggcaatatcctcggggctggcggtgtccgggatctcgcaggcacgctggtaatcggcataaggcactttggcatcaatcggaatggtcttgcctcccggcagatgcacgatcatatccgggcgcaacgtacgtccatcggcatccgtgaccaccacctgaatgtcgaaatcgacatgttccagcaatccggcggactcgacaatgttcttgagctgggcctcgccccacgcgccacgcaccttgttgttgcgcaatgcggcggacagggaactggtttccttgtccaaacgggcctgctggtcgttgagccccttgagttgggctcccaatgcgcccatttccctcttgcggccctcttcgatctgcgtgaccttgttctgcaaggtatcaagatttttggccactggcgcaagcgcctcgagcaccttgctctgttctttcaaacgtgcttcctgttcagcacgcttggcctcggcgtcccgagcatccgcctgacgcttccgttccgcctccgcagccgcacgctcacgttcctgctgaatgcgaatctgctcagcctgctgcgcctgggcaagttgtgacttggcgaaagccaattgctggttcacgccttcaatctgagcctgtgcggcagcattgcgagcactgagctcagcattctcgaatcgcgcattctccagcgaggtcttggcctcctccagctcctcgcttttgacgcctcgagccatctcctgacccttatggcgccccagcacgaagccggcgaagaggccaagccctgcaccaaccactagcacgacgatgacgataatcacggttcctatttgctcaaacatggtacccagtatgtcatcgatggtgaatgacggtaaatttttaccgaactcgacgatttcaagccgttaaacggacgctcagcagcccacattggacgcttggccttatcacagtcgagcatcaaccgttattatgctgtgtcgtatccgagcgtcagacggcctttcatgatttgccagcgcgcgtcatcatgcggcagaactcgtcacgatttgacgagacgtgcgatggccgcggaagcctccgcaagtttttcatcggccacctcgccgccctggaccgacgcctgccgcacgcaatggttgagatgatcgtccagcagcaataacgccacggatttcagcgccgaattcgacgccgaaatctgcgtcagaatatcgatgcagtatttgtcatcctccaccatctgcgtgatggcgcgcacctgcccttcgatacggcgtaatcgtgcgatgaccttggccttgtcttcgtcataaccatgcatcgcaaaccccctgatacttatccgtcagctgaacacaccccattatataccctctaggggtatagggtatacactgttgttcagtacatcaggagtgggaaggaacagttatggagttcagcatcttctcgaccgtcgcggcgctgatagtggcggccgcattgacatggctggtcctgcgattcttcttcggaacgcagaaggcaacggccggggccatggacgcttccggcgaacgccaatccgcaacaatcactgtcaagggcgggtactcccccgccgtggtgagcatgcgtgcgggtacgccgatcacactagccttcgaccggcaggagaccggcgaatgcacctcgcatgtggtgtttgctgatctgggacttgacgccatgctgccgggcaacgccaccaccgacgtggaactgccggcgttgccgccgggcgagtatccgtttgcgtgcggcatgaatatggtgcatgggatgttgaaggttgagggagaggacggctcggatgagaacacgccccttcctcatcctgatgcttcgtatacggcacctaccgccgtggatgcggcggaggccgatcggcgagaggcggctgaacgcgccaatgagatcaaggcgctgacgaagctggtgattgtgggcgcggtactgacgttgccggtattcgccgtcaccatgctgcatatggccaatcccacgctggtgccgcattggatggtgaacccgtggttgcaggccatcctgatcacgccggtgatgttctactgcgggcgtccgatccacacggtcggcttccccgcgttggcgcatcgctcccccgacatgaactcgctggtctcactgggcacttcggccgcctacctgtattcgctggtgacctgcatcgccccgtgggtgttcccggaaggctcgcgcgaaccgtatttcgaatcggttggcgtggtcatcaccttggtgctggtcggccgcctgctggaaaccaaggcccgcgaaggcaccggcaaggcggtgcagtcgctcatcaaactgcgcccgcgcaccgcgcacaaactcaacgccacttccgcagacaatgcagaccatatcgaatggcgcaatccggcgaacttcaccgacaccgacatcgacgccatcgccaccggcgacctgctggtcgtcaagaacggcgagcgcgtgcccacagacggcatcatcgtggccggcgaggcacgcatcgacgaatcgatgatcaccggcgaatccaagccggtctccaaaaccgcaggcgacccggtgaccggggccaccgtgctgctcaagggcgactgcgtgatgcgcgccacccaggtcggcgcggacacggtactctcgcagatcgcggcgatggtggcccgcgcccaggcgaccaaggcgccggtgcagcagctggccgataagatcgcccggtatttcgtgccggcggtgatgatcatcgccatctggacgttcgccatctgggtgtcactgggcccggtgccgcaactggcgcatgcgctggtcaccgcggtcagcgtgctgatcatcgcctgcccgtgcgcgctgggactggccacgccgctgtcggtgacggtctcactgggcttgggcgccaccaacggcgtgctggtcaccagcgccaaggcgctggaacaggcgcgtcgcatcggcaccgtggtgttcgacaagaccggcaccatcacgcgcggcgtggtggacgcggccgccgactgggacaagccgagctacgagcaggacacagtcaaggaaggctcgcgcgaggccatcgcggcgttgcgcgcacgcggcatccgcacggtgatgctatcgggcgacaaggccgaggtagccgggcgcatcgcccgcgaagtcggcatcgatacggtgatctgcgaggtcaagccggacggcaaggcctactggatcgccaaactgcagcgcgaacgcgacgaggccgccgtcaagtccgcggacggcacctcccgcacggccgcgcaatcccgcactctgattgcgatggtgggcgacggcatcaacgacgcccccgcactggcccaggcggatctcggcatcgccatcggcaccggcacggacgtggcgatgcagtcggcggacgtgaccttgatgagcggcgatttgcgcggcgtcatcaagaccatcaacctgtccaacgccacgatgcgcaacattcgggagaatctgggctgggcgttcggttacaacgtcatcggcattccggtggccgccggcgtgctctacccattcaccggctggctgttgagcccgatgatcgcgggtctggcgatggcgttgagctcagtgtgcctggtgctgaacgcgaacaggctgcatgggtcgaacatcaacgcgggcgttgtcgatggcaccgctggctcgggcagcagcacggcggatgtcgaatcagccggatcggccgaatcagccaacgccgccaacatcaccggctccgccacatccaacgcgcctcacgagccaaccgtcatcatcgacgatcgcaccacgctgaatcacaccaatcacgcatctgaccaatccaataatccaaccaacaaggagaacactatggatatgggaatgcacatgcaccacaccgcccccgcggacggcgaaaccgccaccgacccggtgtgcggcatgaccgtggcggtgaacgccgacgcgatcacgcgcgagtatgagggcaagtcctattacttctgcggcgaacactgtgccacgaacttcatgaaggccccgcaggtgttcctggagcagtagcctctgcgtttacctgattcaacgacaatggcctccgcccaaaacgagcggaggccatttgcatatatgaatcaatcaacgaatcagctggcgaagaagaacacgaacagccaagcgccgatgatggcgccgacgatcggggccacgaccgggatccaggcctcgccccagcgggaggagcccttgtgcgggatcggcagaatggcgtgcagcagacgcggcatgaggtcgcgagccgggttcaggccagggccggtcgggccacccatggaggtcacgaggccccacacaatgaagccgacgacgatggaggcggcggcgtaatcctgcttgccccaagccagggacaggcagcacagtgcgccgaagacgagcaccagggtgccgaacatctcgttgaggaagtagttgaccttctggttgtccgcgtcggtggtgcagaaggtgccgagaatggcgtcggcgtcctcggtctccttgtagtgcgggtagtaggtcaggtagacgatgaactggccgagcagggcgccgagcagctgggcgacgatgtacggcagcacgtcgctccacgggaacaggccgttgacggcctgggcgatggtcatggccgggttgatgtgcgcgccggagacgctaccgaacataagcaccgggaacatgacgccgaagccgtagcccatggcgatgttcaaccagccggcgtggtgacccttggtgttcttgagctcgacgttggccacggagccgttgccgaagatcatcagaatggcggtgccgaagaactcggcggccagcttggtaaagagagagtattccactgcttcttcttttctcttcgccgcgcaacaggcatggctgactgttcacggcattctgtgtgattggaaatccgttcgcggagccggcgacgcgatttacgctgggcgcgaaagcaaacgtggcgattgtacactttgccccacgacgaaatgctggcaggatgcgatgtcgaatgtccagccgaatgcaatgcccaaaaaagccatcggaatcagccgaagcgaccttgactctcagtggttgcgaatgacgttgcgcaggggtaggacactggtgggcgagacggacagttcgtcgattcccaggcacaggaacgtatcggtcaggctcaggtctgcgccaagctcgccgcagatgccgcaccagatgccatgacgatgggcagcctcgatagtcatctgaatcatgcgcagcacagctggtgaatgcgggtcggcaaagcgttcgagactcggggtctgacggtcacaggccagcgtgtactgggtcaggtcgttggtgccgatggagaagaaatcgacttcggcggccagctcgtcggccatgatgaccgacgcaggcgtctcgatcatgacgccgatctggatactctcgttgaagtcggtgtgctcgccgcgcagctcgcttttggcttcttcaagaatccgcttggcgtcgcgcacctcctgcaccgaggtgatcatgggcagcataatggcgatattgccgtatgctgaggcgcgcaacaatgcgcgtaactggactttgaaaatctccgggcgggtcaggcagatgcggattgcccggtaaccaagcgcggggttatcctcgtggtccagattgaagtagtcgacctgtttgtccgcgccgatgtcgagtgtgcggatgatgaccggacggtcgcccatctcctgtgcgacttgtctgtatgcatcgaactgaaattcctcggtcggccagtcctcgcgttccagatacaggaactcactgcggaacaagccgatgccctcagcatcgttggccagcacggcggctacgtcagagggacggctgatgttggcgtacaggcggacccgctgaccggacttggtttcggtgggcttgcctttgagcttccgtagtaggctcaggtgttcctcagcttcggccttcctgcgctggcactcggtcagcgtggcctcgtccgggtcgacgaacaccgcaccgctggcgccgtcgattacggcaacgtgaccgtcatcagtcgggtcgaaggcgtcgccgataccggtgatggcgggcaggcccatcgtgcgcgccagaatcgcggtgtgcgagttcgctgagcccttggcggtcacgaggcccaaaaccttagcgcggtcgagctgcgcggtctcgctgggagcaagatcttgggcgaagatgatgtggctttcgccgttctgcgcaatcccgttctgcacagtaccgttctgcacagcatcgccttgtatactgccatcctgcgccgtgctatcgcgtttgccttgcagcacgttcatcacgcggcgagaaacatcctcgacatcagcggctcgagcctgcatggtcgagctatccatcgcagcgaacatggcggcgaactgttcggcgacgctcttcaccgcaaattcggcgttcaccttgtcttgcgcaatcaaaccttcgacgcatcccgcatagtccgggtcctggagcataagccgatgggcgtcgaacagctcggccttgttttcgccgaactcagcggcgacgttgtcacgcagttgcttgagctgagcgacggccatgtcacgggccgcgcggaatcgatccatctcagcctgcggatcgtcgattacgcggcgttctacagcatgatcggcggcggcgagcacgcggaccgtgccgatagcaatgccagcggatacgccgacgccctgtatcgttctcattacaggtgctccttgaggaatcgctcgaactctgcggcagcgacagcttcatcgttgccctgcacccgaaccgtaacctcgtcaccttgttgaacatcaagtcccataacaccaaagatacgcttggcatccacggatctgccgccgtaggcaacggtgatgttcgactcatattcccgcgctttggcaaccaaccggccagctgggcgggcgtgcatgccttcggggtcggatacggtgaacgcgaatatctgagacatgacgccgctccttacacgtccggccgtcacgcgcgaagacggcctttccgcaccagctacggactgatgctggaaaaaacaaaaaaccggaatctttcgattccggttgtctgtgcccccgcagggattcgaaccctggacacgctgattaagagtcagctgctctaaccaactgagctacaggggcttggttagatgttgaagtgttccttgcaacaggtgataaatatactcagatttgaagcgaatgcaactctcggcgtgtcgcgtctatttccggcgtttttgctaatacaaaaatcccccatgcggcgcgaaccgcacgggggatgatgcttaagctcagactcttggtctgtgtgattccagcactaggccggaatgactcactcggccacgaccttcacgaagaaggaagcggtgatctccgggtggagggccaccttggcggggaaatcgccggtggtcttgatggtctcgacctcgatggccttcgggttcaccgcggccttgtcggacagagcgatggcgatggcctcgttggagataccaccgaacagcttgccggactcggacaccttggcggcgatctcgacggtggtgccctcgatggcggccttggcggcgacggcgtcctcgcgggtggcgacggccttggccagacgagcgcgcttcatagcggtgatctgagcctcagcacccttggtccacgcgaaagcgaggccctgcgggaacaggtagttgcgggcgtagccggccttcacgtcgacaacgtcaccggagtggcccaggttggacacggtcttggtgagaataaccttggtttcagccattgttcaaagcctccctaactcagcgacccgaggtggcgtacggcagcagggccatctcgcgggcgttcttgatcgccttggagagctcacgctgctcctgcacggtcacgccggtgatacgacgggaacggatcttgccgcgatcggaaatgaacttgcgcagcagcgcgacgtccttgtaatcgatctcggtgaccttggcggccttcagcgggttcggcttcttcttgaacggcttgaccggcggttgcggcctcttacgtgacatgatgttctccttataaatcttgatattgattgctgctggcagcggggaggtaagtactgatcagaactccgggtcggaatcgtcgccgccgccgaaatcggaggaagcgccgaacgtagagaagctaccggcatcagatgcaccggcattgctccacgggtcggccgcaggagcggacgggttggcgggagcggcaggctgctgggagtatccagcgccaccaccctgatagccaccgttgtaaccgccctggccaccggcataaccaccttggccaccctggttgccatagccctgattaggctgctgaccaccctggagaccaccggaacgaccctggaagccgccctgaccggacgactggcgagtcacctgtgcggtggcgtaacgcagggagggcccgatttcatcgagctgcatctccacgacggttcgctgggaaccatcctgtgcctgataggaacgctgctggaggcggccggtggcaatcacgcgcatgcccttcttcagggactgggcgcagtggtcggccaggtcacgccaagcggagcacctcatgaacagcgcctgaccatcctcgaactggttggtctgacgattccaggttcgcggggtggaagcaatcgtgaagctcgccacggtcgcgccgctgccaatagtgcgcagctcggggtccgcagtgaggttgcccacgatggtgatgacggtttcgcctgccataacggtccttcttacttaccttgaataccagctgttcagctgactaaacgcttgattcagcccttacgaaggatcttcgtacggatcacggattcgttgaggttcagaacacggtcgagctcatcgctggtagcgggctcggcggtgtacttcaccacgacgtagttgccttcggtcttaccggcaatctcataggcgagcttgcgacggccccagtaatcgggctcatcgaaagagccgccttccttggtgacgagttccagatactgctcggtcagcttcttcagaccgcgctcatccagctcaggatcggcgatgaacatcagttcgtacttgtgcgcagacatcacccacctccttcggactattcggccacggacgttccgtggcaggagtgtgtatgcgtgttagcccatgacgcagcaccaaaccggcaccgcatcttcgggcaacttggacagtctatatataaggcgggacagggtatggccatattcctgccggtttcgcgatgcccaccattttggccaagcccgcgcagccaagcccgcgcgccatcacccagtattgtccatttcgagcctcgccctatggtcatggcgctgattttgcgggtacgatagtgctcgaagaagcatcagaagaaagggggactatatgttctgtcctaattgtggcgcagctgtgcgcgaaggagcgcaattctgcggttcctgcggcaaccatcttgccgcggcgtcagctccagcagcagcgacgcccgccgcacccacgcccggtcaacccaccggcgccgttcccacgaccgcacagcccgcggctcccgcaccatcgattccgttgcccggcgcagcggctgtgcagccgacgcctcagcccgctgcccagccgcaggcccagcccgcaggcggaccggcattcaccgcaccgaccacggccattccgaacccagggcagcccggcccatcgccggctcccgccgctccggcacaacccatctcttccagcccactggtcaaggaactgttcggcgcccccaacatgcagaccatcggcattgcggccggcatcggtacggcagccgccttggtgctttcgattttccctgcaatcgcaatgaattccatgggcaccgcagcacccagcctcggggccgattcaacactgaaccaagccgttggcggcatgttcatcaccggcaacggcatgaacttcttccactacctgttcctatcgttggtcatgggcctgtctggcggtattcatttcgacatcgtcgacctctcatcctccagcatggacgccagcaacatgatgtcgtacccactggggctcaccggcttggcattgctggtcggcaccgcattcggcgcattcatgctggcccgttccaagagcattcgattcaagttcaccggcctgatctccggctttatcaccggattgctgccggccgtggtcatcacgctgcttgcggccatcgcggcggcaccactcgccagtggcaccaccatcgtggccaaggtgaccggcgccacagtgcgtacgttctttatggcctacctgctctccgcgctcggcgctctggccggctatgcactggcccaatatgcttccgattccaagaatgtgttcggagctacttggcagtgggcacaccgcgttcgcggatacacgcgcacggtggtcagcgtcttgagcttccagctggctttgctcttcatcgtcggcctggtggccctgttcgccgtggcattctcctcaggtcagggaatcctgatactgacgttcccggtcacactgctgatgatcggcgagttcttctttacctggggaaccttcggcgccattacactgaccgagtccggtcagctgccgcaggatctcagcctgttcagcatcaacctcagcgttaccgtatggcctatttggatcctgttcgccgtgttcctggtcctcaccttctacacggcattgcgcgtctccgcacgcaacctgtacgaccgtgcctacatgggctggcagcactgctggaaagccccgatcgccatcatggtgttctgggcgattgccacgctgctgatgggtactatgggcaaccgcacctccgtcacgcaagttcagaccaccggacctgccatgtggtacttcctggtcatgggcctgtgggcattcctggttgaggtcgttgcactgacgttcggcccgaccatggtggtttccatgccgggactgcgggccctacttgtaggcggcactgtgcgtgccacgcctcagcctgtggtcgactacatctatgccagcggcgcaatggtcggcaagtggcccacgtggggcacgccaagcgccggcgtgggtacgggcgcaaacgctgcgcagcctcacgtcaacgtcacgccgacgtccgccggccagcctcctgttgctggtgtcggtgtacccgcgcccgctgccccgggtgctccggccgcccctgcaacccccggtgctccgggcaccacattcgcaaccgcggctcccaccactcccggagcggcaccggtagccgcacctggcgcgacctccaccaccatgaatgagcagcagaagaagatcttcatcatcgttggtgccgtggccggcttcctcgtactgttcggtatcgtgtatggcgtgctgtcttccgccgtgttcagcgcgaagagcgtggcgaacagctatgtggccgccatctcctccggcgactacgacaaggccaacaccatcgccgatcctcacgtggatacgaaccagcgcgcactgctgaccagcaaggcatcctcgggcgagaacacgcacatcaccaacgcgcgcatctcgcagacttccaacaatgccgatggcaccgtgagcgcccagctgacgtacacgcttgaaggcaaggaggtcaccggcgattccatcaagatggtggccaacggcagcaagttcctgatcttcaagaactggaccgtcgccgaaccgttggtcaagaccatttcggtatatgcgccaagctcgctgggcagcatcaccgtcaatggcgtgaccgtaacgcccaagaacgccgtgaacaacgacgcggacgaaaccggcaactaccggctcaaggtgtaccccggcgtctacaaagttggcgtggtgaagtccgactattacaccgccaagaccgtgtctctgagcaccaacagctccgatagcggcactcttgacgctcagcctacggacaagttgacgtcggaaatcgacacggcggtgaagagcaagctggatgaatgcgcggcttccaccgatgcggaaccgcagggctgcccgttcggctactacacctccaattccagccgataccgcaacttcaagtggacgattgacggttatccgaaggtcaccagcgtgagcctgtcggatagctcgttcagcaccgacgaaggtgatgtgacggcgaattacgagtaccgttacagcgatggctgggaaccggaagacgattccagcactttctcggtgtacggcaccttcaccatcaaagacaataaggtcagtgtcgagttctccgaataatttcggcaatctcaacactcttacgaaataggcaccccgccgtggcgttcgctgcggcggggtgcttgtacactggttaaggcgtaaatcacacagcgactcaaacaaaggatgcgaacgcatgtcggcgattcttgaaggcactccggataaacgactcgtattggtcacgggccgcgcctaccccgagctagctgagaaggtggccgaatgcttgggaaccgaaatcctcgaaaccacgtcctatgactttgccaatggcgagatgtacgtgcgtttcaccgaaccggtgcgtggtgcggacgtgttcgtgctgcagtgtcattcgggcgatatcaacaagtggatcatggaa

SEQ ID NO: 1423 - DNA, 54315 bp, Unknown
  R257_15m  MAG No. k141_13966
gcactgccatgccgccgctttctcgcttttggcgacgtgccagccgatcacgtgcccgccggccaccgcgatcaggaccaccgcgtcgcggtgcaggtggatgccgtccacatgcaccacatgatgcacctcgtccaccagcggcacgggcggccacaggccccacatgagctcgcacctgcggcgcagcgtgcgtgccggcagccggtgctcggcctgcgactgcttcgagaacagccaatccagaccgcaccgcagatcacgggcgctgttgtcgcgcgactgggtgcgtgagctcccacagccggcgttccggcaccgccacctgatccgtcccgagctcgtccttccgttccgcttcatcggctcgccgcacacggcgcaacaaggtgtgttcatccacccaatctgccacgccaactcgaaagtcactcacccgttgtgccgcaaggcctgaccggccattccggacacacattctggccgacctcgagttccccgcccatacaactcgaacaggaggaacgcccactgccacaaaggaacacaagccaaaacggacacacattttggcctataaccctaaaagtgtctattccctcgtgtcatggtcaggttgatcgcccggcccatccttttctgatcccgaacccgctctcgtaggcgtcgacgccgtcggtcggttcctgcacggccgtcatggtgccgggcatgggcccgtcattcccgaccggcttccccttcctcgtcctccggtgttcaggcgtgacgagcgccatggggccgggctgctccgtgagcatgtacaccgtccattcgcagcagcgtctcatatgctcctccgacaatccccggtggtggtcgagcgcgcgcttgaccacggcgttgacgccgccctccagctggttggtcgtcgacggcagcgggccgccgctcttgaggacggccggatcgcagaacgcgaacagcacgccggcccggttcagtctgaccaatcggaagtgggcgcggcgcaggcgttcgtgcgtccgccgccacttgcgtcccctcgcgtgcatgggatcctgtttggcggtggtgcgctccttgaagtgatcgtcgtgcctgccgtgccagtcgttgagctccttgagccatgcggcgtcctcgtcggccgtcgtcaccctgacgagcctgcgggcgagtccgagcagctccctgccggcctcgctcttgggcctgttcgtcaggtacgcgggtgttgcgcagcacatgcaccaggcagcgctgcacgttgcaggcgctctccgcgccgcgcagcccgtccgttatcggcacgtccggagcggggatgcgcgagaacaacgccatataggcggccttgctctcgttcgagcaccactggaagcccagcacctcgccgttcccgccgtcgatggctatgaccaggcgccagccgtggttcatgtacgtgccatccgccatcaccgtatgatgtttcaccctgcacggcgggatggcgggccggatgttccggcaccacgcggtgcgcttgcgcagggcccgcgaatcgccgttcgcgtcgcacgcggactggctcgcgcggccgagcagccatccaaggaacgcgtcgagctgcccggcccgctccgtgttctcctgtggcatcgtcgagctcagcgagcaggatgcgcacttccagcgctgcaccccttcgcggtccgaccgttcttcttcatcggccggccgcacaccgggcatttcttcgccttgctggacttcgttctcatgcgtccagcccaccaccgggacgcccctattttcctgccgggaaaaataacaccccggcacgcctactcccacaaggccaaacccgggttataagcaccacaaaagttcctataggccgtgttcgtttctgttctgttcaatgttcgttttcaagcgatacttgaggacagcacacggcgtgttgggcgaaaatctgcaaattactccaacgttatactagttgcgtttgcgcggttttgcgtactggtgtatcttatgtatcagcagtcggtacaaggttgtactaaatagaaagaagtgttcaaagcaaccgattgattcgatgattctcccataagaggtggtttccgcttcgtatgcaccgaacattgtttcagaaaggttgtggttttttttttcgcctttaagacaacgttgtattaactctgtgagaaacagtaacaggaaagggttcctatggcacaagaagtcactgcgaacaaggcgcgtctcgtcgtcgatgacgcatttgaggtcgcgccggtcaacaatcgtctcttcggctccttcgtggagcatcttgggcgttgcgtttataccggcatctatgagcccggtcatcccacggccgatgaagatggtttccgtcaggatgtgattgatctggtccgcgaactgggtgccaccaccatccgatatccgggcggtaattttatgtccggatatcgttgggaagacggcgtaggcccgaagggtcagcgtcctcgtcgtcttgatttggcttggcattccactgaaaccaacgagttcggcctgcacgagatggtcaagtggctggacaagtgcggcggcaacgaactgatggaagccgccaatctgggaacccgtggtttgcaggaagcgcttgatttgctggagtattccaacattcctggcggaacggccctttctgagcagcgccgagcaaacggtgctgacaagccgttcgacatacgtatgtggtgccttggcaacgagatggacggtccttggcagattgggcacaagagcgccgaagactacggcactcttgccgcttcggtcgcggcgggcatgcgcatgatggatcccgaccttgaactcgtggtatgcggttcctcttcccatgagatggacaccttcggtcgttgggaagaaaccgttctcgagaagacctacgaagccgtcaacttcatttcgtgccatgcttattacttcccggcccttaaggaagatggcacccgcgatatgggcagcttcctcgcatccggcgtcgatatggacggattcatcaatgatgtggcggctgccatcgatgccaccaaggcccgtttgaagagcaagcatgaggtctacatctccttcgatgagtggaacgtgtggtaccagcatgatgagccgagcaggaatccggaaggcatcggcaactggccggttgcgccgcgtctgcttgaggatctgtactccgtcgcggatgctgtggtgtttggcgatctgatgattaccttgctgaagaatgccgatcgcgtgcatgcggctagtcttgctcagctggtcaatgtgattgcgccgattatgactgagcccaatgggccggcatggcgtcagaccacgttctacccatttgcggtcactgcagaatatgccaagggcggtacggtgcttgagccgaaactcgcttctggaacctatgacaccgctaaatatggcgaggtgccggtcgtcaattcggtggcggtacgtggcgcggatggtacggtcagtgtattcgtggtcaatcgttctttggacgctgagcaggacttcgaaatcaaattgtctgaaggcctttttgcgaaaaccgtcacggcgcagacgctgcatgatgatgacctactcgccaagaacactctggacaatcagaaccgtgtcgtgctgcacgacaacgacaccgcatcactcgatggagagaccggtacggcgcatgttgtgctgccccccgtgagctggacggcgttgcatttcgcttaatcgtagcgggcgcgccaacaacataactgtgctgcgggatttcgttaatcgcttcgacgaatttccgcagcgcccataactaaagaacaataaggaaagaacaaatgagaatccaaaggaggagctcatgaagaaagtaacccgggttatggcagccattgcggctggcgctatggcattgaccgtaagcgcttgtggcggaagctccaacgcgaatggtgctaaggtcaacagcgataagaccgctaatgacagtgcatcctgcaccaataccgttaagaaaaagggtgtgcagaaggttaccgtttgggcttggtatccagctatcgaacaggtggtggatgatttcaacgaaacccacgatgatcttcaggtttgctggaataacggcggccagggcggcggtgaatacaccaaattccagaacgccattaaggccggtaagggtgcccctgatgttattcagcttgaatatgaagccatgccccagtttatggccggcaaggagcaacatctcgtcgatttgagccaattcggtttcaccgatcataaagacgattacaccgaaggtgcctggaagagcgttcagctaggttctgaagacaaggtttacggtgttcccgtcgaccttggaccattcgtcatgtatgtgcgccaggacatcttcgacaagtacaacgtcaaggtgccgaccacctgggctgagttcgagcaggccggcaaggacctcaaggcagccggatacgacggctacctgactgatttcgcgccgaatggcaccgcgttcaacattgcactgttcgcgcagaagaatcagaacgtctacaactactcggcgtctgatcccaccaaggcctcggtgaacttcaacaccgatggagtcaaggaagtgctcgactactggcagaacctcgtcaaagagggcctcgtagacaccactgatgccaacacgaacgactggaccaccaacattcttggcggcaagtacgccacatgggtgcaggcttcgtggcagaccggctatctgaagggtgccggcgacaccaatggtcagttccgcatctacaatgctccggtgtgggatgactccaccccgatggtgaaccaaggcggttccgcttgggccgtaaccgatcaggccaaggacaccgaagccgcatacaaggtggcacgagagctgttcgattccgacaaggctcaggaaatcggtgttaccgatggcggcctgttcccggcttggaccaagaagctgcagtccgacagcttcaagaacatggaggaggagttcctcggcgggcagaagctcaacgagatcaccattcccacggctgaggattacaagggctactcattcctgcccttccagacctacgcatacgacgagcaggtaaagacgttcactagcatcgtcaaggatggcaaggataccaccagcaacctcaagagcctcgatgagacgctcaacaactacgccaagcagcagggttacactgtcgaataaccctgacagcaggtgagttgcgggctgggccaacggctccgaagccaaccggctcggcccgcagcttcttcacctgattattggagatacacatgggtaaaaacgcaacaaagaccgttagtaaagacggtatcgtcactcgtcgcggcaatatctggggatggctgttcactgctccattttgcgtgattttcgtgattttcctcgtagtgcccctcgtatatgcattcgttatgtcgctgttcacatccaacgtgttcggcgtccaattcaccggtttgtcgaattaccagagggtgttcactgacccgttgttccttaagggcatggggcgcgtgattctatacacggtggttatggttccgattcagcttggcctagccttgttcttcgctctgctgctcgactccctcaaaaaccgcttcgcatccgtgactcgtttggtcattttcctgccgtacgcgattccaggcgtggtcggagcgttgatgtggggcttcatgtactccaacaacatgggtccatttaccacgtttttcgagttgttcggactgcctacgcctggcttcctcactcctgatggaattttcggcgcgttggtcaatgtggttacttggcagtggaccggctactacatggtgattctgtattcggcacttcaatcggttccgcatgagctgtatgagtccgcgcgaatcgatggtgctacggaactgcagatcgccacacgagtcaagattccgatgtgctccagctcgatggttatggtgaccatcttctccctaatcggaaccttgcagttctacacggaaccgacggtactgcgcaatcaggcaccgacggccatacagccggaatacacgccgaacatgtatgcacaggcactggcgttcaactacaaccagcccaactatgcggcgacggtttcgttcgccttgggactcatcgtcgttatcttcagcgtcgtctttatgaaactgacgaagaaccaatcgggattggaggactgacatggctaagaatgcacgcaaagctgctaaggccaatcacattcgtggcaattcgagagtgtttacgattgtagtgttctgccttgccatcgtttacttcctcattccggtgtggtggcttatcgtcgcctctaccaagaccaataacggcttgttctttggcgcgcacggttcactgtggtttgacgacaagttcgcgttattcgacaacatcaagcagctgaccatctatcagggtggcatctactggcgttggattctcaactccttcctgtatgcgttggttggtggactgggcgcaaccacggttgccgttctcgccggctatggcttcgctaagttccgcttccgcggcaagaagatgttcttcaatctggtgctcgcagctctgatgatcccgaacaccgcgttggtcatccccaccttcctgctgatgtcgaatatcgatatcgttgatacagtttgggccgtgttgcttccctcgctgctcaaccccatgggcgtgtacctcatgcgtatctactgccaggaatcgttgcccgacgagatgatcgaggccgcccgtgtggatggtgccggcgagctgcgcacgttcttccaggtgtcgctgccgattatgaccccagccatcaccacggtatatctgctgtccacggtgggagcttggaataacttcttcctgccgcaggtagtgttgacgaacaacaagttattccccatcactgttggtctgacgcagtggcaggtcaagtcccaggctggtgcggcttctgaacaggtgtggaatttggtcacgtccggtgcgttcatatccatcatcccgatggtgctggccttcctcttccttcagcgctactgggtgggaggtcttacggccggttctgtgaaatcctgacgacttggcgggtcttctccttcggcccgccttcgctctcgacgagcccgacgcacatccttcgcttctttcaatgtgtgtcgggctcgttgtcatagtggcattattgaaggtaaaccgtaattacaatgtgaataatgagcaaattgttaaggagtgaataatgcctaggcgtgtgaccatcaaagatgtggccaaagaagcgggcgtttcgttcaaaaccgtttccaatgtgctcaacagtactggcagtatgcgtgactccacgcgagaacgtgttgaaaatgccattgtcaaactcggatatacggttaacttgtcggcccggtcgctgaaaaccggcacgaccggtctgataggactatctatttttgatttctcgcagccttttgctccctatctatctgatcaggttatcgactatgcgcgtcagcgtgggtatggcgtaatcgttaatacatatggccaaggcggtgctggactggcatcggttatggataatgccgccatgttggcacctgatggatggttcgtgttcattgaccagccccttgccaatgaaggcgcgttactggagcagccgtatccgttggttgttgctagcgactatgaaacatatgacagagtcgataaagtgaccatgcccaatgtcgaaggtgtgcggcaggcaaccggccgtttgcttgatgcggggtgccggaacatcgcgctgttcggtgcatgcgagggcaaccgcgattacgactactatatgaacgctactgaaggcacacaggagatgcgtgttcgtgggtacattcttgctttcgaagaacgaggactacgtccggacatggatatgctgttttcgtggggcctaatgatgagcgacagtggtgtgcgtgccgttaatcacatgttgaagcagggggtacggccggatgcgattgtctgcctgaacgatgctatggcgattggcgtgttgcatggtcttgaggcgaatggtcttcatgtgccggaagatgtgcagcttattggatacgacaatgtgccagaagctcaattctccaatccgtcactcaccaccgtagatccgcatgtgagcgattacgtgaagtgcggcatagatatgttgattgaacgtattcagggctacgaggggccaatacgcacgtattgcactgatttcgagcttatagagcgtggttccactcggctgtagcgtataggtctcgtgccagcagttgcttggtgcgatgcgtaatgcatgcgaatacaggtgttttacctgttgaattgttgaacggcatcgcgtctaccggactatggttcacgaaaacggttactgcgaaactactcgaacaatgtggcgtcagtcgctgggtagccaagttggaacgcggtgtaggcgtgcttggcggccagtgcggcgaggatgagcagcgtatcgctctcggtggaagatttcgattcggtcacggccttgatctgcgcgcgggcgcagtccatttcgatggcggcggcggtcggtacggtctggccgcttgccttgtcggcgatggtggtggggttggccagtagttggtcgatggcatagaccttttggcgggggtcgctctggccggaagaactggactgtgcgccggaatcatcaaaattgccgttcgccagcgacaccagctgctgcccggcggtcttatgcatatcgctcaacgccaacgtagccccagcggtctgtcctcgtgcggccaagacctcgatagcgaatccggcgcgatcctcggccacggccatcgcatccaataccggtcggtcaacgttggcggacgtgacgccatcaagacgcgccggcgtcacctcaggcgcggactgcccgaatttatcggccagaaaagccagccattgcttggtctgcgcgtcacgtaacgttccctcggcaaaacgacccgaacaatacccggcaacgtcaatccaagtcaggggagcggccaggccggtggcatactgctctaataacggcgtgccttcagccggatgggtggcgtagtccgccaacgtcatcgctttctcgcaagggctcatttgagcttccgcctcggcccgtccggccagtcgcggcatcgaacacgccgaaagcgaacacagcatcgcgctcgcgcatagtgcggatgccaagcgccgggtaaaccgtcctgaagagaagcgtgtctgcatggaaacctacactaatagctaactgtgaccactcataggccatgcgccacataacttcataggaggtacggatcgatggaactggacctgacaggaatacacaagctcgccgccgagcaaggaatcgaccccggaaccctggatgatgcgctggcagaggccctgcgcctcgcctacctcaagaccccgcacgccgccaggcacgcgcgtgtggagcttgacgaacgttccggcaacttcaccgtctgggccgccgacgaaatcccggtcgagcccaccgaggacgacccgcaccccgctcccaagctgggcgaggaatacgacgacaccccgcgtgacttcggccgtctcgccgccgccactgcacgccaggtcatcacccagctgttccgccgcgccgaagatgagaaggtattcggcgcgttctccggtcagaagggcaagctcatcaccggcatcatccaacaggatgcttccgacccctccaacgtgcatgtcgcgatgggcgatgtcgaagccattctgcctcgccgtgagcaggtgcccggcgaacgttaccgccacggcgaacgcatccgcgtgtacgtggtgaacgtggcccgtggcatcaagggcccggaaatcgtggtgtcccgctcccacccggagctggtccgcaagctgttcgagcgtgaagtgccggaactggtctccggtgccgtgtccatcatggccatcgctcgtgaggccggcgcccgcaccaagatcgcggtcaaggccaacaccgatggcgtgaacccgaagggtgcgctgatcggccccggcggcgctcgcgtgcgtgccgttatggagaaccttggcccggagaagatcgacatcgtcgactactccgacgatccggccaagttcgtggcagccgcgctgtccccggctgtggccaccggcgtacaggtgatcagcgagaagaacaagaccgccatcgccttcatccacgacgaccagctatccctggccatcggcaaggaaggccagaacgcacgactggcagccaagctgaccggctggaagatcggcatcgaatccgccgaggcccatgccaagaaggtcgccgctgaaaaggccgcccaggctgcggccgaggctgctgctccggaagccgaataggccgccgggctcgaaggcgaatgatcttcagggcgcattgtttcctgatacgagccgcgtcagcaatggcgcggctcgctgcgtctgcgctatccagcgctatgagtatgcttgattggcgtatgtgggctggtgcagtgtgcgcgaaatcgcccacaccagagacgaggtaacacgatcatggtcgcacgatgagacagggtaggcttgccgtcatcaccaactgaccacgcccatgcacgcgcgtggtcacagaataggagtaattagtggcgaaaccacgcgtatacgaactggctaaggttttgaatgtcgatagcaaaaccgtgcttgagaagcttaaggacatgggagaattcgtcaagtccgcttcttctacgattgaaccgccggtagcccggcgtctgaaggcagagttcgccaaggacaacgccaagggcgattccaagcccgcatcttccgtacaaaagcctgctgccaagcccgtgcagcagcgccgcccggccgcaccttcggccccggcttccacttcatcttccgcaccgactccggccgctcccgcacgtcaggcatcgcccgcctcggcacatcagcaggctccgactccgggcgcaccgacaccgcgtccgcagggcggcgcacgccccggcatgccgacccccggccgccacggtcagcacgacaaccgtgagaatggtcgcgataatcgcgaaggccgcgagaacggtcgtcagagtcgcccgaacgatcgccgtaacaacgatcgtcgtaacaaccagggccgtccgaacaatggccagccggggcagcatcagaacaaccgcgacaatgcttcggctccgcgcccgcacgctcagggcggcgccggtgccaatggcggcaatgccgcttcaaacgcgattccgcgcccgcacgctcagggcccgcgcccgggcaacaacccgttctcccgcaagcagggtatgcacaccccgacgccgggtgatattccgcgtccgcatccgatggctcgtccgactgctgatagcggtcgtggcggtcgtccgggccgtcccggccaaggccaggggcagggccgcggcttccgtggcggtcgtccgggccaaggtggtcagggcggtcctcgtcccggccagtggggccacaaccgtccgggtcagggcggcggctcccagggtgccggtcagggcggcgcacgcggcggcttccgtgggggccaaggcggcggcaataacttccagggcggcggcgcaccgagcaacggtcccgcacgtggcggcggtcgcggcggtcgcggcggtgccgcaggtgcattcggacgtcagggcggtaagtcctcgaaggcccgtaagaaccgcctggcaaagcgccatgagtatgaggagctgaaggcgccgaccatcggcggcgttcgcatccccaacggcaacggtcagaccatccgtctgcgtcagggcgcttccctggccgatctggcggagaagatcaacgtcaaccaggccgcgctggtcaccgtgctcttccacctgggtcagatggctaccgccacccagtccttggatgaggagaccttccagattctgggcgaagagatcggctggaacatccagctcgtctccgcagaagaggaagacaaggaactgctccagcagttcgacatcaaccttgacgaggaagaactgcaggatgacgaggatctcaagcctcgcccgccggtcgtcaccgtcatgggccacgtcgaccacggtaagacacgactgctggataccatccgcaagaccaacgtcatcgcacgtgaggccggcggcattacccagcgcatcggtgcctaccaggtcaccgtgaaccttgaaggcgaaccgcgcaagatcaccttcctcgatacccctggccacgaggcgttcaccgccatgcgtgcccgtggtgccgagctcaccgacgtcgcgatcctcgtggtcgccgccgacgatggtgtgatgccccagaccgttgaggccatcaaccacgctcaggccgccaaggtgccgatcgtcgtggccgtcaacaagatcgatgtgcccggtgccaacccggagaaggtccgcggccagctcaccgagttcggcctggtccctgaagagtatggtggcgacaccatgttcgtcgacatctccgccaagcagaacctgcacgtcgacaagctgctcgaagccgtgctgctcacggctgacgctgagctggacctccgcgccaaccccgacatggacgcccgtggtgccaccgtcgaagcccgactcgacaagggtcgtggtgccgtggccaccgtgctggttcagcagggtacgctccacgtgggcgatgccatcgtggccggcacttcgtacggccgcgtgcgtgccatgctcgacgagaacggtcagccgatggaagcggccggtccgtccacacctgttcaggtgctgggcttgacctccgtgccgaccgccggtgacctcttcctggtcgcctccgatgatcgtgccgctcgccagatcgccgagaagcgtcaggccaccgagcgtgccgcccagctggccaagcgtcgcaaggtcgtctccctcgaggacttcaagaagaagttcgccgagtccgagatcgacatgctcaatattgtcatcaagggcgattcgtccggttcggtcgaggcgctcgaggattccttgatgaagatcgaggtatccgacgaggtcggcatccaggtcatccaccgcggcgtcggtgcaatcacccagaatgatgtcaacctggccacggtcgacaaggccgtcatcatcggcttcaacgtacgcccgaaccgtcaggtggcggacctcgccgagcgcgagggcgtggagatcaagtactactcggtcatctaccgtgcgatcgaagacatcgaggcatccctcaagggcatgctcaagccggaatacgaagaggtcgtcacctctcactccgagatccgcgagattttccgctcctccaagttcggcaacatcgccggcgtcatggtgcaggacggcgaggtcaagcgtggtacgaagtgccgtatcctgcgcaacggcgtggccacggtcaacgacctcgagatctcctcgctgcgtcgcttcaaggacgacgttcagtccgtcaaggaaggctacgaggctggtatcaacctcggcaccttcaacgacattgaactcggcgacatcatcgagaccttcgagatgcaggaagtcgagcgcaagtagtcattgttaagccctctctgacgagtgggctgtcagccgcaggctgactgggggagagacatggtagttccatgaattttctctcccccagcctcactgcgttcggcagcccctcgtcagagggggctcaagtctagaaaaggaaattcctatggcaggaaccaacccgcgcgccgcacgtattgcggccttgattcagcgtgtcgtcgcctcctccattgagcgcgaactgcatgacaagcgactcgccagcatcaccgtcaccgaagttcgtgtgaccaacgatctgcagatcgccaaggtctactggacccagctcggccacgaaggccacgaggaaggcgaacgcaagcgcgcccagcaggcgctcgatcaggccaagggtcacctgcgttctctggtgggccacaaggctggcctgcgcctgactccgcagctccaattcgtgttcgatgaagtgcccggcgaggctcacgagatcgaagacattctcgccgtggccaagaagcgtgacgaagaactcgcccgcgcccgcgccaccgcccagtacgccggcgacgccgatccgtacaagcacgacgacgaggccgaagccgagggcgatgagttcgagtccgacgaggagtagtgtgcttcatacaacacccagcggcctactcatcatcgacaagccgcaaggcgtgaccagtttcgacgccgtcgccgccgtgcgcggcgcgttgcacatcaagaaggtcggtcacgccggcacccttgaccccatggccactggcacgctggtcatcgccttcggccacgccacgcgactgctcaacgccatcgtggcgcatgacaaaacctacgaggccaccatacgcctcggcctgcgcaccactaccgacgatgccgaaggcgaggcgcttgtcgatgatgaagcccgctcccgctggcaaacgctgtcagcgcagctgactgagggcggccagagcggcgaaccaacggcgtcaccaactgcctcatggcaaaacctgctcactcgcaccatcgccaccaatttcaccggcgatatcgaacaagtacccaatacgttctccgccatcaaaatcaacggccagcgtgcctacgacttggctcgcgaaggcaaggatgtggaactcaagccccgcctggtgaccatcagcgaattcaccgtgctggatatccgcagcggattcgtagcaggggagcaggccgctgaaccattgcgggaagacgcgaacacgggaacgattcccgcacttgatattgacgtgcgggtcagctgttcatcgggcacctatatccgcgcgctcgcccgcgacctcggcaatgaacttggcgtcggcggatacctgacccgtttgcgccgtacgcgagtcggccgattcgcgttgccggacgataccagcggacttatcgcctctgaggcgatgcttgacacgcgaacccataccgtcaccgcacataccgatcagaagacgttcactaatcgggaagggcaaaccgtcacgcgcaacaagtgcgtattgaacactcctgaaggccttgccggtgacgagcgccgcaactggctgcttgaccatgccctcaccatggaacaggccgctcgaggcgcgatgccggcgcttgacatcacacctgaggaagccagcgaattgcgcttcggccgccgtatcgagcgtacaatcagcgagcccactgccgccattgtgccgcaaacgcatgatgtggcggcgattatcgagcgtgccaacgctcatcaggccaagccggtcaccgtattccccctcgcgtaaagtagacgcggtgaaaagtgcagcttgatacaggccgcgcacaacaacgcctatattgcatgaataacatcgcacggataaaaggaacagcacactgatggatatcacgcacctgacccctgacgccgaaggttcgattgaatggccctcgttcagtaacgacaagaaggccgtggtgacattgggcgcatttgatggcatgcacttgggacatcaggcggtgatcaagcgtgtggtggaactcgcgcaccagcatgatgctttttccgtggtgattctgtttgacccgcgccccgcattcgtgcacggctgggccgcctcgcaccatggcgaggaacccgcggtgcagaacgtggatgccgaagccttgaccagtgtggatgatcgactgcaccgcatggaacagttcggcgtggaccatgtgttggtggtgcactacacgctggccttcgcagccatgtcatacattttcttccttggcagactcaccggcaagctgggcatgcgtacgctggtcctcgggcaggatgccgccatgggcaaggggcgagaaggtgatgtgaagcatatcgccaatcttgccgccgccaccggtgtattcgaacttgatgtggtcgatgaccgtggcccgggtgaagtgcgcattccgcgcgatttcaagccggaagccccgagcgaatggggagagcccgtcgacccgctggccaatgccaccaaggccgagcgccgcgcatggagcaagaagaaccaggccaaggcaatgcgcgcctggagctccaccaatgtgcgctacctgctggctcatggccgaatccaggatgccaacgccattctgggtgctccgcacgccatcgaaggcgaagtggtacacggtgaggagcgcggccgcaccatcggattccccaccgccaatcttggctccgacattgcaggctacattccggtcgacggcgtctatgccggttggctggtagatggtgagaaccgctggcctgccgccatctccattggcaccaaacccaccttcagcgagaaaacaggactcaacgaacgcgtggtggagtcctattgcatcaccgatgagtggattgatctgtacgaccataaggttcgcgttgaattcgtcggtttcctgcgcccgcaggtcaagtttgatggtcccgaccaactcgttgacgaactcaagcgcaacgtcgaagagaccaagcgtcttaccgcctgaggcatatctcagggctatttacgcactcccaaggcatctaaggcgtcggacaatgtgttggactccaccagccgaagtccctcgacatgcaccggcttgcgcagcggaggaatgactgccgtcgtaaagccaaggcgcgcggcctcgcgaaggcgatattccatacgcggtaccgggcgcacctgaccggtcagggaaatctcgccaatggcgcacgtggctcgcgcaatgggttttgacgtggcggcgctcgccagtgccgccactatcgccaaatcggaaccgggctccttggcctggcccccggcaatagtggagatatacaggtcgttggacagcaggttgagcttgctgtgacggtagagcaccgcgaccagcatggcgatacggctggggtccacgccattgaccgcacgtcgaggtgtgggcagcaccgacgtggtgaccagagcctgtacttcgataggcagactgcgatgcccatccaatgtgaacgtcacacaggtgccttccatgggtgccgcgttggccgcatcagggccgtctccagacaggaacaatccggcgggatcggtgacctcttcgatgccctcaccgctcatgtcgaaacagccgacttcatcggtcggaccaaaacgattcttcaccgctcgcaacattctcagcgcggtctcgctgtcgccttcgaattggcagaccacatcgaccagatgctccaatgtgcgcgggcctgcaatcgaaccgtccttggtcacatgaccaaccagaaataccggaatgtcaagcgtcttagcggtatctatcagcgcgcttgccacttcgcgcacctgagtcgaaccgccggaaatgccatcgacctcctgcgagacgatggtctgcgccgaatccacaatggccaaggccggcttgttctgttcgatcagccccaatactgtggacagatcggtggtggaggccagtaacaagttcggctccaccgcgttgatgcgggaagcgcgcaaacgaacctgcgcctgtgattcctcgccggaaatgtacagcacggtattggcatgtaccgacggtgcgttgccctgtaccgacaccgtgtttgatgtgccgccctgcgcccggcccgactgttgggcagaccgctgaccggctcctcggaatgtactgtctcccgccacaacgcgcgcgatattgccggccgtctgcaacagcaatgtcgacttgccgatacccggttcgcccgctatcagcgtcactgaacccggcaccacgccaccgccgagcacacggtcgaattcggaaaacccggtaccgagccgctcgacgctttccgtgcccacttcggtaatcggacgggctgcagatctggcgttgtcggcaaccgtaaccgactgcgtgcgtgatgttcggccgggagcggccgtgcgagagcctgccgccggccgagcctcgtgaaattcctcgaccgtgccccactgaccacactcggggcaacggccgtaccacttcggcccgttccaaccgcattcggaacatacatactgcacacttgatttcgccatggtctcaccctaacccaaacaccagcggacggtaaatttttaccgttcacaagagtttcacgcggcttgcgcacaacgactaagattacggccgtctagcgtcacgcggctgtgagagaatcggggtatgactaatagtgagaactcctcgaccacacaatcccatggcaagttgattgcagtggtggttgccgcagctgttgtgattatcctggcagtgctttcggcctttgtgtggccgggttgggccatccagaagaatgatggcacctccactaccacccaaaacagccagcagaaaaccgaatcatccgagccgatcaagccgaccatcgacgccacagctttgccggatgatgccagtgagctgttgaaggccatgccggacagcgtgctgaattacgcgcgtactaaggcggatgcctccacgacgtggaattccgcatcgccgctcgaggagtacactctgacctactccactggtgatgccgccaaggatgtcacgctggtcgccgcgcagtggtcgtcggcggacaatgccaagacccagtacgatgcgttggtcgctgcgcagaccggcgatgagtcggcatccggcaacgtcaaggtttccggcaacgtcacgggcgcgtacgtggtgaaggccgatgcctccaacagcaagaacgccgctgccatctggcagaacgataccgtggtcttccaagctaccggcaccaaggaagcggtcgatcgcttctaccagaagttcccgatgtagtatctagtatcggctgtcagctgctgcacaaacttatgaacgttggggcatccacattgctgatgtggatgccccaactgcgttcagggcatatgcggactatcgacaacatactggtttcctctgtctggcaacacgtgtattatggtgcaagttgcaacttttacgattaatcgaaatggaggcttcagatgggttctgtcatcaagaagcgccgcaagcggatgagcaagaagaagcaccgcaaactgctgcgtaagacccgccaccagcgtaagtagtcttacctgcaatcaaggcattagaaaccccgtgatcgttatggtcgcggggtttctctttttggctcctttgccttgttcgggcaacagtaaagcccgcacctgcgatgtacagatgcgggcttggaaaagttcagtgatgtgagacgatcacttgttggcgttggtcaacacgcgcgggccgttcgggtcgccgacgatgaccttgtcgaccatgttgaggaacaggccgtgctccaccacgccgaccgtgttgatgaggtcttcggccagctcctgcgggtgatcgatgcgctccaggtgcaggtccaccacgaagttgttctcgtcggtgcgcacttccttgccatcggcgtcaagacgaagcaccggcttgtagccgcggtcctcgaacttcttgatgacgtggccagcgccgaacggaatgacctcgaccggcagcgggaacttgccgatggtgtccacaaccttggactcgtccacaatccacacgatctggttggagttggtggccacgatcttctcccacagcagagcagcgccaccgcccttgataccgttgaagttcttgtcgacttcgtcggcgccgtcaatggtcacgtcgatgtggtccacgtcgtcgatgtccacgatcttgatgccgtagctttcagcctggacctgcgtgcggcgagacgtggttacgccagtgaactcaagaccttcctcctgatgacggcggccgagctcgtccaccaggaacttcacggtcgaaccagtgccgaggcctgcgatcatgccgttttcaacgagcttggcggcttcgatgccggccgccttcttcagcgcatcctgctgtgccttatccatggtttctcctttgccatccttgcctccgccgcatggatcaacggcgtgaagccttatctcctatcctaacgcgaatgagcgattttgtgtcatcgtgtccgattgcggtacatattcgtgtgtttgggtgttagtgtcgtacgaatggtgcgttggtgatggtcaggttgccgtcgccgtccacatagccttcgatttcgatgctgcctttgatcggcatcggctgcccgttgaaatacgggctcgttttcggcgcgggggagaaggtcagcgtaccggataccgtcagtccgcttggctttgcggggtgtacggggtgcgctgattgtacaggttgcgctgattgtgtcgctaagggtgacgaagacttggtctctggccttgtggcatccgtcgaatccgtcgccgcagccggcttgcgcaaacttgccgcatccgccttgccatccagcaccaactgcacgtctggaggcacatcggtgccatgtgcgtattcggagcccagtagcgactgccagccttcaatcggcagatagccgtcgcgcgcacccgaacggcaatcgcccgcataggtgcgtgccagttcatcgaccaactcattgccctcgttgccggcgtgacctttgacccatcggaaatccaccgggccagggcgttgtgagatctcacggtcgatcgcctgaataagctctttgttcttcacaggctttttctgcgaatttttccagccgttcttcttccagcctttgacccacttggtcgagcaattgatggcgtactgcgaatccgattcgatgagcaatggctcagggcccgggtgcgctcgcaaagcttccagcactgcgcacagctcaccaatctgattggtgccgttggtcgcgccgcccgcatcataaccatggtcgtcgtgcttatggccgggcttgccgccggcgttctgctcatgatcggcccaggcccagcccattggcccgtttggattccctaatgcggacccatctgtggatactgtgatagtcatgttctccaccctaacgcaagctgtgcaatctcttgctgaagtggggttgcccagtgcgaggcaaaacaacgtagtgaagagtgtgaataacatcacacctattgactttgcttgaaaaacatgccatcgcgcgtgaataggtgagcgctcacaagaaaaacaagacatttcctctctgcgggtgaggccggcaacaatggcgcatccggtatctggaatgagaataaggggctgtacaaaaccagtgacggcaacatcgaaatcctcaaaccagaggcggacagcgatggttcgacggccacggccgcatccaagggcaccatgcttatcgcaggcaactccaaaaccgtggcactcggtccaggcggcatggccttggctcccggcctgccgctcggtcttggctggttcatccgacgccgcttgggattggatgcctccgacattctggaccgtaagctcggcttgaagtaacggctggttcggacgtgattgctgtcacgtacggatcatgacgacagcgcgaaggtcctcatcggtttacgtcgatgaggaccttcgcgcgcattaggggagtctgttgcgggctgcgctacgcgggtcatgctgcgcgggcgtgctatgcggacaaactacgcgaacaagtcgttcagtgcctcggcaatcgtcggatgcgtgaacaccatatcgcgcaacgtgctggccggcgcgtcaagatccatcgccaacttgacgatattgatcacctcgtgcgactcgacggaaagcagcatcgcacccagaatgcggccagtattgcgttccacaatcgccttcatcagaccatccggtcgccgcattacctgggccttcggcacagcggccaccggcaatcgcttgaccacataatccaatccggccgccttcgcctcgcgctcattcaatcccacgcgcgagtaaggcgtggcgaggaatgtgctcgacggcacatgcttgcggtccttcaccgtgtacggacggtcggaaccattgagctgcgaccacaccacgcgatagtcatccagcgaaatgtacgtgtgctgcgggccgccgttcacatcgcccagagcccaaatgtcggctgctgtggtgcgcagaagctcgtcgactttcacggcaccgcgttcggtgagctccacgccagctgcctcaagatgcagtccctcgacgttcggcgtacgtccggtggccaccagtaccgcgtcggtggtcaggcagaatcgggcttcagccggctcggcgaaccgcggctcgccatcgtctgatggtttcgtttgaacgtgtgacatcgtggcgtgatcggtcgggttgctagtggggctggtggttgttgtagtgtcggtggcgccggtggcgtcggtggcaccggtgatatcggtatgagcgttcccggtgccggcgggggtggaatcgcaagcttgcgatgcgccgcgagtcatacccttcaccgcaacggacaacctgacgccgccgtcagcagcaggcgcgatggccttggtatccgcgttgaacaggaacttgacgccctgcgcttccaactgtgcgcgaatcgcggccgccacatccgcatcctcgcgcggcaggaactcggcattgtgctgcagcacggtaaccgccgtgccgaaatcggcaaacatcgaggcaaactcaagtccaatgaatcctgaaccgataatcaccagtcgctgcggcatatcgtcgagatccatcagtccagtgctggtgtagacgccgggcgtagtgtggataccgggaatatccggaatgcgcggcgtggcaccggtattgatgaagatcttgctggcggtcacggcgaccgggccctcagcggtggcgatttccacgctatgagggccggtgaagtgagcgcggccggtgattacggtgatgttgtcttggtcggcgagcttgtgatagttcttgtcgcgcagcatcgaagtgacgcggcgcttctccttgatagcagcctcgaacgctgcttcgcgggtttcgggagtactgttcgcgccatcccgccgcgcctgttcggcggacaaaatcagtgacttggacggcaagcatccgatattgatgcaggtgccgccgtacatgtcggcgcttgcctcggcgacgacgaccttgcggccggctgcactgagcttggcagccaaggttttgccgcccttgccgaatccaatgatcagggcgtcggtggtgatagtgggggaggtgctgggtgtgctgatggcattgggagtgctgatggacatggttacttccttacgtattcgagtgataagagtgcgttgtgctgatgtgttgtgtgccgtgcggcgtctgttttcttctttgactgccgaagcgttatcgactgatgctggctaggggagatgcgcgggattattagcctttgcgctcgctgaatatctgttcggtgatgtcgtggatggtggtgtgttcgagttgttcgaggcaagtgcggttgagcccggcatagatgtcgttcatcactgcgcccattgaagatgacaccagacagtcctcgtgtacgtcgcccggtgtccagttcactttcacaaaagtggtgccggtggcttccgctaccgcgcgcaaagtgatttcggcggcgggccgggccagagcgtacccgccttcagcaccctctttagtggcgatgagtccggctgaggcgagcggtcgcattactttgcgcacgcgcgccgcattggtgcatatgttctcggccaggatctgactgggcaggtgtgtggcgcgatggtcaaggtagaccaatgcgtgcactgccagtgaatggtcgccgttcatgaaacgacctccttaccgagtcgatactgtaactatgatgtgtacagttatgatactgtaatcatatcagatacagttagtgtgtcaaatcggggttgaagaggtggatgactatgtgtataagtgaggtgtccacatggttatccacaatgaatgtgcgtaagtgaagctaggaccacatacctcggatcggcttccgtttccgcacccactacccatatggtggtgtcatgaacaggatgaccgacggcatcaccaactatggagctctgccaggctctatatacgatcagcctccggaagaatcggaggcagtttttgttccgcccgaatttgcgggatcattttctactgactcgaaatacccgacttctcgcgactcgtcatcgccgaacagtggtgcacatgattctgcagcgacaccgaccatgagcgaaagcctcgcccagcgcagacgcgacatggtcgcacgctgcactgaggaagcgaaacgggcgggcaagaagctgcttttcggcatgaccacttccctcgctctgcaatccgtaccgattcccgccgattgcgacctcgactcggccaagctgcacactgtatccagcgttaagagcaagcggtttcgtacacgccatgcaccactgcaaacgcatatttggaaacatgcggctaaagccgccaatgtggaaatgaaccaacacgtgtttgcgctggacctgtttcacgtatgggcccaacttgccccgtatgtttcttttgagtccctgattgtgctcggggatgccgtcattgctgctacgagcaaacagccagtattggctaaggatcgtgatgctgctgcaatctatcaggatctggtgaagttcgtggagcaatttacccgattcagagggcgcccgtcctgcgttcgagcattgcctctgatatcacctggtgctgattcgcccaaagaatcagaagaacgactctctctggtagcgcatgggattccacggccggttgcgaactatgtggtgccggacgcggcttttgcatctggagctcccataacgttggacttagcgtggccggagttcaaggtcgctgttgaatatgatggcgatcatcatcgtacgagtaaggctcaatggcgccgtgaccaagagaaaaggggtgtgctggtcgggcggagatggctggtcttcgtcgccacggcggcaagtatcgctaacgaggacgctcgtgctgaattcgctttcaacgtggcgagggcgcttgctttgcgcggtgccgtattcgagtttcatgtagttgccatgtctcttgaagagttggcgcagagcctgctgtgaccatgatgtccgaaatggactgatgtaaaggcaatatttgtacgacctgttgttgtggtgtgtgcttgatattgcatgccgttcgattgcgatgcctcgtagtgatggatttcgtgaatgactagtgttcgattgtggagggaaatgtgtcatagtggtcgattgggggtgttgtcggtgcattgagcgtggatttgcgccaatgggtgtgggacgctacgcatgttttgccgatttttgcgtggcgtcccacggcccctcgggtaatggctgtgacgggtgtggcaggaatggcgtctttccggggtttccagtttgagtgtgtgggatgggggaaatgtaaaacgattgacttagctgttgtcccacgcttttgtgggatggcagctctggaatgggcaaattcgtcgtggcgtcccacaacgatgttaaaactcgaccatgatgcaagccgaccgaacgcttcggcggtcatctggccgctgtgaccccacaatgatgatgggaaactcggtcataatataggtagtcgaacgtttcgcggtcatctggccgtcctgccctgcagtgatgttgagaaaatgcagtcacggtgcatgaggagaaccgttgacctgcgtgtttcagtggtcgcgaactgcatatgcgctaaaaaagctctgcagtggattgcatgaatccaatgcagagccttattagttgcggtgaacgcgactaacgcagcgatttcactcgctcagggccttgtcgaccacgacggtggcctcgtcgagtaccttgtccagagcctcgggggagacgaaggactcggcgtacaccttgtagatgttctcggtgccggaggggcgggcggcgaaccagttgtccttggtggtgaccttcagaccgccgatcttggcgtggttgcccggtgcctcggtcagcttggcggtgatgtcttcgccagccagctgcgtggcggccacatcatcaccggtcagcttggcgaacttggccttctgctccagtgtggtcggggtgtcgacgcgcttgtaccaagactcgccgaagcgctcgacctgctcctggtgaagctgggccgggttcttgccggtcttggcagtgatctcggcggccagcaggtcggggatcagaccatccttatcggtggtccacacgcggccatccttgcgcaggaagctcatgccggagctctcctcgccgccgaaggcgacttcgccgctgaacagcgggtccacgaaccacttgaagcccaccggcacttcgatgaccttcgcgttgatcgatgcggccacgcggtcgatcagggaagaggagaccagcgtcttgcccacggctgcgccctcaggccagcccggacggttgccgccgaacaggtactccacgcacacggcgatgtagtggttcgggttcatcacgccccagttcgggcagacgatgccgtgacggtcggcgtccgggtcggtgccgccgaccagatcgtacttgtcccaagcgccggcgttgagctcgtcgaccaggcccttcatggcgtacggggaagacgggtccatgcgaatcttgccgtcgtggtcgatggtcatgaagcgccaggtcgggtcgacctcaggacgcaccacgccgatgttcaggccgtactactcgttgatgagcggccagtagttcacggaagcgccgccgagcggatcgatgcccagacgcacgccggagttgcggatcacgtcgaagtcgatgacgttctccaggtcgtccacgtagtgctcgcggaagtcgaagccctcgacgtactcggacttgatggcctcctcgtagggcacacgcttgatggacttgaagtcgccgagcagctcgttggcgcgagcggcgatggcgttggtggtctcggccggggccgggccgccggtgacggggtcgtacttaaagccaccgtcggtgggcgggttgtgggacggcgtgacgacgatgccgtcggcgaggccctcgccctcgaagcgctgggtgccgtcgaccgcacggttgtgggtcaggatggcctgggagaccaccggggtgggcacgaagtcgtcacgggagtcgacgcgcacgtgcacgccgttggcgacgagcacctcgatggcggtcttcttggccgggccggaccgcgcgtgggtgtcggagccgaggtacagcgggccggtgacgccggccttcttgcggtattcggcgatggcctgggagatggcgatgatgtgggcctcgttgaacgaggtcttcagggacgatccgcggtgaccggaggtgccgaagatgacacgctgctcggggacttcgggatcggggacgaggtcatagtacttgccgataacctcatcgacattaatcagatctgctggggtggcgggctgacccgcattgtttgctaccatgttccctattctgccacgtttttcgccactttgggtactcttatgttaagagttgtcaacttttgtgcgaatcgtgtgccggttgtctagcgcttggtcatttccttctcgatttcctccagcgacttgcccttggtctcgggtaccaagcgcagcacgaacgggatggacagggccgagaacacgccgaaaatcgcgaacgggccgcccacattgttgccgaacgcatcgagcagcacgaggaagaactgggagacgatgaagttgcccagccagttcgccgccgagccgaaggatgagccgatgccgcgcacgctcagcgggaagatctcgccgataagcacccaggcgatcgggccccacgagaccgcaaagccgaggatatagaaagcgatgagaatcatcgtcggcactgccagcacggccacgtcgcccacgaagttcatcacggcgagcaccgcgagcgaaacggtcatcacgatggaaccgaagatcagcatgcccttgcgcgggaaacgatccatgataagcgtggccacgatggtgctcacgaagttcaccacgccgatgcccaccgacacccagatcgcgtcgccttcagggaagccgaagcccttgatgaacacctgcggcaggaagtagatcaccgagttgatgcccacgagctgctggaacagcatgataccgatggcggccaccagcgccggacgagcgatacggaacagttcgcgcacaccacccttggtgtcctgtgcggccacggccttgatttcgtccagctcaatctgcacctgggtctgatccacgtccttgcgaatcagcgtaagtactttgaaggcgttgcgggtgtcgcccttgttcaccagataacgcggggattcgggcagcaacaggccgccgagcagcaacaaggcggccggcaccagcgccgaaccgagcatccagcgccagtcgcggatgccgaagaggttgtggttcaggaatccgaggttggaggcgtaggccagcagaatgccgaaggtgaccatgagctggaacagcgtggacagtgagccgcgacgctccttcggcgccagttcggccaagtacgccggggtcagggcggaggccgcgccgacggcgagacccaggatgatgcgggcgcacaccatcatcgcgaatccggtggaggaggcgcacaggcctgagccgagcaggaacagcagcgcggagacgatgagcagcttcttgcggccgaaccggtcagacagtgcgccgatcgacagcgcgcctgcgcacgagccgatcagcaccgaggaggtgatgaagccggtctgagagacgctcaggccgaagtccgattcgataagcggggaggcgccggagatgatgccggtgtcgaaaccgaacagcatgccgccgagcgcgccgaaggtgaagatgaatgcgctgttgagcgggaagcgcgtggagaagccgtgcgattcggcggcttcgaggtcctcgattgcgttggctgccgcgtttgtggccgcgcccgccactccggccacgccggtttcgatggtttcgattgcgttggccgccgcaccggttgcgctggtttcctgcgccgcggatgccgtctgtttcgatacgggtgatgccgttgtcgtcgtcattgccttgtcctttcgccgttgacggaccgcgcctgttgcgtggcccctctgccgcgtgcaaggtcaggcttcgattgtctgaagtcgcccgaaaacaaaaaaagacctggaacaacgtggaattcgcatattacgatacgcaaattccacgtcgctccaggtcttgcctcgttttgagtaacaaccctgctacgcaacgtgtgtgaaagatagaatacgacttccgcagtcgcgacactccgaataggcagcaaaaaacgatgatttttgacaacgattgcaggattctgcatggtggaatgatgtcggaatgggcgctgcggcaaatacggagaacgggtgtggcgaagcatcatcgcggaacattatggcgggacaccatcgcggagcaccgtagcgcatagttgccgtttcgcgatgctttgccggcattgccgtgcttttggggcacccagcgccgataatggaacacagtggcatacggcagcaaggaggaaccgtggcgaacgcatcgaacgcaacgcctgcagtgattgcggcgcgcatcgtcgatgccgtcggcggccccgcgaacattaccagcctgacccattgcgccacgcgactgcacttcgaactggccgatgccggccatgtcaaccagcacggtcttgaatccatccccggagtcctcggtgcattcccgcgagccggcaatcgttatcaggtcatcatcggcggagcggtcgcctcggtgtacgagcagatcgttcggctgcggacggcgcgattgatgccggcagcgcaattgccatcggcagtgatgcagtcagcgtcgcagtcaacgcagcccactcagtcaatgcagcccactcagtcaatgcagcccactcagccagcgcagcccgcgcagtcagcgcaatccacacagcccacgcaacccgcgcagtccgcgccgtacctttccgacgatgccgcaccatcgcgcgatactgccaccgacgccgaacaaagttgcggcccatccgatacatcccgtcacttcacgcctcgtaccgtccgcgagtggggcagtgccgcccgcgcttgggctgccgcgtttttcgactacctgtctgactcgttccgcccgattctgggtgtactgctcggtgcctcgctggtcatcgccatcgtcaacgtgatcgttgcactcggcatcgtgcctgacggcgagacctccgccggctggatactactcaaggcgatttgggagggtgtgttcaccgttctgccgattatgatcgcctacaatgcggccaagaaactggacgtcgacccctggctcggcggcgcgattatggccgcgctgatgaccccgcagtttactggcgtgatgtccggaatgtccggaatgtccgggacgtccgtatccagcgccctctccggggcgattcaatgctcggccaacgccgtattcggcgccgaaacctgcaccgtgtcggcgttcggcataccgattcaactcaacgactacggcggcaacgtcttcgtgccgttgctcatggctgccgtgctcgccgtggtctaccacgggttgaagcgcgtcattcccgacagcgtacagctggtgttcgtgccattcctctcactggtcgtcgtttttgcgctcaccatactggtcatcgggcctctgggaatatggctcggcggtgggctgggagcggccacagcatggcttaacgcgcacgtgccgttcctattcgcgctcatcatcccgatgctctacccgtttctcgtgccgctcggtctgcactggccgttgaatgccctgatgctgatgaacattcaggcgctcggctacgatttcgtccaaggtccgatgggtgtatggaactttgcctgcttcggtgccaccgctggcgtgctcgtgctggccgtacgcggcaaggattcggccatgcggcagaccgcggtgggggcgttgctcgcgggattgctgggtggcgtttcggaactgagcctgtacggcatccatctgcatcaccgccgcgtctaccgctggctgctcgccggctgcgcggccggcggcgtgaccagcgcggtgcttggctggctgttcccgtccgtgctgccatccggtcagatggtccggggcgtcacgactacggcgttcgccttctcctcgttgctgacgatttcggtgtttgacagaatgtgggtgtacgcgctgtccatcgccgttgcgtttgtaatggcgatggtgctgacggtgctgttcgggtaccgtacgccgccgcgcgccacggaggcgcagatggtctcggcgggcgagaacgtacgctcgcaggatgcagtgagagggattggcgcgacatcgtcggatgcggagtctgcggaagattccccatcgcggcctgcctccgatcggactcctgactccaacgccatcctgtcgccggtcgccggccggttgatgaatctggaagcgactggcgatccggtgttcgcctcccgcgcgctgggggagggtgtaggcgtcgtgccggagacggccggcgagacggccgtgctagcaccggtcagtggcacgctgaaaaccgtggcccggaccggccatgccttcggcattaaaaccgatgacggcatcgaagtgctggttcatgtcggcattgacaccgtcaatatggatggcgagggattcgtcgtggccgtgggcaaaggcgagcggatcgcggcgggagagccactggccaccgtggatttcggcaaagtcgcggcggccgggcacagcgttgtggtggtggtgacggtggtcaacgccgctgaactgaccgtggtcacgccgttgatcggcgacagtagcagcgacgacaacggcggcgactgcaaaaccgtatcagccggcagcccgatcatcgatgtggaacaatgacgttgcgaaaggatgccatggaaatactgcgagtgttcaacaacaacgtcgtgctcgccaaaggcggcgacggcggtgaggtgattctcaccggccgcggactggggttccaggccaagccggggcagacggtcgacgagtcgaaagttgtgcgcaccttcgtgccatcggacgggcgcgaccctgaccatctggcgcagatgctggcggacattccgcccgaaatcatccgcgtggtcgtcgaatccatgcaggagaccggactgggggagcgcgagaccggcagcaccacgctggtcatggccctgtcggaccacgtggcgaatgcggtggagcgggtgcggcgcggcatcgacatcacctacccgctgctcggcgaggtgagcaacctgtacccgcaggaatacgcgcaggggcgtgcgatgctcgcatcgctcaatgcacggctcgacgtcacgctgccggacggcgaggccaccgcgcttgccatgcatctggtcaacgccggcttcgccaccggcgacctgtcctatacgtacacgatgacgggcgtgatccagcaactgcttgacatcatcgaccacagctacggcatcacgttggaccgcagttccgtgaacgtgggccggttcatcacccacctgcgctacctgttcgtacgcatccaccagcaccagcaactgacggacgagccggcaccggtgatgaaggtgattcgtgagtcctaccccgctgcgctgcgatgcgcgcgaaccatcgcctccctgctcgaactgcgcctcgacacggatatcagcgacgacgaaatcgcttatttggcgatgcatgtcgcccgagtcaccggccacgcatcgtagtaacggattagcggattggcgaatcagcgaatcggctcgagtgtaccggtcatttcggcgaaattcgaggtggcatttgaagcagcggcctgcgcggtcttttccagcgcggaggcgtcgggcacgcgcacgatcagcgcgcggtgatccaccgagaaacggatgtggcgggtttccggcagcatgtcaccgtccacctgcgctttggccggcttttccaatgtgatttcggcactgacaccctggacctgttcgatggtcgagttcgtggacagcgggttctgttcgggcttgccgatgatcgtctggtgcaccacgtcgccgaacaggttggcccagccgaggatgccgccggtggtgtcgatgatttcgaagtccagcagaccatcgtcataggatgccgccggcatcagcgagaacatgggaatctggccgcagttgccggccatcaccgtgcggaaatcgagattcttgatggtgtgggtcgagccgtcggcgctggtgactgtcagcgtgccgcggaacttcggcgcgaacaggttcttcacgccgcccacgaagtaggcgagccagctgatgttcgccttgagctcggggttggtgtcgtcgatcatggccgcatcgaagccgatgccggcgatgatgaggaaggcgtggccgtggtcgtcctccgggtggtcgagcagggtgagacggcccatgtccaccaggcgggagccgtgggaggtggccacggtcagcgcggcgtcgatatcgtccacgggaacgcccatattgcgggcaaacaggttgccggtgccgatggggatgatgcccagcgcatggccggtgccggagacggcgctcgccaccgtgcgcaccgtgccgtcgccgccgaccgcgatcaccacgtcggcgccgtcctccagcgcctcaagcgcgcagaccctgccgtccttgtcaagctgggtgtcgtagaagcggatgcgattgagccccttggcctcgcagaacctctggatatgcagccggcgggcttcggcctgcggtttggacggattcacgatgaaggcgtactgcacctcgtcgtcccggcgcttctccagcgtctgagccagcttgcggcggcgctgcgcgcgcagggcgatgacgatgacggcgatgagcaccaccacaatggcgattgcggcgatgatcagaaacacggtgagggcaggctgaggcatggctcctattgttatcggtggggaggtcgtttgcggccatggtgcgccgtacgtgaacatttcctgcacgcaacagccccgtggggcgcgattatggttcaatcgcgtctcatctgacgaaattggccgggtggacccgtccgcggactttcccgggcttccctgtgatttccgcgtgactcccgcgcattcggccattgtcggtgtctgcttacgcggctagtctggtgcccatgcttgatattcaattcatccgtgaacacaccgatatcgtcaaggaatcccagcgcaagcgcggcgagtccgtggaactcgtcgacgaagtgctctcctccgacaccgcacgtcgtgaggcgctgaaggccttcgaagaggctcgcgcccagcagaaggaaatcggcaagaaggtcgcctccgccccggcggacgagaaggccaagctcatcgccgagaccaaggaactgtcccagaaggtctccgaatacaagtccaaggccgattccgccgccgaggaatacaccaccgccatgtggaagctctccaacatcgtggagcccgaagctcccgaaggcggcgaggacgactacgtggtcgtcaagaaggttggccagatttgcgacttcgcggccgaaggcttcgagcccaaggaccacctgaccctcggcaccggcgtggccggcatcgacatgcgccgcggcgtcaaggtcggcggctcccgcttctacttcctgcgtggccaggtggcccgtatgcagatcgccatgctcaccatggccgtggaccaggccgaggagcacggcttcacgctggccatcaccccgacgctggtgcgccccgaggtcatgcgcggcaccggcttcctgaactcccacgccgacgagatctaccgtctgcgcgagcccgacgaccagtacctggtcggcacttccgaagtggcgctcgccggcatgcacgagaacgagatcctcgacctcggcaacggcccgctgcgctactgcggttggtcctcctgctaccgccgcgaggccggcgccgcaggcaaggacacttccggcatcatccgcgtccaccagttcgacaaggtggagatgttcgtctacgccaagcaggaggactcctacaaggagcacgagcacctgctggccatggagcaggagatgctcgccaaggtcgaagtgccctaccgcatcatcgacaccgcagccggcgacctcggctcctccgccgcccgcaagttcgactgcgaggcctgggtcccgacccagggccgctaccgcgagctcacctccacctcgaactgcaccgagtaccaggctcgccgtctgaacatccgcgagcgtatagaagatggcggcacccgtccggtctccacgctcaacggcacgctggccaccacccgttggctggtcgccatcatggagaaccaccagcagaaggacggctccatcgagattccgcaggccatgcgcgcctacatgggcggcaaggaagtcatcgagcccactaagtgggaggcctgagtctcatcgtgctttagctccctttaatgggggagctgtcagcgtagctgactgagggagagatcgctaatagccagcaggcgaatccaagaccgaccgcactgccgaatatcaacatccctcccttctgtataatgaatacttgcgcgtgtgaacgcgcatcaggacaggtgtctgagcggcctaaagagacggtcttgaaaaccgttgaggggcaaccctccgcgagttcgaatctcgccctgtccgcgaaccgaggcctgggcaacatgcccaggccctttttctttttctggaacctgtcttcttgatcgccaccggggtgctgatatattggtttgtaatgccgtaacatgcggtgtccccgttgatatgacgggccaatcggcgtgagccgataagaaaaggcccgacgtttgcggcatcgggcctttgcgttgattaccggcttgcgcctttaatcaacaaggttgcaagatgaatcatatcacgatgcacggtagtctgaccgtgaacgggcgcaccgtgatcgtccatgtgggcgatggcgaggtgaacgccacggttgacggcacgcacttcaacgtgcgtagcctgtggcagctctaccagttgctgagactgctcgtgtagcgtctcattaaggcgcggcgccccccccctagtcgggtatcgcgccggcaacctgaaaaccgataatgttggcaagtgcttgcaatttgtggtggacgattgcaagctaacgtcttggattgttgccgctatccaatatctcattaggtctaccggtggaccaaaagtacgttgctttgtaaggggagttaatgaaatgaacaaacccgcacaatcgagcatcgaatcggtttaatgccactcacctcaacgggacgcgcggtaattgttagctaagttgacaataaaagagcaaaggcctaaattagcaatcagtcatcacgctgaggtgatgatttcactaggaaggagtagagatatggtatcgcacaacaagcgcatcgtggctgctcttgccgcggtagcagcaatgggtattggtttggccggttgcggcggcagcgacactgccggcgacacgaagtccggcagcgatggcggtgtggtcaacatcacctatatgcatcgtctgcccgattccgaaggcatgaccttggtcaacgacattgtggccaagtggaacaaggagcacccgaacattcaggtcaaggccaccaagttcgatggcaatgccgccgacatgatcaagaagctcgagaccgacgtcaaggctggcaatgcgccggatctggctcaggtcggttactccgaggttcctgaggtcttcaccaagggccttctgcaggatgtcaccgatgaggccgccaagtacaaggacgatttcgcttccggcccgttcgcactgatgcaggtggacggcaagacctacggtctgccgcaggacaccggcccgctgacttacttctacaacgccgctgaatttgagaagctcggcatcaccgtgccgaagaccgctgacgagctcattgagaccgccaagaagaccgctgcccaaggcaagtacatcatgaccttccaacctgatgaggccatgatgatgatgtccggccaggccggcgcttccggtccgtggtacaaggtcgacggcaactcctgggttgtcaacacccagactaagggctccaaggccgtggccgatgtctaccagcagctgatcgacaacaaggccgccctcaccaacccgcgttgggatgcatcgtttgataactccatccagtccggtcagctgatcggcaccgtggccgccgcttgggaagccccactgttcatcgattccgccggtggcactggtgctggtgagtggaaggtcacccagctcggtgactggttcggcaatggcaccaagaccggcgccgatggtggttccggtgtggccgtgctcaagggttccaagcacccggccgaagccatggagttccttgactggttcaacacccaggttgatgaccttgtctcccagggccttgtcgtggccgccaccaccgcggatgccaagaccccgcagaagtggtccgactacttcagcggacaggatgtcatggctgagttcaagaccgcgaacgacaacatgggtgacttcacctacatgcctggcttctccgcagtcggcgctgcaatgaaacagaccgccgccaaggctgccgatggttctgccaaggtttcggatgtgttcgacaccgctcagaagacctcggtggatacgctgaagaacctcggtctgtccgtcaaggagtgacctcactaggtcttgtcaacgggccggcttgaaatagccggccgtccaagacctccgatgcctcgcatcaccatagcggaaggccggggcacatactccggccttccgtattgtttgggggtattgctgcaggggcgctgtggcccttgtcatttgttttactgttctttgcgaagacaggttttgtattatgactgcatccactactcaggcgaagggcaaagcacctaggcgtgccgccgccaagccgaagcggtccggcgctcagaagcgcgagaaccgcaccggctgggcgttcatggcaccgttcgccgtcctgttcactttcgtgttcatcttgcccatcatctgggccatctattccagcttcttccgtcaggtcaccgagggcggtggcgcatacggcggtggcgagctggtcaataaagtcgtcggattccagaacttccagtatgctattacttccggcaacttctggtccggcgtcggcagggtgctgctctacaccctgattcaggtgccgatcatgatcatcgccgcactggcgttggccatcgtcatcgactcgttcgtggtcaagcatgtcaccggtttccgtctgggctacttcctgccctacgccatccccggcgtcgtggcctcgattatctgggtctacctgtacaacggccaaatctcgccgatcgtcaagggacttgccgccatcggcgtcaatgtggacttcttcaacaagaacatcgtgctcggctcgatggccaacatcaccacatggaccttcaccggctacaacatgctgattttccttgccgcactgcaggccatcccgcatgacctctatgaggccgcccgtatcgacggcgctaatggttggcagattgccacgaagatcaagctgccgaacgtgcgtggcgcggccctgctggccatgctgctttccatcgtcggcaccattcagctgttcaacgaaccgcagatcatgtctacggctgatccgggtatttccaagtcgtatacaccgatgatgatggccatgaacacttctcagggcaccattaccccgtctggtgacggtccggcctcggccatcgccattgtcatggctctgatcgcaggtgtgcttgccgtgctgtacaccttggccgaaaggaaggtgaacgagtaatgagctccgcaaccgttgaagaacgcgcccgcaaaaaggccgagcgcaagctcgaaaagcagcgtcaggctgcgcaacacgatttgcctcgctccatgcgaccgtccgcggccgtgaagaccctcaccgtggtgctgctggtactggtgttgatctacttcctgttcccgatttactgggccatcatcgcgtccaccaagacgccggcccagatgaccggtagcaacggcatgtggtttgctgtgccgcttgaccagctgcccaatgccatcgccactaactattccaagctgcttggctggactcgtggcaacttctggcgctgggtgctgaactccctgatctactcgggtgtctcggcattgatcggcaccatcgtgtctgtgatggctggctacgccaccgcaaaattcaacttccgcggcaagaacgcggccatcggcatcattatggcctgcatgctcatgccgtccgccctgctgaccatcccgatgtactcgatcttccacacgttgcacctgaccaacactatgctctcgatcatcatcccgtgctgcgtttcgccgttcggcttcttcctgggccgcacgtacgcacagagttcggtgccggacgaactgcttgaagccgcccgcatcgacggcgcgagcgaggcgaggatcttcttcaccatcgtgctgaggctcctggccccggccatggtgacgattttcctgttcctgttcgtggccacgtggaacaacttcctgctgccgttgatgatggtgtcttccgacaccttgaagcccgtgaccctcggtctgtacggcatggtctcgctggccacgttcaccgatcgcggcgccctgatgatgggtgcgttgctcggcgtgctgcccgtgatcgtgctggtcctcggcctccagcgcgactggcagtccggcctcgccgccggtgccgtcaagggctaaccaatccgctgcccggcatgtcgtgtcactccttccggtgccgggcaacgtccctcccatattcagtgacacgattccaatcgtccggcgtcaccgtaagcgtcaaggatctacgcagtcagggtcccagggcccgcgatgacgccggtcattttgtatgcgacgaattcgtcgctttgtagttttttgatgaccaaccccacaaaggagcactcatgaccagcaccggccgcttcacgctgcccagtgaagagaattttgccgaaaagaccaaggaactcgccgaattgtggggtgcggacgccatccgcaactccgacggcacgcatctggacgaggcagtgctcgctcttggcaagaaagtctacagcgcctacttcccgacccgcgcccacaacgagtggatcaccctgcacatggacgagaccccgcaggtctacctgctgaccgcccgtatcctggccgagtccaacgcggtggatgtgccgctgatggacggtttcttcgaggaacagctcaagcctaaccgtgacgccgaccctcataagtactgggaagtcgtggaccgcaccacgggcgaggtcgtggacccgtccggctggacgctcgacccgggcgaggacaccgtgcacgtgaccgtcgccgtgccgatgcacgaatacacggtgagtttcctggcctacatcatctgggacccggtcgagatgtacaaccacctgaccaatgattggggagacaaggaacacgagattccgttcgacatctaccatccggccacccgcaagttcgtgttcgatacgttcgagcagtggctgaaggacagcccgcaggtggatgtggtgcgtttcaccacgttcttctaccagttcacgctcctgttcgatgccaagcgtcgcgaaaaggtggtcgactggttcggttgcgcctgcaccgtgagcccgcgcgcattggacgatttcgagaaggagtacggttaccgtctgcgtccggaggatttcgtggatggcggtgcctacaactccgcgtggcgcgtgccccgcaagtcgcaacgcgactggattgacttcctctccggattcgtgcgcgagaacgtcaagcggcttgccgacatgtcgcacgcggcaggcaaggaagccatgatgttccttggcgaccagtggatcggtaccgaaccgtataaggacgggttcgaaaagctgggtttggatgcggtcgtcggctccatcggagacggcaccaccacccgcatgatcgcggacattccgggcgtcaaatacacggaaggacgcttcctgccgtacttcttccccgacacgttctacgagggcaacgacccgagcatcgaaggcctcgacaactggcgtaaggcccgccgcgcgatcctgcgttcgccgatcggccgtatgggctacggtggctacctctccttggccgccaagttcccgaagttcgtggacacggtgacccatatcgccgacgaattccgcgacatccacgaccgcaccggtggggtggccgccgaaggcgagctcaacgtggcgattctgaattcttggggcaagatgcgttcctggatggcgttcaccgtggcacacgccctgcccaacaagcagacctactcctactacggcattctggaatccctgtccggcatgcgcgtgaacgtgcggttcatcagcttcgacgacgtactcgcgcatggcatcgatagtgatatcgacgtaatcatcaacggcggcccggtcgacaccgcattcaccggcggcgacgtgtggaccaacccgaagctcgtggaaaccgtgcgcgcctgggtgcgtggtggcggcgcgttcgtgggcgtgggcgagccgagctcggcaccgcgcttccaagcgggccggttcttccagctggccgacgtgattggcgtggacgaggagcgctatcagaccctctccgtggacaagtacttcccaccggtggtgccggaccacttcatcaccgccgatgtgccggtcgacccggcggcccgcgaggcttgggaacaggccggctaccgcatcccgctgagcggttgcggcggtggccagtccatcaagccgttgggcggcatcgacttcggcgaacccgtgctcaacacgtatccggtcaatgaaaacgtgaccctgctgcgcgcggacggcgggcaggtgcagctcgcgaccaatgattatggcgaaggccgcggtgtgtacatctccggtctgccctattcggcggccaacgcccgactgctggaacgcgtgctgttctacgcctcccacaacgaagacaagtatgcggcttggagctcgtccaacccggagtgcgaggtggcgcacttccccgagcaagggttgtactgcgtaatcaacaacaccgatcagccgcagcggaccacggtgactctggccgatggcaccaccgaggacttcgacctgcccgacagcggcatcgcatggcgtgaagcctgattcccgcgttttggagaacggacccatcatgaccgaaagcaatgaagttttattcggcatcgcctcgcattttgcgctggaaggtgccgtgaccggcatcgaaccttacggagacggccatatcaacaccacctatctggtgaccacggacggcccccgctacatcctccaacagatgaacaccagcatcttccccgatacggtgaatctgatgcgcaatgtcgaactggtcacctccactctcaaggctcagggcaaagagacgctggacattgtgcccaccacctccggcgccacctgggccgagatcgatggcggcgcatggcgcgtctacaagttcatcgaacacaccgtgtcgtacaacctcgtgccgaacccggacgtgttccgcgaggccggcagcgcattcggcgacttccagaacttcctgtccgaattcgacgccagccagctgaccgaaaccatcgcccgcttccacgacaccccgcatcgtttcgaggacttcaaggccgccctcgccgcggacaagctcggccgcgccgccgcatgccagccggaaatcgacttctatctgagccacgccgaccagtatgccgtcgtgatggatgggctcagggacggttcgattccgttgcgcgtgacccacaacgacaccaagctcaacaacatcctcatggacgccaccaccggcaaggcgcgtgcgatcatcgatctcgacaccatcatgcccggctccatgctgttcgacttcggcgattccatacgctttggtgcgtccactgctctggaagacgaaaaggacctcagcaaggtgcatttcagcaccgagctgttccgtgcctacacggaaggattcgtgggcgaactacgtggcagcatcaccgcgcgcgaggccgaactgctgccgttcagcggcaacctgctcaccatggaatgcggcatgcggttccttgccgactacctggaaggcgacgtctactttgccaccaagtaccccgagcacaatctggtgcgcacccgcacccagatcaaactcgtgcaggagatggagcagaaggccagtgaaacccacgccatcgtagccgacatcatggaggctgccaagtgagccgtcagtcgaaccatacccgaaccagcatgatgggggccgagcaatgagcgatcagctgaccgaggtatacgccagcatcgacgccctagtcgattacgccttggatcatctcgacctcgatccacgcaacgcagactggacccgcaaccaaatcttcgccctcttccacctggattcctaccccggacccaaaaccacaacgtcggcggcgtcagtgtcagacgcagtccaagacattgtcggcagccgaagccaggctccctctgacgaaaagacccccgaccccctactcgccgccttccgcgccgccgccacaaccgccggcctcttcgatccggaggaaggcccggcctacgccgacaccatcatgggcatcctctccgccaaccccgccgatctcgacgaccggttcctgctcatcgagcacagggacggcggcatggccgccatgcaatggttctacgactactgtgtggccaacaattatgtcaagcgtgcccagctcgaccggaacccgcgcttcgactcgcacgggctgacggtgaccatcaacctcgccaaacccgaattcaagaacatgaagaaggcggcggccggcaacgccgtgtccggcggctacccgaagtgcacgatctgccatgagaacgagggcttcgccggacgtgacaagcgcacgctgcgcaccctgccggtcacgctcggcggtgagtcatggttctggcagttctcgccctacggctacttcgaccagcacggcatctgcgtgaacaccgaccacacgccgatgcatgtggaccgcgacaccttcggccatctgctcgacttcgtggaccgcttccccggatacttcctcggatgcaacgccgcgctgcctcgcatcggcggctcggtgctcgcccacgaccactaccagggcggcggcgaactgctgccgatgcacaaggccgccacttgggccgccttcacgctcgccgactatccggacgccgtggtcgaaatcctcgactggcccggtaccgccgtgcgtgtggtgtcgaaaaaccgccagagcatcatcgacgtatccgacatcatccgcgaggcatgggtcggttatgacgacgcggcgaacggcatcgccagccatgacgcggacggcaaccgccaatccgccctctcgcccagcgcgatcatcaccgaacgtggctatgagatgagtctcatcttccgcaacaatgcgatcagcgacgagtacccggaaggtattttccatgcacaccccgaatactggccggtcaagcaggagccgattggactgatcgaagcccaaggcctgttcatcctgcccggacggctcgtcgaccagctcggcatcgtcgaggaggcgctcgccgaaggccgcgatttgcccgatgaagtcagcgaattcagtctcgaatggggcgaactcgctgaaacattggccggaaaccgcgaccgcgaggccatccaccaagccgtacgtgacgagctcggcagcgtctgctaccgcatcctcggcaacacggccgtcttcaagcagaaagccaccacgcaaacattcctcgaaagtcttggttttgccgctaggtgaaacaggtcaagtgaagtaagctcaatactgaaggaaaaccgaaggcaagtccttccaaaggaggagatatgactactgttctggttacgggcggtgctggattcatcgccacccacaccgacatcgaactgctcgacaagggctacgacgttatttccgtagataactacggcaactcgtctcccgtggcgcttgagcgcgtcgagcagatcaccggcaagccggtcaagcgttacgacggtgacgtgcgcgatgaggcgcttatggaacgcgtcttcaccgaaaacaacatcgattgggtcattcacttcgccggtctcaaggccgtgggcgagtccgtggccaagccgatcgaatactacgacaacaacctgtactccacgcttgtgctgctcaaggtgatgaagaagcacaacgtcaagaagatcatcttctcctcctccgccaccgtgtacggcacgccgaaggaactgccgattaccgaggagacgccgaccggcggcaccaccaacccgtacggcacctccaagctgttccaggagcagattctgcgcgacgtacatgtggccgatccgtcctggaccatcgtgctgctgcgctacttcaacccggtcggcgcacacgagtccggcctgctgggcgaagatccgaagggtattccggcgaacctcaccccgtacgtggccaaggtcgcggtcggcgagctcaaggaagtccaggtctacggcgacgactacgacacgcccgacggcactggtgtgcgtgactacatccacgtggtcgacctggccaagggtcacgtggccgtcattgaccacatcgacaaggaaggcgtgttcgtctacaacctgggtaccggccacggctactccgtgcttgaggtcatcaaggcttacgagaaggccgccggtcatccgattccgtacacgatcaagccgcgtcgccccggtgacatcgccgcctgctacgccgacgcttccaaggcggagaaggagcttggctggaaggccgagctgaccatcgacgacatggccgcctcctccctcaactggcagaccaagaaccccaacggtttccgcgacgccgagtgatatgagcagatgagctccctctgatgagggagctcatctgtcgtttatcacacaatgcgcctatcggcggcccagcgggtgagctcggtgcgattcgaaagctgaagctttcgcagcaccgagctcacgtgcgtttcgaccgtcttgatcgaaatgaacagttcggccgccacctctttatacgtgtatccgcgtgcgatcagccgcatgacctcctgctcgcgggcggacagccggtccagctcctcatcatgagcccgtgccgcaccatcagcgccgccatcagaccccgccgccggcacaccctgaaaggccgaaagcacaaaaccggccagttttggcgagaacacggcatagccctcatgcacctgcttgatggatgaaatcaaatcagcgccggtaatcgtcttggtcacatagccctgggcgccggcgcgaatcaccgcccccacatcctgcggcgcatccgaaaccgacaatgccagaaacacggtggtgggggagtagggccgcgatttggcgaggatctcggcaccgccgccaccttcaccgccgggcacgtgcacatccagcaacaccacctgcggcttggtctgtgcgatcatcgccaccgaaccgggcacgtccgccgcttggccgacgatatcgaaggaatcacgcaacgtggcgattacgcccgcacggaacatctcatggtcatcgaccacggccacacgaatcttggctgtctcgttctcgctcatcgatgttctccctgcgccgctttcagcgcgatcggcatatgcattctgacctcggtgccccagccggccctggacactatctccactgtaccgccgcgccgtttgacgcggccgataatcgattcgcggatgcccagccggtcgggcggaatggcgtccatatcgaagccttcgccatggtcgcgcacgaacacttcaaccatcgtgtcgctggcctcgcaatacaaagacaccggctcgccgccatgcgtgaccgcattgaccaacgcctgacgggtggcgtccagcagcgcatcggtctgggcgctcggccgcgcgtcgcccacggtgaccacctcaatcggcttgccgtgctcgtcctccacctcggcggcgatctgcttcaatccggctcccaccgaacgatccgatgtggaacgttcctgatacagccattcgcgcagctcgcgctcttggctacgcgccagggcgaatacggtggtcggttcctcggagtgcagctgaatcagcgccaacgtttgcagcacgccatcatgcagatgggcggtcatgtccgcgcgctcctcttcgcgctccttcaatgcctgctcgtgggtgagtcgttgcagcatcgcgttcgcccacggcatcaccgccaccacgataccgacgatcatcacgaatccgctggcaacaatgcgtcgaggagaggtgccccacccgggaatgctgacattatgcacatacaatgcccatcccatgaaaatcagtgcgatgccgcccaacatagacaacagctgcgtgcctcgcggactaagattcatccatgccagtgcgatgccgcccaaccctaccagcagcggaagcacaatctgggcatccgcaccggtgctggtgagcagcagtccggtggccatcaacgcgaaaccggccaatgccacaacggccggtttcggagcacgttggatggcctcggacaatgattccggtgcggcagccgattcgtcgtcatgagcggcaagtggctgattgcctcgcgcaagcggcgcctgatcaacgggcactgtgcgagccgcagccgccaccgggtctccggcgggcatgaacacccacaggaatacataagcgatgatgcctgcgccgtagaggaaggtcagagcgatgaacgcaatccgaacccatgtcacgccgatgcccaagtgcagggcgatgcccttgcacacgccggtgagccagcggccctgccgggggcgcatcagcggcatgcgcgcgggcagcaatggttcgggagatgacgtcatactcctattgtgccgcgctcagggcgttgcggccggggttttacccggtgttcagggaacaatcagggtgttccccgagcgttgtggcagtggtcgggcggtgtaatggaatcatgagcaatccaaacgcgaatccgtatcagccacagccgcagcctggtccgcaaaaaaacaagacatcgcgacgcttcttcacttgggtgcgatccagtggactggttcgcggcgacgaccggtggatcggtggcgtatgcagcggcatcgctttacggcttggctggagccccacactagtacgtgcgttggtgattgtatgtacattgttcttcggcttcggcgcagctctgtacgcactcggctggtttctgatgccggatgtacgcgatgggcacatcttggccgaggacctcattgccggccaatgggactggaattgtcttggatgcttcctgttcctagccgtggcaatcgtgattccaggtgcggggtgggtttgtattgcgctcgccgccttagcgctatggttgttggccaaaagcggcattcgccagcaggaagggtacggattcggggcatctgcgccgcgaccggtttcacagcctgtgtcgtatccagctccacagcctgcctcatatccagccgcgcaaccggtccctctatctcctttgtattcagctccgcaacctgtttcacaatctgtttcacgaaccgcgcctagtgtttcacaacctgtttcacagcctgtctatcagtcgatgcccagcgtgatgcccggcgcggtgcccggcgtgatgcccggcacagtacccaacgggccgtttgcccccgaccgtatgaatgcgacggcctatgcccccaccgagtccaagcgccgcaagccggcgggcccaatcgtggtcttgagcatactgggccttaccttcctctcctttgccggtctgatgggactgatttgggtaaacgacatgggcattatcggcattatgcgtctgagcaccatctggattgccgcagtatgcatagtgatggggctggtggtcatcatcctcggattcagagggcggcgtaccggtggtctgattcctctcggactggttgccggtggatgcgcgctctgcatgaccatcgtttcaggcacgtatggcgtgcactaccgtgatcttggtgccagcggcatcaatactgttgtttcactgagccaatctgtcagtgcgagaaacagcgacggcatgaacgatgtgcaaaaggatggcatcttcgttgccgatgccagcgatgccacgttcgaaacattgcagcaaggtgtggcgttcaacggtgaaaactacaacaccgatcaggcaatcattgattggtccgattgggacaagacacatggaccgcacacggtgaagatgctggatggcaaaacctccatcagtaattgcccggtcggtaccatcaccatagccgcaacacaggcgcaagtgcatatcgttctgccggattcctgcacttacgccttcggcaccgccgactcctactccacttcgagtgacgtcggcggcaaatacgagatggtatacaacaactacatgggtctaagctttgttttcttcggagctgaaagcgccaccaatcccatgaatgggcctgattacgaatggttggataagggatccgccatgccggacaacggcccagaattaaaaatcaatattccctatgcagtggaagcacgtgtcaacgtggtgtacgcctccgattggaaaggctccacgttccagccgcttgccgatatatacgacggcaacagcacaagcaagaacacaaccgggcaatcggaatgatcaagccgttacaaccaggagatggaatcatgactgatgaaaccaaggaattcgcctccatcgaggatgcgacaccgaccacggccataccttccgaaaccgacgagaccaccgagaccacaaccatggtgaccgtcgatgaccgaaccgataccacggtgctgccatccgcagcggatgatgacaaaacggctgtgctacccgtccccgacgatcatgcggatgcgccggtctcggatgtggatacgcaggcaacagctgcctctccatcgcccatcgaaccaaccacagatcggattgccctggaaacagttgccgatgccgtggagggggatggcgggccgattccatctgccgatgatgtaccgatgtacgcagcatcttcagcacaaccttcctatgagcagtctcagaccgccggcaaaccatgccaaactgaggggatcgccaagaacgtccagaatgctaaggatgtcaagagtgccaagaacatccagaaacagagcaccagcgcgcctactgtggtattcggactattaggcgtgattatcggcgtgatcgcgctggttttcgggtgcatatctccggatcggatgatttcgctgttctcgccgaatccgcaattgctgacggctattatctgcgccgtagtgggacttattctggtaatagtggccgttgtatgggccatagtcggtgccgtcaagaagagaaaatagcgttacaaccattgcattacggtcccagtagaagcacattatgacgggagccgaccgataagagccgaccgttctatgctgatgggggaggcatagtaactatgaaacggatttcggcgcggcgggtagcgagcgtcatcgccaccgcgatggcgatgacgctggtattcgccacacttggctgggcgatgatgccgcaatggaacacacggccctacaccaagcacatcgctatcgcttctgccgacaccaccatcacccctgcccatgcgaacattccccacgaggggcgatatcgtacgcgtgaaacccgactatccatcaagaccggcgacggcgtcacgctacccgccgtactacgtgaaccggtcgacgctcccgggccacgcccggcttgtctgttcattcacgggtccggtaccagcggtgccgaggatttcggcgatatcgccaacgccatggcctctgccggcatcgtgaccttggtgccggccaagcgcaacgacaactacaccgtgctgcatcgcgactacccgcgttttgctcgcgaatacgggcgttcgctcgacgtgctgcgtggcataagcggcgtggaccccgccaaaaccggcatctacgccgaatccgaaggcacctggatcgccacgattctaacctcgaaacggcaagacattgcctttgccatacttacatccgcaccggtgttcaatggacgtgagcaaatggccatggctgtcagcgcctatgcgcatgaggccggcgcgcccaagcccgtggtcaaagacatggccaaattgatgtcgctggactacgcgccattcgatctggcctatgccgactttgatgccgaccggtatctgaaatccctcaccatgccggtgctggtgaactacggcacctacgatacggccatgcccatcgaacagggggcgcagcggatcatcgccacggccaacaagtccggcaacgagaacgtcaccgtacgctattttgccggcaaccatcagatgcgggctggtgagggcttattcaccccgaacctgccattggccgaaggctatacgcaagcgctggaaaattgggtgaacggtgtgactgccggaaccaaagccgatggatgggcaacgccccaagtcgccggtgcgacacctcgccagcgcttcgccgcgccgcaacgtaccagatccggtatcgtcggctcgctcggcgtgctggccggtctgatggtggcagggcccgtgctgatcgtgatggcggcgatattgggtattggcttgactgtgttttcttggctacagacgttgctggccgggcgacgtagtgtggcgactgtgcgggccatgcatgcgacgccgagtgggctgggagccgcccaacagcgtacgttgcacggcattgccggcttatctgccggtatcggcacagcggtgatggtgattactgggctgttgtatggctatatgagcgccgtaggcgtatcggctgtattggttatgcctcaaccgcagttgttttcccttgggtggagggcattgcaggtgctgaccgtgctgttggtcgtgctgttcgcgtgggaactggaacgtatgtggcggtatcgcgccagcattatcggcgtgcgtcgtgtcatttgcgtgatggtgacactggctgcacttgtcacattgacgatattgtctttctgggggttgttcagtctgtgatattcacggtcgttaccggctccttcccgaatatgtgccactgagtcgccgtgagcgtcacaaattcgggaaggtggatggggcgtgacggcgtggaggcactgtcgtcagcgctgagcggcttcagcctcctccaaggtgtcgaaaccgccgagctggaccgtgtgcaacaaggtttcctcagtgatattgcgttgtgggctggctgcggcgcgctcgctaatcatcacctcgtagagctggaaggtccgttcggaatacgtaccaagctcgccgcgcagataggtttcgaatgaggtggcagatggtgtgtcttcggtggtggtgagtacgcgcatcgcctcgccgagcttggggtagcgctcgcggaaatccttggcccaggcgacttgctgggcgatgacctgttcctgacgggccacgcgctcttcagagggacgcggaatatacggctctatgttcttcgtgaaatcttccggcgcggtggaggccatcatgcggccgtatttttcggtcacgaggttgcggcccacgtggtcggccgcgtcaagatcagcggcatagctggtgagtaatggccgctcccatgtgaggaactgggccagccgcatctggtggaacaccggccagttgccttggcatgccgcgcgtccgccctcattgttggtgcgctggaactgatcccattcatggcgcacaatagcctcgcgcagttcatcatcagtcagttcgttggtcatcgacgttcctttcactaatatctccctctgatgagggagatggcacggcgaagccgtgacagagggagcttgaatctacaaacttttaagcaccggatcatcagaggcgatgtggtcctcgacatacgggcgctgccattcgaggaaggtctcgccggacgtggtcaggtgttcgcgtttgagttccctgacgatatccgccgcaatctgctccacgatatcgttgattttcttgattgctgtagccgcgcccttgccgccttcgccgaatccggcccctccatagcaggctgccgaactcaatcgcatcacggtttccaactgttcgcccacgttcggcaacagcgcgaacatcgagccagacagcttgcgcaatgctgcgaactgccacttgtaatacggcatatagcccaccaccatcggcacgttaaccaggaacaccaacgaggcggtggcctgcacgaactcgtggatggacagccatgcagccgcgccgtcgccgcgtttcaacgaacgcggcagattatattgaccggcttgggcgatcatgcccaatcgcttggaaatcaaggcaagccgcacgtcgtcgggcatatccttgaacccttggcgtgttttggagaactgcccagtggggtctgcgaatccttcgccattggtggctgcggccagagtcgattcagccagcatcagccactcgtgcggcgcggtttgcgcc

SEQ ID NO: 1424 - DNA, 33754 bp, Unknown
  R257_15m  MAG No. k141_15047
aacacccgccagatcaagaccggtgccccggcccgtggcgagcgcgttgccaagtacaaccgcctgctcgagatcgaggaggagctcggctccaccgctcagtacgccggctacagcgccttcaaggcctgcaagaagtacttggccaagtgagctgaaacgcccgtaaaggcgtgagtttccactgaagctcgatacccgtcgtgttcgtcaagtcgaatgcggcgggtattttcatgtgacatgagcaagtcgtcccgtaccggcaaacctggcaaaaccggcaaagcacaagtcaggaaaaaagggtcggcggggcccatagcgttcttcgtctccctgttcatcatcgcactcggcaccatccagctggtctccaccttccacacttatgccctgaacctggccgagctcaatggcctcaagcgtgaggaagcctcgctgatcgcccaaaagcaggagttggagaacgatatcaagcgttgggatgacaaggcctacatcaccgcccaggcccgtgaacgcctcggcttcgtattccccggcgaacaggccgtgcgtgtgctgcatcccgaagccgtgaccggctccgatcgcgaatcccagaaaacggaagattccaataccagcaacaaaaaagtcctgccatggtacagcgaactgtcttactcgctcaaaaaggccgatgagcctgtgaccgatagcgagtccggcaaatccgatacttccggttcctctgactcgtcatccaacgactcatccaagcagtccgataagtcagaccagaacacccaatccgatcagaacacccagcaaaacacaggggagggaactcaacagtgaccatcgatatcgccgccaaggccaaggcccttgtcgacaccatgcttgccgagcccgccaacgaccatgacatcgaccaggtgcagcgtcagctcggccgatacccgcgcggcatggtcgccgtgggggcgcgatgcgtctgcggtaggccacttgccgtaatcacccgtccggtgttgcccggcggaatccctttccccaccacgtgctatctgaccggtccggaagccgtcaaggccgcctcccatgtcgaggccgccggcgtgatgcagcaatacaacgatatgctggccgctgatgaggagctcaaggccgcatatgagcaggcccataatctgtatctggcattccgtcacgaactggcaggccgtcttggcgacagtgaggagcatattgaaggcacttcggccggtggcatgccggtgcgcgtcaagtgcctgcatgccctgctggcccagtccttggttatggggccgggcgtcaaccccattggcgatttggtgctggaacgcgtcaaagacgagttcgatccgaccgtctgccgttgcacactggacgattgatcaacagatgagccaccgcgaacagcccattcatacgcactaagggatacgaggagaaggcaatgagcaaggaatccgtaaccgtcgccggcattgattgcggcacgaactccattcgactgaagatcgcacgtgtcgatgccgatggcatgcatgaggtggtgccgcgcatcctgcgtgtgatccgccttggtcaggatgtggacaagacccatcgttttgccgacgaagcgttggaacgcgcctatgcggctgctcgggaattcgccggtgtgattgccgagcatcccatcgacggcctgcgtttcgttgccacctccgccactcgtgacgcggaaaaccgcgaggagttcgaggatgagatcgaacgtatcctcggcgtgcgccccgaagtcattcccggcactgaagaagccgacctgagcttcctcggcgccacttccgtggtcaatcgcgacgatctgcccgccccctatctggtggttgacctcggcggcgggtccaccgagctggtcatcggtggcgacggcgtcagtgcgcccaccacccaggttcagggcgcattctccatgaacatcggttccgtgcgcatgaccgaacgtcatctgaccaacgatccgccgacccaggcgcagatcgatgaggccgttgcggacatcgacgagcatatcgatgaggccttccgcaccgtggacgcaggcaaggcccgtaccatcatcggtgtgtccggcacggtgaccacgatgaccgccttggctatgggattgaaagaatacgatcacaccgtggtcgacgggcatcggttgagccttgaagacgcctatgccgtggacgacaagttccttaggatgacgcgcgccgagcgccgcgaatacaagaccatccaccccggccgtatcgatgtggtcggcggcggcgctgtggtctggagccgtgtgctggcgcgtgtcagcgaagccgccaaggccgatcatggtgaagccatcgattcgttcgtcgccagcgaacacgggctgctggacggcattgtgctcgattatggtcgccggttgctggctcaatagcgtaagtggtaagtgcctccagcgggctgagccgttaagcaaacagcccggtgggctgtttgcgttatatgcgacgccggcgacgctatcgctaccggctgctacaaacagcccactgggctgtttgtaggcgaagggagcggctatgccgcgacggctgcacgaagcgcagcaacccgcaagcaatgctcagggcaggagatagcttataatagaaaagttggcctccgtggcgaaatggtatacgcagtcgacttaaaatcgatcgcttcggcttgtgggttcgagtcccaccggaggcactttgaaatcggcctgtggccgatgccgttttttgcggctgtgccgcggtctctcccccagtcggcttcgccgacagctcccctcgtcagaggggctcgcagcttactatgtggagagcttataaggccgaaacaaaaggccgttaggctatgtggcgttgtgacgatgtacctgatgaaacgaggaatccacatggcttcacgctggaccgatgtcgaacgagtcgaacaaggcgccctgcccaccatgcttgcccaagccgtcattgcgggcactgcactcaccgttggtgccatcgcctgctcgggattctatctgtccatgatcggcaatgtggccgcactcctgccgtgggcgactatcgtgatactgatcgccgtggcgttcacctacatcgtcggcttcgccctgttgtggtgtgccgaagccctgaccctgcgtgccaacgacaaactcaagccatggctgtacggcgtcgtcggattaatcggctacggcgtgtggggcatgttcgtgatgagcacgatgatgaacacgctgaaccagccgctgaacggcgtggtgttgtcgaacagcgatgtgatggccctgaccgtcaactacgcggtgttcggcttcatcgccttcctgttggcacaggcgtacgcgcccaaaatcgccaccaagaagggactgaccatcgggctgatggtggtgcagatcgtattggccatcatcggtatcatcgtactggttatgatgttctccgcactatctcactgactgacttatcgctcgccggcacgacgcgcgcggccatcatcgcgcaaagcgaaagattccgggcgctaggctggaatacgatatcgtgatggcatgacgcctggtgacaccggcatgccgaaccagcaggggagaaggagccaaatgttcagtgtgcttgacatgttcaccatcggcgtcggaccttcatcctcgcacaccgtaggcccgatggtcgcggcacatgcctttgcctcctcgttgctggccgaccatttggtcgatcgcaccgcacgtgtcaaaatcacgctttacggttctctggcgctgaccggtctcggccacggcaccgatcgtgctgcgatggccgggctcgaaggcaatctgccggccaccgtggataccgaccacatgatgcgcatccgcgagacctgcgcgttggacgatactctgaacctcgccggcctcaaacgcatccatttcgactacgaccgcgacgtggtgttcgaacaatggaagcgcatggccgcgcaccccaatggcatgcgattccaggctttcgacgccgccgcaagcttggtcgacgaacaggtctggtattccatcggcggcggattcgtgcgcaaaggcgctcccgaagacccgatgatcggcattcatgaacgtcctccggaaggcacctcctttgccgacgcggacgaatcatcatccactgatttcggcgtcgaggcaccctacccgttctcatcatgcgccgaactggtgtcgttgtgccgggaacatcatctcagcatcgccgaacttgtatgggccaacgaaaccgcttcacgctcaggcatccaggtccggtccgatattgatgccatctggcgtgttatgcgcgcctgcgtggaccacggatgcacctcggcggagcccacattgcccggtggccttgacgtaccccgccgcgcgccgaagatgtatcggcgtctcgcttcgaattccgatgtgctgcgccgcgacagccggcgcaaagacgccgtgctcgagtcttccgacgccgcatgggtggatctcttcgccttggccgtctctgaggagaatgccggaggcgggcgcatcgtaaccgctccgaccaacggttccgccggcatcattcccgccgtgcttcactattactggcatttcgtggacaacgccaatgaacagggcgtggtcacgtttctgctgaccgccggtgccatcggatacctgttcaaacgcaacgcctcaatttccggtgcggaagtcggttgccagggcgaagtcggctcggcctgttcgatggcggcggccggacttgccgcagtcatgggcggcacgccggaacaggtggagaatgctgctgagatcggcatcgaacacaacttgggcctgacttgcgatccggtgggcggactggtgcagattccatgcatcgaacgcaacgccatggccgccaacaccgccatcaacgccgtgcgtatggccatgctcggcgacggctcacacatcgtgaccctcgatcaggccatcgaaaccatgaagcagaccggtgaagacatgatggccaaatacaaggagacctccaagggcgggcttgccgtcaatgtcgtcgaatgctgattgacatgtctggtattcaccagcatgatgaccggaattgacgtatacggccagcgtgtcgtatcgcacagggatgaaggactaccgccgattcgccgatggtgctaaggtagggcgcattgtgtctttgaaggaggactaatggcagatcagatgcctcaggtgaacgccgaattcggcaccacgcccgttatcgagttcccggcgcccgaagccccgaagggcctcaaggttgtggagctgaccgagggcgacggcccgatcgtgcgtcgcggcgacaccgtcaccgtgaactaccacggcgtggtgtggggtaaggacaccccattcgactccagcttcgaccgtcatcagcccgccagcttcggcatcggcgtgggacaggtcatcaagggctgggaccagaccgtgccgggccataacgtgggctcgcgtctggtggtttccattccgccggaatacggctacggttcccgcggcatcccgcaggccggcatcggcggcgaggacacgctggtgttcgtcatcgacatcatttccacccgctgaccataggtcagcacatgacgaacgccggggtcatagccggcgttttgtcataaataacgaaaattgtttcagcatcgacaacggttcaggaggacgatatggctgaggacaaggtctacctgctgacgcaggaagcatacaacaagatgaaggaagagctcgcccatcgtgaaggcgagctgcgtgaggaaatcgcgcacaagatcgccgtggcgcgtgccgagggcgacttgtccgagaacggcggctaccaggccgcccgtgaggcgcagagcaagaacgagggccgcatcaccgagctcaccgtcaagctgcgcgattccaagatcatcgagaatgccccggaaggcaccgtgggcgagggctctgtggtgaccatcgagctcaacggcaacgagatgacctacgtgctcggcagccgtgacatcgtggccggcaccgactacgacatcatgaccccggattccccgattggcaaggccatcgaaggtgccaaggtgggcgacgtcgtttcctacaccgcaccgaacggccgcgagctgtccgtgacggtcaaggccgccaagccgctggcctgagttataagtgactagtatgcccccgtaggcgggggcatacttatatgtcgtagcgtttattgccacagcgagacgatcaccatgtagatggccaccatatggcaggcatatccggccaccgttccgcagtggaaaatctcatggaagccgaagacgcgaggccaagggtcgggcttgcgcaaggcgtagacgatggcgccgaggatgtagcaggcaccgccggcgcacagcagcaccaccacggctggccccgcatacggcgaattccagaacatcaccatataagccaggccgtagatgccgaagatgatgtacaccaccgtatacagccagcgtggtgcattgatccagatcacatgaatcacgatggcgatggccgtgcacgcccacatcgatatgatgatcacattgcgccagaacggttccagcgcaaacgaaaccggggtatacgtgccagcaatgagcaggaagatgttgacatgatcgatacgccgcagcacatcggtgacgcgcgggctccaatcgcccagatggtagcaggccgaattggtgaacagaatcagcgacgctgtcatgaacacggcacacgcccacttcagactcgcgccatgtgccaggcatataagcacgatgcctgccgccaatgacaggggagcggcaatcgcgtgaatccagccgcgcatcaacggctttggtcgtccgtgcacgtcgagacgaatcttgcgttccacttccgcaggggcaatgccctcgattttcagcgcacggtgctccgctttggcgagcttgtgccgggccttctcctcggctttggctcgaatggcctcggccttgaactgggccttggcccgtacggcatcagccttggcctgcaacgcctgttcgcgcgcctcgatagccgcctgacgcttggatgcgatggtggcatcctctgcaatcgtcacgctgttatgagcgtcgtgatgcatcgtcttttccgcgtcgtcggttgttgatgccatggtgatgcccccgtttcacgagttgacgatacgcttcttacgctgccgtaacctacgttagcgtaacttttatgcttgtcaataccgactcacacgaacactatcacccaatggtggcgatactatggaatccgaagatgagaacgtcacagcaaaaaggggttcggtgatggtgtattgcacggagtgtgggtttgccaacgagcaaggaaatgccttctgttcgcagtgcggaagcccattggagcagcccgaggccaatccggcggcccctgcctatgacgataacgcgctgacgctggtgaagcagccggcggcgccgttgcccgccgtcgcgccgccaacggcgccgggttccgcggtgccggggcctatggcaccgggacccatgaccgctggccctgcggcacctgcttctcctgaacctcccgccgggcgtcctggcggcgatcacaccaaagcggtggtgattgtgctcatcgcgctgatttgcgtcgtggcgttggtcatcggcttgttcgtcacccatagcatgggattgtggggagctcagccgcaggcgcaaacatcggtacagtcgaccgggtccgatgcgtcggattccgccgatgatggcacgacggattcctctgacgccaagtccaaggccaagaagaacacgtctgatagcgccaaagacaagaacagcgacgattcgtccaagaaaagctcgacggagaagtcgaagccttccactccggtgatcacatccagccagttgtctgacatcgcggattcatactcgtcctccgatgtggccgtctccgccatggtcatcgatggaacatacgccgattcctcagaggacgccaccatcgcgaccacgtcgcagtccggcaagcaattcgtggctgccggtctctatctgccggtctatcttgcggcccaggacaatggcgatgacaacgccaaagcgcaggcaaacgcgatgatgggttccatggacaacaatgccggcaatatggcggccgcggcggtaggtggctggagcggcgtcaattcgtgggcatcttcgcatgggtataagggcacctcgttcaaccgcgatttcggcgatgtggcggccagcaatgccggttatgagaattacggttcctcccgcgatgcggcccgcatgctcgccgcagtggacgccaagggaggcgcgtcattgatgaacgtggacattgcttccgaaggcgtaaccattccgtccgacatgatcgtgcatgcccaccgaggccaaggcatccaggacacctggaattacttcgccatcgtcgaagccaatggtcataaggccgccgtggccgttgtcacccaatatcaggggcagtcggtggccgcggacctgatgagccgggtgctggccagtgttgacaagacattggggcagtgacggtggctcggcataccaagcatagtagcgacacgcgtgcaacaggcagcgtcgtgggattgatcctgatcgccgccctgatcgccgctttggtaatcggcgtcggtggatggatgtacgcgcataacggtctcggcgcatcgcacgccaaaacatcgcccgtcgcctcggcatcggactcaccggcaacagcgtcggcatcgtcgtcaacggcgtcatcgaaacacgaacaacgccctgtgcatgacaccttggagcgcaaggcggcacctgctcccgacctgaccacggtggcggaagagaagcggatgtcagatgtgtcctcggcggtcacggcagctgtggccggcaatggaggcacctggtcggtgtatgtcgaggatctggccacgggcaaaaccgtgagcgtcggcggccagcccatggtggcggcttcggatatcaaactgtacgtgatgcttgccgtgtacgataagcaacatgccggcaccttggccgcgggcgggcaagataccacctcgctgatcaaccagatgatcaccgtcagctcgaacgctgccaccaatcagctggtattgatggtcggcgatggcgacatggccacaggcatgcaacgggtgactggtacggccgcccgatacggcttcagctcatccaagcagttgcgggtgttgtccgatgccggcacagacgggaccggcaccgagaactggacgtcggcttccgattgcggcagattcctcgctgcattgtaccgaggcaaactggtttccgccgaagccagccgctccatgcttgacgtattgctcgggcagacgcgacgcgccaaaatacccgccggagtaccgtctggcattcaggtggccaataaaaccggtgaactggccggcgtggaaaatgatgccgccgtggtgtggggcaaggccgcggacggaacagaacgggattatgtgatggtggttatgacctcgggagtggtctcgggaaccgcgcagcagcagatcgccgcattgtcctctcaggtgtatgaggcgatgaccgcctgaacggcgggcagccgtgcaacgcgattggtgcggtattgaagatgcgatgtcgtaatagtcgtcatacttgcccgtgtggcttgccgcaatggcggcgacgtgtctgcgtatgataggggcatggctgatttttcacacatccttgcaacgcgccccgacttcgacgacgaggaccgcgagtggctgcatcatctcgttgccgattggcaggtgatcgccgatctgagctttgccgacctgctgctgctggtacagaacggtgacggcaaatacgtggtggccgaacaatgccgcccatccaccgtgatgacgctacgggcggaagacgtggtgggaaacgtcatgccggatgacatggtcggcgaattggacgccgccatgctctccagcgtggtgttccgctccacggtattgagaaccgtgggcaaggcgaccgtctgcaacgtgtacgcgccggttcggcacaatggcaagaccttgggcttggtcgtgcgtgagaccaatatggccacacgagaatccaacggtcgatatgagtcggaaagcattaacgcgggcaaacagctgtacgagatgattccacgaggccagttcccctacaaggattcggtgatgagccagcgccatatcgctcgcgtggcggacggcttcatcatcctgaccatggacggcgtggttcgatacgcagccccgaacgccatcagctgctttaggcgtctcggcctgctgaccaccatgcctggccattacctcagcgaactcggcacacagctgttgaaggagaacgaccccgttccggaaaccctgccgttggtgctggcgggcaaagccgcggtcgactccgaactcaacgccaaccgttccgccgtctcgatacgctcgctgcccttatatgacaacaacggtcgtatcggagcgattctgctatgccgtgacgtcaccgagctgcgccgtcgtgagcaggagctgcagaccaaggacgctacgatttccgagattcaccatcgtgtcaagaacaacctgcaggccgtctccgcattgctgaggcttcaggctcgtaagaccaagtcggatgaggtcaagaaggaattgcaggaggcgcaacgccgcgtgcagaccattgccatggtgcatgagggattgagccagaccgccgacgaggtcgtcgacttcgacaaggtgattgccaacctgctgcgcatggccgtggacctagccacgatgaaagaccagcacatcgatatcaactacatgggcaagttcggcatgatgcccgctcaggatgccacgccgctgtccctcgtgctgaccgagctcatcaccaattcggtggagcatgggttcgaaggccgcaaggatggccatatcacgatttccgtgggccgctccggcccgaacctcaatgtggtggtcgaggatgacggttccggtctcggctccgaagaacagggaggattggctcgttcttccggttctggtttgggcacgcagatcatcaacacctttgtgaccaatgatttcggtggttccgtgcattgggagccgcgccgcggaggcggcacccgcgtggtgcttgatatgaagctcagggccgctcaggatgagtgatgcgaagcccaaaaataaggaaaccctcccaagtgggagggtttcctagtatgacgaagcgataatcaaaacatcagatttgcatctgcatggcctgagaacggcgggcgcgcatggcgcggcgcttcagcgcacgacgctcatcttcgctcaagccgccccacacgccgtaatcctgattggtgtccagagcgcacttcaggcatgcatcaatcaccttgcaggtgcggcacacggccttggcctcctcaatctgctgataggctgcaccggtgttgcccaccgggaagaagagttccggatccttgtcacgacatgcggccttggctcgccaatcaaaagcgctgctcattgcttgcctcccttaaaagccccgtggctggtgttgttccttaagtccagtaccaaggtaaccacgaaccgtggtgattttcaagaggtttcgccgagaaaaaaccgaagttttcacgaagcgcactgcaccagacatgccgatgtgccctcgatgagcacggcccggcccgcgttgtcggcatcgatatgactcatcgtatccaataggcgagcggggactccggccataaggtcagacgttcgttccccgcacgggaacacgattctggtattgcaatgctctggtatacgtatcgggcgaatcgtgctgacggcgaataccacgctgacggactcatcggccaacgcatgtgtgaaagacagcgcctgctcgtcggtgcggaatgggtcgaacaactcatcggcgtcgtcgacgaaccacacgatatgcggaggcggtggtgcatccgagctggcatacggcgtgcagcggccgttgcgaagccattgcgatccccatacccggcgatgcggggaactgacacgtaccgccaagccatcagccatgctggcgtgtcgagccaatgttttcagcaacgtggttttgccgcgcccctgcgggccgatgacaccgatattgccaccggtgagggataccgtcgcttctcgcaggttgatgccatcgtcggcaagtccaaatcgaatgcgttgcggtgcgtgattggccacagtccggtcttttacgtgccggggaagtggcgcggtaaacagggacggctgcggcgggctcccgacgaaccgcgatgcgaacgcgatctggcggcataccgcatcgatatcgcgcgccgttgcacagcggaatgccgtcacctgttcggaatcgttgcagaacgccgcaccgggcattgccggactgaggtcggcggcacgaccatcaccaagcagctcgcatgattgcagacggtcccgaacccgtaaacaaatgctgacggacatattcgccttcatatcggcactgacctgacccatcggattctgcgtacaggcgatcagatacatgcccagtgacctgccgagcgaggcaatacgcaccagacgattcacataatccgggagctggtccttcagggcatggaattcgtcaatgaccacgatcaggcgcggtggcggattgaccatatcacggatatcggaagcatggacagcggcggacagctgttcacggcgtgtcagttcggcttccagcgcacgcaacgcgcgtacggcatgcgccagatccagatcgcatacgctgcccacggtatgcggcaaccgttcgagtttgcggaacgcggaaccgcctttgaaatccaaaaacacgaaattcagatgctcaggcccgttcatcgaggcgagcgccagacaccagctttgcagcaacacggatttgccggaaccagtggtgccggccaccagagcatgcggcccctgacggttcagatcgagcctcagcggctcgcttccggtcatgccgatcggcaccgcaaggtcaaggggttcaagccaatggcccacaatggtgcgccatggcaggcgtgcgaagtgcagcagcgattctatcggctgcgacggcgcatgacggaggtctgcggcgcgggcatcggcatcgtccgtgatactgatatcgatcgttgcctgttgcggggcgggggtcttctccgggcccggaggtggggggagcgtcagcagcagggacacgagacaggcgaatatgcctggcgtgatcatggcggcgaacagccattgcccgtgcaacagcagtatgaccatcatcagtgcctgcgcgatcatcgggcacgccgcggcaagcatggtcaggcgggcgcgcaatggcggcgcgcccaaacggtgcttcgcccgggatacggcggatgccgtatgggcggactgtcgcttcgaatcgttctgctgtgatgtcatgcttccagcgtgggggagcgcatgccgaaagcgcaagccgaatcaaggtatgtggttctagcttgccgagttatccacatgacattttgcccgtgcatgattggtggtgtaggcaatggtggcgatcatgcgccgacgatgaagccgatgggctccgggaaagcgtcggtcagccttccgccagattgcccacggcgccggccttatgcgtgccgtcggcaagctgattgaacagttcggtgttcctggcgtcatcgagcagcaccgaggagccaacgccatcaacgtaataatcagggtcggaccagtacacgctgccggagatgccattcgagccggtggcgcttttgaacgccaacgccatggtgagcaacgtgtaagggttggttttttcatccacagtgagtgcgctcatcgcggcattggacactgccacgactttggacggattggtcagggtcccactgctggaagcctttttgacgatggccgagatgacctgccgctggcgttcgttgcgtccgaagtctcctcgcgcgtcggcgtatcgcatacgagagaaggacaatgcagtggaaccatccgtcgtatggcatcccgccttccagttcagtccggaataggaatcctgaacatcctcgtcatagcacagttcgataccgcccaaggcgttcaccacgttctgcagaccgccgaacttgatctgcgccacatggtcgattttctggccggtaatctgctcgacgttgcttaccaaggctttcttgccggcaatctgcgccaccgcattgattttcatgtactggttatcgacgttcataagcgaatcgcggggaatggaaatcagcgaactcggcccgcttttaggcttgatcagcaccagaatcgtatcggttctgaagcctgagatattgtccacgccgccgtaatcggtggaaccgtctcgctcgtcggagccaagaatcagccaggtcgaggccggcgtgttgggggtgtcggtcagccagtcgctccggttcagtttgctgtccacccattgccaggcaccgaaaacagaaagaatcaacgccgccaccagtaccgcaatcgcgcataagatgatgcgcaaggcgcgcggccggtgtgccgttaccgttttcgccgttgccgccgccggccggccaatatggctgaacttcgtggacacgtttgctgctggcgatgagggccgggaaaccggcatatccgacggattgcgcacggcgttgcgggatgagccggaagacatccgcgctcgcgacggcggaatgctgcgcggtgcggcggcatccggagccgtgctgcgggtggcacgtccggttttcggagaaaaactgggcggagtccgcctgccgttgtccgtgacgttggcgcttgccgtgacgttggcgcttgccgtggcgttggcgttcgccgtggcgttggcgttcggttgaggctcttcgatgtcatttcccgtgacggacggacgggccgatggagcctgacctgactgacgtgaggcgcgggcaggggcgaaggagcgtggcacctgcccggaaggtcgggtgcgtcgatttcccgcaggaatgaagcttggcgggttgatatgcggatccgccccacctgattcctgcgtcataacccctcctgaaactgtcgattgtctgaatgacactttgacacagcatccgccgggtgttcctgcgctatggtgttcctgcgcaggaacggcacaatatcatgtgcaacggcatcagggcatcgtgtccgcgccatagcacacagttccataaaaatgatgtaatgacacgagaaagaatttgacaaaaacgaaattgcatgtgtgtaatttagtccgtatgaaaagctcaataggcaaggagaatcgcatgtggggtgtggtcgacgattcagccgaagagccatggcatgaattgtggggactattccgacctgatggcgatgtatcttggcagcacaaggcgttgtgcgcgcaaaccgatccggaggcgttcttcccggaaaagggaggctcgacccgtgatgccaagcgtgtgtgcgccaaatgcgaagtgcgtgaacaatgcctgaaatgggccatcgaccatgatgagcgattcggtatttggggcggcatgagcgagcgcgaacgccgtcgatataagcgagagcaccgggagcaggcgtagttccacacacacccccttcaagtctggtgcgtacactgggagtttatgagtccgacaggtaatagcgatattcatgaggcgttggccgacgccatgtcttctcgaccgtatacgcataggcaggatgtggataccggcattacggctgtgatcaccgttgaggaggatatgcgtttcctccggtctacattgcgttcggtattgacgcagaatgttcttccgggagtcgtcatcatcgccgacgcgaccgggcgcgccggttcgaggataaccacttcgttcgaggtcattccctcgccatcggggccggtaatggaggtgccgcagtccaagcatgtgaccattcacatcgtttcggccaagggcgcgcgttccttcggcgatgcggtcagccgggcgttggatcgggccgatttggatgacgctccccgcgcattgtggttgctccatgatgattcccgcccctcggatgcctcatgccttgaacgattgcttgaggcgtggcgcaatacgccgggggccagcgtgctcgggtgcaaacagtgtgattgggaaggatcccacctgcatgatgtcggtatgtatgcaggccgacacgccgtgcattccctggtggtcgatggagaacccgatcaggagcagtatgacgggcgacaggatgtgttcgcggtgtcgctggcgggcgcgctggtgtccatgtcgcaattcacgcgactgcggggcatcaatgcctggctgaccacctacagcgaatcggtcgatttctgccgccgtgtctgcctgagcggcggacgcgtggtggtagtcccgcaagcggagatatcacatcgtcgcgcacggtatgagggcattcgtacacgaggcggggagccgcttaaggaagatcacacggtcaatcatgcgatgacggtgcatcgctcccaacagcgctatctgtacactgacctggccatgtcgtcctggattatcgtctggctgtggaggctgattcgcagttttggcatggccatagccatgatgttcggcaagaagccgtatgaagcatgggtgcaattgtgcctgccatggttggctttggccgatatcgcgggaaacatgaaatcgcgcaggctggtggccagacagtcgaaggtcgccgcatcgtccctgcaggttttgttcgccgacagtcggcagatcaagcagttccatgatcgtcgggatgcattccaatcccagcagggcagagtgctgctcagtccgctggaacgtgcccatctgcggacacgcaccatatatcgctggagcgcagccgtggtgatggcgctggtgtgctttgcggccatcgtggtgatgtattggccggtgttccgttcgatattctccggtggatcgttgtattccgatgtgttgctttccaccggtgccagcttcactcaactggtgcagtccgccaccacgccatgggtgtttggcagcggcaccggcattcctgcgccgcccacgccgtggctgctggtgctgatgctggcctcgctggtcacgctcggccatgtgaccgccgctctggcgatgatactgtttgtggccgcgccgctgagcgcattgtcgttctgggcgctggcgggcgtattcacccgctcggacgtggttcgtgtgctgggaggactgttgtgggcatccaccggcattatgttcggctggtatgcgcaggccaatatgccgatgctcaccgtaatggtgttcctgccggccgcgttcgcattcgtgttccgtgccgtgggcatgtaccataccgaagacccgctcaagccgcgcacatccgttcaggccgcggccatcgccgcactgtgcttcatccctgtggtggccgccgaaccgcagctgctgttcgcgctgatcgtcgtgttcctgatgttcctgctgttcgtgcgccgcaagcgcgccatgctgttgcttattccggttcctgccgcctttgcggtggcccctacgctcgtcaatgcggtgcgttacgccgatttgggcatgtggcgtcaactgttcggcgacatcacagtgccaacgtcatccgccaacgggtcgccggcgtcgctgagcctgcttgaggccgtacagcgtgcgctgggatggcgaatgggatcgaccgattatgccgatttggcggtcactgtgctgttcggcgtcatcacgctgctcgctcttgcttcgctggtgctgccgttcgcgttgcggacctcgcggctgatgtgggtggtaatcgtttgcggaggcgcgctcgccctgatttccagccgtgtggccatagccgtggatgccgatggcgtcgtggccggttccgcacagcctggcatcgcgatgatgatattgggcttccttgcctgcgtgtgcctcgtcgccggtggggcggtgaagcgattccaaccgttgcatgcgtccggcagcgatcccgcaccgaaaagggaccgtctgcatgcgctcatcgtgtctggccgtgtggtgcttgctctgatactggtgtgctgcatcggcatccaatgcatgtatggcatcgaacgtcataaggatgcgggactgggcgtgtccgaaaacggcctgcccatggtcaccaccgattatctggaggccagtgccgatcatcgtgtgcttgccgtgagcgcggagacccgcaacatcgtcaactatgcggtgatgcgcacctcgcgcggcgatctgatcgacagctctccggtccagcgggcgcgcctgctgtccggcaagcatgatgcggttgacgaacagctggcccaggcctgtgcctcgctgctgtccaatcccgacgaagaggccatcgcggccatcagcgcgcttggattcggcggcatctacgtggttcccgagaccggcgattcctcgaacgacatgccgtatgaacagttgagcgcgaatatcgccgcatcgaacggcacccagtccctggtctccacggatagcggcagctactatcgtctgacgctgcgtagcagcacctcacagcaggtggatacctcatggcagcaacgtgcacagcatagtgtctggaggcacgcctggctgatatgcctaggtgtgatcacggcgttgtactgcttggtcgccatgcctcgcagacgaccgtcctacggattggaggagcaggcatgagcaacacaacttctggtttcaaacgtgcgatcggcatcgtgctcggtgtgatcaccatgctggtgttgattgcgctgttcgtcgttctcgtcatggcccccatccccaatatctgggtggacaaggtggccgcttccgataatgccatcgaccagacagttagtccgacccagtccgaaacctactgcccggcacctataggattggccgataccggcacgtacggcgacagcgccttccaggccactgtcggcaatctgagcacacaggcgcgctacgcggcgttcggctccgtctacagcgccactgtctcggcgatcgggcaaaagtccagttcagatgacgtgactttgaaagacgccgatccgaccgacgattcctcggtgaaaaccggtgctcagaagatcgatcagggagctcgcctgatcaatacccgtatgttgcaggccgcagctggcaccggcaccgtcggcaccatcgcatcatgggccgatgacggcgatgtgagaggcgtatcggcggcatcctgcgtatcgacctcgctcagccagtcgttcttgctctccggcggcacgaccggtaccacacagcagctcatcgtctcgaatccctccaccaagccgaccaccgtcgacattgccgtctggggttccgagacagccgggaaaatggcattgtccacacaatccacgctgtctgtgccggccgagggggagtcctcgatggaactgtccgccgcggtcgatgggcagcatggtctgttcgtgaccgtttccagcaaggagactcctatcgcgtccgtggtacgtacggtgaccatggatggtctgacaccgaagggttctgatttcgcgctgccgctgccgaccgcctccaatgcgtcggtggcgccgtccatcactgccggcgatgcggtcaccgcttatctgttcgccaaggcagacaccagcaccgggctgtcatggattaccgacaaaggattggttcccgccaaagatgccaccgtcactgccgataaggtgacggcgatcgacttgggagaggctcctgatggggcgttgggcgtgatgtccaccgcagaggatgccgtgtcgttctccgtcaaggccacacgctccggtgactccggccaagccgatttcgcattggtcaatgccggcgagccatccgaattctcggggttggcccttcccgacggagtaaaggcctccatcacgctggccaatacgtccaatgcgcgcaggacggtcaccttgcacgcctacgatgatgccggtgcttcggtgacctccgaggaaatcacgctggatgcgaacgcggcgcaaacgattgagaccggcaaactttccggcgatcatggcaccgcggtcgtgctgatgttggaggactcatccaagaaagtgagctggggagcgcgtttcagtcacgattcgttgcaagacaaggacatcgccggattgtccgccatcgacgcttcaacgctgatgcccgccacggtccatgtctgggctcggaacgattcctccatcgtcaagtagagcgcgctcgccgaagcatcggtctgatgatgtttcggcgccgatatagctgcgggggccgtgccactgtcttacttgaagtggcacggcccccgcaatactgtcacaggccccaatcggggtcgatttcctcgggcctgcgcccatacaattccgctatgcgagccaccagctcatccctgacggccaactgcaattcgagcttggtaggtgcctcggtctgcaacggcatacggtagagcacgactcgtgcgggaatgccgtggctggcggggaagcactgggacgtcatattcggctcggtctgccaaggcgtcggatccgaaggcggcacatcctccaccgcgaactggagcggacgtatcagttccggccacgcttggccgagcctgcgaacctgggccgccaccatatcgtcgaacatgccggtgcgagtgcggtaacggggcagacgggtgccgaacatcggggttcgtgtgccgcgaccgtggcggttgcggtagattcgtgcgttccaaggtggctgaagcatggttcccaccataggacatggcggaggcaacatgcgttaggattggttcattggctgtgaacattcgtcaacgagggaggcgcgacaaatggtggtacgttcgtggtccgaacttgatttcgataatgtctgctccaacgccaaggtgttcggtttcgatttggacaacacgctggccagctcaaaacagccgatgaggcccgcgatgatcgaacggttctgtgcgctgctcgaccatacggtggtggccctgatctcagggggcggcatggcggtggtcacctcacaggtgctggatgtactcaccccgaatgccaggcgcggcaatctgcatgtcatgcctgcctccggctcccggtattaccggtgggatggcacgcaatgggccttggtgtatgcgcatgatctgtccgaagccaccgtggccgctgtctcggaaagtcttgagcgacatgcccgggaactgggattgtgggaacagcaggtatgggggcctcgaatcgagaacaggggcagccagatcaccttctccgctctgggacagttcgcacccgtagcggccaaacaggcatgggatcgcgataacacgaagaaacaggcgctggtcgaagcggtcaaggccgatctgccgcacatgcgggtcagggccggcggctacaccagtgtggatgtcagcgaatgcggcatcgataaggcctatgccgtgcgcaagctgacgcagacacttggcatacaggccgatgaaatggtgttcgtgggcgatcgcatgacgcctacgggtaatgactatcctgcggttgaggccggtgcgatcggtgttcgtgtggagaatccgcaagacacggtacaactgctggatgcactgcttgcgcgattcgatactccagcttgatggtgacgcgttatggacaggccgagcgtatacaagtggtggcatgcgatgtgggcacaggcctgcaatctgctgtttccacgcggctgcgctgggtgtgacgcgccggatgaggtattgtgtgcggcatgtcgggccttgttcgcacaatgccgggagcgggatacagacggtggtggcggagcccgtatatggtccgcatcgatttaccagggagcggcgcgtcgtgccattctcgactggaaggaccacgacgataccgagcttgacggccctttcggccgcatcatggtgtcgctgctgaacaagacgccaatatcatcatcatgcttggggcatcgcgtattggtggttccggtgccgtcatcgcgggcgtcaatgcgccgaagagggcgtgcccatacggcaccgttggccaaatcggtggcaggggcattgcgtgggtacggtgtcaatgcgcgaccatgcaatgccctgagctcctccaccaaggcacgctccgtgcagcagacctcttcggtacagcgtgcccgtcgtatcaccggtcatgtcagggtgaagcgtgatctcataggccatggcgacgcggtgcttctcattgatgacatcgtcaccacaggtgccaccgtgcggcaatgcgttcaggtgtttcagcaggccggcaccaaggtggtgggcgtgctggtattggcggatgccgtggcgcgacggtccgatgacgatatcaacgggtgaatgacatcggtgacgatgccccagatagcaggcgaagcgccgttgctcggcatgtaatcgggatatcgaggattctcggcgtgcaatatggtgatgccggcccgtgaaaccagccgcttgatggcgatttcatcgtccatgacagccgcaaccacatctccggggactggtgccaacgaacgatcgacaatcagcagatcgccgttatgaataccggcattgatcatggaatcgccggccatctgcatgacaaacagcgtggtgtcgtgcggcatggttcgtgacttggattgctgtgtcatgctgtgcctcccaccctgtattcgaacatctgttcgaatacagtatacggtaggacggcggacaatatcagcgttcggcgacgtgatatttaggcaggatgatttcgaaatcggcgcctcgcgtgtcatcgaccactttgacggtgccgccgtgcaattgggccgcccaacgtgcgatggacaggccaaggccggtgccgcccgactcggtgccgggacccgtcttgcctttgacaaagcgccggaagatatccgaacggtcggacggtgcaatctgggagccgaaattcaccacattggtcacgatggtgccttggctgtcatcctcatgggcatcgaccagcacggtggtgccgtcggccgaatgcttcagtgcgttggcgatgatgttggtgaacagctggcgcaggcggtcctgatcgccttccatcgagatgtcggccggcacggtgacgcggatgtcgtgggcgtggccgccatcggcgatttccaacggctcgatggtctcgtcaagaaagtcggcgaaattgaacttctcgatattcaaactcgccgcaccggcctccatacggctcaaatccaacaggaaggcgatgaggtcggagagacgctgcgtttgggtgaggatgctctccagattggcgggagtgggctcggtgacgccgtcggccatgttctcgaccatcgcttgcaaagcggaaacgggcgtacgtagctcatggctcacattggcgatcatatcgcggcgcattttatcggcatgttcgagttcgccggccatctcgttgaacgagcgagccagctggccgacctcgtcatgacgatcctgatcgatatccacgcggaccgtgtaatcgccatccgccatggcttcggccacatcgcgcatctggcgtaagggagcggtgatgccgcgggagaagaaataggtgatgcccaaggccaccaccaaagtcagcggcatggcgatccaaccggaccagccgaatttcaggaggaaccagcacatggcaaacgcgatggcagtggcgataacgatcagtacgctgagttccagcttcagagaggagaacaaatcaaccggcttgacgcgaggtttcatcgcatcaagccgggattgctgttgttttttggatgccatcacgcggtcggcggctcgaaagcgtagcctacgccgtgcacggtgcggatggtatcggcgccgagcttatggcgcagcgccttgacgtggctgtcgacggtgcgggtgccggatgcgtcgacccagtcccagacctcttcgagcagcttgtcgcgggtgagcaccgacttcgggcggcgggccagtgtggccagcagatcgaactcggtgggggtcagatgcacctgctcgccgttcacggtgacgatgcgctgggccgggtctatgaccatcgaaccgaagtcgagcagcttctcgttctccgaattcttggcgatgaccttcgcacgctccacgcggcgtagcagcgccttgcagcgggcgatgagctcgcgcatggagaacggtttggtcatgtaatcatcggcgcccgctcccagaccgatgaccttgtcggcctcgtcatcacgtgcggtgaggatcagcaccggcaccggacgttcggcgacgatgcgtttggtggcctcaagaccatccatgaccggcagcatgatgtccatgattaccagatcggggcgtagctgggacgcggcctggacggcggaagcgccgtccccggccacgcgagcggtccatccttcagcggtgatgcgctgggcgatggccgtggcgagtgtgggctcgtcctcgaccaccagcaccatgcgcggtgtcgtattctgacgcgctgtggtattgagcataaataaaccggttacctttcagcctgttgaccagttcagtcttccggcttcaagaatacaactcccagagccggaacggtgatcttcgccgagaacggacgcgaatgatattcgccctcgaccgcttcgaaggtgccgttgtggatgtcggagccgccgtacttggcgtcatcggtggtgaacacttcggtccacttgccgccggtgggcagcgccacctggtaatcgggccaggcttcaccggagaagttgaccaccacggccaaggtctcgcccttggtgccgatgcgcaggaagctcagcgtgttgtggtcggcatcgtcgctggtcagccactggaagccggccggatcgaagtcctggctccaaagtgccggatgcgccttgtagaaggcgttgaggtcggcgaccatggtctggacctgacggtgctcctgccagttcaggcaatcccaatcgatggaggcgtcgtgatcccactcgccccactgggccagctcgttgcccatgaaggagagcttcttgcccgggtgagcccactgataggcgaacatcgaacgcacgccggctagcttctgccagccatcgcccggcatcttgccgtacagggagcccttgccgtacacgacttcgtcgtggctgatgggcaatacgtagtgttcggagtaggcgtacaccatggagaaggtgatttcgttgtggtgccacttgcgattgatgggctcctcgtgcagatactcgagggtgtcgtgcatccatcccatgttccacttcataccgaagccgatgccgccggcggaggtgggggcggtgatgcccggccatgcggtggactcctcggcgatcatcatgacgccggggttgttcttgtacgcggtggcggtggcttccttgaggaagtcgatggcctccaggttttcgcgtccgccgtagatgttcggacgccaatggccgggttcgcggctgtagtcgaggtagagcatggagctgacggcatccacgcgcagcgcatcgacatgcaggtcctcgagccagaacagggcgttggccaccaggaagttgcgtacttcgcggcgtccgaagttgaacacataggtgccccattcggggtgttcgccgcgcagcgggtccgggtcctcgtacagcggggtgccgtcgaagcggccgagtgcgaaggcatccttcgggaagtgggcgggcacccagtccatgatcacgccgatgccggcctgatggaaccgatcgaccaggtaacggaagtcgtcgggggagccgaggcgggaatccaccgcatagtagccggtgacctgatagccccaggagccggagaacgggtgctgtgccagtggcatgaactccacgtgggtgaagccttcctgcttgacatagtccacgagctgcttggccaggtcgcggtaggtcagtccctgcttccagctgccggcgtgaacctcatagatggagaccgggccatcatgcgggttggtggtgcggcggtgctgcatccaggcgtcatcgttccactcgtaggtggattcggtgacgatggaggcggtgtgcggcggaacctcgtgctgacgctccatcgggtcagccttcatctcccacgtgtaattggcgttcaggatctggaacttgtaggtctcgcccgcgccgatgccgggaatgaagatctcccacacgccggaggagccgagctcgcgcatggcatgacgacggccatcccaggcgttgaagttaccgaccacgcgcacggcatgggcgttcggggcccacacggagaacgcggtgcctaccacctgttcgccaggcgtgccgtccacgccgcccatcggatcgtcatagcgcagcacgtgcgcgccaagcgcctcccagagcttctcgtgacggccctcgccgaacagataggtgtccatgtcaccgactgtgggcatataacggtatgggtcgtcctcaatgagcactgcgccgctttcccactcggtcctgacgcggtagtcgggaatcgtgggctgcttcttggtgccggaggccggcacggtagccacgaacacgccgttgtattcgtgggtcatcgggtattcgccatcctgggtgaggatggtcacggacttggcaagcggacgcagcacacggattgtggcggtgtcggcatgcttgccgatgccgagatgcccgccgagaactccgtgggggttgtagaattcagcattgctcaccgcatcgaggtcgccttgggcgacaggcacggtgacggtatcttccttgatcttcgtttctttagccatgacccaaagtctacgtgcgttggagtcgaaaacgctacattggcgcgtcgaaaatggcgaattcttgcccttttcggtgtgtctccgtggttgtgagcgctctcataggggcggtccagaccgcatggcataattattcgagtttttgtgtgtaagccgtcagttctcggagggtacatgtcttacaaagtcggcgatatggtcgtctatccgcgtcatggtgcagcgaaggtggaggccattaccgagcggacggtcaagggagtgacgcgcgaatatctgcagctgtccgtactctcttccgatggtttggtcatcaacgttcctgtggacaatgccaggaaggtcggcgtgcgtgacatcgtctccgcatccgaagtggccaaggtgttcggcatcctgcggaccccgatcatcgagaaagagatgaactggtctcgccgttacaagctgaacgtcgaaaagatcgccaccggtgacgtcaacaagatcgccgaagtggttcgcgatctcgcccagcgcgatgtcgacgagcacggcctgtccgcaggcgagaagcgtatgctcaccaaggcccgcgccattctgacttctgagatcgccttgtccgagaagatcgacgaggcggaagcccagcgtctgctcgacgtgaacctgggctacgagcccgctcaacccggtgacgacaagcatcacaccgccgagcccgaagaggccgcggccgatactttggctcgtgtcgaagccgagaagaagtccaagaagaagtgatttgattgttgaggccccggtcgtgtccttatgcgatacgccggggcttcgtgattcataatcgtttgctgccgttcgtctgggtagcgccatcgaaggggactgcatggggtctgcaggagtgttgatagggcagggttttgacgctcaccgttttgcgcctgccggctcaggccgtgaactgtggattgccgggctttactggccggcgtctgattcatgcagcgaggccgatgccgccaaatacgagggtatcgaaggcgattccgatggcgatgtggccgcgcacgccctgattgacgcgttgcttgccgccgcccgattgggagacattggttcactgttcggtgtcggtgcggacgcgcatggtgccggaaggcatggcatcgatatgctgcaagaagttgtggcgcatctggcatccaacgggtatacgccggcatcggcctcagtggcgatcatcggcaaccgcccgaaaatcggcacacgccgtgctgaagccgaagccgccctgtctgcggcggttggttgcccggtatcggttaccgccaccaccaccgaccatatgggattcactggccgcggcgaaggcatcgccgccatcgccaatgccttggtggagaagatataacaaagcccccgctatgaatttgccagcgggggcaagaaaaatgaatgagattacttccgcactgtctccacggccttggcgatagcccagaacagggtggaaagcgtcacgataatgaagctcgggggggcggggaacatcgccgacagcacgagtccggcccaaatcgacaccaggcacagcacgctggcgatcaccatcgccttgaatggggagccggccagaatattggcggtggccgcaggcgtgatcaccagcgcgaaaatcagcaaggtgcccactgccggcacggcaatggtgattacaccggccataatcgccataaacgccacgttcatcagcccgatcggcacacccttggcctgtgccacctgctcatccaacgagctgaacagcagcgggcggtagatgatggccaacaatgccagcagcaatacgtcgaacacggcgaagccgatgatctggccggtggtgatggtcaggatcgagccgaagaggatcgactgcatctgctgggaggcggaactcgacaatcgcgcgaagaacagacccaagccggtggcgaaggccagtacggtgccggttgcgatttcacgctcggaaacgcgcttgcccaaagcaccgatcaccagtgcgccgcccagtgcgaacacgcccatgcccagtgatacgggcaggccgagcaacaccgcgccggtcgcgcccggcagaccgatatgggccagcgcatgggccgcgaaggtggaacgacgggcgatggtgaagtatcccatgacaccggcggccagggcaatgcacaggccggcgatgaaggcgttggtcatgaatggagcggacagtgtgtccagccattcgggatcatacgaaaagttgatggtgctcatgtccctgtattttctccatgcctgagctgcagcccgttgacgggctgtggatcggctagcttgatgttatcgattctcggcgctgttggcggcactgccattggtggcgttgccgtgctcgtgatggtgcaattgcgccacttcggctgccgtgtgcatatcctgcggctggtcctggggctcatccggcgtcggggtcacgaacatgtcaccctgcggagtggtgaccacctgcacctgtgtgccgtagaggtgggtgagcaggtcggagtcgagcactttgtgcatatcggcgtagtgcgggtgcccgtcgagcaagtagacggcaccggtcagaatcggcaagagcatattgagatcgtgcgcaaccacctggatggtcatgttcagttcacggttcagcttggccagcacgtgtacggtggcgcgttgactggccagatcgaggttggccaacggctcgtcaagcatcagcagttgtggatcgcacaccaacgcctgggcgatggccacacgctggcgcaaaccgccggacagttcggacagacggtactgcgccttgtcggcgatgccggtgaactccatcgcctcgagcgctttggctttctgggccttggtgatggggtggatgccgaatcgggtgccggtcaggcccagcaacacggattgttcggcggtgagattggaatcgacattcgccacatagctctgcggcacatatccgatgcgtttgttcatctcgcctgcgggcttgcccagtacggtcaggctgccatggcaaagcggcaaaagtcccagctcggccctcatcatcgtggttttgccggtgccgttggtgccgactatggccgtgaccgaaccggtgggaatggcaaaggtgccatgctgccagatgatatggtcaccacgcttgatggcggcatcgctgaacacgatgcaatcggaagtttcactcataacgcccgattgtggcaaacgatgctgacaatcgttctcaatatcgtgtacggatggtgacaaccaaagaaaagggttgtgcggccatctcgacaatggtcgcacaacccttctcgtgcaaggcgtctatcggcattgcacgaatccgatgccgttgtcctttgcttctaactatttgccggagtcggtctggtcgttgccggaggcatcgccggaatcgccattggaggcatcggcctttgccgaatcctgagacgaatcactggatgtggccgccttgcactgacggatgtacttgggctccgtgctggaaccggtgctggccttggaatcgtgcgcattggcatcatccgtggcggcgccgtcggcgctggaatcatcggaattcgcgttgccgtccgtggcgtcttcgcagccatagctcggatccaccgcgtcgatgatggtgttgatgagctggttgatccaggcgttcagcgtgtcggtatccttgggcatttgttcggagacgtcgactaccggcacatcggcacgaccggcagcgccagtgatcatattggtcgcgtcactggcttcctgcgtgttgttaaccagcacatccacgcccttgtcttcgatgagtttctggaaagactgcaggtccgcgggggccggttcgccgccggaagcggtcgattgcgtataccccttgggcgtctgattcttgaacccgagatcggccatcagataatagaccacgggttcggtggctgcataggtgaggtcggagtgggatctggtgaactcggacgcccatgtttccagcgatttctcatccgcctgccatgccttgagccgcttctggaaggccttcttcttgctggggagcgcctttacatatgcatcggtgatggccgtggccatgctggatcgagcgtctttggagaaccacagatgcgggttatcgccttccatggcacccatgacggaagcggcggatacgatattcgtggtcttggtcatcgatttggtggcccaggaatcgtagcccgcaccgttggccacgatgatctgggccttggacagcttggcgacgtccgaggtctttggctcgaaatcgtgggcatccacattggtggagttcacgatggacgtgacttccacatcatcgccgcccagctcggcggccagcgagccccattgattgagggaggcgaccacattgatcggcccggtcggtgcgggaacactggtcttgttgtccggctcggtttcagtgggggaggtggctgcgcatgcggcggtcgcgaacaacaggacggcgctcaggccggctgcggcgagtcgcgtaagtcgtgtgatttgagtccccatggcacgccttcttcgtgagagcgaacgatatataatcctgacttgttccaacgatagcctatcgtttcgatagaatgcaccgaaaccacaggggagggcgttgatgtccacaaaaatcgacggcaaacgaatcgcggccgaaatcaagaccaaccttgccgagcgagtgaacaagctcaaggcgcagggcatccaaccagggctgggcacgctgctggtgggcgaggaccccgggtcgatgaagtacgtggccggcaagcacgccgattgtcaggaagtgggcattacctcagtcaagaaggaactgccggcggacgccagcttcgacgacatcgccgctgccgtacgcgaactcaacgaagatccggcctgcaccgggttcatcgtccagttgccgttgcccaagggcatcaacgagaacgcgatcatcgacatgatcgacccggccaaggatgccgacggcatgcacccgtacaacctcggcgaactggtgctgcatgtgcgcggcgacatttcgacaccgctgccttgcactccgcgcggggtgctcgagctgctcgacgcctatgacattgatctgaacggcaaggaagtgtgcgtgcttggccgcggcatcaccattggccgcacgattggcctgatgctcacgcgcaacgccgtcaacgccaccgtcaccctgtgccacaccggtacccgggatgtggccgaccacatgcgccgcgccgacgtgatcgtcgccgcaatgggttcggccggattcgtgacgcccgacaagatcaaggacggcgccgtgctggtcgacgtgggcgtcagccgcgtctacgacgaagaagccggtcgctaccgcatcaagggcgacgtggacaaggcctgctacgacaaggcctccgcctacacccccaaccccggaggcgtgggccccatgacccgagccatgctcctggccaacgtcgtggaaatggccgaacgacacgcctagagtttcctaggaaatttgggcagagttgcttgtattgtgaatatctgtatgcctgtaagggtgtgcgtataactgaatatcgagaaattatccatccactattagaaaccatatatttacatggcagagaacaacactgaagtcgccaaggttgccatcaacgacatcggcaccgaagaggacttcatcaaggcagtcgattccaccatcaagaacttcgatgatggtgatctggttgagggcaccgtcgtcaagatcgatcacgacgaagtcctcctggacatcggctacaagaccgagggtgtcatcccctcccgcgagctttccatcaagaaggacgttgatcctgacgaagtcgtcgaggtcggcgacgccatcgaggcccttgtcgtcaccaaggaagacaaggaaggccgtctgattctgtccaagacgcgtgcccagtactagcgcgacaggggcgacatcgagaagatcaaggaagctgacggcgtcgttgagggcaccgtcatcgaagccgtcaagggcggcctcatcgtcgacatcggtctgcgtggcttcctgcctgcctccctcgtcgagatgcgtcgcgtccgcgacctctccccgtacatcggccagaagatcaaggccaagatccttgagctcgacaagaaccgcaacaacgtggtcctgtcccgccgccagtacctcgaggagacccagtccgaggtccgcgagaccttcctgtcccagctcaagaagggccagatccgtgagggtgtggtgtcctccatcgtcaacttcggcgctttcgtcgatctcggcggtggtgacggcctgatccacgtgtccgagctgtcttggaagcacatcgaccacccgtccgaggtcgtcaaggtcggcgacaaggtcaccgtcgaggtgctcgacgttgacctcgacccagagcgcatctccctgtccctcaaggctacccaggaagatccgtggcagcgcttcgctcgcacccacgttcctggccagatcgtcaagggcaaggtcaccaagatcgttcagttcggtgtcttcatctccgtcgaagacggc

SEQ ID NO: 1425 - DNA, 36107 bp, Unknown
  R257_15m  MAG No. k141_15093
aacggcccgtattcagtactcgacccctgcagacggccgtgagagcatgaaacgccagctggatcttgcaagggcgctcgccggtgaaacattccagatgggtgatgccaacgttcatgtcgacgcatggtgcagcgagcctgatgacctgttggtctacaggatgtcatcggatgcgccgattgatgtgaacatcagtgtcgccggcactttcctcaagcaatcacgcgcctcgttggaagcggtatccgacggccatcgggccacactcgtcgtcatgggccggatgcctggactcaacatcgggctcctgcctcacccttccgaacatccttgggaagatgaccaggacggaaccggaatggcgtacgccggtgcattctcccttactgtcacaggtggcggcatcaacgtggacgacaacagtctgcaatgctcgaacatcaccggattatcgctccgcttccgcagtatgagcggattcaagggaagcgaccagcagccggaacgaagcatgacggttatcgccgaccatttggagaaaaccatcgacgagtggtcgaccgacctgcagaccatgctcgaccgccatatcgcggactaccgcaaatatttcgacagggtgtctatccatctcggttcagcccatgatgacgatacggaactaccgttctcggcgatccttcgctcggatgagaaaaaggaaccgcatcgtctggagatgctggcggaagcgatgttcgatttcggccggtatctgcttatctcctcgtccaggccacacacccaacctgcgaatctgcaggggatttggaaccataaggatttcccgaactggtacagcgcctacacgacgaacatcaacgtcgagatgaactattggatgaccggcccctgcgcgctcaaggagctcatcgagccgctcgtctccatgaatgaggagctgctggcaccggggcacgatgccgctgacaagattctcggctgccgaggatcggctgtcttccataatgtcgatctctggcgtagggctcttccagcaaacggcgatccgatgtggtcgttctggccgttcggccaggcatggatgtgccggaacctgttcgatgaatatctgttcaaccaggatgcatcgtacctgtcccgcatctggccgatcatgcgggacaacgcgcgattctgcatggatttcctatcggagacagagcatggactggccccgtcccctgcaacatcaccggagaactgtttcctggtgaatggagaaccggtatccgttgcgcaaagcagtgagaacgccacggccatcgtgcgtaatctgcttgatgatttgattcaggcttctcacgatttggaaaaccttgacgaagaggacagcgctctggtccgtgaagcggaatccgtccgttcccaactggctgaaacgcgattgggagctgatggaagagtcctcgaatggaacgacgaattcatcgaatccgatccacagcaccgccatctgtcccacctttacgaactgcatcctggtgcaggcatcacgtctaagactccgcgtctggaggaagccgcgagaaaatccctcgaagtgcgtggcgatgatggttccggctggagcatcgtatggcgcatgatcatgtgggcacgcctgcgtgatgcggaacgcgccaaacgaatcataggcatgttcctacggccggtggatgcgaacgctgaaaccaatctgctgggcggaggagtgtacgacagcggattatgcgcccacccgccgttccagatcgacgggaaccttggattcccggcggccttgtcggagatgcttgtccaaagccacgatggctggattcgcgttcttccggccctgccggaggattggcatgagggaagcttccatgcgctccgcgcaagaggtggaatccaagtggatgcgacatggacggatcagacagtggaatatacgttgcgctgttcgaagcccacggagattacgctgaacgttctggggactgatatgggacatgtcgcattgtctccggataagccattcaagggaaccatccggcgttaacgtattgcgttatatccgttactaaatgttgcggaccgtctttcctaatagaggaggacggtccgcaatctttttttgatgggaaaggagattccgccattttccacgattggtatgcgcagatgaacctgtacagtgaaagctatgcgtgtaatttctggacgattcaagggtgtggcgcttgctacgccgaaaacgggtacccggcctaccacggatcgcaccaaagaggcgattttctcgcacctcgactcatggggagtgctggatgatgcccgtgtactggacctgttcgccggtactggtgcgttgggcatcgaagcgctgagccgtggcgcgcgagaactcgtggccgtggaaagttcccggcctgcggcggcgctgattaccaagaccttgtcgcagttacagaagaatcgttcgtgggatgcctcgctcaaggcccgtgtgttcaccaaaaaggccgagcaagtggctggcggctttggtgaatcctttgacgtgatattcattgatccgccctacgcctatgagaccgctgaatgcaatcagttgttggtcaatctggcggtgggcagcgccaccaacgagaacaccgtgattatgctcgaacgctcggtacgctccgacacccccaccgcccccgaaggctggcaaatcactgaaagccgcaactacggcgaaaccgccgtcttctacatcgagcccgcggatgacgactcggatatagagcgttccgacgattccgccgcgtagtgaatctcccaccgtgtggtgaattaatcggcgagccggcgcggatgggcggcggagacctcccagcccaaggccatcagggtcttgcggtcggccttatccagcgccttgcaatccagtgccgcgataaggtctggccggatctcggcggtgcgggccagcgcttcgtcgcggcgaaaacggtccaccttgccgtggtcgccggacaacagcacgtccggcaccgcaataccacgccacacggccggcttggtgtactggcgatgttcaagcagtgcgtcctcgccggtgtaggattcctcgacaatcgaatctgggttgcccatgaatccgggcatcaggcgggtgatggcctcaagcatcaccgacaccgccacttcgccaccgttcagcacatagtcgccgatcgaatattcgcgtacgtcgacgccctgggagcggtagtagtccgggatgcgcgcatcgtagccctcataccggccgcagccgaacagcagatggtcggcatggctgagctcggtggcgtcgcgttgggtaaacaacggggccgatgggttcgggaagatgagcaccggtgtgccggatagggcggaggattcagacggccgcgagaatcccagcagttcgtccagacattcgctccacacctcgggcttcatcaccatgccggccccgccgccgactggcgtatcatccaccgaatgatgcacatcgtgggtccagtcgcgcaggttgtgcgctttgatctccaacaatcccttggcctgggctttgcccatcaggctgaggttcatcacctcaaagtattcggggaacacgctcacgatatcgatcttcatgttatccagcctaacggtagccccgcccgcattacacggccaccactacactattgcggtgatgaatacgacgatgaacctccccacccgcaaaaagcccgaagtgttgtccccggccggcaacctgaggggcctgaaaaccgcggtcgattatggtgccgacgccgtctactgcggcggcaaagccttcggcatgcgatcggcccccaaaaacctaagccttgaggactttgaggaaggctcgcgctacgcccatgaacgcggcgcccgcgtgtacgtgacctgcaacgtgctgccgcgcaacaacgagatcgaagccatgcgcgagtacgtcggccagctcaaggacaccggcgtggacgcgctgatcgtctctgacatcggcgtgatgatgatggcccgccaagtggctccgaacctggaattgcatgtctccacgcaggccggcgtcaccaattaccaagctgcgaacgccttctatgagcttggcgctcgccgtgtggtgttggcccgcgagatggacttgcaggccgtgcgtgatattcgcgccaacattcccggtgacctcgacatcgaatgcttcgtgcatggcgcgatgtgcatggcgttctccggccgttgcctgttctccaactatctgaccgggcgtgatggcaatcatggcgaatgcgcgcagccatgccgctggaagtattcgatcgtggaagagaagcgccccggccagtacttcccgatcgagcagaccgagaacggcgcctatctgttcaattcgcaggacatgaatatgctggggcacttggatgatttgattgactccggtgccaccagcctcaaaatcgaaggccgcgcgaaaagcgcctactatatcgccgccatgaccaacgcctacaaaaccgcggttaatgaatacatgattcaacgcggttttgaagacgctgatggcaatgttctgaagcctttccgtgaccgtgtgattcgcccgggcgaccccgattttggccaaggaaccgaagatcaagtgatgagcaatgccgatgccgcgttcgccggtgtggccgatgagggatatgaccgtggctctgatactgcggttgccgattcggtcaccggctcggttgccgcagaacgtgaccgcgtgacggttgctgatgccgccgactcaactgcctctggtacgtcggccggcaccgccgtcgaacccgacggcatgagctcccacgcccgctccacgcgccgcaagtccaacaccgcggtcgaacagatcgagaccgattggaagcatgcggccgttcgcccggccccgcacgtcgaactgcccgaatggctgctcgaggaaaccgacaaggtggcccaccgcgactactccaccggcttctattacccggagcacaaggtcacacagaacaccgaccgctccgcctacttccgctcatggctggtagtgggcgaagtgctgagctggagcgcggacgaaggcggacgtgtcacgctgatgagccgtaacaagatcgagcccggtcaacaggttgaattcctgctgcctggcgagagaccattggtctttaccgtgccggaaaccggcctgcgcgatgccgatggcgcgccagtacccgccatcaataatccggcgcacgtgttctcgatgccctgcccgcaccaggtgcccatcaacgccgccatccgctcgcgcaccaaaaagcccaccctcaaagccgaataacctaccactccgcccccgctgactgggggtggtcatgggaatcatgaacaccgcccgcacccaagaaagaatgccttatgcctgaatacagcgaagaaatcctcgattccaacagcatcagctctaccgataaagccggtcgccctattccggtgaccatccccatcgcactggcccccggcatcaaggtggtgtacaccacgcgactgggcggcctgagcgccggcgattacggcaacctgaacctcggcggcaagtccggcgacgaacctgaggccgtgctgtcgaaccgcatcgcactcgccgaagcggtgcaagcccgcctatcgctggtctcccaagtacattccggcgtggctgtggacgtggacgactcgttcgtcatcaacacccccttcggcttcgacgtgtccggcacacatggtgagactgacactccgcacgtcatcgaggcggacggccaggtcaccgcacaatccggcatcgccctaggcatgttcgcggccgactgcctgccggtgctgctgggcgacccggtcaccggcatcatcggtgcggcccactgcggccgtcgtggtctggagcatggtgtgatcggcgccacggtagacctgatgaagagcaagggtgccgatccggcgaacatcgtcgccacactcggcccgcgcatctgcggcgactgctatgaagtgggcgacgagatcgccgaccagttcatcaagcgcttcccgctgaccaagacgaagacccgcttcggtggtgccggcatcgacatcgccgaggcggcaataatcgacctcgctttcgccggcgtacatcaggtggtcgattcgatgccgcgcgtgcacgccgccacccagtaccttgaggaagacccggaactcgccgaactgtgccgcacggacggcgaaggcccggccgagctcgcggagcgcatcgacaacatcagccacagcatgtgcacgctcgaaaacccactgtggtactcgcaccgccgcgccgcgctcgccaacaaaacacacgaaggccgcctcctcgccctcatcgtgcgtgactaaacggagaatgcgggcacattccgtggagaagatgtgatgcagttcacggacggccagccctcaccctacggtggtgcctatgactgagagagatttcgatacccccgtcgagacgcctaccgtccagccggcccccgctcagggcgccaaaccggcacaaaccgtgccggtggtggccgtggtgctggccgccggcttcggtacgcgcttcgaccccgacaatcccaagcagcttgtctccgtgggcggcaagcccatcgtgtgctggagcattgatgcctttgaacattgcgatcgcgtcagcgacatcgtggtggtggtcaatcccaaggtgcgcggtgaagtggaaacgttggttggcgagatgggctacaccaaggtccgcgtcatcattgacggcggtgacgaacgtgtggacagtaccgccgccgcgctcgacatgctggctactgctggcattccggacgatgccaagattctgatccatgacgccgtccgtccgttcgtggaacagtccgccatcgacggttcgattgatgcgctcgaccagttcacggccgcgaccgtggcctacacctcaaccgacaccgtgctgttgaccgaggatctgggcgatttgaaagtggtcaagtcggtgccggaccgcccgaacaccttccgcgcgcagaccccgcaatccttccgcttcgcgacgattcgtcacgcttacgatctggctgccgccgacccggacttccatcccaccgacgacacgcgcgttgtggtcgattatctgcctgatgaacccgtcgccattgtctccggtgcggaaaccaacctgaagatcaccacgctggaggatattcccacagctgagcgtatcgccgaggagattctcggtcgtgatcccaaggaagaggcccgcgcccgcatgcacgccctgctggcccaagcggccggccagatgcatcgctagactggcattatgcgtgaactcaatgttgtgatctccggcttcgaccactatgacggcgtggaggtcaatcccgccgtcgaagtgcccaaggccatcgccgagcaggggttgggcgtctcctctgctccggacgatccgttggagcaggtcgccgtcaccgtccatgccgtcagcatcccggtgagcttcgccaaagcctggcccacgctgaaagagacgattgaggccaccaagcccaatatcgtcatcgccaccgggctcaagcacgcagcccgaggcgtgatgcttgaacgatgcgccaccaacctgatggacgcgatcaagccggacgcggacaacgtgaccccacgccgcgaacccatcgaccccaatggcccggccgcctattggacccgcctgccgttgcgctcgatcctgaatgatttcacggacgattcgattccggccaccctgagctcggacgcaggcacgttcgtatgtaattcgctgttctacaacttgctgaactggaccgccacccaggagcgggtgctgggcggattcgtcagcttcccgccggtcgtgccggcggattccagccagcatggtctgccactcgaccagcagatcgccgctggccgtgatgtggtgcgcgaagccgtgcgctactatctcaagccctccagctccggcatcctcatcgcctagcacgctgcgcgccacgccggaatagaacatggttcgcacgcattgtaacgattgcgcgtcactcaacgcccagcgctagtgcgatgcgctacagtgcttcaaggatgtgccaagagctttatgcgtgtgcgaaaggaataaacagcgatggtggatcgtttcccggtggtgctgcgaggatatgacaaggagaaggttgatgctgccttcgacgctactcaggagagtgtgaagcgtgcgcagcagacgttggccagcatgcgtgagcagattgcggcggatgacgaccgtattctgcaactgcaggcccagcttcaggaagagaagaacaagaagccggaaggcaacagcttcgcttccctgggggcgaacgcccagcagatgctcgcctccgccgagcagacgagtaccgaactgttggaacgcgccaagcaggacgcatcctccatccgtaccacggctcaggctcaggccgaaacgctgatcaacaacgccaagctggatgcccagcatattgttgacgacgccaatgccaaggccgcctcgattctgacgaacgccaacaatcaggccgaatcagtgaccacctccgccaacgaggacgccgcacaactgcgctccgaaaccgccaagaccatcaccgaacagcgtcagaccgtcgagcttgagctcagcaacgcgcgcgaagagcacaccaagaagatggcttccgaacgctccacccaagagcgcgaaatcgccgatatgaaggcggaagctacccagcaggtcgccgcaatgcgcaaaagcgccaatgaggagatcaccaagcttaagtccgattccaacgatcagattgaggcggcgctcgccgaggccaacaagaagctcgccgacgtgcgcgagcaagtgtccaagatgatgaccgaagcccagcgcaaggccagcgaaatcattgatgcggccaaaaccaagggtcaggaaatcactgatgaggccgaggtcaagcgcaccagcacgatgagccaggtcaacgccgaagtcgagcagatccgtcacgacatcgccgctcagcaggatgaggccacgaagaaggtcaacgaactcctgcagcacctcgaagagcgtcgtgtggcggccaagcgggaagccgatgagttggtcggccaggccaagaacactcgcgaccaagccgattcatatgccgcgtccaagcgcgaggaggcggacatccaggccgccgcaatcgtgcataaggcgggcgaggaagccgatgcgcagatcgaggagcgtcgtgccgccgcccaaagcgagcttgacggtctgtccaagcgcatcgccgatctgcaggaacgcgagtccgtcatcacccagcgtgtttcggaactgcgttctatgttctcgcaggcgttctccggattcgctttcggtggtaatgcggcggcctctggtcagagtcaggaagccgctgccgtggcgtcattgccggtggtcgcgcccgtcccggaagtcaagcctgtacacaacgaggccgatgatcagccgggtgagttgagcggaaacgagtcggctgccgacgatcacaatgagacagatgcggcaccggctgattcggctgattcagctacgcagaatgagcagtccgaatcgtctgagccgtccgagcaccagacacagggcgaaccggaggccccgactcaggagaatccagccgtatctgagcagaacggcgaatgacaggccttcgattagactactagcggtaagaattacggcacctgcgctttcgagccaggtgccgtattcgtttggatctgcgccacaagcgcaccatcacagaaggagtatgacatgagtgaattgacgcctctgaccggcgaagcattgaataccctgcgcggcgatttcgcacagagcggcaccaaccgtctggccatgaacgcggtgaccgccgccggcatcgacaaggtggctcgcaattatgaccgcgctcgtctgatgcagcgccgtttctccaccatcgttgacaatggcgaagccacccatcaggatcgctccggccgctgctggctgttcagctccctgaacgtggcccgtttcgtggccaagaagaacatgaacctgaaggagttcgagttctctcagaactacgcgatgtactacgacaagctggagcgcgtcaactacttccttaaggatgtggccgctctggtggctgccggagagccttccgactcccgcctgatgcagcacctgctcgccgacgtgatgggcgatggcggccagtggaccatggccatgaacgtgtacaagaagtacggcgctgtgcccaaggacctgttcccggagaccgaatcctccaagaacaccggtgaaatgaacacccagctgcgccacatgctgcacaccgccgtggcgcacatgtacgccgctgacggcgatgcctccaaggtcgaggcgattattgccgacgccactgctgccggccaccgtattctgaccatccacctgggcgagccgccggtctccttcgactgggaatggaccgacaaggatggcgaattccaccgcgacggcgagattacgccggttgagttctggaagaagtacgtgggtccggctggtcttgaggactacgtgtgcctggtggatgatccgcgcaccgagcacgccaagggcaagaagatcggcatcgagcacctcggcaatgtggctggcggcgacgccaccgagtacctcaacgtgccaaaccagttcatgaaggactgtgtcaagcagattctcgttgagcagggcatcccggtatggttcggtgccgactgccacccgttcatggaccgtgagaacggcgcttgggccaccgacctgttcgagtacggccgcgtgtacgacgtggacttcgatttggacaaggaagcccgcgtgcgcttcggtgactccgccatgaaccacgccatggctttcgccggcgttgacgtggccgacgacggcaccacccgccgctggcgagtggagaactcttggggcaccaagatcgccgacaagggctacttcaccatgtccgacgactggttcaccgaatacgtctacgaggtagccgtcccgaaggccctgttgccggaggaataccagaaggctctcgaagagccagccaccatgctccccgcatgggacccgatgggcgccttggcctgacttcgccagcctcccggaatcggcctgacggccgatgctgtgttttttcgcagcctgccggctgctagggtctctccctctgacagcgcgaagccgctgacggggggggaggccgcggtcgcaggccgcacaacaacacagcatcgccgcaggcgagtccacgcaggcgagtccacgcaggcgagttcacccaaagtccataaccgccggcccaacaagcagtccccgtaacagactgctatagttgggcttttgcgtctatagcgccataccgacggtacgtatacaaggaaaggagtcgagcaatggcagcactacgtggtccggatagttccgaggatgaacgtcgtttgggggagcaggccgtctttcccgagaccgtcgatgtcaacattcgtcagcttgaccccattcccgcgccgcgtgccttcctcagggagcagccgctcaccgatgagatgagcgagctcgtgctccactcgcggcaggaaatccgcgacgtgctcaacggccgtgacgatcgattgctcgtcatcgtggggccctgctcaatccacgacccgaaggccgcgcacgagtacgcagaaaagctggctgccgtcaagcgtgagcttgaagaccgtctcgtgatcgtgatgcgcgtgtacttcgagaagccacgcaccaccatcggctggaaaggcctcatcaacgaccccgatctggacggtcgcttcaatattcgtaagggcatgtggctggcccgcaaggtgctcaccgacgtgctgagcctcggcctgcccgccgccaccgaatggcttgaccccatcaccccgcagtacatctgcgacgcgatcagctggggtgccatcggcgcgcgtaacaccgaatcccaagtccaccgcgaactggccagtggcctgtccatgccggtgggcttcaagaactccaccgacggctccatcaaggccgccgccgattcctgcttcgcggccggcttcgagcatcacttcctgtccattaacttggacggtcgcgtgatttccgccgaaaccaaaggcaacccggattgccatctggttctgcgcggttccagccacggcccgaactacgatgccgaatccgtgcgtcaagctctggaagacctcaaggtttccaaagcgtccggcccgagccagcatggcctcgtcatcgatgccgcccacggcaactgcggcaaagacgaaaaccgcgaagccgaagtcatcgaagagatcgctgagcgtctggcgcacggcgaacaaggcatcaccggcgtaatgatggaaagcttcttggtcggcggtcaccaaaagccggccccgctcgaccagttggtctacggtcagtccgtcaccgactcttgcgtgccgtgggaacgcaccaacgagctgctgcacaccctagccgacgccgtcaccgctcgccgcgcggctaaatagctttgtctttgtaaaaatgctcactgagacccactcagtgagcattttttgccaataacggtggtcatgtcagtttgttcccgtgacaccttatccttgggaaagatactgatccaaggagagatgttatgcagcagcaggaggaagcagcacattcgctgcatccgttgcaagtcggtccgcagccgttgaacaccccggaagagcttcgcgccattcgtcaggcgatgggggaggggaagaacccgctcgttgccactgatgtgccgcgctgggaagatcaggtgggtgtcagtcgcatcatcaaccgccgcgtattggagctggagccgctgcccacgcccgcgcaagtgctcgctgaactcccgctgaccgatcaggctcaggaaatcgtcgcctactcgcgtgatgagattcgcgcgtgcctgtacggccaagacgacaggttgttggtcatcgtcggcccctgttcggttcatgacccgaaggccgcgctggactacgcgcaccgattggccaagctgaaggacgagctcggtgagcagctgctcatcgtcatgcgcgtgtacttcgagaagccgcgcaccaccatcggctggaagggcctgatcaacgacccggatattgatggcagccacaatatccgcaaaggcctgttgcttgctcgcaaaaccttgcttggtgtgctgaaggaaggattggcggccgccacggaatttctggagcccaccagcccgcagttcatctcggacgcggtgagttggggcgccattggtgcgcgcaacacggaaagccagatccaccgccaattggccagcgggctttccatgccggtcggcttcaagaacgccactgacggctcggtgaaggcagcggtcaacggttgcttcgccgctgctcagcagcacacgttcttcggcattgaccatctggggcgtgcctgcgcagtcgagacccttggcaacccggactgccatgtggtgttgcgcggctcgattcacggcccgaactacgatgccgagtccgtggccaaagccatggaagacgtacgcgccgaaatgcccgccgaatccgcagcctcgcacggtctgattgttgattgctcgcacggtaactccggcaaggacgagcatcgtcaggccgaagtcgtgcgcaatattgccagcagaattgcagctggcgaacagggtattaccggcatcatgatggaaagctttattgaagggggcaatcagaaggccgcgccgcttgatcagctggtctatggcaagtcgattaccgacaagtgcatcagctgggaagaaaccgaggccttgctgcgcgagcttgcggaagccgtggccacgcggcgttggcactgagttgcgtcatcggctctctcggggggagcaatgtgacgaaacgtctgactacccctcagcccgccattcggcggccagctcccctgacaaggggaaccgaaagtgttgtgaaaggaacttacgtatgggtatgaaaactgtagctattattggcgcattggatgaagaagtggcactgatcgccaaatcgctcacgcatgtgacgcacaccgccaagggcagccttgacatcgtgtccggcacggtcgactccttcggttctgacgtcatcaaggttgccgcaacggtaggcggcatgggactggtcaatgcggccgccaccacgcagctgctgattgacgagttcgccccggacgccgtgattttcagcggcatcgccggcaacctcaacacccacctgcacatcaacgacgtggtgctcggcggcaccctgcgctacctcgacactgacatgcggctcgtaggccagtggaagcccggcactgcggacgctccggtggaggaattccactctgatgaccgtctgctggaagttgccgacgaggcgcttgccaatgcgggcattacccacatcaccggcatcatcgcctctggcaactacttcgtggacacgccccaaaaggtcgaggaggtcatccgactcaccggggctgacgccgtggagatggaaggcgccgccgtggcacaggtcgccgcccgcaatgacgtgccggcactggtgattcgtgccctttccgacaacgccgacaccgattacgaggtattcaaggagttcgacatctccgagtacgccgataccgccgcccgtctggctgtcgacatcgtcaagcgcctgtagtcggcgggctggcccatctcaccatccacgttttgggtatgatgaccacaatatgagcgttttcaaactattgcttataacctgagccatactcggtgttcggcacagcgatgtgcggggttcatcgctggggccacaagccgtaccagttcttctcccgcatgccggtcgctgtgctcaattcgttaagcgacgacaacaccgtcgcgaagcattgaatacacaatgcgcacgctgcactggggtttatctgcagcatgaggagagaaaaaatgactgcaagcgcaaccgcggctgtgaccaaaccggtgaagaaggattcggttcctgagatcatcgccgcttccatggtcggtacggccatcgaattctacgataactactgctattccattgccgctgctagctacttcggcatgatcttcttcacggacgtcgccaagtccaaccagaccctcgccacgctgatggccttcgtgaccttcgccgtttcgttcctcgcccgtccgttcggctccatgctgttcggccacttcggtgacaagctcggccgtaagaagacgctggttatcgccctgatgaccatgggtatcgccaccttcctggtcggctgcctgcccggttatgagcagattggcgcatggtccgtcgtgattctgtgcatctgccgtgcctgccagggcgtgggcctcgccggcgaatggtccggtgccgcgctggtcgccactgaaaacgctccggccgacaagcgcgccctgtacggttccttcccgaaccttggcgccccgattggcttcttctgcgcttacggcctgaacctgctactcgaatccaacctgagcaaggcacagatgattgccttcggctggcgtatcccgttcctgtgctccgccgtgctggtgatcattggcctgtacgtgcgtgcccgcatgtctgagaccccagtgttccagaaggccactgaagagaagcgcacctccaagcacccgctgcgcgacctgctgccgtactggaaggaagtcgtgctcggcaccgtagccatgggtatcacctataccctgttctacgtactcggcacttggtcgctggcctacggcgtcaagggcttgggcttccagcagggcgagtacctgctcatgcagatgtgctccgtggtgttcttcgccatcttcatcgtggtctcctgcgtgtacgccgacaaggtgggccgcaagaaggtcatgattgccgtgaccgccgccgccttggtgttcagcttcttcgtgccgatgctgctcgtgcactccgccgcccatatcatgatcttcctgtgcgtcggcttcatgatcatgggtggtttgttcggcccctgcggcgcctacctgcctgagctgttcccggtgcacgtgcgttactccggcgccggcctgagctacaacctcgccgccatcttcggtggcgcattcgctccgaccatcgcccaggccctggtcgcctccaagttcggcgttgccggtgtgggctggtacatggccatcatggccgccctcgctctgctcgctctgttcctgattaaggaaagcaaggacaaggactacgagctgtaaatagagctccccatattatgctcccgctggcgggagctgtccacgaaagcggactgagggtggccaatgggatttcggttctttgaccaccctcagtctcactgcgttcgacagctcccgccagcgggagcattttgttatgtcgtcccaccaaaaatgaacaatagacgaacttacgtagtttgggcatctcactacgccttgcacgttttactctggaaatcatggatatctggcagatcgtcgtgattgtggtgctcgccgcgctgatactggcgtgggttgccgtcatcgcctacaacaaaggccgcgtttcaggtcggctcgccgccgaacaggacctgtccggcgacgaggatacgcgttctctattcggtgatgatgcgcccgtgcgccccacagagcgtcgcctgattgaagtcctgcccgaagccctgattgttaccgaccgcaacggcttggtccaatattcaagccccggctcagtgccattcggcctggtctccggcgaccgactcaactcgcgcgaagtcgaggacatcctcactcaggccgccgccgacggtggcgtgcgtgagcgtgaggttcagctgccggtcaatcgcaattcctatccgtcctctaatggccgaggactggaggccggccagtcacgcccgtccaacatgctgtatttgcgtgtgcgcattggcgatatcggcgatgacctgtacgccatcttcatcaacgacatgtccgagcagcgccgtttcgaggccgttcgccgtgactttgtgaccaacgtttcgcacgaactcaagactccggccggtgccatctcgctactggccgaaaccgtgaccgacgccgccgatgatccggacgccgtacggtatttttccggccgtatctccaaggaatccgcgcgcctgaccgaactggtacatcatcttatcgacttgcagaaagcccaaagcccgcaaagtgtgattgatgcgcggcgcatttccgcgctggatgtggcacgcgctgccatcgccgccaatcagacccaagccgactcccgccatgtggatattcgactgagtgtcaacggacagtcagtgcccacgaaggtcgaggagctggccgatggcgaaggttccttggaagaatcaggcagcccggccacgagcggtccgatgatcaaggccgacaaagaggccatgcaaaccgccgtcaagaacctcgtagagaacgccatccattactcgcccgaacacaccactgtggcggtcggcgtgggggagcgcgatggcaaagtcaccattcgcgtggtcgatcagggcatcggcatccccgccaaatcactggaccgcattttcgagcggttctaccgggtcgacccggcccgttcgcgcgagaccggcggttcgggactcggcttggccatcaccaagcactgcgtgcaggagaacggcggtcgaatttcggtctggtcgcgtacgggggaggggtcgacgttcaccatcgagctgccggccgtcccggatgaggatgacgacgaggcccgaccggacgagtcgacacaagcgtagggccttggttggtgcccgatatggtgccattccattgccgcacaatcacacagtgggcgaggtgcgcacaccgtgcgtagcacaattacgcaattacgtactttcaggaaacagcaggctaacggagaacaaatggttacgatagtatcggaaaactttgcgcctatgcgcacgggaacatacccaagaaaggctactatggcacgcattcttatcgtcgaagacgaggaatcctatcgcgagccgttggtataccagctcacacgcgaggggtacgacgtgtccgccgccgccactggcgaggaaggtctggaactgttcaccaagggcggcatcgatttggtgctgcttgacttgatgctgccgggcattgacggcactgcactgtgccgtcgcattcgtgagcagagccgtgtgccgattattatgctcaccgccaagagcgccgaaatcgataaggtcgttggccttgagattggtgcggacgattatgtgaccaagccgtactctttccgtgagctgctggcccgcatccgtgccgtgatgcgtcgcaatcaggccacggcccaggcttccggcactgtggatgacgatattccgctggtgtgcggcgatatcgccatgcaggtaggccagcatcaggtcaccgtacgcggcgaaaccgtgttcttcccgctcaaggaattcgaactgctcgaatacctgatgcagaacaagggccgtgtgatgacgcgtcaccagctgatcgaccgcatctggggttcggattatgtgggcgacaccaagacgctcgacgtgcatgtcaagcgcgtgcgctccaagatcgaggaagatccggcgcaccccaagtatctgactaccgtgcgcggtctcggatacaagatcgatactcccgcggagtaaatggaaggcggccttcgggccgccttttttgttgtggattgtgggctcgccgcaggcgagtccactccaaaaactacgtagcctcaacgtagcccacaaacatccaagtgttcatcttctgtttactgatttcggttttgggcccttgaaaccaccaatacgcttgtagttgtcatgaattgaccgggcagcgctgagccgcccgcgaatagttgatagagggattaagtaataatcatgcagaagaacatcctcattcgttccattgccgctctgtccggcattgtgatgctcgcttccgtggccgcctgcggcgataacaccgccaccacgaccgacaacagctcctcctccgattccacttccaagtccaccccggtctccggcaacttctcgggcgccggcgcctcctctcagcaggccgccgttgaagcctggatcgccggcttccagggcaccaaccctgaagccaagatcgcctacaacccgtccggttccggcgctggcgtgcagaccttcctgaccggtgccaccgcttgggccggctccgataaggcccttgccgatgacgaagttgagcagtccaagtccgtgtgcactgaaggcaccgccttcgatgtcccggtctacatctccccgatcgccgtggtcttcaacctcaagggcgtttccgatgccggcaagcacatcaacatggacgctgccaccatcgccaagatcttcgacggcaagatcaccaagtggaacgatccggccatcgccgatcagaacaaggacctgaagctgcccgacaccgccatcaccgtcgtgcaccgctccgataagtccggcaccacccagaacttcgtctcctacttcaaggacgtcacccctgacaactggacctacgacctctccgagaactggccgaacgaggttggccagggcgccaagggcacttccggcgtgatctccaccgtcaagcaggccgacggcaccatcggctacgctgacttctcccaggtcggcgacctgggcaccgtggccgtcaaggtcggcgacaagtacaacgagatttccgccgaggccggctccaaggtcatcgaggactccaagcaggacgacaccgttaagggcgacaaccgcatcgtcatcaagatcaaccacgccaccgaggccgagggtgcctacccgatcgtcttggtctcctacgacatcgtctgcccggcctacaaggacaccaagcaggctgagttcgccaaggcttggctgacctacgtgacctccgacgagggccagaaggccgctcaggatgccgccggcaccgctccgctgccctcctccctgaagtctaagatcaccaagtccatcgaggccatcaagaccaagtgatgacgtcggcccgcaagggtcgtgtggactggacctgacaactgaacgatagactgtagtagtaagagcagtcgccgccaactttaagccgcagtcgtaaaccatacggctgcggcttaaagcgggtcaggacccgaacggtttggcaaagtcacagacgaaaaccgcaccacttgaatacttgataaccaccctatataaggagaatccgtgagttcgcaagacaaaacggctgtgcagccagttggaggcaagaccgccgacaaggtgtttcgcggtgtggcatacgcctgcggcatcctgatcctggttgtacttgccgctgtgttcctgttcctgtttttccgcgcctggccactcatcggtggcgatcaggccgccaacagcgacaccgtgtccagctttaccggcggcaaggccagcagcttctggggctacgtgctcccgctgttgttcggtactgtgctcgtgtctttgctggcactgctgattgccttcttcgtgtccatcggcattgcgctgttcatttcgcactatgcacctaagaagctcgccaccgcgctgagctatgtggtcgatctgctggctgccatcccgtccgttatctacggtttgtggggcggcctgattctggtgccggccatctacccgttctggaactgggttgccaaccacttgggcttcattccactgttcgagggcccggccgccaacccgtcgcgcaccgtcgccaccgtggctgtggtgctcgccgttatgattttgccgattatcacctccatgtcccgcgatatcttcatgcagaccccgcgcctgcacgaagaggccgcgctggcgctcggcgccaccaagtgggagatgattcgtctggccgtgctgcctttcggcaagtccggtattgtgtccgcctccatgctggctctcggccgcgcgcttggtgagacgatggccgtgttgatgatcctgtccccgggcctcaactactccatcaagctgctgcaggcctcgcagaaccagaccatcgccgcgaatattgccgcacagtaccctgaagccaacgatctgggcgtctccacgctgattggaaccggtctgattctgttcctgatcacgttcgtggtcaacttcatcgcccgtaagcttaccgagaaagcgactgcgtgatgactgctgctgagaacactgaaaagactccgatggacggcacgcccgaaatcgacttcgatcgtttccgcccgacccgttccgccatccagcgccgtaatatcatggaccgcttcatgtgggccctgatcgcggtggcgtttgtgatcgcctgcatcccgctgatctccctgctgtggaccactatcgtcaacggcatcaagcgcctgaacctgaacttcctgagctacaacatgaccggtgtggtcggtggtagccagaccccgtccggtggttacggcggtgtgctgcacgccatcatcggtactctcgaaatcaccgctggcgctatggttatctccattccgatcggtttgatgtgcgccgtgtacctggtcgaatactcgaaccgcggcaagctcgccaccacgatctccctgctcgtcgacgtgatgagcggcatcccgtccatcgtggccggcctgttcgccttctcgatgttcacgattctgctgggccccggtaccatcaacggtttcgaaggctccgtggctctctccctgctgatgctgcccaccgtggtcaagtccagcgaggaaatgctgaagatcgtgccgaacgatttgcgtgaggcttccttggctctgggcgttaccaagcagcgcacgattaccaagatcgtgctgcgcaccgctctgccgggcatcgtctccggtgccattctggccatcgcccgcgtgattggtgagaccgcaccgttgctgatgaccgccggctacatctccagcaccaacgtgaacctgttctccggccagatgaccaccctgccggtgttcgtctaccaggagtactcgaagctcagcgcgaactgcccgcccaacgccgacgccacctgcgtgaccacgattccgatggaacgtgcgtgggctgcggctctcgtgctgatcgtcatcgtgctgctgctgaacctcattggccgaatcgtggcgaaggtcttcgccgtcaagaccgagcgctaagccagtcgctaagcctaagccttaagaacacaaggaaatataaggaaacatcatgggacaacgtattgacgtcaaccacgagaacatctattacggcgactttctggccgtggaagatgtgaacatcaacatcgagccgaacaaggtcaccgccttcatcggcccgtccggctgcggcaagtccaccgtgctgcgcaccttggaccgtatgcacgagatcatctccggcgctcacgtcgagggcgaggtgctgctcgaaggcaagaacctgtacgacaaggacgtggatccggtggccgtgcgccgcgacgtcggcatggtcttccagcgcccgaacccgttcccgaccatgtccatccgtgagaacgtgctggccggtgtgcgcctgaacaaccaccacctggccaagtccgacgccgacgatctggtcgagtgggctctgcgcggtgccaacctctgggaagaggtcaaggaccgtcttgacaaccctggcatcggcttgtccggtggccagcagcagcgtctgtgcatcgcccgcgccgtggccgtccaccctcaggtgctgctcatggatgagccctgctccgccttggacccgatttcgaccttggctgtcgaggatctgatcaacgagctcaagagcgactacaccatcgtgatcgtgacccacaacatgcagcaggccgcccgtatcgccgactacaccgccttcttcaacctgaaggcagtgggccagcccggtcacctcgagtacttcgcggacaccatcacgatgttcaacaacccgcaaaacgaagaagccgagcgctacatctctggaaggttcggctgatcgtttcctgcgcgcggcgtaatgatttgtgcgtaggagaaacggcaaagcccgccgcaaggcgggctttcgcatattcaacgcgagtattgccgagtattatcgttctcgcaacggagcgagctggaatactttgtcggactgggcggcgacttcccgcttcggtcgatcgacgggagaacggcgggtaaagcggtacaagacaagtccgcacgatgaatactctgtgatgaatcttctgtttacggtgcgagtgtggaagaatagtcacagcaaggtccagcaaaggagcataggtgagtactggtctgatcgtcggcattgtcgttgtcgttattatcgttgtcttgattggttggggcgtcagcgcctataacaacctggtgacgctgaagaaccgtgtgaagaacggttgggcgcaaatcgacgtgcagttgaagcagcgcgccgacctcatcccgaacctggtgaataccgtcaaggggtacgcatcccacgagtctgaagtcttcactcaggtgaccgccgcccgcgccggcgtagtggctgcggccagcaacccgagcacgaccactgctcagcgcgccgccgccgaaaaccagctgtcccgcgccctgttcaacctgcaagccacggctgaggcatatccgcagctgcaagccaaccagaacttcatggatctgcagaaccagctcaaggaactggagaacaagatcgcctacgcccgtcagttctacaacgacgtggtcctgaagctcaacaccgccatcgaaaccgtgccgacgaacatcatcgccggtctgttccactttgagcaggcgcaatacttcgaggccgatgacgcttcccgtcaggtgccacaggtccagttctgacccgcttcaggcccgtccggtaagccgccggccgggcccgtattgtcttaagagagggaagatatgcggatacgattcattcgcgccggaatcatcagcattgttgccacggtggtgttggcagttatcaccttggcgataatcgggacttccgcgttcggcgattcggccgacctcagctaccgcacgctggactatgacgtgaccgccaccgcgaacggtgatttgaaggtcacgcagcatatcgacgtcaagatgcgtgagcgtaccgacagtgacgacaacaccaagccgtggaagcagctgttccagcaatacacgctgaactccggcaccttgactgatatcagcgatatcagcgtgcgcaacgtcaccgacggcatcgactacgcacaacagagcgagcccaagctgcccagtgacgtctcttccgacaaggaatggaacagcgactacgccaaccattggtatgtcgccgatgtgagcgatggcagcgaccatccaaaggcatacacgcccggtaccgatggcctcaagcccagcgcctccgccaccgaagatgacacaaccgtggagatcggctggaatattccggtcaccaccgaggccgacagcatgaagttcgatgtaagcttcaccatgcacgatgtggccaccaaatggaaagacgtggcctccttccaatgggagccgttcgccaagaagaaccaagtgcctatcggcacggtcaccggcaccgtccatttccccaacggcatcaccggcaaaacctcatggacatggctgcacaccgagcgcacctcggaaaccaagcgcaacagcgacggcagctacacgttcacggcctacaacatccacaatggcgactacctcgatgtggtcgcggcgttcgatgccgccaaagccaagggcatcgcccgcaagggaaccggcaatcatctcacggacctgaaacaggacgaatataagcaacagcagcgctggctcgacaagcaacgattcgctgccagagctcgtctcgtgttctggattgtcagcatcgtgctcggcatcgcgttgtgcgcgtggggtatctgggctgtgatctccagcaaccggcgtgcgcaatacagtggcagcgtcgaatactggcgcgaccagcccggcatcagtccggcttccgcagcccgtctgattcgcgtggtcgatccgtcgacgcgccaatccgatgaagaccgccagctgaccgccaccatgctgtcgctcgccgtcaagaaggccatcgccatttatccggggccgtcggacatgtatcgcggcatcgacatgagccaggccacgccggtgggcttgagccaaatgattgccgccgaccaaggcaagcagtatgcggcaggcatcaccagcaccatcgtgattctgccgctcgccattgatgaggcacccaacgcgcaacagttgggattgagcgaatcggaagatgcgctgctgaacctgctcatcgtcatttctcagcgcgtgggcagcccggtattcgacctgaaccagatgaaggcgacctgccagaactggcaagacggctatattgagctcggcaaattcaccggtgcatgcagcatggaataccagcggctgggtgccacgcgctctgtgggctggcaatggatcctacccggcgtattggccgccgtgctgggatttggttcgctgctggtcaacagctttatcggatacccggtggctggtcttatcgggctgccgatattcctggtcggactgttctgctcgatggccggcgcgatgaccgtgctcactgatcaagggcaggatatcgccggccggactctgggccttaagcgttatatggaagacttctccaacttcaccgaccggggtaccgccgatttggccttgtgggattggtatatggtctacgccgccgcgtttggcatttccgatcgcgtgatgcgtgaactggccaaagcatatcctcaggtcaacgacccggcttggctggatgccaacgcctccaactcgttgttctactggaactaccgcccgtatggctggtacagccaccgtcataatggtccattcgaccacgatgctgccgggcagatggacctaggcgttggcggcccagctccggcttacggaggcacgtcgtttgccggcggattctccgacctcggctcgcagctgaactccggtctggcggacatcagctcgaccatcagcgcggcagcaccatccgccgattccggtggcgatttctccagcttcggttcgggcggcggctccggtttcggcggctcgttcggtggctcaggtggcggctcgttcggcgggcggtagcgcatgcctatgtcgaaacgcattgttcgtgccctggacttaagccttgtcggtgcgctgattcttgccgcactctgtgccggtgccttgattctcggcacagatggtgccgacctgagctaccgcacgcttgattacgatgtgaccgccaccgccgacggcgatcttaaagcacggagcatatcgatatcaagttgcgcaaacgcaaggatgacgatggcaagaccaaaccgtggagatcggctggaatattcccaccaccgtaaaaaccaacagcatcaagttcacggtgagcttcaccatgcatgacgtggccaccaagtggaaggacgtggcgaccttccaatgggagccattcggtgagaacaatcaggtgccgattggtacggtcaccggcacggtgcatttccccaaaggtgtgaccgcgagcaactcgtggacttggctgcacactgaacaaacctcggaaaccggccgaaccaaggatggcagcttcaccttcaccgtaaatgatgtgaaaagcggcgagtacctagacgtggtggccgctttcgacgcggccaaggcgggagatatggctcgtgtcgagaccgacgatcatctgcaggagttgaaggaagacgaagccgacgacgaacggttctggcgcaatctggaacgccaacgcgccacaaggcgcctgaacaactggatgaccaccatatcggccggcctgatattcgggattattggtgttgttgcagccttacgctcctccggacgttcacgttaccgtggctccatcgaatattggcgcgatcgccccgagctgagccccgcatcggcggccaaactcatcgatatcgtgacttccggcgacaaacccgacatttccgagcgccaactcgtcgcgaccttgctttctctggccgtgaagaaagtcattgctgtgttccccggttcggcggacctgtatgtcggcgtggatctgaaacaagtttctccggtggagctcagtcagcgaatcgggtccgatccatacaagcgcaataatgcgcgtaccaatagcacgattgtgatgctgtggcagtccgattacggcgtatctgagggatttgatgaatcagtattcgtcgaatccgtatttgatggatctggatctggcggatctggatctgccgcatctagcgtgtccgatgcacaccagcccgatctcagtgcttctgagcgggcattgctctatctgctcaccgtgatttccgagcgcgtaggtcgtacggcatttgacatgggtgacatcaaagacgcctgcaaggattggaaagacggctacaaggaactcgaaaagttcaccaatgcgtgcaagaccgaattcgcggcggcggatatcgcgccgaaaaccgagaacggatggctcattcccggggcaatcaccgtgctgatcggtgacgccagcatattcatcaacggtttggccggatatctggtggccggggccctcatcggcattcccctgatgacggtcggcatattctgcttcctgatggggaattcctacgtgctgaccgatcatggtcagcagatggccgggcaatgcttgggtctcaaacgatatatgcaaggcttctcgaacttcaagtaccgtggagtcgcggatttgacgctgtgggattggtatatggtctacgctgccgcatttggcatatccgaccgggtgatgcgggagctggccatggcctatccgcaagtatccgatccggaatggcttgatgccaatgcctccgacacggtgttctattggaattatcgtccgtacgactggtatgggttgcgtttctacaatggctcggcgttcgcggattccgtggctgacagcggattggccggagcggtgccagcgttcgggggcacgtcgttcgcggctgggttctctgaccttggcacgcaattgtcgtacggatttgcggatatcaccgcgacaatcaatgcggcctcgccatccggtggctcaggcggctttggcggtagcagcggcggttccggcggcggttcgttcggtgggcggtaagcgatgtgcttctgaaagtccctatagctttgaaagtaaaaggtccggtgtcatgaaccgcacctccgatcatcgaatctgaattacttcagtccaacaatcggggtgcggttcaccatggggttccggcccctcgttttcactgaactgggtatgagtaagttgcgttttctattccgtgaagttgcggaaatttcatagattgattgtgcgggcaggccgagagtgtgaaatccaacgggatgcttaggcttgatcgtggatatcgagtttccataagtttcacgaagggaatcaccatggcattgttccgtaacctcggaccgttctccaccaccgccatcggccacggcgaaatgccgctgaccatcgaaaacaaccgcggccacgaggtcggcatcgaaaccctgcatgcctcgctggacgccggctgccgccacatcgacaccgcttgggcctactactgctccggcggcgaggagcagaccggtgaaaagctggtgcgcgaggcccttgagacctggaaggggccgaaggacgaggtgctggtggccaccaaggtgggccacttccgcaacttcaccgacggccgccccacgtgggatgtggacggtcgcccggagaacctgattcggcgcggcaaggagagcgcactggcgctcggcgtggacaccatcgacctgctgtacttccaccgcccggacccgaaggtgccgtacaacgagtccgtcgaagccatcaagcagctggtggacgagggtgtggcgcaggaggccggtatctccaacgcctccatcgagcaaatcgacattgcgcgcggcattctgggcgacaagctcgtggccgtgcagaaccagtactcgccgattcacctggagacccaggacacgctcgactactgcgccaaggtcggtctggccttcgtgtgctggagcccgctcggcggctaccgtcacccctatgatgagaccaagttcgacccgttccgcgaggtcgcggcggcccacggcgtgagctaccagcaggtcgtgctggcatgggagctcgccaagggcgaccacatgttcgtgattcccggcgcccaccaccccgagaccatcctcgactccctcaaggccgaccagctcgaactcacccccgaagagctcgccaagctcggctgattgcccattccccatcctcccgaatttgtgccgctgacgttggcttaacgtcacaaattcgggaggattgattcgtcttgaaggaaccgccatgcgcaaaaaactcatcctcgacctcgataccggcatcgatgacgcgctcgccatcgcatatgccctaggcagtgccgacgagatcgatctgatcggtatcacggccacctacggcaatgtcgcggtgccgctggccgcgcgcaacgcgctggcggtggtgcacttgttcggccgtgacgacgttccggtctatcccggagtcgaccatcccatcgccccggcaacattgccgaaaatgcgtggcaccacaccagacgagcggacccaggcctacgcgcgctggcagaacggcggcgcggacggctggcaaacggacgcttcgtgggcaccaactcccggctcggtggcggtccaccatcccaacggcatcggcggcgcaatcatccccgactccccgcgcgctccggaagcaccaggctcggcggtcgatttcatcatcgccgccgcgcgcgaatacggcccggacctgaccatcgtacctacgggcgcgatgaccaccatggccaccgtattccgcaacgctccggacctgaaggattccggcgtgaacgtgacgttgatgggcggtgcgttgacgctgcccggcaatgtaagcccggccgccgaagcgaacatctcccaagacccagagtcagcagactatctgttcaagtgtggcgcacgcaccaccatgatcggcctcgacgtgacccaccagaccgcgctcacctgcgagaaagctcatgaatgggacgctctgggaacgccggccggtgacttcctcgtcaccatgactgattactacatcgatttctacgtaaagaaccagccggaaatccacggctgcggactgcatgacccgctcgctgtggctgccgcgcttgacccatcattggtcaccacgttcggcttcaacttgcaagtcgatctcgagggcccgttccgtggccgcaccattggtgaccgctcgcggttgcaagatttcgacaagcacactcaggttgcgctcggcgtcgacgtgccggaattcctcgaccgctttatggctcgcgtcaccgctgcggctcgtgggtaaacgcttatgctttggcggtcgtgtcggttgctgaagcgtcggttagtagtgcggacaatgcggttctagcttccggggtgatccacatggtgtgtggataaccctgtggataactagcggtacgattcgtcgtcgtgtatatgcgggatggcatcggtcggtgtgcatatggatgagaataccgatttggccgagcttcgcccgtttctggtggtaatcatggaggaggcgagaaagcgggggtctagtgtgatgctcgttccggccgacgaggggattgagggactgtgccgtatggtgcgtcaaggcttctctgcgctctgagcccagcggcgctctattcggggcacgccattgcagcggtggcgtgcccttttggggatgctcgaatagggaagtaggcaaggatttttcatttggtgccgtccgagctaattggctataaacgtatcgaacgtgcctgtaaccgatggagaaaacgtaaggaaagaattctcggaactttgtcatctgcctgaactgacctttagcagtcggatgccaatcagctgccgtatgacgtgtcggccacgcagtcatcgcaatcgttgctctccggtgtgaggaccgccgcgactttttaagcgataccagagacataccgaggccggagccacgagacgagtaacagtttgcggtagatccccatcgctctactgcagagcatgaaccgccttatcaaaacgttcggccatcagattgatggaatgcatgtcaatgcggcgcatcgcggctcgagataatgcctgagataaggctgatcgcaatgtcggcaaccaatgatccgcatatttacggcttacaccgaacaaagacagactctcatcggacatcaatttatctatatcgacttcggtgtcacctaataatgacatctggtgtgagtcgggtagcgacggatcgaatggttcaggattcatgtcaaaagcgggtgccaattgccaggaattattcttacgcaaatacccgtggtttcgtagatggtcatcagtgttgccgatggccgcgccaaacattgctctccgccatagctctatggtgtctcctcctgccctacgcgtaaattctgctagatccaaccagtctccgccgtccccatctcttgcttccagcgcggtcattgcggatatataaggtaatcgctccattcgctcaactgatggtgcagacacgcgatcaaaacggtgagtcaatagcacggtccggcttctctcctccgaatcctttattgcaatgacgcgatgttcgggcactttgatgccggccatgttcgcgatttccaaggtgacggcttcccagccgataacatcccaatcatcgccgttcggtttcggaaatttggccagccacagcgcattacgatccgacaccgaagctttaggtcgtgcgcctccgagtgagccggttgcccgatacaacctgcgtaaggagacatcacttacttcgcggttctgttccaccgcatccgcagtgtccaataactccggcagctttgacagtacgggtactccttcatctcctgccgctggcttgccatcaaccatgaatcgaatggcaccctgtcttgtcagatcgttgacgccgaacaaatattccgactcgctgacacgcgtacgtttaagactgcgggaaaacacctttctgccccaacggtctggggcggaatccgaaaatggaccaagtccagagaagaagaatggggccaacgagcggggcatagatgggaagaggtcgaaggaatcgctgctgattgtgtacgtcgaatcatagcggaacgataggtcgtcgccagtcgcatacaatgtgccggcaggagcttccattccaggccctagcgtaatcagcacagttgattcgatagtttttgccatcagggattcacctccgaacgcgcttcgggagttgttggccagcgcggagacgcccaagatcggtggaataggggtcgcatgcggctacgagtgtgtcagcaagttgcaacacgcgcgcgatggttaacagcgaatctgaccggacagccttgccttgctccagatttgacactgtggtcgggctgacaccagagcggtgtgctacatccgcaaccgtcaacatcagtagtttgcgctgtcgcgagaactgttcgcctaggatgcgtaaatcgcgtttggtggtggtgggcacatacttcattgcgatactccgagtgttataacatatagttttccatgaataaaatcatttattcactagtatactattgattatctgctatgcgataccggaatgaggaaggtttagcgtctcgatgtttctgctcatacgcaaaaggactttctgccaacaaatagccagaaagtcctttggtctcacgcgtatatgaggtttacaatcccggaatcaaaccaccgggtgggtcgagcgtgaggtattgctcctccagatcgatgtcgggcaccagttcctccacgaacggcaccaacgcggtcttctcgaccacatcctcgcccttggaattctggccggttaccaccggctcggtcaaacgaatcttgagcagtgactgagcgggggagtcgaccacatccaccactttgccgaccacttggccggcgggcagtcccagaccgttgccctcgactagacgggcctcaaggccaataagatccttgggataccattcgtcggcttcgagcatatcttctgcgtcgtcgacctcgccgtagagttcgacaccgtttagggcctcggcggcattgcggtcgtcgacgccctcaagcttgagaatccaacgatccttgaacgtgcgcgagccctcgacgatgtactcggtctcgccatcctggctgtagagcacggagtccggctcgaagcgccactcgggatcatcggtgtaccggcgcacggtgacttcgcccttcaggccctgtgcgcggccaatacgagcgaccctcagcaactcgagctgctgagggtcgtcgtgcatgtcttgctgtgccatgctgtgaattgttccttatcggttatcgacggacgtccatgatgtcaacgcggaccttgtgatcagacagtgcctgaatcacggtgcgaatcgcgttggcggtgcggccgccacggccgatcacacggccgatgtcttccgggttcacgcgtacgcgaagcagttcgccgcgcgcgttctcatgggacttgacggaaacatcgtcgggaaaatcaacgatgttcttgatgaggtgttccacagcctgtgcaagcatagctagcctttcgtttccgctcaggcctcggccggagcttcttcggcggcctcttcagccggggcttcctcagcggcggcagcggcttcggcttcagccttggccttggcggcagcttcggccttggcggccttcagcttctgagcctggttctcaacggccgcgatgcgggcctcggcgtccgggccagcctcaacggtcttcagggtgccttcggcaccttcaaggcccttgtacttctgccagtcgccggtgatgttcagcagcttgaagacgggctcggacggctgagcgccgacgccgagccagtactgagcgcggtcagacttgatctggatggtcgagggctgggtgttggggttgtaggtaccgatctcctcgatgaccttgccgtcacgcttcttgcgggaatcgacgaccaccacacggtagaaggcgtagaacttcttgccctgtcgcttcagacgaatcttggttgccaaaatggctctccttgtaatgctaggtgtgcgggttctcggtttgccatgtggggcatgaccggccggaatccacgtgtcctcgcggctcggggtgtagagggcgccacgcgcgcgcgaataaccgtactagtgtaacgcggaagccggatattgcgcatcggtccggtcgtgacgcacggaatcgccggacggacggcgtgtcggcggcgcacctaccgtcttcatgactgatagcctgattgatggcagtgcgagacgggaaagggggcgctgatcgatgggtgagtgcgtgatcggccccggtgcccgggcgcgtgtggatgcggatgacggattcttcttcggcatgggggccttcgagaccatcgcggtatccggcggcgcgcccgtgtttctggacgaccatctgacgcgtttgggtgagacgttgcgatacctcggcatcgaggcgcgtcgcgccgatctggagacgatggtgctccgcgcatgcgccggactcggcgcatcggacgattcggccctcaagctcacggtcaccgagcgcaaccgcgtcgtctcgttgagacgcaacccgtatgccgcgccgggggcgaagcgcgtcttccgctgcgacttcgccgatgtgcgcaggaacgaatcctccccactcgcgcgcatgaagacgctggcgtatgccgaaaacatcatggagaagcgtcgcgcccgtgaccgcgccgtcgacgagccgttgttcctcaatacgcggggcgaggtcgccgaaggggccgtctccaatatcttcgccgtcatcgggggagacgtcgtgacgcctcccgtctcctgcggtctgctgcccggggtcatgcgccatgccgtgatcgggttcacgggggccgtcgaacgcccgatcatgcccgacgagctgcttcgggccgacgaggtgttcctcaccaactccctgatgggtgccatgcccgtggccggtatcggcggcgtggaattcgaaccggggagcgtgtcgcgcgacgtgaacgacgcctatgcccgcatggtggcgcggacgcgggaccgggcgcagatgaaggagtcccggtgagcgcgcaggtattcaagctcaggacgttccgaccgcttgccgacatcgtggagtgcgtgcgcggcgaggaacgcttcgcgttcctggactcctcgatgccgggggcgcaggggcgctactcgatcctgggactcttcccctatcttgtgatcgaacatgggcggggcggatgcctcgtcgacggcgttgccgtggagggtgatttcctcgatgtcgtgaagaagcggcttggaccctgcgatggcgcgcgcgatccgcgtctgcccctcacgggaggcgcgatcgggtatctgggatacgatttcggccgcgaatcgtgcggcgtgccgaccaggcacgatcccgtcgcggccacaccggaggcgagcatggtcttctacgacctgctactcatcgaggacgtccgg

SEQ ID NO: 1426 - DNA, 4052 bp, Unknown
  R257_15m  MAG No. k141_15250
gtactcgccgagcagggaggcggcgtagttgccgccgcacttggcgaaaccagtgcagccagggccggtgcggaaccacttgtcttcaacccagatcctcaccggcttgacgccgcccgggaagtacgggccggacggagaggcgatcacgcagtagtcgacctcctgcggggcgcgcacgccgaggaacggctcggaagcgaacatgaacggacgcatgtacagcgtgtactcgcggcgggacggcacccagttggcgtcgcgcttgaccagcgcggccacggaaccgaggaagtcgtcaatcggcagctcaggcaggtacagacgcttggcggagttctggaaacgctcggcgttcgcatccgggcggaacagccaggtggagccgtcggcatgacggtaagccttgaggccctcgaagcactcctgtgcgtagtgcagcacggaagcacccgggtccatcttgagcggtgcgtacggttcgacgcggcggtcggaccagccttcgcccttggtccaagtcatgtgggtcatgttgtcggagaacacctggccgaaagccggcttgtcgatgagggactggcgcttctcatcggatgcggggttgtcgttcggcagtacggtgaacggttcggtgagcttgtcgagtgctgccggatcgtggtgcgtgttttcagtcatcactagctacttcttcttgactttggcggcccgaaagccaccatatggggtgtgtgctgtgcgcttgtggcgcgaactctgttgcatacttttgcacacccatgtgttactcgtgtggcagagttcacatggtgaaaaaacgaagaagcccacaccgttctcaacggctgcgggcttccacgtttcagttatgttctgaattgttcgctatcgaagcgaccgactcacttggcgtcggcagccggagcagcggcggcgtcagccggggcggcagcagcttccggagcggtggtggactcggtggcatcctccggcacctcgacggtgacgacggactcttccggatcctcgacgtccagctcgacgccctcaggcaggacgacatccttggcgaacaccttggtgccgtcggtcaggccttcgacgctgaccacgatcttctcgggcaggttggtgacgtcggcgcggaccttgagctcctgaatgtcgacgaacgccacggcagcacccttcggggtgccttccacgaacaccggcacctcgacgtcgatcttctcgccggccttgacctcgaggaagtcgatgtgctcgatgatgcgcttgaccgggttcttctgcacgtccttgacgacggccatcttggtgttgccgtcgaaggcgatggtgaacagggcgttggtgtgacgcagggccagggtggtctcgcgcatcggcaaggtcacgaaggcgggctcttcgccgccggcgtagatggtggccggaatcttgttggcaacgcgcagacgacgagcaacgcccttgccgaactcggaacgggcctcgccctcaagcttaatggtggtagccataatggatactccttgtatcttcgtttcgtactgtctcgctcagacgccacgacgcgccgaaagacaccctacaaggagtgaaatacgccgagtcgataacggaatctgtgtcatgtgtcagcatgcacacttccctcgccaaagcaacaattgtcaagtatacgccaaccccggactttgcgtaatgatgcttcgatgacactgcatataggccgtcccagctacgtcaacgtacggtttccgcgaaataatccctaactttgtgaagaacgtacgcttacccgttctcatcatacggttttcacgaaatcgttcgccatttcgtgaaaaccgtacgctcagcgacactcagtgtacggtctttcacgaagttggggatgatttcgaaaaataacgtacgatggtgagtaccatatcgggaggttgatatgactcgttcggacgacgtcatcaatgagtatggccatgacgtcatcgccgcacacactcgcgttgtcaggggcatggctgcggcacttgccgcgatagccgccacaggagccggcgtcacagccgcggccgccaacgtcatgttcatgttcgcgctggacaccaaggccaaacgttcgatgttcaacatgccgcacgaggagacgccgaaaggcatcgaattcgacatgtccgagcagcttgaggccggccggtggttcgaggaggccaagcaatcggtcacgctgcgcagccatgatggattgaaactccacggctggctgttggacccggattgttccgacccacagccgcatctatacgcgatctgctgccatggctataccggagagcccgcggaaatggccaaatgggcgcatcgctatgcgcgactcggttttacggtcctgctacccgcgcagcgcgcccatgaattgagcgaagggcgctacgtgggtatgggattgctggaaagcgacgatctgttgggctgggtttcgctgatcaccgcagctgatccggatgcacgcattctgctgcatggcaattcgatgggcgccgccacggtgatgatgacggccggcgatgcgcgactcccccgtaacgtcgtcgccgcgatttccgattgcggatacagttccgtggtctcgcagtttacggataatgccgaggcgatgtcccgtttgccgcactcgttggccgtgctgctggtcaaagtggccagtcatgtgtctaaacgcaaggctggataccggtttgaggacgcctcctgtgtgaaggcattacggcacgcgactattccgatgatgttcattcatggcggagcggatacttttgtcaacccgaagtatctggacatcaattacaacgcctgcgccagcatcgaccgcgagaagctgctgattcccggcgccgaccacacgatgagcgccagcaccgatccggaccgctattggcgtcgcgttaacggctttgttaagcgggtgtttgggctgtagtagatatagagcttggctcccctctgtgaggggagccaagaatggttacgcgagcagttccttgacggcggcgatgacggactgcagactcttcttcgcgtcaccgaacagcatctgggtgttgtcctcgaagtagagctcgttctggataccggcatagcccatgccgcggccacgcttcatgaccacgacgttctgggacttgtcgacgtcgagaatcggcataccggaaaccggggtgccaggacggcgagcagccgggttggtcacatcgttggcgccgacgaccagagccacgttggcctgcgggaactgcgggttgatctcatcgagatccacgagctcctcgtagggcacgttggcctcggccagcagcacgttcatgtgaccaggcatacggcctgcgaccgggtgaatggcgtaggagacttccacgccatggcccttgagcagttcgccaaggtcagcgagctcgcgctgggcctgagcctgagccagaccgaagccgggcacgaagatgaccttctgcgcgtagacgagctgaacggccagatcgtccggcgtggtctccttcatggtgccttccagaccgtcgccagcagcggcggcgtcagcaccaccgccgaagccaccggccaagacagagagcagcggacggttcatggcctgagccatgaggatggacagggtcacacctgcggaaccgacgagtgcgccggccacgatcagggcaacgttgtcaatcgccagaccggacatagccacagccgtaccggtgcaggcgttgagcacggagatcaccactggcatatcagcgccgccgatcggaatcacgaacaccaggccgtagcacagggcgaacacggtggtcagaatcgaccacagcaggcgctgttcgggctggacgcacagcataaccagcgaggcgacagacagcacggcgaacagaatgttccatacgcccttgcccggcaggttcagcttcttgacccacttgatgccctgtagcttgccggcagcgatgagcgagccggtgaaggtcacagaaccaatgaga

SEQ ID NO: 1427 - DNA, 9187 bp, Unknown
  R257_15m  MAG No. k141_15578
aaaaacgcaatgggcttgtgatcgcgacagtcagcgcaagtccacaatccacagtgaagaatctttacaatgtggacgctaatgagaccattgcgaatggattcaggccaccattgaacgcaatcatgacttcagtcagtcattgtggtgacgttgcatcaatgctgattcatcccgatgggcgaatcagcgtgttcgggacgttgaccgtcggccaccattacctgtggcaaggcgtatggccgaccgaatagctttccgtaacccagcaatggaaaccgccgtatacgaacaacagcctcactctgtgtcgagtcggacgcatcgtcacgatcaacggcaacgtcaagttcaccgccagcggaacacagaactacacgacggcgagtgagaccatcccggatgcgttccgtccgcttgccgatcagagcatcatatcgttcccgtactgcggtttcagcctgcttgccatgcgtgatgggaaggtgcagatgctgggcgacccgagatccgcttactccacggcgcacggctgttggacggcactgcaatagctttccgtaacccagatccatttcacgaaagtgaccagtgacccggaattcacgatcagtggatgcgtcgtcaatggtttggcgaccgtctactgccggtgggtcaacaaagggcctttctttagtaaggcgtgggctggagtgactttggcaagcatggacgtgcgggctgccagtgaagacttcaacatgttcgtagacaattccggtgcagaccgggcgcaggatcgttatctgtacgtcgttggaaacacggtttccttccgcacatcgtatgatgcgaacattcccgggaacgtatggcatatcggcagcgtatcgtttccggtgacggcggtttaggcaacgatataggtcatcgtcgtggcgaaaaagtcaccgctctgactgccgccgcgattgctgtaggtgaacgtcccatccgttttcagcaggaactctcgttggcttcctccatcacggccgctccacgttccacgcacgcctgccacaggacgccacccctccgggattatgccaaaattaccgctatcccatgatgcagtgttcgcgctcttccaagccacgttgatttgagcgacattgccggtcttaacgccagtcaccgtgccatactggctggtgataagcgtctgggttacggaaagctattcagcaggtaagtatgagtttctgccatgctttctgcatgtccttgaggacgctcagatcgggcttgaggtaataccgtgcggtggtttggatgtcggagtgtccgagctgtcgcgcgaccacgctgatgtcggttccggccttgatcgccaacgtaccgaacgtgtggcgtaggttgcgtggaggcacgcagggcaggttcatgcgcttgcaccaactgcggtaatggtttgcgacttggttcgcgttcaggctgccgaccagtcggccggtctttgtgccgtggcgtagctccgccaagcgtttgaccgcgaaccgtggcaatgcgacggtacgtcggctcagatctgtcttcggttcggtgacggtctcatggcccgccacccactgcaccgaccttttcaccgtgacggtgccgcgacgcaaatccaagtcggcccattccaggccgaccgactcgcaccggcgcaatccagcgcacacggacaccaatagccatgcttccaatggatgcccgtagaagcctttcaacagtctgcgcacttccgacgcggacagcacttgcggctcgtagtgccgtaggcgtggcaggcgtatctcgcgtctggtcacgtcattgtcggtcaaaccgcgtttgaacgcgagcctcagcatcgcccgcagcaccgcgtaggctttgcgtgccgctcccggcctgtcgaaggagtccaaccatgattcgatgtccgccacgctgatcgagtccatgtcccttccgctccattgcgggaggatatggcagttcagggcgctttcgtagcctactttggtgcattcgcggagtttcgcgcatgagggtttccaaacggtggttgcgaatgtgtcgaaaagcattggttccttcccgattcttgttgaataatcccacacattgtcgtgttgccgttgggtgggcgtgtgtgtgggttttctcattgttccatatccctgttttttaggaggatgttttgactcagattaatttcgatttcggccatccaagcgccgatggcgtcgcggtcctggccggcgaactggtgcatgtggtgccgaccgaacggttcaaggtcggcaagcgtatcgtcgtgcgtgattctttcgacgtgcgactgtcggaaaccggcaccgccaccgttaacgttccgccgaccgacaacacgttcgcctacgaggtgacggtgggcgaatcgccggacgcctggcgtttcgtccgatgcgtgcaggtaccgaattcgagcacgcccgtggcgttcgccgatctggtcgatgtggacgcgagtactctggccccggcacccaattccggtacggcgctgacgtatctgcttgcttcttccctgtccgaggcgcaggccatgtcggcggcgaatccaggtcagatggtgttttatccggagggcagggccaagactgtcgcttctcagattctggaggatttgaccgatgcgcgtgccgtggtggaggctcagagcgccgtgtccgctcaggccgcgaatgccgccagggccgcgtccgacgccgctcaggccgcaaacgcgcaggtgacggcggtggccgacagcatcaccgaatcgaaggcggtcgtggaatcacatgcgaatgatgccttgacggcgattgacgaggcggtgaagagcgtgaaggataaggcgtccgacgtgtctggcgaggataggacggatgccatgccgacctattccaccgattccgcctcctctcaggaggtctgacaaatgtctgtactgctcaacggcacgagggtcggcctcccgtatatgaccaataatggcgtgcctgtgccgatgaacgcgctgtacaacggcgtgcaggtatggccgccagccgccgaaacactcgtggacgtgtggctcaaaccggtcgatttcacctctcaggcgctctatgccgaccatcctgaggtcaaggtggccgcccagaaggttttcgccgacggtcacatcgaggacgcatccttgacgctttccacggcggacaccaccgtggcgggcatcaatggtggcacggtgagcttcgtttccgacaccacgaattttctcaccgtgctcaagcaggatgcgttcaacgcctgtcacgtgtcgattgccgaaggcggcaagacgttgggtgccaagcagatcctcgtccagcctgacaagccggcgactgctccggtcggcagcctgtggtgccgcaccgaaaaactccacaacgggttgaaatactatacgggcgctgtcggcaatgatgcgaacgtgatgtgcttcctcatcgaccgcatccgcgaggtatggcgcaaggaatgggacggttggaagcttttgacgggaaaggaattgggatgagacggacgaatctgtgtgcaaaacccgctgagacacttgatgcatcggccggcgatccggacaattggaaggacttcaaaaacgggaccggaatgtctttgcagccgggacgatacgtcgcctcatgcaatattacgaagctcggaagcaaaaaagcggtgatccaattctgggatgagactcatcacgtgcagttgggtgctgtctggaatggcgtcatcggcgtcaacgtgatgcagttcgacgttcagaccgcttccgacaaatgtaatttttccgcctgcggctgcaaggccacggacttcatcgtcgaacgcgccgacacgcacgctctcgcttcggggggggttccgggcttcttcaccgcaggcaccgcgccgtactgagcttgagggtggaggcggacatcaactccgggtatctgtacctcggcgggttcctcggccggcttggcgcggggcgcggaacgttccagacggtctattttcgtaataaggagcatgagcgtgcagaggattaatcttttccccaatcctgtttttgccggaccgcttaccgacgcctcccgttggggtgacgcgaatgggacggtccgtgataatgcgttgcacatcacgggaaccagaggcggatatggcttcaacgttgcggttccattcaacgttccgctcgtcttgtcgatgagagtggacgccagcgatgataacgtcgcgggcttgatgctcattcagacaactgataaggccagcgttaataatatgttgtctttccaaaaattaaagcaggggatatcggatgtcttgtgcagattcacggtcccctcccatgggtttcgattcgaggtaaatccatacggaatccgtcacgtggcggtatcgaatgtgctcatcgaacgtgccgacacttacgacgccgccgtcgggggggggcttccgggcttcttcaccgcgcagaacgcgccgtactgagcttgaggcgggtggccgccgatgaggatcaggaaccgttacgccgatccgaattgcgagcggacgatgccaacatggagttccaagggccaggttgccgtcacacaggacggcgggcactggaaatacagctttcctcgagctgcgagcttgataccgcaaaaaatgtcagactgtctgatgataaggctgacgcctgcaagcgtatgggagtccatgcgcgtggagaactcggacttgctttactcgtcgtccgatggtctgcgggtcgtggacgtatccaaggagaagcggaatatcgtcagcatccaggcgctgctcgcgttagaggccacgccaatcggcatgtgcttcgtcgggttggacgagtggccgattttgcaggaggttggcgcttgtatcttcgccgtcgacaccgcaccctactaaacattttgggggtggccgcgtgaggatcaggaaccagcatccggacgcgcacgctgcccagaaagtctcgacatggaacctgttggccgagccggatggaaaaggccatgtgacgtacacaaacgtcggcggccccggcggcgacttcgggacttttcatgctttcagagacacgaagctggaaggcatgacttacctgctccggacaagcggatattgctccaagaggcactttaatctcctgtcggacggatcgtttgcctgtgacagccctcagctgaaggacagcgatgtgtgggtggacaagggcaagtcctgcacggcgatcgaatactgcatcgtcgcgccagcggagttcaatgtcctgcaagcagtcggaatcggatgcttcaccggggacaccgccccctattagcctgctgcagaatgctggcctaccgtccgtgttcgccgcctctgaccacccgtattaaataaaccacagccccgccgtgtgcggggcttgttcgtaaggagatgtaatgtgctgcaaaattttctagccgggttcggcggcgtgggcggcgcgtgcgccatcatcacgctcggacttaaagtctggccgggcgctttggacgcgctggccaccggcctgtattcgcacgtgcggccggaacgattgccctatgattcgccgctctcgcagcatttcgcgaaaacacggaccttgggagagcggacatcgaaaatcgacgaccgcatggacgagttatgccgcgacacgatcaagaacacgatcatcagcctgatctacggcgaccagtcgcacgaccattcggaggcagtccgatacgagctcgccaaactcgaaaaactcgacgcgcaatgctggatagtcaacgccgccgaaaaatacttggaggaccggcaatgagcggccccgtcgcgttggtcgcgtatctcatcctcctcgcgctcatcatcgtgtccaatcatggcgcgcgcaggcattgattttcacactggttttcaaagccatcccattccgggatggcttttctattgcccccttgactcggggcgggaaggagaggatgtgaagatcctcgacaaaagcaagcataaacacggacgcctgcaccggcgcgtgggcgtgacgctggccgcgctcgtcgccgcggtctccatggcgtgcgccccggcggcgatggccgacatgcagggcatcgacgtgtccaactggcagtgcggcatcgacatcgccaacacgcaggcggacttcgtcgtcgtcggcaccacatggggcacgggacaggtgtataacaactgtctcgtgtccggcgtcaacacggacgccaaccgcgtgatcgcccaagcgcaggcatccggcaagaaattcggcttgtaccattacgcgatgggcggcaacccggaggccgaggcccagttcttctacacgaatacgtcgaactattggcgtcacggcatcgtggcgctcgactgggagatggacgacaaccccgcatggggcgattgggattgggtacgccgattcatggcggagtgcgaacgattgagcggcggtgtgcgcccattgctgtacaccggcccggtcgccggcaccatcccgcaggacatccgcgaccggtacggtttgtggatcgcccagtacgccaacatgagcccgaccggctatcaggccaacccgtggatgatcggcgcatacggcgaggccatgcgacagtacagcggcaccggtgtcgtcaacacgtggagtcccatcgacctcaacgtgttccgtggcgacgcatggcagtgggatctgtacgccaacccaaccggcggctccacgccaccggccacaccggccgcgcccgcacagccgaacactcccccggccgacaccaacacggatggcatcagccacgtcatgcagtggggcgagaccgtctggggccttgccgtagcctacaacgcatggcccctgtccgcatggcacacgccaagcggtgacatcaaccgctactacgtgggcgatgtcgtaacctacggcggcaccaccacggccgcgccgtccaacggtgtttccaaggtcctccagtggggcgacaccgtgtgggagttcgccaccgcgcacgggtacaacgtcagccaatgcacggtaccctccggcaacatcaacgtctactacgtgggcgacgttgtaacctgccgctgagattcaacagatgccgtcgtcactcccctgatggcggcatcaccaccattttttttgatcggagtaaaacatgaccgacaacacgccggacacccaactcgaagaaatcacggaaaccggcacgcccaatattcccgaccatacggccacgccgtacactcccgtgttcaatgacacggtgcgcaccgtcatctacgtggtcacgctcgtcgcctcggtcatcggactcgggttcatgagcttcggctcccccggaatcggcggtttcatcagtaccgccgcaggcatcatcgccgcaggattcggagtcgcatacaacccggtacgcatggccggcaagtagtcgcagcgaataaataccaccgcccctccccagcagtaacgctggacggaggggcggttttcgcgtatttacgctttcatgggcggaagattgaaatacaatcgggcgattcgctcagcttcgcggttctccctctcattaccaagcaacagaagccagatggcattcttccccgctagaggaatcggagcctttagctgctttatacagccctgctcttgtaaaaactttgcaccacggctcagtcggtttcgcgctgtccgtgtgcgggccattgttgtttctgcggcagtgtctaaatcatgttccttggaggcgatgaccatgcccataccctctatcatcttgtcccaaccctcccaataacaccagtaggcacggttttgatatacgacggcgttcacatcctctttgtcgattaccttcgaggccatgtaggtcatcatcgacaaagccagtaggtctagcgtctgcttgccgttttcatcagtcttggagaatttgccttggcttgcgagagcatatacgcgatctacattacggtagcccatctgttccgtcatctttcctccacgccctcgactaaacttgggagtggaactcttgctagggtttcgtttttcaaccctgtggagtcttcacctccatagggttttttattcacactcacatgataacagatagtcacaccataatgggaatagtgagtcacagtcaacgctgattattgctcacaccgacatgtgaacatacatggatagatactaaaaggcttacatgaatatttatacaaaaaccgattattgatttttcgagcgaatcaccgtcgattccgccacgccgaaaccgttccgcagcccaacccgaagatttgttggagaatgttggagaatgacattcctagacgccggaaatcttacccgagatacgatgagaccccttgcaaacattggcgttcgcaaggggtctcaatgcctaatcagcgagtgattcagcacaccttccacatccagttgtgcgggtcctcgacttcgccgagctggatgccgagcagctcgtcgcgcagttcgcaggtgagcttgccggagccgccgtcggcgacggtgacgtcgaacttctcggacttgaagcgaccgatcggggtgatgatggcggcggtaccgcaagcgaacacctcggtgacttcaccggacttgatgtcctcgagcagctggtcgagggcgatcatggtctcgaccacgtcgtggcccttgtcctgcagcagctgaatcagagagcgacgggtcacgcccggcagaatgttgccggtcagggacggggtctccacgtggccatccttgtgcacggccatcatgttcatgccaccgagctcttcaaggtaggtcttggtggcggcgtccacaaagcacacctgctcgcagccattctcaacacccttgtactcgccgagcagggaggcggcgtagttgccgccgcacttggcgaaaccagtgccgccagggccggtgcggaaccacttgtcttcaacccagatgctcaccggcttgacgccacccgggaagtacgggccggacggagaggcgatcacgcaggagtcgacctcctgcggggcgcgcacgccgaggaacggctcggaagcgaacatgaacggacgcatgtacagcgtgtactcgcggcgggacggc

SEQ ID NO: 1428 - DNA, 5060 bp, Unknown
  R257_15m  MAG No. k141_15773
gccgtcagaatccgtggtgttcgcgatgatggtgccatcggtggcaatattggatttcgctgatggagatgatgcctgcgtcggctcggcatcatccttccaccggtacagaataccgccggcggcttccacgattcgtctcatactgttcgtacccatctcttgtattgtaggtcacgttggaccgctgctacgtagttttgcgcgctgaacaacgatgcccggcatcctctcgaaagaggagccgggcatcgtaaccaccctcagtcagcttgcgttgacagggagcatcgagtgaaatcagttgtgcgaattggggcggcgctggtgcttgcgaatcagatattcctgactgtcgaccagcgggcggccctcgtcgtccttggtgtgcagcacatacgtgccgtcgggctgcatgtgccagctcatggtggagtcggccatctgcaggtccacgtacttgatgagcccgtcgatctgctccggggcggtgacacgcaccagagcctccacacggcggtcaaggttacggtgcatgaggtcagccgaaccgatgtagacctccgggccggaagccggaccctcgccgatctgcgggccgtccgcattgcagaaggcgtagatgcgggagtgctccaggaagcggccgagaatcgaacgtacgcggatgttctcggacaggccgggaacgccgggcttcagagcgcagatgccgcgttcgacgatgtcgatcttcacgccggcctgagaggcacggtacagggcgtcgatggtcttctcgtccacgatggagttgaccttgatcttgatccaggcctccttgccggcgcgggcggcgtcctcctcgcggcggatgcgctggattagaccggtgcgcacggtgcgcggggccaccagcagacggtggaagctggactttggcgcgtaaccggagagctggttgaacagacgagtcagatcctggccgaccaccgggtcgcaggtcagcagacccagatcggtgtacagtcgcgcggtcttcgggttggagttaccggtgcctacgtggcagtagcggcgtagaccgtccgcttcctgacgcacgacctcgatgagcttgcagtgggtcttcaagcccacgatgccgtacaccacgtgcacgccggcgcgttcgagcttgcgggcccacgcgatgttggcgtcctcgtcgaagcgagccttgatttccaccaaagccagcacctgcttgccggcatgagcggcgtcgatcagggcgtcgatgatcggcgagttggagctggtgcggtacagggtctgcttgatggccagcaccttcggatctgcggcagcctgcgcaaggaaggcctgcacggaggtggagaaggagtcataggggtgatgcagcaggatgtcgcgctcgcggatggcggcgaaaatgtcctgtgcgcgggaggactcgacctcggcgatctgacggttcgtggtcggcacgaacggacggttcttcaggtccgggcggtccacgctgccgagctcaaagagcacggtcaggtccagcgggctgggcagacggtatacctcgtcctggcttacgccgagctggtcggcgagcagctgggagaggaacgggctagtggtgtccgtgatctccagacggatcggcggtccgaagcggcggcgcagcagctccttctccatggcgttgagcaggttctcggcgtcatcctcttccacgtcgatgtcctcgttacgagtcacgcggaaggagcgggcttccttgatgatcatgcccgggaacagggattccagatgcgcggcgatgagcttttccatggcgatgaagccgtaacgctcgtccttggactcctcgtcggtcatgtcgtccaccggcaccaggcgcggcaggttgcccgggatcttgacacgggcgaagtgcgacttgccggaggccgggttctccacaatcacggccaggttgatggaaccgccggaaatgtaggggaacgggtgggccggatccacggcgagcggcgtcaggaccgggaacacctgctggcggtagtagcgcgagagacgctcctgctcggaggaggtgagcttgtcccacgtcagcaggacgatgcgctccttctccaattccggcagaatggtgtcgatcgcgtaatgtgcgtgctcgtcttgcagacggtgtgcggtctcgctgatcgcgcgcagctgctgacgcgggctcaggccggcggcagacggcacggcgatgcccgagtcgatacggcgcttcaggccggcgacgcggaccatgaagaactcgtcaaggttcgaggcgaagatcgcggcgaagttggcgcgctcgagcaggggcatgtcttcgttctccgcgcattcgagcacgcgctggttgaacttgagccagctgagctcgcggtcgaagaaacggtccttgggcagcggtgcctcgccttcctgatcgacgcggcggtcgttgttgtcgttttcggcaatatgctctgcgatttggctgcgcagaattgccttcgagggtgcgtcaaatatctgtgccatagcttatatcgtaagctctggcgtggccggaaaacggctgaacgcgccagaattcaacgggtgttcatgttagttcggtgttggttggttttgagtgtgctagcgtgctcgcgacacgccgtgagcggcggtgaaacgaacgaaaccgaacatcagacgggttcgatgtgaacggttcagctcgttttccgatagtcagaaagtgcgattgaacagttgtgataaaaaacgcacaacgactctctgcaggttgcgagaaacgggagtgatgaatagattatgaggtacaagaacaactgaacagagcagagcccacaaatagtgtatggtcacgaggactgttacgttggacgggcattggaaagacttaccgttacgacgatgatgttgtgcagagattctgctccagtagttgaacttgtagaaaaggcccgctccggcgggccttttcgtttgtgtgtacagtggagggcatgacggaaacacagcgtacgccagaggggatgtcgtcgaaaccccgtatcaagccggccgatgccgaagacggccgcccggtctctatctctgcgcgtctcggacgactgcaattccactattccggcaagttccgcgtgctgcagattgccgacattcaggatgggccgaaagtctccaaagacaccatcgccctgattgaggccagccttgatgccacacggcctgatctggtgattttctccggcaaccagatcgccggctacgatccggcctttgccaagagcttccgcaaacgccgttggtgcgaagaggcgattcctgaatctgcgttgaatcatacgcgtgaattggtgcgcaaggccatcggtcaatttacctctcctttggcgtcacggggcataccgtgggcggtgacctacggcaaccacgatttccagtgcggtttgagcaatgccgaactcgacggaatctaccgcgagtttcccggttgcatcaatccgccgagtgatgcgctggccaagcagaccgtatatatgtgtcataaggacggctcgcctgcggcaaccaatggtgaagaaaccgatgcgccgatttccgcgtccaccattcccggcacttttgcattgccggtgatggatgtggattgcacgcgcaacgtactgggactggtactggtgaattccggtgactatgcgcatggaggcggtttcggcacgccttcgcccaagacattggccttcctcaaggctttgcccgaacatatcggagccaaatcaatggtgttccagcacatgccgctgccggagtattaccaggtactcaaaccggtggccgccaatgcggctttcgccatgcagggctaccgcaagcatgcggatacctattatgtgctggacgaggatcgcactcaagccggcgggtatctgggggaaggcatttcctgcccggatgagtcggacgagtttgaggcgctgcgcgaggggtatttcggcgtcgtagctggtcatgatcatcgcaacggtttcgtcggcgaacatgagggtctgttgcttatcgctacgccaacctgcggattcaatacgtacggaccggctccggccaaacgtgccacgcgattgatcgaatttgatatccgtcacccttacgagccgcgtacgcaattgctggagtttggcgaactggtgggcaagcccagttccaaacgcgcctacacctatgcggtgaaccaaaccgcgcctggcgagggcgagggtgatgatttgctgcgcaagccgtcgctatggagccaactgtccggtttattcaggtaacccggtttattcaggtaactgttcctgatagaggcggaaagcggcgcgaagtattcgtatacgcgcgcggccggaggcgcggccgtataccggttccatatcccggcacaaagatatgctgacatacgatacaaatgataacatttgttgaataaagggttacgttttcgcgtctagggacgtgtgcttcggcacgcattcaaacaagcgcatcccttgcggtcactatctcacgatggttcgcgcgaagcgatgaaccgtcagtatgtgcggagttctggtatggtcacacgtttaacgcggttggcgacggcggtcgcgctggtcatcggcatgatcgcaccggtcgccacggccgccgccgtcgacggggggggggctgtcgatgccgcacaacagacgccggcgtgcggtcgtccttggaaccaggacgaacagggcgccatcgttgattccagcaagccttccggccgatgggtcggctgcatcagcaatgccgcagtgcaatatcgattgcagaattcgacgcaatggcagaacggtcccgcggatgaacacggcaatgtctcgttcgattacatcacgaagatagcccaattccgttttgacgcgcaattcgtcatacccaaaggaagcatcaccgaagacaaccacgtgttccgataccacatcgcgggattcaacggcaccggtaccaccatgtcgggcacgctcaacgacgatctcggcacgtac

SEQ ID NO: 1429 - DNA, 4694 bp, Unknown
  R257_15m  MAG No. k141_16206
cgccgtgcgccgtgcggtgtgcgaactgggcttgagcccggtggacgcggtcgaggccgccacattgacgccggccaaggcgttcggcttcgaccggccgaacccggtcaccggggtgcctatcggcctcatcgcccccggcttcgccgccgatttcaaccttgccgatccgaccgattggacggtcgaacaggtgtggtgcgcgggccgcaaattgaaatagcgctggatacctctccgcaggagaataggcggagctggtgggggggcggggtgacagtactgcgtcggcacagtcaccattcgcggcaatgcggtgcgacgccgacacggcaaatgacgaattgcgtttgaccgcactccgtactatattgttgcgagttgctttgcggagcaaagtaacatccaaggggctgtagctcagttggtagagcgcttcgttcgcatcgaagaggtcgcggtttcgactaccgtcagctccacgagaccctctgcattcattccaccgcagagggtcttttcatttgtcttcgttggtattgtgccatctcgcgtttcaaggggctgatttggggtttgccggaggtctacttgcgtttcgaggggctgatggtcaagtagatacgccgccaaaatggcggaatagcgttgcgtcaaagccgtttgtactggtgcttcaccggatgaggagccccttgaaacggaagtagacttccggaacatgtgaaatcagcccctgcaaagggagaatgcctcgattccgccatggattgtcgtggattgctctgtggtatgggcaatactgggagtatgacaagcgcagatgagttgaatgagcagtatgacgctgacggtagcgtgacgcaagtgcctgaacgcaatgatgaagttcatgccggcgaatccgccgccacccaatcccgcgaatcggccgtgaccgtccccgccggcaccgtggtgctcgccgcaaccccgatcggcaacgttggcgacgcctccgcccgtctggtggccctcttggagcgggccgatatcgtggccgccgaagacacgcgccgcctctacgatctcgcccgtcgcctcggcgtctatgtgaacggtcgcgtcatcgcctatcacgaccacaacgagcgcgacaaggccgacggcctgctcgaccaggtcgaaaccggcgccaccgtgctcgtcgtgtccgatgccggcatgcccaccatcaacgaccccggcttggccatcgtgcgccgtgccatcgaacgcggcctgcccgtcacctgcgcgcccggcccctccgctgtgctcgacgcgctcgccctctccggcctgcccaccgaccgcttctgctacgagggcttcctaccgcgaaagcattccgagcgcgtgcagtatctgcgcacgctgttgcccgaacgccgcaccatcgtgttctacgagacgcctcatcgcattgccgattcgatggacgatctgctggacgcgttcggcccgaatcgcccgatggccctgtgccgcgaactcaccaaggattatgagcagattcgtcgcggcccgattggcgagattcgccaaagtgtgattgatgatccgccccgtggcgagatggtgctggtcgtcggcggcgcgtccaacgaggaggccgaagcggccgcgcccagtacgttgagcgtggatgacatggccgtgctggccatcgaccgtgctttggaggacggcctgcgtatcaaggacgccatcgcgcaagtggtgcaggagcatccactggctgacggatcgttggccaatcgcaagcaggtgtatgcggctgtgctgaaaatcaagggatagcgcagcagccggcgattatctccccgttacgcttccatcgactcgaacaatatttccaacgcctgctggaccccgggcccaccacgctgcgagaccaattccagcaaaggcgcgtcggctttgggattggcaaccagccatttacgcagttcgggcacgtgatatgcgatgtgccagagcacggcaacatccgtatcgggcgaacatgccaccgcgggcgtaagtctgatgggtggttcaggcggcgcggtcatatccgagattgcgcgcgatgcggattcggatgagtgtgccgccgccgcgtggcgaggcaaccgttgcgcctgccgcaaatgccgtaaacggtgagcggcatggcggcctctgcgatgtcctttggcgatgaatcccctcgtcatgcgcattgctccaaagccggttcgtcaatctccttctgcaccgattcaaaaaacatgcgtgcgcgtccggcatacttgtgatgccgatgctccttgacgatttgcagacagtcgtttggccgaaactggtacgcggacatcagctgacacaccagtgcgttgacggtggaaggatcggggatgtcttcaggactcatcaccaggtcgcaagccgtacgggctggcgtggtgacaggcagcccgccgagcttgatgatttgctccggcaacgtcaatcttttgaatacgcggatgcggcggctgacggatgccgagcggaagtgcgatgtggagatcacgtctatggtgctcggaaagtcggggcctcccagccatacccaagcggcggtcatcgaacacaccacagtgccaaacggggcgacctccgcgacgatttttgcgcgaccatacagtgtgcccgaatgctcgatccagtagccggcggaatcgtcgagcttacgtaacgcgccgaaggcggccagacggttaaggctgagcggtcccggcagatccttggtaaacagtatcggcggcaccgcgggctgtgcggttgccggcgaggtgactgttgtgatgtccgtcatcggacctgctgtgatatccatgaccgaacaatatgcagaaatgcggcttgcgcgccaccggataagcgaaaacggtggataagtgcataacttcactaggtgcgcgaatgatgtggataactcggtggatatcgacaggcggaagtgtgtgcggatgtgcgtggacgtgcgtacggatgggtgcgtggacgtgtgtacggatgcacgtacggatacgtgtgcgaatgcgtatgcggataagcgcgcaagcggtgtacggataagtatgtgggggaagttacgggcggataggtgagtgggatgaggatggcggcgcggcagctatccgggcgtgtccccgccgcgccggataatcaagccttatgagtcatgttttggtgaatgttgcttggccgtatgcaaacggcccccgtcatatcggtcacgttgcaggatttggtgtgccctccgacgtctacgcgcgctacgagcgcatgaagggcaatgacgtgctcatggtgtccggcaccgacgagcacggcaccccgattctcgtcgaggcggagaaggaaggcctcactgcccaggaactggccaaccgttacaaccgcgtgattgccaaggatctgtgcgacctcggcctgagctacgacctgttcacccgcaccaccaccggtaaccacgagcacgtggtgcaggagatgttcaagcagtgcttggagaacggctacatctacaagggcacccagcaggtggcgattagcccgtccaccggccgtaccctgcccgaccgctacatcgagggcgagtgcccgatttgccacgccgaaggtgcgcgtggcgaccagtgcgacgcctgcggcaacgagctcgacccggacgagctcatcaaccccgtctccaagattaacggcgaaaccccgcgcttcgagcagaccgagcactacttcctcgacctgccggcgctcgccgaagccaacaaggcatggctggagacccgcaagggctggcgcaccaacgtcatcaacttctcgctgggcctgttcaaggaggtcaagccgcgcgccatcacccgtgacatcgactggggtatcccggtgccggtgaagggctggatcgacaacccgaacaagaagctgtacgtgtggttcgacgccgtgatcggctacctgtcggcctccatcgaatgggcccgccgccagggcgacccggagaagtggcgtgaatggtggaacgatccggcgtgcccggcctactacttcatgggcaaggacaacatcaccttccactcccagatctggccgtccgaaatgctggcgtacaacggcaagggctccaagggcggcgaaaccggcccgatgggtccgctcaacctgccagagcaggtggtggccagcgagatcatgaccagggaaggcaagaagttcagctcctcccgcggcattgtgatctacgtcaaggacatcctcgcccgctaccccgtggacgccgtgcgctactacatttccgtggccggccccgaatcctctgattccgacttcacctgggccgagttcgtgcgccacaacaacgaggagctcgcctcctcctggggcaacctggtcaaccgcgtggccaacctcatcaacaagaacttcggcgagattccgccgctggacgaggattcgatgaccaacgaagaccgcggccttctggaagaggcttccgccgcgttcgacgtggtcggctcctccatcgaaacccaccaccagaagcacgccctatccgaggcgatgcgcgtggtcggagacatcaacaagtacatttctgccaccgaaccgtggaagattaaggacgaccaggctcgtctcggcaccgtgctgcacgtggccgc

SEQ ID NO: 1430 - DNA, 10326 bp, Unknown
  R257_15m  MAG No. k141_16245
ccggaaggacgttcttctccttgagcagctcgccgccacgcttggcttcggcttcaccctgctcggtcagcggtacgtcgacccagccggtgaactggttggttttattccatgcgctctgtccatgacggagcagtactagtttataagtcatacggttcagtctacagccgcgtgcgcccaaacacgagtattcgtcttattatttcgctctcatagcgccacggcaaccgccagcaccaccgcaaacagcaaggtctggaagctggcggcgggcagagccgggcggaattgacgtttattcacgctggagaccatgcgcacaggtattccggcgcccgagagcaacagcaccgcaccccacggccaccataatgtaccacacatcagcagggcgatgatccatgcgatgacgcagcacacaatcagcaacgtacgcgcgccggactcccccagccgtacggccagcgtgtgtttgccatgctcacgatcctcgtcgatgtcacggatattgttcaccatcatgatcaggcaggagaacaggccagccgccacagcacccaatagtccgccgacgtccaccgtgccgcacagcgcgtattcggtgcccaataccgcagccaagccgaagaacaggaacacgccgacttctcccagcccgacgtatccatacggatgcttgccaccggtgtagaaccagccggccagcaaggaggccgcgcccacggccagcaaccaccatgcttgggcgagcacgaccgccacaacaccgcatatgcaggcgatggcggcgcaaatcatcgccgcgaacagtacatgtttggccggtaccagtccggatgcggtcagtcgctggggtttgcctgatttcgattcgtccgtgtcacgcccggcgtcagtgccgcggatgccgtcggaatagtcgttcgcatagttgacggcgatttgcaggaacagcgcgactagcaggcacaggatggtcaccggccagaatcggtccatcagcagggtctgctgttcacgggccgtggcgcaggaggccggttctggatatattgcgatgcaggtgcccgaccgctcgatatgcacgtacgccatcaccgccccaaccatcaccgacgcgatggaagtgaccaaggtcttgggacgcgcgccccgaacccacaagccgatagacataagcaatccctttcatatataactctggctcccctctctgaggggagccagagtatgcctaatcagccaacgagcggcttgaccagcgggaaggtgatggtctcgcgaatcgtggcaccggtcaaggcgataagcagtcgatcaatgcccatacccataccgccggccggaggcatgcccacgccgagagcctcaaggaagtcctcatcgatgtcgcaggcctcttcgtcgccggcgagtgcgtccttggcctgggccacgaaacgctcacgctgcacgatcgggtcgttgagctcggagtagccggtagccagctcgaagccgcgcacgtagagatcccacttctccaccacgccgggcttggtgcggtggcccttgaccagcggggaggtttcgaccgggaagtcacgcacgaaggtgggctcgtaaagcttgtcctcgtagaagtgctcccacaggtgttcgacgagcttgccgtggttctccacgtcgtcgcgctccacgccgagcttgtcggcgatggcgcccaaatgctcaacggaggtgccgggatgctcagggccgccgttcggcacgatttcctcgcccaatgcctcggacagcgaatcgtacatgctgatggtcttccattcgccgccgaagtcgtattcggtgccgtcgagcagggtgaccttgtgcgagccgtagacgtccatggcggtcttctgcacgagctccttgaccagctggccgatggaatcataggtgccataggcctggtaggcctcgaccatggtgaattcgggggcgtgcgtggcgtcgacgccctcattgcggaagtcgcggttgatttcgaacacgcgatcgatgccgccgaccaggcagcgcttgaggaacagttccggggcgatgcgaaggtacaggtcaaggtcgaaggcgttcatgtgcgtggtgaacgggcgggcggccgcgccaccgtgcagggtctgcagcatcggggtttcgacctcgaggaagtcgtggtcgtcaaaggtgcggcgcagggaggccacggccttggagcggttgcgcaccatgttgcggatgttctcgtccgcgatcatgccgatgtacggcttgcgggtgcgggtgtcttcgttcaggtccttgtgcagggccggcagcggctgcagggccttggaggcgatagcccactcaatggcgaatacggacagctcgccggtcttggaggcgatgacgcggcccttgaggtacaggtgatcgccaaggtcgacgagctgcttgaactgcttgagcgagtcggcgccaatctccttcttggagatcatgccctgaatcttggtaccgtcaccggcggacagctgcacgaagcacaggccgcccgcgttgcgcaggaacagcacgcggccagcaatgccgaccatgtcttcggtctcttcgccagcctcgagcttgccgtcatacttggcgcggaccgcctcgatggtgtcggtgacgtccaagtgcaccgggtagggggcgatgccggcctcaagcatcatcgcgcgcttggccacgcgcatctgaacctgctcggggtgagccagcgggccgaactccttgttggaggggtccacggcttcgtccagcgtggcaccggacttgatcttctcgcggatggtggcgtcctgctcgagcagcatttccgcacgttcgacggtgctcatctgcgggacggccggggtttcattctcagtgttttcggtattttcgacaacttcagccatgattcatcagtgtacgcaaggccggcgattatgagcccggcagaccgtacggccatctgaacacccgctcacatgacgcaaaaccggctctgcacaaggcttgagagacctgtacacacggcgaatccaccatcacgcaacactcgcgacatgccgatttgcattgtccaccaccacaatgtaatatctacatctgttgccaaacgggctgtagcgcagcttggtagcgcgcttcgttcgggacgaagaggccgcgggttcaaatcccgccagcccgacaactggaccggattgttgagaaatcagcaatccggtttttcgtttcctaacccaacaatcagaccaagcgatcggacagcggtaaacaacccgccgcgcacagcgacaaaccgcgtcgcggcaaggcccgtatttgttggcggaccaccgtaatatatcgctcgaatcaatcgattgccgcactgtttttgtaagtaatactgaagtaattagaggaaccatgaagaagagtctgcttgcactggcttcgggcgcgttcattctcggtgccgccgagttcgtgatgatgggtattctgccgcaggccgcggccgccaccggcgtggacatccccaccgcaggccattacatttccgcgtatgcgatcggcgtgtgcttcggcacactgattctggtgttcggccgcaaggtgccgccgaagaacctcatcatattgtttatggcgattgccttggtaggcaatctggcttccgtgttttccgtcaatgccgccatgctggtcgtcgcgcgattcgtcgccggcctgccgcacggcgcgttcttcggcacggccacgctcattgccaagactctggcggagaaaggcaaggaagcgcaggccgtatccgtgatggtcaccggacagaccgtggccaatatgctcggcgtaccggcgggcaccctgatggccgagttcctttcctggcgtcttgccttcggcattttggccgcttgggcggcaatgacgattgtgctggcgttggcgtggattccgtacgttgcaccgattaaagacgcgggcatcgccggtcagttcaagttcctcacccgccgtggcccgtgggtgattttggccgccgtgttcaccggcaatgccggtgtgttctgctggtggagctacgtctccccctggctgcagaaaaccggcggatggtcgtcttccctggtgccgatgctgatgatgcttgccggctttggtatggtcatcggcggtctgcttggaggtcgtctgaccgaccattggaggcatgccggcgcggccgcaataggtcagtccatctcctgcctcggcttgttgctggtgctgatcactccgggcaatcagccgatgaccgctgtactgacgttctggatcgccgtcggattgttctttacttccgctccacagcaattgctgatgaccgaagccggccaaggcggcggcgagctcatcgccggcgcagccgtgcaggtggccttcaacttcggcaatgccatcggctcgattgtcggcggcgcgatgctcaccaccttctcgatgaactatcgctataccggtctgggcggtatgccgctggccctgcttgccgtagggctgctggccttctactcgtggcgctgcgaaaccgataccgacgccattcaccgcatgcgcgaaatcaaggtggactgagaccggacgtcacattcacgcataatcagcggaatgtgacgttgctctcttcttactgaagttcatctgcggttcgttttcattacacacgtattccaccttgcctttctaagttctcactatgaaagagcatctttcctgatgcctcatgaaggaagggaatacagtgaaacccatcaggttcacggcgaggatgattgccacactcgtcgccgcagcgacgctgtccagcgttgcgattgcgaccacgacggcttctgcagatgaatccgtaccggcagcgtccacggtcggtatcggcggcatcgccgccagcggcgccacggatgcgttcagtgaaaccaagtacgcggccaccaccgaaggccgttacgaagcctcggtcgacgcgaatgacgtcaccggctatgcagccgttccgcagacgcgtgcggccaagccgaatcttgtgcagctgcttggcgaatatgacagctactggcagccggccaccgaaaccgctggcggcaaggtgctcaacaagaccgtgctcgatcacgatgacgcctacatccaacagatcaacaacgccgccgccgaagacggagacggcacgaccgctaccgcacagcagcagcgcgctctggtggacgcggatatgagcgccgatgagaccttgccggactccctgggcccggtgctcggcgaatatttttccgccggtctggccgacggcagcctgaagaaggtcgcggacatcttcaagtacgatacaatctccacctctaccgccaagaagcacttccagcatcctcgtcctttcgaggatcgcaccaatggcggcaagaacgacatcacgaacatcaacgagaacatcatgcgcgtccccgactggactgacgcccaaggcaacgcgcattccgccgaatacgacgggctggtcggttccggttccttcccgtccggccacaccaccggcgcatactcctggggcgtggctctggcaggcatgctgccacaacttgctccagagatcctgacacgcacctccgaagcgggcaacaaccgcatcgtgctcggcgtgcactatccgctcgacatcatgggcggccgcatcgacggcgaagtggcaaacggctactactggggcacttactacgacaagtacgtcaagccggcatccgaccagctgcagtcctatctggcagccaagtgcgtggcggacggccacgccaccaaacaggacaccgattacgcgactgtgaccgaatgcgtgaacaaccttggcgcgaacgcctccaacggttaccagaacgcctttgtggatgccgtgagcaaggagcccgtcaccgaccgcgcctcggcgttgcgcgtctacacgaaccgtctgacctacggtttcggcaagaccaccgccggcaccgcattcaccgcgcctgaaggctctgccgacttgttgaagatcgcgtacccgaagttgcaccgcgaccagcgcgaagccatcctcgccaagaccgcgattgacggcggctacccgctggattcctcatccgacggatggcagcgcatcaacctagccgcagctctgagctccaccgtgacgttgaacgagaacggcgatgtcgtcaaggtcgagcccggcgcagccaccccgtccgtgatcggcgaggaatacgccgacaagggcaaccacccggattccgacaacggtggctccggcaaccccagccaacccggtaaggacgccaagcaagtgaccgtgttcgacatcaccgacttccacggacacatcgaaaccggccagtgggtcgaagccgcttatcagaagcttgccgtgcagcacaacccgggcaacagcgtgttcgtctccagcggagacctcgtgggtgcttccccattcgaatcctcctatttccaagacactccgacgctgaacatggcaaaggcatgggatctgagtgtgagcgccttgggcaatcatgagctcgacaagggcactgcagacttcaacaaccgcatcgccgaaccgaagtacggcatcgactgggtcgccgccaacatcaccggcggctcgctgacttccgaccgtctcaagccgtataccatcaagaccgtcaacggcaaaaaggtcgccttcgtcggtgccatcacctccgatctgaagaacgtagtctcccccagcgtgatgcaaggcgtcacggtgaccgacccggttcaggctgtgaacaaggtggccgaccagctgtccgatggcgatgagtccaacggcgaggccgatgcggtcgtggccctgatccatgaggatggcgacaccatcgcctccgacggcgacggtctggacgctaacgtcgatctggtctacgcaggccacagccaccgcaacgagtacggcaccaccaccaagtccggagcgccgatcatcgaggccggcaagtacggccaggatgcagctgtccaggatctgtacatcgagggttccggcaaggattccaaggtcaccgtgcagaacgcctcccagtatgacgtgacgtacgtgaccaacaaggacggcaccgctccggccaagggattcgagggtgacgacaacggcccggccgccaaggtctacaagcaggctcaggcggattccgccgaggctggtaagaaggtcgtcggcaccatcgacaagtcagcgaatttcgccaagggcaactggagcgccgaaacccagctcggcacgctgaacgccgatgccgcactcgaatccgccaagaagacgcccgtgggcgagaaggcctccatcggcttcatcaatccgggcggcctgcgcaccgacaacctcgatcttgacggcgacaagcagatcaccgtcaaggaggcgtacagcatgttgccgttcggcaacgataacagcgtggtcaccctcaccggcaagcagctgaaggacgtgctcgcccagcagtggcagatcaaggacggcaagtccaatgtggtccgtctcggcatctcctcgaacgtgaccttcgtgtacacgctggtcgaggacgccaacaccaaggcaccggtcgccaccgtctccgacgtgttcgttgacggcaagcagatcaaggacaccgacaccgtgacggtcgccggcaactccttcctgctgaccggcggcgacggcttcaccggttttaccgcgcagggtcagccgcagctgaccggcacggtggatgtgcaaggtctgatcgactaccttgccgatcacaaggatgtcaaggccgatgactcgcctgcaggcatcgagctcaagtcctcctccgttgaaggcaccaaggcatccctgaccttcgacctgccggtctacgcgaatggccctaagccaatcgccctcggcctgtatgtcaacggcgtggacttcggcgtgaccaagctcggcagcgccaagccgtctgagttcaccgtggccaagacgctgagcgccgatgaagccaagacgttcggcggcaccgtctccaccgtcaacccgcagctgctttacacggacgccgagatcgccgccgccgaaaaggagcacgccaacggttccggcgaacaaggtgggaacaacaaccaaggcggcaacaacaaccagaacggcaaacccaacgccgacaagaagccgacggccaagccgaacaagaccgatctgccgggaaccggtgcttccatcgctggaatcttagccgcagtcagcctgctcgccgccgccggtggcgtgaccatcgtgctgcgccgtcgccagcaacgctgaacgattgtccgacgcctgtacaggtacggcaataaccgataactgaataccgaggaatagccccgcacgtcatagcatgcggggcttttccatgcctgttgagcctatttccactgaggacgacaacggggaaaacgacaagcacatacaccagctccggcagccgccgcacactgtaacgacactcacatcggcggtctccaaatcgttcacagtacgctggaacctagcaataatcggtatctcacgacgaaggagattatgtatggccgatgatgcgatggacgcgcggctggagcaggcactgctcggcatgcaggcgaaacacgcacatgatttcgatgcgcctgaaaacggcccggcggctcagggcggcaacgaactgcatgactttgacgtgaacgaattcctccacggcctcgacgccatcttcgacgcccacaacgccgcagaaaaggcgggcccgtatcttgaacaagcggcggtcgacgcggaaaacgccggagacgaagccggactgctgaccgtgctcaacgagacgatggggttctaccgctcgcaaggccgtcacaaggagaaccagtggatcgtgcagcgcgcgcttgagttggccctgcacatggggcttgagggtaccgaaagctgggccactacgctgatcaattgtgccactgccatgcgcgcggccaagcggtacgatcaggccgaggatctgtatcatcaagcgttggattgcgccaataagaacttcgcccccaacgaccgacgcctggctgcgctgcataataacctctccatgttgtacagcgaaacgaaccgattgccacaggcggaaatcgagctcaggcaggcgttgcacatcgtcgaggcggcgagcgtgaatcctgatgccgacatcgacgtggcctcgtcgaacaccaatctggctctggtactgctgcaggagagcaagctcaaggaagcgcacatccatgccaccaaagcgttgaccatctatgagactggcaagctgacgcactcggcgcattatgcctccgcattggctggctgtgcgcaagtgctgtatgtcgaacaccgatatggcgaggcggcctctcattaccgcagcgctttggcggtgatcgccgaatgctatggcaaggacaccgattactatcgcgtcaccgaggcgaacctgcgcgaagccgaggcgcaaatcggtaacgatgacgtgcatgcagcgaacagcgccgatgcaaccagcaccgaaactaataccaacatcgatgctactgccgaaatcgctgtgtccggtctcaaattggcacgcgcgttctggacacaggtgggcaagccgatgattacggcacagtatccgcaatacgtgggccgcattgccgccggactggtggggcatggttcggaatgctatggctttgacgacgcctattctcaagaccatgattttggcccacgtttctgtctatggcttaccgatgatgattatgaggcaatcggcgagcagctcgaggccgattatgaagcactgccacgcgggttcacgatggacgcgcaaggccgtgtgacatttatcgatacaccgttctcccccaccacgccccgcgcacaaggtgccaaccgccgtgacggcgtgttccgcatcggtgacttctttgagtcgatcaccgggtatcgcactgcgcccgcgcagaccgcgccgcatgagtggctgatgcttcaggaatcgaccttggccgccgccaccaatggcgaggtgttcgccgatcccaccggtctgttttccaagacgcgccaagggttcaaaaacatgccagacgatgtgcggctcgcgctgatctccaagcgactcggcatgatcgcccaggccggtcaatataatctgccgcgttcgttgaagcgcggcgacggcgcggccgcatggctgtccatccacgagttcgtgcaggccaccgcctcgttggtgttcctggttaacgtgc

SEQ ID NO: 1431 - DNA, 14674 bp, Unknown
  R257_15m  MAG No. k141_16265
aaggcggccagtggacgcttctggtcgccggcatcatgctgttcatcggtttgctggcctctgtggccgtgcgtcgtgccgcgttgtcgcacaacgtgcgttgacgcatgacggctactgtcttatggggagtgcggtcgtgcgcggtcgaacgatatggtccgcataccgtccaccacacctgcggtcggttcgccggtggaaggaacgatgtatcagacggcgtgtcgtaatccgatgatgctgtaacatatcctcttgtgcctcagcgaggcacgcacggccccgtagctcagtgggttagagcgccgccctgtcacggcggaggtcaccggttcaagtccggccggggtcgccaccaaactcccgatgcatgtcgggagttttttgtttcctgccgttcttcgatgccatccgcaaggacggtgaaagtgattgcatccgattcgacacgccgtccgcaccgatgccggcgttaagggggcgcccgtttgcaacgggtgaaatgcatgaggaagcgcatcggtggaatgttcgcgacgcatgacgaaccacggaaaaaccgcggtgggaggtcatggcggctcgctactattttcgctatctcgcatgttacgaaagtcttcaaggagtaagccatgaccacgctcgccattgatatcggaggaaccaagatcgccgccgccgtctgcgatgaaaatgacagcatcatccagcgctggcgcgtccccacgccgatggacgccgacgccatcaaccagcacatcgccgaggtgtaccgcgaggctgtggccgccgggcacaccgatatcgaggccgtcggcatctccgccgccggcaatgtgagcgcggatcgcaagacgctcaccttctccgccaacattccggcatggatcaactacgatctgtccgagcacgtcggcgcgctgatcgaccatgccgtgccggtcatcgtcgaaaacgacgccaactgcgccggatggggcgaattcgtgcacggcgccggccagggtagctccaacatggtcgcgctgaccgtgggcaccggcctcggcggtgccatcgtgatcaacggccagctctaccgcggctccttcggcatggccgccgagctcggccacctgccgatggtcccggacggcgaccactgcggctgcggcctgcgcggctgcgccgaacgttacacttcgggaacctcgctggagaacttcgccaagtccgccgtgcgccgtcgtcctcaggacgccaagcgtcttctggaactgtgcggcggcgacatcaccaaactggaggggccgatggtgtcccaagcggctcaggaaggtgacgtacttggcctgtatgcgttcggcaagatcggcgaatggctgggccgcaccatggccgccgtttccgccgtgcttgacccggacctgttcgtgatcggcggcggcgtggtggccgtgggcgacatcctgctggagccggcccgctacaactaccagcgtttcctggaaggcagcgcctaccgcggccatgccaagatcgtcgcggccactgcgggccaggatgccggtctgatcggcgcggccaacctggctctgcgctgacgatgtcgctccggcaacgggacgttagtctaatggtgagtcatggccggtgccatggctcactgccgcgctgatagtgcggtcgatgagtttccgctgcctgaccatggaatcgaattccgggttctcagcgatttcctcgtactcgtgttcggtggtcacgccggcgatttcggcgataatctcctcataggacgtttcgacggttcgatgcacgccggtgacgtgcccctgacgtatcacgacaatgcggtcggataccgcgaacacatccggcagatcgtggcagaccatcaccacggaccggccttcggagcgcagtctcttgatatatgcgagcacttctgccgactgcatcaccgacagtgcggcggtcggttcgtccagcagaataagctgcgggtcattgagcagcgtgcgtgctatggccacggtctggcgctggccgacggataaggatgcgataggggagccgacccgaatcgccgagctcagggtcttcagcacggaacgggcacgcgagttcatcgaatcgtcatcgcgtatgccaatctgattgatctccttgccgaggaacaggttcgaggccacgtccaggttgtcgcagaactcctgcccctggaacaccgatgcgatgcccatgcggtccgcctccctgatcgagggaatggtcacctgttcgccgttgagatagatatggccgaatcccggctgcagaaatcccgcgatgaccttgatcagagtggactttcctgcgccgttatcgcccacgatggcgacgacctcctggcgttggatggacagattcaccgatttcaacgcctcgacgaagccgaacttcacacagatgtcctccagccgcagcagaggaggtgtgctcgaattcctcatggtgtgttccttcttctcactcttctcctggtaccggtcactggctgacgtcattgcgaaccgagaactcgatggcgcataatgcgccgcctagcgcgcagttgtcgttcgggtgggatgacacgagtacatcgatgggtgccacggcatcagggaacagcatgcgctgcaacgcttcattgaacggttggatgaatacgtcgccggtcatggccagcttgccgccgagcacaatgacctccggatccacgctgatgcacagatcagccgccacctgaccgatacgcacggccgtgtcggcgatgatgcgacggcaaccggggtcgccttcgttggcaaaggacaccagatcatccagcgtcatattgccgtgtgtgacgctgagcaactgcaccagcctgttttccgccacgacggtgtcaaggcagccgcggttaccgcacgaacagatggcacccagcgggtcgacctggatatggccgatttcaccggccaggccggtcacgccatgcatgatttcgccgttgatgacgatgcctgcgccaaccccgtcgttggctgagatatatacgaaattgcgtttgcctgccgccacgcccatacgggattcgccgtatgccgcgaaattcgcgtcattatcgacgtatacgggaacgttgaacgccgtgcgcaacggggccgtgatatcgacgccgtcccatccgggcagaatgccgggaatcgctatggtgtggtcgttggtggccaccggtgcggccacggccacgccgatgccgaccagctcgctggcttcggcgtcgatgctgctcagggtctcattgatgagcagcatggcgcgttccagcgttgtgtccgccttgtggcccaacggcagggggagcgtgtgctcagcgatgattgacttcgagaagtcaacgatagaaagcgtaagatgacgtcgcgcgatccaaagcccgacgccgaggccctgatgccgtgcaagggtcaccagagtggctctgcgaccgttgcgaacggtgtttttggtctccagctggtcttcgtcgacaagctgatggacgagcgtggacacggtcgcagtggacagtcctgtcacctctgccagttcgacctgtgtcatggcgccgaacttgtggatgctggccagcaagttggcgcggtttgcctcgcgaagcgaggtctgcgaaccgaaaagccttgttgccataagagttcagtgtagtcgttaccggcatgaggcacagcgaggcgcagagcgtggatttttcggcgtgtcgccttgtgatgcgcgaaaaatcgccattgcgttcattggtcgaacataaacgacaggaaattcgctttcttgagtttgacaacttaactcaatacggtattctatgagatgaacctgaggttattctcaggttcgggcgaccaaggagggttcgccatcccctcgaagatgaaggagaacaaatgaagttcactaagaagatcgtcgccgtggtggcaggcgttgccatgtgcgcgggcctcgcggcctgcggtggcagccgtagcggccaggcaactggcggtgatgccaagatcgaaaagggcgccactatcggcatttcgatgccgaccaagtccgaagagcgttggaacaaggacggcaacaacctgaaggccaagctggagaaggccggatacaaggtcatcctgtccttcgccgacgataagccggcccagcagaacgctgacatcgagaacatggtcaacaacgacgccaagatcgtcgtggtcgcttccaaggacggcaccgcagtgggccccgccgttgagaaggcccgcgatgcaggtgccaaggtcatcgcctacgatcgactgatcatgaacaccgacgccgtcgactactacgccaccttccagctggagcaggtcggcgtgctcgaggccacgtggctcattgaccagctcaagcttaaggatggcgccaccggcccgttcaatatcgagctgttcaccggttccccggatgacaacaacgccaagtacttcttcaagggcgcttgggatctgctgcagccgtacttcgagaagggcgtgctcgtctccccgtcccagcacggtcagggtggcgtgaccaaggacttcaccgttgaggattggcagaagatctccgtgatgagctggaagaccgagcaggcgcagaaggacatggaatccatccttgactccacctacgcccacggcgagaagctcgacgcggtcctcactccgtacgacggcatcgcccagggtgtgatcaacgccatcgaatccaagcgtcccgacatgaagccgggcaccgactcctggccgtacatcaccggtcaggacgccatggagatcgcagttgccaacatcgccaaggataagcagggcgagaccgtgttcaaggacgtgaacaagctggctgacgccgtgtacgacatggtcgtcgagatcgccgagggcaaggaagtctccggcctgaacggcaagttcaacaacaacaacatcgacgtcccgtccaagctgcttgacccccagaacatcaccaaggacaacctccaggatctggtcacggccaactacatcacccaggatcgcttcgacgagctgactaagtagtcctcatcaggcaatccgtaaacaaacacaatgacatgcggcgcatagccgatatgcgccgcatgtccatgaacacagaactgtgacgaggagtgatgacatgtcatcaaatgacaccatcttgacgatggaaaacatcacgaagacgttcggtccggtcaaagccctcaccgatgtgaatctttccgtcgatcgcggcgagatccacgccatctgcggcgagaacggtgcaggcaaatcgaccctgatgaacgtgctttcgggtgtgtacccatacggtagctattccggcaaaatcacctttgatggcaaggaatgcaaataccatactattaatgattccgaggccgacggcatcgtaatcattcatcaggaactggcgttgagcccgttcctgtccattgcggagaacatcttcatcggcaacgagcaggccaagggtggcgtgatcgactgggacaagacccgcgccgaggcgaagaagctgctcgatcgtgtgggacttcccgaagacccggataccagagttatggacatcggcgtcggcaagcagcagctcgtcgaaatcgccaaggcattgtccaaggacgtgaagctgctcatcctcgatgagccgaccgctgcactgaacgatgaggattccgcccacctgcttgacctggttcgtcagctacgtgacgagcagggcgtgaccagcatcatcatcactcataaactcaacgaggtcgccgccattgccgacaatgtcaccatcattcgagacggttcgaccgtcggtgtgatgtacgtgacgccggagacgccgctcgaccaggaagaactcatccgcaagatggtgggtcgtccgctgcacaacctgtacccgaaccacccctccaataccccgggcgaggaatacctgcgcgtcgaggattggaccgtgcatcatccgctcgacgcggagcgcgtgatcgtagaccatgcgaacatcaacgtgcacgccggcgagatcgtcggtctggcgggtctgatgggtgcgggtcgtaccgaaatggccatgtccatcttcggccactcttacggttccaacatctccggcaaggtgttcgtcaagggcaaggaagtcaagatgcccaacgtgcagtccgcgattgacgcaggtctcgcctacgccaccgaggatcgtaagggcaacggtctgaacctgctgcagaacatccgagagaacgcatccctggcctccctgaccaagatcagcaagggcggggttgtggacgacaaccttgagcgcaaggaagtcgaacagtaccgcaaggacttcaacatcaagtgtcatgacatcgatgtgaatgtctccaccctctccggtggtaaccagcagaaagtgctgctcgccaagtgggttatctcgcagccggacatcctcatcctcgatgagccgacccgaggcatcgacgtcggcgccaagtatgagatctacgaaatcatcgataagcttgccgatgcaggcaaggccgtcatcgtgatttcctccgagctgcctgagctcatcggtatctgcgaccgcatttacacggtgtcctacggtgtcgtcaccgacaatgtcgagaagaatggatttacccaggaatacctgatgaagggtatgaccaaggaaagggaggtggcagcctgatgagcgccgcaactgcaacacctgcaaagaaagaagaaaagaccggcctgctggccacggtcgccaacaatgcccgtcaatacggtattgtcggcgcactgctgatcatcgtcgtggccttcgagatcctgaccggaggtgtgctgctgaagccgaactccttcgtgtccctgatccagcagaacgcctacgtgatcatcctggccattggtatggtgatggtcatcatcgccacccacatcgacctttcggttggttccttggtagccttcatcggtggtgtgtgtgcactgctgatggaacgcgccggagtcaactggatgctcgccatcgtcatcgctctggtcgtcggcctgatcgtcggcgtctggcagggcttctgggtcgccgtcatcggcatcccgggcttcattaccactctggccggcatgttgatcttccgtggtctcgccaccgtgatcgtcggcgaatccgtgccgattacctccctcgaattccgtggcattgcccgtaactacctgcccaacatccttggctggtggggtccgttcgacggtctgaccattgtgctcggcatcctgtgcattgtcggctttgcctggagccagctgcgcaagcgcgcccgtgtggccaaggtcggcctggtgcccgagccgatgagcctgaccgtcctcaagattgtgcttgtcgcggtcgtcatcgccttcgtcacctacctgctggcttcctccggtaacgctgatcagggtggtaccccgatcatgctggtgatcgtcggtgtgctggtcttcatctacaacttcatcctgaccaagaccgtgttcggtcgccacgtgtacgccgttggtggcaaccgcaaggccgccatcctctccggtatcaacacccgccgcgtggacttcctgctgttcgtccacatgggcttcctgtccgcagtggccgctgtctgcatgctttcccgtctggcttccgcaactgctcaggccggtatggagttcgagatggacgccatcgctgcctgcttcatcggtggcacggccgtcaccggtggtattggtaccatcccgggcgctgtgattggtgcattcgtgatgggtgttatcaaccagggtctgtcgattatgggtgttgacaccgccgtggtgaagaccatcaagggcctcgtgctcctgctggccgtcgccgtggacatcatatccaagcgcaagaagagctgaccttcccctttctcctcctcgatgtgggattcgtgccggtgccgctggtgcggatcccacactgttatctgccgtcattcttgtaatcaaaggactttttccgccatgaaactcaccgcgcgctccacctcccgtatgtatgcattgacctgcttggcctgcgttatctggctctggcagtcactggtcgaggccaataacgatggctcgctgttcaattgggccactattgtcttctcgctgtgcttgctagtggtcatcggatggagtggttggaatgccgtcaccgggtggaacgccaaggaggctgaggctgccacggcgggtgccaaggatgatgagggcagcactgatcggtaacgtatatacggctgttgttgccgggaacatataggtcccggcaaacctgcagcgatatgtgcattgcaagccagggatcccctggcttttttatgccgaaacggaactcgacacgggcgcgcaggtcgttgggtttgtctagagcctgcatatagttacttatggtaatgactattggtaactaattggaggttgggccagcgatgtgcgattcccgaaccgataccaagaccggcttgcttccggtggatgaggtgcggagcctcctggatgtctgctggaaggccaagaccatcaccgaactgatgccggcattgccgaaaggtatgaaaccgcgctatgtccacgtgatcgacgccgtctggcatatcaacgaaccgaatgggcaagataccggcaccgcgcgcgtgggcgacgtcagcgcattcctcggcgtcactacgccgagcatcaccaagctcgtcggcgaaatggccgacctcggactcgtcgtcaaacacgccgatgccgccgatcggcgtgcagtgacgctcacgctcaccgaacgcggcttggatatccgccgcatctatgtggaggaatatcacgcgcatttgagccaactgctgggcggattgacctcggaccagtgcgaaaccacggtacgcaccttgaccgaggctctgcgactcatgcaggaagacttccaacgtcgtagtcagaatatctgaatgaatggaggagagaacaagatcgtgactcattccgcaacacagctgcctaacggcggcaagcaaccggtctccaacaaactcgtcatcgcggtcgtctcgctcgcgatcctgaccttcctcggcatcctatcggaaacgtcactgaacatcgcctactccacgccgatggaggagttctccatcggcgcctcggtggtgcagtggcttgtcaccggttatctgctcttgctgtcggtgtcgattccgagctcgccgttcatggtgcgcaaattcgccaccaaaacactgttcatcatggccatcgtgattttcaccgccggcacattactgggcgcgctcgcggtcaacttcccgatgctgctcgccgcccgactggtcatgtcgctcggtaccggcatctccctgccgcttatcaccaacatccactggcacgaagaagcgtgattccaacatgcaacgccctattatgacttcgcggtcgtttttgcgcacgccgtctgaagcggctgggcccggcgacgaggcaactattcaggacctcgtggatacgttggaggccaaccgttcacggtgcgtgggcatggccgccaacatgatcggcgtgagcaagcgcatcatcgtcttcgtggatgaagaccttggcgggcgtatcacggtgatgctcaaccccgtgatcaccgcttcggacggtgccttcgacacccaggaaggatgcctgtccctgaccggcgaacgccgcacactgcgctgccgccgtatcgaggtcaactacgaggaccgtcggttccgcgcccgccacgccaccttcaccggctggaccgcgcagatcatccaacacgaagtcgatcactgcaacggcatcatcatctgattcattcggtgctcgttgcagcccaccccccccccgaggctggtcatctcgattacgatgcaattacatcgcaaccgctatgaccagtttttttatgtgcactggtggggtgggtgttttcagcggtgttggggtgccatgcgctggccggttggcttcgctgaggggtgtgggtggtgtcatgttgccagcggttggctggttggcttcgctggaggttctctcagcgtcggtgatgtgccaaagagtggcgggctggcttcgctaaggagcgttaccgtcggtggagaaccagtgcgtgacctgctgccgacgctaagcgttcattaagcgtcgttagcggccaaaacttggacgtgtaacgatgctgggcggttttagtgtcgttgctgtgccaagttgtggtcctctgccgacgctgccagtgcagtagcgtcggcgttgggacaggtgttgggcctttgccgactctataagcgagggaaaatcattcgccggtgcctaagtgggtctattgccatgctgaatacatctgctgagtgtagctatgcgttcgaaggcgatttcgggacctttctcagtagcaaatatgcctaatgcgcggagttatacacttcaccgtgcacttatacacgccaaacgaagcagaaatcgactgctgacagtggacgacacgccagagacgatgtggataacccagagacggtggataacagctgcgcgatcagtggataacctgcaagaaagtgcggttatccaccgacggtagccactgttatgcacattccataccccttggaatcattgggttttccacttatccaccatctcgccatgcgggcttgcgggccaccgcacgaacgtcatacagtgtgcctcacggcgggcaacgtagcccgccgtccacatcacatgaaggggggaaacaccatgagcaccgcaaccactactactgccgaaaatgccggtttgccagcaatgctggacaccaaagacgtagccgagatgttcaaacgctgcaatctcgccgtctatgccgaagcgagacgcatatattatcgcgaagtgaatctgaacccatgcaaaaagtatccgaagcaggtgctgcaaaggatcgaatggtggttctgggattggtttgcctatgactgcgccgtcagcggtattggactgaccggcaatgaatccgaagatttacgtatcgaattgcagtacggtccgggcgcaggtatctcgccattcctagccttggccgaattcatgtatgacaaggacgaacgtatcggcacacgcgagatacgtgattttcgcgaacttgatgacaccaatttcgcttcgatgttctggattcgcgatgccagcgcggtcaaaggtcgtctgacagttgaggacatcattcatggtggtgtctacgaggtggcggacgtacatgccgcctcgcaatacgatggtgcgcacggcggcatgatcgtcaatcgcatcgcacatgtgagaggcgtgtggcgatcctgttccatcccgatctatgaggcacgaaggcctgatgacccgcaaatcggtgattcgctggcccgttcattccgggaaaccggatataaaccggactttgccggtctggtgcggtttttctacgggagggccaaagacaccggtctcgactgggaagatgcggaagccgcacgccaagctggcactttggacgcgctgatcaagaaggccagcaatcggtgaaggatccgcctaacgctgctgtccaagtcggcggccacggtcgcgaacgaagagggacgcaaccaaacagaccgcgcacacaatggcgaccgtgcggaacgaagcccgcacgccaatggccgatgccgccgcttccggcactccggtgcgcatggccgccgcggtgtgcgtgttcatgatggtgaccagcagcacagccgcagacgtcatgatcgcgaagcccagcaaggcgagcggccggccaccgatacggtcatacatcttgcctgccaccgggttcaggatgcccatggcgatgccgctcggcatcatcaccagaccggacaccagtgcattaacgccaagatcattctgcaaatatgcccattgcgtacaggaacagctggcgggtggtgaaggtctcgatgaggaacgcggtgatcgggatcatgatgccgttggtaagcatgaatccggtggtcagccattgcacggtgctgccgggcacatcgaattcatgcatcaacgtgggcagggcggagatcatcagcgtttggttgagaatggccacaaacgagccgatcatcagggtgatgaccatggcggtggtgttggcggggggtggtgctgttggagttggcggggtggtggagccggcctcagcggtggccggcgaggaattgcgtgacgtcaattatcaagtctcgttttcttggctgagttgtctttcttggcttgcccatactatctgtgccttgactgcattcgaaaaccattgcaatgactagcaacacgctgagacgcggcgtattaattcaatcatttgacaaacttagttcgttcgttttattgttggtcctgcaatccgtaatatcgcctactgcaaaggagcgcccaaatgggtctgtgggatgttgacaagatcgagtacgtcggccgcgccaaagggccgaaggaagacttcgccttccattactacgatgccgacaaggtcgttgccggcaagaagatgaaggattggctgcgcttcggcgttgcttggtggcacaccttcaaccaggaactggttgatccgttcggcaccggcaccgcgcaccgcccgtactacaagtacaccgatccgatggaccaggctctggccaaggtcgactacgccttcgagctgttccagaagctgggcgtcgagtacttctgcttccacgatcgtgacatcgcccccgaaggcgacaccctgcgcgagaccaacgccaacctcgacaaggtcgttgacaagatcgacgagaatatgaagtccaccggtgtcaagctgctgtggaacacctcctccctgttcaccaacccgcgcttcgtgtccggcgccgccacttctccgttcgccgacatctacgcctacgccggtggccagctcaagaagagcttggagatcggcaagcgcctgggcgccgagaactacgtgttctggggtggccgcgaaggctacgagaacctgtggaacaccgagatgaagcgcgagaccgaccacatcgccaagttcttccacatgtgcgcagattacgccaaggaaatcggctttgaggcccagttcctgatcgagccgaagccgaaggagccgacgctgcaccagtacgacttcgatgccgccaccgccatcgagttcctgcgcaaccacgacctgaccgacgtcttcaagctgaacttggaaggcaaccacgccaacctggccggccacacctaccagcacgagatccgcgtggcccgcgagtccggcttcctcggttccctcgacgccaaccagggcgacaagctcatcggctgggatatggacgagttcccgaccgatctgtacgagaccgtcgccgtcatgtgggaagtcctgcaggccggctccatcggacctcacggtggtctgaacttcgacgccaagccgcgccgtacctccttctacgaggaggacctgttccgctcccacatcgccggcatggatgcctacgccgccggcctgctggttgccgacaagatgaaccaggacggcttcatccagaatcttcaggccgagcgctacagctcctacgactccggcatcggcaaggacatcgacgagggcaacgtcaccttggccgacctcgaagcctacagcctcgacaagccgcagtccgagctcatcgccgccaccaagtccgatcacctcgagtccgtcaaggccaccatcaacaactacatcattgatgccctggctgaggtcgagtgaccatcggtctgaccgattgaattcgctccatcgggcgtgtacacatcaattatgatgccagtgcgcccgatgggctgattcgatagtttcgccatgtgcggtgttgtgttatgcccgcatggcacctttccattccttctttctcctttctctccttccgctggcatggagttcgagatggacgccatcgcggcctgcttcatcggcggcacggccgtcaccggcggcatcggcaccatccccggcgccatggtcggcgccctgatcatgggcgtgctcaaccagggcctgtccatcatgggcgtggacgccgcctgggtcaagaccatcaagggcctcgtcgtcatcgccgccgtcgcctacgccctactctccaagaaaaagaaaggctgagccaaacctggcctccgggcccgcccggtggccacggggatggacctgagttccattcctcctccgaaagggacgctgttgcacgcagcgtcccttttccgtttgtcgcgatggatggatcccggtgtacgttcttcgcgaaatcagccctgacttggggtgtatttcgacaatatgattcggcgatgtgcctcagcggatatgtacggccaatgaaaaacgggataccgatgtcgatatcccgctttcagcgaataggtaaggccagagcttacttcttcttggctttcttgacgcgcttgggggcgggagccgctttcttgggctcgaagaacggccacttgtgcaaagcccaggcgtgcagcgcgggaatcttggcaacggcgaagccgatgaccagaccgattaccat

SEQ ID NO: 1432 - DNA, 14711 bp, Unknown
  R257_15m  MAG No. k141_16784
taaaactctcatggggcggtaaaactctcatggggcggtatgccagaatggcttcattccgcggtttcacatatctttcaaaccgccccatgggcaagttaccgccctatgggtgttttgccgccccatggatacgccggtgtaccgcccagaagcaacaaaaaacggcgtccagccgtagccggatcgccgctttcgggcatcctcctcaaaccataggaggacaagtgttcagttattcgcccaatgtgaggacaagccccaatcagtcgatgtcggtgccctcgtcgcgggtcggctccttggtggggtcgaagccggagacgatgtacaccacacggcgggcggcggacacggcgtgatcgccgagacgctccaggaagcggcccagcagcacgatatccacggtctgctgacgggtgatgtcatcggacagcgccagatcgaaggtctggtggtgcaggttgtccagcttgtcgtcggccaggatgatggcctcggcggtcttggcatcgcgatcggagagcatggccaccagctggtcagcggtgttgtccaggaagtcgatcatctcggcgaacaccggctgagcggattcgggaatcgcggcggccgggtaggtgcggcgagcggcctcggccacgtggcgggcaagatcgcccatacgctcgaacgtggaagccagacgcatggtggaaacgaccacacgcagatcggtggccaccgggttctgcttggcgagcagcttgacgcactggtcgatcacagaggactccagggcatcaatctcgatgtcgccgtcaatcacagtctgtgcggcttcaacgtcctgattcagcagggcttccccagcgcctttgatcgccttgcgcacgttctgcgccatacggtcgaggtcgtcagcaacctgcttcagctcctcgttgaaaataacgcgcatttctctagcctttcatgcttgcttattgcaacctgtaccagtgtattattccagtacttgttccccacttcaacgtaggtaatggcaacctcaaattgttctactgttcattgggttgttcacctgaaattcatgttaccggcgcgccggcaaaccgcaatcccagcgtgtggtgtgaaagaatgggggcatgacacagatgccgctcgtcgccgcgattgctcttattgtcgcggctgttttatttgtggtaggaatcatcacgctcatcgtgggatttgcgacacatcgagtgtccgtggaatcgccgctggccgatgatgacgacaatgacgatctgtccgacgacaccgccacgctgctgtccatgctgccgggtgcgtccgtggtggtcgacgagcacgacgaggtggtccgctgcaatcccgccgcctaccgcctgggtgtggtgtcagatgacgccatcgcccagcagcaggtgctggatgccattcacgaggcgcgcaagtctggtggcaagcgccagttcgacttgaccaccgatactccggagcggtacgtcgcagaccagaacaagggcgatcacgtcgccacgcagtccgtccaccgccccaactggctgaaggtgactgtagggcgtatcaacgagcagttcgtcatcgtgttgattaccgatgtcagtgacgtgattcgtttcgctcaagtgcgtgactcgtttattaccaatgtatccgagcaattgttgggccccactgaagctctggccaaactcgccgattcgctggagtccggcaatctggacgaacagcaggtggctgccgatgctcgccaggtgcgttccagctgcagcaagctcaaccatatggtgtccgatttgctgctgctcatacgcgcacaggagccgattacgccgtcttccgccaaccgactgaacgttatggaacagctcgaggccacagtggcgcgactggagccgcaggcggccgcggctggcgtgcagctgaacatcaagggcaacgatgatctagtcatcaatggtgaggcggatcagatcgacagcgccgtgaccaagctcatcgaaaacgccatcggctattccaaggaaaatggtgtggtcagtgtgtccgcatccaaagacaaggatggcgaccgtgcggtgattcgcgtgatcgaccagggcgcgggcatcgcgaagaaggaccagacgcgcatcttcgagcggttctaccggggtgcggaacagagcaatcgcacggcggatggcgtgggccttggcttggccatcgtcaagcatgtggcgctaacccatcatggcgatgtgaccgtatggagcgcgcccgggcaaggcagtacgttcagcctgacgttgccgttggcgcagtgaactttattactgtccgaggcggcggtagtcccagcggtcgaagtattcccaaatcagcagtagcaagccaataatgacaccggccacgcacataatcaccaacggcattacgctgtagcccacggccagcagaatcagcacgacaatcaacgccacaatccatagaccggtaccgatggcaaacaccttacgcaggtccacccgtacgggcttgggcgcgggtttgcggacggcagggtcaatgagaggcgcgaacttcatactcatgcactgtagtaagagtagggaggggcgtcaaacacctctccctacgatttattcaatcggtatcagttgagaccgatcaatgtgcatggcatatatggtcggccatgcgaggcatagaccgccatcacaggtgctcgaccacatagtcgacgcacttggtgaaggccatgacatcagccggttccaccgaggggaacacgccaacgcgcagctggttgcggcccagcttgcggtagccggcggcgtccacgatgccgttctctcgcaggatggacagtatctgggaggcctggacgcgctcgtccagatcaatggtgaccacggcgttcgagcgggcgtccgcatcgacgacgaacggagcggcgtattcggagcgctcggcccacgagtacaggatggatgcggacttggcgcaacgcgtggtggcccaggcgaggccgccgttgctgttgagccagcgaatctggttttccatcatgatcagggtggccacggcgggcgtattcagggtctgatccttgcgggagttgttcagtgccgtggtcagcgagaggaacggcggcacccagcgatgtgcgccttccagatgagcgcttgattcgacgcctgccgcacgatcgatggcttcgggggagaggatggcgacccacagaccgccatcggcaccgaaggccttctgcggtgagaagtagtagacgtcggtctggctgatgtccacgggcaaagcgccggctgcgctggtgccgtcgatgacggtcagggcaccggcttcacgactgccgggcacgcggcgaatcggggcggccacgccagtggaggtctcgttgtgagcccagcaatatgtgtccacgcccttggtgagctcaggcagacggtaagtgcccggctcgccggggaacagcaccgggtcttcaaggaagggtgcgttcgcggcggacgcggcgaacttggcactgaacgagccatacgtgccgaatgcggcgcgacgggtgatcagcgaagcgcaggcaatctcccagaacgcgctggcgccaccgttgccaagcgccacctcatacccttcaggcaggtggaagaactcgcgcagaccttcacgaatcgaagcgaccagttgcttgactggtgcctggcgatgtgatgtgccaagcagggtggtggcgccggcatcgagcgcggcgatctgttcggggcggattttgctgggaccggagccgaagcgaccatcttcgggcttcagcgactcgggaatactcagtgtgatagtcatggtttcaagggtagaccagtgttggggaatatcgcggataatgctcggtgtgcgggattgctgcggggctactgcggaattccggggtgccgggcggtagtagcggcaatgcggaatgcagtgcagaatgtacgcagcacatcatggctacggtgtgtcggaatgacatgagttagtgattcttccgataaccggatagtgaggttcgtgaacgggcggaaacaaggcagtttttcaccctgccgcacggttacgtaaatcgtttgacatgcccggatggtgggggatcgcattgaggattgacctctgttcgttgtacagtactcaattgtgccggtcatacggggtcgttgaaaggaccccgccgaacccatccaaggagttaacgtagtatgaagcatgcttcgcataaagcgaccacggtctcgcgccagaagttcagcttagcgaaggcattgtttgcctccggcaagggttctcattccgttcgtgccgtgcgcgcggtgcaatccgctggcagcgacgccgttgttttggggcttgatccggccattgccgagaagatcaatgaaatcgctccccagactcgtcgttccattcgtgaggccgctcgtgccgctgaacgccgtagccatattcttgcctcggcctcactggccgctctggtcggcacggccgcaggtgctctcgcattttccaacaataaagacgccacgaactcgttcgtggctgatccggccacgacgaccacgcagattaagcgcatcagcgatgtgactgcggcttctcgttccgaagcacgtactgatctgagttcatcctccgttaccgcacagtccaccaatgaaggcggttgggggctgagcaattcagacagcaccttggacgccaagctgatgaatcgcaataatgcgaacaatcctgtggtgtcggccctcatggatgccgatggcgatgctgtgccggctggcttcaacccgaaccatgccgttggcaccaactccaacaactatccgtggggtcagtgcacgtggtacgcgtaccagcgtcgtgccgaactgggactgccttccagcggcaacttcggcaatggtggcgagtgggcggcgtcagcttccgctctgggctattgggtggacaacactcctcgccatgtcggtgatgctgtggtgttcgctcctggccaggccaatgccgatggcacatacggccatgttgccgttctggaaaagatcaatgccgacggctccattgagatctccgaatccaatgccaagggattgggtgtgatttcgacccgtacgttcagcgccgccgaagccggtaagttccagtacgtccactactgattcatttcattggcttacattcggtgattactgttcggatgtgacgtcgccctatcggcaatcgttcgcgcgaaatgacatttcaagtgttgcgaccgcgtattagtccgaactgacctgtgccgacacgccgatatatcccaatagctccggggtgttttatttcttccatcctgtacgagttaatgcgcaccgtgtaaggtgatggttctatgaagaccaaaactgtagcttcttccattgttgccgcgattgtctcctgtgcttgctcgtttatgtttgttcctacagcgactgcagctgagggtgttactgtgacttccaccaagtccttcccctcgtacacccaggtgcgcaaagatctgacgactgaagccactgccacgaatgttgaggacaatgctgattggggcggcattgagaacctcgacgtgccgcagacggaatctcaggcggaaaaggatgccgcagcggccaagaaggctgccgaagaggaggccaagaagcagacggaggccgaggctcaggcgacccagaagcaggccaacgccgcgagccgtaatgagtctcgctcttctgttacttattccgatgccagtggttcggtttccgctggtgccggtgcctctatcgaccgtgcgtattctttgatcggacagagcatggactgcaccgcattggtcagtcaagcgttggcggcccgtggtattaacttccacggttggcctgaagagtacgtcaatgttcccggtggccacgtagttacagacgggtccctgcagccgggcgatattctgatttatgccaacaccggtggatggaatggcggcgcgcactacgatcatgtggcgctgtatgtcggcaacggtcaggcggtccatggtggctggaacggctacagcgtggctctcgctagcgccatgaccgaaaaactcaccatcgtggtacgtatcccgtgatgcagtcttattgattgatatattgcaggcctcggatgccaatcggtatccgaggcccgttgcgttctcctgccgagtgatacacccgcgacatcatcttcgaaaagacattcctgttatgaaatcgacccatgtgtgctaaggtaaggcgctgatgacgaacgttaagaatattatttccacatcagtggcggttatcgccacgggtgccatgtttgcatgcgtagccccgtttgcctctgccgattccgcgcagacgagtgctatggtgtcctcacgttctttcccgaaggcgagttcggtgaagaagaatctgttcgccgaatccacctccacttcggttgacgagaactctagatggggtggcatcgagactcttgatgtgccacagaccgagtctcaggccgagaaggaggctgctgctgcggcggcggctcagaaagccgctgatgaagctgcggcagcccagtccgctgctgctgctgcagccagccgctctgaacagcgtgcgtcgattccacaggttgacttgggtaaaatgactggcactggcgctgagcttgccagcttctcactgaagttccaaggctatccgtatgttgccggcggcaacactccggcaggatgggattgctccggttttgtacagtacgtcttctcccagtttggcatttccctgccgcgaacctctggtgctcaagccactgtgggtactccggtcgcaagcttggcggatgccaagccgggtgacattcttgcgaatggtactcatgcggccatttacatcggtaacggacaggtgatgaatgctatgaacccggtgcagggaacggcaataagcaacgtttccgtgttcggtggagctggatattccattcgccgcgtgatgtaacaagaattatgcggtaagcgaattcgtattaaggcacgtcctttgggatgtgccttttttcgtatacgcggatttctttttgagcggaggataccggccaaaccgagtgtcgcggggtattgttggaggtacgcggtattcgtgccacaataacttcaaggaggtcgtcatgattaacgacaaggccattctcgtcggcgttgacgggtcgcatgccagttacaaggcaacatggtgggccgcgaattatgcaaagcacgcggggctgacgctgcagattgtctgcgcatattccctgccgagctatgccgccgtttcgttcgatgcaacttacacggcgatgggggacgataacgccgcgcattccgatgctcaggagattctggccaaggccaaggccatcgcagacgagcagggcgtcgaagccgccacactgattgttaccggagacccggcatcggtgttcgtcgaattgtcgcgtaactacaatctgatcgtcattggtaaccgtggcaagggcggtctggccgagcgtctgctgggcaccacgtcctcgtcgctgccggcatacgcctactgcccgattgtagtggtgccgtacaccgatgatgacggcaacctgatgcacctgaacaacacgattaccaaggtggccgtaggctccgacgaatccaagtggggtctgaaggcgctggacattgccgccgacttcgccacgtgctggggtgcggaactggacgtgatttccgctgtgccgaacctgaagggcgtggatggcgaggatgccatcatggagtcctacaaggacgatcttgaggtgcgtatcaagccgttgcaggaatcgcatcctgatctgaaaatcaacaagcagatcgtttccggcccggccgtcagcgcactgaccaaggccagctacgatcacgatgttgttgttgtcggctcccgtggtcgcggcggcttcaccggtctgctgctgggctccaccagccagggactgctgcagcatgcggccggcccggtgtacgtggtgccacgcaagtatgttgaggctgcggaatcgcgtctcgacaccgtgccgagctcgcccgccgaagtgcctaccaagtcgctggaggagattgccggcgtcgaggagattccggtgtccgcagccgagcctgaagtcgcccagcagatcgaaaagaccatcgatcccgacaggcagtaaagtccgggtatacaatgagctccctcatcagagggagctcaatttattagtacgtcggtttattagtacgtcagtgcttgacggtgacgttcatgcgcaccggggtctcctgtacgtaggtgtgcttgaccgtgcagcccttgtcgatatggcgggtgacgcgttccttgagcttgttggcatcctcctcggacaggctggcgtcagaagcatcaatcaccacctgctcctcgaaaccggtgtaggcgtcgttctcggggtcgtacgtgccatccaccacgatcttggcacccttgccctcacccagcgtatgttcgatggcgaactggctggacagcgcggcgcaaccggccagcgcgaccttcatcagatcgcccggcgtgaactggccacgatccttgccgaacttaatgtgcgcgccatcgtcgctgaacgcatcccacgaaccgtccttgttgcgttcaacccacagtcgcttacccatagctgctcctttattttcagccgccggcgatctggcccatcgccatgccagcgggggagcgcggcacctggccgctctcccgcatcatcggacttctctattatgcccctaagctacactggtgcacatggctttgaccgaagaacaactcgcagatattcgctcccgtatccccgcacgtcccgaaacggacattccgatgccctatgaggacctggtgcgcaagatcctgaccgaaggcacgctgaagtccgatcgcaccggcaccggcacgatttccctgttcggccagcagatgcgcttcgacctgtcgaagtacttcccgctgctgaccaccaagaccgtgttcttcaagggcctggcctacgagctgctgtggtttttgaagggttcctccaatatcaactggctgctggagcacaacgtgcatatttgggatgagtgggcggacgagaacggcgacctaggcccggtctatggcgtgcagtggcgttcctggcccgcaccgacccccgaggacccgaatcgcaccatcgaccagatctccaatgtgctcgacctcatcaagcatcatccggattcgcgccgcatgatcgtctccgcgtggaatccggccgaggtggagaagatggcgttgccgccctgccacgcgctcttccagttctacgtggccgacggcaagctaagctgccagctgtaccagcgttcctgcgacatgttcctcggcgtgccgttcaacatcgcttcctactcgctgctcaccatgatgatggcgcagcagaccgggctcaagccgggcgaattcgtctggaccggcggcgactgccacgtctacgacaaccacgtcgaccagttccttgagcagctgggccgcaagccctacccgtacccgaccatcgagattcgtaaggccgattccctgttcgactaccagtatgaggacttcaaggtcgtcggctaccagcatcaccccactattaaggcacctgttgcggtctgatgctgattaccatttcgtggacagcgaagactgtgaaggtgacggaccccgagtcttcgctgtccactacactaaggcccagttccgcaatccaggaggagtaagcgaaatggagcatgacagtagccgtagcggctatcacgaacccgagcccggatctgccgggctgtctgccactgaagaagactggggtgacgattatcccaagaccttctcggtgaatcttatctgggccgaagcccgcgacaaggaaggtcgcgccggcgccatcggcctcaatggcggcatgccttggcactgtgccgaggatatgaagcatttcaaggagctgaccgtctcccatccggtgattatgggtcgtaagacttgggaatcgctgggggtcaagtaccggccgctgcccaaccgcgacaacatcgtcgtttcccacgatccgatgtaccgtgcgccgggggccactgtggtcaccagtcttgacgacgcgctcgatatggcccgtcaggaggcgattccggacgacggtctggatcgttcggagatttggatcaccggcggcgcccagctgttcgccgaggcgttgccgttcgcggacaaagcctatgtgactgatctggccgtcactgtggatgccgacagctatgcgcccgatatggcgtcgctggtcgaggccgggatgtggcgggaagccgaagtgggtgagtggcgtacgcccgccaaggaggagtccggcatcgattcctatcgtttccgtatcttggtcaaaaccaagtaagcatgcgaatccggcttgtgtcctttatggcggcatgagccggattcatattcattcgaccccaaaaacacattcgggccgtgtgcggcccggtgaagcccgattgaggattgattcaaagctatgagcaatacccagccctacaccgtaatgaccgtctgcaccggcaatatctgccgttcgcctatgggcgagattattctgcgtcacttctttaatgagcgcggtctcggcgaccaggtgaacgtggaatccagcggtgtgtccgacgaggagtggagccatccgatcgacccgcgtgccgtgcgcgtgttacgcgaacgtggctatggtgatgagattccgcgtgaccacttcgcacaccgcatctcacgtgaggaaatcgaccgtaccgacctgttcctgccgatgaccgcctcccacatgcgcgccctgctgcgcatgctgccggccggcaagcgcgccgaagtgcacatgtaccgcagcttcgacccgaatctgcccaagccgaagcccggccgcgaggatcagattgatttggtggatccgtggtacggcggcaagcacgagttcgaggtcgccatcgaccagattgaggaagtcgctccgtacatcgtcgattgggtggcgaagcagctgtaggaatcggcctgtggccgatgctgtgtgtttcgcagtcttacgaccgcgggtctctacctccgcttcgctgcgttcagcacctccctcacagggggaggtggtcgccgaaggcgaccggagggagagatcaacgaaggagaagccgagcccaacctcagaacaccagctgcaccagtagcatgtatacgatcatgccgccggcgattgaaagcagcatactgcgtttccagacgtgcagcagcacgatgacggtgcaggcgatgagttccggaaggccgtgtgaaccggtcagaatcggggtgttgcgcagtgcgtataccaccagcagaccggtcatcgcatagggcaggactcggccgaaatattcgatgacgcgcggcggctgcttggattcgggaaataccaggaacggcagaaaacgggtgcacatcgtccccagcgccaccgtcacgatggtgagcgcgccttgccagatggtcatcgtcatcgcgtctgtccttccttctgctggtccgctgcgtggctcatggcacggtctgccgtggcttccggggcgtcggcggccggccgcaacacatccagatgcgggcgcaacgcgacgaacagtatcagcatggcgatcattgagggaatcatgaaatcattggccccgaatatcagcaggcaggccagcgacgtcagcacaccgatgacggcggacagtcgctcgcgatgcttgccggcgagccactgatcgaggaagatcaccagaaacagcgcggtcagtacgaaatcaagaccgtcggtattgaacggcagatgcgcgccaatcagcccgcccagtgtggcgccggtcacccaatacagctggttgcacagcgtgacccagaagtagaaccagcttcggtcgataccggcggggattttcgcggtggagttgatggcaaaggtctcgtcgcacatgccgaaaatcaggtacggacgcttccagccgagccccttgaatttgccgagcatggatagtccataaaacaggtgacgggcgttgaccatcagggccagcagaaagccggcgagtgggttgaacgcggagagcagcagattcaccgtgacgaattccatcgaaccggcgaagatgaacgcgctcatgcacatcggccatacaaacgagaagcccttggtgcccatgagaatgccgtatgaggcgccgagaaacaggaatcccaggcaaatcggtatggtcagcggaaacgccgctttgagcgccggcaaccaggcgttggtgttggcggtgtctgccatgtggatgatgttctccttgtgcaactggtctgccggccgatattcgccgataatgccatatgtggttatacacgcatggtgccgataaacgaggtgaggacggtgtcgggactctgtgcgcgaagtcacagtgtggatgatgtcacatcgtctacggtgggacagtccttgtggcgggcgtgaacacgtgctgagatgaaagcatgagcacatatcaaggtaacgaaccatcgcaaatcgtctacaccgctacggcgcaggttacgggcggccgcaacggccacgccgtgagccatgagccggaactggagttcgacctggacacgccggtcgccatgggcggcaagggtcagggcacgaaccccgagcagctgttcgccatcggctggggcgcctgcttccaaggagcgttggcgcttgccgccaaggagcagcgcgtggcggccaccaagctggccaagagtcaggtgcgcgccagcatctcgctcggtcctgaaggcgagtccttcggcctgaagggcaagattgaggtagttctgcccgatcttgacgatgaggctgccgccaagctcgtcgagcgtacgcaggagctgtgcccctactccaaggccaccgcgggcaacgtgcccaccgaggtcgttgtggtgaagtcgctggactgaagccttccgggttgaaacccgagtccaagcattcggcccgtttccttcagggaagcgggccgaatgctttcaggcctggtcccgcgaatacgaaaagacctcggtcgctatgaccgaggtcttcaatgaagtacccccagagagagtcgaactctcgttgtcagattgaaagtctggtgtcctaaccgttagacgatgggggcgaacaactcgagttactttacgggaggttgttcggttatgcaaatcgacggcatttcggcgtgtcgcaatcagttcagggtgacggcctgatatgtgaagtcgtgaatcacgcggccggcggccaggcccttcttctcgaagttggtgagcacgcggccctcgaaccgctcggattcggtgaagtcggcgtgcggcatgtcggcggccatgtcggcattgcccttgcccacgtgctccagcgggaggctgacggttatgctgcccaggttcttccagccatcgaggccgtccatcacctcgtgcacgtgcagggcgtagtcctcgatgtcggtggcgatgcgccagacgccgtctgtgaccagcgcgcgatgaatgtcgccggccatggcctcctgcacgatgcggcgcttgtggtgcttcttcttgggccatggatcggggaagaaggtccatacctcggccacggtgccgggcgcggtcaccttgaacagctcgggcgcattgacctgggccacacgaatgttggtcagcccctgcttgccggcgagcagcagcgtgtgggccacaccggggtcatagacctccaaggctaggaagttcgtctccggatgggccgcggctgcggccgccacgttttctccctgcccggtgccgatttccacaatgagcggattgtcgttgccccatgaggactccacgaacgcgcggtcgagcgtgacgccttcgcgcacgtccagcaggttgccggccgcaatatccaacagatatgtgtcggcatagttgtcccaggcgcgctgcaggcgatcgtccaaacgtccggagcggcgcacgaaggaaagcaccttgtgcagggggtgcgccggtgcctcggtgtggtccgcggccatcgcggtgacggaatcgattgctgtggattcgggatcggtcatatattcctcggattttccttgtgcgccgcaccgctgttcattcattaggtcgatttggcgttcattaggtaggtggtgtgcgataccaaccaccatatcaagccatttacccggtgtccgtgcgggccggctccgggccgacctacctaatgaacgccaaatcgacctaatgaatgcagatattgccggacgacaccaccgttttgtgcgattatgttcgtgtgatatactcaaattgtttcaaaaggtaacaaagcggaccaaaagtgaacagccgctgaactccacacggccgacacttgcaacccgcacaaggaaaggtcaactatgacagttctcgtcaccggcggctgcggctacatcggcgcgcatgtcgttcacgcactccatcaggccggcgaaaaggtcgtcgtcgtcgacgatctgagctacggcaagcccacccgcatcgaaggctcccgtctgtacggca

SEQ ID NO: 1433 - DNA, 4856 bp, Unknown
  R257_15m  MAG No. k141_17250
cccagagtcgttcctgccgtggcgtcgggtcgagcgccaccctgaccgcctctagcatcacgcgccgccctcaacgccgcgtccgtcttgcgcttggccgcgcgacgcccgtacagccgggcgcagaacgaggtcagcacctcggtcatgtcgcgcaccagatcgtcgtccggctccgtgtcgtccaccacgatgatccggcgtccctgcgccttcaacgcgctctccaccagtcccgcgttcatgcgggcgagcctgtccctgcgctccacgatcagcgtgcccacggtcgggtcggacaacagccggttgagcttgcgccgcccgtcgtccatgcccgagccggtctccgtgaccacctcggggctcttgacgcccatgttgatggcgaacgccttcaaccggtcggcctgacgttgcaaatcttccttgtggtcggacgagctgacacgcgcgtaacacaccgtcctgccgttcgccgtgggggcggcgggcgggttctcgtatttcgggtcgtggatgataatcgtgcccgggttcatgcgctcgaacgggacgggcatacggttctcgcgacaccactgccacaccgtctgctcgttgaagccctcacgcctcgcccattccctgacacgcatgacttaattatatcacacgaaaacaaactaaagcaaataatcaatctagcaggctataacccctcaggctggaggatgacaaatcacacatcgtgattctccgtcgcctgaggggcctttctatgcctttgaccggtgcgtactatccaagggcggcatgctgtaacactgacctagcgctgctcctatgtcacaggcagcagtcagaacagcaagccatcagcaggtcgccgcaatcagtccgtaagataggcctgcgcatccagcgctgcacggcagcccatgcccgctgcgctgattgcctgacgataagtacgatccacgcaatcgcctgcagcaaagatgcctggcgcactggtcaccgtgctggcaccctgcaccacgacatacccatcattgtcacggtccacaacaccggctgcaaaatcagtggctggcgtatggccgatagccacgaatacggcgttggtgtccagcgtgctttcttctccggtcaccacgttacgtacggcaatgctgctgacactggccggtgccacagccggtcgtttgattgtcaagccaggaatggcaataggtgcaccggtgttctgtgtgggggaggaggtgccggtaatggaggtcaccactgtgttggtcagcagggtgatggtcggattggctttggctcggtccaccatgatctgcgaggcacggaagctatcgcgtcggtgaatcaaggtgaccgaagaaccgaaccgggtcaggaataatgcctcttcaaaagccgaatcgccaccgcctacgaccacgataggcttgttcctgaagaagaagccatcgcaggtggcgcagtacgagacgccatgtccggacagctcctgttcgccgggcaccccaagcttacggaatgacgaccctgtggcgatgatgagtgctgatgcctccaactgggagtcatcggagagcgttacacgataggtcggcttgaccgaatcactctcacacgcctcaatggaagagacatcgtctgtgatataggttgtaccgaagcgcttggcctgttccttcatgcgatccataagatccgggccaagaataccttccgggaatccggggaagttctccacctcagtggtgttgaccaactgtccacctggcgacaacgcaccagtgaccataacaggattaagacctgcacggccaagatagatggcggccgtgtagccagcgggaccagaaccgataatgatgacgttatgtttcacgtgaaacattgtcacacccccatacgatattccatgtcattcagccagacgcgaagaaagggcggcaccgtcgaatgtatgcgaacggtaccgcccttcttgggtcagttatcggtatagatgccgattagaagacctccaccttctcgatgtacagctggttctgcggcaggctacccgatggcacccacagcagcagatcctgcgtattgacggctttggtgaacttcacctcagtagtgccaccttcagcaaaggtgaattcggccacctgctcgccctgagtggggtctccagtggtatttgcgcgaatatagcccttaccaccggatgtgcggatggtgataaccatgcggtacgcatcctgcggctggtcaaggtgcatgtagtatgcgtacccggattggccgccaggattcgacaggaagttggcgctggaaatcgtaaacgccgtgttgttctcatggcgcggttgcggagcagcgctggaatccttatcgccggacttcttggccttggtcttcttggacgacgaatcagcagtctcggacttcttggacttgtctgatgccgagtccctggattcgctctgagtggcatcactcgactttgaggaatcgtcagtggcgccaccgttcgtcgcgttcttgctgccaccgaatggcacagcgtcagcattgatatcgggccagtcaccttcactggagttgctggaagcatcggcaggattgtctccggaggatcggaacgcatgcactgcccaaacagccgctgccactaccaatatcagagccacaatgatggcaacgaccttggtcgacagtttgccgaacagatgttcatcgggcagcttgctgtcatcctcgtcatccggcacatccttcggtgtgaagctcggaggaatggcgcttacttcggcaatgcgggcctgctcctcttccaaggcacgcagcgattcctcaccgggggccacagcacggccgctgacatcgaacacgggaatacgactggtcgtctctcccacggtggcatcggaaataccgccggtaacaataggcaccgtcaaccgagtattatcacccggaccgccgatgggggccggattcatttcgctgtaccagtcaccggtgtcttcaccggaaagattctcgtgctcccaggcgtcagaaaggttgaagtcaaacagacggcgggcgtcagattgagactggttgccgtcagcagtactggacccatcaggcagaggagccggtgacatcgcgtgcggagcggggacggcggccggctgaaccggcagggaaggggtaatagacaattccggaagactgctgctgttaatcaacgtgctgggaataggcacgatatcggtctcgttggcgggcttcagtatcgccttggtaatcgagcaatcgctttccacgctcggcaaagcgatatcagcatcgctcagttcagagagcggcttccaattacccaacaaggcgtcgagttctacaagggcagccatcggcaacgtgtgctcgtcgggcttgcttaaggccaatccacgcttgcaaatcacgcggaattcgccaggggtgtcttgcggcaaggcgcgcagattgaatgtgggtgtcgcttggcttggcgtgcgtgtcagcagggcatagagcaatgccgcaagctggcgaatcgcataccgttcaggaccgtccgtacgcagatcagtagcggacgtgtcggccagcatcgtggcacatggtgcatcggcaatctgcacaccggaggtagtcactcgaacggtgtcggttgtgatgacgatgctgctgggagtatccgcaatgacctcgcgcagcacgttggcgcattctccgataatcgaccggatggcgctgtagctgagcggcttgtcggtatccaccatgtagtcagtcaggcattggccgctgtccaccggcatgacaatgagaagtacgtcggattccatacggtatttcagtacgggaatcacacgatcagggcgagtggcggcgatgcgaccagcgagctcatcgattgcggcgaaagcgctgcgattggtaatgatgaacagctggcaatcctttgccaacacacggtcgttggctttccatgcctgaatgccaggctcctcacgcaacgatgataccaaggtgtatcggttgagaatcgtgtctccgagttgcggtttcatagtgcgttcggctccgtgtgattggtgttcgagactggtcttagatattctacgtgtggggctatccttgacgggctccgtctcaggattgatttgcgtatcgtcgactttttccggctgggctgtcacagcaacgtcctcactggccggagtcttgtgtagacgggccagtatcgagtgataggcgctgatgagttccggggtgcgtatcacccacaacacagccacatatactacggccagcacgatggtgagcaccacgcagatggccagtgcagaccaccagctcatgtgcccgcctaccgatcgaatatccgcgccgaacagtgcgactaccggtcgtttgatcagccagaccacaactccggaagccagtgccgccacaatggccttggcatatgtcctcgtgatctcccgaccaccaagattgccttcgaacttgcggcgcaacatcatcaacgtcagcggcaacgccagtaatccgccgagtgtcaccgagcaggcgatgccgagtacccaatgctcaggaggaagtaccatcatgccgatcatcatgaataccgaggtgaacccatactgcatcaccgcggacaggaaggggtgcaggccgtcctcaaaggcgtagaacgtgcgctggatcaacaggaacgccgatcccaaaggagtgcccacagatagggcgataagcgcgtaggaaatcagcatggtctcgtccatcgagacggacggaagcaatgcgcggatgatcggttcggggaacacaatcatggcggcggcgaa

SEQ ID NO: 1434 - DNA, 32316 bp, Unknown
  R257_15m  MAG No. k141_17325
aaccccttctgtccgcgcccctggtgcatccagatgtcacgcccccggtcgtggtcgacgaccacggtcctgtacgtgtggccctgcctgtagccggtctcggccacgccgatggcacgctgcccgtcgaacaggcccgcgccctgttcgacgcgcagttcgtcggcgacccgttcgcagatcgggcccacgctcttccggtcgacgcgcatcagcgccgataccgcgctcctgggcgcgtgcacgctcaaccatgccgtctgccgctcgaagtcacgcgtgtacgcgctcttgcgtttggcccacggccccatcgcgaccgtcaccccgtgctccgcgcaatcgaccctccggggcgcgtgctccagcaggagcctcgtgcagccgatgtcgaggtgccgccagcggcgcacgcccagacggtcgtacggccggccacgctccccacatctggcgcaccgatccatgtcgcccgcgtaagggcggaccggaacggccacgacgttggcgggcaggttgagcatgcgcttgagcgcatcggctgatatggtgggcacaggcgttcctctgttgttcggttttctttcttggcggaaacaaatctaacagacgaatgccctttccacatccgatacagaaaccccggcgacgacgccgaacccaactcccctcaccacacaaactggcgaaggctctatttggttgccgtcactgcatattcatagagctgcttgttgctgttacgcttacgtattgcggtggccttaacattatggtagccgagtgctttcatcatctctgcataccatgtatgcgatggcacctcgataccggagaatgtggaattgcctacgatatagcataggtttccaccctctttaaccactggcgtaatggctttgaagtgtgaccacatatcgtcaaaatacttatatacatacggggatagaatctctccgctcttcccttgaagtatcttttcgcatacttcactaagtgtggtgtcgataggtgattcatgcggagagacgcgggcgcgcaacttagtgccgaccgaaccccatgtgccgcctattgtcttccagtccatctccccggcctgttccccggaagtaagatagcgcatccaatacatatagggacgaagttcacggatatacgacatgcgattcgcatacggtggagacgtgatgactagatcagccggttcatatcctgtaaacggtaacgtggaatcaccatgctccacggaagctttccccacaggggtgtcgttcatagctttcgccacgacatccttcacttcggtcgcatagcttctgacgttatgaagaaaatcctctcgtgaatacccaaagagggattcttggtctttaaacgacatgctctggtgattgaaagcggctgcgctaagacctatgagcaggcggcagaaagctatatcaagaagggtcctcaccttgccgtttcgctcgtctatctcgtgccggagagcggccagagcctccaatgaggcctgatcccaccacctagtgatgttgtgcatgggaggaacccataagccatccagcccctcgaatttagaagcctcggctatgaccgaatgcgcttcttctatactggcttcaccgtcttccttgctataggaattcagttttgcattgcccaaccaaacaaggaacgggttaatctcccgtgcattgcaggacaaccccagttcggacgcagccaacggagttgtaccactacccgaaaaaggctctataacccggcttccttcggacagcttggagagttctccataaacaaggttgatgccgtatgcgggagtaagacggagccatccatgacgacccgccttaatgtttgccttgtaggtgtaatcagatcgctgtcgtaaggcagttcggttcacttggcctccagaatagatgtaagaatggcgtgggtctgatcgcggaacacctgcgagttcctctcgaagaaccccgctaggtcgtagccgactacttgcctgaagaaagcataggtgctggttagggggccatcgtcttgtaaattgcccgtcatcacgcagatattcgagcgttcatagcggctacgcaccgcattaggtatctgcatactcatcaccatgacgaacatctggtaggccgaattaagggcatgggagccgttaactatatcgcctttggcgcgcttgctatcttggctcttgtagccttgccgaatctcaaataccgccccttgcagatcaaactgagtgccctgagcctctttcacggagttcaaccagtcagccaagatctctgctttttcagtagacctaatcatgcttaggtcaagacggccatccagtgtcctgtgcgtctgagtgccattgtcctcagtgatgacataaccccagttcgcttctccctccgtaagttggtactcatctataaagatttgccgtaccagacgctccatgccgtcaccaaggtgcctatagatagaggtctgaccgccgcctgctttcgcggcgaggtacattaactcgttgtcaagtcccatccagtgatacaaggggtctgacgagtacaaactgataaagtcaggcagcgatacagccttatccgttcccatcttgggcttgtacttcattgcatcacggagaggcgcaagtactatctccctatagtgctcatctctggcgctccaagagcctactgctcttgcctcttcgggtataccatcctcggccatgtgtgttctaatgctattggagtgcatgcccgtgccctttcgtcggctcatctactacccacaagtgtacgtgccaagcatcaccgcgattcgctgagcgccgaaaacccttctcccgactgggaaacagggaaccgcgacacgcccgacaatacccagagcggggcaaagtacggaacaacgacaaaaaagcaatccccctcgaatcaaaggagattgctcgtgagaaataccctaggtgggatcagtcctcgtcgtcctcgtcatcatcatcgaaaccgccgaacggaaccgggcaggggaatccgaatggaggcttcggctgctcgaccgagtatgagaggcgtttcttgatgtgcttaatcgtggagttgtacagtatggcaacctccggaagagactcattgctctgccagtaggagattggtttggcgttgatgcgctcgatggtgtccacggtagccacagccttgcctcggatgacggcaagcacatactgctgttccttggatcgtttaagcatcaccatttgaactccttcataaagggaagtactggcgggggattccgacaacacaggagccattgaccggccatgctgatgaatttatagaaaatgcacgggaatggtcgtggtatacgaaaagaagaatcccgtcctccagaagaagagggcgggattcattggttatggattggtgaggctactgcttctcccaagctccgcagccttcggaactgaatccggccaccccgtcagggatggtgatggtctgggctattcctgcggacacgaagttgttgtcaatggtctgaccgtttgcgtcctgcatctcccaatagcagttctccaccttgtcgctcatggttttccaagtgccggtggacatttcgtcagggactttgtaggtccccgcatcctttattagaccttgttggcgtttggtttggatttccgccaatcttgctgtatcggctccagctttttgtctgatttcttcagcacgcgggtgatcggggcacagtacaagtgctcccagcagttcttttgcttggccttcacccattgttggcaaacttagcggaatgaatgaagtggaagcgcattcactgtacagaacgcccatgccgtattcggtatcgtcagcatggtctccatacgccgtctttaaagcttcgtaatcagtcgtgctcttttctccggtggctgttgaatcctctccttcagaattgcaactaactgatttaccggtcttccataccgtgtctctgaagttttggctagtgacaccatcaatgcgttccgtatgtgccgacaaatctccatcacctgaagtgacgtagcagttcatgccaatggtgaaaggctgtggctccgattcctcttcggtggtatcagaagattcttcttctttatccacaaaatctttcaaggtcgatttaatcttgaaagcacctccgccggtacccaaatactgtactgtaaccgtggcgtacatggtgtcgtcatctatcgtccatgccgccttccaatctgtccacaggattgatgcgttctcctttgaggaagatgaataccctatggtgtctacggtgttctcactcattccggtattagccgctatgcattcaagaatctcgcggtcagggatgctgctccaaaccatttgcaaagcaggctcctcggaataatcgccatcagacagcactttaatcttgccatctcgattgcaagcggtagacactttctgaacgacttcgagacgttctccaacttgaacgttatgagatacaatagccgcaatcgaggtaaccagtatgattgctgcgactacaaatgaggctatcactaccggcaagcgatacttattccaaacctcctccgcctttgacttgctcgcctcttgtgcaacgaaaggctgggaatccgcctctgccttagcctctgtaataccctcttcgtctggagcgggttccggtgttagctcttcctgcgtctgcgtctcctctggtttctgaggaagcgtatctgctgctggggctggttgctcttgtgtgacttgtgagggttctgcgctaccggcagaaagaactccagacactcccgagaagaattcgtccgcaagggagatgctatgtgagttctggaagccagctgccgttgaccctatctttcctgcgacggtgagcctgactaaagtgccgtcaccgctgggtacggctgaggccgtcagattctcgccccaagtggtcaggctaatacccgatgagaacgtgcatgagcaggacaaatcgtcggcgttcttcaaggtaaagcgggactgatcggattgcagacagcgcttcatggcttcatagacttgtccgattggcgcgttgtagtagcgctccagctgtgtggtattcaacgccattgtttcttctccctcaggtgaacaggcaactgcctccattctattgcaatgaaggtggggggcggcacttgatgagaagtgccgaaaagccttctcccgactgggaaacagggagccgcgacacgcccgagaatacccagagcggggagcgacggcaccgaagtacggggaactggaacgctaaaggaaccagaggggaaacaagagggtacaaaaaagccggaagccttagaaaaataaggcctccggcgagggcggaggatacgagattcgaactcgtgaggctgttacaccaacacgctttccaagcgtgcgccatagaccactaggcgaatcctccatgctttgcagcgcgcagttgaactgtgttccgcaggcaactcgaataggctaccacaggtttcggataagtgcacgcttcggcgtggcgcgtgtcgcgacgcggatgtgaagaatgatcactgcgagtgaaagactcactggaaagtcccgcgcaacacccgcacaaggaccgcatgcttgtgcagggcccacacacccgcgcgcacctacacaacccccggtaaagaaatcaccgtatccgggtgaattttcgatgttcgcccggcgcgcgcccgcaatcgcgcctaggctgttgagtcatgaacgaggggacagcggccgacgtaaccgcagcacatggcggccggtcgcgccaatcgaagaaacactcaaagacgtaccgcagcgtatccgcgatccttagttggctcacggcccgccgcccgaccacgttatccacatcgctgcgcgcgcgattcctcccttacctgctcacgctcgctatcgcctggctgccgtggctcatactcacctggccgggctcgatgcgcgacgatacgcttgcccaatatctgcaatcgtccggtctgcaccactactacacccagcatccgctgtttgatactctcacgttcggcttgttctggcatatcggcagcgcactcggctcccctctgatcgggcaggccctgtacaccgtggcccaagcggttctactcgccgccgggtgtgcgcttctgctgtgctacatccgcaaaatcggctcgccgcgctggctcatcggtctcggcctcgtctatcttgccaccaactatgtggtggtcggtgcaatcaccacgatgggtaaggactcgttgcacgccgtgttctatctgccgttggccgtgctgttcgtggaggcttgtctgacgcgcggctcggtactggctcgccgcccggtggcattcgcgttcggcatcctgctgttcgccaccatcgtctccaagcggacggcgctcataatcgtgctatgcgccggctgctgtttgctcgccgtctgcacgcccaaaggcgcgcggcgtcgtgcgttcgcgtgtcttgcggttgccatcgttgtggcgcagggcgtgtggacgccattaagcgcggccgccacgcatgcgaatcggtcgcccggacgtgaggtgtggggcctggtcacccagccagtggcccggctcgcgcacgatgatcccagcgcgatagacaagattcagcggcagcggctgaacgcgatcatggacctcgactgggccgccgccggcatcaacccgcaccgcaccgatgagaccttccgcactctgcgcgagcaccctaggccaaccgcggcgcaacaactcgcggccctgcaggtctgggcgcagctcggcctcgcgcatccggttgaatatgccacggcctatgccggggtgactcgcggatggtgggacccgcgcgtcaatttcgcgtaccccactgattccgactacctgttcacgcctagctatctcaggcaatgggcgtctttcctgtctgaaagtgcttggaagcatacttccgacggcgatgccgataccgtggcggccgaacgacttgccgccatcgaacatgaccttgcgccgctgaggggtacctccgacaagccgcaatggcagaaaaacatattgcgggcgattcatcgatgggtgcgttcggatggtcatgtcggtgttcgcaaaggcaatccgctgacttcgatggccctgtacgtcacgtggattccgctggctgctggtcttgcgctggcggtgcggcctgcgcgacgacgctacggccccgcactggccgcttacggcttgctggcattcacggtgctgtcgctgtatgcctcacccgtggcactattttggtatccgattccggtattcctcacgttgccgctttttgtggtgttgccgttcacattccgggaaagccatcctctctgagcatagttatctcagatagtgaaataattgcggggttgaaaagcactaaaacgccttctattacctcgcacccgtcaaaaaatcaagactgttgttcaagaatttttttctatagagttcatagttgtttttggaccattcgagtacttgaagtgagaggaattcagcatggttcgtcgcgcctgcgcgcagtccgctgaaatgaacacgatgcgggaacgtgatacgcgcgttgccgtttctcgcgtgcgcgcgaagtcgggcagcaccggtcgtctgcagtcggccacggtctcggctcgtgcatttgcggtcatcgtttttctgtttgcgatgatcgccgcgaccttcctcccctccgccatcattccgcagtccgcgttcgccgtgacgccggcaaccactgccactgctgccaccgtcaagagcgacgacaccaccagcgtcgattacgcgacctgggccgacgttgccaaggccgtcgaagcgcagttgcaggaaggccttaaggaatacaaggacggcaacccaatgggtgccaagtccgatttcggggctgcatacaccaccgtctacgtgacgtccaacttcaacaaagtggtgagcgacaccatcggcgcagacaagcagaccgcgcagcagcaggccttccaggacctgcaaagccaggtgttcacgtcagaccaggccgatcagcttacccagaaggtcaacgacctgaccgccgacctcgacgccacggcccagcagctcgacgccaacaccagcctcgccaacccgaagcagtactccgaagacctccagaagcagatcgccaaggagcgcaaggagctcgacgccaagaagaagcgcaccgaggaaacggccaagacttggaaggaagtcgcggatgcgatgcttccgatcctggacaacgcctacaaggcctatgagggtggcgacgccgccaagggcgccacgctcgtgaacgacgcctactaccagcactacgagaagctcggcttcgagaagaccgtgctgagcgccatcagcggcaaccgcgtctcccaggtggaataccagttcaagctgtgccgctcctcgatgaacaccggcaagcctgcttccgaagtcaagaagtacatcgacgacctgaagaacatgctggccaccgatgccgccaagctcgacggcggcgcggccgatgaggagggtggcttcctcaagttcatcaccagctcggtcggccaggcgttcctgattctgatccgcgagggtctcgaggccctgctcgtggtcgccgctgtggtggcctacctcgtcaagtccggcaacaagcgcttcaccaagtggatctacgtgggcgtgctcgccggtctggccggcgcaggcatcgtggcggtcatcttcatgctcgcgttcggcggctccggcccgctgcaggagatcatggaaggcgtgtgcgcgctcgtcgccatgtgcatgctgctgtggaccagcaactggatgctcaacaagtcctcggtggaagcgtggaaccgctacatcagggaaaagaccgaagccgcggtggcctctgtctcctcgcaggtcgaatccggcgagaaggtggcttcccgcacggtgatttcgctcgccatgctgagcttcctcgccgtgttccgtgagggcgccgaaaccgtgatcttctaccagtccatctacacgatgagccaggatacgcatggcatggtggtcggcgcactcgccgccgccgtggtgctcgtgatcatcttcctggtgattcgcttcacctccgtaaagattccgattggcccgttcttcctggtcacctcgatcctcatgtccgtgctggtggttgtcttcgccggcggcggcgtgcacgcgctcatcgagggcgacctgctgcccgccaactacctgccgggcgttcccaccaacgactggctcggattctacccgtacgccgaatgcatcatcgcccaggtactggcagccatcgccgtcatcgcgctgttcgtggtcggctttgccaaacagcgtaaggccaaggcccggcttgcggccggtgcgagcaagtcggacgcgaaggctgacgaggagagcgcgcaggcgtagcacaacgcccggtgcgaccatctcgcgcaacacaacttgcgacatggcaatggaagcgattccagcccacgccgccacaactaaaaacagataagtcgtgaataatccattcaccacaacagaaggaataagagaaatgatgaagaacaagaagcttgccgctctgctcggcgtgctgctcgccggctccatggctgtttcgatggctgcttgcggttccaccaacaacgcttccgataccaagtcctcgaccagctcctccgacaccgccaagaaagacgactccaagaaggccgacgccccgactgagacctccggcttcgaagaggtcccggtcggcccctccggcaccgccaaggagcaggacaaggccgctggcccgctgaccgtgggcgccgtctacttccagcccatcgacatgtaccctgcttccatgggtctgaaggctgctgacgcttccttccacctggaagccgacatccacgcctcccaggaaggcaccgactacggctacggcaagggcgacttcgtccctgaccttactgtgaactacaccatcatcgacaagtccaccggcaaggaagtcgagggcggccaggccacctccggtaccttcatgcagatgaacgcctccgacggcccgcactacggcgccaacgtcaagctcgacaaggccggcacctaccaactcaagctctccatcgagtcccctgagaagaacggctggatgctccacgttgacccggagaccggtgtcaagaaccacaagttctggaccgagcccatcgaggtcaccttcgacaactgggactacaccccgcgtcagtggtgattgactaagcagacagccccctcgtcagagggggctttacgccgctttagggagataattcttaggatggtctaaaaactcccctcagtccgctttgcggacagctcccctcagggaggggagcctaagatgaacagagaaaggacgcgaatgcttgaacaattcgtggcagtgatgccgggcaccttggcccccgcattgctggtgatgagcctgagcgtgatgctcacggtcggcgaggggcgagataagccgataagctcgcattggcgtctcatcggcctgaccgtcggcctgatcgccgctatcacattcgccggcctgcgcgcctcggccgtgatcaaccagcgcacgttcgtcaactatccggtgctgtggtgcgcgatcattgccgacatcctcaccatcgtcgtggtggtgttcgcacgccgcatcaccaccaattggcagcagcacaaggtgttcatgcacattgcgaacgccgtggccgccatcgacatcgcgctcaccctgttctacgcgctgccggacgtgatcctgcagctgaccatctgggtggagcccggcgacccgatcttcacgtccgacatgttgctgcgcgcgctcggcttcgcgctgggcctggccatgtcgatcatcgtggccgcgatcttccgcacgatgcgttcgaccgcggtgcgtgcctcgttcaccgccgccgttctcgcggtgctggcgattctgttcgtccggcacctgaccggtgtcatgcagatcctgcaggcacacggtttcccgataggccacacgggattcgtggccctcgcctggtcgatcaaccacaacgactggatgatcatggcccaggcgttcgtgttcctgattccggccgtcgcctccgtggtggccggcttccgcatgccgctgaccggcgcgaacgaagccatcggccgcaagcacaaggcgttccgccgtcgcgccgtggcctccgccgtctggagcctcgtggccatgatcggcgtcacgctgaccctcaccgtcggcgtcgccgcgacccatcagaccatcactctttcgccgccggaagcctactcgctcaaggacggcgtggccaccatccccttcagccaggtcgaggacggccacctgcaccgcttcgaatacaaggccaaggacggcaccgtcatgcgcttcatcatcatccgaaagaacggtggcgcgtacggcatcggcctggacgcctgcgagaactgcggcgacgccggctactacgagaaggacggcaagatcatctgcaagaagtgcgaggtggccatcaacctggcgaccatcggcttcaagggtggctgcaacccgataccattcccgtacaagaccggccacggcaagatcaccattcaaactacggatctggacgcgctgagcgcccacttccagtgagtcaggcaggaggcaaggatcatgttctttctgcgtatgattactcgctcgttcacccgacagctgcgccggcgcctgcttatcgcgctgaccgtatgcctgtcggcgaccgtgtccgtatcgatgctgggcgtcgtgttcgacgtgggcgacaagctcaacgccgagctgtccacctacggttcgaacatcaccgtgcagcccaaggcggacgcggtcgtttccgacctgtacaacaccgagtcgggcggcgcggcgtccaccagcgacccgaccgcctttctgaaggagtcggacgcggccaagatcaagacgatcttctggtcgttcaacatcaccaacttcgcgccgcagctcaacatccacgccacggtgaacggtgccaacgtgccggtcgtcggcacgtggttcaacaaggacctcaagatctccaccggcgagaccaccgtcgtgggcgtggaaggcatgcgctcgtggtggcagctggacggcaagtggcccaaggacgattccgatcagggcgtgatcggcaagacgctggcctccgaactcggtgtgaccaccggcgacaccatcaccctcaacaagaccaccgcctcgggcaagaagaacgagcagaaaatcaagctcaccggcgtctacgattccggcgacgaggacaacggctcgctctacatcgcctcctccacggcccaggtgctcgccgacctgcccgattcggtcgacaagatcgaggtcaaggccctgaccacgccggagaacgacctggcccgtaaggccgccgcgaacccggccgcgctgagccaggaggaatgggagacctggtactgcaccgcctacccgagctcgatcgcctaccagatcgaagaggtgattccgggcgcggtggccaagcaggtgcgtcaggtcgccgcgttgcagggcaatgtgctgcagaagacgcaggccgtgatgattctgatgaccgtgctgagcctgatcgccgcagccgtggccgtggccaacctgatggtcgcctcgatcggcgaacggtctggcgagctggcgctgctcaaggcgctcggtgccaccgatgccgcggtatcccgcctgatgctggccgaaacggcggcaatctcgctgctgggcgcgattgtgggcgcgttgcttggttccggcgtggcccagctgataggccgggtggtattcggttccggcatcacgatgcggccgatggtgttcgtgctggtgttcgtgctgctggctgtcaccgtgctgctggcgtccgcctcctcgattcgttcgattctgaatctcaagcccgcggaggtgctccatggccgctgagtttatctacgtaggtgtggaaggaggaaaccgatgaccaacaccggtatgttcttcagaatgctgttcagcgccgtgttccgccggcgttcgcgcgcggtgatggccgtggtggcgtcgctggtcggcgcggccacactgttctgcctggcgatgatctgcctcgccgtgccgcagcagatgaacgaggagatgcgtgcgtacggcgcgaacctgattgtcacacccaccgaatcgaccaatgccgacggcaaggccggcatcgacaaggcgatggtgcagcacaccactgaaatggtcaaggccaagggttctgcgaaatacgccacctaccgatacgagaacgtgcgcgtcaacgcctcgccgtacgtgatggccggcgtgaatgcggcgcaggtcaagaacctcaaccatcactgggtggtcgacggctcgtggccgaccgacggcaaggtgctggtcggacgtgacatcgccgacgccatcggtctgagaatcggctccgccatcaccatcggctaccgtgcatccgataacgccagcaccaacggcacttcgtcgaactcctcgatcgaccaacaaaccaaagacggccgcgtttccagcgacatcatggacacctccggcaccgaattccgcgtggccggcatcgtggacaccggcggcaatgaggactcgatcatctacgccaccaacgacgacgtcaacaagctcaccggcatcacgcgcggcgtggacgtcatcgagtattcggccggctccagcgatctcgcgggcctggtgtccagcatcaacgacatgacctccatgcacgtcaaggcgcagcaggtcaccaagatcaccgcctccgacacccgcatcatcaccatgctgcagacgctgttctggatcgtctcgttggtggtgctggtgctgacgctcgtcggcgtcggcaccacaatcagctcgatcgtctcgcagcgacgcaacgagatcggcctgcgcaaggccctcggtgccagctcgcgtgccatcggcaccgagttctacatcgaatcatcgctctacggcctgatcggcggcctcatcggcaccgcaatcggctacggactcgccagttggctgtgcgtggcggtgttcgaacgctccatcggattcaactggtggctggcgctgatctccgtgctgttcagcgcgctggtcgccatcgtcgcctccatcccgcccgtccaccgcgccacccgcatcgaccccgccgtcgtgcttcgcgaagaataaagaaagagaaacgtcatgctacttgaactcgaccacatctcgaagatctacggcgacctgcatgccgtggacgacctcaatctgaccgtgccggaaggcgaatggctcgccatcgtcggctcctccggctcaggcaagaccacgctgatgaacatgatcggctgcatggacacgccctccaagggctccgtgaagctggaaggccgcaagctggaggacctgaacgccacgcagctggccgacgtgcgcaagaacctcatcggactggtgttccagaagttctatctggtgccgcacctgaccgccgtggaaaacgtgatggtggcccagtactaccattcggtggtcgatgagaagcaggccatggaggcgctggaaaaggtcggcctgaaggaccgcgcccaccacctgcccggccagctctccggcggcgagcagcagcgcgtgtgcgtggcccgcgcgctgatcaacgacccgaagctgattctggccgatgagcccaccggcaacctcgacgagaagaacgagaaaatcgtgctcgacctgttccgcaagctgcacgagcagggcaccacgattatcgtggtcacccacgatgcgcttgtcgccagctgcgcgcagcgcgagatcatgctcaaccatggcgtgctcgtcggtgagaagtggaatgacgaggatgcgcgcaaggcctacgaggcggccggcggcaagcccgcctccacgggtgcacaggtcgagggcgcgcagaacggcgagaccgccattggtttcgctgaccccaccaaggccgcgaaaaccggcggcgaggagtagggccgtcaggggcatcgagcagtatgtgaggaatacatggcaagctgatggtctctcccccagtcagcttcgctgacagccccctcgtcagagggggcttaaggagcgtgaatatgaccgaaaagaatacgttgaagaaatccgcgacattggcggcggccggactggtcgtggctggcgcgctgctggccgggtgcggcgaatccaaggccacgccgatggacgatgcgtacgccggcaactcgggcgagaccgagaagtcgcaggaagagcagtcgcaatcccagtcgaatggctccgatagctccgacggctccgattccggctcatcgcacaacgacccgtccaccaccacgtccgacaagaaggacaccggcaactacaaggacggcaactactcgatcaacggccagtacggcccggtcggcgaggattccatcgacgtccatctgaccatcaaggacggcaacgtcgagaccgtcaaaatcattgggcacccgttcaccacgatttccaagaaccatcaggacgacttcgccaaagccatcaacggcgtagtggacggcaagcccctgaagggactcaaagtggacaaggtcgccggtgccagctggacctccgacgccttcaacaaagccctcgaagtcgcccgccaggaggcttcgattcaggagtaagaccgctacttcagcaatgctggccacagcagatcggccatgcgcgaggcccaggcggtgtcgtcgtccatcgctttgccctcgatggcctcatacgccaccaaagacccgataatcgtggacaacagcaacttctcgtcaacgtcctcgcgaaacacgccctgcgcgactccctgcttgaggaacgcccccacacgctccagccacggggtcaccacctggtcgacgatgtgctggaagaactcggcctcgctggacaatacaatgcccacgcgcttgacgtcgatgtcgttgtcgcgcacccaatcgaccaatcgctgcaatagttgcgtgaaatgctcacgcgtggggctgggcactgggtcggaatccgggatggccagatacatcgcgctgatctcgcgcagcagctcgtcggcattatggtatcgacggtaaatcgtggttttggccacaccggagcgccgggccacctcctcgatggtcacgccgctgataccgcggtccaccgcaatctgcagcgtggctcgcatgagcttgcgatccgtcgcctcgcgcgtgcgctcaccgcgcggtgtcgccgtcgtacctgtcatctccgtcatctcttctcttcgaaatatgctcccgtacgctcccgttggcgggagctgactggcaaagccagactgagggtggtaagtccatgccgtttgtaggcaacccccggataatacctactagcccagcactttagtgctctcgactttggccacataccactggttgaaccgcaccagtggcttcctgagcaacagtccaagcaacagcagcggcggcacgaatgccagcagcattccggcggcccgccagtaatccatgtcgtagatgccggcgatggccgcacgcatcatcgtcaccgcatgggtgagcggcaagaacggactgactttggcgatgaagtcgggcaacatctgcaccgggtaggcggcgttcgcacccgaaatctgcacgatgagcataagcacgccgattgccttacccacattgccgaaactcaccaccatcgtataggtgaagaacgagaacaccagcgaggccagccatccggacaacataaacagcagcggatgcacggcctgcacgcgcaggaacagcagatcgccgccgagcgacaccgtggattgcagcagcgcaatcagcgcgaacaccccgtaatgcccaaggaagagccgatgcggccgcggatcgcccaaggctttgcgcgtccggcgagacacggtggttttcagcgtcaccaccatcagcagcgcgcccacccacagcggcagcagcgtgtagaacggcgccatcgacgaaccgaaattcgccaccgggaatacggccttgcgcctgagctgcaccggcgcggccaacgtactggccagcgtttcgggatcattgcccagcacctctttggccatgctcatatcgccactgtttagtgcgtcgctcagtgtgctgttgaacgaagccagttcggcaccggcggaacgcagtttgccggacaccttgcccaaggtggtgcgagcgtcgctgagcatatcgctggcgtcgtcggaagtccttttcaggtcgccgagcgtggagcccaactgggtggcgccggaactcagtatgccggaggcgtcagagacggtggacgacagggagtcgatttgcggtttcaccgtggccgtgaaatccgacttgatattggcgatactgttctgcgcttgatcggccagatccttgacctgcgcatgctgatcctgcgcgttctgattaccttggcgaatattggtcgccgccgtattcagcgcttgccgcagcctgttctgccgtgcgattgaacggtcaatcgccgtgatgatggatgagtcgttgcccagtatgccggccaacgtgttgcgaatttcagtgtatttctccgtctgcttgccaatggccgtggcttgacggtccaattcgtcggcggccgtggtggcaccatcattcgcgtcggaatacagcttgtctatggaatcggacaccgcgccgaaactggaggcgctcgcgtccagtgagctgctcatcgcgtcagcggtggtgcccagggctccgaccacgtcggtgactccctgcttggcgctggcgagatccttgcctccttgtttggcggcagaggaaacctgcgtgatcagcgagttcgaggtgtcgagcaaggcgccggccgtatcggtcaatgcgctgtatgtgccaagcaaatccgccgtatcgtcaagccgtgtggcgaaatcggcgatattggcgttgaaggtattcagttgctctttggcttcgggcttggacagctgatcggccagcgaagacgcgatttccagccctgccgaagtgatggtcttggcgaacgtggtgttgatttccgccgccacctcgtccgtgccctcgttgagcagattcggtgccagcgcgttcttcttctcgttgcggtaataggtcagttcggcatgctgcacatcgtcggagaagaaggtcatcatgtctttgctgaacgacttcggaattacgatggccgcgtagtatttgccggatcgtgcgccctcgacggcatcggctttggacgtgatcgtccaatcgagctgactgttggcgcgcagcgcgttcaccacctgatcaccgaccgtgactttcaccgggatcaggtcggaacgatacccctcatccacattcgccaccgcgaatttcaggttcttcatattcgagaacgggtcccagcatgcggccacgttgaaccaggtgaacaggccgggaatcatcaccaagccgatcacgatgatgatggagaccacgttgctggtcaggcgtttgatgtcgccggtaaatagtttccacatggtgttcatcgtgcgtgcctgccttccttggtcggcggaatagtggggatgattgcggtaacggcggcgctcgggtccgcttcttcgtggcgttcggcggaggtgtcgcgacgcttggccttatgcccgtacagcatggcgcggatcgactcgtcggagaggttgccgagctcggtttggcggcggatggaatcgcgcatgaattccacgaccatcaggaagcccatgatgatgagcacccatgccagccatgtgcccatgaccacgattttctcgctggtggtcagcacaaacacgataatgagcgcggccggcaccacgaatccggcgataagcgcacccagcagcagccggggataacggtaggcgaatttggcggcccgacgttcgatggcatgacggtattcgtcgcggtcggccagtgccgcaatggcctgagtgacacggtattcgctgccaggcaggtgcaccggctcgccgataatcatgtcgctttccttgatttcccgcgcgaacaggcggttgagattggccagtttcggccgggcgccgaggccaagcgcaaaggccagaaccgcgaaaaccagcaatttgccgatataggcgaaccagaggccgtcgtagaagccgccgatggtttcacgcattgcgtcaatcgaataggtgaacggcagcagcggatagatggcacggaagaacgcgggcatcatttcaatcgggtacaggccggaggcgcccggcacctgcagaatgaccagcgccacgcacacgcctttgcccacgtgcatgaacgtggtggagagggcgaaaatcaccgacatatacaccagtgaggtgatgacgcaggtgagcagaaacaccggggcgctcgcgcattgaatgccgatgacaagatcgccgatggccgtgaccaggccttggacggcggccagcgtggccagcagcaggaaacggccgagatagccttgggttggcgtgagatcgtcgatgccctcgtcgtcggtttcgagtttgggaatgaccacgagcacgaacgcgcccacccacaaagacagggtggtgaacagcggtgccatgccggaaccataggaggcgaccgggtagacggcccgttcgctgataacagtgggggagagcatgaagtcggcgattgtggcggcatccagtttgccgtcggtgccgatcagggaactgagtgaactggagatgctcagggctttgatgtcggtggtcagcgtttcgagcttggtttgcatgccggccagcgccttatcggtgtcgtgcagggcggtcaccgtggtggaggcggctttgtcgagttgatcgagggtgctcttcgactgatcgatgagtgagccttgcgacgtgatgccggtcgacagagtgttggcggtcgagctgagggtgttgaggccggtgttgagctgaggaatggcgccggagatgatggtgccgcgagcggtattggcctcgcgcaccgtggtttgggtggcggtattgagatgctgcgccaatccggcggtgtctgtggagacgttgccgatagtggtgttcaggctatcgaggttgcccagtgcgccggcaagctcgctattgtggctttccagtgtggcaatggcggattgcagcggttctcgatcggcgttcggcagccctttgagttggtcgatgatgtcggcgttcgcttggttgatgtcttccgccgtattgatcagtccgcctacctgctgattggcggcgctgatggttccggctaccgtgcccacgctttggttggcctgtgctgcggcttggctcagcaggcttgagccttggtcaagcgcttcggacgtggaggtgacgaagccgttcaggttggtctgggtagtgccgatcagggtggagacaccggccaggccttccgcggtgtcgatgccaagtgcgcgcgcgtcgtccagcgcctgacgtgcggtgcgtgtctgctccggggtatcggtgagtttggtggtgagcttggcgatggtgctgcgtgtgtgctgcacgtcgccggaggcctcggcaagggccgtgagggccttggctttggtggtgtcttcggtgctgatggctttgccgccaaccgtattgatgacttcggtaagtactttggatacggtggagacgaatgtggaattgaccgtgcggtccacagtggacgcgcctacgtcggtgactttgggggcgatggcgctggctttttcgttgacgtaatactccagagtgggccgactcttgccgccggtcaccacgccggcgagatcgtcggaaaagtctttggggatgatgatggctgcgtatgccttgccggattccacctggtccatggcctcggcttcggtgacgaaggtccagccgagctggtcgttgcttttcagctgcttgacgatttgatcgccgaggttttgcttgccgatgagcgcgttgtcggtgccgtcgtcattgttggcgatggcgacggtgatgcctttggtattgccgtacgggtcccagaagccgacgatgttgtaccacgaatacagtggcgggataaacaccatgccgaacaggatcacccatgcggccggcaccttgaacaggcgcaggaagtcgcgtttgaggaccttgaagatattgcccactgatacctccggagcttggtgttgcttgattgctacgttttccgtagcgatacgttaatcgtagcgctacggttgtagtagcgtaatacggctgccggagattattggggtgattgatgatggttttggcggaataacgccgctgcccagcggcttatcgtgtgtcgctgggcagtgtgcctaattttttgtggctggggtgctgtgtggccgggtgtgctgtgtgtgttggtgtgaggctgccctccatggggcggtaaaaccttcattgggtggtaagtggcccatggggcggtaaaattcccatggggcggtggcttaaaatggctttattccgcggaatgcggttttgggctaaccgccccatggggtaattaccgcctcatgagagagctaccgccccatgggtaaaccgttgtatcagctttcgatggtgccggattgaccatcaatggccgactgctcgttctggctggatgactggtcggagttggagttaccggaagtatcagaacctgtgccggagctgctgccggtgccggactggccatcagtgccttggctggagcgaaaggcgttctggaacttattgacaagatttctggatggtttttggatgtttcctgaaagcgagcgggctcggtgtccggcaatgtagacagacatgtaccggctatccatcaagttcggcaaaactgcaatcgggtgatagtgtaaggggacgctatgtggggaggaaaccatggttgaattcaaggacgatggcacggccactacccctggcaagccgcgggagaaccgtgacgccgagtccgcagtcgtggctgatctggtggccgtcgaactggacgacgccggcttgaacccgaacgccaagcgattaccgattctggcgcgcatctatggcgcggtcgtgctgctggacggactcgccacattgccgattatggtgatttccatcctctatgccgtgcgcgagattctggatggtcatgtgcacgtcgatgcgatgagcctgactttcatcctgtccgcgattcatgcggttgtgctggtagtcagtgccgcatgcctgattgtgttcggcgtgatgctgctgcgcaatcatcgccggtatgccgcgcgctggacctacgtgctgatgccgttgacgttggccgacggcatgctgtcgctggccctgaccggccttggcttcaacctgctgctgccgctgattcagatgattattctcgtcgtgatttcggtgaccgccgatccctccctgagcgaggaacgccgtttgcagcgcgcgctcaaacgcatggacgatcgcgatgattatgaatcggcggtggcggccggcatgctgggccgcgaccaatccggcaagggctatattgcactggacttcttcaatatcttctggctgtttaccatcgcttcggtgggtggcctgattatggagacgatctaccatatggcgctgtataacggtgaacttcaggaccgcgcgggtttgctgtggggcccgttctcgccgatttacggctgtggtgcggtattggtaaccgtgtgcctgaatcgcctgtggaaggcgaatccgttcttgatcttctgcgcttcggcggtgatcggcggcgcgttcgaatactgcaccagctggttcatggaagtggcgttcggtattaccgcgtgggattacaccggccgttggctgtccatcgacggacgtacttcgggccaattcatgttcttctggggactgattggtgtggtgtgggtcaagtggctgttgccgcgactgctagctctgattaatcgcattccatggaaagtacggtattcgctgactgcggtatgcacggtgctgatggtgatcgacattgccttcacgctgatggccttggattgctggtatgggcgcatggccggccagccgcaggattcaccggtcgcgatgtggttcagcgaacgctacagcgacgcttacatggccaatcgcttccagaccatgcatatcgacccttccaaggccgggcgtatgtgaatggctggcaagtaattacgcttcgcgggcagaaggtgcgtagaacctaagacagccttcgcgtgtgggtggtaagtgggatacactttcgagcgttgaaggaatgattccctccgctgatgcgctgttttgtgacgcgcgtgatgacgatgggacaatcaaacgaaaggcaaggcacatggccgaagctacagcaaacattggtgtgattggactggccacgatgggctccaatctggcgcgtaatctggcgcaccatggcaacacggtggcgttgttcaaccgtcactactcgcgtaccgagaagctcatgaacgagcatggcgccgaaggcaacttcgtgccggccgaaacgctcgaggaattcgccgcgtccctgaagcgtccgcgtaccgccatcatcatggtcaaggccggtgctccgaccgacgcaactatcgcgcagctggaagaggtgttcgaaccgggcgacatcatcgtcgacggtggcaactccttcttcaaggacaccatcaagcgtgagaaggaagtacgtgccaagggcttccacttcgtgggttgcggcgtgtccggtggtgaggaaggcgcgctcaacggcccgtctctgatgcctggtggcactgcggaatcctggaagaccttgggcccgattcttcagtccatcgccgccaaggtgaacggcgaaccgtgcgtgacccacatcggcaccgatggtgccggtcactttgtcaagatggtgcacaacggcatcgagtatgccgatatgcaggtgattggtgaggcgtatgacattctgcgccgtggactcggcatggataccgaggagattggcgacgtgttcgctgaatggaacaagggcgaccttgactcctacctgatcgagatcaccgctgagattctgcaccacaaggatgccgagaccggcaagccgttcgtggacgtggtcgtggatcatgccggcatgaagggtactggtacttggaccgtgcaggctggtctggaatttggttctcctgtggctgctatcggtgaagccgtgttcactcgtgcactgtcttcgcacggtgagctgcgtgaagacgctcagaaagaaggtctggctggcccgaacaagaccatcgatctggccggagaagacaaggccgcgttcgtcgaggacgtgcgcaaggccctgttcgcttccaaggtcgtggcctatgctcagggcctgaacgagattcaggacggtgctaaggaatacggctgggatatcaacctgtccgaagtggcccgcatttggcgtggcggctgcattattcgcgcccagttcctgctcgaccgcatcaccgaggccttcaagggcgataatttgccggcttccctgttgttcgatccgtacttcgagaagatcatcggcgaatcgcaggatgcatggcgtcgtgtaatcgtgcgtgccgtggaggccggtatcccgaccccggtgttctccagctccctggcgtactacgatggtctgcgctccaagcgtctgcccaccgccctgacccagtcccagcgtgacttcttcggtgcccacacctacggccgcgtcgacaagcccggcgtgttccacacgctgtgggctgaagaaggcaagcctgaaatcgaggcgtagcctcgtgatttcaggtttaggacagccctgtgggctgtccggccttcttcaggctcggcgatagccgagctgagaaaacagcaagcctgagatcgaggcgtagccatagacgaattaagccccctcatcagagggggcttaattcactcacaactcggtgacggtttcttcggtggagaaccaggtgaactcgtccactccgttggcgtaggaggacgggtaatccgggttgttgggccgctcgaagacatgggccagcgattcggctttgccggcaccggcggcgaagaaccatgtacggcgcgagcgggcaatcagcggcgcggtcaacgagacgcgcaacggcggcatcttgggggagtggttcacacccacggtgagcctatcggtaaccttgacctcatcatgacccgggaacagcgacgcatagtgaccgtccggtcccatgccgagaatcatcagatcgatgaccggttccggccccaattcattcaccaactcgcgctcatagtcgctcgcggcatcgtccagcagcgcatcattcgcggcatcggcggcggcgcgaacggaagcgtcatcactatcggcctgatccatcacatcggcgatgtcatcggctgaacgggtatcggccgccatctcatgaatattcgattcaggcagcttgccatccgccaccagctggtcaagcagcaggcgacgggcctccagagcattgcgatcggtgtcgtaagccggcacaaaacgttcgtcgctccaccagaaatgcacgcgcgaccaatcaaccgcatcagccagtggatcgttcagcgccaaacccaacggctgtgcggccgaaccgccagacagcgccacatccacacgtgtgcgatgcgtgccatcaggcaatcgttcggcgagcaaatcgagtagcgccaagacaaaacgttgcgcgccagcctgaatcatcagatctttattcggatacacaatgagttttcgagttgccatgtatggtccttatatggggtatgtgtcgtactttgcaatgtggattgtgttgtcagttgacaacgcataatacgggtggcatgccgggaatccagccatttgcagcaatgaaatgtgttgtcagttgacaacacaatgtacattgtgcgacatcgcatatgtcactttattactccgcggtcatgagcttcggcatcgcatgaggtaggaaacgatgagcaacggcgttggcatggctcgaccacaattgccgaactcatgccaacgccgctgtggcaacggttctaccgacttcagtgacgaatcagatcccagccttcgttgatgacctcggcgtagatctcatcgggatcgatgcggcgcagttcctcggtcagacagtcctcgatggtgcgcatcggcacggacacttcctgcggagtctggccgggcagcgagatcagcgcttggtcctcatacgggcgttccagtgagatcacaccgtcctcacgggtcaggtacacgccggtcacggcctgcgcgtcgggcgcgaactcagtttcgactggtacgccgagtttcagacgcagccatgcgcacagcatttccagaggcaggaagtcggccttgccggtcaccttcacggcggtgatgggcaggtgcggcggctgatcgagcatcgaggcgagcattgcgcgccagacggtcagtcgtgtccaggacaagtcgatgtcttccggtgtccaattgcggcgcaaacgctcgatcgtggcctccggattattggagtgcagcgcgtcggtgatgcgactgcgggccatcgcacccatcagatccttggccgggttcgacggcggtgtggtcggccaccacgccactacaggcgcatccggcacaagcagcgggataaccagcgtatccgggtggttgataaggccaccgcgcggacgcaagatgataatctcaccggcaccggcgtccgcgccgaatcgcacttgggcgttcagattggaatcgttcggatcgttcgggccgtcggtcaaatcgacggccggattatcgcgattcgcgctcacctcggcggccacttcggtctcgttcggttcgccttcgccggactgatcggcaggattggcatccggtactacggcaatcacgcggcacgggtgctcacggctggccgagttcgcgatttccagcgcatgctctaggtccgcgtcctcggtggcgatgagtagcgtcagcacgcggccggtcgccgattcgccgcgctcctcgtgcagctgttcgattttgtgcgcaatctcgcgggtgcgggtgttcggcatatcgatgatcatggcatcctccagtggcggccgtcgcgcgccagcatttcgtcggcctgtgccggaccccacgtaccggcgcggtaggcctgcggctggccaagcgtggaccagaattgttcaatcggatcgaggatctcccagctgaggttcacctcttcggtggtcgggaacaacggcggatcaccgagcagcacgtccagaatcagtcgctcataggcttccggcgagttctcggtgaaggagcggccgtagctgaagtccatgttcacgtcacggacctccatggtggagccgcccggcaccttggctccgaagcgcatggtaacgccctcgtcgggctgcacgcgaatcacgatggcgttcttgccgagttcgcgcacggcggtctgctcgaacggcagatgcggggcgcgcttgaacgccacggcgatttcggttacacgcttgccgaggcgcttgccgcaacgcaggtagaacggcacgccagcccagcggcgggtgtcgatatcgaggcggatggcggcgtacgtttcagtggtgctcttggggtcgatgcctttttcttccaagtagccgaccacttcgtgcgagccctgccagcccttggcgtactgaccgcgcgcggtgttggcggcgaggtccttgggcaggcgcacggcggaaagcaccttggtcttttcggcggtcaggtccttggcggtgaagctcaccggctcctccatggcggtcagagccatgagctgaagcaggtggttctggatgacgtcgcgtgcggcgccgatgccgtcgtaatagccggcgcggccgccgatgccgatgtcctcggccatcgtgatctgcacgtggtccacatagttggcgttccagatcggctcgtacatggcgttggcgaaacgcagggccagcaggttctgcacggtttccttgccgaggtagtggtcgatgcggaacacggagctcgggtcgaacacttcggataccacgctgtcgagttccttggcgctggccagatcatggccgaacggcttctcgatgatcacgcggcgccatgcgccctcggacgagcgcgacaggccggaggcggccaactgcttggcaacctgcgggaaggcgcgcggcggcaccgacatgtagaaggcatggttaccctgcgtgccgcggtcgcggtcaagctcctgcacggtggcgctcagacgctcgaaggcctccggatcgtcgaacgtaccctgcacgaagcggatgccggcggccagattgcgccaagtcgactccttgaacggcgtacggcaatgcgcccggacggcggccttgacgaattcgatgaaccgctcctgtgtccagtctcggcgggcgaagccggtcaggccgaagctcggcggcagtaggccacggttcgccaggtcgtagacggccggcagcagtttcttttgtgccagatcgcccgtgacaccgaaaatgacgaggctgcacgggccggcgatacggggcagtctgaggtcgcgcgaatcgcgcaggggattgctccaattgggggattcactcataatgtacaagggtagccgccggcggctatctatcgctagaggcgatatgcgatttgggctgcgatttgggccacattgcgtgtgctgtgccgtgcgttgggccaatcgcgtacgcaaacgtgtacgcaacgccgtagttgaaatatcccaaaacggtgtgtattttagaagagttgcccctttagctcaacggttagagcagcgtccttttaagtcgtgggttgtgggttcgaatcccacagggggcacaacaaatccttggaatcgcaatggttccaaggattttttgtttcgaccagcctggctcctagagtggtgccccatgtcatgcaccacgattcttgtcggcaaaaatgccagttacgacggttccaccatcatcgcccgcgatgacgattcgggctcgggccgttacgatcccaagcgcttcgtcgccgtcgcccccgacgaccagccgcgccactaccgcagcgtgctgagccatgtcgaaatcgaactaccggacaatccttgccggtacaccatcgcaccgaacgtgctgaataatcgtggcattctggccgaagccggtgccaacgaacacaacgtggcgatgagcgccaccgaaaccatcgctgtcaacgagcgcgtgctcggtgcagacccgatggtcgagttgcggccggctgtcggcgggccggacagcaccgattatcaggccgagcagcccggcggtatcggtgaggaagacatcatcacccttgtgctgccgtacgtcaccaccgcgcgcgagggcgtcgcgcggttgggcgaactgctcgaaacctacggcacctacgaatcgaacggcgtgattatttcggatgcggacgagatctggtacgtcgagaccatcggcggccatcattggatcgcccgccgagtgcccgacgactgctatgccacgatccccaaccagctcggcctcgacgacgtcgagctcgccgatgcgttcggcgagcagcgcgaagacctatgccgcgccgacctgcgcgagttcatggccacgcatcaccttgaccgcacaatgggaacgtcggtctcttccaacggccgtcacgtgcatagcgccggattcggaacaaccgttgcccttcccacccgcttcaacccgcgcaaggccttcggcgccgcgacgccgaaggaccatatctacaacacgccgcgtgcctggtacatgcaacgccgcctcaaccccagcgaggactgggattcgccggccgcccgctacacgcccgaatccgacgacatcccgtggtgccgcgtgccggaagacaaggtgagcctcgaagacgttgatttcctgctgtcctcgcacttcgaaggcacgccgtacgacccgtacggcacgaccggcacggcggaatcgcgccaccgttaccgtccgatcggcgtgaaccgcaccggccatatggtggcgattcaggtccgcccgtatgtgccggcggccaatcgcacggtgatgtgggtatcgttcggctccggtccgttcaccgccgccgcgccgttctacgcgaacgtcaacgacacgcctgcctacctgcgcgacaccacgcccgaagtctccaccggcaacctgtattggacgaaccgcctgatcgccgtcgtggccgacgcgcattggtatgagacgaaccggttcatcgagggctatgcggaaggcgtgcgcgcgttcgggcaccggctcatcgagcgcacggatgagcagttgcttgctcgaagcgatgccgaatcgacgggtacgaatgcatggccgctcgatggcggccacggcgatgagaaggatgtgcagggcgtggcggatgtgctcgaagcggccaacgacgagatggccgactacctgcgcgagcatacaaccaagctgctgaacgacgtgctatacacctccagcaacctgatgcacaacagcttcgcaatgtccgaccgttgggccgagtagcaaaacctcggctggggaggtaatagggatgccctgctgataacgcgtcagcagggcaaagccgcaatccgaatcagttgaagccgacgatgcgttcggcgatgagatagccgttgcgcacgatccagcggccggttttaccaggcagattgagcgcgcgggacatcagcttcgagcgcacatccttgccgatgtccggagaataggcgtcaatcgcatcccacagctcggttttcttaacgtagttggccggatcgcgcgagagaatcaggaacgccgaggtaacgcatgattcgatcgtcaggaagtgaatcatgtaccggtacagcccctccggcaccgtaccacgttcgggcgtggcctcggtcatcagccgattgacgagccgcagctgatccacacgcttaatcatcacgtcggtctgcacgctctgaccctcgcgcccgatgaagtagtggtagaacggcacgtcgagatactggatgcgcttcacccacgggaacggctggtacgagtaatagaaatcgacgtagaacgtatgctccggcagcttcagcccggaatcgcgcaccacctgcgtgcggaaagtgagcgcatgcatgatgatgtactgcgccagaccgaacttgcccaggtcatcccagccgagcacgcggccggcctccatcacatgacggaagttcaccacgatcttgtggcgcttggtcactttgtcatacacatagttggtcaccagcatgtcgatcggctcgctggcctcacgttgcgcgcgcaacgtggccagaaccgtgtcgatggcctgcgggtcgacccaatcatccgcatccaccaccttgacatacatgccggtcgccgccgtgataccggtgttcaccgcgccgccgtggcctttgttctcctggtgaatcgcgcgcacgacacctggattggtgcgttccagtttgcgcgcgtactccagcgtgccgtctttcgaaccgtcgtccacaatcagcacttcgaggtcgcgggtgtcgttcgccgaaagcagcgagttcacgcaacggtcgagataggactccatattgtatgcggggatcacaaaggtgagcgtctttgccgtgctggccatgaaagtcttacgtcctcacatatttagtcgttatgttcagtttcctgttcaaaccgtagcacctcgtctcccgactcggcagagtgttgcgcaacctgtgcccctgaactcacattctgcaaccctgaatcttccctgagcgtgtggtcgaggtccgtctgctctaagggcgatgatgccttgccgtccggggccggtgtttcggcatcgatcccgcgcttggcccggcgctcggcctccttccgggccttgacgccttcaaacaacagctgcggcttggaatcgagccggctcaggccatgccatgccaggtccacgatgtacgcggccagctgctccttgctcaccttgggccggtcggcccagtactg

SEQ ID NO: 1435 - DNA, 9150 bp, Unknown
  R257_15m  MAG No. k141_17402
ccttcttgccgtcggcggcggcccacttgagttcacgcttgcgcttgaactccatgccttcactttcggtgtcgagcaggtgctgggcgtacaggccggcctcgatgcgctcggacaggtcaacttcctgttcggcgttcagcaggctcacacggccgatctgcttcaggtagtccttgaccgggtcggcggttgcgccggccgcgatcacacgacgcttcggattgcccgaagggatgatgttctcttcctcatcatccgtgtcggagaccacgtaggcacccttttccttgggctgctcgggtgccttggacttggcttcttcctcgtcctcgtcgtcttccacatcgtcgtcgtcggcatcgtcctcatcgaggtcttcgtcgtcggcatcgccttcgtcaacgtcgtcaagatcctcgtcgagatcgtcaacgtccaaatcgtcgtcgttgacctcggcatcgtcatcaagcccgtcatcgacctgagtgtcctcgtctttgacgagctcatcgtccttggccttcttcgcggttttcttcgcggcggacttgcgcgtggtctttttcgagggctctgcggacttggacttcttggcagaagtcttgcgcgcggtggtcgtagagctggccttcttcttggtctcggtctcctcgctggactcggctgtctgcttggttgccgtcgtttccttcgtggccaaaactgctccttctgatctctcgccgtgaagtgcatataccacacgggcccacttctggcaagggcaaatcgtcaactatgtgagtaaaccaccctccacggacgattattcccacatcgttgcccgacgtgttgccgatcaccacacgctttccttccgcgcatcgcgcataaaacctcggaaatccgccgtttctgttcattcagcccgagcaccatgccggtgccacgcctcgatcggcggctgagaatatcatcgccgccagcgaacaatcctcatcgagcagcaggcatcgcaaggcgaacaccattgctcgcggatcgcccagccaccataaggtgtaggcgatcacggccaatggttgtatgcagtacggcaccggtgaggcttcggcgatatcgagcaacataccgatgccggcatggcaacgctccttatccggcatcatgccttcatcctcgaatgcgcaagtcagcagctcgcccattcgtgttctcgtacgcgccagatgcggtcgcgccgcgaattccataagccatgacttggggcaacggctttcatcaataaccaacgagagaatcagcgcatcacgaatcgataaggtctcacgcatgcccaccgcaaacgcggccatcgtctctcggcctaggtcggtgttcccggcatcaagacaagacagccattcgtccaatggttcggccacccagtcggcattagcctgttgcgcgcctcgaagtcgtcgatcattgcgaaattcctgtgatctcgtctccaactcgtcaaagacaaaaggctccgtctgttcggcggcgtgccgtttggcgtgtcggttcttacgcggcttgtgtggcgtgttgttgttcatcatatcctccttgactaatggtgtgcaatctattggtgttgtggtgcgcgccgagccgggtagctcatgcgccgagggggtgtgtgcccactatggctgaaaacgccgtatgacgcaggaaaaaacgaccattgtggttctagcttcaaaacccttgattcccaacgttcttgtgttcttcaaaccctgtggataagttattaggcatgtgcacaactgctaacaaccgcgaaatcatcgagccacgcatcattcagttggtgcgggaactgactgccgcccccgccaccgacgaggttgccgacgccctgaaaccggtgatggaacaggttgtgggccaagccgcctcctccagccaaggaggcaaacgactgcgtgcgttgctcgcattggacgccttcgatattcttgccggcgacgtgactcctgatcggcgtgacgccatgatcgacctagcctgcgccattgaagtgtttcagacggccgcactggtgcatgacgacatcatcgacgaatccgatctgcgccggggcaagccttccgcacaccgtgccttggaacaggccgtacacagcggtgccataggccgtggcttgggcctgatgctcggcgacattctggccaccgcctgcattgaaatcacacgccggtccgccagccgtcttcccaacaccgatgccctgaacgaggcgtttcttaccatgcagcgcgaggtggagatcggccagatactggacttggccgtcgagatgaccccactgtccaatcccgaagctctggcgaacgcctcattgaacgtattccgctggaagacagccagttacaccaccatcgccccactgctgcttgcactgctggccgcaggagagagcccggatcaggccaggcattgcgcgttggccgtaggccggccgctcggactggcgttccaactggccgatgacctgttggatgtcgtcggatcaagccgcaataccgggaaacccgttggcggagacattcgagaaggcaaacgcacagtgctgttggctgatgctctgtctgcggcagatacggaggataaggccgatctgattgccatcttcgaagcggattgtcgcaacgacgaccaggtagcccgcaccattgaactgttcacgtcgaccggtgctcttgatcgatcccgcgagcgcatcgctgccctatggggtgagtcccgtaaggcgattgccggtcttgagctgaattccgaagcgcagcgccgtctgaccgaggcttgtgcgcgattcgtccccgaatccttgcgatagtccacaatgcgagccgccgggtcatgagaccatgaacaccggtgaaaacccgtgaaaactatgcgccgatgctccggccgcgtaaccggggccatgtacactgaacatgtttagtcgtgattaaaggaaccgtacgatacaacatgagtgagaacgagcccgcgcagatgattgagggacgctaccgcatcgtgcgcaatatcgccgagggtggtatggccaccgtgtatgaggccatcgatgagcgtctggggcgcaccgtggcgattaaggtcatgcacacacaactcgccaaaggcccgcatcgggagcagttcgtcgaacggttccgccgcgaggccaattcggccgcgtccatcgccaacccgcacatcgttcaggtgtatgacaccggcgagttcaatggacttgattttctggtcatggaatatgtgcatggcgtcaatctgcggcatgagatgaacgcccaaggcacattctccgtacgtgagacactgcgcgtggtcgcggagacgctggatggtctggcttccgcacatcgcgccggcgtggttcaccgtgacatcaagcccgagaacattttgatcaatgatcgcggccatgtgcagatcactgatttcggtctggccaaggccgccagccaggccacattgagctccaccggcatgctattgggcaccgccgcttatctggctcccgaaatgatcgagaacaatcaggccaccgcgcaaggcgacctgtattcggtgggcatcatggcatgggagatgctgaccggcaaggtgccgttcgattcggataatccggtgacgcttgttttcaagcatgttcatgaggacgtgccgtccgtggccacggtctgtcagggcattgatccgtccgtggcggcgttcatcgcccatctgaccgcgcgtcaggtggatgcccgccccgccgatggcgcggcagcagctgaggaattgagccagttggccgccaaattgccgctggaggcgtggcaataccgtttgcatgccgaacccatcggaggtgatcataccgatgccaccgctgcagcgctggtaggcaatatcgccgagcaggccccgctgaccggcgtacctgccggtgcagcaacgttcaaaccgtccgtaccagcgtttttggccgatgatgtcgcaagcaataccgtcgataccggtggcgccgcagacgtcaatcctccggctcctccggtcgcccccaccacggcacttgattcgtcgacgccagccgatgcttcggctccccataagacgcaaatcatggcacagtccggcagcgagacacaagtgctgcctcaggccggcgatgccttcacccgagcgcttgccctttccgatgagccggacgtcgcttccaacggcaccgggccaaagaagcagcgcagcaaaaaaccgctcatcatcgtactggtgatcgtgctggtactggctgcaatcggcggaaccgccggctggtggtggtttaccggaccgggcagctattggagtgtgcccaagccggatgacgtgacctgcgatgcgaatgcaagcaccgaatgctcgttggccggcgcggattgggccacgtatgagagcacgttgaaggctctcggcatcccctacaagacgcacaaggaatacagcgacgacgtggcggaaggcaagatcatctcttcttccgtgaacaagaccaaggccgttgtgaacagccgcataagcaagcgagccaatcaggagcttacggtggtggtgtccaagggcgtgcggatgaccatcatcccgaaggatattctcgacgcgaattcggccaatggcaaggacccgttgaacgcgctcaagaaggccggcttcgataatgtcaagcatgacgagtcgaaggatgagtattcgatggacacgccgcagggtgtggcattgacgatctcccctgatcccggtaccacggccaagcacaacgatgaggtgacggttactttgagcaagggaccgatgccggtgaccatgcctaacatcgtcggtaagacccaggatgagatgcaagccgcgctcggcgagttgaagctcacggccaatgtcaccgaacagtacgatgacaaggtcgaggccggtcaagtcatttccgcgtctcaggaagccggagcccagctgaagtggggcgatagcgtggacgtggtgatttccaagggtccggagatggcaacgataccgtccggccttgtcggcaaacaggaaagcgccgtaaccaagacacttgaaggtctcgggttcgaggtgaaaaccgacaaggtgctcggtggcctgttcggcacggtacgtaccgtgaaaagtggcgatacggacctatccaacggcggcaagattcgcttgcgcgatgccaacggcaaccccaccgtcatcaccctcaccatcgtgtgagatttgaatgaggctccctctgtcttgagacgagggagcctcatttgttaattacttttcggcttcttcagcggcctgctgggccttgagctcggccttgaccttctgggcgtattcgttcacgaattcctgaccgctcattttctggattgcggtggaaacacgatcggtcagcgaacgcaaatcatcatgtgtaatttcatcagccggcttcttcgcaacctcaatcggcttgccatacaacaccttggtcttgcccttcttgggaatcgacgtgccaatcggctgcagcttgtccgagccgatgatggcggtcggcacaatcgggcaaccggtctcgagcgcaagtcgtgcggcaccggtgtgtcccttgtacagtcgaccgtccgggctgcgcgtgccttcaatgtggataccgaacaggtgcccatcctcgataatctcgcgtgcatgctcgagtgcgccaagcgacttgctgccaccggaacgatcaaccgggaacacgcccacggacgtgaaccaccacttcttgaacttgcccttcaatcccttgccctcgaagtattcggctttgcccatgaagtgcaccatgcgcgggcaggtaatcggaatcaaagcatcgtcaatcaccgccagatggttggctgcgataatcgcgccaccctctcgaggcacgttattcagtccactgacagcagggctcaaacgatgatgagcaatagggccgagacctttgacgaagaaccagtagagcacttggcattcctcccgcagacgaactagccattggccggtcgcctgattagagtgacagttatgactgagaaccagaatagcaatgccgacggagagcggccaacccccacgccgggcaacggacaggattccgatacttcgtccaagtcgtcgactcccggtgccgccggaccggccacgaatggtgccgatacaccgcaatcgcatgacgcgaacgatttggatgcggcgtgggccgcgttcgaagccgagcatcaggccgacttgcatgacgtggcttcctccaggcaggccaaaaagttcgagaagcaggccaagaaacgcgagaaggaagcactgctttccgtagatgacttggatatcggctcgttcaccgatgatgttcgcccgagccgtggcggcaaaaaaggcaagcagtcaggcccccgtgatttcaccggctccagctggctggataccgataatgtgatggacgcctatgatgatggcggcttcactcccccgaaccctgatcttggtccggtcaaagcatctacggtactgctgacggcgttgctcatcatcggtctcgcaggcgaaacggtgatgatattcgttcccggcttgaacgcgattcctctcttaggcgcgctgctcaatattctcttcgggctgggcgtcattttgggtctgggcggattggtggccaaaatcctcaaccgcaaagaccgccccggtgatcagggtggctattacgacgacggcgcgagggtgtagttcgcgtaggttgtgtagtccttggctcccctctctgaggccgagccgttaagcaaacagcccagtgggctgtttgtaggcgaggtgtgagcgatagcgaaccaatgtatcacaggcgtggctcgtccgtaattgcggccgagccaagataggtcacgaattgaagtcgatggactcctgcaactcgaaatagttgataatgaaggaaaggtaaacatattcgagcaaacccattccatatcacgccttggacttggcggtttcgatccacttgttgaacagggcttcagccttgccggagtcgacagcatcctcggccagcttgtaggcctcggcgaagcgctcggccagtgtgccgttgccgaccagattgccgtcagccacgatggcggaggcagcgttgagcagcgcggtggtgcgggacgtaatgtccttgccggccaggaagtccttaaatgcgttggcgttgacgtccggcacgccgcccttgagctggtcgacggtaatcttggcgagacccagatccacggtcgggtcgaactcggtttcggtgaccttgccgtcgcgaatctcccagacggaaaccgggccggtgggggcgagctcatccatgccctcatgcgaagtgtagaccaagccggactgaccacggctggcgtagacggcagccatgatcgggctcaccttgcggttggcgcagccgatggccacgtgtgccgggttggcggggttggtcaacggtcccaggatgttgaagacgcacggaatgccgagcgcggcacgaatcgggcccacgaagcgcatggccgggtggaaggtgcgggcgaacgcgaaggtgatgcccacctcgtcgcccacttcgccgacggcctccggcttcaaatccagcggcaggccgaggtcttcgagcacatcggcggcaccgcacttcgaggatgcagcgcggttgccgtgcttgacgatcttcacgccggctgcagcggcggccacggagcccatggtggacaggttcacggtggcgaagccgtcaccaccggtgcccacgatgtcggtggtcccaccggaaacgttcagcggcacggcgtgggagaccatggccttggcggcaccacgcacctcgtcggcggtcagtcccagctgctgctgcatagcgagcgcggcacccacggcggccggattggcgttaccttgcatcaggtcgtccacgaaccactccgattcctcagcagtaaggtggtctcccccgaccagcttggtgagaatcgacttccatgtgatctcggccatgatgccctccttggcgtttcctacgccgtgtgatgtatgttcgccgctcattgtaatggttcgtcatttcaaggccctgaatcttccatattgcaaaatatggcgctattgctgttttcgtggatgtcggttcgtcgtcgagccgttggtttcgtaagcgtgaggggcgttcccgcgtattctgttttccgaccaaagaaatgaatcacgaagaacgcctgggcaaaagcccattcaccggattgccgaacgtcaaaggcacggttgcagaggatgcgcggatcacggattcgccgccgcgttccgaacccgtgctcgagatccgggtgcgtccacgtgcgggtatgctccgatgctcccgatgcggaaggaggcgccgcgggcatgaccagggcggcggcgtgcggcgtcgtggtcgcttccgtgccgtgggccgagccgggcagccggtccacacgtgatttcgaatcggaacgcgcgtggccgatgagcgtcgcgaaccagaagaccgtaagcggttttccgcacgtcgcgtggcgcgccgccggaagacgccgcccatagggtcgccgaacggttgaaagcgtcgatgccgtctccgttcggcggcctcacgtcgatcggcgtggacgagaccggctaccgcaaaggccacacgtgcatcaccgtggtcgtcggccacgaacggcatcgggcgatataggcgcacgacgggtacggcagggacgtgttcggcctgttcttccaaacgttgacgcccgaacagcgcgcctccatcagggtcgtcgccggggacggggcccggtggatcgactcatgcgtgcatgagtggtgcccgaacgccgaacgcgcgcccgacgggttccacatcgtcagttggacgagcgacgcgcccgacaaagtcaggagacacccgtggaaccaggcgcaccgcgacggggacgagaaatccgtcaagcgcatgcgcggcgtcagatacaccgtcctgaagaaccccggcaagctgaccgacagacggtccgaggcgtccgggaacctgcggtacacggaccccaagggccggccctaccgttc

SEQ ID NO: 1436 - DNA, 12893 bp, Unknown
  R257_15m  MAG No. k141_17801
tccgaaagcagctggaacggctcttcggagccgaccagttccatgttgacgcgcaactgaccacgggtcagcatacgggccacggtcttgagttcggtcatggtgccgagcgtggcatgcaaagcctgatgcccctcaacgcccagcgacttgatctcgtctttggtggcgttcttcagcgatttcgacgtggcgatatggtcggaaatgatttcgatcatattcacatcaggaatgaactcgtccagcaagccttcgagcgtaaccaacgcgcggccgacggtggtcaccgtactgggcacctcgatgttgtggcggccggccatctgcgtcagcgcggtcaggaaggcggcgatgtccagttcggccagatccacggtgccgaattccttgacgatcacgtccagatcggccaatagcgcgggatagtcctccggatcggcctcggtgccggcaaatcgcagcagcccctcggccagagcgggcgaatcctgtttggcgacggcgaaaatcatttctttgaggactgcacgggtgcgctggtcgagccgaccggtcataccgaggtcgataagtacgatctggccgccccggatgaggatattgccgggatgtgggtcggcgtggaagaagccgtcgtcgagaatctgtgtggcgtaattgtcgacgagcttggtgccgatctccttcaagtcataaccggcgtcgatgagctggcccgggtgggagacggagatgccgtcgatgtactccatgaccaccacatgctcggtgcacagttcggcgtacaccgtcgggcagtccatgtatttgaatcgggcggcgaaacgcttgaattcggcgagattgcgggcctcgatcagaaagtcagtctccgattcgaaggtgtcccacagctcctcgaccacgcccttcaggtccacgatctgtgaggtgcgaatcaccttagtggcggccttggctatggagcgcatgatggagacgtcctgggccatgatttcgcgcacacccgggcgctgcactttaatggccacatcttcgccggttttcagcgtggcgcgatgcacttgcgccagtgaagcagagcccaacggcttggggtcgatatgcgcgaacacctcgtcggcgggacgcccgtattcggcggcaagcacatccaacaccgtggaatccggcatcgggtcggcgtcggcgcgcagtttggcgagttcgtcgcagaagctttgcggcagaatctcggagcgcatcgacagaatctggcccactttgacgaacgtggggccgagcgcctcgaacatgaggcgcatcttgaccggagtcaggccgtgcagcacgtcgaattgctcgacgattctggtgatctgccccaatcgtttgatcttgccacggcgcgtcagatggtagcgcgtggcgaaatcgttcctgcgtccgaacagtgccagcgtttcgtcggatacgctcggagtcgccttggtaacggtctgcttgagcgtgtccggcgtgtcgacggaccggttcgccgccgcctcacgttcggctttcgcaggcgtcagaatagggtcgaccctgctggaaagcggggtcgactctgattccggcgtagtgcgtgtgggcttggtcactcggccttgccctcgtcggcgggcttgtcggcggcactggtgtcggctgcggcagcagctttgtcgccggcttcggcggcggccttcttggcgtcatccaccgtctcgctcaccttgcgcttgagctcggtgttcagcgccttgccctgctcgaccgtaatctcacccttcttgacgagttcgtcgacgagctcgctgctcttctcatatccggtggcgagggctccgatgcccgccagcaggaccttgcgcaggccatcacccagaagatcaaaatcagccatgatacccctccttcgaggtccgacatggcctggtgccatgtctcgtaccaccaagcctagcgcaaacaacagggcaatgtactagaccctcagactgatttcgactgatttttcgctgattggtacttaccgaggactcaccgagaattcaccgaggacgttcggcggcagccttgcgcgcgttggtggctacttgatcaagccgggcgagctccttggcttgttcgggggtctgatcggacgtatcgaacgtaccgtaacgacgagtcacggcagtttcgataaggaaatcgctgatggcgggatttttaggcagcaacgagccgtgcatgtaggtgccgatcacgttgtgcacgcgcgcgccctcggtatggtcttcgccattgttgcctcggccgtcctgatcgacggtgccgagtggctgaacgccttcgcgcaggaaggtctggccggagtggttctcgtagccaatcacatcgccgaactggtcggaatgctcaacaagattgccgatcatacgcacgttctggcccacggtataagcaccgataacgccgatgccgtccagacgggtgccgtccacggtttcaaagtactcgccgaacagctggtacaggccgcagatcatcagcatcggcgtaccgtctgcggcaagcgagcgcagcaggtcggcgcgatggtagaagtcgtcgatgattttcttctggccggtgtcttggccgccgcctcccagaataaggtccacctggtcgggccagtcgtcgccttgattgtactggtggacgaccggttcgtaaccgtacagttccagccggcggcggatagtcagcacgttgccggaatcgccgtagatgttcatgtctttgggatacagggacaccacatcgattgttctggccatgtcacgttctccttgtcgatgtcttcccgctaaggggaagtcttattcctcaccatgtcctcctgcaggcgggaggtggcgcgcgggcgctagagggtggttacttgcccacgccagcgtcccgtacttcggtgatgcggcccagtacggcgcgggttttgagcatggcggtgtaggtgcagtagatgtgcttgcgtgtgccgggattggcattgacgaatgcggtgaccgcctgttcgaggtcggtgttcgtatcggcgactggcacttggtcataccccaagcgcaatgccatgtcccaggcgcgcacgccggagaccatggcgacaccggacgcgcgcaaagaggtgaagtccacgtcccatagccagctcatgtcgcggccgtcggcatattcgtcgttgatggcgatcatggtgtccgcgttggccgggtcgaagctggcgagcgagaggcggaagcccatcgggttcttgaccagcagcagttcgaccggggaaccgttgacgtcgatgacctcgccacggccgaaagccggcgtgacgcgggaaacggcggcgatgagctcgtcggcggacacggcgcaggcgttggctgcggcggtggccttggatgcggcggcattgtcttgcatcaccgcacgtaccacggcgagcgcggcggccgcgttgtacaggttgtagacgccttcaagtttgacgtcggtggcgtagtcctggctgtccatctggaaggtggccttgtggtcgcccacggcggtaagtgtcacgtcggcggggagttctgccgtgcctgcggaagctcccctctccgaggggagctgtccgcgaagcggactgaggggagtactgactgaagggagcggcccggtcataccttccaccgacacggtcgtggccatgtcgtcatcggacgggaaatagtggcgcaaatcgtcggcgaggccgaagtatcgcactgtggtgccagccggggccttcgcggcgagcgcggcgatacgcgggtcctcgcggttcagtaccacagtgccggtagtcgccgcagccacatggctgagcagtttggccgtggtgtcgatttcaccgaatcggtcaagctgatcgcgcatcacgttcagcagcaacgcataacggggcttgacctgcttgacgaagtggacggcgtacgcctcatcgagctcgagtacggcgatgtccgcatccaatttgccgccgaaagtgacttcggtgagcagtgcggagaccacgccgcgcacgaagttcgagccggtcggattggtgaacaccttcaatcccagatcggagagcatcgaggcgaccatgcgggtggtggtggtcttgccgttcgtgccggacaccaataccacgccaagcggcaactgcccgagcgtacgggtcaggaagccggggtcaatcttttctacgactttgccgggcaaagccgaaccgccatgtttggtgacgcgggatgcaaaccgcacgaagcggcctgcggccacggtggcgaacgcataccacggtttgcgggtctgcaccacggacgattggtcttgcgaaacatcgcgtgaaacgttgcttgccatcatcacaccccctgattgctgttgtagtcctgcggcatgtccttgaatttggacgtggcaccgaggaaggcgaggtggaaggtttcggtcgggccgttacggtgcttggccatgatgatatcggcctcgccggggcggtcttccttgtcgtagaagtcagggcggtggaccaggaacaccacgtcggcgtcctgttcgattgagccggattcacgcaggtcggagagctgcggcttcttgtcgttacgcatttccgggccacggttcagctgggaaagggccacgaccggcacttcgagttccttggccaagagcttcagggcacgggagaattcggacacctcttgctgacgggattccacggccttgcccgaggtcatcagctgcaggtagtcgatgactacgagtttcagatcgttggtctgcttcagacgacggcatttcgcacggatctccatgaggctcatgttcgggctgtcgtcaatgaacagtggcgcattctgcatcttggtccagaactggttcagggtgttccagcgttcgggggtgatgtcgtcggcgcggcgcagggcggccatcggaatattggtttcggcggagataatacgctgagcgagctccaccttgctcatctccaagctgaagaccacggaagtcatgttgtggtgcaacgcggcggcgcgggcgaagtcgatgccgagcgtggacttacccatggccggacgtcctgcgacgacgaccatctgtccgggctgcaggccctgggtcacgtcgtcgatgtcgcggaatccggtcggcacgcccttgttgacgagaccctgctgcagtttgtccagctggtcgagcgcgtcgtggaccaccgggccgatggcggcatagtcctgacgcaccttgcccatcgacatctcgtagatctcggactgggcgaggttaaccacatcctcagcctgcgatccctcggcggaataaccgagctgggcgattttggtgccggcggcgatcacattgcgcaaaatggcccgctgatggacgatctccgcgtagtacatggcattggcggcggtcggtacggatgcgacgaggctgtgcagatagtccgcgccgccgaccttgtcgaggttgccatccgccaacagctggttggccacgagcaccacgtccaccggctgactggcggaaaacagatcgatgatcgcgttatagatcgtctgatgcttgggctggtagaaatcggtgacgtcaatggtctgcgaaacttcgccgatggcatccttactcatcagcatgccgccgagcacggccatttccgcgtcgtcatcgtgcgggggcactcggtcgaaaatcgggtcgccgaccgccgccgacgtctgcgcgccgccccggcccgcgcggtcgccacgatcgccacgatccgagccactgccgaacccattctgatacgagtgttcacttccttctgccatagccctcaagtataggaggtggcgtggcgagcggaagatatcgcacgactacgttcattaggtcgattcctcactcattaggtcactgtgcttggtaacaccacaaaccatgcgcttggaatggcggcattctgaggcgctcgatcaatatctctcaaagtccaccgacctaatgaatgcacaatcgacctaatgaacgcatgaaagtgcaagtcgtgccgaatcatcgcgcaccaatttcatcgttggttcaccttgcggtcagcgcggcgacacgctgaagcgtcaaatgtggatagaaaaataagttatccacattttggggataattctggggataatccactaagttatccacatactggggataacttggtggatagtctggggataacattccgcgtccacaacaggtgcttgcgcaatgtagtcaggcgtgatatgcgtgtgagcgtgcacatagactcttccgacgccaaagccaccagttccggcgataccacacgccgcgatggcttcggaaccccgcatgccggcgcaaacacaaacaccagcaacggcccgaccgacgcccgctccaccaaccgtcggatcatggcgctggccctgccgaccttcggccagctcatcgccgaaccgaccttcatccttatcgacacagccatcgtcggccatatcggggatgcggcgttggccggcctgtcaatcggctccaccatcatcctcacggcagtcggactatgcatattcctggcctactcgaccactgcgcaggtggcgcatctgctgggagcgggtcgttgtcgcgagggactgcaggcaggcattgacggcctgtggctggccttgagcatcggcaccgtactgggattgggattgttcgcggctgccgagccattatgccgggcactgggcggtcagggcgaagtattggaacaagccgtgacctatacgcgcgcaatcgtgctgggtgcgccaggcatgctgatggtatatgcggcgaacggcattttccgaggattgcagaaggttcgtatcacgctgatcgctgcggtgggcggcgcggtggtgaacacggcgcttgatgtgttgttcgttattgtgctgaattggggcattgccggctccggagtggcgacgctgatagctcagtggttcatggggctgttcctggtaatccccgccattctgtggtcccgggcggacggtgcgagtctgcggcctcgtttggccggtattgcggcagccgggggcgacggactgccattgttcattcgtacattggcgattcgtgcggccatggtggctacggtcgcctgtgccgcgcgcatgggtactgccgtgttggccgggtttcaggccgtgaactcctcttggaattttgcgatgaacatgctggattccgtgggcatcgccggccagacgctggtggccacaacgctgggcgctggcagcgtgcagcaggcgcggcggttgacgcgggcgaccgggcgtgcggggctggtcaccggcgcggtaatcggcacggcttttgcggtagtcggcctgttcgccgggcacttcttctcccctacgccaaatattcagacgttgattgccgttggcatggtgacgatgggcatcttcttcccactgcaaggctggatgatggcaatcgacggcattcttatcggcgcgcgcgactaccgctatctggcaggcacctgcacgctgaccgccgtggtgtatgtgacgctcatactcatactggccaatatggtgacgccggcgctgacgagcgacctgatgcgtaccgccgtgctctgggccgcgttcaacgtggtgctcatgggcgggcgcagcctgtccaacgggctgcgcgtgcgctcggacgcatggatgaagtaggtatcggccgcgcgaagtgctgggcgattccgtttacatcgcggcgcgagcggcggaatacatgccgcgcacgatttgttcgcgccacttggaccagccgtattgcttggtgatggtctcaccggcggtggcaccgagcgaggagccgtcggcccgggtcaggtcgaacagcatatccaacagcatcttgtcgtggtgcaagcggtcggccaactcctccgccacggccggatcataggggtccttacccgtggcaaattcggatagggtcaaatgctcacgcaccagcacggtggcccagtcgacgatgtccggcgcgtagcccatacgcttgagaatcaccggcacatggcgggcaccctcggcggcgtgatcggccacgaacgcgcgcttgccgatgtcatgggtaataccggccaacagcaacgccttgaaatgatcgtcatcataccgtcccccggacggtgtctcacgacccagacgcgacgtgacctccaccatatgccgatcgatggtgtaccggtgggcggccgaggcggacggacggttgcggacgccgagccattccggcatccatcgacccggaatgtccacgaagtcgatgctctcccacacttccataagattcggcccgcatgcaagcagacgaataaacagctcgcgcgattcgtcatcccactggttgtcgtgaatcgggcagtgcttcagattaaccaaggtagacggattgatgggcaaaccgaattcgccggccgccacggccatacgcaacgccagcttggcatccttggcaggctcggcaccgggtgccaacaccaattcgccttcgtgcttggccacgccgggagccaccacgtcgaattgcggggcttcacgcttgccgccagagcgctgagagaacatctggaagaacgcgaatcgcggcttttcgtgggtcagcgaatgtccagcgcgggatgcggtggaatcaagcgagaaggagatgcgccggccgatacgggcaagcagcgtctgcaaatcgtcgatcgagtaggcggcacgctcgttttcgggccaagtcggatcggcaaggccaagcatggcagccactttggcctgatagggcgtcagcatcaggttggtatccttgccggccaccagatggatgcagtcgcgtacgtcgagcagacgttccacggcttcgtcgtagatgccgtgcgggcggtcggccagccatgagacggcgagcgcggagacgagcaccgaatcgcgcaaacccccacgggtctccttgatgtcgggctgattgacgtattggaggcggccgaattcgtcgagtcgggctttggcagagtcgagcagttcgggcaggcgcttgcgggcggccttgcgccagcgttcgaggatggatgtggcggtggtggtaatcagagcagtgtcgccggcgatgggcttcacgtccagccagcccatggcggcgggaaggtcatggtcggtgacttcctcgcattgggcgcgcgtgcggatggagtggtcgaggtccagaccgctgtcccatagcgggtaccagagtttgttggccaactcgttgagctgctggtcgttcaacgtgcgaggctcgtagatgatgaccaagtcgaggtcggagctggggcccagttgaccacgtgccagcgagcctaccgcggcgaagccgatgccggagtcgggcacggggaaagagacatccttgcaggccgcattccacagctccgtgaggcattgcatggccagttccgtgcgggctttacgcttggtcgcaccattccggtagacaccatcgtcatccggctggctcatatccatgaatcgttgtttcaagccatctactgctgaagtcattgcttcatctttcattgccaaaaaggtccccgcacggcgtcaattcgcggcgtgcggggacctttcctatgcagtccatccccttctaggcatggacgtctgtgttatcagatcgcggcggaaccggtctcaccggtacgcacgcgggccacggagtccagcggagcgacccacaccttgccgtcaccgatggtgccggtgccggcggacttgatgatcacaccgaccagcgtctcggcatccgcgtcatcggacagcacttcaacgcgaatcttcggaatcaggtccacggtgtactcagcgccacggtagacctcggtgtggccgcgctgacggccgtagccgttggcctcggacacggtcagaccgtgcactccggcggccgcgagggcctccttgacgtcgtcgagcttatggggctggatgatagcggtgatgagcttcatctcacctcacctccttgagaacagagctggcagtaccagcaaaatcgtaagcacgttcgccctggtcggcaagatcgatgccgccgacttcctgagcttcggtgacgcgccaaccgatggtcttctccagagcgaaggcgatgatcgcggtgatcaccgcggagtagaggatggcgacgagagcgatgaccagctgaacgacgagctgcttccagtcgccgccagccagcaggccggtgccttcgccgaagaagccgacgaggacagtaccggtgaaaccaccaacgccatgcacgccgacgacgtcgagggagtcatcgtagccgaacttgaacttgagaccgcaggccaggcaggtcagaacaccagcgatggcgcccatcacgatggcccacagcggggaaaccacatcggcggccggggtgatggcaaccagaccggcgaccatacccgaggcggcacccatagcggtgtagtggccggagcgaatcttctcggtgaagccccaggagagcatggcagcggcagtggcggcggaagtggagacccaagcgtcgccagcggtgccgttggcggcgaaggcggaaccggcgttgaagccgaaccagccgaaccacagcaggaaggcaccgagcatcacgaacggcacgttgtgcggacggaacggctgagtgccgaagcccttacgcttgccgatgatgagcacgataatcagggcggcgactgcggcgttgatgtgcaccacggtaccacctgcgaaatcgtgggcggccgcgccgatggccttggagatggcgccgtcagcagacagcagaccaccgttccagaccatgtgggccataggagcgtagtcgaaggtaacccacagcgccacgaagatcatccaggtgctgtacttcacacgctcggcgatggcgccgcagatcaggccgacggtaatcatcgcgaaagcgacctggaaggcaacgtccacggaaaccgggtagttgttgtcgttcagaccggtggcggtgaacacgccgtcctgcgcgaccatggaatccttgagcaggaagccgctggccgggtcgccgaaaataccgccgatgtcggaaccggcgtatgcgatggaccaaccccacaaagtccaaataatcatggtgaccgacagcgcggccgcctcaagcatcagcatgttcagaacggccttggcacgaaccataccgccgtagaagaacgccacaccaggcgtcatgaggaaaaccaaggacgcggatgtcaggatccatgcggtgttaccggaatcaatcgctcccatgtctacctccctctctttcgttcagggcaccgggggctttgtgcggccggcgtcttatttgtctctacaatgccgtcccccttatgggggctaacagtttgtcagttaaagccggccgcgttttggtttcgttacgccaagttacgcgattgttaagcgtggctggaagcgtacgtgcgaccactcgaggaaattttggcgcgattccaacggatatgacgaagccccgaccatgtttcgagcatgattcggggcttggtttataggtaagtcgcgcgttttgcgctctcacaacgtggacgttggcttacgcgagaatgccgtccacgaaaccttcaggatcgaaaggtgccaaatcgtccgggccttcgccaagaccgacgagcttgaccggcacgccgagctccttctgcacgctgatcacgatgccgcccttggcggaaccgtcaagcttggagagcaccacaccggtaatgccgatggcttcggcgaacaccttggcctgggccatgccgttttggccggtggtggcgtcgagcacgagcagcacctcgtccaccggcaggttcttttcggtgacgcggcgaatcttgccgagctcgtccatcaggttcgacttgttctgcagtcggccggcggtgtcgatgatgagcacgtccgcgttcgcttccttggccttggcggatgcctcgaaggcgacggatgccgggtcggcaccgtccttgtcggaacgcacgaccggaacgccgaccttggcgccccatgtttccaactggtcggcggccgccgcgcggaaggtatcggcggcgcccagcatgacctgcttgccttcggaaacaagcaggcgggaaagcttgcccgcggtggtggttttgccggtgccgttcacaccgaccatgatgacgacgctcggcttgttcgcgccgtccttgtcggcgttgagccggcggtcgatgtcagtgccgacgagcttgagcagtttgtctttcagcgccgcgcgcacttcggccggatcggactggcctgcgattcgggcgtcgttgcgtagttcctcgacgagctgttcgctggcttccgcgccaacatcggcgagcagaagggtgtcttcgacgtcttcccaatcggcttcggagagctgatccttcgcaagaatgttgaacagggccttgccgaacggattgccggatttcgacagccgcgccttaagacgctgcatgcgtgtgccggcggattcgggggtgtcatgaaccggttcgggcttggcttcggtggctggtgcaggagctgccgtttcggaagaggaagcttgagccgaggacttctgctgactttcagccggagctttttcagctgcatcaacattggaatcaacggacggcttcaccgtggaagaatcagccgcagccaactttgcttccgcagcaagacgggagtcagccttggctttcgcatcctccgtggacttatcgacggcgttcttgcgggtcttaccgagccaccaaccgccaatcaccagaattgccgcgataacgacaacggcgacaatcgcaa

SEQ ID NO: 1437 - DNA, 12341 bp, Unknown
  R257_15m  MAG No. k141_17864
acggtgattacggcaacgcctatgccgccggccagtgcacgtactgggcgtatgaacgccgtaggcagatgggcattggcacgccgtcctatctcggcaatggcggcgactggtggcgcaacgccccctcgtacggcttgcgcgtggaccacaaccctcaggtcggtgcggcgctctccttcctgcctggtcaggatggtgccgacggtacctatggccatgttgccgtagtcgaagccgtgtatggcgacggcacattccagatctccgaaatgaactggggtggtccgtggaacatgcacaaccgcaccttgaccaatttgggtcagtactggttcgtccactgaccggttggttcggccgatatatgcggttgaagggttcctcttgaagaggaacccttttcgtattcgaggccggtccgtgatatcgtcggatgttgcgttgctacccacgagttgctactcacgagttgctactcacgagttattgcccacgaaaggaggagacatgcccaaggaaaccggtgagaaactcatcgtccagaacaagaaggcccggcatgactatgccatcgaagacaagtacgaggcagggctggccctgaccggcaccgaggtcaagtcgttgcgcgaaggccgcgcatcgctgtccgaggcgttcatctccatcgaccgccgtggcgagatgtggctggagggcgcgaacatccccgaatacctgaacggcacatggaacaaccatgcgcccaagcgcaagcgcaaactgctgctgcaccgactgcagatcaccaagctcgcccgcggcatcgaagccaagggatacacgattgtgccgctgagcctgtacttcaaggacggtcgcgtcaaggcggagatcgcgctggcccgaggcaagaaggaattcgacaagcgccaggccctgcgcgaagagcaggacaagcgcgaagccctacgcgccatgcgctacgccaacatgcgccactagtcccgcctcttggctcccctccggaggggagccaagagtaggatgtccgcgttgtgggccatttcgcccacgattaacgcttccgtagcattgcactcctacgctctggaaccatctgggaaacatacccgcccagctgactatccggagagaggaaatccaatgtctctaagcaagggaatacaatccgctgcggccgccgccctgagcgcggccatgctgatcgccgtggcggcctgtggcacgactgacagcaccgacaccgcatccaagagcggcgattcatccaaggactcgtccagcacttcgattcaaggcttcgacaccagcagcatccagaaggacgacgagattgccgcactgctgcccgattccgtggccggcgacggcacgctgaccgtcggcgccgatacttcctatgccccggccgagttcctggccgaggacggcaagaccccggtcggctttgatgtcgacctgtccaaggcgctggccgcagtgttcggactgaaggaaaacaccgtctcctccacgttcgattcgattatcccgtccgtcggctccaagtacgacatcggcatctcctccttcaccgtgaccaaggaacgcatggaggctgtggacttcgtgacctacttcaaggccggttccacgttcgtggtgcagaagggcaacccgaacaaggtcgactcctcgaacctgtgcggcgtgaaggtggctgtgcagaccggtaccacccaggaagaggaagtcaacaaggataacgagcagtgcaaggcggacggtaaggatgccatcgacatccagtcctccaagctgcagaccgatgtgactaccgccgtggcttccggtaaggctgatatcttctacgccgatacgccggttgccggctacgccatcaagcagaccggtgatacgctcgaggccctcggcgaggacgttggtgtgacccctgaggccgtggccgtcaagaagggcgattccaagaccgccgaggccgtacagaaggccatccagaagctgatggatgatggcacgtacaagaagatcctcgacacgtggggcgtctcttccggcaccgtcgacaaggccgagatcaacccgtccgtcgagtagtttcggttactatgaagactcccgttgccctgcggcgggagtctttttgtatatgtatgcactgtagtgtataaatatgcttaaccgttgatcgttgccgcataagcggcgcaagagagaagaagagacgattatgcagtccaccaaactgaagtccattatggccattgcactgagctcggccatgctgctcgccaccgccgcttgcggcacctccgacaaggccgatgccggtacggattccgccaagggctccgatgccgccaccatcaccagctacgatgtcagctccgtggagaaggatgacaccatcgccgcactgctgcctgaatccgtgaccaaggacggcaagctcaccatcggcaccaacccctcctacgccccggccgaattcctcgacgccgacggcaagacccagatcggctacgacatggatctcgcccgcgccatgggcaacatcttcggtctcgagaccgaaatcgtctcctccaacttcgatacgatcattccggccatcggctccaagtacgatctgggcatcgccgccttcaccatcaccaaggagcgcatggaatccgtcgacttcgtctcctacttcaccgcaggcatgggctatgcagtggccacaggcaaccccaagaacgtcgatgagaacgacctgtgcggtctgaacgttgccgtcgagaccggcaccgtcgaggaagaggccatcaacaagaccgccaagcagtgcaaggcggacggcaagaaagacatcaccatccagtcctccaagcagcagaccgacgccaccaccgctgtggtgaccggcaaggccgacgtcttcttcgccgattccccggttgtcggctacgccatcgcccagaccgatggtcagctggaacagctcggcaaggacttcgatgaagtgccgaacgccatcgccatcaagaagggcgattcccagaccgccgaagccgtgcagaaggccatgcaaaagctcatggacgacggcacctacactaagatcctccagcactggggcgtcgaatccggcgcactggacaaggccgaaatcaacccggccgtcgaatagtcgacaagctgtcgcgaaaattcgaatggggcgcactgtttgtaacacagtcgccccattcgtgcactaaggttcaacgctagttgcaacttgcagttcaggctgcctaacacatccaaggaaccagattatggcgaagaaagaagtcgacggtgaggggctgaacatccccaaccgcatcaaggcgttgccggtcaagcgccccggcccgattgtggccgcagtgatcgtggtactgctcgccgcgatgctcattcaaggcttgattaccaatccgcgactggattggcccaccgtctggaagtacctgttcaacgagaacgtgcttgaaggcattcgctataccttggagcttaccgtgatctccatggtcgtggcgatcatcctgtcggtgattcttgccatcatgcgcaaatccatcaatccggtgctgcgcggcgtcagctggttcttcatctggttcttccgcggcacgcctgtgtacacgcagctcattttctggggtctgttcgccgtgctgattcctaagatcagcctcggcattccgttcacctcggtggagttctggagcatcgactccaacgtggtggtcaccgcattcaacgccgcatggattggtctggccctgaacgaggccgcctacctgtccgaaatcgtgcgtgccggccttgaagccgtggaccccggccagaccgaggcggccaaggcattgggcatgaaccgcacgctcatcatgcgccgcatcgtgctgccgcaggccatgcgcatcatcatcccgcccaccggcaacgagaccatcggcatgctgaagaccacctcgctggtcaccgccgtgccgttcaccctcgaactgcagttcgccaccaacgccatcgccaaccgtatctacaagccgattccgctgcttctcgtggcctgcttctggtacctgctgattacctccatccttatggtgtgccagtcccgccttgaagcgcacttcggcaagggcttcgatgcccgaccggtgggcaccaagggcaagcagacgccattgccgggtaagaccgacggtgaaccgaaggatgacgtggacaagctcaaccagaccacatttgtcggattgaatgcataaggcgggagcgcgattatgactacgaatgacatcaccagtgttgccccggtcgtgcgcaaggcggctgacggttccgtgattcctgccgtcgaggccgtgcaggtgcacaaggcgtttgggccgctgcatgtgctcaagggcatcgatctaaccgttatgcccggtactgtgaccgtgattctggggccctccggttccggcaagtccacgttcctgcgtctgatcaaccagctggaaaccctgaccggcggttccatcgaggtggacggcgaactcatcggctacaagcacgtgaccaaaaacggccaggacatgctgcagaccttggacgataaggagatcgccgcacagcgctctcgcctcggcatggtgttccagcgcttcaacctgttcccgcacatgaccgcgctggagaacgtgatggaagccccgatccacgtgcagcaccagtccaagaaagccgcccgtgacctggccgtggccgagcttcagcgcgtcggtctgggcgatcgcatggactattacccctcccagctgtcgggtggtcagcagcagcgcgtggccattgcccgtgctctggccatgaagccggagatcatgctcttcgatgagccgacctccgcccttgaccccgaactggtgggcgaagtgctcaacgtcatgcgttccttggccaaggaaggcatgaccatggtgtgcgtgacccacgaaatcggcttcgcccgcgaagtcgccgaccagatcgtgttcatggacggcggcgtagtcgtagaaaagggcggccccgacatcatcgaccaccccaccgagcctaggtttaaggacttcctacagcatgtgctgtaggaaggctgttatattacctcagcactgtcgtgcttcggcgtcgcctacggggagcccactgggctccccgctttacgactccgcctacagcacgtgctgtaggaaggctcgttgttgcagctccaaaagcgtacgctgatgaactcagcgtacgcttttcacgaaggggcatgttccaatcctgcaaaggcggcgggttggattcgctttgcgcaataatcgtccgctaggctggtgagccatgtgtggaatcgttggatacgcgggaaatattgaaacggcatgcggcaagcctttggaggtctgcctgcaaggcctggaacgtctggaataccgaggctatgactcggccggtgtggcgctgaccgcgcccggcatggataaggtggtcgtgcgcaagaaggccggccgtttgaagaacctggtcgaagacatcgagcgcaagccgatgccgctcgccacggtgggcatcggccacacgcgctgggccaccaatggcgagccgagtgacgtgaatgcccacccgcacaccagtatggacggcaaggtggccatcatccataacggcatcatcgaaaacgcctctcagctgcgtttcgacctgcaagccgaaggctaccgattcgcctccgccaccgacactgaggtggccgctaagctgctcggcaagatcgtggacaagattatcgcggacgaaggcaagccagacttgttcaaggctgtgcgccgtatggcccgcatgcttgaaggcgcgttcaccattctggccaccgactgccgccagccggacatcgtggtcggagcccgccatgattcgccactggtcgtgggccttggcgagggggagaacttcctcggttccgacgtcgccgcattcgtggcctacaccaagcgcgccatggaagtcgaccaggatcaggccgtatgcgtgtccgctgacaaggtcatcgtcgccgatttcaacggcaacgtggtcgaaaacccgaagacctacaccgtggattgggatgcttcggccgccgaaaagggcggctgggattcctttatggacaaggagattcacgaagaccctgccgcagtgcagcgcaccctgcttggccgcttcgacacgaatggcgacatcacccttgatgaagtgcgtatcgacgaacacgacttcaaggccatcgacaaaatcatcgtcgtggcctgtggcaccgccagctacgccggccaggtagccaaatacgccatcgaacactgggtgcgtatccccgtggaaatcgaactcgcgcacgaattccgttaccgtgacccgattctgaccccgcgtacgctcgtggtggccatttctcagtccggcgaaaccatggatacgctgatggccctgcgccacgcgcgcgaacaggggtccaaggtgctggccatctgcaacacgcagggtgcctccattccgcgcgaatccgacgccgtgctctacacacacgccggcccggaagttgccgtggcatccaccaaggcgttcgtggcgcagattaccgccgcctacctgctgggcctgtatctggcgcaggtcaagggcgcgatgttccgcgatgagattcatcagatgctcgactccctgaaagacatgccgcgcaagattcagtgggtgctcgacacccagcccaagaccatccaggcggccgccgagcgcatggtgaacgccaactccttcttgttcctcggccgccacgtgggctacccggtggcgcttgagggcgcgttgaagctcaaggaaatcgcctacacgttcaccgagggcttcgcggccggcgagctcaagcatggaccgatcgcgctggtggacgagggtgagcccgtggtgttcatcgtgccgccgcagcgcggccgcaatgtgttgcacgccaaggtgatctctggtatcgaggaggtcaaggctcgtggcgcgtacatcatcgccgtggccgagcagggcgacccggatgtggaacggtacgctgacgtggtgttctggcgccccgcctgcccaacgctgatgagcccgctggttgacgtggtgccgctgcagctgttcgccatggacatggcaaagctcaagggctacgacgtggacaagccccgcaacctcgccaagtccgtgaccgttgagtaagccacatcggtatgtgattgacgagcctcatattccgtttgagatggacgtgctgtatgaggacgagcggatcatcgtggtggacaagccgcattttctggccaccatgccacgcggcatgtggtatcggcagaccgcgctgatccgattgcgtgagcggctgggggagccggacatcacgccagcgcaccgattggaccgcatgaccgccggcgtattggtgttcgtgcgggattcggcctgccgcggcgcgtatcagatgctgttccagaaccggcaggccgtcaagatctatgaatgcctggcaccctgccggccgatcagcggcccgcgattcggcacgatcatgcaggtcgaaccgccacgcccgttcccattgctgcgccgatcgcacatcaccaaggaacacggcacgatggccgcattcgaggaaccgggtttggccaacgccgaaaccctcatcgagcgcgacgacctctgtttccctcccgctggcgggaggtggcgcgaagcgccggagggtggtccccatccgggaaatcaccccatctgccgctacacactccacccgcgcaccggcaaaacccaccaattgcgcgtccacatgaattcgctcggcctgcccatcgtgggcgacgacttctacccgcgcatccagacacgcccctacgacgatttcagccagccgctgcaattagtggcgcgtgtgctacgattcaccgatccaataacaggcgagaagcgcgaattcgtttcccgtgtgccgcttaagatctgatttcttagggggatggcgagaccaatccccgcccgtccgaatcactgtccctttcgactggccatccagctcattgcatcgtcgtacaccatcatgatgcgcttgcgatagctatcgatgaattcctgcgcaccaatgctcgcgataacgtcgtgagcgggttgcacggtgctgtcgaatgcctccggcagcctatccaccaaggtgtggaatcgtaaaatcacggattcctcatctaatcccatccgctgtgcgaatcgttccagatgtttgcggcgtaattgaagaagatctcggcgtccgccgatgttcatcgccaaagtggcatttatgatctgcttgccatgccccaaataagggaacaccgaagcaaggtcatagagcggggcaagccgcacggacgcgccatcgagcaatagcgagtagttcttggcgtggctgtctgttgccccgacgagataactggcgaggatgccgtcggtgaaggctcggatattgctttcggcctgaccgggcagaccgtgcttgcgcaacatttccgcatatgcattggacgttgggccgttgtgttcctcgtatttcagcgatgagggaatgcccagcgcttgggtaaagtcttcttggtgcagggccgtcaccgtaccattggcggacactatacggtcataccgctcgctgatgatggctgggaccccatcaaagatgtgaaaagaggtgtgggccacgggtattcccatcgcctccacaatgcgcatggtgatgtgttcgttgaatgcttggtgtgaaagggtcggtatgccgggcttgatgatatgagtcgtccgcgcgattccagtggtggagaaccatgatccattgcggttcctcagtgcgatcttgccctgctgtcccgcgaccgaccaatgctcgtctacgcttgcggactggatgcctgtgggggcggctgcgcgtagtcgattcgcgatctgcgaatcgctgattggaataagcgaatcgtcatctatgggcaagtgcgggtcggcggacagccgtaatgcgccggtggcatcgaatccgatggcttgcaacagatcaaatgcgcttgtcgatcgggcatgatgcaatcgcatggcttcatctcgggcctgaggggattccgggaccagggcctcaaggaaattacgcgggatgtcgcctgaatattcggctgcggtaatgggcatggaaagcgatattggtgtgggtgattgcgaccaacgataggaatcgtgatattggaaaataatgctgccatcgtttgttcttcgaaactggccgatgggtgtttcgccgagaaatgcattgagagtgttttcgctcatggtgtcaccattcatagagttcggcgggctgcggggttttgcggacatccagcgacaagccaagctcagtcagagcgctgagaatggtggagaatccgggattggggactcgggcgtgttcaaattcgatcagccagcgacgtgacacgcccagccgttgggccatgtcggtctgactgatgccctggcgttgcctttcatccttgataagccgcgcgtattcggcgatatccatgacaatcatgtgcaaaatatatcacagtatagtaaagtgtgcaatattctgcacatagttggaaatgtgcagaatattgcacaaccgagtcgattggtcggtgcggaattgcctatggatcactggcaggtgaatcactgacaggtaccagtggatgccagcacatggctcgtcagctgatgtcgcgcacggaaccgcgttcgatcagttccggcgggattacggttttgacgccgaccggtatcttctcgccttcgcattgacggcggaccatggagaaggcggtggcgccaatgtcgtcaaagcgcagcttcatggtcgtcaggttcaagcgcggaaccatatctaccagcgaatcatcgacgcccacgatgctgacatcctcgggcacgcgcttgcccgctgactgcaacccgagcattgcgccgtatgccatttggtcgttggcggcgtagatggccgtgcagtcggggtcgtgggccaacgccacgccggcctggtagcctgaatccgcgcaccaatcgccgatgtacatgctcggtacgcgtgctcccatttgttccaacgcttctcgccaaccgcgggcgcggctttcggcggcgcgcgaggtggacggtccggcaatgtggtagacggtcttgtgccccttgttcatcaggtaatcgacgatagcggtcgagcagccatactggtcggcgtcaacggtggggcagtggtcggcggcggattcgcagatgagcacgactggaagttctcgcggaggcttgtatccgacgaaatcggagatgcgttcctccagcactacgatgacaccatccaccggctgacgctgcatgcgatcgatggcggcggaaagcgtgcgttccgcaccgtggcgcatggtctggatggtgactgaataatcgtcatcggccgcgttggccacaatagaatcaaggatgcgggcgttgccgaacgcggtggtgttgaacatcaccacgccgatatcctggaagcggccgtgctttagggctcgggccgcataattcggacgatacccaaggcgtttcattgcagcttcgacacgctggcgtgtttcgggtttcaccgcatcgctgccattcgccacgcgggacactgtctgtggcgaaacgccggcggctttcgctatgtcttgcatggacacctgtgttggtctcgacatttcaccctcgcttgactcattaatgtcggtgtttcgtttacaacgcttatcttagggacgcttacggtaacgataacatcgttgtcttcgtgaccattgtagcagagtgactgagaaacccttaattcaacacggtactcaacacgattggacaatgttacaaatggtgttatgatgataacgcaaacattttggtcaaccttcgaaggagaggggttgggaatggcttcagccgatatcgcagctgcgcccgtgcattcgggcaaggctcgtgtgaataagcacaaggccgattggcgtggatggaaattcatgtggccttttgcggtggtgttcgtgttcgtgttcatcgtgccgatcgtgtacgccgtttatatttcgttcttcaagaagcagatgatcggcggcaccaagttcgtcggcttcgagaactatgcgcgcctgttgggtgatggccagttctggagcagtgttggtcgtgtggccctgttcacgtgcgtgcaggtgccgatcatgctgtgcctgtcggctttgatggccctggcgttggattcgatgaagctgcatggcacgaggttcttccgtatctcgacgttcctgccctacgcggtgccggcggtggtgtcgacgttgatctggggtttcgtgtatggcgcgaagtacggcctggtgggttcgttgaacgatttcctgggcacggacatcgacgtgctcgcccccagcgtgttgttggccagtatcgggaacatcgtgacgacggcgttgttcacgatcgtggcgacgtggaacaactacttcctgccgttgatcatgctcaaggacgcggactggtacccgctgaccatcggcctgaaccagtggaaggaccaggcctcgaccgcgggcggccaggcgatccagaacctggtgatcacgggctccctgatcacgatcatccccctggtgatcgcgttcctgtgcctgcagaagtactggcagtccggactcgccgcaggcgccgtcaaggagtgatggagtcggctccgccgacgcggtgtcttcaccgcctcgcggcggggtccctccctccgtcccggctccgccgagacaaccttcctcatcagagggaggtaaaatagtgccaagccccccccctctgacgagctgagccgttaggcaaacagccctgtgggctgtttattcccgcggacgcagattatcgataaaattcaataaaggagctgaatcatcatggaacgtaaagagttcaagtggccgcagccgcttgcgggcaacaagccccgcatctggtacggcggcgattacaaccccgaccaatggcctgaggaagtgtgggacgaagatgtagccctcatgcagcaggccggcgtcaacctcgtctccgtagccatattctcctgggccaagcttgagcccgaagaaggcgtgtacgacttcgattggctcgaccgcgtcatcgacaagcttggtaaggccggcatcgccgtcgatctcgcctccggcaccgcatccccgccgatgtggatgacccag

SEQ ID NO: 1438 - DNA, 6964 bp, Unknown
  R257_15m  MAG No. k141_18372
catcgtcaagaagatccaatccgagctgcccgaaggcgcatggatcgcacgctcctgcgccaccggttacggcgaaggcctcatcaccaccggcctgcacctggacgagggcgtggtggagaccatggcccactatcgtggtgccgaaatggtcagccccggcgtcaccgccgtcatcgacatcggcggccaggacatgaaatatctggccatcaccgacggcgtcatcgactcgatcgccgtcaacgaagcctgctcgtccggctgcggctcgttcctgcagaccttcgccatgtccatgggcctgacgattcaggaattcacccaaaaggctctggcttccacccatccggtggacctcggttcgcgctgcaccgtgttcatgaactcctcggtcaagcaggcgcagaaggaaggcgcgtccatcgaggacatcgccgcagggctgtgctactccgtggtgcgtaacgccttgtacaaggtcatcaagctgcgtgattccggcgaactcggcgacactgtggtggtccagggcggtacgttcctcaacgacgccgtgctgcgcgccttcgagctgctcaccgaacgtcaggtcacccgcccgaacatcgccggcctcatgggcgcgtttggcgccgccctgaccgcccgcatgcactatcaggatgaggccgaccacttggacgtggtggttaaggccgatgggtccgaggaacagtccgaggctgagcccgcacccaagtccgagcccaaggccgcagccttcaagaagaccgagacggccaagcccgaagcccatgtcgttgtcgtggacggtgtgacccacaccgccagctccattctgaccggcgaagcgctcgacaacatgagcatgaccgccgagcgtgacgtgtgcaagctgtgccagaatcactgcaagctcaccatcaccacattctccgacggctcgcgcttcgtgaccggcaaccgctgcgaacgcggcggcgacgccaagaagaagcgttccgaccgtccgaacctgtacgactacaagtacaagcgttgcttcgcctaccgccgtttgaccgacaagaaggccactcgtggcgagatcggcattccgcgcgccctcaatatgtacgagaactacccgttctggttcacgctgctcaccacgctgggcttcaaggtgatgatctccggccgcagctcccacgagctgttcgagaccggcatcgaatccatcgcctccgaaaacatctgctatccggccaagctggtgcatggccatatcaagtggctgatcaacaagggcatcaagaccatcttctacccgtgcgtgagctacgaggagaacctcgtgcccaacacggacaatcattacaactgcccggttgtggccaactatccgctcgtcgtcggcgccaacgttcctgagctgcgtgaggacggcgtgcgctacatgcacccgtacttcaacctcgccaaccacgagctcatggtcgaccgcatcctcgaagagttcgcctgggccaacgtgacccgcgaagaggctgaaaccgcagtcaaggccgcatacgccgaagacaaggtcttcaagcacgacgtgcagcaggagggcctgaccgcgctcgcctacatgaaggagcacaactgccgcggcatcgtgctcgccggccgcccctaccacatcgaccccgaaatcaaccacggcatccccgaaaccatctgctcgctgggcatggtggtgctctccgaggattccatctgcgaactgcagccgggggagaagctcaacctcaccgaattccgctcggaaggcgaagccgacccgcgctccaagaacgccgccggattccgccacgtgggagaccgcacagtcaccaagatgccgttgcgcgtcaccaaccagtgggcctaccactcccgtctgtacgcggccgcacacttcgtggcctcctacccgggcctcgaactcgtgcagctcaattccttcggctgtggccttgacgccatcaccaccgatcaggtggccgaaatcctggcagacaaggcggacgtgtacacgctgctgaagattgacgaggtctccaacctgggtgccgccaagattcgactgcgctcgctcaaggccgccgtcgaggaacgcgaagccaacaaggcccgcgaagccgccgcggccaaggccgtgcaaggccccaagtccgccggattccgcaagaccggctccaccgcgccaacccccggccgccagattctgcttgacagcaccatggccgccaacccgaagctcaccaaggccatgcgcgccgcctccaagcgtgccgccgaacgcgacctgcaggccgcagtcgccagcaagaacggcacttcggacggcaccaccggcgtggcgaacgccaagaatgccaagaagtccggccacaacaacgccaccatgtcccgctacgctcatcgtgagaagttcgtcaaggacatgaagaagaactatacgattgttggccctcagatgagcccgattcacatgtccttggtcgaagcggtgattcgttccggtgggtacaagttcgacatcctgaagcacgcgagccgtggcgatgtggaaaccggcctcaaatacgtgaacaacgacgcctgctacccggccatcatggtcgtcggccagctcatcgacgcgattctggaaggcgaatacgatcccgaccatgtagcgctcgccatcacccagaccggcggcatgtgccgtgcgaccaactacttcggcctgatccgcaaggccttggtcgatgccggttacccacagattccggtcatcgccatttctacccagggcctcgaagacaaccccggcttcaaggccaccctgcccctgctgcaccgtgccatcaaggcgctgattctgggcgacttgctcatgaagtgcctctaccgcgtacgcccgtatgaggtggagaaaggttcggccaacaagctgtacgagctgtgggacaccatcgtgcgtgagaccatcgagcatcacggctattccaagaccgcagccaagacgccgagcatcaagaagggctatctgccgtataacgtgctggccaaggagatcgtgaagtccttcgacaatctgccgctgcgcgacatcccgcgcaaggtgcgtgtcggcgtggtcggcgagattcttgtcaagtaccagccggacgcgaacaaccacgtggtcgacgtcatcgaatcccaggattgcgaggccgtggtgcccggcatcatggaattcatgaccacccgtccctacatcaccgactggaacgagaagaacctcggcatgggcggcaacaagacggtttacgccctgatgcgcaagggcctcgacctgtacaacgcgccgatcaaggccgcgctggccacatcgaacggcaagttcaagcaggacgagccgatgcccgaactggtcaagaaggctgctgaagtcacctccatcggcgtgcaggccggtgaaggctggctgctgacggccgagattctggaactcatcgaacagggttgcccgaacgtgatctgcgcgcagccgttcgcctgcctgcccaaccatgtgaccggccgcggcatgttcggcaagatccgccgcctgcatccggaagccaacatcgtctccatcgattacgatccgggtgcctccgaggccaatcagctcaaccgtatcaagctgatgatcgccgctgccaagaaggcccacaacgccaagttcgccgaggccggcgagccgcagggcttcacctccgcggactgatttatgctctggctcgtccgcaattaaggacgagcttcgctcgcgacatgctggttcgcctatcggctcaccctcgcctacggacagcccactgggctgtccgctttacggctcggcctctgtgaggggagctgtcgcgcagcgactgaggggagtctctagagcgagaaaccgggccggagcctgctatcggtttttcgtatagcgtattacgggctttcgggcacgcgcaccggccggctcgaatacgatacaaagcatggttactccccgaatcagttacgcgcacctgctcgccaagccgaaccccaagcacgtcgaaagcctgctcaagttctttgagaatggacgctcccagcggggcgccggcggcttcggcgtggagatcgagcacctgcccgtgcacaacagcgacgacaccgccgtgacctactacgagccgaatggcatcgaggcattgctcaaacgcttggctccgtactacgacgaggagaaggaatactgggagaacggccatctggtgggtctcggccgttccggcgtcgccgtttctctcgagcccggcggacaggtggaaacctcaatcggcattctgaagaagccgagcgacctgaatacgttgtattccaagttccgtcgtgagctcgacccgattcttgacgatctcgacttccgcttggtcaactatggttaccagcccaaatccagctttgcggatgtgccggtcaaccccaaggatcgctatgacgcgatgactgactacctcggccgcgtgggtcagttcggcccatgcatgatgcgttgctccgcctccacccaggtcagcatcgactacgtggacgagcgcgattccatcgaaaaactgcggttgggcacagttatcggcccgattctggcctacttcttccgtaacgccccgtatttcgagggcgagacgaacccatggccgctgctgcgccagcgtatgtgggattatctggacttccagcgcaccaatgtgctgcccggtctgttcgatgctcgctatggttgggaggattacgccatcgacgtgttgtccacgccgcttatgttcgctgacctgacccatacccctgaagctgtggcttctggagcaagccccaaggaactgcatcgcccggccttccgcgagaacgcgggggaggtgtacccggaccgcgaactcaacccgtacgagatcaaccacatcatctccacgcacttcaatgacgtacgcctgaagaacttcatcgagcttcgccactgggattccttgccgatcgagcgtgccgaacgtctgacggagattgtgtcctctctgttctacgtgcccgagcatcgcgaccgcttggaaagctacttcgagggcatcagcgaggaagaggtgttcgaggccaaggccaacattcaggcccacggccgcgaagccacgccatacggccagccgctcgacttctggaaggaattcctggggctggagggccttttgtccgacattcccggcgatctgaagcaccccgacgtgttccaggagtaagcgaagaagcatatacagaaaaatctattgcgcgatatcggtgtcgaaggcatgacagaatgttttgttttggcaccgttttgcatatccggccaaggatattggatgtggttgcgcatgggagtggggagaatgcggatagactggcggatatgacatctgggaattcattgcagcataagcgtgttcgcaagtcgccgggggaacgccggcaggaaattctcgatgccgccgtgcgactgatttccgagcgtggctacaacggtacttctgtgcaggatgtggccgatgcggtcggtgttaccaagcagggagttttgcgatattttcctagcaaagataacctgcttgccgcggtgtatcacgagaattacaacacgtttggcagtgtggaagacttcatggcctccggcctgcctggttcagtgcccgatgatttcagattgcccgcgtatctgaggttcttggtacattgcaattccacgcgccccatgcttgttcagctgttctcgatattgcaggtcgaatcgttcaatcctgcgcatccgttacatgacgagtttgccaatcgtcgggattcaatatggcaatactattcgacatacaactggaatctgccttccgaattcacctcgtttgaggaggtccggcccacgttgcgccatgctttggagatcatggatggtgtgcaactgaggtggttacgggggccggccattgacttatgcgatgaatgggccgatctggagccggcgatatttccttcgccgatatgggacgggtatcgctgattcgctgtgtgccttgaaccgaggcttgtgcttgatggcggcagtaagtatgcgggcgaacgaaggggtcgcatacatacggtcgttttggtgtatgtgatgcgcgcggcataagcgtgttgtatgctgtcaatagatagactaccaattggtaattaaaaagctgttcgatttcactgaggaaagcgacttcgtatgaccgacaacaccacgcctgccgcaactgctgaaaccttaccgtacaagaatcctgatttgcccgctggtgagcgaatcgccgacttgctctcccgtatgacacttgaggagaaggtcggccagatgatgcagcttgacgcccgcggcggcgatcttgaggatctcatcgtgaataagcatgtcggatccattctgcataccagccccgaggatgtatctcgtgccgccaagaccgtcaatgagaagacgcgtctgggcatcccgttgattatcggagatgactgcatccatggatactccttctggccgggcgccacgatcttcccctcccagctcggcatggccgtcagctgggacgccgccaaagtcgaagccgctggccgcgccaccgccgaagaggtctcctgcaccggcgtgcactggacgttctccccggtgctgtgcatcgcccgcgacacccgttggggccgcgtggacgagacctttggcgaggacccgatgctgatcggcgaactcgcctccgccatggtcaagggctaccagggcggcgccaaggccggcgaggccctgccgaagaacgcgatcctggcctgcgccaagcatttcgccggttactccgagacccagggcggccgtgacgcctccgaagccgacctctcccaccgcaagctcgaatcctggttc

SEQ ID NO: 1439 - DNA, 18634 bp, Unknown
  R257_15m  MAG No. k141_18379
cccggggcgtacggggtgcccttcttgtggcgggacgggaaggaaccggtgttcttgccgtactccacgttggaggtgatggtcaggatggactgggtcgggacggcgccacggtagacgggcaggcgcttgacctggcccatcacggtggagacgacccacttggcgatgtcgtcggcgcggtcgtcgtcgttgccgtagaccgggaactcgccctcggtgcggtagccgacgaccagatcgtcgtcggcgccttcgacgtactcgtactcgtggccttcgaggttcttggcttccttgttggtgatcgggtacaccttggcgtacttgatggcggacagggagtcggcggcgatggacagaccggacatgccgcaaccgagggtgcggtacacctccttgtcgtgtagggccatctcgatggactcgtaggcgtacttatcgtgcatgtagtggatgatgttcagcgcttcgacgtaggtttcggacagccactcgagcgccttctcgtagttgttcttgaccttctcgtagtccaaggtgccgtcggcctccggggcgatcgggtcgatgacgcccttgtcgatgacctgcatgccggtcatctcatcgcggccaccgttgatggcgtacagcagggccttggcggagttcactcgggcggcgaagaactgcatctgcttgcccacacgcatcggggagacgcagcaggcgatggcggcgtcatcgccccagtgggaacggatttccttgtcggactcgtactggatggccgaggtgtcgatggagatcttggcgcagaagcgcttgtagccttccggcagcttcggatcccagaagatggtgatgttcggctcagggccaggtccgaggtgctcaagggtcagggtgttgagcagacggaaggaggtcttggtgaccatcggacggccatcgtcgccgaagccggcgtcggaccaggtcgcccagtacgggtcgccggagaagatgttgtcgtagtccttggtgcgcaggaagcggacgatacgcagcttcatgacgatgttgtcgatgagctcctgggcgtcggtctcggtgatcttgccggcctcgaggtcgcgctcgatgaagcagtcgaggaaggcggagttacggccgaaggacatggcggcgccgtcctgggacttgatggaggccaggtagcccatgtaggtccactgcacggcttcctgggcggtctgagcagggcgggacaggtccaggccgtactcgttgccgaggttgatgagctgcttcagagccttgatctgctcgtcgtgctcctcgcggaagcggatccagtgctcgatctccggctcggtgaagtcgttgcggtacgggatggagtccttgtcgcgcttcttgaaggcgatcagcttgttgacaccgtacagggcaacacgacggtagtcgccgatgatgcggccacggccgtaggcatccggcagaccggtgaggatcttgttgtggcgggcgaccttgatgttcttggtgtagacgccgaacacgccgtcattgtgggtcttgcggtacttggtgaagatcttcttgatctccggatccggctccttgccggcttccttgatggcctgctcgaccatacgccagccgccgttcggcatcatggcgcgcttgcagggcacgtcggtctgcaagccgacgatcacgttgtcgacttccggggagtcgatgtagccggccgggaaggcatcgatgccagccggggtgtgggtgtccacgtcgtagacgcgctgcttgcgctccacggccaggtagttgtcgtcgaggtacttccacaggtgcttggtcttctcggtggcaggagccaggaatgtctcgtcgccctcgtacggggtgtagatcttctggatgaagtcgcggacgtcaatatccttctgccagttgccctcggtgaagccggcccacgccttagcgtcgagctcctcttgggagacagctgcattttctactgcggtcatgtcactccttaaatggggttgtaggtttcgcatcttcacggaacccttggttcaacagtgtagttggcacttgcttgggaaaagccgaaattgggagtgagctatctcacattgttttttatgaacgctaccattccaatggtttctaggtattgatggggctattgcacgtctccagatatgggaaaccgctcatactgtgatgttcgtatgagcggcttggtgagcggttcggtcttgagattgacagcagaaccgtatccgtctgttttggccgtcagtcttcatcgttcgcttgcgcggatttcacaccgtagttcttccagcgccagttctcctcctcccatctggcgttgcggtccaccacgatgtcccaggcgtgttcggcatcttccttggtcttgtacggccccatgcgctgttcaatcggtgagaccatgcccagctcggcctgcttcttgacggtgttgaaataccactgcttcttgttatcgtctgtcattggtacctcctcaacggtattacttgctcccgctggcgggagcaatatatgtttattccctgaacgcgttggtgacgggcagtcggcggtcgcggccgaacgcgagggccgtgaccttcggtcccaacgggtattggcggcgcttccattcggcgcggtccaccaatcgcatcacagtgtccacggtggcctggtcgaagccgtcggccaacaggtcggcgcggccgtgcgcgtgctcgatgtatgcggcgagcaccttgtcgagcagcgcgtattcgggcagggagtcggagtccttctgcccggggcgcaactcggccgagggagccttctcgatggatgagaccggaatcatcacgccgtccttcaacgggatgccggcgttgccgtcctcgttgcccacgatcttgagcccgccgataccgacgcctgcggccgcggccttgttacgccaacggctgatctcccagacacgggtcttgagcaggtccttgatgggtgcgtagccgccgaccgcatcgccgtagatggttgagtagccgcaggcgagctctgacttgttgccggtggccacggcgagcaggccgcgagaattggaactggccatcacgatcacaccgcggatgcgggcctgcaggttctcggcggagacgccatcaaggtcaagttgctgttggtaggcgttgaacaatggctcaataggctggacctcgtaatgggcaccgatgttggaggccaggtcagcggcgtcgtctttggaaccatcggaggagtacatggagggcatggagatgccccagacgttctcgccgccgcatgcgtcggccgccatggcggctaccagtgcggagtcgatgcctcctgagaggcccagcgtcacgccggtgaagtggttcttggccatgtagtccttgaggccgagcacgcaggcagtgtatacctcttcgtccgggtcgagttccggaacgatctcggccttgacctgatgttcggcggtggaatcgaagtcccagaacgtcaggttttccatgaacatcgggccgcgttcgataagcgtgccgtcggcatcgaccacgaagctgccaccgtcgaagaccaggtcgtcctgaccgccgacctgattcaggtagatgaccggggcgttgacttcggcggcacgacgctgggcgagctcgaaacgggtgttggtcttgccttcctcatacggcgagccgttgatggtgagcagcaggtcgatgttcttggtggccaggtcggccaccgggccaccatcctgccagatgtcctcgcagatggccacgccgatggtggcaccatccacgtcgagggtcacggaacggtcgccggcggagaagatacggaattcgtcgaacacgccgtagttgggcaggaagtgcttgtcgtagccggcccagaccacgccctgatgcaataccaccagtcggttgcgcggcttggaggtcttacgatcagtgcccacggtgccaaccaccacgaacagattgccgaggccgtcgtcgttgagctgggcggcgagttcgttggccttgtcccatgcggcttggcggaaggtgcggcgcagggccagatcttcgatagggtatccggtgagggtcatttccgggaaaacaaccacttgggcattccctgcggcggctttacgggagtagtcgagcactttggcggcgttggcatcgagcgcgccgacgcaggtgtcgatctgggcgagtgcgaagcgaagctgtgtcatagcttcttagtgtagccgcgtatggcgtcggattgcctgttcttccggcttggcgtcattcattaggtcgtttttgcgttcattaggtcactgcaatgcgatatcagtcgttgcaatggcgcgattccaacaaccagtatcgccgttcaccgacctaatggacgatgaatcgacctaatgaacgaatgccactcccctcagtcagcttcgctgatagctcgtcctgcacttatggacgggcgaggcccgcgcatatctggttcggctgtcgcctcaccttcggctgcagacagcccattgggctgtctgcctaacgcctcagcctccagaggggagccaaaaaaggatttacctcagctcgttgagcacgcgcagggcggcgttgacgtagaagttgacgaaggtgggaatggattcgtcgagacccacgaaatgcgggctatgccagtcggcgcaaccttcctggccgtttgacccgacgaacgcgaacaccggcaacgtcaccttggcgaattcgcagaagtcctcccccgccatcgactgacgtatcggttcgagctgcgcgtagtcgttgacatccgccgccacggccttggcaagacctggatcggagaccagcgggtcttggaaatcatcccagaccacatcggcgctgataccgtatgcctcggcggtgtgttccaccacttccttgaatcggcggccgaccagattgccatccgacttgtggaaatagcgcacagtcccttggaatccggcttcggcgggcaccacgttccacacatggccgccgtgcacttcggtaacggacagcaccagcgggtggaagggcgtgacgttgcggctcacgatggtctgcaggctcagaataatactggcgagcgcttcgatgggcccggtgcccttgtacgggtagccggcgtgggtgccttgggcgtggagggtcacgcggaatttcacgcagccggccatcatcggctcgacgccgatggccagctggccggacgcatagttggggttgttgtgcgtgccgataatggcttcgacgtcatccacgagtccggcgtcgatcatggcgcgagcgccttggccggtctcctcactcggctggaacagaatcttgattgagccggcgaacttgtcacggtgctcggcgagccagaaggcggcaccgagcagaccggtcatgtgcaggtcgtggccgcagccgtgcatcacgccttcattgacggagctgaactccagtccggagtcttccacgatgggcaggccgtcgatgtcggcgcgcagcccgatacgcggcccgggaccggcctcgccctgaatgagccccacaacaccagtctccagcgggttgtgcaggatctcgatgccgtgcgccttgagctggtcggtcagatagatgctggtgtcgaattcacggaaactacgctccggatgggcgtgcaggtagtggcggatggtgatgagttcgtggtcgatgtcgatatgttcactcatggttcccgattctagtagcgcgaagaatatattgcggccctcgcttcatattgacgagggccgcgatctatggggtcagtatgccttgttattgctggcgtttgagcagtcgtttggcgatggcgttggcgatgccctgcaccacctggaccagtacgatcatgatgatcacggccgtccaggtgacggtctggtcgaacttctggtagccgtaggcgatggcgaagttaccgagaccgccaccgccgatgtagccggccatggcagacatgtcaagcacgccgatgaacaggaaggcgtaggccaggatcagcggtgccagggcttcggggatgagtacggtgcggatgatggtgagcttgccggcacccatcgaacgcgcggcctcgattactcccgggtcgaccggcacgagattctgttcgaccagacgagaagtggcgaaggtgcacatgaccaccatcgggaagatggcggccacggtgccgatggacgtgccgaccacgacgatggtgagcggctgcatggctgccaggaaaatgatgaacggaatcgggcgcacgatgttgacgatgatgtcaaggatgcggtagacgaccgcgttctcgaacaggttgccggggcgggtgccatagagcaccacgccgaggatcaggccgaggaatccgccgatgacaagggtgacgagcaccatggtcagggtctggccgatggattcgaacaatagtgggcgcagcacgttccagtcgctacgcgagttggcgaggatgatcatgcgttgtctccttcatgtgcggcggcggatacagcgggcgcggtggcagtatcggccgccagtgggtcatgggcgcggtcttcggcgtaggaggcatgtccggcaactgcgtcggcgtaagccacgggctttgcggcggtgccgaagtcaatgacgtcgctattggcggcgagctcgcgcaggaattcgtccacgtgccagccgggcccgttgaattcgtaggtgatggcaccgatggcggtccccttgaccgtgtcgatgccgccgtagagcaggctggattcgacgccgtatttggcgatgagttcggagatgttctgtccggatgccttgagttcgtggccatggctgccggaaacgtccttttggcggatgagcacggtgacgatgcggcccgaccattcgtggtgcaatcgctcgacccggtcttcctcgggcaggccggacagggcggtggcgatgaatcgcttggtcaccggctgctggggcgcggcgaacacgtcgtatacgtcgccggattcgaccacgcgtccggcgctcattacggccacgcggccggcaatctgctggaccacgttcatctgatgggtgataagcacaatggtgatgccgaattcctcgttcacacgcttgagcaaggccagcacttcggtggtggtttccgggtcgagcgcgctggtggcttcgtcggcgagcagaatctccggattagtggccagtgcgcgggcgatgccgacgcgctgcttctggccgccggacagctgcgaggggtatttgtttgcgtgctcactaaggcccacgaattcgagaagttcgttgacgcgacgatcctgatagtccttgcgccagtgatcgagttgcagcgggtaggcaatgttctgcgccacggttttggtggagaacaggttgaactgctggaaaatcatgccgattttctggcggatgggccgcagcttggtctcactcaaagaggtgatatcggtgccgagcacggtcacggtgccggaggtgggtcgttcgagcgcgttgataagccggaccagtgtggatttgcctgcaccggaatagccgatgatgccgaagatgtcgccgcgatcgatggtcaggctgacgtcatccacggctcgtgcgatgttcgcgccgcgtccgcgtgttttgaattccttcacgacatggtcgaaggtgatgatggggtcgctcatagtgctccctgatgctggttgttgatgtccggtcacggaagcggagcgaatcccgattgttggctcgggtactcgctccgcttggtggtaatggctatggacaggttagtcgtgcactcgtatcagccacggctcactgctgggctttggcgtccttctcaatgtcggacaggaagccttgcagctcgctggcgctgaacttgtcggcgaacaccgcggtaccgccggagttctcctgcagggcgtcgagcacatccttctgctggtagatggaaacgagcttcttgtaggtctcgttgttcacgtccgccttgcgggccacccacacgttgatgtaggggcgagcttcttcggattcggcgtcatcctggtagatggcgtccttcgggttgagaccggcgtcggccacgtagtcgttgttgatcacaccagcggcgatggtcgggtccttcagggtggtggccacctgttcggccttgagcggggtgaccttgaccttgctcttggcttcgtcgatgtcggccggagtggagaaggcggtccagtcgcccttgagcgtcacgagaccggcggccttgagcacgccgatagcgcgggcctggttggtttcgtcgttcggaatggtgacggtgtcgccctgcttcaggtccttgatgtccttgaccttggtggagtacacgccgagcgggtagatggcggtgccgccgatgggctgcaggtccttcttgttgctcacgttgtagttggccaagtagagcaggtgctggaattcgttgaggtccagctcgccggagtcaagggccgggttttcggaggtgtagtcctggaagtcgacgatgtcgacgtagatgccggccttctcggcgtcctgcttgaacttgacccattcggggttggtagcgccgaccacgccgatcttgaccgggttgcccttgctgcccttggcggacgactcgttggcaccggcaaacgcgcggtagccgaagaacgcggccacggcgataatcgccacgaccacgatggtgatgatgacgttgcggacggtgtggttcacacgcaccggctcgttattgttaggagcggccggagttgccgactgggttgctgctgtcattggatttcctctctccaaaattgatgtcgggtaacaccataacgcgcttgaaccgcgaaagtgacggaaaatggccgattgccgtataggtgtcttttatggcgcgcatgcaatggccgggattcgtgcgtttgataacccgctataggcgtgccgaacacgccggaaagcacgtcgagaggggctttgacaatggaagctatgactaccgatactgccaatgccgatatccgagccgtattcttcgatatcgatggcacgctcaccagtttcacgacccatacggtgccggattccacaatcgaggtgattcaccggctgcaggccgcaggcgtcaaggtgctgatttgcacgggccgcgcgccttcacagatgcacgtggtgctggataccatgccggtgacgttcgatggcgtggtggcgttcaatgggcagtattgctttgatgacaccggcttctttgcctcgcaggccttggatactgctgatattgaggtgattctcgactggctggaccgtcaccccgatgtggtgtgcaatttcggcgagaaggattacgtgtacttcaaccagtccaatgatctgcttcgcgccacgtggagcaaactgggcaaaaccgcaccgacccggtattttgaggacccgcgcacccgcgcgctggatcatgagactttccagatcagtccctttgtcggacccgagttggaggccgaactggtgggactgtgcagcaatgtgcgcggggtgcgttggcatccggatttcacggatctgattccggccgatggcggcaagccgcgcggcatccagcggtgcatggcgcattacggcatcacgcgcgggcagaccatggccttcggcgatggcggcaatgacacggatatgctcgcctacgccggcatcggggtcgcgatgggcaatgcgaccgccgagccaaaggccgccgccgattacatcaccgacgacgtggaccacgacggtgtgcgcaatgccctactgcatttcggggtgctgcgcgattattgatgccgtagcgcctcgaccgggtcgagctttgccgcgcgcctagctggatagtagccgaaaatcacgccgacagcgatgcagatgcccactgccagtccgatggactgcacggaaactgctggcgcgatactcatgccaccggcgatgccggacaccaatccagcggcgcccaacgacagcaagtagccgatcaacgtgccgataagacctccaagcactgtgattgcaatggattcggcgaggaactgcgcggtcacgtcacgccgagtggcacccaatgcccggcgcaggccaatttcgcggatgcgttcggtaacgttggtgagcatcatgttcataatgccgatgccgcccaccagcaacgagaccccggccaccgaacccgccagcacctggaatgcgctcatgaagctggaaagctggtcgatggaggattgggcgcttacgaccgacagattctggtcgatctgttcggttgggatacgcatgatgcgagcgacaacggtcttcgtctgttccgtgagctggtcgatatcaaccccgtccttggccagtccgtagatctgcatgtatcccatgttcgaggacgcaaaccgcagcgccacagtggtggcaggcatatagatattcacgccgtcgccgcccatgccgcccatcaatccagacgactcgaccacacccacaacggttgcttcattgccgtcaagcgtgacggttctgccgatggcgtcaatgtccgcgctgccgaacagcttctgcacgccctgcccgtcgagaatcaccaccattgcaccactcgttgcttcactcgatgtgaaggcccgtccacgaccaatcgtcactccggatacatcgaagaaatgctcgtcgacaccggtgatgctcgccgacaccttgtcggtggtaccgggcgcggcgattgacgaggcggcaccatagttcgtcggcgagaagtactcgtagtcggtcagttcctcgcgcatcgcagtgatctgttcgtcgtcaagggtgccgacgtccgtgtaaatcgaaatcgtgcgcgccgcgttcatacccagttcgccgaccagagagtctcgaatgccaccgatcagtgaggtcatggtaatcaccgcggcaatgccgatgacgatgccgagaatggtcagtgcgcttttgcctttgttcgccctcagtgcggagccggtttccgccagcagatcccgtgttctcatcggtacatcccgtcacgcagtacgccgtcacgcatgtgcaggcatcggtcggcgcgttcggccacttcggggctgtgggtgatgagcacgatggttttgccttgctgcttgagctgttcgaacgtgtgcatcaccgcatcgccggttttggagtccaggttgccggtcggctcgtcgccgagaatcagcggcgggtcctgtatcaacgctctggcgatggccacgcgctgcatctgaccaccggagagttcattggttttgcggtcgaacagttccggactcaacgccactgattggagtgctttgatggcacgcccttcccgttcacgcaccgggcagtcggaataggccaggggcagcatcacgttgcgcagcacgctggtgcgcggcagcagattgaaggattggaacacgaagccgatgagccacccgcgcagttcggagcgttcgtcatcactcagattctgcacgtccatgccgcacaggcggtaggtgccggatgatgggcggtcgagcaggcccagcgtgttcatcagcgtggatttgccggaaccggatggtcccatgatggcgaggaactcgccttggcgcacgttcatggtgatgcctttgagcacatgggtgtaggtgtcgcctgtctcgaagatgcggttgatgttttcaacctcgatgacgttggctgtggcggtgggcacggcaatggtctcattacgccgtttgccgcgatttgcccggctcgcgtcggaacgaaacgggaacatatcagcgtgccctttcgtccgaagccgcggtttgcgaggtggaagaagcagcatcgccagtattgtcggcagccgaagcgccatcaagcatgatgacatcgcccttgctcacattgccttccacaacggctttggtgttgttcttggctttgaccgtgactcgcacccgcttgaactcatgggtttcggcgttggtctcgagcatgaccgcgctgctctccttaccctcatccacgatggcggcgagcggcaccatcaaagcgttgtcaatgctctgcatggtgattttcacactggccgtcatgcccggcttcagtttcggatcaggggcgggaatgatgagacgcacggcgtatcccacgccgccgttgccactctgcccgcctgccgaggaatcagccaactgcgacgtggtgctggcgatggtatccaccttggcatcgagcgtcagtcccggcaccgcggagaacgtgactttggcgctctggtccttggccactttagtgatatccagctcattgatgttgacattgaccttcatctgactcaggtcggcgatctgacacaatggtttaccgtctgcgccggcggaagtggatgagccatcggaggaagctccgatggcggcaccgggcaccgcgctcatggtcagcaccgtgcccgagaccggagcagtgaccgtacgcttgttggcttgggcgaccgcctcgtcataggtggcttgtgcttgctgaacggcgacctgcgcgctctccacgccgctttgtgcagcgggcagctgtccggccgcatcatcggcagcggcttggccttcctcaccatcctgattacgtgcctgacctatggtcgcattgatttggttcacctgctgctgggcggcattaaggtttgagttcgctgctcgcagagccagatcggcctgattcacgtcgctatcgagcttgtcgttgttgatggtaaacagtacgtcgccggcgttgacggttgcgccttcctgcaccttgacttcgccgatggtgccgtcgatctgcggggcgacgacggtggagttgatgggttctatggaaccggtggagctgacttggtcgacgaaatggccacgttccaccgttgccgtggataccggagacacgcccccatctgacggggtaataatcgcgtgcaccaccataaagccgataatcagtaccgccacgacggcgacggcgatgatgcgatgcaccacgcgctttttcttgcgcgtctcacgttcgcgcattaatcggttgaattcggcgacttccgcgttctccgcctcgccttgggcaagggcgtcgacacttgattccacggtgtcggtagcgtccaacggttgtatgattgcggtctgctgctgatccttctgcatgcgctctcccccatggctggctccgagcctcgtgcccggatactggttccaagcctatggaggaatggcgtggtttccatcatgcgcaggattgaattgatggggagttgtcatccttaaggattagttggggtggggaatttatgggctgttttcagtcttggctctcgccttcgcttccgcttttctctcccccagtcatgcttcgcatgacagcctcctcgtcagagggggcttatgaataagcaaagggctcgggacgaatcccgagccctttggcgttagcgaactaacaacaccgtggaggtgttatcactcgttgtcgccagcggtagcggcggtagcggtgacggcacccttcttgtcggtgttcacgccggagtacacccagtcggtgtagtccgggtggtcgtagcccttgtcgacggcgaactggaaggcctcatcacggaacttctcgagctcgtcgatcttgtcggcgtacttgtcggcgtcgatcatgcgcagggcctcagcggtcagctcgtagcggtcgatgcggttgacacgaaccatgtcgtacggggtggtggtggagccctcctcctcgtagccgtggacgttgaagttgtcgtggttcggacggtcgtagatcaggccgcgcacgtcgtgagcgtaggagtggtacgcgaacagcaccggcttgtcggcggtgaagatgtcggcgaactcctcgtcggtcagagcctcgtcgttctccttggcggactgcagggagagcaggtcggcaacgttcacaaccttgaacttgacgcccagttccttcagcttgtcggaagcagccatgatctcctgagtcggaacatcgccggcggcggcaagcacgacttcggcctcatcgttgttcttggcggtggaagcccaatcccaagcggcggcacccttctcgagctcggcacgagcctcgtccagggtcagccaggtggcagcaggctgcttaccagcgatgatggcgttgatcttgttggtggacttgtagcacttctcggcgatggccagcagcatgttcgcatcggtggcgaagtagatgccgatgacgtggtcattgtggaagcacttgttcagcaggacggaggtgacacccgggtcctggtgggagaagccgttgtggtcctgacgccaaacgtgggaggagaccagcaggttcatggaggcgatcggcttgcgccacggaatctcgcggacggtagcctcaagccacttggcgtgctggttcagcatggagtcgatcacgtggacgaaggactcgtaggagctccagatgccgtgacgaccggtcagcaggtaggcctcgaggaagccttccctctggtgctcggacagctgctcaacgacctggccggagacgtgcatgtgctcgtcgacctcgtcggagatgtagccggcatcccactgcttgttggtgacttcgtaggacgcctgcagacggttggaagcggtctcatccggtccgaagatgcggaagtcgcgcgggttgttcttgatgatgtcgcgagtgtaggcacccagggtacgggtggcctcgagctggccccagccgtggccgtactcagccacttccttgacctcgtagtcctcgaggttcggcagcttcaggtcgtcgcgaatcacaccaccgttggcgttcgggttggcaccgatacgcagctcacccttcggcatgaaggcaaggacgtcgtccttgacagcgccgttggcgtcgaacagctcttccggcttgtaggactcgagccagttcttgaggacctcgaagtgggcctcggtgtcgcgggcggaagccagcggcacctggtgagcgcgccaagagccctcggtcttcttgccgtcgatgtacttcgggcaggtccaacccttcggggtgcggaagatcagcatcgggtagaacggacggtgcacgttgtcggtctgagcggcggccttgatgtcgcagatctcgtcccagatggtctcccacagctcggcgaagcggcggtggatggacatgtgatcttcatcgtcgaagccagcgacgaactcgtagggctcgtaacccatgccgtggaagaactcgtggagctcttcgtcggagatgcgggacaggatggtcgggttggcgatcttgtagccgttgaggtgcaggatcggcagcacgataccgtcggtgcgcgggttcacgagcttgttagactgccaaccggtagccagcgggccggtctcggcctcgccgtcgccgacgatggccgggacgaacaggctcgggttgtccatgatggcaccgtaagcgtgggacagagcgtaacccagctcaccaccctcgtggatggagcccggggtctccggagcgaagtgggacggaataccgcccgggtaagagaactgacggaagaacttctgcagaccagcttcgtccttggtgatcttcgggaaggtctcggtgtaggtgccgtccaggtaggactgggaggtaccggccgggccaccgtggcccgggcccatgatgatcacggtgttctggccgtggtcagcaatgaaacggttgatgtggccgatgaggaagttcaggccaggggtagtgccccagtggcccaccagacggtgcttcacatcttcgcgggtgaagggctccttcatcagcgggttggaacgcagataaatctggccgatggaaaggtagttggcaacgcgccagtacttgtcaacgccttcgagggcttcctcggaaaccggagcgttgagcttcttccaaggggtgccaataacaggactcgtcatgtgtactcctgtactcctgcacgtgatcgtgcgattgattatttctgttcggtcacggttcctgacccttgcggtgccaaggttttccgttcccaatcaatcgtcatggtacgaggacaacgcgacttttgaacgatttcttgcgggtgtgttcgaaattgttgcggaaatttcagtatttgtgcggttcacctgaccgtttgtcaacattagttttttcaacatactttttcagaacggcggaagcatgcggaaatctagcatctggctagaacagcgcacgttcgatttcccatgttcgaaatcggcgtgttgtccgactacaggcatgtagtttgttcgatttgcgcacatagtccctgcgtgtcggccttgtcgccttgaccagtgataatcaggggtgttcagcccacgtaaaattccaatgaacgttaggggaatatcaatggcaaacggtcctgtgcttgtcgtcgacttcggcgcccagtacgcccagctcatcgcccgccgcgtgcgcgaggcaggcgtgtactccgagctggtccctcattccatgccggtcgacgagatcctggccaaggatccgaaggcgattattctgtccggcggcccggcctccgtgttcgagcccggcgcgccgaccatagataccaaggtattcgaatccggtgttccggtgcttggtatctgctacggcttccaggtcatggcctatgagctcggcggcaaggtggataaggccgctctcggcgaatacggcaagacctcagccaccatcgacgacgccgacggcatcctcgccgactcccccgccgagcagaccacgtggatgagccacggtgtggcggtcgaacaggccccggccggcttcgaagtgctggcccacaccgaaggcgcgcccgtggccgccatggcggacgaatcccgcaagctctacggtgtgcagtggcacccggaagtcaagcactccccgcttggccagaagcttatcgaaaacttcctgcaccgttgcgccgcgctgcccaacgactgggacgcctcctcgattatcgaggatcaagtcaagaagatccgcgagaaggtcggcgacgccgaggtgatctgcggcctgtccggcggtgtggactccgccgtggccgccgctctggtgcacaaggccatcggtgaccagctcacctgcgtgttcgtggaccacggcctgctgcgcaagggcgaggtcgagcaggtcaagcacgacttcgttgccgccaccggcatcaagctcatcaccgtggacgcggccgacgacttccttgaggccctgaagggagtctccgagccggagcgcaagcgcaagatcatcggtgagaagttcatccgcacgttcgagaaggcccagcgccaagtgcttgaagaggccggcgcgcgcggcaaggaagtcaagttcctcgtgcagggcaccctctaccccgacgtcgtcgaatccggcggcggcgacggtgccgccaacatcaagtcccaccacaacgtcggcggcctgcccaaggacatcaagttccagctcatcgaaccgctgcgcactctgttcaaggatgaggtgcgtgccatcggcaccgagctcggtctgcccgacgaaatcgtctggcgtcagcctttcccgggcccgggtctgggcatccgcatcatcggcgagatcaccaaggagcgcctcgacctgctgcgcgaggccgacgccatcgcccgcgaggagctctccaaggccggtctcgaccgtgacatctggcagtgcccggtcgtgctgctcgccgacgttcactcggtgggcgtccaaggcgacgagcgcacctacggctcccccatcgtgctgcgtccggtgagctcggaggacgccatgaccgccgactggtctcgcgtgccctacgatgtgctcgccacgatctccacgcgcatcaccaacgagtgccgccagatcaaccgcgtcgtcctcgactgcacgtccaagccgccggccacaattgaatgggagtgagccgatagggcttacctgcgctttcgagtgccgctgtgccgctgagtttcgtttcgtatgcgactcgcggcaaagccgccagcgacggcgatgaatacatacggcaatcgagccttcgttcccacgttgggacggaggctttttctttgccgttttactccctttcacctgcgattccgccatttactccccgtgtttcaaaacagcaaagtacggggcggtattcggggttataggccaaaatgtgtgtccggcggtctagtcgttcgactgccattcgacccgtgtgtggaactcgttccagtcgatgccggtgccgtatcttgcggggatgccgaacgtctcgtactggccttgcgggctcctttcccatgcctgccggtagaggcgctcgagtcgttcgtcggtcatcgcgttggccgcgagccacgcgtcggtctcgggacgttccgtgtgctggtggcaccaccagcagatcgccttcagccgtctgaccagccgcagtccgcggtggcggcgcagcatgtcgcgcaggcgcgcgttccatgattcgacgaggttgttggtggacggcaccgggccgacggacgcgagcccctcgtcgagga

SEQ ID NO: 1440 - DNA, 34784 bp, Unknown
  R257_15m  MAG No. k141_18752
cacgtaaccgttcggcaacacaccagttgaaggagcgacgatgactaccacactgttcaccaacgcacatatcgccaccggagaacccggcagcacggctgcaagcaccctgccattgcaggacattctcgtcacggatggcgtgttcaccgcattcggccccggactcgcgcaacaatatgaggctcagggtggtgatctggcggccattgaggtggtcgatctgggcggcaaacttgtctgcccaccgttctgcgatacgcatctgcaccttgattacgtattcacggcccgcaagcccggtgcggtgaatgaaagcggaaccttgtttgagggcatccagcgatggagtgagaccaagtccgacttgacggtcgacgagatcaagcagcgcgcgaaaatcggcattaagaaagaaatgctgcatggcgtgcagctcattcgctcccatgccgatgtgaccgacccgaacctgacctcattaaaggcgctgctggagcttaaggaggaattgaaggatacggtcactctccagatcgtcagcttcccgcaggagggcatgtactcctacgagggcccgcatggcgaatcgggggccgagctggtggaggaaggactcaagatgggtgccgactgcgtgggcggcatcccccatttcgaacagtgccgtgagtttggcgagcattccatgcacacggtagttgagttggcttcgaaatacgacaagctcatcgacgtgcattgcgatgagacggatgatccgaattcccgttacgtggagctgctttcggcgttggcatataaggctggcattggcccgaaggtcaccgccagccacacctgttcgctgggatcggcggacaacgcctacttcttccacctgaccaagctgcttaaggcggcgcatatcaacttcgcctgcgcccccaccgagaacctgtatttgcagggccgtcaggataccttccccaagcgccgtggcatcacgcgagtcaaggagctcactgaggcgggtgtcaatgtgtcattgggccaggattcaatgcaggacccgtggtacccgctgggcaatggcaatatgatgctcattcttgattatgtgctgcatttggcacagatgatgagctttgaagaaatcgacgatgcgttgaagttcctgaccgtcaacggtgccactacgttgggcctgcgcgatatgtacggcttggaaacgggcaagccagcaaacttcattgtgctggacgccgatagtgtgttcaacgccgtgtatgagcgctgctcggtattgcgttcggtgcgcgccggccgcacgctgtttacccgcgaggagaccatcgacaccggactcgccctgctgcaataacccgacaacaaacagtagttccccttgacaggggagctatcgccagaggcaactgaggggtagaccaaaaacgtgcacattatgtgtgcgtagatctacccctcagtcagcttcgctgacagctcccctgtcaaggggagctttgctggtatgcgctagctacgctatcgaaacggactacttctgcggagcgtcaccggaatcggcgggagcggattcggctggttcagtggccggagtggcgtcggctggagtctcgccatcagtggaggcaccggcttcggacgaagtttcggcatcggtggcggcaccgtcttcggcgggcttatcggcggcggccggctcctcgaacttctcccccttgaaggtgaattcgccgaggataccctcgccttccgcatccacaatcacgcgctgaccgtcttcgagatcgcccatcagaatcttctcggagatggcgtcctcgatgtcgcgctgaatcacgcggcgcagcggacgggcacctagcagcgggtcgaagcccttctgcgcgagcaggtccttggcggcgtcggtgagttcgagcgacatgtgacggtcgaacaggcggtcgttgagctgcttgacgtccagatccacgatctggcgcacctgcggctcggtgagctgcttgaagacgatgatgtcgtccagacggttcaggaactccgggcggaactgctgcttcaattcggagctgacctggtccttcatgcgctggtagctggactcgttgttggcacccaggttgaagcccgtgttggcggccttggcgatgtctcgcgtaccgaggttggtggtcaggatgatgatggtgttcttgaagtccaccttgcggccctgaccgtcggtcaggtggccgtcatcgagcacctgcagcagcgtgttgaagatgtccggatgagccttttcgatctcgtcgaacagcaccacggagaacggcttgcggcgcaccttttcggtaagctcgccgccctcctcgtagccgacgtatcccggaggcgcgccgaagagtcgcgaagccgcgtacttctcggagaactcggacatatccacgcgaatcagcgcgtcctcatcgtcgaacaggaattcggcgagcgtcttggccagctcggtcttgcccacgccggtggggccggcgaagatgaacgaaccggacgggcgcttcgggtccttcagacccacgcgagtacggcggatagagcgggacagggcggaaaccgcctcgtcctggccgatgatgcgcttgtgcagttcggcttccatgttgagcagtttcttggactcggcctgagtcagcttgaacaccgggataccggtggtggagctgatgacctcggcgatcacgtcctcgtccacgaccatcttgacgtcggactcgccttcgcgccaggagtcttccttctgcttgcgatcggcttccagcttctcctgcttgtcgcgcagttcggcggccttctcgaagtcctgacccttgatggcctcgtccttgtcggcggcgatcttggcgatcttctcgtcgagttccttgagctcaggcggggcggtcaggcgcttgatgcgcaggcgtgcaccggcctcatcgatcaggtcgatggccttgtcgggcaggttgcggtcctggatgtaccggctggacagctcggcggcggactgcagcgcgccatcggtgatggtcacgtggtggtggttctcgtaacgggaacgcaggcccttcaggatctcgatggtctcggcgatggtcggctcgtgcacctgaatcggctggaaacggcgttccagagccgcatccttttcgatgtacttgcggtactcgtcggtagtggtggcaccgatggtctggagctcgccacgagccagcatcggcttcaacatgtcggaggcacccagcgcgccgtcggcggagccggcgcccacgatggtgtggatctcatcgatgaacagcacgatatcaccacgggtcttgatttccttcagcaccttcttcaggcgctcctcgaaatcaccacggtagcgggagccggccaccatggaaccgaggtccagcgagtagacctgcttgcccttcagggtttccggcacgtcgccggcctgaatcttctgggccaagccttcgaccacggcggtcttacccacgccgggctcgccgatcagcaccgggttgttcttggtgcggcgggagagcacgaccataacgcgctcgatctcgttggtgcggccgatgaccgggtccagcttgccttcagcggcttcgacggtcaggttgcggccgaactgatcgagaatggcggaaccggacttgttctgcgtgtctgtcacgccgccggcgttggccagatcgcccttgccgtcaccggtgccggtgccggagttgccgcgaatcatatcgatggtcgcgctcctgagctcacccaggtcgacgtccatcttgatgagcacctgggtgcccacgccttcgccttcgcgaatcaggccgagcaggatgtgctcggtgccgatgtagctgtggcccagctgcagggcttcgcgcagcgagaactccaacacctgcttggcgtgcggagtaaaggggatgtgcccgttcggagccgcgttgcccttgccgatcatttcttcaacctgcttgcgagtggcatccagctccacgcccttcgaggcgagcgccttggcggccacgccctcaccttcgcggatcaggccgagcagcaggtgttcggtgccgatgtagttgtgctgaagggccctcgcctcttcctgcgccaacacgatcacgcgccgtgcacggtcggtaaaccgttcgaacatgcttgtccttcctcaattgacattccgtcttactctaccgattcacgatgacgtttattcatcggattccatgaattgcgccgtaagaggataagaaaacgatatgctggttctagattcacccgtagtcgattacaaggaggctcgaaatgagtgaagctgcaaccaagcccgacatcgttgtcggcgtggatggttccgatgaatcctttgccgcgctgaagtgggcgcttgaggaggcttcgttaaccggtcagagcgtcaacgccgtgtttggctggacgcattcctgggatatgggttccgaaccggacagcgacgaggcctgggccaaggtccgccacgacatcgccaacgagctgcgtgtgtgggtcgacaaggccgctgcaggcatcgacttcgatccggcgaatctgaagctcacctcggtgaaggcctccggcacttcggccctgctgcagatcggccatgatgcgcagcagatcgtggtcggccgccgctcgctgagccgtgtggcccgctggttcatggggtccctgtccgcttcgctggccgaggccgccgaagtgccggtgaccgtggtgcgcatcgccggcagcgaggatgagaccgtgaccgatgccatcgccaatgccctgacgccaggagaccagccggtccactacacgcagccacagcccgtggtcgaggtggctcgccgcccggtggtggttggtgtggatggttccgagacttcccgccgcgcgttcgacttcgcgctggaaaaggcacgactgcacgacgcgccgctgcatgtgatgttctgctggcagctcaaggatttgggcgttattccgggctatgagaacgccgtggcaccggtgaaggtcggtcagcgccgcgccgaggagattctcgccgggctgatggccaaggccgagattcccgatggtgtcaaggtcagcgcgaatgccttccatattcccgcgtccaaggggctgattgcggcatctcggtacgccagccatctggtggtcggttcgcgcggcctgtccggtctggacgcgcacttcctgggatcggtgtcccgtcagatcgtgaacttcgccgaatgcacggtgactgtggtgcactgattcaccgaaatcggcatggagtgctaacgcacgtctcggtgatgggcttgcagggaggaattctttattcctgcaaccccatcaccatctactttttaggaaacatcttcgctgagacctataagttgatccgagagtacattctgctgttggggagcaggattggcgtttattttattcctcgtccgccctgttctggcgcagctgctcaatgagatcgatgacggtttcgagttcaggagtcacatcgtctgaaggacgaacgttatcctcttcgtcgtccatctcatcatcctcatcatcatcggcaacggtgttgttgaggatgtcctcttcggtggcctcgtcgtcagcatcagacttggactcgtcgctggaatcagctgcatcaacatccacaacggaatcggatgcgttctgtgcaacagactcatcaccggcagactgggattgcgaggtcccgtcgcctgccgcctcctcagcgggctcagtatcgacggcgttcccgtcaacagtcttctgtgcttcgatatcatcaccggcaggctcgcctgtcttgtcggtttcgccttcggcctcgtcctgggcaacctgctcctgcttgcacggacggttggcaaccacgtcgatatgcagatcgtcaaaggctggcttggactgcacccacagctggcttggctcgggaggttcgatttcggaatgctcaccgcagccgtggtccagggagaccacgcggccgtcatccggactccacttgttggcgcacacgccgaacatacggtcgagttcgcccgcgagcggcacgaagaaaccacaggtggagcacaggttgccttcggcggttttggtgctcaacgctttggggcctcgcggaccttcataccagcgcttggcagcctgcgcacgacccaacgaggtcagcacgtgacggcgggtcagtcggaaggtctcgacggcatcgttgacatcctgcagcgaggattcctcgacttcgccttcctcgatgcgctcgtcatccggatcggtaccgatcgaatcggtgggagccagatctgtgggctcaaggcgatctttccaaggaatccacttgggcggcatcaacgcgccctcagtggggatcaaggaggattcgttgacggtccaggagtcgatctcctcgtcgtgatacagcgtcaccgaccattgccatccttcgtagccacggatattcgcggcgaagcggaagtcagtgacgtgatcctcaagatcatatgaggtaacgaaatcccccacctgatcgctctcgtcggccacttcgagcagcacggcgcgcgcgatggcgtgagggtccggtgtcacgatggtttcggtggtatcagtcatagatcagatcagtcctgtacatcgaattgatccgccaccgcacgcagcaacgtggccagctttttgctgtcggcagcagatgggtaacggtgacggcgcaacgtattgccggccgcatcaagcatcttgataaggtcctcgcagatggcggccatgtcatccgccttcgggcgggtggccttgaccaagctgggagtggaggcgatcaggcgaacatccatggcctgcggcccacgacggccgtccaccacggaatactccaccttggcccccttgcgcaacgtggtggcgccagtgggtagggcctgagccggcaggaacacgtccttgccttcctcactggtgatgaagccataacccttggctgcgtcaaaccaacgaactcgaccggtgggcattgcgaaccttccttaatcctcaatggaaatagtaaaccgaaggtacagtttacctcacagggcttgacctcacgctttgggctgagtcgcctgagtcttacgctcagagctgaaccaagaagtcttctgtttggcgtccttggttttgccggtgggccgcttgggctcaggagcgacgatctgctcaatcggcagcaccacggtgaaggtcaggcctcccccatcggtgccggtggcgcagataaagccgtgatgtgctttgaccacggattgcgcgatggccatgcccaaaccggtaccacccttttcgcgggcacgggatgggtccgcggtgtagaagcgttcgaaaatcttcgagcgcgattcaggcggcacgccggggccatggtccacgaaacgcaatacggcgtatcgatagccggtctgcatcgaggcacctacttcggcggcgtcgatgaaccgccgcattgacgcgtcgctggcgggcatgcgagcgagctgtcttggatcgatggcggccggcatcacaccgagcgcggcctcggcaggcgaatcggcaggcgtgtagcggtggatgttgcccacgatgttggtcaccacctggcgcagtcgagaggcgtcgccgggcagcacgacctcgggccaatcgccttcggcaaggttgaattcggcgggatggttcaaatcgcgcgccggttcgagggaaatctgcatgcggcgaacggcacggtccgggtcgagcgcatgcaagtcgtcgacggcgtcggtgaccagcgacgagagtttcaccgtgccggtcacatcgatgccgcgcccctcatcgagacgggccaaagacagcagatcctcaacaagaacagtcatgcgctggctggaccgttcgatatgttcgatggactcgtccgcacgctccaaggcaccaggcatatcgcgctgcatcttatacagctccgcatagccatggatggcggccaacggggtgcgcagctcatggctggcgtcggagacgaaccgtttcatcttgtcggtggtctcctcctgttcatggaaactggattctattcgggtgagcatggagttcagcgaggcggccagggagccgacctcggtgttttccggcgcggaaggaatacgttggctcaggtcgccggcggcaatctttgcagcggttttctcgatgcgcttcagcggcgtcatcgtgtgctggatgatcagcgtggacagggagccgccgagcagcaccacggcgatgccgaccacaatgcagtatcgggtgagtgtgttgacggtgtcgatctggtcggccagcgacaagccgatgtacaccacggcacggtccttgccgttttgctggaaggtcaccggcagaatacgccatggtgccctcgccgtgacgatggcggcatggttggcattgacagtggggttggccagtaccttggcgatggtgtcagaggaattggagtttccgttggccggatcgttctggctgtccgcactgtcggactgcaccgtgatgatctgcttggccactgcctgcgtagtgaatgcctggccgagcgtgatgccactggtatcaccataggtaggaagaatcggcaccgatacgataccgtcctgcatctgcggcatcagcggggtcacgaccagaggattgccctctttgtctttggtgccgtcggtatattgaatctgcagaaagtacgagttcggccccgatgagtcattttttgacagcagatcgatattgttgaccaccagctggctttgcgagcttaactgggtgtcggttttctgcagcatgtagttgttcaccaacgcgcggatggagaaggaaatcaccgacacgccgataagcagcacggcgatggtgcaggccaccagcttgctgctcaacgagatacggtcgatatgccgcatcagcatgtttttcttacgttcgcgccgctcttggaaatgggcggcgaacggcggcattgcaggcatgggattcgtgttcggggcggcgttcggcgtgctgctcggcggtacgccgcctgactgcttatcggggatactcatgagattgcgatgcgttatggatggggcgactagttcttcggttcgcgaatcatatatccgatgccgcgcttggtttcaatcagcgaagtcaccttgcgcttgccgccttcgccgtcgtcgacctcgatgccgtcgactttcttgcgcaggtaggagatgtacgattcgacgatggctgcgtcgccgccccagtcgtattgccagacatggtcgagaatctgtgccttggacagtactcggccctcattgtccatcaggtagcgaagcagcttgtattcggtggggctcaggtcaaccggctgccctgcacgggtcacatcgtgggagtcctcgttgatttccaagtcggcgacgcgaataatcgggtcgtcttccacctgttcgcgggtacggcgcagaatggcgcggatgcgagccacgacttcctcgaggctgaacggcttggtgacgtaatcgtcaccgccgacggtcaggcccatgatcttgtcttgggtgtcgtcacgagcggtgaggaacagcacaggggcgttaatgccttcctggcggatgcggcgggtgacggtaaatccatcgatgtcaggcagcatgacgtccaacacgatgagatcaggctgcactttttcgataacctcaatggcttcggaaccggaagcggcggtgtttacctcgaatccggcgaagtgtagggaagcgaccagcagttctcggatggacggctcgtcgtcgacaacaacaatcgatgcttcaataggcttactcatgcttcctagagtgtcgcgctcttctgggcgtttcctgaatgtcatcttggagttcggccttggaatccttcttgatctccttgcgccgacgaatcaccaccatgaccacgatgatgatgaccagcgccaccaacaccacacccatgatgattatgcctacggtcaccgtggatgatgaggtggaggcttttttggatttcacgatttgatccatcattgccgttgccgcgccagaccagctcggcgggttttccagtaacggctgctgtgcggcttcggatagcttatcgacggttttgttatcgagaagccacttatcggagttcttggacacgacgaccaccaggttgccgtcattcgaggccacggcaagcatcactgtgttcggcttgggattcatggactccatcacggttgccgcccagtcttccggtttctgttgactattgaaactggaaagatacagcagatgcacgtgtacaccggtttccttctcggttttggcgatggcatccgtgacttcggccgcatgggagcccaggagattttccgtatccgtgatgttctcggtgatggtcacgccgctgtcggtgctgctgctggagctgtcagagctgtcgcccgagttatccccataggcatttgcggttatccacattgcgttcatcgctactgcagcaagggcgcaaatggcacaaacaagccattttcggaccatattcccgaaggctgaacaggacggctccgaagataggaccacaatagttgtttttccgtcttcccgattcgttgttgacatatcctccaccttagcggccggtattggcaagcggccgccatacataccattaaccctctagaaaaggagcaacgatgccccaatatcaggtagattccgagcgaatccaatcatcctcggccgcagtggccacttcgatctcgcagatcaggcaggccgtgggcggcatgtacaccaatctcaatgccttgcaggacgcatggcgaggttcggcggccacccagttcaccgcggtagccgaacagtggcgtgcggcccaacagcagatggaggcctcactcgagtccatccaacgctcgctgacgcaagcctccaccgtgtacgctgacgccgaaatccaagcttcgcgcctgtttgccagctagtttcttggctctcctccctgaggggagctcgatcgcgaagcgaaactgagggagtatccctacaccgcagctccccttagtctcactgcgttcgacagctcccctcaaagaggggagccagaatacaaaaaaggggactcccgaaggagtcccctttcagctcaatcagctagcgatcgcttgcggatcagtagcccatgtcggcaccggcggccggggcagcaggcttcggctccggcttgttggcaacgacggcctcggtggtcaggaacagaccagcgatggaggcggcgttctgcagagcggagcgggtcaccttgaccgggtcggtcacaccggcggccagcaggtcttcgtaggtgtcggtggcggcgttgaagccttcgccatcaggcagggagcggacggtgttgatgaccacgtcaccggacacgccggcgttctcggcgatttgcttgatcggggcttcgatggcgcggaacacgatggcggcaccggtagcctcttcgccggtcagggaggcgacggcctcggccttctcggccttggcagcagcctgaacgagggccacgccaccgccgggcagcaggccttcctcgatggcggccttggcgttacgcacggcatcttcgatgcggtgcttgcgctccttggcctcaacctcggtggcagcgccgaccttgataacagccacaccgccggccagcttggccagacgctcctgcagcttctcacggtcgtaatcggagtcggtgttctcgatctcagcgcggatctgggccacgcgagcgtcgaggtcttccttggagccagcgccctgaacgatggtggtctcgtccttggagacgatgaccttcttggcgtggccgagcacggaggtgtcgacggactcgagcttcaggcccagttcgtcggagacaacctgagcaccggtcaggatggccatatcctgcagcatggccttgcgacggtcgccaaagcccggggccttgacggcgcaggacttgaaggtgccacggatgttgttcaggatcagggtcggcagtgcttcgccgtcgacgtcctcagcgatgatcagcagcggcttgccggtcttcatgaccagctcggccacgtgcacgatgtcctgctgggaggagaccttgccggaggtcagcagaatgtacggatcttcgagcactgcggtctggtcgtcagcgttggtgacgaagtacggggcgatgtagcccttgtcgaaacgcatgccctcggtgaagtcgaggtccaggccgaagcggttgttgtcttcaacggtcacaacgccgtcctggccgaccttgtccagagcctcagcgatcttctcgccgacctcagggtcggcggcggagatggtggcggtagcagcgatctggtccttggtctcgacgtccttggcggcggcgacgagttccttgacgatgacctcggtggccttctcgatgccgcgacgcagggcgatcgggttggagccggcgaccacgttcttcagaccctcgtgaaccagggactgagcaagcacggtcgcagtggtggtgccgtcaccggcgacgtcgtcggtcttcttggcgacttccttgaccagctcggcgccgatgcgctcgtacgggtcttcaaggtcgatttccttggcgatggacacaccatcgttggtgatggtcggagcgccgtaggtcttgtcgagcacgacgttgcggcccttcgggcccaaggtgaccttgacggtgttggcgagcttgtcaaggccctccagcatgccctgacgggcttcctcatcataagagatgatctttgccatggttgcgtattcctccaaatggctaggtataccggttatcactcgcaagcgtcgagtcgtgacgaccagccgtcagctgccgattatcactctcgacctccgagtgctaacccagacattagcactcgcgaccgccgagtgccaacatcatcggcggcgattgcgctttgggcatgaaaaggccccaaccgtcgaaacggtcagggccttcaatgcacatccttgcgtgcgtgttgctcactcggagcgggcttcacccgaagacagcttgacaacatcctttgcctgcgtgcctttgccggacgaagcgggcgtatactccacgcgatcgccctcgtacagcatcttgaacttattggtgctgccgtcgtccttgatttccgcgtagtgcacgaaaacgtcctcgctgccgtcgtccggctggatgaacccgaaccccttcttggcaaggaagaacttcacggtaccttgtgccatatctgatctttcctttgttcccttaggcgtcgcgacacaaaacctatagggaacgtagaaagaaccgcatcgcgctcccctacctcgcgactagatgacgattgtacagtgacgagggaacaatcccaaccgcagtggcacattttcggtacgaattatttcatagacgtgagaacgctcacagttttcgatgtattccacgccgatatcaggggcgcatcaacaacgctagttgagcagcaccaccgtaatgggaacggcgagtccttgcacctgctccacagccgaaatgccaagcgtggtcgccacatcttcggcggtggctttatcggcttcattctgataccataccacggaagaagccggcaatgtgccgcgcggattggtcgcctcgacgctggtgtaaccggcggtctgcagcacatcggcctgctgacctgcatatccttggattcctgtggcgttgaccacacgcacctgcgtggccttattcacagtcgcggtggctccggactgctgagactgctgatcggagtcttgattctcattcgaggatgtcgtatcactgttggtatcggattttgccgaatccgaagtcgagtccttggacggatcggtcgaagtggacgaggaatcatccttggtgctgtttttggtcccagccttgctggacgaatcggacttggaagcagtcccggacgtggtcgcagtctgggacgatcctcctattgcattcctgtattccccggaaatccatgcccagaccccgacaccgcacagtgcggccaccagaataacgacgatgaacgggcagaggcgggccactgccgaacgagcgccacggtgaactcccaccggtcccttcggaggattgtcgaaggaatccggttcataggattcgtaggtcatcatgtcgcgtgccataatcgccctttcttcctgtcaaaactacccatgagtgtaatcggcaaacaactcatcagtccaccacaccacgcctcgtgcaccggatatgcacgtttgactacagtggtgagtcatgatcaaaccattgagcgaactggtagagccggggtgggcccatgccttggccgacgtggagcccgccatccaccatatgggcgattttcttcgtgcggaaaacgccgccgggcgcccgtggctgccggcaagccacaatattctgcgcgcgttcaccatcccgttcgattccatcaaggtgctgattgtcggccaggacccctacccgaccccgggtcacccggtgggtttgagcttctgcgtggcgccgaatgttcacccgctgccgaaaagcctggtcaatatttataaggaattggttgacgaccttggggtgcccatgcccaccaacggcgatctgacaccgtggacggaacgtgaggtgatgttgctcaacagatgtctgaccgtcggcgtcgggcggccgaattcgcatcagggcaaaggctgggaggaagtcaccgaggccgcgattcgtgcgttgaacgcgcgcacggacgccgacggcaagcccaagccgctggtggcgattctctgggggcgtaatgcgcaaagcctcgagccattgctgaccaatgccttcattatcaaatcgcctcatccgagtccgctgtccgcttcccgcggattcttcggctccaaaccattctccagagccaatcaagccctagtcaccatgggtgccgacccggtggattggactctttagacagaccaacagtcattgtgagtagttacagtgagggcatgactttgttccccacgcaaccgaacataccttcgccgaccaccgccgcacgaccggtcaccgttcccgcgcccggcgtgtcggctccgctgggtgccgatgacgccaaacgcgcacgtatcctggccgacgccattcgggcgaggttcgcccagacactggtgggtcaggataatctacgcgaatcgcttatcgtgaccttggtggccggcgggcatattcttatcgaatccgtgccgggcttggccaagaccacggccgcccagacgctcgccacctgcgtatccggctcgttcaaacgcgtgcagtgcactcctgatctcatgccatccgatctggtgggcacgcaggtcttcgattttgcgtcgcagaagttcaccacgcagatcggcccgattcacgccaatttcgtactgctggacgagatcaaccgttcgaatgccaaaacccagtccgccatgcttgaggccatggccgagggtgccacgaccatcggcgggcagcgtatcgccttgcccaagccgttcatggtgatcgccaccgagaatccgattgaggaggagggcacgttcaacctgcccgaagcccagatggatcgtttcatgatgaaggccgtcatgacctatccttcgcccgacgaagaggctcgcatgctggccatgctcacccaccgtggctccgatatgatcggtcccgacaccatcaccggcgaacgcatttccgtgtctgacgttgattttctgcgcaaggcggcacgccgcgtgcatgtttccgacgcgatcatgcgttatgcggtcgatatcaccgccacgtcacgaggtgccggctcccgccccatcaagggattgtcgtccttggtgcgtttgggtgcctcgccgcgcgccaccatcgccttgacccgtatcggccaggcgaaggcgttgctgtccgggcgcgactatgtggtgcccgaggacctcaaggcgttcgctcatgaggtgctgcgccaccgtattatgctgacgttcgaggcactggccgatggcgtggtcagcgatcagatcgtcgacaagatcgtcgaaacggttcctgttccgtgagttccgattccgttcgcaagaaaatcgaggcccttggcactcagctgagcctgcctaccgtaaggaaggctttgggcgtgctggagggcgaacacgcatccgggcgtcgtggcggcagcggcgatgcgatggatgtgcatacctatgagccaggcgacgaatcccgtcttatcgattggaagaccagcgcccgccaaggccgccccatggtggtcgagcgcgagcgcctgtcgacgtcacgggtctggttgctgatggacgttggcctggagatgactggcgtatgcccttccggagaacgcgcatggcaggttgccgccaatgcgctgcgtatgttcgccgcactgtcgttgcgcaggtcggacgatatttcgctggtgttcggcgatgagtccagcatcacccgcgtgccgttcaacggtgggttcgcgcagttcgaacgcacgctggacaaggcgcttgatcgtgattgggatcatcaccgtaatatcgacgcgctgctggaatatgcgcgccgtatcaaggatcgtgaggcattgatcgtattggccaccgatgagcatgcgatggaggagcggcatatcaccacgatccgtcgtattacccgcacccatccgatggtgctgatcgatgtggcgacgatgaatccgttcaaggccgtctcatcccgccacgctcccgccgacggcttgagtgcacggcgtgtgccggcattcctgcgcaacgccaaggcagcggccgaggtcgatactcatcgcgcgtatatggccgcggctttggaacaggagctcacccgtgccggttcccatatcattcgagccgcatccagcgaatccatgttcgatcgtttcgtcgccctggtgtcccgggcattggcccgcaccacacgcaatagactgggcactgcacccgaactggtcggactgactttggcgggtgatctatgatgcacagcatgttccccatcatcccgctcgccactgatcccggcgatctcaggcccgtggagtcgttggccttgaccactcccctggtgatggccatcgtcgcatgcctgttgctggcggtaggtctgatcgcgttgatcatcatgctggctcgccccgcacgcaaacctcggaacagcgaccgtgcgcgtggcactcatagcaatgccagctccaaggccgagtggcgtgcccgcatcgacgatgtggtggcccgtcatgaatccggagcactgccccggcatgaggctttcgtcgaattggccgtcatcgcccgtgatttcgccggtgccgcatcaggcaaggagcttagttccagtacgctgaccgatttggcgtacctgaatcgcacgcccgcgaatcgccaaggattggacgcattgaagcagaccattagcgcgttgtatccaccggaatttgccgatgatgcccgcaaccgaatcgcccagacgaccagcgtgcagcaggccgccgagtgggtggcgaatctggtggaaaggtggcgttcatgatgctggcatggcattggccttgggccgctctggccggcgtcttggcagcgctggcgattatcgtgctgattgtcgtgttcgcccgccgtaacgccgccgacgacacccctgtattctcgatggacgacgatctcaataccgagcacgcttcccgtctgttccgtcaatggcgcgctttgggccgtctcgccatcagcgtgctggtgcttgcgctggcgctggccattgtgctggtggctcgccccagccaagtggatgccggtgacgaacgcgcttccagccgagatatcgtcctgtgtctggatgtgtcgggatccacgctcccctatgatcgcgaggtcatcgatacctatttggaactggtcaagcatttcgagggggaacgtatcggtttgagtatcttcaactcgacctcacgcacggtgttcccgctgaccgacgactacgaactggtcaccaaacagttgacctccgccagcaaggcgctgaaaggcgtcgagtcgcaggatgacatcgataagatgtccgatgccgaatatcaggacatcgccaattggctcgaaggcacgcagaaccgcaaggacgccacctccttgattggcgacggcgtggtgtcttgcgcggcgatgctccccggtttcgcttatggcgaagccaatcatgcgaatgccgaccgtcagcgtgcggcatccatcgtgctggccaccgacaacgtcgtgtcaggcaaacccacctattcgctgaccgaagcgttggacttgacccagcagaccaaaatcaccgtggacggcctgtattccgggccgaaagccagtgaatcggaccaaaccacaacggatatgaagtccgcgatcgagtcgcatggaggcatcttcctcacccaatcgaatggcgcgtcgatagatgagctggtacgggatattcagtcgcgtagagatacggatgtggagaacaaggcgaaatcctcaatggtggacgctcccggtctgtggacgcttgctctggccgtgatactcattatctggatcgtatgtgcatggaggttgaggcgatgaacggattcaccttctcccccgccttgggctgggtcgccggcggactgctggcggccgggctcgccgtactggccattctcgaaatcgtattgtttgttcgccgccgtgcttccagtgacgagaccgtgtgggcttgcatacgacgtacgcttatgctgctcatcgtagcggtgatggtactgactcccagcgtggtatcgtctaccacctcacaggtcatcaatgccaccgacgtcatcgtggcggtggataccaccgggtcgatggcggtggctgatgccacatacgggtccgagaagaccattacccgcatcgatgccgcgcgtcaggccgtgcatgatgtgaccgctgcttacccggacgccagtttcgcggcgttacggttcggtgcttcgggaacacttgatgtgccgctgaccccggatgcgccggccatcgataattgggccaacacgttggcggtggaagccacatccgtgtcggcgggatccagtctggatgctccgatcgatcaattgctgctgaccgcgaagtcgattcgtgaagcgcacccggatgatgcgattgtgctgtacctcatcactgacggcgaacagacctcgaatgtgacgcgtcgtacgttctcgtcactgcgacagtatctcaatgatgggtttaccgtgggcgtcggctcgaccgagggcggcaagattcccgtcatcgccgatggcgtcagtgccggcgattccaacaccacggaccactgggtggtcgacccggataccggcgaacccggcatctccaagatggatgagaagaaccttaaagacattgccgacgagatcagtggcacgtatgtggccgtggacgcttcacagactttggcggattcggtttcggccaggtcgtcgaagcagtggcgcatgaccaccacggtcaaggagcgcacacgcaccacgccggtggtatggccgttggccattgcgttggcgatattgcttgccatggaagtcggtgcatggatcgcgacctcaaggaggctgctgtgaggaacagtaacgaaatccacgagaacgatggctcggcgaatattcggatgcgggcgaaatgcccgctttgggcacgtatcgtcctggcttgtggcaccgtattgctgctgctggttgccggcgtggcggcagtaaacctgtccgcttcgattacgttcaatcaggccaccgcatcattgaatgccaatatcaaagcggctcaggatgagtcgactgatatcaccacgctcaaggcgcaacagcagcagaccgatgcgcaattcgccgaggccgggcgaatgcgtacgcttctgttgccgcaagtcaaggacgccatcgacaccaatgcttcgatttcttccgagctgacgaagatcaccctgaaacaggccgaggcgcagaacagcggttccgattccgggcaagcccagtcggcgcagcaatccgagagttcctcagccaatgccaaaaagggcggcgcgttgaccgacgagcagaagaagcaggtcgaggagctgatgaaggccaatcagcaatccaccgatacccagtcgaacaccacccaatccgagcagaaggcgacgcagaacaagggtaccggggccaccaagccgtggtaagcagtcgttcacggttgctctttttctcacatcctcacgggtcatggccttatcgcggctgtttcccggtttcggctgtcggctttggcgtttgtctgatcccgatagcccatggctgatccaaggtgtgcccaaacaggctatttgtggataatcgttacggctatacacaacacttgtgaataacttcgcccaaaatcggcaagctagaaccacattggtcgttccggctggacaagcatgagtcctgtccttttagctggatatatgaatacctacaccagcaccccagcacccatcgatcccgccggcggctttgccggcaatacggtgacgccgttcgattacggcacttgcccttgccatgcggcggtacagcgtagtcgcgacctcgtgtccgtccaacgtgcggccacactggcgcaatcggaccagatggcggtggccgtgaaccgctcccgcaacatcgtgtggaccggtaaagccgccgacctattccgatcgcggctcagtcgcaccgcacagtattcggccagtctcgcgcaagacatggagaccacccaccgattggcttgggggtcatcatgagcgagcacgattactggcaggtggaatcgtccgtttacggcggagtgggatatgcgccagccactcttgaagaatatgccgccatagccaaggctctcgatgacgaggcggcaggatttgcggccatagccacggcttgggaatcggccgcattacagttgcagtcacatcggcatagtgcgccgatgtgcgtcaccttgcagtcgggcgatccgagcgccgttgttcccggccatgtcactgcaccatatgccgcgctgggcaatcggtgttatgaccatgcaacggcatgtcagcggttgagcgatgatctgcgtggcgcggccgatctgctgattcgcgcacactctctgtattctcaggcggagatgacggctcggcgcatgtttaccgaattattgcaggccggtacacaggccaaaccgggatatgccgcggtgggtgttgccgctgtggcggcgggcggctttctggccggctgggctattgacggcaaaccgaacccagcatggatgtccacgttcacctatccgttccaggaaggagtgctcagcggcgcgggcggaatcattggcggcgtacctatcggcaagagcattgcgcacaccgatgaggtcaacaaggctgcggggaaaatcgccaatttctccggcccggcgaaagacgtcgtccaaggcaatcatctgaacgtgcgcgaggtgcaggcgaatgccgacgtcgtccgtgcaagcggatcggtggccgagtcaatggagaatctgcgcaggctcgccgaagaacggctcggcaaaatcgagctgaacagcggactcgaatatgggaccatcgccattcaacgctatgaacgggctgatggaaccaactcctggctggtcaccatcccgggtaccgatggacaacctgactcaccattcggctgggcgcagaacgtggaactgatgagcgccgatcaggagcgccgcaggaaagcggacagcgctcgcacggttgccgaggcgatgcgtcaggctggtatcggcaaggacgagcccgtggcactgatcggccactcccaaggtggcatcgtcgccgccacgcttgcctcggattgggcagaggaatataccatcgagcatgtggtgacagccggatcgccggtggccaatcatccgattccgcaacgcacgtgggtcaccagcgtggagatcgatgatgaactggtcgccgcgctggacggtgccgccaacccggtcaccgataattggctcaccgtgcaagggcatgtatcgcccgcgcccgcggcaacaccatccacagtgcattcggacgtctcatgcactcccggcgcaacgcccatcaacggtctgaccccatatgacgccgcttccgtggctggttcgaccaacggcagggagttgtcgcattggctcaaataccatcaggccgcttatcagaacgccaccgacctcggctcccccgccgtgcagcgccacgaagcgcattttcaggaagtcatcaacggagaactcaaggaaacccgctattaccaaggccgtatgacccagtccacaaccattgctcccggcgagcgcaccaccgagttcagcacgttcggcggttaaaagtaaataccacacttgacagagttgtcaagaaaggagttaacaatataatgacgagtaggagatggctcatcaaactgatgaagcaagcggcgaaacgcaagaatattacgtttgagagtatcaggcaaagagggagtcatgagatattccaactcgatggactcatgattcccatcccacgccataacgaaatcgacaacgacctcgcgaacatcatttgtaaggaagcagaagccaaactcgggaaaggctggtatcagcagtgaaaacatatcaggtcatcgttcgtcctggcgaaaaatactggattcttgagattcccggtatcggtttcacgcaggcaagaacaacagcagagattgaaagtatggcacgcgaccttatcaccgtcatgacgcaagatgctgatttcgcactcaccatagagacaaaactgccgcaatccgtacaagagcaccttgatgaagctcggcgactgcgcaaggaagaagcggaatgcagatcgaacgcagcgcgggaaactcgcgccgcggcacaagaactacatggcatgggtctcgccctacagcaaataggcgatatactcggggtctcacggcaacgggcacatcaacttgtcaatgctgtcaatgcttagcatcaatcggctacccccacaatgcaatcaccgcagagacgcggctagcgccactttcccgggattgttgcgctagcatgcccgaaaccctctctatcagcgcaacattcccgggaaagtggcgcgcaaagagtgtcaggcgcgtcgctcgatgagtgcgcggccggatgcgaggcggtcgagcacaccggttttggcgatggccagcatcagataccaggccatcacgccgctgataagcacgccgccggtgacctcggaaatcatgtgcacgatgccacgcgggctgacgaatgacacacccacgtagcgaaacagcatcagatatgtgccgtattccaaggcgaccaacgcaccggatgcaatggaaatcggcagattgaacatgcggtaacgggtcaaagcgaacggaatctcagcgaaaacaccctgcagcagcgccgagataatcacgaagcccaaatcgaactggctaccaatcaccgtttcgaccagcgtgccgataaggttcacgtacagcgccgctccgggtttgcgcagaatcagcaccgccagcgtaccggagaaataccagacggcgtgcacgatgctggcgaaaccgggcagaatcgcaccaaacaccgaagagatcggcatgtacgcgaagttgaatccccagaagatcacgccgcaggccgcgcccagtgtggcaccgaccgcgatgtccaacggctgccatttcagcgacgatacggcgaccgaacgtttcggaagagtatgaatggtggttgcaggcatggtgatctcctagccttaaaggccgcacacagtaatcgaatcacgggcgttccttgacctgtgcggctcgggcgggaacgccacaccacagtgtagccgctcggttcacggctggaagtacccttggaggttatgaagcttaccgatatttcccccgcaatcgcattgaccccgctcgacggccgttaccacaaggccaccgccccgctcgtcgaatacatgagcgaacctgccctgaaccgcgaacgcatgcgtgtcgaagtcgaatggatgattcttctggccaacggctttgagggcaacggcaaccagccaatcgttgacggcgtcaagccgttcactgccgaagagcaggccttcctgcgcgccattcccgaggacttcggcgccgaaggcatcaagcagcacgccgctcatgaggccatcacccaccacgatgtgaaggccgtggagtactacatcgatgatcagatcgacaaggctccggccgagctggccaacatcaacgacgagctgaagaccctcgtgcacttcgactgcacgtccgaagacattaacaacctctccatcgcccgttgcgtcaagaacgcgatggaaaacgtgtggaccccggagttcaagcgcatcatcgaccacctcgccggcaaggccgaggaattcaaggatatgccgctgctctccctcacccacggccagccggccacgccgaccacgctcggcaaggagctcgccgtctacgtctaccgtctgaatcgtcagctcaagcacatcgaaaaccaggagtacttgggcaagatcaacggcgcgaccggcacgttcggcgcccacctggccgcatgcccggatgtcgactgggtcgccgtctcccgcgaattcgtcaccaaccgcatgggcctgacctggaacccgctgaccacgcagatcgaaagccacgactggcaggccgagctgtactccaccgtctcccacgccaaccgcatcatgcacaacctgtgtgtggacgtgtggatgtacatctcccgtggagtgttcgcccaggtgccggtcaagggtgccactggttcctccaccatgccgcacaaggtcaacccgattcgtttcgagaacgccgaagccaacttcgaaatcagctgctcgctgctcgacaccctctccgccacgctggtggaatcccgttggcagcgcgatctgaccgattcgaccacccagcgcaacatcggttccgcgctcggctactccttgctcgccctgaccaacctcatgggcggccttgagtccatccacccgaacacccacgtcatcgagcgtgagcttgatgagaactgggaggtgcttggcgagccgatccaaaccgccatgcgcgcctgcgagctcaagggcctgccgggcatggacaagccgtacgagaaggtcaaggagcttatgcgcggccacgccatcaacaaggaacaggtcgagcagttcatcgaccagcagtccttcgacccggaaaccgccgctcgcttgaaggctctgacccccgccacctacaccggtgtggccagccagctcgtcgctttcgaccgctgaaataggtgcgatgcgagtccctcgagcccatcgcatccaccacactactgcgctgagtcacaaaccaaaccgcaaactgaaccgaacaaggacaggcgtcaggtaaccatttcatgactactgaacaggagcagtccactacggaagatcgcccggacaaggcgacctcctccactaccgaccggccgatcgcctctggtgacggccggtcggccagttttgctgtcagcggaccggacagcccggcaaccgacgacagcaacgattccggaccgtacatcgacgacatcgctccgcgccgcacgcgcgacttcggcgatctgacccgggccggtctgtcgctgttgatggccgccgtggtcatggtgttcgccgtgtatctgggcggcatgacgcgcggcgtcgaatccgacgcacacaccgcagcccaggtcatcaactggttggctgacttcccctccaccgtgctgacgcagctggccaccatcgtcatcgtgatcatcgtgctcgctcaattgctactggcccgggaatggctgcaggccgcggtgtccgcgctggccatgttcgccggctacggcatggtgtgggtcgtatcgacggcaatcagcagtctgaacgatttcaccctgccaatggcactagtctcagccgccacctcatacggctccgggctgttgcccgacatctacgccggcatggcgtccttcctgaccgccgccgggccacgccgcacccgctccacggtcaaatggagctggaatatcctgtatgccatcgctgcggtgatggtggtgctgtcgtggcattcggtcaccggcatgctggtgtcgatggccgccggccgcacagtgggcatgctgatccgattcgtggtcggcacgcagaacaagggcgtgtggggccaagatctggtcgccgccctgaaaggcatcggactggacaccgcctcgctgattcggcatcaggagcccggcgtcggccacggttcactggccgtcacgctggacgacgatctggccgaaggctcgcgcatctacgatctggataccacggacaaccgtcgtttcatcgtttccgtcatcgacgcgcagacccataccgtcggctatctgaagcagttgtgggactgggtgcgtttcaccagtgtgtccatccgacgtgaccgttccgtgcgtgacgccgtccagcatcatttcgccatgctgctgggtctgcacaatatcaaactgcccgcgcccgcaccctacggcatcgccgataccgacgaatccgcgattctggtgctggatgcacacaccatcgaactgcccgccaacctgaacacgcttaccaaggcggatgccgtggcctacatgcgctacctgtccgtggcgagccggcgcggctatacgcaccggcgcatcacgccggacacgctcgcccggcttgaagacggcaccgccgtgattgccggctggctcaacggcgacaacgcttccggtccggccaacaccgcgctcgacaaagttcagctgctagtgctgttcgccgcgctgatcggcgtggaaccggcggtggaggccgcccgcgaggcgtggggagacacgactctgacggccttggccccgttcattcagaaggtcgcggtcccctcccccacgcgcgcgctggaatcctgggacaagcagctgctcaagggcctgaggagtcgtatcaccgcgctggctgacgaggagacggtggaatccgccgaaccggtgacgctggcccgattctcctggcgttcgatgatcaccatgctgctggtcatcgtggccgtggtcgtggtcttcacccaactgaagcccgaggagatcatcaccgcgctgaccaacgccaacccgttgatggcggtggtgacgctcgcgttcggtgtctgcggctggatcggctcgtcgatttcgctcggttccctgatggcgcggcacaagcgtgacaatatgggcgtcttcatgagccaggtggcaggcggcttcgccaccgtatccatgccagccggcgtgggcccctcgttcgtcaacctgcagttcctgcgcaaatccggctatcgcaacacccaggcgaccgcaattatgagcgccgtgctcgtggtgtattacgccgtgtacttctccatgctggtcatcatcggcctgttcaccggccgcaacatgttctccggcgcaatcccgacaaacacgttggttatcgtgctgggcgttgtggtcgtggtgctgtccattgcgatgatgattccaccgttgcgccactgggtgacccgtcgtcttatgccgctggccaagacgtatatcaaccagctgctggacgtgctttcccagccccgacagctcacagtcagttgcctgggcgcgctgttccagaacgcgaccactgggctcgctttctgggcggccctgcaagcgttcggctattcatcgaatccgattgaaacgacgttcgtcttcatgctggcctatgcgttgggttccgcggtgcccacccccggtggtttgggcggtgtggaagccgcgctgaccttcgcattcgtggcggtcggcgtgcctcagggcgtggccctgtctgccacgttgctgcatcgcgtggtgttctattggctacgaattccgctgggcgcagccgctatgaagtggctcgaccgtcacaatctcgtctgatttgtccgtttttgtccattttgggcttcagaacacgaaatagatgtgaaaagccttataagatgcgggttttcgcaggaacatgcgctagtatcattgatgaaaacgtggacgaagcaaaagtgctcgccccctgaaccaagaaggatgctttatggcatacaacaagtctgatctcgtctcgaagatcgcccagaagtccaacctgaccaaggctcaggccgaggctgctgttaacgccttccaggatgtgttcgtcgaggctatgaagtccggcgaaggcctgaagctcaccggcctgttctccgctgagcgcgtcaagcgcgccgctcgcaccggccgcaacccgcgcactggcgagcagattgacattccggcttcctacggcgttcgtatctccgctggctccctgctgaagaaggccgtcaccgagtgacctgccgccagcagttaagagtctcgtagattaacagcgagatagcaagaaccccgaccattgcggtcggggttctttgtgtttgcggtatcggatgtttaaaaagcgggcgacctgtaaaaagggcatcaggccacccgcttaggaggagagggaacgtatcaggtctttcccatcatgctcacgcatgacccctcaagaaagacccagcttattaggctttggctgctttcttcgccaaacgctttgcagcacggcgttccttgcgtgcagctaccctgcgaatggtccacggcaaccaacgccacccagagaagaaggccagcagagcgagtatcacaccgcagcatgcgttgaacacaatctggataaccttcatctggctgtagaatgtgaatccggcaccaggcagtgcgccttgcatacagttcgtgtttgcaacggtatacagaagatggtgcatggcctgccgcgcgtaatggtaggtggcggggtcagtaaggtcaagctgctcgccagttggatcctcgcttacgttcagcagtttgatatcggcacctgcctccagcatctggtaagggctcatgaatttgctggtgttggcattatccgtgatgatcaaaccattgaagccccattcgttacgcagcagctgttgaatcagggaatagctgccgcctgtccatgtagcaccaatgcggttgaacgaggtcatcacggccttggagatcggcgtcttgacggtcgcgttctcatatgtgccatcggcgttcttctgaacatacttcatgtccatgtcgccggccttcatgcaggcttcgaagggcttcagatacagctcgcggatcgcttgttcgtttgaccatgtggcaatggagaagttgccttcacgatcgcctcgatgatcttcctgatcgttgagtgcaaagtgcttgatgtaggcgtacacacccttgctcgctgcgcccttgacctccaaagaggccatggagccagacataaagccatcctcggaatagtattcgccgttacggccggagaacgggctacggtggatgttcatagccggcgcgtaccagccatttgccccaccgagcaacgcctcgttgcccatcatggtgcccaattcctcggccaaatcggcattccaggtctgggtcaacatcatgatgctggggaacgacttaccggtgccaccatagaaccagccattagccgcatcggcatccgtctggaacggcttgtctacagaaccgatgtagtccactccataaccggagaagtagatgagctggttgtagtcgtcttcggtgagctggtcaagaatcttgtcccactgctcgtcgtcgtaatcaaggcctcgcatatcagagactttgaggccattcttcgcaccgaaaaccggggtatcgtcgatggattcgcgacttacatccgtgccggagtcattgccttccagttggtcaacaagagcagaatcggcggttttcttccacgtgcaggaggcgttgttgccatccttatccgtgcaattgatttcattgccccacgtgctgatttcgtcggatgcttcaccgtaatgcttcgggaaagtaccggtccagtcggcacgagtcaggtaggtgacatcgggatcggatgccgcgtcgaacaagttggagatggctttgccggtttcggcatcggtggcaaatgtggtggtgtccacgtccttattgtccggcgcccagctggacaccattgcggcattgcccgtctcggtcatgccatccgccacggtcttgcctttgtcggcaaggatgttattgacggcctcattggcattggcggcagccgtgaaacggtactctccaggatcgagaatgtaggttttcgcagtggtgtagtcataggacttgagctgatcctgagtgaaggttacggtaacggtttcgctgtcaccgggttcaagctcactggttttggcatatccgacaagattcaccgaggccttttccaccgcgttcttcttgtcatagtcagtgtacggagcctgcgaatacagttccacaacgtccttgccggacacagcaccggtattggtcacggtgacagtggccgtgaagccatcgcctgactcctgcaccgcaaagtcgctccactggaaatcagtgtaactcagaccatagccaaatgggtacacgacttcggatgcatagtcgtaatcgccggcgttgccctgtccgagcaccttgtcctcgtatcgggtttcgtaatacttgtagcccacatagatgccttcggcgtagtcgacgtaatagtatttcgtcggattgccgttctcatcgtagtaccggtagctaccgaagttctgggcggcaggagatgcgagcgcatccgccgcgaatgtgtcgacagtacggcccgaagggttgaccgcaccggaaaacacctcgcccaaagcattggtcacgttctgtgaatagacgacagccttgatgttggggtactggctcaaccagtccagttccatcgccgcgctggacttgaccagcaacaccacgtcatcaaagttgtcattcagatacttgatgatctcggtttcggtggagtcaagctcgatatagcttttctccttgtcttcctgcttgtctgcatggttgtacatggagcgcggcatatctcggccttcaccaacaacacgattgagtacatacaccggtacggtgcccttgacggagtcaagcagaccggattcggcctcaagcgcgctcagcggcgcttcattaatacgaaagtcttcggcatcgccgtagcttaccgatccggaggccagaccgtaatctttgcctgcaccggattcgtagtaattccatagggtctcgttgactttgaatcccgccttggtgaatgcacttttcaacgtcaccgtatccgaggagccgaaatagctcatgcccagtgaggtgctatccacgctattggcactgaagaaactgaattcggttcctttgctcatcggcagcgtattgtcgtcgttcttcagcaatacagtgccttcggacgcgatgcgattataaaggtcatcttcagccgcgcggatattgtctttcgtgtagtcggcggtgtaatagttcgcgtcgacgccatctgcagtaatgccattattgttgacgctctgatggttgtatcccatcagactggagatgagcttattggcgctcaactgcgggttgataagcaccatggccacaataatcactgcggccaatacgacggatactacggtttttacaatacgtgcgaccagtgggccggtattgctcctttgtgtattcatggttccttcttccttgacggatgccacaccctcttcagcatgtcggcatacgttcattgttggagagaacgaggaaccatccaacgcgtaatgcgtaaacggtatttttcatgcgatgaactgcatgattcgcgttatggccgctgacaccagccagccgtaagacgtgctgcgttatgcgggcaaaggtagcaacacatccaaagagaacacgccatcatcggcatttgcggtcaatacgccgtcatattgttctgcaatcattcgcatggaacgcatgccgaaaccgtggtatcggttgtcggctttggtggtttgcggcagcccatcttcaaaggtgatgccgccttggtaagggttttccacatgaatcagcagcatgcctttgctgtgacgcaccaccatagagatatatttctcacggccatcttcgattttgccaacagcctccatggcattatcaacggcattgccgaacagcgagtagatgtcagcaggtttcattccactcagtaatacaccgtcaatcatgcggtcaaaacggatgccttgctgctcgcaaagcaatgatttattggccagtacgacatccaaagcttcattgccggtatgaacagaagaatcataaataccgaccagcccattgagatcatcaatttcctgccgggaaatacgaccatccaacagcgttaattgtttcttcagatcatgcgttttcacattgatcaggtcgatggttgctttgtcagcggcaagctgtgattgctgctgcctcaataggctttgcagcacgataccatcgcgttcggcatgcgagcgcccgacaatttcacgcaataatgcgagcacgaatatgcatgtcacaaatctggtcagcattatcagcaaatacgcagtcaccgtcatcccggtagtgctgcctgcggtttcaagcagacaggaaaatacgttgacgcatagcaacagtccgagaaatggcagcagaatggaattatccaggcgttccggcatttgtccttccaacggtttggcgaacaaccagtatgccgctgccatgaacatcactgtcaagatgaagaagcacaatgcccccggccacgtatcgatatcggaataatcaccgggcaatttcatggtgatgattttcgtgccgcagtatacgcaatgctgggccgcaatcgccgcgaccgtgtagaagacaccctgtcgccttccgattacatagcattggcgaatagcccaataacacaacacatacagcaggaaaaatcggagaatgatgcaccagacccaccaataatagttacccaatgcactttggatattcggccattgtaggatataggtaacttccccaatcagaatcaccactgccacactcacaccacagcgaacccaaaaatgaggtcggcgaggcaattcccacacgaataacgcagcgcaagtcaataattcgaccatgaacccgttgagaaagggcatcactgcgatgagcatgacatcagagagcatggccatgtcctaaatcgccggccaaatcaatcaggaattgcttgcggaatgcccggccgataggcaatcgagtatcgtcggcaagtatcacttccgcaccttgcactgaagcaatgtgccgttgattcaccatgtaagggttgccgcagcgcaggaatcctctcccgcgcaattgtcgttccagctctttgagcgtgccagtcaccgcgatgacgccgtgttccgtgtgatattccaagctgtgaccgcgcacttcgatatagctgatatcacgcagcaatacgcgatgagtgacgccgcgctgtgcgatgacgatcgcctcagattcccgctcgcggagtttgaccgcacggccaagtttgcgttcaaagtcaggatacgcaaacggtttaacgatgtagtcgagtgcgtcgacctcatatcctttggccgcgaactgggccatattggtcacgaagatgaggatgacctccgaatcgactgcccgcaaccggtgcgccgcttccataccgtccatattcggcatctcaatgtccatgaatacgatatcccatactgttttgtatgggtcaagaaagcttgtcggctcattgaatacggtgacatcgaactgcactccggcatgagtcgcggcgtattggtccagacaagcacgcagcttcgccaccgctgtctcgtcatcttcgaccaccgccaccgtgaacatgcgttttacactccttcgccgttcataccgaacttgcttttagcttagtggacaatcgtggcatatcacagcacacacagtcagtgtctaccgcaaggcactcatcagatgtgtgaattcttcggtcggctcggactcgaaggggtcgaggagcacggcttcgcggcgctcgggagccgtcacggtcagatgggtccagtcggcggagaactgggctccggcggcaagcgctgccctgacgaattggccacgcagggctgcacgagtgtcggcaggcggattgtgtacggcatattccacatcgtcggcggtcagcagttcgcgcagctggttgcgggaagtcagcgaaccgtacaggcgaccgttggcgatgtcgtggtagtcgagctcaagctgttccatctgggcgaaggtgacgtccgggcgacggcgtttgagcgcgtcgaacagacgcttcttggcggcccagtccacgcggtcggcgagcgcatcgtatgcaccacgctccagcgcgtccagaacgcggctccactcccccataatcgtgtcgatcgtggtggccggcagcgaacttgccagcgcatcgccatgggtttc

SEQ ID NO: 1441 - DNA, 15724 bp, Unknown
  R257_15m  MAG No. k141_19035
ccgcttcgtgcgtctcccgcctcactcatgcggcgcctcggggaagcccactgggcttccccgcaagggcagacgcgccagcgtcagcccttgacagctccgcccatcgactcctggtagaagcgctgcatgacgatgaacaggatggcaatcgggactgagatgattaccgcggcggcggcgaagcgggcgaaccaatcgttgagatactcacggctgagcatctggtagaggccgagcgccacggtgtagttatcctgtgtgcgggcgatggccttggccatcacgaagtcgagccacgggcccaagaacgaggtgagggcctgatagacgagcattggcttgcacaccgggatgatgatcttggtgaacacctgccagcgagtgcatccgtcaaggtaggcggcctcatcaagcgacatcggaatcgtgtccatgtagcccttcatcacgtagaagcccgcgccggcaccagccgagtagacgagaatcaacgccacggtgacgcccacgccctgggtcaggcccaacgacttcagaatgaagtagatcactaccacggacatgatgcccgggaacatgcccagcaccagcacaatgttcatgaacgacttgcggaaacggaagcgcatgcggctcatgcagaacgccacgcacagtacgaagaacacgctgatcagacacaccacgatggaaatcaccagcgtatgcatgaacatgcgcgggaagttcaggatgtgggtgtcggtgaatagcttggtgtaattctccaacgtgtattcggtggggaaaaaggtctcgttgtaggggccgggattcttgttgaagctctccagcaccacccacacaatcggaatcacccagatcaccgcaagcacggcgagcaacagatggcttaggacatcgcccacgatgcggcgcttgcgctggtcatgccagaacggattgctggcggacttaggggttgcgatgtcggtacgaggggtcgcggtctgcgcgttgctgctcatcggaatcctccttcattcttgtaggaagcgctgctgcggtaggtaatcagggagaccactgccaaggtgacgaacgtgaagatgccgatgacggcacccaggttgtagtctccacggtccaccgtgagcttgtacagccaggtgataagcaggtcggtcttgccggccgtatcgcccaccggggtcggattgccgccggacagcaggtagatgacgttgaagttgttcacattgccggtgaacgtggtaatcaggtacggggtgagcacgaagaccaggtagggcatcgtgatgcgggtgaaggtctgccaccagttcgcgccgtcgatggtggcggcttcgtactgttcggcggggatgttctgcaggatgccggtgatctgcatgatggtgaacgggatgccgatccacaggttgacgacgatcacggtcacgcgggcccacatggtgtcggtgaagaacggcagcgggctgtcgacccacccccaagacatcagcaggcggttgatggcaccttccggctggagcatctggttaatgaccagcagcgagacgaactgcggcacggcgatcgacagcgagaacgccgcacgccagaagcccttgagtcgggtagtacgacgattgatgatcatcgcgaggaacaggcctaggaagaagttcaggaacgtcgcgaagaacgcccaaatcagggtccaggccaacacactgccaaactgggcggcattaatctcgccggtggcgctgaacagctgggtgaagttcttgaagccgacccagtcgaacagcagcacgtgatcgggatcgtagttggtgaacgcgatgcacatcataatcagcgtcggcaggacggtgaatacaaggatgccggccaccggcaacgccatgaacatgacctgcgcgttgcgatcggtgatgttcttcaggtcttcgatgaaggtcggcgccttgccggtctctcgggcgagcacctgtgccttgtacgcgctgcgcacggcatacgaccagaacacaaggaatagtacggtgatgaacacggcggccacaccatagaccatcagcagcaccgaattgtcaccggcatcgtaatgccaataaccatcgatcttctgtttggtctgggtgcgggagccgagcgagcccagcattgcgagcgccggcccgccagccgtcaccatgtaggcgatatacgccacttcgatggccaggaacaccagtcccttggccacctgcttacgggccaggttgcctgcgcccaataccaggaacgacagtcgggtcagggcatcgccttgggtggccgccgcgcgcaacgtgtagtgcgacggaggaatgtagtccgccttgcggcggcgtggtgcgcgtttcgctgcgcgcggcatggctgtggtttccatgattggtctttcttctcgcgttctacaggaggctctggtatgaggccatccactgctcggtgagtttggccgagttggcgtgggtgacttccttgttgtagatggaattgccgaagttctcgcacggtacccagaagttgttcatctcggcgatggacggctgcaccacggacgtctcggcgatggtgtccatctgggcctgggccacggcgtctttctcgatggccggatcggaggcaagctcgctgtccgagggaatcaccgaacgcatcttatagtgcttgcgctgtgattcggtgccggacaggaatgcggcgaactggtcggcggccaccggatgcttggtgtacgggttccagccgtagatggtggagccggcgaaggccttcatctgcacttgcttgccgttgagcgtgaagctgggcagcttggccacgccccagtcgtcgccgagattctcacggaccgtggcggcgtcccagttgccggtgaagaccacgtcgaccttgccgcttttcagcccggccaggccggagccgttcttgtcgttgacgaagttcgggttgttgcgcaagtcgacgaggtaatcggtgacggcggcgccgattgcaccgccgaactgcacgcccgacttggcgtcggtgccgtctttgccgaacagtgtgccgccggcaccgatatagaaggcgggcagataccaggagttggtcagcgggaatgagaccttgcctttggcgagcatggcgtccagcgaggtgatgtcttgctcggtgaacttgcttttgcggtagtacatgaaccaggtgttgccggccagcggcacaccgtagacgttgccgtcctcgccggtgacggtctgtagcatcgtggcattgcctttggtctgcttggcgagctgtttcatcgtcgggtcgctcacttggccgacggcgccggcatcgagcagggtgcccagctggtcgctggcgaacgtgtaaacatctgcggctacggtcggatcctgcttggctatgccggcggcgtctgccgaggccacgttctggtttttccacgtgatgctgtattcggggtgctgctgttcgaatgcggcctccatggtctgcagccacgaatccgtgttggcttggtcctcttgggaggcccacaccacaagcgtgatatgctccgcgtctccgcccgcgcttgcggacccgcaggcggacaggcccgtgacgaacagcgcacaggcggaaatcgccgctagggctttcttccatcgtgccatcatcgttgattttcctttcttcggacgccgactccagtatcggctcctgccacgcacacccttgggtactacgtttccgttttcggcctgatacaggggaatcgcggaagattggggggtacgtcgttgttgcttgagttcagtgtaactgaaattgcgaacgtatgcaagccaattgcaatcagccataattgcagagtcttaaatccttgatatttcaacgtttatcccgcgtttctctagattgacagcgttcgcaatcatgcagtatcattaagcaacatcccgcaagaatctgtaaaaacaaccgttattcggacccggcagagaagccagatccatcacacctgaaggaaggaccacgatgacgcaacagccccagacttaccccaagccagcctggctggaaaacgcccgattctacgaggtctatccgcaatcgttcgctgactcgaatggtgacggcatcggcgatattcccggcatcaccggcaagctcgactacatcgccgctttggggtgcaacgcgctgtggatcaacccctgtttcgactcgccgttcaaggacgccggctatgacgtgcgcgactatacacaagtcgcgccgcgttacggcaccaatgacgacctgatcgcgctgttcgaagccgcccaccggcgcggcatgcacgtgctgctcgacctggtccccggccacaccagcgaagatcacccctggttccaagccagctcccgcccgaaccctgctgagcgcactattgtcgcctcctccgatgggccgagccgtaaagacaacaccggagacccgccgacagccccctctgaggagggggctgtcggcgaagccgactgggggagagaccagcccaccaatgtctccaaccgctacatctggaccgactcctggatcgccggcggcgacggtctgcccttcatcggcggcgagactgagcgagacggcacctacatcctcaacttcttcaaatgccagccggccctcaattacggtttcgcgcacccgcaccaggcatggcagaaaccggcgctcggcccggatgccctggccacgtgcgacgcgatgatcgacgtgatgcgcttctggctggcccgcggcgcggacggtttccgagtggacatggccgacagcctcgtcaagcacgacgacgccggcaaaccatacacaatccgcacctggcagtacatgttctcgaaaatccgccctgaattccccgaggcggcgtttgtcgccgaatggggccgaccgaacgaatcgatgcaggccgggttcgacatggacttctacctcgactggcgctgggacggccacccgaatggctacaacctgctgctgcgcaatactgatacgcctatggaacacgaaggcgattccagttatttcaacgccgattcaggtgcctcaatcgccccattcctcgcggaatacctgccgcaactcgccgattgccgcgcggcgggcggccatttcaacctcatcacctgcaaccacgacaccttgcgcacggcccagcgcctcgccgaacgcgagctcaaggtggcgtacggcatgctgctgaccatgcccggctgcccgttcctctactacggcgacgaaatcggcatgcgctaccgcgcgctgcccaccaaggaaggcggctacgtgcgcaccggcagccgcacgccgatgcaatgggcgtccgacgctccgaatctcggcttctccacggccccggcggacgcgctgtatctgccgaccgatccggccgacgatgcgccgacggtgaccggcgaggcttcgcgaccgcattcgctgttcaactggatccgctcagtactggcgttgcgcgccgcccagccggcactggccgccggcgccgggttcagcgtggtcgccgcgcccgcggacggccgcgcgttcgcctatctacgcacggccgcgccgaacgacgacagcggcgacggcacggcggccgggcctctcctcatcgccatgaatccgggccgccacagcgaaaccgtgggcctgccggacacgctctcccccgatgccgtcatgctgctcggcctcggcgagccggccgtgggcgacgggcagctgacgctctccccgcagtcgttcgccgtgctcggatagcccgccggccacccaactcaccgaccatattgcaatcgttgtcaatatgagttacggtaaagacagaacagctcgaacattggtctgtcagattgccggaacctcaacgcagagcggccctcgaacagcaatgcaaacgactagcagtacccgatctgcaagcaaggagtcatcatgaccgacgcgcacggcaacgacgcagcgaccagcaccggcaccatcgcagacgccaccaacgacgccgcttccggtgcctcgcagcgtacggaaagcgctgaacgactcacccgcccgctggtcaagctggccaaaacctgcgggcttgccacctcattcatcgaccagctcggcacctacaccgaaatcagcgacgaggccttggtcgccgtgctcaaggccctcgatgtggacgcctccagcgacgaggccataaaacgttccatgaccgaacttgaggccgaaaacagcaaacgtttgctaccacccaccatcgtggccaccaccggcaagccgacaagcctgaccctgaattgcccgtcggacgcggacatcaccgcctccatcgagctggaggacagcaccgcgtttggccactttgccctgctgccgaacctcaattccggcaagccggacttgaccatcgcccccgatttgccgatgggctaccacacactgaccgtcacggtggacgggcgcgagggcaaggcggccatcatcgccgcccccgcgcgcattcccgtgccggaggcggtcgccgagcaccagcggtggggctggatgacgcagatgtattccgtgcggtcccgcgaatcgtggggcatcggcgattacggcgatctgaagctgctgctggcggacgcggccgacaagtccaaagccgacttcatgctcatcaacccgattcacgccggcgcgccgattccgccgcttgagccatcgccgtatctaccggaatcgcgccgattcctcaacgtgacgtacatccgcccgcaggacatccccgaatacggcacgctgccggccgatatccgagcgcaggtggatgcgctgcatgattcggtggccgcacgcaacgacgaatcgaacccgatggacatcaacgcggcgtgggcggccaaacgcccggcgctgcgcctgatcttcgacgcgggccgcaacaacaagcgcgagctcgaattcgagcatttcaagaccaccgccggcccggacctcgattccttcgccacctggtgcctgtgcttcgaggtatggggcgcgccgtggggcgagaaccgttggttcttcgagaagaccatcgacgacccggccgtgcgccagctcgtcgaggagcaccacgacctgttcgagttcaaccgctggctgcagtggattgccgccgagcaggtgaacgccgcgcagcaggaggcgctggaccacggcatgacactgggtctgatgcaggacatggccgtgggcgtgcacgggctcggcgcggatgcctgggccaatccggaacgcttcgcctccggcggcgtcacggtcggctgcccgccggacttctataaccagcagggccaggattggggccagccgccgttcagcccacgctatctggaggccaccggctaccaggtgtaccgcgagatggtgcattcgatgtacgagcacgcgggcgcggtgcgcatcgaccatgtgctgggcctgttccgcctgtggtggattccgcaggggctcggcgccctcaacggcgcatacgtgacgtacaaccacgaagcgatgctgggagtactggccatcgaagccacgcgcgccggaggcatggtggttggcgaggatctgggcaccgtgccggattacgtgcgccgcattctggcagatcacggcgtactcggcactgacgtggaatggttcaaccgcgtggacgattcgccgaacgccggcgacccgtaccgtgcacccgaggactaccgcaagcaggcattggcctcggtgaccacgcacgatctgccacccaccgccggctacctgaacttcgaacacgtcaagctgcgcgaggagctgcatctcctgagcgagccggtggaggcgttcgccgcctcggcgatggccgaacgcacggccatgatgaaccgtctggtggagaacggctatatctcgcagaccgtggcggatgatgtggaaggccatgtgcaggagatcatggaggcgatgcacgccatgctcaccgatacgccgtcgctgctgctgcaggcagcgttggtggacggcgtaggcgaatgccgttcccagaatcagccgggcacttccagcgagtattcgaactggcgcgtgccgctggcggacagctcaggccacgtggtgcataccgacgaggtcttcgacctgccacgcgtgcagtccctagccgccgtgatgcgccgagagaagcggtgatcgattccggcaatgggaaattggtctaaatcggcttcgaggggctgatttggccttccccggacatccacttccgcttcaaggggctggcgcccaagtagacccagcgcgagaacggcggaatgacgttggcacaaagtcgtttgcacttgtggtttcaccggcaaggagccccttgaaacggaagtagatgtccggaatgccctaaatcagcccctcgtaatcgagatagccgaagacgacgacttgttatgggcatgttatcgttgtcatgacaatgattgttcgcgacggtaaaggagcgacggcatatgaccaaggcaagcattcaggcagtggcccgcgaggccggcgtttccgtatccacggtgtcccggaccttcgccaagccggatctggtgcttcccgagactcgagaccgagtgatggccgcggccgaaaagctcgactactcagtctcacgctcggccgccgccctaaaatccggccaatcgttccgtatcgcactacttgccagcgagaccatcgccagttggttcaattcgaacatcttcgccggtcttgactcggcgctgcgcccctccggctacgacactgtgccctaccccatgcgcaacgccgccgagcgccacgacttctttgcggatttgcccgtgcggcgcaatgcggatgcggtgattgtcagctccttcgacatcgaaccggctgaagtggagcgactgaagcatatgcacgtgccgattgtcggcatcaacatcccctccaccgatgggttcgacgcaggcgtgagcattgatgattacgccgccacacgttcggctatcgagcacctgattgcactcggccaccggcatatcgcgttcgtcggcagcgcaccgaccgaaaccaatatgcgctacagtgccgaggctcgtttgcagggcgtcattgatgccgctgccgcccatccggggatcgagctaacgcccctgagcattcaacgcggtcttggcgaaagcaacgcggcattgaacgccgtactgaacgcctcccccagcatcaccgccttctgttttgaggatgatgaaatggccgcgcccgtgctgtatcgcctgcgtcaatacgggcggcgggtacctcaggacatttccatcatcggcttcgacgattccaccctgtccgccgccgtgggactgaccacgctgcatcaggacccgttcgcaatgggcgcgactgccgggcacatggtattggatgccattgccggcaagtcaatcgaaccggcattcgtacggccggacactccgctaatactgcgcgaaaccaccgcgccgcctgccgcgacagcagcgcccgcgcaggcgtgaccacgttaccaccgcaaaacgccgataaatcgatttttgcatgtgtaattcacatgatatcgttgtcatcatcaatacaacggtcgggccttcacacagcagttcggccgcgaccggaacaacccaaccacaacgcacccggaacaggagagaatcggcatgaccgcaaataacctcaatgacgactggtggaagcaggccgtcgtttaccagatctacccgcgcagcttcaaggacgttaacggcgacggcatcggcgacatcgccggcgttaccgagaaaatggactacctgaagagcctcggcgtggacgccatctggctctccccgttctacccctccgatctggcggacggcggctacgacgtgatcgactaccgcaacgtcgacccgcgactgggcaccatggacgacttcgacgcgatggccaaggccgcgcatgaggccggcatcaaggtaatcgtggacatcgtgcccaatcacaccgccgacaagcacgtgttcttccaggaggccctcgccgccgagcccggctccccggcgcgcgaccgctacatcttccgcgacggccgcggcgagcatggcgaactgcccccgaacgactggcaatccttcttcggcggcccggcctgggcgcgcgtggccgacggccagtggtatctgcacctgttcgataaggcgcagccggacgtcaactggaagaatccggacatccacgaggagttcaagaagaccctgcgtttctggtccgaccacggcaccgacggcttccgcatcgacgtggcgcacggcctggccaaggacctcgaatccaagccgttggaagagctcggccgcgaatacagcgtggtcggcgtgctgaatcatgacttcagccacccgctgttcgaccgtcgcgaggtgcacgatatctaccgcgaatggcgcaaggtgttcaacgagtacaacccgccgcgctttgccgtggccgaggcgtgggtggtgcccgagcaccagcacctgtacgcttcgatggacgagctgggccagtccttcaacttcgacttcgcgcaagccaactggtatgccgacgagttccgcgaggccatcgccgccggactcaaggcggcggccgaaaccggcggttccaccaccacgtgggtcatgaacaatcacgacgtgccgcgcagcccctcccgttacggcctgccgcagatcaagggcgcgccctaccaccagctgccgcacgactggctgctgcgcaacggcactacctatcccgaggatcgcgagcttggcacccgccgcgcccgcgccgccgctttgatggagctcggcctgcccggcgccgcctatatctatcagggcgaggagctgggcctgtttgaggtggccgatattccgtgggatcacttggaggatccgaccgctttccacactgctcaggccacgatggacaagggccgcgacggctgccgcgtgccgctgccgtggaccgccgccgatgagccggccttggccgacttcagccgtccgactccggccgatgacggtaccggcgagaaccatgtgccgctgtgcgccgccggccagttcggcacgggcgcttccttcggcttctcgccggctacgcgcgctgagggcgtgacgccgaccgccgacccgcacctgccgcaaccgctgtggttcaaggattacgcggtggacgtggagcaagccgacccggactcgatgctcgcgctgtatcgcgccgcactggcgattcgccaggagtcgctgaccgccacgcgcgacaccacggccgagcaggtggacatgggcgacgatgtggtggcgtacacccgcgcggcggttggcgggcgggtgttcacctcaatcaccaacttcggcaatgccccggtcgcgctgcccgatggctccgtggtgctggcgtccggcccgctgacccccgaaggccagctccccaccgacacttctgcgtgggttattcagtagagcttttgcgagcttacccgacgccagtcatccatcttctccggatgctggcgtcgtcctttttcccggctaagctgtctccatttcggggatgactgccctttctttccattcgcgacatgccaaccccgaaatacttaataatattctatatacttaacaagagatgtgaatcttacagattttcgttaaggattgaggtcgacatggatgccgagcattacattcgcgagacacttggtctgccctgccaaatcacttcttgggatggcactgcctcactgccgctatttctgaccaacggacggacattcagcaaactcaccatcgacaacacgagcatgctaatcgcgagcggagaggctcacccattcagcatcacacgcgtcaccgccgacgccagcaggcttgagcagcggacggatctgcccattgtctttcagtttccccggctttctgcataccagcgaaaagccctgattcagaatcacgttcctttcatcgtgcccggtacccaactgtatatcccttcactgggcatggtgttcacccagcgcatctcctcacggctgctggagaacgcacaggatatcgaggtgcgacccttctcccccgcaacacagctggtctggctgtatttgctctactccaacgagagcaaagtccaatcagatattgcccgagcgcttcagtttaccgaagctcaggtcagcgttgccgtgacgctgttagaacagctggcattcgtgcaccgcaccaagcaaggccgcagcaatagcgtcgaactactgacttcaaggcagaccagccgacttgatttactgaaatcatcttggcatctcctgaagtcaccaatattcagcaaatataccgtcacgaatcgcaatcgccagatgattgccgacgagctgattccggccggcgaatttgctctttcgcgcaggacgcaactggccaccccaaaactgcgaatctatgccgttgaacgtcattggctcaagcagcacaacaaggaactatgcattatcgaccccgctttggaaaaggtgccagataatgcatatattctggagctgtggaggtacgatccccgcctacttgctcaatatacgcaggaagactaccttgccgaccccatttccacggccctgactcttggcgagattgccgacgaacgtttggaagacgccatacaagaatccatccgcaatactttctcaggagtgacaatatgacacaaggcctgcagctcatcagaacggcctttgccggctacgaagattcttacgtaatcatcggcggcaccgcttgtgacatcatcataaccgacaacgacctggacttccgagccaccaaagatattgacatggtgctgattgccgagggacatcttcgcgagtttgcacaacgattgtggtctttcattcgcgatggcggatacacctctatcacgaagaactccgcacagcctcacctgtaccgtttcatgcaccccagtacgtacgggtatcccactatgatcgagctattttcacgtcaccctgacttccctattgtgccgaactcgttcctgacgccattgcatattgcaaacgacgtttccagcctgtcagccatcatgctgaacgacagctactatcggctattgcagcaaggccgcgaatcaatacaaggcatcagcgtgcttaacgagaaatatctcattcctttcaaggcgaaagcatggttggatctcaacgcccgagaacaacatggcgagcacgtagacggaaaagatctcaagaagcataaatatgatgtattccgtttggctcaactacttgctccagaggatcgcgtgtctctcaacgacgaggcctaccatgatctcgctgattttcttggggaaatatcccatgaaacgcttccgatgaagcagctcggcatacggggaacacagcaagacatcattgatttgatagccggcgtatatcaactgtctatcccaccacgcgatgaactgcccaccacgcgatgaatcttctaccacgatgtcagcgtaattttgtattccgcggaataaagccgttttgcgtcaccacgtggtgggtagtttgctacgtcgtggggattttactacgtggtggaggtttgactatatggtgggaccatgcgaaaggccgccgctccgaatgaatcggagcggcggccttttggtacgtgctgggtactctcctcaggcgcttatgcgccagcgggagctacaggggctcactgaacctgggcgcgggcgatcttgccggtgaaggagttggcctcgtcggcatccttgacgccatccttgttccaggagaacatggcgcgcagcttcgggccgacggtctcgatgcgctcgttggagtacttctcctgcagttccttgaagtgcggggcaccggcatcctgatcgtcgatgaactccttggcgaaggagccgtcctggatgcgctgcaggtggtattccatgcgcttgcggcagtcctcgttgatgacggtgttgacgtagtcgccgtactgggcggtgtcggagcaggaccaacgagccttgttcaggccgccctcgttcatcagatcgacgagcatcttgagctcgtggcagacctcgaagtaggcgatctccggctggtatccggcgtcggtcaggacttcgaagcccatctcgacgagcttgttcacgccacccatgagcacgttctgctcgccgaagagatcggtctcggtctcttccttgaaggtggtcttgatggcaccggcgcgcagagcaccgagggccttggcgtaggccagggtcagagcccaaccatcgccacgcggatcctgctcgacggccacgacgaccggcacgccacggccagcggcgtactcacgacgaacgatgtgacccgggcccttcggggcaaccatgaacaccgggtgatcctcagtgggcttgatgtagccgtagtgaatgttgaagccgtgagcgaaggcgacggcggcacccggcttgatgttgggctcgatgtcgttggcccagatggtgcgctggtactggtcgggggccaggatcatgatcacgtcggcctcggcggaagcctcggccacggacttgacctcgaggccctgctccttggcgaagtcgaccgacttggaggtcggacgcaggccgacgaccacgtcgacaccggaatcgcgaaggttcagcgcgtgggcgtggccctgagagccgtagccgatgattgcgaccttcttgccttcgagaacagaaagatcaccgtcgttctcataccagatctgtgctgccattattggcactccttttcagtagtggggtgtggcgccgctgggcgccggggtatctacggtgtgcagataagtcctgtgttgcgaggattgtgtccttcaaaccgaaatcaatcctaccgagaacgccgtcacagccccgctggagtccacaacgtgagctaggtcactattggagtatggacagccgtgtgcagagaacgattctcgataacaactctgcacccttttgaacagaatcgcacaatcccacatatggggaaaggctgagatatcaacgatcttgcatattcggtgttcgtttgcctgcaagaaatcagcgcacagttgttattgagaatgattcgctgcgcgcaacgacacaaaaccgccgctcccgtatgggcgggaacggcggtttgctagcttaaatccccttcaggggcggcaatcactgaacctgggtacgagcgatcttgccgttgaaggactcggcctcgtccttgtccttggcctcggcgttgttccaggagaacatagcgcgcagcttcgggccaacagtctcaaggtgcgggtgagagaactcttcctgcagcttcttgaacttcggggcgccagcagcctggtcgtccatgaactccttggcgaaggagccgtcctgaatgcgcttgagctggtactgcatgcgcttcttggtctcgtcggtgatgacggtggaggtgtagtcgccgtactgagcggtgtcggagcaggaccaacgagccttgttcaggccaccctcgttagccaggtcgaccagcatcttcagctcgtggaacacctcgaagtaggcgatctccggctggtagccagcctcggtcagcacgtcgaaaccgaggtcgcacaggtggttgatgccacccatgaggacg

SEQ ID NO: 1442 - DNA, 10270 bp, Unknown
  R257_15m  MAG No. k141_19146
cgtgttttgtagcatccgtggagttacatggggagtatgactgaaaacatcgctgataaggccataaacgatactcgtatcgtcaagcagttcaccaatcccgtcaaggagccgattgacagcgacatcaacctgttcgatctgctcgatgagcgagccaagcgcgatcccgatggcgccatgatcgaatataaaactgaggatggcacctggcagccgtatagcgcccaggtcttccgcgacatggtcatcgatctggccaaaggcctgattggtctgggcgtcaacaagggcgactccgtggccatcgtgtctcgcacgcgttgggagtggaccgctctggatatggcgatcatgtccatcggcgcactcaccgtgccggtatatgagaccaactccgccagccaggtcagctggattttcaacgattccaaggtcacgctcgccatcgccgaggatgacggtcagcgcgacaagattgaatccgtgcgcagcgaggtgcccaccctgcgcaacgtgttcgtcatcgaagcaggcggcctgaacgccatcaagacctatggcgaaagcgtcaccgatgccgaattctgggaatacaagagcgcctcccacggcgacgaccgcgccaccatcgtttacacgtccggctccaccggcaccccgaaaggcgtggagctcacccaccgcaacttcgcgttcctggtgcgctccggcctgcagtacatgcctcgtgccggcgcatggcccaaccgccgtctgctgctgttcctgcccctgagccatgtgttcgcccgattcctggaattcttcagttttggcggcaccatttctctggccctgagctccaatatgaagaccatggtcaaggacttcgagaccttcggccccacgctgctgcttgccgtgccgcgtgtgtacgaaaaggtctacaacgccgcctcccagcgtgccggcagcggttttgcgggcaagatgttcatgcgcgccgccgaaaacgcgcgcgaatggtccaaggccgagcagaagggcgagaagctgccgcttcccggtcgtattgctcacgctttctacgagcaggtggtgtacaagaagattcgtaccatctttggcccgaacgccgactttgccgtcaccggtggagccccgatggattccgagctctcccacttcttcaacggcatcggcatgccggtgctggaaggctacggcatgacggaaacctgtggtccggtgtgcgtgagcttgccggaagacaatcgcatcggcaccatcggcatgccgatgtgcggcatcaccgccggcatcgccgaggatggcgagctggtgatcaagggaccgctggtgtgcaaggggtaccacaacaaccctgaggtcaccacccagcagatcaccgatggctggctgcacaccggtgatttgggcgatatctccgaagacggattcatttccatcactggccgtaagaaggacctcatcatcaccgccggcggcaagaacgtgtcgccgggtctgcttgaggcttccgtgatgacctcgcccgtggtcaaccagtgcttggttattggcgataagaagccgttcgtggccgctctggtcacgctggatctggcggatgccaacaactggttggaatcccaaggcgccaaaccggaacccgatctggcctcgctggccaagaacgccatcgttcatgccgaggtagagcgtgcggtgaacgccgccaacgagggcgtttcccgcgccgagtcgattcgtaagttcgagattctgccagacgaattcaccgaggccaacggcatgctgaccccgagcctgaagacccgtcgcgcgcaaatcgttgagcactatcgcgagctcattgacgacgtgatctacgtgccgttgaagaagtagctatcaactccctctgatccaaaaaataagctctctctgacgagggagctgtcagccgcaggctgactgggagagaccgcggctagcccgcgaaacaacaaggccgggtgcgacttgcacccggcctcagcttattcagtccaaaatcgccgaaacataatcggcggcggcctgatccagctccgcatcgccgatggtggcggtgccctgcaccaggaacggctcagcatagttcatgccgatcttgtacgccacgacctcaaacgggctcagcagctcctccatggtgcggctgtactcgccatccttgcggtacttggcggcgtcggaaccagtggtgaccaccagcttgagctccttgcccttgagtgcgtggcctccaccgtaggcccagcctgcggtgatgacctcgtcttcccattccttgagcagcgcgggggaggagtaccagtagaacgggaactggaggattacgcggtcggcggcctccagtagctcgtgctccttgtcggcgttgacggagaagttcggatattcggcgtattcgtcgcgtacgatgatgtcgtcctcgccttgtgcggtgagttcggcaagcagacgggcgttcactcgcgagccgtccttcaggtgcggatggaatacaagaatcagcgttgacatgggatttcccttctataactgctaccaatgtggcctaatcaccactatcgtatgccgggaagcggaactcagtccagtccggattcaggtgcgagccgcgggatgccgcggatgagtaattgacgcgggaaaggatgctgactgatgatttggcgctgaagcttcagtgggccgcatatacgagtcctaaagcggataggatgggatatgacgcggatatcgtcggtggactgaataacgggaggcgcacatgaccatgaaccgcatgctgatgtgccgtacccatccggtaatggagttcgagtatttcgaacgcggcggatacgccctgagggcaggggagatctacgacgagtcccgaatcccgatcggcatgtatgtggacggcaaacctgagcccaccggtgagtcgattaccgggtggtggcgttctcgcggcattcccatgacccgtgacggtatgcgttccgtatttgccggttcgggtatcgcttcgacgaacgatctgctggaccgttccttgggactcagcctgtcggaccagtattgggtgcggcctctcgaccggcccgatctgacgtgggaaaaactgaactttttccacaacgattttgacgaacgacttgggcaggccttattcttcggtaattcgtcgcgcatcggcaacgtgaacaccccggatgtcaccagtgccggtgacctgccgaaacgttggattatcggtcccgatggcgtccgcagcctgatcaagggagggcgcaccggtcaggagccggacaacgagcgcatcgcctggcatacggcacgactgttcggcatcgaccatgtcgaataccgcatcggccgcgccaagggcatccgggtctccgtctgcgatgaaatgctcgaagacacgcaagagctgattcccgcagggcaggttatgcgcatcttccgacgcggcgacaacaccgaacgcaagatgatatggctggacgcatgtcagcaactcggcgtaagtcatgatacggcaaatgcggcgaccaacgattttctgttccttgattttcttctgcgcaacaccgaccggcattacaacaacttcggtctcatccgtgacgtcgaatcattcgagattcgcccggccccgatttttgacagcggcgccagcctgtggaacggcatggaccccgaagccatcaccaacgaagactatccggcgaagccgttctgggtcgacgactacggcgatgcggacaacgcctactggcagttgggacttatcgacgattgggaccgttatgatttggggatgctcgacgaggtgcctgaactgatacgggcacagctcgccaccaaccgccggctgtccgctgatgtgattgacgccatctgctccgccatgcaggagcgcatcggcatcatccgcaagcttgcacgatgatgccgcgccgggaggcaactcagtcgaggttggactgcgtgcctgcggtggcttcgttggcggcttgctcggcttgtgcctggtcgagcttggctcgtacgtcgttgagcaggccctgggcgcgcttggccaaggcctcgccgatttcccattgacgcatcgactggtcaagattgaggccgccggtttccagtgcctggacagcctgaatcagcttgtcgcgcgcctcctcatatggcatctgggcgatgagctcgcgttccttgtccgtcagggacgaggcgggggtgttcttgtcggtgggtgtggtgttctcggtcatcttgttctccttatatatacggtatatatgcgtgaatgcatatggtgcattacgcggttgcggttgcggatgtggcggtggcggtaatgacgccctgtttcagggtgacggtgatgtcatccccggtactgacccgcgaagcgtcatccagcacatggccatcggcggactgcaccaccgcatagcctcggttcagcgtggattgggggctgagtgcggtcagtgaggcatgggcgcgttcgacggtgagctgggcatcatccacgatacgccgcaggccgatgtcaagccgctgcagggaatcgtcgatcagccgctgatgcggttcgagcatggtatgcggttgggtcaggctcggacggttcgcatatccctcgataagtcggatctcgttctccgcgcgcgaacggacctgcagtcgcatacggtcgatggcaccttcgatgagctgcgactgctcacgcacatccggcaccacgcgcttggccgcatcggtgggggtggaggctctgagatcggcgaccagatccagcaatgtccagtcatcctcatgcccgatggaggagattaatggtgtggtgcaggcatacgccgcacgaaccacacgctcatccgagaaaccgatgagatcctcaaacgagccgccgccacgggccacgatgatcacatccacgttcgggtcggcatcgagctgtgcaatggcctgaaccacttcggccgggcattgctcgccctgaacatgcacatggaccaccttgaaggttacggaaggccaacgaaggtttacattggtgatcacatcgccttccgcacgtgcctgaggtgcgcaaatcaggccaatagtcttcggaaactccgggagaggcagtttgtgatcggcatcgaacaggccctcgcccttaagtcgcttgcgcaattcgtcgatcatggccttgaggctgccaccggctccgaccttgagaatcgtgtctccgcgcaacgacagcgaagtacgcttcatccacaggttcggtttgccatgaatcaccacgcggtcgccctgaacgaactggctggccgcggccgcgaacctgccgaagccattgacttccatggcgatatcctcgaagtcgtcgcgcagcgtgatgtaggccgagccggcgcgacgggtattgatctgcgtgatctggccggtgacccacgcggacggccatcgttccacggcaccgtagaacttctggctcagcacacttaccggccacggattttgcgcgctggtttcagcggcgcgtgcaggcagctgatcgatagggcgaggctcattcggcagattgatggtgccctgatcaggcgcgaaagtgccttgacccggctcaaagccagccgaggccagtgaagcggcggtcggtggacggccggtagatgggtagcccattgcagtagtcatgcactccactataagtgcgttggttgatgacggtaaatatttaccgtcgcctgaaaacggtgtgatgatgaatgcgagaaccgtacgaagcgatgtatcagccgatgatggagatggtctggtgcatcagaagaaaggagtcattatggcgaagaaacgggtgctatgaagaggagtgagatatgcgttgcgctgacgattgagagtcgttagtgagctcgctgtgcgacacgcgagcagaaaacagttacgctaatcacacacttgtggttttggcggaaaatagccgaaaaccctataaatagttcgacacaccactgttgagcactagatatagtggtggagatgccgtattcttctagaggttcaaaaaaacgacatcaatgtaatttcgtgtggcccacgtcgagtgcggccaaaatgcggaactcaggagagtgttcgccttataggaaaggggtgcccgatgggcgcacaggtgttggaggaaatcgtcaccgataacgagaccaaggtggccgccaaggcctccaccgtgctcgttgagaagcgtgatggtcgtgtggtcgacttcgaccccattaacatcatctctgcggtcaagtctgctttcggtgacctgaacaaggaagtcggccccgaagaagatgccatgatccgtggtttcgccaaccaagtcgaaggcgaaatcaaggggcgttacgccggccccgccaagatcgaggacatccagaacctcgtggagcacgccctcattgacgcccacctgtacgatgtggctcgcgcctacaccaactaccgtctcgacaaggacattcagcgtgccaaggccactgatgtcaacgaggccgtttcccgcttcatcaaccacgacccgaccctgattcacgagaacgcgaacaaggattccaacgtctactccacccagcgtgatctgctggccggtgccgtgtccaaggccgccgcgttcaacatgctgccgccggcggtgtccaacgcccacatgaagggcgacattcacttccacgatgccgactactcgccgttcactgcccagtccaactgctccttgccgaacttctgggacatgttggccaatggcttcactcttggcaacgctccgatggcttccccgaagtccatcgccattgcggccacccagattacccagatcatgaaggacgtggcctccagccagtatggtggccagaccgccaaccgtgccgacgagcatcttgcccagtatgccaagaaggattacgagaagttcctcgaggaagctcgtgagaccatccccgacggcatgccggttgaattcgcccgtcgtcaggtcgagagcgccaagaagaacgagcccgccaagctgcatttcggttcccgtgaaccgctgccgatggacaccccgttccacaccgacgttgacgaacttgagcaggagcgtgaaatcctcgccaagattcgtacccgcaaggccatctatgatgccatgcagaccatggaataccagatcaactccaaccgtgtgtccaacggccagaccccgttcgtgactgtcggctttggtctcggcaccgactggttctcccgtgaagtgcagcgcgcaatcctgctgaaccgtattcgcggcctcggcaaggaacaccacaccgccatcttcccgaagctcgtctttactgtgaagcacggcgtgaacgccgacccgggtgacccgaactacgatctgaagcagctcgccctcgagtccgccaccaagcgcatgtacccggatgtggtgttctacgagaacatcgtcaagatcacaggctccttcaaggctccgatgggttgccgctccttcctgcagggttggatcaacccggagaccggcaaggatgaagaagatggccgtatgaacctcggcgtggtcaccgtcaatgtgccgcgtatcgccatcgaatcccacggtgacaaggctcgcttctggaagctgttcgaggagcgtatggaagtcgcccatcaggccctccagttccgcatcatgcgctgcaaggaagccaccccggtcaacgccccgaccctgttccgcttcggtgcgttcggtcgtctcggtgccaacgacaacgtggaccagctgttcaagaacgagcgtgccaccgtgtcgctcggctacatcggccttgccgagaccaccgcggtcttctacggcaagaactggattcgcgaccacggctgggatccggaaggcaaggagttcgcgctgtccatcgtcaagcgcatgaacgagctgtgcaagcagtggagcaaagcggagggctaccactattccgtgtactccactccggctgaatccctgaccgaccgcttcaaccgcatggaccgtgaaaagttcggccgtatcgaaggcgtgactgaccacgacttctacaccaactccttccactacccggtgtggttgcagcccaccccgatggagaagctcagctacgagaaggacttcccgtactacgcttccggcggcttcatcaactactgcgagtacccgtgcctgcaggacaacccgaaggcgctcgaagccgtgtgggattacgcctacaacatcggcatcggctacctgggcaccaacaccccgatcgaccactgcttcgtgtgcggcttccagggcgacttcgagccgaccgaggaaggcttcaagtgcccggagtgcggtaactccaacccggacaagtgcaacgtcaccaagcgcacctgcggctacctcggcagcccggtccagcgcccgatggtgcacggccgtcacgaggagatcgcccaccgagtcaagcacatgagcggcgaaaccggtcgtgtgacgctggatgacggcaccactcgcgagtggttcgaagaggccaagtagggttattcgtgagtaggctcccctctctgaggggagctgtcagcaaagcagactgaggggagtccgaagagctattccgaagctcccctcagtcgcctacgacgacagctccccctcaaagaggggagctaatgctttccgtaaggagggaatcatgccggagttgcatacgaccaagcccgaacccaagcgccatgactttgcggccggcgagaccgggcgtggcccctccgtaccctccaacggtcttgccaacgatccgaaagccggtcaatgggatggccggcgcatgtccaagcggatgatcgccgactacaaaaccttcatcgtcaccgacggagaaggcgtgcgcaactctctctacgtctccgggtgccccttccactgcgtcgactgcttcaacgcctccatctgggatttccaagccggccacgaatacacgcaaaaacttgaagacaaaatcatcgaagatctgaaagccccatgggtgcaaggcattacgttccttggcggcgagccattcctcaacactcccgtgctggtgccgctcgcacaacgtatccgccaggaattcggtcataccaaagatatctggtcgtggaccggctacacatgggaagagctcatgcgccccggagaaacaccagacaagcttgaattgctgcatcttatcgacatcctcgtcgacggccgctatctcaaagaccagaaggactcgctgctgcaattccgtggctccagaaaccagcgcatcctcgatgtgtccaagtccctagaagccggcgaaccggtcatctgggccaagctccacgatcaagaacgagatatccccgaaatctatttgagagaccgcgaagccggcgaaggccaacaggcctcgtagtagcaggtccggaatgccgcactcagcaatatcgtcggaactgttgggggaacgcccttcccgtgagcgaaatcaccatgcccggcgtcacgttgggcaggtggtcggactaatattccagaagaagtagccgggcgaagccgtccgcaggtatctgccagccgtcccgaaacggctcatgatgcctgaaggcgcacatacccggaagtcggaattaagaggaacacatggttgacatcgtcactgacgcgagcgtaaagcccgcttcacacccgaagcccctgcgtgtgggattggacatcggttccaccaccgtcaaggccgtggtgcttgatcagtccgattccctgaaagacaccctcttctccgattaccgacgccaccacgccaacgtgcgtgccaccgtggccggcctgttggtcgacatccgtaaagagctcgtggaactaggtcgaggcgatgagccgattcgcctgtctatcaccggttccggcggtctggcgcttgctgacaatctgcatgtgcctttcattcaggaggtcatcgccgaaaccgaggcgatcgacaaggaatacccgcaggccgacgtcatcatcgagctcggcggcgaggacgccaagatcacctacctgaagcccacgcccgagcagcgtatgaatggttcgtgcgcaggcggcaccggcgcgttcatcgaccagatgtccacgctgcttgacaccgacgccgcaggcctcaacgagatggccaagagctacgagaacctgtatccgatcgcctcgcgttgcggc

SEQ ID NO: 1443 - DNA, 6477 bp, Unknown
  R257_15m  MAG No. k141_19261
caccccctctcagggaatcggaaggcacggcatcgcaacgacaaaaagtcttccgtcgattcccgatgaggggaccggcggaagacttagcatgcccgtcagccggcaaccagccgatggcaggcataggcatcagggccttggtcagtggcggttccgcatgaagcgcagcgccaccgcgccgcggatgcgcggctgagtggggccggatcagtcgttattcgggccgctgttgtcggactgggctttgccgttcctgcaagctatcgccatgaacgtgacgcaggcgatgacgggcaggaggatggcggcgagcgttgcggcgcggcggatggcatcggacgttgcctttccggacttggcgtcgcctgacttggcggacgctgcggaatcggcggacttggcggcggtgtcatcgcccttatgcggtgtttcgccggtgaaccaggcggggtcggacggatcgtatttccgggtgccggtccagtttgcgggcgtcgcgccggcgtatagggcgacggccgagcccttggccacggtggcggtgaaggtgccgtcagtcgggcaggtcatgtccggcacggaggtgcgggggcgccgggagcgccgtcgtcgacgctggcgtagtagtagccggagaagatgtgcggctggccgtaatcgtaggcgagcatgaaggcgttggcgagcaggtagctggtgccgtcacgggtggtgagcgaggagccgttgcgctcggtgtcccagttggtcacccatacggccgccttatcggaatctacccaagtcggtccgccgatggcgtccaggccgcccgccgcgacggtgatgctgccgccgaacacggcaggcaggcgtttgttataagtggattcggagactttgccggtggcgaggtagttgactggctggatcgacgccgcttcgctgccgttgccgatgacctcctgttcgaagaagatgccgtccacgtcccggccggtctttgcggcgagcttggctttgatggcggccacgtcttgcgcggcgatgtgcttgaccgcgtccacgcggaatccgtagacgcccatgtccagcagcgtggccagatagtcggcgatggtgtcttgcacatggtcctggctggtgtcgaggtcttgcaggccgctcaggcggcagttctgcacttcgtcggcgttggaatagtcggcgatgttcttggcgcaggtgtggaagtcgcccttggtgtatccgacggcggggaaattgccggcggagtcgtaggtgttgccggcggtgcccgagcccgacgtgacgtggcgttgcgagaccgggttcaacccgagtctgtccagaccgagcagcacccggccgtcgaacgcgctagactcggaaccaagccgcgcggttttcttcactttttcgatcacacaccgaataaaaccgcacggcccatacacacccaaatgcgaagggccagtaatatcgccaggcactggggactggcagcactccacccgacgattcatgcgaggaggacacatgggcaaggcagacatctatcaggtggcgaaggcggccggcgtatccatttccacggtgtcgcgcgcgttcacccgccccgagctcgtctcccggaagacgcggcacaaggtgctggaagtggccgacaagctcgatttcaacatctcccgctccgccacggcactgaagtccggccagacctaccgcgtggcgatgctgatgaacgaggagatcaccagctggttcaacacccagacgttcgccggcatcgaatcggtgatgcacccggccggctatgacatctccctgttccagcacatcgacaccgcggccaaccgacatgagttcttcaccgagctgcccatccggcgcaatgtggacgccgtgttcgtggcctcgtttgccatcgacccgcacgaggtggagcagctgcagcgcatccatgtgccgatcatcggcatcaatacgccgtcttccgagggctttgacgccaccatcagcatcgacgacgaaaaaggcatgtacacggccacgcagcatctcatcaacctcgggcaccggcacatcgtctacccctgctccgaggcggccgggctcgattcctcgatcgacgcgcgcgcccgcggcttcatccgcgcctgcgaggacgccgaaggccgccacgacatcaactggcaggtgctttcggtgccgcgcggcccggccttcgccgactccgcgctgtccgcgctgctggcgttggacaagttcccggacgccatctgctgccagatggatatgatggcgattccgctggtgctcaagctggagcgatacgggcaccgcacaccgcgcgactactcgatcgtcggctttgacgacagcccgtacgccgacaccatcaacctgaccaccatgaggcaggacccgtatgcgatgggacgcacggcggccgaaaaagcgctcaaactcatcgccggcgagacgccggacaccccgcatgaggtgatcgaggcgcaactcgtgccacgcagcacggatatgccgtttggggagatggcgtaggggaggaatcgaccaacggaatcggccaagggccgatgctgtatcttccgcgggccgccggcccgttcagagctctccctccggccgattccgagactacgccgccaccaacgcgccaaacaccagcagtaccgggtagatcacatagaacgcccacttggtccatggttgcttgaaaccctgctcgccgttgcggtagtgcaggaaggccacgccgatggcgggcgtgatgcacatcaccgcgcccaacagcccggcggtgaacatcatcgaattctcgcgtgcgttgaggaagtagaacaccatcacgaacgacagcgtgagcacgcccgtgtacagcacgcgctgatctacgcccacatgcagcagcaaatcccacagcaggcccgcgataatgaccagcacagtcagcgtccaacggaaggcgccgtggtatttttttgccagccagtccaccagcgccagcacgaccagggcgatgagcagtccgaacaccgggttctgcacgctcaggctgaagggctcgccggtcataatcaggtcgtatggcacctcgctgatcacggccacgacgagcagtcgcagcccgtacgcccatgcgttatgcgtatgacggtagccgtcgaacaacagccacgaataaatcggcacggcgatccaggaagccgccgcgcacagtacgatcgcggtcagcgctgtcatgtcttggctcgggtcgcccaccagcgcaggcagtatcgcgacgctcgccacgttgagcgccatgaatatcacgccaatcaccttgagacggaacacggacagtcccttgcgacggcgctgctcgccgcgccgcgtcttctccatttcgacttcgttcatgtgttcctccgttgttgtgatcatttgggctgtgggagttgtgtggcgccccggcggccactcccagtcggctttgccgacagcccccgccagcgggggctttattaggctatgtcaggtattgcaatagttcagcataatcggggccggccagcgacaaggcggcatgcgcactgacctgcgagtcgctggcgggcgagatctcggtgcgcagatagacgccggcgatgcccgccgacgcggcgcccaggatatccgcacgttcgtcgttgccgaccatgagcacgcggtcaggcgtcagatgctcggtctcaagcgcccgacgaaagattgcgggtgatggtttgcgcacgcccacctcactggaaatgacgatgcgatcgaacgcccgatccaacccaagcgcggccagttccggccgcgtatagcaggattgcgcgttgctgacaagcacaacgcgctttcctgcgactcgcaatcgcgccagcagttccggcgcgcccggatacacccgcagcaggctggtactcgcctgccgaaacgtccatgccaacgatcgtgccatagcgtcgtcattccggcactcccccgccaacgccgcgtataccggcagcaaatcgggctcggcccactcgccgtgcgcggcgacggcggcatcgcgaatcggctgtgccaaggtttcgaatcgccgctggagctcggcgttgccggcgtacgtcacgccgcagtcagacaaggccaaacgcaacgcatcccaggcggcagccgatgtctcatcggtacgaatatccaccagagtgccgtatagatcgaaaaacaccgcatccacggtcggtacggtgtcggcctcatcgaccaccctcagtccggcgttgccggacagctcccgccggagggagcgggagtcgggagcgaaacggtcagtcatcacgccacctttccggggtatgcggtgtgcgccgccggcgggagcgagcatcgccgtcagccacgattgcggcgccagacggtgaaggtgtacgggggcaggggcagcagtcgctgttccaccgcgcccggcatatcgctgccggagcaatagatgcactgccattcgttgggcgcgattttcgagacctcgccgtacgggccgggtatctccagatcggtggtgagctgggtctgcgggctgccggtaggattgatggccacgcaatcgtcgccgacgcggaacaccacggtctcgtcgtcgcgcggcacgatcatgcgagcgccgccgaagtaggccgggttgccgcgccgcagttggatcagcgcggcgtaatggtcgaccagatcgcccatgcgttgcgcccggcgccaatccagctggttcaacgcggccggactgctgaacgaatcggagacgccgtgtttggtgcgggcgaattcctcgccggacagcatgaacggcacgccggcggaggcgaatacgatgccggccgccagtcggttggcgcgcatcaggtcctcgcacgcctcgccttcggccgaatagtccgtatcggtggggatgcggcgcatggccgcgcacagcttgtcccacaatgtcaggtcgtcgtgggcggaaacgtattggatgacctgccccacgctggcggtctcgcgcaaggtgccgcgccagccgtcttcggcatgacggatgtcgtcagcgtaatcggcggccgcaccggtcaggtagccgggcacccactggtagaacacatggccgcgcaccgcgtcacgggtggagtcgcagaacgcgccgatgcgtgggctcaggtagggcatgccgcgcttgtcggccagaatcgcgccgggcaacagcgcggtttcgcgggccgcccacggttcgccgtgcatggagatcgtggcaccgccaggcagctggtcgagtgcggtgcgcacggcgttcatcgtgtccacgtcgatcaggcccatgaggtcgaatcggaagccgtcgatatggtattcgcgcgcccagtagaccacggaatcgacgatgtacttgcgcatcatcgggtgttcggtggccacgtcgttggtgcaggccgagccgtcggcgaaggtgccgtcggcgcggcggcgcagcgcgtagccgggaatcatacgttcgaaccagttgtcggtggagaacatgtggttgtagaccacgtccatgatcaccttgatgccggcattatgcagcgactggatcatctgtttgcattcgcggatgcgtacggcgccgtcatacggattggtgctgtacgagccttcgggaacgttgtagttgagcggatcgtagccccagttgaagccgcgggcggggtcggtgcgtgggatcgattcgtcgatggaaccgtagtcgtagaacggcatgagctgcacggcggtgatgccgagacgtttgaggtaggccatgcaggtggggaactcgccggcaccgtccacgctggtgtccgggtgggtgaaggccagataggtgccgcgatgctcttccggaatgccgctgtgttcgtcgttgctgaagtcgccgatgtgggtttcccaaatcaccaggtcgcggctggggatgtgcgggcggcggtcctcggcccagcctgccgggttggtttggtcgaggtcgacgaccatgctgcgccggccgttcacgccggccgcgcgggcccacgggtcggcggtgcgattgacggtgccgtccgcgaatcggaccagatagtcgtagtaggtgccgtggccgatgccgtcgcagcgcaccagccaggtgccgtccgcgcccggagtgaggtcggcctgcgtttcaggctcgggagccgtctccggcgatccagccgtgaacaggcgcagggtgacaccgctggccgtgggtgcccagacgcgtaaggtggcgcctttggcatcaggtaacgcaccgaggtcgtcatcctgatagacgggagaatcggggcagggcatcgccagttcggctggcgtccaatcggctaccgccaacgcggagatctgctgttccatgggggttctcctttgttcaaatcttgcctgcgcgacagctcgcctgcggcccctgcaattacgggctcgcctgcggcg

SEQ ID NO: 1444 - DNA, 86380 bp, Unknown
  R257_15m  MAG No. k141_20040
agacgaatcgtggaagccgccggcggtattctgtaccggtggaaggatgatgccgagccgacgcaggcatcatctccatcagcgaaatccaatattgccaccgatggcaccatcatcgcgaacaccacggattctgacggcgagaccacggcagcacccggcgcatcggacgcggcttccaccccggacccggcgcaggccgacagcccagccacagcggacaacgtactcaaccgcatcgaactgtgcatcgtgcatcgcccgaaatacgacgactggagctggccgaaaggcaaggtcgacccgaacgaatcgcaccggcatgccgccgtacgcgagatcggcgaggaatcgggcctgtccgtggaacttggcccttatctgggcgacatcgagtacccgctgtccgaagaaggcagcaaacagcgccataccaaggatcggtcggcggataccaagcatatccagttctggatggccacgccgatcagcgccatcgacaacctgcggcgtacccatgcgtttggcccggtgcatcgggcggacatcggcgaaatcgacgaagttttgtggctgacgccggccgaggcccgcaagaagctcagccattccaccgataaggacatcctcgcgctattcgttgatcgggtcgaagaaggtgcactggacgcggtgccggtgattatcgtgcgccacggcaaagcggaagcgcgcaagctgtggaagggttcggacgcgaaccgtccgatcacgccgcgcggcgcggctgcggcatacgcgctgaaccgcgagctggcgtgtttcaatccgacccgactggccacgtcgccttgggtgcgctgccaggagacgttggagatgttcgcgtggcagaccggacgagacatggttcatctcgatccgctcaccgaagatgcatacgccgctgcgccggacaccgcatgggagtgtctactcagcgaaatcgagttcgcacttgagcgccgtcagcccatagcgatatgcatgcaccggccggtgattgggggtatgttcggacacctgcgcagcatgtgcgttgcgccgtctctgagcaaacgcctgatcgccaagacaccgttcatgccgactggcacggcggtggcgctgttcgtcactccgacgcctcatggtcccaaaatcatcgatattcagaaggttcaaccgcttgtctactagacccgcatttcctgattcatccaactcctcggccgctgccgctgcagctcatgccgcgcacaatggtgccgccggcagtctgggcccgggcttcggctcgttgcgtgcggccggagcggcattcggacctgctcgcatgggttcttcacgcccctcgcgcccggctcagctcgacccggctgtggccgatggattggccggtggcatggacccgcaggcgttgagcgagatgagtcatctgtctgctgccgcattgctggatcgtgtgcgccatagcgaagacccggcggttgttgagcgggtgctcacgttggtggagacggtcggcgtggatgaaatcgccgaactatggagcgatgccgagccggattcgctgcctggtgtgctgtggcgactgtatatgttgcgtacgtggatgcgatcgaatcgcgactcgatcgcgcatctgtggcgcttgggtgagccggtggccactaccgcctccgccatcgccggcgtggatcaggctcccagtgaagatgacatcgtgcgattggccgattcgattctctccggtgcttttgtgggcgattttgccgtggcgcttgagcgtgcggcggcgtttaccgatgtggtggcgttgggcttgcgcgtggaggcgcggcgcatggtgacccgggccgaggccaacggcgccttctcctcggatgccgatgagaaggccgtgcgcaccaaagccgcccgccttatgcacaccgccggcagcctcatggccaccgccaaggatttccagcacggtgccaacctctggcgtcgcggacggttggagtagccctgctccaggctccctctgatgagggagctgtcacgggcgatgcccgtgactgagggagagacccaccaaccgcaccccaacaatcagctaccagccaacaccacacctcccccggcgcggcgagccccatcgcaagctatactaagtatccgcgtcggaccgtgcttaagccccgggctccattttttgccgccgcgagcggcccttgcgccgacaggcgctttcgcggttcggcgcttcttttcttttacccgattcacgccccgaacgttgcgatgggcacgaccagtatgccgtcattgcggcgataggccttcccacctcggccggtaaggaacatcatgaactctggttcgcgaacttgggccatggggttgccacagattttgtcgcggaaggatttgagcttatccgcattgtcatcgttcaccttaaggtcactgagttttatttcgatagcaccccacctgccgtcagacaactcgataatgacatcaacttcaagccccttgtcatcgcggtagtaggcgatgcgattgttcgcgcccggcatggccgacagatatacattcaaatcacgaatgcacagcgtttcaaacagatcgccgagcgtctgtgtatcgcgcatcagagtattcggcgcggcacctaaaaccgcagcaggcaacgaaggatccacgaaatatcgcttgggcttggttcgcacacgactctttgcgcggagtggcggctcccaaccctccaaatccgtcagaaggtacaagtccttgagcattcccaaatagctctttactgtctgcgtatccggttcacggcgctcatcgccataggccatatccgcagccagcgtcgcatattttggtgcctgcgatacgttcacggcgagcgcacgcatgagtgcacgcgcggtttcagggttcttgttcatcttgggcacgctgatatcaagcacactcttgatatattcactcggaatttccagagcaaactcgtcatccaaatcaagatttgcgggccacccacctcgacagcaccatctggcaatatcttcaatgttggttgcacattcggcaggctcgaattgtccatcaaacaaaccagacaagctcactacaccggtagattgccctgactcgcacagactcataggccacatacgcaagcgagaaattcgacctgtgccactgtggtgaattgtttctcgacccttcggaatggccgagcccgtaagaatcagctgccccttgcgattcgcattgtcatccacatgacgacgagcggcatcccaaatttgcggcacatcttgccactcatccaccaaatgcggttcattacccatgagtaccaatgccggatcagtctgtgcggccgcaaaggtagcggcatcatccagacgatccatacttcgcgagcgggaaagcgccgtccatgtctttccacaccattttggcccgacgatttccaccgcgccgaatgctttaagtaacttacctaacctgccatcgaccacgcgagcacgataatcaggttgagtcaaggtatcactacgattgttcaaatcgttcattttccggcctttctcagctacccaatcacctcaatatagattttacacctttctcattcccgattttacactatttccattcccggttttacaccattccgattcccggttttacaccgcaaggtgtctagtttcttcctatgacttaatccaccgagaatcaatccaacgaatcttcgcgcacgactgcgagcgctaggccaaacttgacccattccgatgagacatatttcacaataccgtagctttttcagctggtttccagaaaccgttgacttactgtccggttcggcctagatacgctctttttcgaatctcatgaaatcaacgtcaacaccttggggaaactctcatgaaggcaaccatcaccaaagcgactatcgcagttctcgccggactcgcgatcctcgccgatgcctttctgcttttttcgatgaagatatccaatagacgccacgtgaatgtcattgccatagtgacggatgcacgcgcacgatgcgagcgtcgagccgctccacgatgtcgtggtgatgcgtggagaacagtacagtcttgccggcatcagtgaaggcgcgcaatacctcaaccactacgtcggtattgcgctcgtccaagccgtcggtcggttcgtccagaacaagcaggtccggattcatcgacatgcagcaggcaatcgccacacgctttttttcaccgccagacagacggtatggcgcccgctcccgcatccgatccaagccgaacaacgtcaccatgtcatcgactctgcgctgtacttcggcatccggcaaccccatctgcaacggaccgaacgcaatctcctcttccaccgacgggcagaacagctgggtgtcggagctttggaacacgaatccgatgcgctgatgcagcgctttggcgaacaggctgttcttcgcctcgacttcctcgcgaaccaccggagtaccgccaaaccgatactcgcctgagtccggaaattccagcgcattgatgatgcgcatcagcgtggtcttgccgctgccgttcggcccgagcagcgccacgcgctcaccgcgttcgacggtcagcgaaaaatcacgtagcacggcgtgcgacgaggtttcatcgtcggcgtcgccgtaatctttataggaaaagtcgatgtgattcagttcgaccagcgggtcgccgcggaaccatgagttatctggctgcatggttgcagtttgtttatgattacgctgtaatccgaacattattgggctccattcattcgaaccaccctcatcccgaatacaccgccagcgcaatcattgcagcaatgcacacggcatacaccccgttgcgccacgtcagcagacgctcgtggtggatatgatacgtaccgtcaaacccccggcacaccatcgattcagccatttgccgcgcctgcgtattcgcacgcagaaacagcgcgcccatcaactggccggcggacgtcagcttggtccggtcgcggcccacgctgcgcaaccgcagcgcatccagcaactccaccatcgaacgaccgagaatatcgatgaactgaatcgtcacgtcgcagatataaatcaccgaatcagggtagccaactgcgcgcagtccggcaatcaggcgattccacggcaccgtacgcgccagtgcgatcaccagcgacaccgccacgaacgcacgcaccaccagccggaccggcgcactgtactgcccaatcagcaggctcggcaccgccacgaccaggctcaggatgcatacggccagcaccgggccgagcaacgccctcatcaggcgcgccggccgggtcgccatcatcagcagcaccaccgccagcatgatgtacgagaacagcatgttgcatgtgatgttgacgcagacaatcgcggccagtatgcccagcagccgcacgcccggattgaccgagcccagcaccttgtcgaccgggctcgactcaatcggcaacgcatgaccaacctgctcgagtacgctgccgaaatgccccaggttgtgttcgatgaaggatgacttgtcagccggaggatcgtaatcctccgactcacgcatccatgcaggtatcgtcaacgcgcggatgtcttgccgttgccgctcaccgcgagcgccagcagacggaacacgatagtgagcacggcgatgccaatcactgcggagagaatgtagccggcgatgtccggcagaccttgcagcgagtagtcaggcaacagcgcatcccacgagaagccatgggcgatgtactgcggcacgtagttgagccccgtggcactcatgaagtcctcggcgccccactcgccccaggcgtcgccggtggcgagcaggccgatcggggaaagcaccgccaccacggccagcgcaatccacgcagacttgcgcagtccggcgtgcgcgacctgtttgccgtcagcaccggcggtctcggcgaagttcacacgggcattgtcttcgataatctccggtgcggtacggcgcacgaattcgacaaccaccacggtcaccagaccctcgaccacgctggctacggccaggtgcgggatcagcatggcgggaatcgtcacgttaaaggtgaacgggaagtagagcgcctggccgtcagcggctttgaacagcagcggctgcacgccgagttccagcgccacgcagaatgcggcgagcgtgatgccgatatagccggacacgaattcggccacgcgttccttccagccgtcgggcagcaccttgcgtagcaacacgtacagtccgtaagccacaaacggcagcacgaacgccatgttgaagcagttggcgccgagcgtgatcaggccgccgtcgccgaagagcagcgcctgcagcagcagggccaccgacacggagaccgtcgcgtactggggaccgagcagcagagcgatcagcgcgccgccgacaccgtgcgcggtggtgccgccgggcgtgggcacgttgaacatcatgatgaggaacgagaacgccgcgccggcgcccaggtaggccatcttctccggcgtgctgttgcggatcacgtggcgtaggcacagcacccacaccggaatcatgatgacgtagaacaacgccccggtggacggcgaaatgaaattatccggaatgtgcatcgccaatgtgacggtgtcaggtacttcgattatatccaacttccctctttttgttgatttcggagctcgaccacaacctcccgctccaggaacgtgatatgtaatatcacaactgtgattcgtctaatgcacaaccatgcaaaatagcttgcaattactagcgacacaccgtgtaccatatatccggtttccgtgttttcggatatttttccgctatattttttgcatatttcgatcattcgttacaaagtgacgcaacaggctctctacactgtggcatgaaggacgtggggattctcacgccacaagcaattttctccaaggagaacggatgatcgccaaagaaatcaccggcaacatcatcagtcagcagtacagcgacggcaaacttaatgtgtcgattgccttcgactggttcgaaaccgataagaagcgcatgcgcaaggtggccgaggacggcaccgagttcggcatcatggttggcaagaccatcaaggatggcgatgtgctcgccgaaaccgaagacaagcgctatttcgcacgcattaaaaccgcacagctgattgagattccggttaactcgatgacggaaatgggacgcctgtgcttcgaactgggcaaccgccacctgagtctcaaggtcgagaacgaccgcgtgctggtgccgtacgaccatccgaccatggaatacacgaagaagatcggttatgaaccgcatatcatcgagggtgggtttgacggcttcctgatcgtcaaggcccacgccggcaccggcacactgattccgggcaccaacaagaccacgggcgacgtggccgaggaggagcaggaagccgaggccgacaaggaattcccggccgaggaggccgccggccatctggatgtgcatacacacgacgcaggtgagggtgagcccggcgaatatgagatgaacggcgtgctgcaccgcccggacggctcccacagccacgacggcggccgcacctggcacacccactgatagccccatgaacatcaacgaaaccgaatcgcgacgtctggccatgctgcaggtgtgcgacagcgtcttccccgtgggcgcgttcgcgctgtccaacggcatggagaccttcgtacagcgcgacttcttgcgccgtggcgccgatttcgaggagtatatgaagaactacctcgaagtcgcaccgtacaaggaaatcgggcagatggtgctggccggcaagtacgccaccgattcgcgagtctcccgcaaagggctggccgagcgactcatcgaacttgacgagctggcctcggccctgcaatccgcacgtgaaatccgtgaaggcagcgagcgcatgtgtacccgcctggtcaagctggccgagcagatggatgccggccaggcgcagacctcggatgggcatcgtgggttcgccaagccaagtcctgccgacaatgccaccgcatccgctgcggattcgcgcgaaaacagcatcatcgccgtgcacgagcatcacaccgaacgccaccagctgcacgatgccgccgacggcctgtacggctcgccgtcgctcgacctgtatgccgggctgattcgcgagcgccgctgccgtggcctgcattcgatcgcgatgggcctgtacgcggctgaccatgcgaacgacgtgcgcgacgcggccatcatgtatggatattcgctgttgagcgcgcttaccatgtgcgccgcgaaggcgattccgctcagccagtacgctggccaagtcgccctgcatgattcgttcccgcgcctcgtgcgcgcggtgaatatcgcgatgacgttgaagcccgaggatctcggcatctccggagcttacctcgacatcgccgccatgcagcatgaaatcttgtactcgaggctctacatgagctaattatcctggctcccctcaaggaggggagccaggataacctcacccgcaaaccacatacctaaccaattcccacataaaggagaaaccccatgtcatacgtacgcatcggcgtcgccggaccggtcggttccggcaaaaccgcgcttatcgaacgcctgacccgcaagatggctgacgaatacagcatctgcgtggtcaccaacgatatctacaccaaggaagacgccgagttccttatcgagcactcacgcctcgcgccggaccgtatcgtcggcgtggagaccggtggctgcccccacaccgccatccgcgaggactgctcgatgaacctcgaggcctgtgaggaaatggcccgcacccacccggacgtgcagatcatgttcgtggagtccggcggcgacaatctgtccgccacgttcagcccggacctggccgacgccacaatctacgtcatcgccaccgatgagggcgacaagatcccacgcaagggcggccccggcgtcacccgctccgacctgctggtgatcaacaaggccgacctggccccgttggttcacgccgatctagacgtgatggcccgcgactccaagaagatgcgcggcgaccgcccgttcatcttcaccgacctgatgggcggtgccggagtggacgacgtcatcgcatggatcaagaagagcgtgctgttcgaggacatgtgatgttttggcccgcccgtatccaaaaacggacgggccgaaacataccgttgcaccaagtgcggcataattgcccatgtcatcgtcaggcaccaatcataagaaggcagcgattcgtccatgggcagtagcacttttcgtctatccactgcattccgccacggacgtaccaaaatcgacgatatttatttcgaggcgccgttcaaactgatgaccccgttcaccaacggacgtcattcggatttcgtcgtgatgctcgcctcccctggcttcctgaggggcgatgaagcccatatcgatatcgacttcggcccaggcaccgattcgaccatcaaaacgcaaagctacgagaaggtgttcgacaccgcggacggctcggccgaacgcaccatcgaactcagggcgcgtggcaatgccaaagccgtgttcctgccgttcccagtgattccgttcaagaacagctcattcatgaacctgaccaccgcgcatatttccgccgagtcagcattcgtgtatgcggatgtggcgacatgtggccgcgttgggatggatgagcgttgggccatgaaacgttttacgaatcgtatgcgcgtatatgtggccgaacccgaagccgtgaccaaggccgccgcagccgaattggcgcaacagcacgcacatcgccgaggccggccttccaaggcggaagccgccgctgcccaaccgcgcgaacatctggcctttgctgaccgcatgctgttggaacctgatgcttttgactacaccgaactcggcatgtggcgcgaattcacccactgcggcgttctctacgctcacctgcccgaactcgaccctagcgacgctgtacaagatgccgcaactagagaagcatcctccgccgccatccgcgagcgcatcgagactgcccgcatcgccgccgaagacgcgctcatcactcgcatccatgaacacgcagacgccatcggcttcaccggcgagctcggcgtgagccgcgtaatcaatggcatctgcttgcgtgtactgaccacccgaggcgacgacgccttcgacctcattcgagatgtggccgatttcgtgaccgatttcgtggccgaaggctaaaaccaagtggctctcccctttgaggagagccaccagttctctcagaacaggaagtaccgctgggtaagcggcaactcgtacgccgggtcagagtggaccggttcgccgtccaccgtcacttggaaggtttcgggattgacctgaatgtcggcgagcacgtcgttgaacttcagatccttcttgcctaccgtgcggcagccatgcactggtaacacctggcgctgcagctccagcttgcccttgatatcgtcatccacggcggcctgcgaaacaaacgtggcgcaggacttgccaagcgcacggccgagcgcgccgaacatatcgcggtagtagacaggttccggggtcgggatagaagcattcgcgtcacccatacgagagtaggcgatggagccacccttgatgaccatttccggcttcgcgccgaacatggacggctgccaaagcacgagatccgccatcttaccgacttcgatggagcccacgtattcggaaatgccgtgggtgatggccgggttgatggtgaacttggagacgtagcgcttgacacggaagttgtcgttgcggttgttgtcgtgttcgtcttcggggagcggaccgcgctgcttcttcattttgtcggcggtctggatggtgcgggtgatgacctcgcccacgcggcccatggcctgcgagtcggagctcatcatggagatgatgcccatgtcgtgtagcacgtcttcggcaccgatggtctcggggcggatgcgcgagtcggcgaaagagatgtcttcgggcacattgcggtcgaggtggtggcagaccatcatcatgtcgagatgctcgtcgatggtgttgcgcgtgaacggcatggtcgggttcgtggaactcggcagcacgtttgggaagccagcggcacgaatgatgtccggagcgtggccgcctccagcgccttcggtgtggtaggtgtggatggtgcggcccttgaacgcggcgatggtgtcttccacacaaccgccttcgttcagagtatcggtgtggatagccacctgcgtgtcggtttcgtcggccacgccgagtgcagtgtcgatgacggccggggtggcaccccagtcctcgtggatcttcaggcctgcggcaccggcgcgaatctgctcacgcaacggttcggggctggagtcgttgcccttgccaaggtaggcgatgttgatgggcagcgcttcggcggcctcgatcatgcgggtcaggtggaaggctcccgggttgcaggtggtggcgttggtgccgtcggccggaccggtgccgccgccgaccatcgtggtcacgccaccggcgagggcagtgcgaatctgctgcggggagatgaagtggatgtgggtgtcgagtccgcctgcggtgacgatgaggccttcgccggcgagagcttcagtgccggagcccgcttcgagaccgggggtgataccgctcatggtctgcgggctgccggccttgccgatggcgctgattttgccgtctttgatgccgatgtccgccttgtagatgccggtgtagtccacgatgagggcgttggtgatgatggtatccggcgattcaacgtcgagctgcacggagctttggcccatgccgtcgcggaatgatttgcctccaccgaacttcagttcatcaccgtagtgcgtgtagtccttttccacctcgatgatgaggttcgtgtcaccgagtcgcacgcggtctcccgtggtcggcccgaacattcccgcataatccttgcgcgtaataatcttcatgtcaaaagtccttgctgtttttcagctccccttgtcaggggagctggctcgcgaagcgagactgagaggtagtccgctccccgctggcgggagctgtcagcgaagctgactgagggtggcccttagctcagattcccgagaatccaagctcatgcgccttcttaaacgcggcctcccgcacctcagggtcatccaacttcccctcaaccagtgcgctgaagccgtgaatctcacgcgtgccaccaatatcaatcaaccgcactcgatgcgtttcacccggctcgaacctcacagccgtaccagccgcgatatccaaccgcttgccatacgccgccttacggtcgaacttcaggtacttattaacttcaaagaagtggaagtgcgaaccaatctgaatcggtcgatccgcagtgttcaccacgtccagctcgatgtcttcggaaccttcattgagttccaaatcatcgtcagccagcagatattcccccggcaccaacttctcggtggattcgatggggttatgaatagagacgagcttggtgccgtccgggaacgtggcctcgacctccaccacttccagcatctcggccacgccatccatcacatcttcaggcttgagcagcgtgcgaccgtatgccatgagctccgccacagtgcttccctcacgcgcccgctcaacgcattcggcggaaatcaacgcaatcgcctccacatagttgagcttcacgcctctggctttgcggtctttggcaagctgccccgccaagtacagcatcaacttgtcagtctctcgtggtgtaagtctcataacatcctctgttgttgactggagtttttcaggcacaccaatgtgagccctaacatcgcccaataataagagcgttataagaacgggacgtttctcataacgctctatggccataaacgggggtcgaattaatcacactctcatggattccttggcggcttctacttggtcggggccgccttcgccggtggcgatgaaacggccggaggccaggacgtagtagcggtcggcgcgctcgacggcgaattggaccttctgctcaaccaagaccacaccgatacccttgtcttcggccatcatgcgaatggccttctggatttcggcgacgatattgggctggatgccttcggtcggctcatcgagaatcatgagcttggggcgggtgatcagcgcgcgggcaatcgaaagctgctgacgctggccaccggacagcagaccggcacgtcggccagcaaattccttcaagaccgggaacatttccacggcttcgtcgtaacgggccttggcctctgaaccgtagcggtcggcgaccacgtgcaggttttcgtccacggtcatggtgccgaaggactgctggccctgcggcacgaacgccatgcccttgcggatgcgttggttcggtgcagccttggtaatgtccttgccctcgaaactaatcgaaccggacgaaacgggcagcaagcccagaatcgccttcaacagcgtggtcttaccggcaccgttgttgccgacgatgctcacccattcgccggcggccacgtcgaaactgatgtcgttgacgacggtcactttgccgtaaccggtgttcaaatcctttacttcaagcattgccatgattattcactttctacggcgtcgtgcatattgatgttgaggcgcgttgtatcaccctcaatatgcactgaaaaagcgcattccgggatgcgatggttgttgtcagtgcggtccatattgcgcttcttcctcttacctactcccctcagtcaccttcggtgacagctcgtccgcaattaaggacgggccttgcctgcaacctgctggttcgactatcgtctcgccttcggctacaaacagcccactgggctgtttgcttaacgcctcggcctcagggaggggagacagggagttagttttctccgccgcccaggtagatgcggactacttcttcgttgttttggatgtcttcgaccgaaccctcggcaaggatttcgccctggttgagcaccgtgaccgaatcggcgaactgacgcatgaaatccatgtcgtgttccacgatgatgaccgtgcggttcttgctgcatcgcttgagcagctcaccggtctgcacacgctcggccggagtcatgccggccaccggctcgtcgagcagcagcaggtgcgcgtcctgcacgagcagcataccgatttccagccactgtttcttgccgtgcggcaggatgcctgcgggcttgtttgcatccacagtcagattgcacacgtccatcatgtattcgatgttctgcgaaacgccgcccatcggctggaacagctcacgacccttcttgcggaagccctcggccagctgcagattctccaacacggacagctcttcgaccaccgatgcggtctggaaggtacgcccgacgcccagcttgacgatgtcgttcggcttgcggcccaacagctgctcgccacggaattccgcggaaccagtggccggcaccagtccggtaatcgcgtcgatgatggtcgttttaccagcaccgttcgggccgatcaggaatcgcaaatcgccgtgctgcacagtcaaatcaagattcttgacggccacgaatccatcgaactcaacgtgcagtccacgaacttccagataatcgctccactggccgccgcgatcatccagcaccgcaagctgatcgtgcagcttcgtacgctcttcaacgatttcggccttcatctgggccgcttcgtcgcgcatacgcttggcttcgtcgcgcatctcaatcatttcggcgcgcaactgctccaaatcggcctgcgatgcaggtgcgggagccgatggattcgagctcatgttcttctcctcactcatgcgttcaccgcctttgcagtagcagtaccggtaccggcaacggcaccagcaccagcaccagcaccagccgaagctccaaccgaactctttccgagcccgatcttctccttaatccaaggccatacgcccttgaactgtcccaagcccttcggcacaaaggcaatcaccagaatgaagatcaggccttcgatgtacgtccacgcggacggatacgcctcagacagctgcgtttccgcaaagcgcaccagcagcgtgccgaccaccgggccgagcaaagtggcacgtccgccgatcaccacgccggcgagcatcaggatggacggcgtcacgccgatatcggacggcgaaatgatgccgaccactggcacgaacattgcgccaccaatgccggcgaacattgcagccaccgagaaggcgaacaccttgatggaggcggggttatagcccaagaacttcatgcggttctcttggtcgcgcacgccgataatcaggtcgcccataaacgatttgcgaatccagtagacgataagcaccatggccagcgtcaggaacgcgcagatgtagaagatcatctgcttgttggcgttatcagtcaagtcgtaaccaaagaatcccttgaaatcgttgagaccgttggtgccaccggtggttttcgactggccgataagcagcacggcgaacgcggcaaccagcgcctgcgaaagaattgcgaagtaggcgccacgcacgccacggccgaacacagccagaccgaggattgcggcgataatgcccggtaccgcagccacgccaatcacggcgatgaccggattgcggaagagttcccagaatccaggaaccttggtgatgccgtactgggacatgaagtccggcacttggcccacgccaatgtcctcaagcttcatgtggatagccatcacgtacgcgccgagaccaaagaacaggccttggcccagcgtcagcataccgccttggccccaagccaggccgatgccgaccgcgaccatcgcgtagcacaggtatttggacagcaggccgaggttgtacacgctcagcacagtcggagaaaggaagatcagcgccacggcaatgaccacaccgatcaaagccttatatttcgtggcgtattcgctcaaagtcatcttcattgtcgtttccttacccttctgaagcactcacgcgaggttcctggagcggatggagaccaagccctgcggcctgaactgcaggaacaccaccacaatcaggaacacggcaacctgaccaatcgaggcagaggtcggcagttcgatggacgactggcacaagcccagcacgaacgaggcgataaccgcgcccttgagctggccaacgccgccggccacaacaaccaggaaggcctgcacgatgaaggtcgtaccgaagttgaagctaatcgagttcagcaggctcagcgccacgccagcgataccggcgatgccggagcccaggaagaacgtcacatggtcgaccatcttggtggagataccggaaacctcagcgaggtcgcggttctcggaagtggcgcgaatctggcgacccagcggcgtgagcttcaggatcgcgtacagcgcagccacgcagataatcgacagaataaagatgaacagtcggcctgcagagaagctgtagccaaagatggtcaccggattggtcagcgcttcaggagccgaagcgtagaccggagtggcaccgaaaatatcgcgtgcgagctgctgcaataccagcgatacaccgaaggtaaccagcagcgtatcaagcggacgattgcgcatacgctccagcagcaacacgtccagcagtaaaccaagcaaaccggctactacgaaaccgaccaccagcgccacggccagggacactgttttattgccgatgaccatgctcatgacgtatgcggtgtatgcgccggccatcatgaattcgccgtgggcgttgttgataacgcccatctggccgaaggtcaacgacaacccgagggctgcgagcagcagaatcgatccgttggacagacctgccacaatttgtggaaataacatacccatgttgttgtgtcctcttctctcagttgctctcgacgctggcgctcaggctcttggcccagctgtaggtcttcaggtacgggtccggcttgatgggaccgtccgacttccagacggtgtggatgagcttgtctgagccgatcttgccgatgtatgaggtcttgtagatgtggtggttttcgccgtccaccttgaccttgccttccggtgcattgaaggtgacaccgtctgctgcagccttgaccttgtccacatcgaacgacttggccttctcgaccatgcccttccacaggtacacagatgtgtacgccgattccatcgggtcggaggtggggcgattggctccgtagcgcgccttgaagttcttcacgaacgtcttgttttgcgcattgttcagcgtctggtagtagttccaagcagtgagctggtccttgacgttgtcaacgccgatagcggaaacctcttcctcggcgatagacatggaaatcaccggcgtggtggcggctttcaggccggaagccttgtattccttgaagaatgcgacgttggaatcaccgttcagcgtgttcaccaccgcatccgcgccggagaacttgagcttgttgacgatggtggtgaagtcggtggagcccattggggtatattcctcgccgaccacttccatgccattgccctcggcgtacgccttgaccacgcgatttgcggtctgcgggaacacataatcggagccaaccaagaacagcttcttgtagccttgctccttaaggtaatcaagcgcaggcacaatctgctggttcggtgcagcacccgagtagaagatgttcgggctggcttccatgccctcgtattgcagcgggtagaacagcagcgcgttatccgcctcgaacacaggcagcatggccttacgcgaagaggacgtccagccgccgaacaccgcggccacgcattccttttcgatgagggtcttggctttttcggcgaacacagccggctcggacttgccgtcctgctgcactaccttgagctgcttgcccagcacgccgccctttgcgttaatctcatcaacggccatgtgcagcgaatcactcaccgtctgttcggaaatggccatcgtgccagacagcgaattcacgaaaccgattttgatggtgttgcctgaggtgtccacacatgatgaggtgtcgcttgccgcagtcgcgttgttctcttgggcctctttctcggccacggtgcgaccccagccacaaccgctggtggcaagcactgcggcaacaatgcacaccgcagcacccatcttcagtctttgcaatcgagtcatatgactcttcctccccacatacgactacattccgcgaacgttgcccgcccgcggaatgtctacgctgattgccgtaccgtgccctgatgcctgatatcgtgctgaaccacttgccgtatatcgacggctggcttccggccgactgcactatacgatggcagtgcctgcgtgaatttccgttgcctgaatatttcatatgcgtctcatacataacgctcacgttacaaaatcaacggtgttacgcggcccgccgtcgaacgctgtttacattggtgtgcgatacgcgcgcgactgccgcccaagtgacttccccgcgaactacgggtaggctggggagtatggaacttcacgttttgaatcatccgctggtcgagcacaagctcaccgtgctgcgcgacaagaacactccttcctccactttccgcgagctcgtctcggagcttgtgatgctcgaggcctatgaggccacccgcaacctgtccgtagttgccgcaccaatcgaaacaccggtcgctccgatgaccggtaagaagctggccaaaccgcgtccgatcattgtgccggtgctgcgtgcaggtctgggtatgctcgatggcatgacccgtcttatgccgaccgccgaagtcggcttccttggtatgaagcgcgacgaggaacaccccactcagcaggtcacctatgcgaaccgtctaccggaggacctgtccggtcgtcagtgcttcctgatcgacccgatgctcgccaccggtggcacgctggttgctgccacgcactatctggccgagcgcggtgccaaggacgtgaccgcgatcaacatcatcgcggcgcctgaaggcatcaagttcgtggaagagcacatcgatccgtccatcgacttcaaggtcgtagtgtgcgcggtcgacgagaagctcaacgacaagtgctacatcgtgccggggttgggcgatgccggcgaccgtctctatggcgtaattgactgattttcctggctcccctcagagaggggagccaatgtgatgggctttttatgcaaatcgacattattgcgccgggacgcgtgaaggaacgatatcttcgcgacgccatcgacgagtattccaagcgactttcgcgctactgcaggctcaacatcattgaagtggcagatgagaaaacgcctgaccacgcctccgaaggcgttgaccgacagatcaaggccaaagaaggcgaacgcatcgccaagcatctgaaggacggcgcgtttgttattgcccttgccatcaatggcaagcagctgtccagcgaagaattggccgccaaaatcaacgaccttggattgcgtggcaccagccatattcagctggtcatcggcggctcaatcggccttgacgacgcgattctgcgtcgtgctgattttctgctgagtttctcgaagatgacgttcccgcatcagctcatgcgcgtgattctgctggagcagatctatcgcgcttataagatcaacgctggcgagccatatcacaagtaaaacgccatacctcatggggcgggaaatcccccatggggcggtaattgccccatggggcggtaaaaccctcatggggcggtatgccaaaatggcttaattccgcggtttcacatattcttcaaaccgccccatgggcaagttaccgcccgatgagcctgtaaccgccccatgggcacatcaataacgccctcaacctcacactgcgtcggggacgaacgcttcgaagatgtggcggtcgaagtagggcgcgcactgggcgagttcatcgctgctgcgcacggtccatgaaaccggcatcgcacccatcgaacgagcgagcctgacttgcggcgaagcgccaccggtccagtcataggccacgaaatcaggacgagacagccagtcgaacgccagtaagccggcggcccattcagccgcaccattcttgctcagcttcgccggccagctcagctgaccgcggcacacctcagggtgatgctccttgtaccaattcaccgcgcccggatggaaggattcgatcacgtacgggccgtcatacgcctcaagcaaggcgtggcccttttccatgagctcttcgctacgctcatcccaagccttgttgtcgctgaacttgtattccacaatcagcggagcctggccggccaccacgtccagcacatcggagaacagcggcacatgctggtagtaccgttgcaaactagtttgttttggtttgtaggacggtcttgcgatcgtccgctccaagtctcacgccgcttgcgtggctgcttggttcgcacttcaccggggtctgcgttgcacgacgtgatgcgtcgttccgtcttccgtcccctccatgcgcgtttagggtctccggggcactcccggcgacctggatgttgacggccgcgttcaaatcacggtcgatggacagtccgcactcctcgcaatggtagacgcgctcggacagggacagtttggttttcaccgtcccgcagttcgagcaggtcttcgagcttggataccagcggccgatgatgtggagtccagcgccggtgcgtgcggtcttgtaggtcagttggcgtcggaactccgcgaatgcggcgtcctgaatcgattgggcgagcctgtggtttttgaccatgcccgccacgttcagatcctcgatgctgatgtccgagtacgtgtcggcgagccatgtggtcagcttgtccaacatgtcgcggcgctgattggcgacacgcgcgtgcagtcggacgactcgttcccgcgcgtgggcgcgccgatgcgagccgggctgtctgcggctcagcgagcgttgcgcccgcttaagacggcgttcattggccttgagcgtgtgcgggttggcgatcgtggtgccgtccgagagcgtcgccaaggatttcacgcccagatcgatgccgaccgccccttccctcggcgttcgtctcgccgttgggtcggcgcgttcgacggtcaacgcggcgtgccagcgtcccgcacggcacgacaccgtcatgcgcagcgccctggccccgtccacgcgtcctgcgacgttctccatgcagtgcacgcggccgatgcgcggcagtctgagcgccttcggatcggccctgacgaggccgaagctgccggtcgtgtacgcgaaccgcggcgtctcccgatccttcgccttgaatctcgggaacccgaccctgcggcccttccgttcgcccttgcagcttttcgaccagttcgacagggcgtcggacaatgcctccagaccactgttgtaggcttccttgctgttctcccgccaccacggcgtcccgtccgcatccacggccagcgtgcccttgttcgcgttccaccagcggcgcagcgcatacaatgtccattccagcttcccgccggtttcgatggtctccttgacgtgggcgagccccgcattgtaagcgaacctggccgcccccgcgtgcgacagcatcaggcgttcctgcacgggcgtcggatccaacgccaccttgacggcctcaagcatcatgcgccgccttcaacgcggccttcgccttgttcctcgccgcgcgccgaccgtacaggcgggcgcagaacgaggccagcacctcggtcatgtcccgcacgagatcgtcgtccagctcggaatcgtccacgacgatgagccgccgcccctgcgccgtcaacgcggattcgaccagtcccgcgttcatgcgggccaggcggtcgcgatgctccacgacgatcgtgcccacggtcgggtcggcgagggtgcggttcaacttgcggcgtttgtcgtccatgccggaaccggtctccgacaccatttcgacgtccgacgcgcccagatcgatggcgaacgccttacgcgcgattctgttgaagcacggcgtggcagcggacgagatgtattacgagccgtttgcgatgtgatgttcgggagcgcgggagcgtagcgtatcgaacgtataggtaacgaagtgggaggtgtctcgccggatgattgcttggcgagacacctcccacttggcattgctcccctcagcctcacctcgttcggcagctcccctcagagagggagcaatatgggtcatatcatggttctggaatctccagcgggaagctacgcagacgccttagcccaaacgcagtgttggctcctcctcggagagggaagccaacactgagatgggaattagtgctgacatgagtcagcaatcattcttagtggcggagcattttgcgggcggtggcgagggcggcacctgcggcgaggaacagcacggtgatgccggcgaagacgctcacgtcagcgccagagttggccagcttgccgttggccttggacgcgttcttggacgtgctcggcttcttgttgccgttgttctggttctggttgttggagccggcgttgttctggtcgttgccggtgttggaaccattgttggaaccgttgttgttttcgttgccgttgttgttgccaccgttgttgttcggggcctcctgcttgacgacttcagccttctgaccgggctcgacgctcaccacgttgccgttggcgtcaagggtgaccttagagctgaaggcggcggcgaggttcaggcgctgccagccgtcggaagtagagtcgagcgggtagccggactggatttcagtgcgggccagcacttcgcggcgctggtcggcgctcagggtcgggaacacggtacgcagcagggcctcggcgccagcaggcacgcgggcagcctgatcggtggggccgaccgggtcgaagccgtaggtgaggcgctcggtgtacacgtccacggcggacttgacatcggtgacgggctcagtggcgacctgatcggtgttgaggttcttgtagccgttggtggtggtggccttcgtgttggcgataatctcgtcaagggtgttgccgtatccggcttcttggccgcgcttggtcaggtagtcgcgcagttcctgctgggcgggcttgacgacctgctcgaagaagacgtcgtcgttcagacggccggcggcggaagcctcaccgacgatacggccgcccatgatgtccatcgggtagtgcacaccaagcacgatgcggttgttgccaccctcggcggcacgggctgcaatctgcggggcgagctcaggcatcagggcagccagggtcaggccggacgtgtagaacgccatcgtgtggccggacgggaaggactcggactgcaccagaccgccatagccattggcacggtcgacattgcggaaatcatcgtggaagccggccacgcgcttcagagcgagcgcaggagccagtcccttcaggtcgttttcaccgttggcgctgcggtcgatagagtcgccttcagcggtgttaagcgacggacgcgggtaattgaaaccatgcttggcgccagtcaccgggatgtagccgaccatgtcgttgagcagcttgctggtcttggccagcggcacattgccattggcatctgcttcgtagccttcatagaaccattcgccgataatcggaccgaaggcatcccagtaggtttcgcgattgttctgggcaccatcaatgacggcacgctgctgctgggtgtagtggtcgtccaccttcacaccattggtgttatcggcgtcagccttgttgttgatagccacggtcaggtcatcgctcttgccaagcactgcaacgccggcatcagtgacgctgccgtgggatgcagtggtctcgtcattgttcgggttggccaccggagtccagtagttgttgaactccttgagcagtacctgcggatcggccttagcgatgtcagacgggtaggtcggctggtcgtcggccatggcggccggcaccacagccgcgaagctggcggcgatggtggcaacggcggcgatcccggcaagcgcacgctcgcactgagtgaatacggacattgtccctcctcatcaatatcggtctgtattgatgcccttcctcttggcatcgatcgacgaaaacgccggcacccaaatgcatgagcgctgatgggaacgctttcggtgaccaacgttaggaatgcgacatggccgcaatggttaagaaccatgaatgtcatatggccgctaattgaacagcacgagccaacaatgtagtcatggttcagcgactactgcctgtggccaaggtgttttccggcaaagctgcgggtaggctgggagctatggaattgcatgtactgaatcacccgctggttgagcacaagctcaccgtgctgcgcgacaagaacaccccctcttccattttccgcgagctcgtctccgagcttatgatgcttgaagcctatgaagccacccgcgacctgagcgtcgtggccgcgccgatcgagaccccgctcgcgccgatgaccggcaagaagctcgccgaaccgtgtccgatcatcgtgccggggctgggcgacgccggcgatcgcctctacggcatcatcgactgatggagcgtaccccccttctccggaaacgtacgctgaatctctgtgagcgtacgtttccggagagtttttcctcccctttctcagcaaacgtacgctgacggcccttcagcgtacgtttgctgagacgaaggcagataatcccgcacgaaacgtacggtagcgacttggcagcgtacgtttccggataaacgactatgcaaatcgacattattgcgcccgggcgtgtgaaggaacggtatcttcgcgacgccatcgacgaatattccaagcgactttcgcgttattgcaaactcaacatcatcgaagtcgcagacgaaaagacgccggagcacgcgtccgagggcgtagagcggcagatcaaagccaaggaaggcgagcgcatcgccaaacatctgcgcgacgacgcgttcctcatcgccctggccatcgacggcaagcagctctccagcgaggaacttgcagcgaagatcgaagactggggattgcacggcgtcagtcatatccagttggtcattggcggatccatcggactggatgatgcgattctgcgccgagccaacttcaaacttagcttctccaaaatgacgttcccgcaccagcttatgcgcgtaatcctgctcgagcagatctaccgcgcgtacaaaatcaacgccggcgagccgtatcacaagtgattattccccacaaccccgtgcacagggttggccaaccttccaccgtgtggcaactcgcgcaccgtgtggcaactcacgcacggtatggaaactcgcgcacggtgtggtttgccaaaatggcgttattctgcggttttatggttcttgacaccttgtcgaaaaccacaccgtgcggattttgagccgcatcgcagggaaaaaaccacacgacagcgagcggccgactgcatgaatacagccggccgctcgctaataaaatcgccaataggtcactgcgcgtcaggaacgaacgcctcgaaaatatggcggtcgaagtactggtcgcactgagcgagctcgtcgctgctgcgcacggtccaggagacagtcgtggcgcccatcgaacgagccagacggacctgaggcgtagcaccaccggcccagtcataagccacgaaatcagggcgggacagccaatcgaatgccagcagaccggcaccccattccaacggaccatccttggccagtttggctggccagctcagctgaccgcggcacacctcaggatgatgttctttgtaccagttcacggcgcccgggtggaaggattcgatgacgtatggaccgtcataatcctcaagcagggcgtggcccttctccatcagctcctcggtacgagcatcccaagcgctattgtcgctgaacttgtattccacaatcagcggcgcacggccagccaccactttgagcacgtcggagaacagcggcacatgctggtagtagccagcgggggcggtggaaggcgtgaccaccagcggcggattcgcgtcggcaccgggcagcggttcggccttcaagtcaccggacttgccgttcgggaacagcggaatacgggtcagttcgtcgtacgtcagatcttcgatgcggcgcggatcgccggccacgcgcagcaaatcggcgtcatggaccacgaccacttgaccgtcgagcgtaagctgcacgtcgagttcgatgccatagccagcctcgcaggcggcggcgaatgcggccagcgagttttcaggagcgatcggaccggtcatatccgcactgccgtagccggccttgacagccatgcgacgggcaagcgacacataatcatcgttttcggcgatggatcgctcagtggtatcggcttgggcgctgaccgaattatccccaccataatcagcgatatcggtatagccgaccaaaccagaacccgcatcgtgcaagccacgatgggcataccataccttcggaatggagggcacgaaattacgacgcttgtcattgaacgtgcgcggggccacggcccacacggtagcaccggcggcggccacgcctgccagcgccacgtttctccagagcttcgacgacattggaatccttcctgttgggctgcctctagcctaacgcttctgccagccattgtggagtggttggatcgtccggcttcagcgcgcggtccaggtggttggcacgcagcggctcccagctgaaatctgccagcagatcggcgggtttgcaagggattggagtgggttgcagacgcagcaaccaggcgcagtatccgatgatttgctcgggggttacgttgcgggcgcgcaaggctcccatatccagcgaacgttcgcgcttggctaaacgccgaccggccgcattgtcgatgagcggcaggtgcgcatactcggggtgctcggcgagaggcttttccgtgttgccgcattccggctcaaagccgccagctaacagacactggcgaatccacatttgcagcgcggtggagcgcagcagatcacggccgcgcacgatatcatcaacatccatatcgaggtcatccacgaccacgaccagttgatagccgaacagtccatcggctcggcgaatcacggaatcgcctacctcgcgggccaaatcgtagtgctgtggactatagacacggtcgttaaagcatgcgacaccatcaacgattccggcatcgccctgctgttccggcggcacggctcccgacagcgcagcggaatcgtcaggcactgtacgttgcttttctcccgctgccggtttcggcatggcgatacggatggaatgctggtcgccgcgagacagacgggcacggacctcgtcgggatggtcgtgcagcaggcggcggcacgtgccggggtacaccatgaagccgtcgccctcgttgggggccgaggcggcgcgaatgtcggcacgcgagcagaaacaggggtacagcacaccttgcgagcgcaggcattcgagagcgtattcatatcgttcagtgtgctgggattggaacatcggttcgccatcccagtcgaggccgagccaatgcaggtcgtccatcatgagctggtccgcaccggcaaccacgcgcggcttgtccacgtcttcgatacgcatcagcatgcggtcgccacgcgaacgggccgaaagccatgcacccaacatggcgtacacgttgccgatatgcatgcgccccgacggcgtcggcgccaatcgtccggtcactggctctcccttcgtccgttaacactcactttcctaccatatgcgacagtgaacaccttgatgccacggttcttccactcttggggaacacaattgagacggatcggacagatacttccgtttcaaggggctgatttcgatgttgcaggaggtctacttccatttcaaggggctggtagccaagtagacacggcgcaacaatggcggaatggcgttgccataaagccgctgatactcgcggttcggcagaagagcagcccctcgaaacggaagtagacctccgaaagggggcaaatcagcccctcgaaatcgagatagacccacaaagacgaaaaagtgggtatgactgctaccatacccacctgtttaagagattttgcagagaaaaatcactgttgcgaaaccgcccgaactcccctcagtcagcttcgctgacagctcccctcagagaggggagccagtgattgtcacttatcttcggtgacgttgtccacgctcacatccgggtcgtcggagacgatctggtcgctggcccaggcggtgaggtccagatgctcaccaccggtctggtcgacgagcacggtgtcgccatcgtggaccttgccggccagcagcatacgggccaactggtcgcccacttcggtctgtaccaggcggcgcagcggacgagcgccataagccgggtcgtaaccggtgttggccagccattcgcgagccgagtcggtgacgtccagcgtgatgcggcgatcggtcagacgctgggccacgccagccacctggatatccacgatgccgccaagctcctcacgcgtgagcgggtggaacatgacgatgtcgtccagacggttcaggaactccggcttgaagttcatgtggacggcgtccatcacggccttcttcttggcgtcggcgtccatgtcctcgttcacgaggaactgcgagccgaggttggaggtcatgatcaggatcgtgttcttgaagtccacggtcctgccctggccatcggtcaggcggccatcgtcgagcacctgcagcagcacgtcgaagatctccggattggccttctcgacctcgtcgaacagcaccacggaatacgggcggcggcgcacggcctcggtcagctggccgccctgctcgtagcccacgtagcccggagccgcaccgatcaggcgcgagactgaagccttctccatgtattcggacatgtcgatgcggaccatggccttctcgtcgtcgaacaggaagtcggcgagcgccttggccagttcggtcttgcccacaccggtgggaccgaggaacaggaacgatccggtcggacggttcgggtcggagatgccggcacgcgaacggcgcaccgcgtcggacacggcggcgatggcttccttctggccgatcacacgcttgcccaggtagtcctccatatgcagcagcttctcgttctcgccctgcatcaggcggccaacgggaatgccggtccagtcggagacgatctcggccaccgagtcggcgtccacacggtccgggaccatcggctcatcggccgggttggccgcgccggcatcggcagattcggcatccgcgctttccgcggcggcgagttccttctgaatagccggaatctctccgtacagaatcttcgaggcctcagccagatttccctcacgggtgaacttgtccgcctgcacacgcaggtcatcgagcttggcacgcaggtcaccgaccttgttgtggccggcctgctccgcatcccaacgcgccttgaggccgctgagcttctcacgggtgtccgcgagttcggcttgcagcttgcccagacgctccttggatgcaggatcctcagccttcttgagctgcatttcctccatttcaagacgggtcaccttgcgctgcagttcatcgatctcctcaggcgaggagtcgagctccatacgcaggtgggcagccgcctcatcgaccaggtcgatggccttgtccggcagctgacggcccggaatataacggttcgagagggtcgcggcggcaaccagcgcgtcatcgccgattgtcaccttgtggtgcgcctcgtaacgctgcttcaggccacgcaggatggcgatggtgtcttccacgctcggctcgcccacgaacacctgttggaaacggcgttccaatgccggatccttttcgatgttctcgcggtactcgtccagcgtggtcgcgccgatcaggcgcagctcgccacgggccagcataggcttcagcatattgccggcgtccatcgagccttcggccgcacccgcgccgacgatggtgtgaatctcgtcgatgaaggtgatgatctggccgtccgcgttcttgatttcgttgaggacgctcttcaggcgctcctcgaactcgccacggtacttcgagccggccaccatggagcctaggtcaagggagatgagcttcttgccttgcagggtggtgggcacgtcgcccgccacgatacgctgggccaggccttccacgacggcggtcttgccgacgccgggctcgccgatcagcaccgggttgttcttggtacgacgggagaggatctgaatcacgcggcggatttcctgatcacggccgatcaccggatcgagcttgccttccttggcggcggccgtcaggtcggtggagtacttctccagggccttgtacgagccttccgcgtccgggctggtgaccttcgcgccgccacgcacgccgggtacggccttgcgcagggaggctgcggtgacgccgttcttctccaggatttcggccgactggttcggcttgctggccgcgatgccgataagcaggtgctcggtggagacgtattcgtcgcccatctgctgcatttccttctcagcctgggcgatggcggcggtcagctggcggctggcctgcggctgcgaagtgctggagccggatgcgctcggcagtgcgaccaaagcgttacgcacggcggcgccgatggcctgtgggtctccgcccgcggcctcgatgagggagcgcaccacgccgttttcctgacgcagcaacgcatccatgacgtgcagggtctcaacctgcgcgtttcctgcggcggacgcactctgaatcgcgtcgccgacggcctcctgggccatagtggtgaacttctgttccatatcgtattcctccatatcatgcggcccgcgcggagcggctcgcgggcttcgaaagccccgcaagcgccaccgcagaccgcaacttgtcgttgtctgatatggtcaaccgacctggaacccattctattcccaaaacttgagtgcaggtgactcaagttttggattttggtggggagggtgaacagtagccccctctgatgagggagctcacatctatttcaggaggccgacggcagcttcggcggcggataggatttcgccggagaggatggcgttggctacgccttcgatttgcggggtggtccaggtatcgcgtacgtcggggccgatttcgttggcgtactggcgcaccacgcggtatacggcggcacccgccgcacccggacggtacggcttgcggaagtcgaaggagcggcaggagcacagcagttccacggccagcacgcgcgcaaaggccggaatcgaccggcgcagcttgcgggcggcggcccagcccatcgacacgtgatcttcctgcatggcggagctcggaatcgaatcgaccgaggcgggcacggcgttgcgcttcatttcggagacgatgccggcggcggtgtactgggcgatcatgaaaccggagtccacgcccgggtcaccagccaggaacgccggcaggccgcggttgcgcgccacgtcaaggaagcggtcggtacgacgctcggagatagaggctacgtcggcagtcggaatcgccaggaaatcgagcacataggccagcggcgcgccatggaagttgccgttggactccacacggccgtccagcgtgacgcacgggttgtcgatggcggaggcgagttccacgcccgccacggaggccgcgtattccacggtgtcgcgggcggcgccgtgcacctgcggggtgcagcgcagcgagtaggcgtcctgcacacgcacggtggagcccgggcggccggcctcgatcagaccggagcccttgagcatgcggacgatgttcgcggcggaatcgccttggccgcgatgcggacgcagcgcctgcaagtcggcggcgaacacgcggtcgttgccgagcatgccttccacgctcatcgcggcggcgatgtccgccgtcttgagtagcaggcgcagatcggtgatggccatacacaacatgccgagcatgccgtcggtgccgttgaccagcgccaagccttccttctctttcaaatcgacgggcgtgatgccggccgcacgcagcgcttcgccgccgccgatcttgcggccgtcagcgttgcgggcctcgccttcgcccatcgccaccaaagcgcaggcggcgagcggcgccaaatcaccggagcatccgagcgaaccgtattcgtagaccaccggggtgatgccggcgttcagcatatcggcgtagacctgcgcggtttccgggcgcacaccggtgcgtccggtgcacagggtgctcaggcgcagcaccagcaggccgcgcaccacctcacgctccacttccggtccggcaccggcggcatgcgagcggatcagacttttctgcagctgcgcgcgctgttccttggggatggaagtggaggcgagcgcgccgaatccggtggagataccgtaatgcggcacggtgtcgtcggccaaatgatcgataaccgcgcgacttagcgccatctcatgcttcgattcgtccgaaatcgccactttggcaccgccgcgcgctacggcgataacgtcctcgatgctcaatgccccaacgcctacggtgaccgtctgctctgccatgttttcctacctctctatcgtgctgagctccacttggtattggatatattcatctcgccagcatggcatatcaacgttacgggactgtccacaatatgcaccgccccgcgccagcgccgcgcgaacgctcctatactcacggctggtttgttatgcgcctgaccgccgccggtgctgcggcgggtgcttgtgggataagagaagaacatgatttttcaggccggttcgctgctgctcgttatcatcggtgtctacatactcaaacatgtccacattttcggcgagcgtgattacaaaatcgtgcagggtctggtattcaatctgacgcttccttgtgcgattatcctgtcgttcgccacgaacaagcacgacatgcgcatgctgtggatcgtgttgttcggcttcttcgcctgcgcgattccgctgttcatcgtgtatttcggttctcgcggcgacgagaagaactaccgcgccttccagatgctcaacgcctcgggcctgaacctgggcgcgttctgcctgcctgtggttcagacgttcatgggcccgtccgccggtctgccgatcatcaagctcgatatcggcaacgccaccgtggccacggccgggtcactgaccatcacacgcacgctgctgcatatggataacaatttcaagtcgctaccgctcatcctgcgtctgcgcaatattgccagggacttcctaagctcaatttccttcgacatctacatgctgatgctggtgttcatgttcctgcacatcacgatcccacagcccatcgttacgctcatcaccccgttcgccaatgcgaacgccttctgcgcgatggccatgatcggactgatgatggagattccgaacaatcgcaaggacaaggtggagttgggcaaggtgattgtctggcgcatggtattcggcgcgattatcgccgtggccgcctggttcctactgccattcgacatgaggattcgcgagatcatcgtgttgggctcgttcgcccctatcacgatcttctcaaccaagttcaccgattcgctaaccggcaacgccaagctcgccggcttctcgctgacagtgacggccatcatcagcttggtggtgatgaccgccctgcacgcggtattgccgggagcgtaagggggaattacgggcccagacacgaggggagccaaaaagagcaatacttcttctatgtgatatcaatcactgactaagctgcatcaccgactatggttaatcatcatgagaccagttcgccctacaattcaagttctgttgagcatgattgacaataatctcttcaactcagagaaccctcaacaactcattgaacagaacatgcggacggaagcagtaacaccgttcgaaggtcttgatttcaccgcattcgacgtcacactactcaatatggctcgtcaggctttcgctggtgacaaaatcgctgccaccaagcattcggaatttagcgctgtggcaaagcgcccagtctatgaaataaggaacaagcaaaccggctggcgaggcatcgtcattcttgaccaatatggcgacccgtggatggtctattgcggatcgcatggggatttccattcaggcaattgcaaatcaatcattaaggcttccaacgccagcaactatatgcccagcgaagaagattatctggttcggaaacgagaagaagaacgtcagcattttctggattttgagcgacgagtcgttcaggagatgcttaacaaaattcgtgcaggaatttatgcgggccaaacaacttcccagtccgaagccctctcagcgctggatatcccctatcagatttcaggagcccccgtaaaggccagtattcagattcagcaagatgacgatgacgactcagcaactgtcaatcaattcgttgaattgacccttgattttccggtcgaggaacaggacaacagttctccatacgcccgacttcaccgcatcctcttgagatgctttaacgccatctgccagcccaaagaccccaatcagccagcagaaacgtcgttgaagacatacagcgacggtcagcaaagacgcgcaactatgtcagcattcgtgctgctggaaccagacgacatcaagcgcatcacaagcccgaacttcctcgatgattccgaatcgttatacaagacgataggcgacaccgagccagaatctatgctacatcgcgtacccaaagagactctgaccgacgcatatgttgaaggcaccctcatccgttctctgtgcgggaaatggttcgtgccaaccagagatgaatactcaggacttcctgcatgccccgattgccaagacatactggaagtcaaggagtatctgagacgtaattacacgcctgagcaatagtcatgacttgacgcataccgggtaaatcgcacagacaatagattcactacgattcgcctgagacaatcctcactctgcgggagaaactgcggcactactcgctttgatcgcttcacggcgatgctctgcaactaaatcacgcatacgatttcgacttgtctcagacaccggagcgacttcgtcaaccgcatcggcaatatcctttgcccgagaattgattgcgtgggcgtattccttacgtcccgcatcacgattagccatgtacgtccgcaaagcaagtaccgtaatccgatgatgactgcccaccatatgagattcgagcagtcctgacttcagcaaacgagtcacatagggccgactcacgccaagaatctcagcagcttgagcaggggataattcttcgtccttgcgaaccaccagtacattatcgtcaataatgccatccaaaattgcagcgagtacagagcctttttgcaccagctctcggcacgccttcgcctgatccaaatcgcgttctgtaagctgttcacgttctattactgcagtcataatgcacatacctcatttcataactgaaataagtgtaacatatagcttggtgcaacacttagatttcgcgaaaaaatcatctgtacattagacagatgcatatatagatgaaatatatgaaacaaagcacgaaggcccggacatcccccaaataggaaaatgaccgggccatgcgttcgtcagtcgaatcacgcccgaacgattacgttgcgcagatcaccgatgccttcgacgtgcacgatggtctcgtcgccggggtcaaggtgaccggaagcgttcggcgtgccggtcatgatgacgtcaccaggcagcagcgtggagaacgacgaaatcgcggcaatctgctcggggatgccgtgaatcaggttcgcggtggtgccagacgccatcggcacatcctcgccgttcagcgtgaaggaaatcttggcgtccctccagtcgaggtcgtcgcgcatcacaatccacgggccaagcgggcaggaggtatcgaagcccttggcgcgcgtccacgtggggtcgatgccctgcaggtcgcgcaacgtcacgtcgttcacgcaggtgaagccgagcacgtaatccatcgcgttttcaacggacacgttcttggcgatacggcccatcaccacggccacttccggctcgaagttcatgtccttggagcaggccgggtacacgatcggatcgtcggggccgatcaccgaggtggacggcttggtgaagatcaccatgtcttccggcgcatgggcgatttcggagtggccggcctcgtgcatgaactgggcgtgggcctcgtagttcttggccaggccgtagaccttggaggggatgaccggggagagcaggcggatgccgtcgccgtcgaccgggtaccggttgccggtgggcttgacctggtcgccggccagcggatgaccgtcaagttcgatgaggtagtccttgccgtccgtttcgtccttttgtacgaaggcgtagcgcggcgaatcattcaaagaaaaacgtgcgagtctcatgcctgtaagcctactccttggcggttccttccgcagaagcatccgtccaaggagcaagcagaccggccttcaatcgaccaaaacgcacgttcgctgggattgctacttttcggtccaggttttgtcgtacagcgactggccgctttgcgtgtgcatgatgacgcgcaatgatgccttgccgctggaggtcttgcacatcgagcccagcagattcgcggtggattgataggtgctgtccatagcatccagtgaggaagcgacggtatcgcctagcgaggcgtagctgtcgtcgagcacgtactcgtacaccaaggtgtcaccgtcgacacggtagttgaaggtaatgccggtatctgcaaacgtatccgcttcggattcaatggagtccttgaattccgaatagtcgacgaaatcctgaatcgaatcgtacagcccataatcgccgtcggttagatcgtcatgggtttcgtccaacgtgtcgtccagcgcatcgtcaagattatcttgagctttgctcttatcgctgctatcaccgttgcccgaagaggactgactatagaaggaatcggttttcgcctcatctatagccttgctggtgtacgagacaccgccgacgatcagcgcgatgaccagtattacctgtatcaccatgcccgccgcactgatgatgatgccggcgatggccaagcccttgcccttgccgccctgtttcttaatctggttgaggcccacgatgctcaggatcagaccggggagtgagacaaggaacgagcagataaaaccggcaatagccaggccgttgtacttctggttcgcttcaggcggcacactgccgtaagaaccagaccatcccggctggccgttcggttggccgccttgcatatacgggttatagggcgtttgcggaggcacggccccgccgcccggataccgagcactgacgctgccgtagaccggaggaaccgatccgcctgccggagccgtccccggatagggcgaattgggcgctgctggtgcgggcgcaggcgcgggcgctgtcggtgcgggcgcaggcgcgggcgcagcggcaggagtcactggtggcaaagcctgcgtaggcggtaccggctgattgaccggcgcaagaggctgggtggactgctcggcaggtgtaaacgcctgcgtaggctgctcaacaggagtgaacgcctgagtgggctgttcgcccgctgcgagtgcttgggttggagcattgttggcggcggttcctgcttcccccgtcatcgcatttaacggctcagtcggattggcgtcagcttgctgccccggcacctggccgttcggattggcattcggatcagtcatgacatgcactccttcaactgcatcgcaccccacttgcgagatacgcccctcgtcttacgcgccacattgtgcgttacagacaactgtactcctcgtggcgagctttaagtaccccaggaaatttggcttcccaaaaaacacagaagcctgaaaccggctattgcctcagcaatattcagtcggtttcaagctaaatcgttaatcctctggtgaaacgacggtctacttcttcagcagcggcgcgacttgttcctcgtaggcggtcagggcggtgtcgatcacctggtgcatgtcatagtacttgtaggtgcccaagcggccgccgaacacggtgttcggctcggccgcggccttggcctcgtactgggcgtacagcgccttgtccgcgtcggtgttgaccgggtagtacggctcgtcgccgcgctcggcgaagcggctgtattcctcccacaccacggtcttgtccgggttctgggagtcgtggcgctccgggttgaagttcttgaactcgatggctcgggtgtagggcacgtccgcgtcggagaagttcatcaccgggcatccgaagtggtcgccctcgtcgtagcggacctccttgaagtccaccgtgcgccacttgaggtcgccaagctcgtaaccgaagtaacggtccaccggacccgtgtacaccaccggcacgcccgcggccttcagcgcctccttgttgtacggctgggactcgtcgaagaagtccacgcccagcgaaaccgtgatgcgcgggtcatcgatcatgcgctccatccacttggtgtagccgtccgcgggcagaccctcccacgtgtccttgaagtagcggttgtcgtagttgaagcgcaccggcaggcgcttgatgatggccgccggcagctcggcagggtcggtctgccactgcttgcccgtgtagttcttgatgaacgcctcgtacaggggacggccgatcagcgagatgcccttgtcgttgaggttctgcgggtccgtgccggccagctcgcccgcctgctgctcgatcagggccttggcctcggccggcgtgtaatgcgcatggaagaacgggttgatggtgcccaggttgatcggcagcggatagacctcgccgtcatgcgtggcatacacgcggtgcacatagttcgtgaagctcgtgaaacgattgacgtagtcccacacacgcttattggacgtgtggaacaggtgcgcgccatacttgtggatctccgcgccggtctcctcatcaaagtacgagtacgcgttgccgccgatgtggtcacggatatcgatgatgcgcacgcgcgcgccggtgtgctccaccgcctgctgcgccaccgtcagaccgaacaggcccgcgccgacaatgactaggtctgggtattgagtagtttccggcatgcgcgcattccctttcataaagtcaatatatcaattattatgttcgatttccgagaaaatatactatgattattcgccatcgcggcgaaacccgccactctcccaatagccagtccaggatgttaacttgcttgatgccggcgtggtctgatgtgacttgatttttgttccgcatttcctctcacttgataggagatgatggaatcatggcaaggggcatccgttacacgagggaattccaggagaaggcgctgcggcttctgggcgagtcacgcgcgaaccattcgtcggagacgaaggccttggcctcggtctcgcagagcctgggcatagccccggagaccctgcgccgttggcgcaacagggccgataggacggtcacggcgcaatccgcgcgcgatgcgcaggcggcggccgagctgaagaggctcagggcggaggtcgcggaactgcgcaaggcgaatgagatactgacgacggcgtcggcttttttcgcggccaggctcgacccgacacggcgttgaaggccgcgtgcatcgacgcgtaccgcggccgtttcgggggtcgggccgatctgccgggtgctgtcggccgggccggactgcggtttcctgaccgcccgcggctaccgcgccttcaagacggggcctctcagccgcatggcggcgcgccgcgaggcattggcgcgtgacatcacgtcgatccacggggacgagttcatgcgcgtgtacgggtaccgcaaggtgtggcgtcagctgctcgaccaaggctgggatcccttggaggccggccgagaccaggtcgcccgcatcatgcgcgaactcggtctgcggggcgttcggggcggccgcaggccggtcaccaccatccccgccagggggacgggcggcaggctcgacctggcggggcgcaagttcgccgcccgcgcgccgaaccggctgcacgtcgccgacatcacctacgtgcggctggcggacggctcgttcgcgtacgcggcgttcgtcaccgacgcatacgccagaagaattgtcggctgggccgtcgcctccacgatgcgcaccggggagctgccgctgcaggcgccggaacaggccatcgcgtgggcgcgcgcccacggcgggacggaggggtgcgtgcaccattccggccacggctcgcagtatataagcctggtgtattccacgcgcgtggaggaatacgggatgctgccgtcgaccggcacggtcggcgactcccacgacaacgcgctggccgaacgcacgaacaacacgtacaagcgcgagctgatttggatcaacaggccgtaccggacggtcggcgagctggaatacgcgaccatgaggttcgtctcgtggtacaactcgaaacgactgcacgcctccctgggctacaggacaccggaacaggccgaggacgagtattatcagaaacaggcggcacaaaccgtctcacaatagaggcggaacaaaaatcaggccacttcagccgccccgctttgttatactgagcaccatccacaacacaaataaaggaaacagacttgactctgcaggctacgcctcttgtatcgattatcataccggtctataacgccgaaaaatatctccgatactgtgttgattccattcttcagcagtcatacaccaatcttgaagttattcttgtggacgatggagctaaagattcatccccatccatttgtgacgactatgcacaatccgattccagagtaacagtaattcaccaacccaatgggggcatcgcgaaagcgcaaaacaccgggctcgacgcagctcacggtgattacatcgcgttcgccgacaacgacgatatcctcgacagccgtaacatcgagctactgttgcacgcattgaaatcaacagacgctgacatgagtaaaggacgctggcgtcaattcggcgtctcgcaattaccgaccatctgtaatgaagccgctcagggcgctgacgaaccacaccacattaccgtatttcgtaacccgctacgggcttatcaatccatattctgcaaaagtctgagaattatcggagaacgtttcggtcgtcatactgaggcgcggtatttcaacgaagcaaactggtgcaggctctacaaacgcgagctgtgggacggactgcgattccccgtcggccattatgcacaagacatccgcatggctggccccttatactctcgtatgtacaaagtcgccgatgttgatgcgactttgtactactggcttcaggaacccgactcagtcacgcactcaaaacgcaccccgacattttggcacgataatgtactttccgcagcggagaacttccagttcacccttaatcagggaatagtgccataccgcaattacttcggattgactgcgagtgtccgtgatgaaggacgcgggctgcatcatgcgaacagcagcacaggctctgctcaggcccagttcactatctcagccgaagatataaagaactaccaggacgacgttcaaaacatgaaatctcttattcgacggctggccccgtcacaaaggttcctctgcaagatactgtacttcatccgatcaggagaaaatcttatttacaaccgtcgaatccattccatgaaatgacccaaacgcgcgctcactctggttatggatacacctcttttgtgaagaaaaacatgctggtattcgcaaaatgtcatacttacatgccccgctggtacactctgtaggtatggttgaaagaatactggtcactggagccggcggttatatcggtaggcatgtcgtcaaggcgctgcttgatgatggacaagacgtcatcgcctcggatctccgcttgaacgatgttgatgatcgtgcggaacacatagagaccaatctgtttgaatctggtagcgatatctattccaagcttggaaagccggatgtctgcctgcatatggcttggcgcgacggcttcaagcacaactccgacaatcacatgggtgatttatccgcccattatcgattcatcaagaacatgttggacggaggtcttcctcaaatcgcggttatgggaactatgcacgaagtcggatactgggagggtgccattgacgagcacaccccttgtcatccggcttccatgtacggcatcgcaaaaaatgccctacgtgaggccacgcttatgctcgcacaagaacacaatgcagccgtgcaatggctccgcgcatattacatcgtcggagacgatctacgcggtagttccatcttctccaaactgctgcaagccgcacatgatggcaagccgtccttccccttcacgacgggtaaaaataagtacgactttatcaatgtcgacgaacttgcacggcaaataagcgcagcggtttcccaacgagaggtgaccggtatcatcaactgttgcactggaaagcctatatccttggctgagcgcgttgagcaatacatcaaagacaatgatctcaacatcacactggattatggggcgttccccgatcgtccctatgattcccccggcgtatggggtgacgcgaccaagattcacgagattctagcgacacgatagatcaacaaaacatatgggttggggcggattccatcgcgatggaatccgccccaacccatatgttttgttgatctatcgtgtcgctagaatctcgtgaatcttggtcgcgtcaccccatacgccgggggaatcatagggacgatcggggaacgccccataatccagtgtgatgttgagatcattgtctttgatgtattgctcaacgcgctcagccaaggatataggctttccagtgcaacagttgatgataccggtcacctctcgttgggaaaccgctgcgcttatttgccgtgcaagttcgtcgacattgataaagtcgtacttatttttacccgtcgtgaaggggaaggacggcttgccatcatgtgcggcttgcagcagtttggagaagatggaactaccgcgtagatcgtctccgacgatgtaatatgcgcggagccattgcacggctgcattgtgttcttgtgcgagcataagcgtggcctcacgtagggcattttttgcgatgccgtacatggaagccggatgacaaggggtgtgctcgtcaatggcaccctcccagtatccgacttcgtgcatagttcccataaccgcgatttgaggaagacctccgtccaacatgttcttgatgaatcgataatgggcggataaatcacccatgtgattgtcggagttgtgcttgaagccgtcgcgccaagccatatgcaggcagacatccggctttccaagcttggaatagatatcgctaccagattcaaacagattggtctctatgtgttccgcacgatcatcaacatcgttcaagcggagatccgaggcgatgacgtcttgtccatcatcaagcagcgccttgacgacatgcctaccgatataaccgccggctccagtgaccagtattctttcaaccatacctacagagtgtaccagcggggcatgtaagtatgacattttgcgaataccagcatgtttttcttcacaaaagaggtgtatccataaccagagtgagcgcgcgtttgggtcatttcatggaatggattcgacggttgtaaataagattttctcctgatcggatgaagtacagtatcttgcagaggaacctttgtgacggggccagccgtcgaataagagatttcatgttttgaacgtcgtcctggtagttctttatatcttcggctgagatagtgaactgggcctgagcagagcctgtgctgctgttcgcatgatgcagcccgcgtccttcatcacggacactcgcagtcaatccgaagtaattgcggtatggcactattccctgattaagggtgaactggaagttctccgctgcggaaagtacattatcgtgccaaaatgtcggggtgcgttttgagtgcgtgactgagtcgggttcctgaagccagtagtacaaagtcgcatcaacatcggcgactttgtacatacgagagtataaggggccagccatgcggatgtcttgtgcataatggccgacggggaatcgcagtccgtcccacagctcgcgtttgtagagcctgcaccagtttgcttcgttgaaataccgcgcctcagtatgacgaccgaaacgttctccgataattctcagacttttgcagaatatggattgataagcccgtagcgggttacgaaatacggtaatgtggtgtggttcgtcagcgccctgagcggcttcattacagatggtcggtaattgcgagacgccgaattgacgccagcgtcctttactcatgtcagcgtctgttgatttcaatgcgtgcaacagtagctcgatgttacggctgtcgaggatatcgtcgttgtcggcgaacgcgatgtaatcaccgtgagctgcgtcgagcccggtgttttgcgctttcgcgatgcccccattgggttggtgaattactgttactctggaatcggattgtgcatagtcgtcacaaatggatggggatgaatctttagctccatcgtccacaagaataacttcaagattggtgtatgactgctgaagaatggaatcaacacagtatcggagatatttttcggcgttatagaccggtatgataatcgatacaagaggcgtagcctgcagagtcaagtctgtttcctttatttgtgttgtggatggtgctcagtataacaaagcggggcggctgaagtggcctgatttttgttccgcctctattgtgagacggtttgtgccgcctgtttctgataatactcgtcctcggcctgttccggtgtcctgtagcccagggaggcgtgcagtcgtttcgagttgtaccacgagacgaacctcatggtcgcgtattccagctcgccgaccgtccggtacggcctgttgatccaaatcagctcgcgcttgtacgtgttgttcgtgcgttcggccagcgcgttgtcgtgggagtcgccgaccgtgccggtcgacggcagcatcccgtattcctccacgcgcgtggaatacaccaggcttatatactgcgagccgtggccggaatggtgcacgcacccctccgtcccgccgtgggcgcgcgcccacgcgatggcctgttccggcgcctgcagcggcagctccccggtgcgcatcgtggaggcgacggcccagccgacaattcttctggcgtatgcgtcggtgacgaacgccgcgtacgcgaacgagccgtccgccagccgcacgtaggtgatgtcggcgacgtgcagccggttcggcgcgcgggcggcgaacttgcgccccgccaggtcgagcctgccgcccgtccccctggcggggatggtggtgaccggcctgcggccgccccgaacgccccgcagaccgagttcgcgcatgatgcgggcgacctggtctcggccggcctccaagggatcccagccttggtcgagcagctgacgccacaccttgcggtacccgtacacgcgcatgaactcgtccccgtggatcgacgtgatgtcacgcgccaatgcctcgcggcgcgccgccatgcggctgagaggccccgtcttgaaggcgcggtagccgcgggcggtcaggaaaccgcagtccggcccggccgacagcacccggcagatcggcccgacccccgaaacggccgcggtacgcgtcgatgcacgcggccttcaacgccgtgtcgggtcgagcctggccgcgaaaaaagccgacgccgtcgtcagtatctcattcgccttgcgcagttccgcgacctccgccctgagcctcttcagctcggccgccgcctgcgcatcgcgcgcggattgcgccgtgaccgtcctatcggccctgttgcgccaacggcgcagggtctccggggctatgcccaggctctgcgagaccgaggccaaggccttcgtctccgacgaatggttcgcgcgtgactcgcccagaagccgcagcgccttctcctggaattccctcgtgtaacggatgccccttgccatgattccatcatctcctatcaagtgagaggaaatgcggaacaaaaatcaagtcacatcagaccacgccggcatcaagcaagttaacatcctggactggctattgggagagtggcgggtttcgccgcgatggcgaataatcatagtatattttctcggaaatcgaacataataattgatatattgactttatgaaagggaatgcgcgcatgccggaaactactcaatacccagacctagtcattgtcggcgcgggcctgttcggtctgacggtggcgcagcaggcggtggagcacaccggcgcgcgcgtgcgcatcatcgatatccgtgaccacatcggcggcaacgcgtactcgtactttgatgaggagaccggcgcggagatccacaagtatggcgcgcacctgttccacacgtccaataagcgtgtgtgggactacgtcaatcgtttcacgagcttcacgaactatgtgcaccgcgtgtatgccacgcatgacggcgaggtctatccgctgccgatcaacctgggcaccatcaacccgttcttccatgcgcattacacgccggccgaggccaaggccctgatcgagcagcaggcgggcgagctggccggcacggacccgcagaacctcaacgacaagggcatctcgctgatcggccgtcccctgtacgaggcgttcatcaagaactacacgggcaagcagtggcagaccgaccctgccgagctgccggcggccatcatcaagcgcctgccggtgcgcttcaactacgacaaccgctacttcaaggacacgtgggagggtctgcccgcggacggctacaccaagtggatggagcgcatgatcgatgacccgcgcatcacggtttcgctgggcgtggacttcttcgacgagtcccagccgtacaacaaggaggcgctgaaggccgcgggcgtgccggtggtgtacacgggtccggtggaccgttacttcggttacgagcttggcgacctcaagtggcgcacggtggacttcaaggaggtccgctacgacgagggcgaccacttcggatgcccggtgatgaacttctccgacgcggacgtgccctacacccgagccatcgagttcaagaacttcaacccggagcgccacgactcccagaacccggacaagaccgtggtgtgggaggaatacagccgcttcgccgagcgcggcgacgagccgtactacccggtcaacaccgacgcggacaaggcgctgtacgcccagtacgaggccaaggccgcggccgagccgaacaccgtgttcggcggccgcttgggcacctacaagtactatgacatgcaccaggtgatcgacaccgccctgaccgcctacgaggaacaagtcgcgccgctgctgaagaagtagaccgtcgtttcaccagaggattaacgatttagcttgaaaccgactgaatattgctgaggcaatagccggtttcaggcttctgtgttttttgggaagccaaatttcctggggtacttaaagctcgccacgaggagtacagttgtctgtaacgcacaatgtggcgcgtaagacgaggggcgtatctcgcaagtggggtgcgatgcagttgaaggagtgcatgtcatgactgatccgaatgccaatccgaacggccaggtgccggggcagcaagctgacgccaatccgactgagccgttaaatgcgatgacgggggaagcaggaaccgccgccaacaatgctccaacccaagcactcgcagcgggcgaacagcccactcaggcgttcactcctgttgagcagcctacgcaggcgtttacacctgccgagcagtccacccagcctcttgcgccggtcaatcagccggtaccgcctacgcaggctttgccaccagtgactcctgccgctgcgcccgcgcctgcgcccgcaccgacagcgcccgcgcctgcgcccgcaccagcagcgcccaattcgccctatccggggacggctccggcaggcggatcggttcctccggtctacggcagcgtcagtgctcggtatccgggcggcggggccgtgcctccgcaaacgccctataacccgtatatgcaaggcggccaaccgaacggccagccgggatggtctggttcttacggcagtgtgccgcctgaagcgaaccagaagtacaacggcctggctattgccggttttatctgctcgttccttgtctcactccccggtctgatcctgagcatcgtgggcctcaaccagattaagaaacagggcggcaagggcaagggcttggccatcgccggcatcatcatcagtgcggcgggcatggtgatacaggtaatactggtcatcgcgctgatcgtcggcggtgtctcgtacaccagcaaggctatagatgaggcgaaaaccgattccttctatagtcagtcctcttcgggcaacggtgatagcagcgataagagcaaagctcaagataatcttgacgatgcgctggacgacacgttggacgaaacccatgacgatctaaccgacggcgattatgggctgtacgattcgattcaggatttcgtcgactattcggaattcaaggactccattgaatccgaagcggatacgtttgcagataccggcattaccttcaactaccgtgtcgacggtgacaccttggtgtacgagtacgtgctcgacgacagctacgcctcgctaggcgataccgtcgcttcctcactggatgctatggacagcacctatcaatccaccgcgaatctgctgggctcgatgtgcaagacctccagcggcaaggcatcattgcgcgtcatcatgcacacgcaaagcggccagtcgctgtacgacaaaacctggaccgaaaagtagcaatcccagcgaacgtgcgttttggtcgattgaaggccggtctgcttgctccttggacggatgcttctgcggaaggaaccgccaaggagtaggcttacaggcatgagactcgcacgtttttctttgaatgattcgccgcgctacgccttcgtacaaaaggacgaaacggacggcaaggactacctcatcgaacttgacggtcatccgctggccggcgaccaggtcaagcccaccggcaaccggtacccggtcgacggcgacggcatccgcctgctctccccggtcatcccctccaaggtctacggcctggccaagaactacgaggcccacgcccagttcatgcacgaggccggccactccgaaatcgcccatgcgccggaagacatggtgatcttcaccaagccgtccacctcggtgatcggccccgacgatccgatcgtgtacccggcctgctccaaggacatgaacttcgagccggaagtggccgtggtgatgggccgtatcgccaagaacgtgtccgttgaaaacgcgatggattacgtgctcggcttcacctgcgtgaacgacgtgacgttgcgcgacctgcagggcatcgaccccacgtggacgcgcgccaagggcttcgatacctcctgcccgcttggcccgtggattgtgatgcgcgacgacctcgactggagggacgccaagatttccttcacgctgaacggcgaggatgtgccgatggcgtctggcaccaccgcgaacctgattcacggcatccccgagcagattgccgcgatttcgtcgttctccacgctgctgcctggtgacgtcatcatgaccggcacgccgaacgcttccggtcaccttgaccccggcgacgagaccatcgtgcacgtcgaaggcatcggtgatctgcgcaacgtaatcgttcgggcgtgattcgactgacgaacgcatggcccggtcattttcctatttgggggatgtccgggccttcgtgctttgtttcatatatttcatctatatatgcatctgtctaatgtacagatgattttttcgcgaaatctaagtgttgcaccaagctatatgttacacttatttcagttatgaaatgaggtatgtgcattatgactgcagtaatagaacgtgaacagcttacagaacgcgatttggatcaggcgaaggcgtgccgagagctggtgcaaaaaggctctgtactcgctgcaattttggatggcattattgacgataatgtactggtggttcgcaaggacgaagaattatcccctgctcaagctgctgagattcttggcgtgagtcggccctatgtgactcgtttgctgaagtcaggactgctcgaatctcatatggtgggcagtcatcatcggattacggtacttgctttgcggacgtacatggctaatcgtgatgcgggacgtaaggaatacgcccacgcaatcaattctcgggcaaaggatattgccgatgcggttgacgaagtcgctccggtgtctgagacaagtcgaaatcgtatgcgtgatttagttgcagagcatcgccgtgaagcgatcaaagcgagtagtgccgcagtttctcccgcagagtgaggattgtctcaggcgaatcgtagtgaatctattgtctgtgcgatttacccggtatgcgtcaagtcatgactattgctcaggcgtgtaattacgtctcagatactccttgacttccagtatgtcttggcaatcggggcatgcaggaagtcctgagtattcatctctggttggcacgaaccatttcccgcacagagaacggatgagggtgccttcaacatatgcgtcggtcagagtctctttgggtacgcgatgtagcatagattctggctcggtgtcgcctatcgtcttgtataacgattcggaatcatcgaggaagttcgggcttgtgatgcgcttgatgtcgtctggttccagcagcacgaatgctgacatagttgcgcgtctttgctgaccgtcgctgtatgtcttcaacgacgtttctgctggctgattggggtctttgggctggcagatggcgttaaagcatctcaagaggatgcggtgaagtcgggcgtatggagaactgttgtcctgttcctcgaccggaaaatcaagggtcaattcaacgaattgattgacagttgctgagtcgtcatcgtcatcttgctgaatctgaatactggcctttacgggggctcctgaaatctgataggggatatccagcgctgagagggcttcggactgggaagttgtttggcccgcataaattcctgcacgaattttgttaagcatctcctgaacgactcgtcgctcaaaatccagaaaatgctgacgttcttcttctcgtttccgaaccagataatcttcttcgctgggcatatagttgctggcgttggaagccttaatgattgatttgcaattgcctgaatggaaatccccatgcgatccgcaatagaccatccacgggtcgccatattggtcaagaatgacgatgcctcgccagccggtttgcttgttccttatttcatagactgggcgctttgccacagcgctaaattccgaatgcttggtggcagcgattttgtcaccagcgaaagcctgacgagccatattgagtagtgtgacgtcgaatgcggtgaaatcaagaccttcgaacggtgttactgcttccgtccgcatgttctgttcaatgagttgttgagggttctctgagttgaagagattattgtcaatcatgctcaacagaacttgaattgtagggcgaactggtctcatgatgattaaccatagtcggtgatgcagcttagtcagtgattgatatcacatagaagaagtattgctctttttggctcccctcgtgtctgggcccgtaattcccccttacgctcccggcaataccgcgtgcagggcggtcatcaccaccaagctgatgatggccgtcactgtcagcgagaagccggcgagcttggcgttgccggttagcgaatcggtgaacttggttgagaagatcgtgataggggcgaacgagcccaacacgatgatctcgcgaatcctcatgtcgaatggcagtaggaaccaggcggccacggcgataatcgcgccgaataccatgcgccagacaatcaccttgcccaactccaccttgtccttgcgattgttcggaatctccatcatcagtccgatcatggccatcgcgcagaaggcgttcgcattggcgaacggggtgatgagcgtaacgatgggctgtgggatcgtgatgtgcaggaacatgaacaccagcatcagcatgtagatgtcgaaggaaattgagcttaggaagtccctggcaatattgcgcagacgcaggatgagcggtagcgacttgaaattgttatccatatgcagcagcgtgcgtgtgatggtcagtgacccggccgtggccacggtggcgttgccgatatcgagcttgatgatcggcagaccggcggacgggcccatgaacgtctgaaccacaggcaggcagaacgcgcccaggttcaggcccgaggcgttgagcatctggaaggcgcggtagttcttctcgtcgccgcgagaaccgaaatacacgatgaacagcggaatcgcgcaggcgaagaagccgaacaacacgatccacagcatgcgcatgtcgtgcttgttcgtggcgaacgacaggataatcgcacaaggaagcgtcagattgaataccagaccctgcacgattttgtaatcacgctcgccgaaaatgtggacatgtttgagtatgtagacaccgatgataacgagcagcagcgaaccggcctgaaaaatcatgttcttctcttatcccacaagcacccgccgcagcaccggcggcggtcaggcgcataacaaaccagccgtgagtataggagcgttcgcgcggcgctggcgcggggcggtgcatattgtggacagtcccgtaacgttgatatgccatgctggcgagatgaatatatccaataccaagtggagctcagcacgatagagaggtaggaaaacatggcagagcagacggtcaccgtaggcgttggggcattgagcatcgaggacgttatcgccgtagcgcgcggcggtgccaaagtggcgatttcggacgaatcgaagcatgagatggcgctaagtcgcgcggttatcgatcatttggccgacgacaccgtgccgcattacggtatctccaccggattcggcgcgctcgcctccacttccatccccaaggaacagcgcgcgcagctgcagaaaagtctgatccgctcgcatgccgccggtgccggaccggaagtggagcgtgaggtggtgcgcggcctgctggtgctgcgcctgagcaccctgtgcaccggacgcaccggtgtgcgcccggaaaccgcgcaggtctacgccgatatgctgaacgccggcatcaccccggtggtctacgaatacggttcgctcggatgctccggtgatttggcgccgctcgccgcctgcgctttggtggcgatgggcgaaggcgaggcccgcaacgctgacggccgcaagatcggcggcggcgaagcgctgcgtgcggccggcatcacgcccgtcgatttgaaagagaaggaaggcttggcgctggtcaacggcaccgacggcatgctcggcatgttgtgtatggccatcaccgatctgcgcctgctactcaagacggcggacatcgccgccgcgatgagcgtggaaggcatgctcggcaacgaccgcgtgttcgccgccgacttgcaggcgctgcgtccgcatcgcggccaaggcgattccgccgcgaacatcgtccgcatgctcaagggctccggtctgatcgaggccggccgcccgggctccaccgtgcgtgtgcaggacgcctactcgctgcgctgcaccccgcaggtgcacggcgccgcccgcgacaccgtggaatacgcggcctccgtggcgggcgtggaactcgcctccgccatcgacaacccgtgcgtcacgctggacggccgtgtggagtccaacggcaacttccatggcgcgccgctggcctatgtgctcgatttcctggcgattccgactgccgacgtagcctctatctccgagcgtcgtaccgaccgcttccttgacgtggcgcgcaaccgcggcctgccggcgttcctggctggtgacccgggcgtggactccggtttcatgatcgcccagtacaccgccgccggcatcgtctccgaaatgaagcgcaacgccgtgcccgcctcggtcgattcgattccgagctccgccatgcaggaagatcacgtgtcgatgggctgggccgccgcccgcaagctgcgccggtcgattccggcctttgcgcgcgtgctggccgtggaactgctgtgctcctgccgctccttcgacttccgcaagccgtaccgtccgggtgcggcgggtgccgccgtataccgcgtggtgcgccagtacgccaacgaaatcggccccgacgtacgcgatacctggaccaccccgcaaatcgaaggcgtagccaacgccatcctctccggcgaaatcctatccgccgccgaagctgccgtcggcctcctgaaatagatgtgagctccctcatcagagggggctactgttcaccctccccaccaaaatccaaaacttgagtcacctgcactcaagttttgggaatagaatgggttccaggtcggttgaccatatcagacaacgacaagttgcggtctgcggtggcgcttgcggggctttcgaagcccgcgagccgctccgcgcgggccgcatgatatggaggaatacgatatggaacagaagttcaccactatggcccaggaggccgtcggcgacgcgattcagagtgcgtccgccgcaggaaacgcgcaggttgagaccctgcacgtcatggatgcgttgctgcgtcaggaaaacggcgtggtgcgctccctcatcgaggccgcgggcggagacccacaggccatcggcgccgccgtgcgtaacgctttggtcgcactgccgagcgcatccggctccagcacttcgcagccgcaggccagccgccagctgaccgccgccatcgcccaggctgagaaggaaatgcagcagatgggcgacgaatacgtctccaccgagcacctgcttatcggcatcgcggccagcaagccgaaccagtcggccgaaatcctggagaagaacggcgtcaccgcagcctccctgcgcaaggccgtacccggcgtgcgtggcggcgcgaaggtcaccagcccggacgcggaaggctcgtacaaggccctggagaagtactccaccgacctgacggccgccgccaaggaaggcaagctcgatccggtgatcggccgtgatcaggaaatccgccgcgtgattcagatcctctcccgtcgtaccaagaacaacccggtgctgatcggcgagcccggcgtcggcaagaccgccgtcgtggaaggcctggcccagcgtatcgtggcgggcgacgtgcccaccaccctgcaaggcaagaagctcatctcccttgacctaggctccatggtggccggctcgaagtaccgtggcgagttcgaggagcgcctgaagagcgtcctcaacgaaatcaagaacgcggacggccagatcatcaccttcatcgacgagattcacaccatcgtcggcgcgggtgcggccgaaggctcgatggacgccggcaatatgctgaagcctatgctggcccgtggcgagctgcgcctgatcggcgcgaccacgctggacgagtaccgcgagaacatcgaaaaggatccggcattggaacgccgtttccaacaggtgttcgtgggcgagccgagcgtggaagacaccatcgccatcctgcgtggcctgaagcagcgttacgaggcgcaccacaaggtgacaatcggcgatgacgcgctggttgccgccgcgaccctctcgaaccgttatattccgggccgtcagctgccggacaaggccatcgacctggtcgatgaggcggctgcccacctgcgtatggagctcgactcctcgcctgaggagatcgatgaactgcagcgcaaggtgacccgtcttgaaatggaggaaatgcagctcaagaaggctgaggatcctgcatccaaggagcgtctgggcaagctgcaagccgaactcgcggacacccgtgagaagctcagcggcctcaaggcgcgttgggatgcggagcaggccggccacaacaaggtcggtgacctgcgtgccaagctcgatgacctgcgtgtgcaggcggacaagttcacccgtgagggaaatctggctgaggcctcgaagattctgtacggagagattccggctattcagaaggaactcgccgccgcggaaagcgcggatgccgaatctgccgatgccggcgcggccaacccggccgatgagccgatggtcccggaccgtgtggacgccgactcggtggccgagatcgtctccgactggaccggcattcccgttggccgcctgatgcagggcgagaacgagaagctgctgcatatggaggactacctgggcaagcgtgtgatcggccagaaggaagccatcgccgccgtgtccgacgcggtgcgccgttcgcgtgccggcatctccgacccgaaccgtccgaccggatcgttcctgttcctcggtcccaccggtgtgggcaagaccgaactggccaaggcgctcgccgacttcctgttcgacgacgagaaggccatggtccgcatcgacatgtccgaatacatggagaaggcttcagtctcgcgcctgatcggtgcggctccgggctacgtgggctacgagcagggcggccagctgaccgaggccgtgcgccgccgcccgtattccgtggtgctgttcgacgaggtcgagaaggccaatccggagatcttcgacgtgctgctgcaggtgctcgacgatggccgcctgaccgatggccagggcaggaccgtggacttcaagaacacgatcctgatcatgacctccaacctcggctcgcagttcctcgtgaacgaggacatggacgccgacgccaagaagaaggccgtgatggacgccgtccacatgaacttcaagccggagttcctgaaccgtctggacgacatcgtcatgttccacccgctcacgcgtgaggagcttggcggcatcgtggatatccaggtggctggcgtggcccagcgtctgaccgatcgccgcatcacgctggacgtcaccgactcggctcgcgaatggctggccaacaccggttacgacccggcttatggcgctcgtccgctgcgccgcctggtacagaccgaagtgggcgaccagttggcccgtatgctgctggccggcaaggtccacgatggcgacaccgtgctcgtcgaccagaccggtggtgagcatctggacctcaccgcctgggccagcgaccagatcgtctccgacgacccggatgtgagcgtggacaacgtcaccgaagataagtgacaatcactggctcccctctctgaggggagctgtcagcgaagctgactgaggggagttcgggcggtttcgcaacagtgatttttctctgcaaaatctcttaaacaggtgggtatggtagcagtcatacccactttttcgtctttgtgggtctatctcgatttcgaggggctgatttgccccctttcggaggtctacttccgtttcgaggggctgctcttctgccgaaccgcgagtatcagcggctttatggcaacgccattccgccattgttgcgccgtgtctacttggctaccagccccttgaaatggaagtagacctcctgcaacatcgaaatcagccccttgaaacggaagtatctgtccgatccgtctcaattgtgttccccaagagtggaagaaccgtggcatcaaggtgttcactgtcgcatatggtaggaaagtgagtgttaacggacgaagggagagccagtgaccggacgattggcgccgacgccgtcggggcgcatgcatatcggcaacgtgtacgccatgttgggtgcatggctttcggcccgttcgcgtggcgaccgcatgctgatgcgtatcgaagacgtggacaagccgcgcgtggttgccggtgcggaccagctcatgatggacgacctgcattggctcggcctcgactgggatggcgaaccgatgttccaatcccagcacactgaacgatatgaatacgctctcgaatgcctgcgctcgcaaggtgtgctgtacccctgtttctgctcgcgtgccgacattcgcgccgcctcggcccccaacgagggcgacggcttcatggtgtaccccggcacgtgccgccgcctgctgcacgaccatcccgacgaggtccgtgcccgtctgtctcgcggcgaccagcattccatccgtatcgccatgccgaaaccggcagcgggagaaaagcaacgtacagtgcctgacgattccgctgcgctgtcgggagccgtgccgccggaacagcagggcgatgccggaatcgttgatggtgtcgcatgctttaacgaccgtgtctatagtccacagcactacgatttggcccgcgaggtaggcgattccgtgattcgccgagccgatggactgttcggctatcaactggtcgtggtcgtggatgacctcgatatggatgttgatgatatcgtgcgcggccgtgatctgctgcgctccaccgcgctgcaaatgtggattcgccagtgtctgttagctggcggctttgagccggaatgcggcaacacggaaaagcctctcgccgagcaccccgagtatgcgcacctgccgctcatcgacaatgcggccggtcggcgtttagccaagcgcgaacgttcgctggatatgggagccttgcgcgcccgcaacgtaacccccgagcaaatcatcggatactgcgcctggttgctgcgtctgcaacccactccaatcccttgcaaacccgccgatctgctggcagatttcagctgggagccgctgcgtgccaaccacctggaccgcgcgctgaagccggacgatccaaccactccacaatggctggcagaagcgttaggctagaggcagcccaacaggaaggattccaatgtcgtcgaagctctggagaaacgtggcgctggcaggcgtggccgccgccggtgctaccgtgtgggccgtggccccgcgcacgttcaatgacaagcgtcgtaatttcgtgccctccattccgaaggtatggtatgcccatcgtggcttgcacgatgcgggttctggtttggtcggctataccgatatcgctgattatggtggggataattcggtcagcgcccaagccgataccactgagcgatccatcgccgaaaacgatgattatgtgtcgcttgcccgtcgcatggctgtcaaggccggctacggcagtgcggatatgaccggtccgatcgctcctgaaaactcgctggccgcattcgccgccgcctgcgaggctggctatggcatcgaactcgacgtgcagcttacgctcgacggtcaagtggtcgtggtccatgacgccgatttgctgcgcgtggccggcgatccgcgccgcatcgaagatctgacgtacgacgaactgacccgtattccgctgttcccgaacggcaagtccggtgacttgaaggccgaaccgctgcccggtgccgacgcgaatccgccgctggtggtcacgccttccaccgcccccgctggctactaccagcatgtgccgctgttctccgacgtgctcaaagtggtggctggccgtgcgccgctgattgtggaatacaagttcagcgacaatagcgcttgggatgctcgtaccgaggagctgatggagaagggccacgccctgcttgaggattatgacggtccatacgtcatcgaatccttccacccgggcgccgtgaactggtacaaagaacatcatcctgaggtgtgccgcggtcagctgagctggccagccaaactggccaaggatggtccgttggaatggggtgccggtctgctggcattcgattggctgtcccgccctgatttcgtggcttatgactgggccggtggtgctacgcctcaggtccgtctggctcgttcgatgggcgccacgactgtctcctggaccgtgcgcagcagcgacgagctcgctcagtgcgaccagtacttcgaccgccatattttcgaggcgttcgttcctgacgcgcagtgacctattggcgattttattagcgagcggccggctgtattcatgcagtcggccgctcgctgtcgtgtggttttttccctgcgatgcggctcaaaatccgcacggtgtggttttcgacaaggtgtcaagaaccataaaaccgcagaataacgccattttggcaaaccacaccgtgcgcgagtttccataccgtgcgtgagttgccacacggtgcgcgagttgccacacggtggaaggttggccaaccctgtgcacggggttgtggggaataatcacttgtgatacggctcgccggcgttgattttgtacgcgcggtagatctgctcgagcaggattacgcgcataagctggtgcgggaacgtcattttggagaagctaagtttgaagttggctcggcgcagaatcgcatcatccagtccgatggatccgccaatgaccaactggatatgactgacgccgtgcaatccccagtcttcgatcttcgctgcaagttcctcgctggagagctgcttgccgtcgatggccagggcgatgaggaacgcgtcgtcgcgcagatgtttggcgatgcgctcgccttccttggctttgatctgccgctctacgccctcggacgcgtgctccggcgtcttttcgtctgcgacttcgatgatgttgagtttgcaataacgcgaaagtcgcttggaatattcgtcgatggcgtcgcgaagataccgttccttcacacgcccgggcgcaataatgtcgatttgcatagtcgtttatccggaaacgtacgctgccaagtcgctaccgtacgtttcgtgcgggattatctgccttcgtctcagcaaacgtacgctgaagggccgtcagcgtacgtttgctgagaaaggggaggaaaaactctccggaaacgtacgctcacagagattcagcgtacgtttccggagaaggggggtacgctccatcagtcgatgatgccgtagaggcgatcgccggcgtcgcccagccccggcacgatgatcggacacggttcggcgagcttcttgccggtcatcggcgcgagcggggtctcgatcggcgcggccacgacgctcaggtcgcgggtggcttcataggcttcaagcatcataagctcggagacgagctcgcggaaaatggaagagggggtgttcttgtcgcgcagcacggtgagcttgtgctcaaccagcgggtgattcagtacatgcaattccatagctcccagcctacccgcagctttgccggaaaacaccttggccacaggcagtagtcgctgaaccatgactacattgttggctcgtgctgttcaattagcggccatatgacattcatggttcttaaccattgcggccatgtcgcattcctaacgttggtcaccgaaagcgttcccatcagcgctcatgcatttgggtgccggcgttttcgtcgatcgatgccaagaggaagggcatcaatacagaccgatattgatgaggagggacaatgtccgtattcactcagtgcgagcgtgcgcttgccgggatcgccgccgttgccaccatcgccgccagcttcgcggctgtggtgccggccgccatggccgacgaccagccgacctacccgtctgacatcgctaaggccgatccgcaggtactgctcaaggagttcaacaactactggactccggtggccaacccgaacaatgacgagaccactgcatcccacggcagcgtcactgatgccggcgttgcagtgcttggcaagagcgatgacctgaccgtggctatcaacaacaaggctgacgccgataacaccaatggtgtgaaggtggacgaccactacacccagcagcagcgtgccgtcattgatggtgcccagaacaatcgcgaaacctactgggatgccttcggtccgattatcggcgaatggttctatgaaggctacgaagcagatgccaatggcaatgtgccgctggccaagaccagcaagctgctcaacgacatggtcggctacatcccggtgactggcgccaagcatggtttcaattacccgcgtccgtcgcttaacaccgctgaaggcgactctatcgaccgcagcgccaacggtgaaaacgacctgaagggactggctcctgcgctcgctctgaagcgcgtggccggcttccacgatgatttccgcaatgtcgaccgtgccaatggctatggcggtctggtgcagtccgagtccttcccgtccggccacacgatggcgttctacacgtccggcctgaccctggctgccctgatgcctgagctcgccccgcagattgcagcccgtgccgccgagggtggcaacaaccgcatcgtgcttggtgtgcactacccgatggacatcatgggcggccgtatcgtcggtgaggcttccgccgccggccgtctgaacgacgacgtcttcttcgagcaggtcgtcaagcccgcccagcaggaactgcgcgactacctgaccaagcgcggccaagaagccggatacggcaacacccttgacgagattatcgccaacacgaaggccaccaccaccaacggctacaagaacctcaacaccgatcaggtcgccactgagcccgtcaccgatgtcaagtccgccgtggacgtgtacaccgagcgcctcacctacggcttcgacccggtcggccccaccgatcaggctgcccgcgtgcctgctggcgccgaggccctgctgcgtaccgtgttcccgaccctgagcgccgaccagcgccgcgaagtgctggcccgcactgaaatccagtccggctacccgctcgactctacttccgacggctggcagcgcctgaacctcgccgccgccttcagctctaaggtcacccttgacgccaacggcaacgtggtgagcgtcgagcccggtcagaaggctgaagtcgtcaagcaggaggccccgaacaacaacggtggcaacaacaacggcaacgaaaacaacaacggttccaacaatggttccaacaccggcaacgaccagaacaacgccggctccaacaaccagaaccagaacaacggcaacaagaagccgagcacgtccaagaacgcgtccaaggccaacggcaagctggccaactctggcgctgacgtgagcgtcttcgccggcatcaccgtgctgttcctcgccgcaggtgccgccctcgccaccgcccgcaaaatgctccgccactaagaatgattgctgactcatgtcagcactaattcccatctcagtgttggcttccctctccgaggaggagccaacactgcgtttgggctaaggcgtctgcgtagcttcccgctggagattccagaaccatgatatgacccatattgctccctctctgaggggagctgccgaacgaggtgaggctgaggggagcaatgccaagtgggaggtgtctcgccaagcaatcatccggcgagacacctcccacttcgttacctatacgttcgatacgctacgctcccgcgctcccgaacatcacatcgcaaacggctcgtaatacatctcgtccgctgccacgccgtgcttcaacagaatcgcgcgtaaggcgttcgccatcgatctgggcgcgtcggacgtcgaaatggtgtcggagaccggttccggcatggacgacaaacgccgcaagttgaaccgcaccctcgccgacccgaccgtgggcacgatcgtcgtggagcatcgcgaccgcctggcccgcatgaacgcgggactggtcgaatccgcgttgacggcgcaggggcggcggctcatcgtcgtggacgattccgagctggacgacgatctcgtgcgggacatgaccgaggtgctggcctcgttctgcgcccgcctgtacggtcggcgcgcggcgaggaacaaggcgaaggccgcgttgaaggcggcgcatgatgcttgaggccgtcaaggtggcgttggatccgacgcccgtgcaggaacgcctgatgctgtcgcacgcgggggcggccaggttcgcttacaatgcggggctcgcccacgtcaaggagaccatcgaaaccggcgggaagctggaatggacattgtatgcgctgcgccgctggtggaacgcgaacaagggcacgctggccgtggatgcggacgggacgccgtggtggcgggagaacagcaaggaagcctacaacagtggtctggaggcattgtccgacgccctgtcgaactggtcgaaaagctgcaagggcgaacggaagggccgcagggtcgggttcccgagattcaaggcgaaggatcgggagacgccgcggttcgcgtacacgaccggcagcttcggcctcgtcagggccgatccgaaggcgctcagactgccgcgcatcggccgcgtgcactgcatggagaacgtcgcaggacgcgtggacggggccagggcgctgcgcatgacggtgtcgtgccgtgcgggacgctggcacgccgcgttgaccgtcgaacgcgccgacccaacggcgagacgaacgccgagggaaggggcggtcggcatcgatctgggcgtgaaatccttggcgacgctctcggacggcaccacgatcgccaacccgcacacgctcaaggccaatgaacgccgtcttaagcgggcgcaacgctcgctgagccgcagacagcccggctcgcatcggcgcgcccacgcgcgggaacgagtcgtccgactgcacgcgcgtgtcgccaatcagcgccgcgacatgttggacaagctgaccacatggctcgccgacacgtactcggacatcagcatcgaggatctgaacgtggcgggcatggtcaaaaaccacaggctcgcccaatcgattcaggacgccgcattcgcggagttccgacgccaactgacctacaagaccgcacgcaccggcgctggactccacatcatcggccgctggtatccaagctcgaagacctgctcgaactgcgggacggtgaaaaccaaactgtccctgtccgagcgcgtctaccattgcgaggagtgcggactgtccatcgaccgtgatttgaacgcggccgtcaacatccaggtcgccgggagtgccccggagaccctaaacgcgcatggaggggacggaagacggaacgacgcatcacgtcgtgcaacgcagaccccggtgaagtgcgaaccaagcagccacgcaagcggcgtgagacttggagcggacgatcgcaagaccgtcctacaaaccaaaacaaactagtttgcaacggtactaccagcatgtgccgctgttctccgatgtgctggacgtggtggccggccaggctccgctgattgtggaatacaagttcagcgacaacaaggcttgggatgagcgtagcgaagagctcatggaaaagggccacgccttgcttgaggcgtatgacggcccgtacgtgatcgaatccttccatccgggcgcggtgaattggtacaaggagcatcaccctgaggtgtgccgcggtcagctgagctggccggcgaagctgagcaagaatggtgcggctgaatgggccgccggcttactggcgttcgactggctgtctcgtcctgatttcgtggcctatgactggaccggtggcgcttcgccgcaagtcaggctcgctcgttcgatgggtgcgatgccggtttcatggaccgtgcgcagcagcgatgaactcgcccagtgcgcgccctacttcgaccgccacatcttcgaagcgttcgtccccgacgcagtgtgaggttgagggcgttattgatgtgcccatggggcggttacaggctcatcgggcggtaacttgcccatggggcggtttgaagaatatgtgaaaccgcggaattaagccattttggcataccgccccatgagggttttaccgccccatggggcaattaccgccccatgggggatttcccgccccatgaggtatggcgttttacttgtgatatggctcgccagcgttgatcttataagcgcgatagatctgctccagcagaatcacgcgcatgagctgatgcgggaacgtcatcttcgagaaactcagcagaaaatcagcacgacgcagaatcgcgtcgtcaaggccgattgagccgccgatgaccagctgaatatggctggtgccacgcaatccaaggtcgttgattttggcggccaattcttcgctggacagctgcttgccattgatggcaagggcaataacaaacgcgccgtccttcagatgcttggcgatgcgttcgccttctttggccttgatctgtcggtcaacgccttcggaggcgtggtcaggcgttttctcatctgccacttcaatgatgttgagcctgcagtagcgcgaaagtcgcttggaatactcgtcgatggcgtcgcgaagatatcgttccttcacgcgtcccggcgcaataatgtcgatttgcataaaaagcccatcacattggctcccctctctgaggggagccaggaaaatcagtcaattacgccatagagacggtcgccggcatcgcccaaccccggcacgatgtagcacttgtcgttgagcttctcgtcgaccgcgcacactacgaccttgaagtcgatggacggatcgatgtgctcttccacgaacttgatgccttcaggcgccgcgatgatgttgatcgcggtcacgtccttggcaccgcgctcggccagatagtgcgtggcagcaaccagcgtgccaccggtggcgagcatcgggtcgatcaggaagcactgacgaccggacaggtcctccggtagacggttcgcataggtgacctgctgagtggggtgttcctcgtcgcgcttcataccaaggaagccgacttcggcggtcggcataagacgggtcatgccatcgagcatacccagacctgcacgcagcaccggcacaatgatcggacgcggtttggccagcttcttaccggtcatcggagcgaccggtgtttcgattggtgcggcaactacggacaggttgcgggtggcctcataggcctcgagcatcacaagctccgagacgagctcgcggaaagtggaggaaggagtgttcttgtcgcgcagcacggtgagcttgtgctcgaccagcggatgattcaaaacgtgaagttccatactccccagcctacccgtagttcgcggggaagtcacttgggcggcagtcgcgcgcgtatcgcacaccaatgtaaacagcgttcgacggcgggccgcgtaacaccgttgattttgtaacgtgagcgttatgtatgagacgcatatgaaatattcaggcaacggaaattcacgcaggcactgccatcgtatagtgcagtcggccggaagccagccgtcgatatacggcaagtggttcagcacgatatcaggcatcagggcacggtacggcaatcagcgtagacattccgcgggcgggcaacgttcgcggaatgtagtcgtatgtggggaggaagagtcatatgactcgattgcaaagactgaagatgggtgctgcggtgtgcattgttgccgcagtgcttgccaccagcggttgtggctggggtcgcaccgtggccgagaaagaggcccaagagaacaacgcgactgcggcaagcgacacctcatcatgtgtggacacctcaggcaacaccatcaaaatcggtttcgtgaattcgctgtctggcacgatggccatttccgaacagacggtgagtgattcgctgcacatggccgttgatgagattaacgcaaagggcggcgtgctgggcaagcagctcaaggtagtgcagcaggacggcaagtccgagccggctgtgttcgccgaaaaagccaagaccctcatcgaaaaggaatgcgtggccgcggtgttcggcggctggacgtcctcttcgcgtaaggccatgctgcctgtgttcgaggcggataacgcgctgctgttctacccgctgcaatacgagggcatggaagccagcccgaacatcttctactcgggtgctgcaccgaaccagcagattgtgcctgcgcttgattaccttaaggagcaaggctacaagaagctgttcttggttggctccgattatgtgttcccgcagaccgcaaatcgcgtggtcaaggcgtacgccgagggcaatggcatggaagtggtcggcgaggaatataccccaatgggctccaccgacttcaccaccatcgtcaacaagctcaagttctccggcgcggatgcggtggtgaacacgctgaacggtgattccaacgtcgcattcttcaaggaatacaaggcttccggcctgaaagccgccaccacgccggtgatttccatgtctatcgccgaggaagaggtttccgctatcggcgttgacaacgtcaaggaccagctcactgcttggaactactaccagacgctgaacaatgcgcaaaacaagacgttcgtgaagaacttcaaggcgcgctacggagccaatcgccccacctccgacccgatggaatcggcgtacacatctgtgtacctgtggaagggcatggtcgagaaggccaagtcgttcgatgtggacaaggtcaaggctgcagcagacggtgtcaccttcaatgcaccggaaggcaaggtcaaggtggacggcgaaaaccaccacatctacaagacctcatacatcggcaagatcggctcagacaagctcatccacaccgtctggaagtcggacggtcccatcaagccggacccgtacctgaagacctacagctgggccaagagcctgagcgccagcgtcgagagcaactgagagaagaggacacaacaacatgggtatgttatttccacaaattgtggcaggtctgtccaacggatcgattctgctgctcgcagccctcgggttgtcgttgaccttcggccagatgggcgttatcaacaacgcccacggcgaattcatgatggccggcgcatacaccgcatacgtcatgagcatggtcatcggcaataaaacagtgtccctggccgtggcgctggtggtcggtttcgtagtagccggtttgcttggtttactgctggacgtgttgctgctggagcgtatgcgcaatcgtccgcttgatacgctgctggttaccttcggtgtatcgctggtattgcagcagctcgcacgcgatattttcggtgccactccggtctacgcttcggctcctgaagcgctgaccaatccggtgaccatctttggctacagcttctctgcaggccgactgttcatctttattctgtcgattatctgcgtggctgcgctgtacgcgatcctgaagctcacgccgctgggtcgccagattcgcgccacttccgagaaccgcgacctcgctgaggtttccggtatctccaccaagatggtcgaccatgtgacgttcttcctgggctccggcatcgccggtatcgctggcgtggcgctgagcctgctgaactcgattagcttcaacttcggtacgaccttcatcgtgcaggccttcctggttgttgtggccggcggcgttggccagctcaagggcgcggttatcgcctcgttcgtgctgggcttgtgccagtcgtccatcgaactgccgacctctgcctcgattggtcaggttgccgtgttcctgattgtggtggtgttcctgcagttcaggccgcagggcttggtctccatccgctccaggaacctcgcgtgagtgcttcagaagggtaaggaaacgacaatgaagatgactttgagcgaatacgccacgaaatataaggctttgatcggtgtggtcattgccgtggcgctgatcttcctttctccgactgtgctgagcgtgtacaacctcggcctgctgtccaaatacctgtgctacgcgatggtcgcggtcggcatcggcctggcttggggccaaggcggtatgctgacgctgggccaaggcctgttctttggtctcggcgcgtacgtgatggctatccacatgaagcttgaggacattggcgtgggccaagtgccggacttcatgtcccagtacggcatcaccaaggttcctggattctgggaactcttccgcaatccggtcatcgccgtgattggcgtggctgcggtaccgggcattatcgccgcaatcctcggtctggctgtgttcggccgtggcgtgcgtggcgcctacttcgcaattctttcgcaggcgctggttgccgcgttcgccgtgctgcttatcggccagtcgaaaaccaccggtggcaccaacggtctcaacgatttcaagggattctttggttacgacttgactgataacgccaacaagcagatgatcttctacatctgcgcgttcctgacgctggccatggtgcttatcgtctactggattcgcaaatcgtttatgggcgacctgattatcggcgtgcgcgaccaagagaaccgcatgaagttcttgggctataaccccgcctccatcaaggtgttcgccttctcggtggctgcaatgttcgccggcattggtggcgcaatgttcgtgccagtggtcggcatcatttcgccgtccgatatcggcgtgacgccgtccatcctgatgctcgccggcgtggtgatcggcggacgtgccactttgctcggcccggtggtcggcacgctgctggtgcgctttgcggaaacgcagctgtctgaggcgtatccgtccgcgtggacgtacatcgaaggcctgatcttcattctggtgattgcctttgtgccgaagggcttgggacagttcaagggcgtatggccttggattaaggagaagatcgggctcggaaagagttcggttggagcttcggctggtgctggtgctggtgctggtgccgttgccggtaccggtactgctactgcaaaggcggtgaacgcatgagtgaggagaagaacatgagctcgaatccatcggctcccgcacctgcatcgcaggccgatttggagcagttgcgcgccgaaatgattgagatgcgcgacgaagccaagcgtatgcgcgacgaagcggcccagatgaaggccgaaatcgttgaagagcgtacgaagctgcacgatcagcttgcggtgctggatgatcgcggcggccagtggagcgattatctggaagttcgtggactgcacgttgagttcgatggattcgtggccgtcaagaatcttgatttgactgtgcagcacggcgatttgcgattcctgatcggcccgaacggtgctggtaaaacgaccatcatcgacgcgattaccggactggtgccggccactggttccgcggaattccgtggcgagcagctgttgggccgcaagccgaacgacatcgtcaagctgggcgtcgggcgtaccttccagaccgcatcggtggtcgaagagctgtccgtgttggagaatctgcagctggccgagggcttccgcaagaagggtcgtgagctgttccagccgatgggcggcgtttcgcagaacatcgaatacatgatggacgtgtgcaatctgactgtggatgcaaacaagcccgcaggcatcctgccgcacggcaagaaacagtggctggaaatcggtatgctgctcgtgcaggacgcgcacctgctgctgctcgacgagccggtggccggcatgactccggccgagcgtgtgcagaccggtgagctgctcaagcgatgcagcaagaaccgcacggtcatcatcgtggaacacgacatggatttcatgcgtcagttcgccgattcggtcacggtgctcaaccagggcgaaatccttgccgagggttcggtcgaagacatccaaaacaacgaagaagtagtccgcatctacctgggcggcggagaaaactaactccctgtctcccctccctgaggccgaggcgttaagcaaacagcccagtgggctgtttgtagccgaaggcgagacgatagtcgaaccagcaggttgcaggcaaggcccgtccttaattgcggacgagctgtcaccgaaggtgactgaggggagtaggtaagaggaagaagcgcaatatggaccgcactgacaacaaccatcgcatcccggaatgcgctttttcagtgcatattgagggtgatacaacgcgcctcaacatcaatatgcacgacgccgtagaaagtgaataatcatggcaatgcttgaagtaaaggatttgaacaccggttacggcaaagtgaccgtcgtcaacgacatcagtttcgacgtggccgccggcgaatgggtgagcatcgtcggcaacaacggtgccggtaagaccacgctgttgaaggcgattctgggcttgctgcccgtttcgtccggttcgattagtttcgagggcaaggacattaccaaggctgcaccgaaccaacgcatccgcaagggcatggcgttcgtgccgcagggccagcagtccttcggcaccatgaccgtggacgaaaacctgcacgtggtcgccgaccgctacggttcagaggccaaggcccgttacgacgaagccgtggaaatgttcccggtcttgaaggaatttgctggccgacgtgccggtctgctgtccggtggccagcgtcagcagctttcgattgcccgcgcgctgatcacccgccccaagctcatgattctcgatgagccgaccgaaggcatccagcccaatatcgtcgccgaaatccagaaggccattcgcatgatggccgaagacaagggtatcggtgtggtcttggttgagcagaaggtccaattcgccgtcgagcgcgccgaccgctactacgtcctggcctccggccgtttcatcgccaccggcgaaggcggccccgaccaagtagaagccgccaaggaatccatgagagtgtgattaattcgacccccgtttatggccatagagcgttatgagaaacgtcccgttcttataacgctcttattattgggcgatgttagggctcacattggtgtgcctgaaaaactccagtcaacaacagaggatgttatgagacttacaccacgagagactgacaagttgatgctgtacttggcggggcagcttgccaaagaccgcaaagccagaggcgtgaagctcaactatgtggaggcgattgcgttgatttccgccgaatgcgttgagcgggcgcgtgagggaagcactgtggcggagctcatggcatacggtcgcacgctgctcaagcctgaagatgtgatggatggcgtggccgagatgctggaagtggtggaggtcgaggccacgttcccggacggcaccaagctcgtctctattcataaccccatcgaatccaccgagaagttggtgccgggggaatatctgctggctgacgatgatttggaactcaatgaaggttccgaagacatcgagctggacgtggtgaacactgcggatcgaccgattcagattggttcgcacttccacttctttgaagttaataagtacctgaagttcgaccgtaaggcggcgtatggcaagcggttggatatcgcggctggtacggctgtgaggttcgagccgggtgaaacgcatcgagtgcggttgattgatattggtggcacgcgtgagattcacggcttcagcgcactggttgaggggaagttggatgaccctgaggtgcgggaggccgcgtttaagaaggcgcatgagcttggattctcgggaatctgagctaagggccaccctcagtcagcttcgctgacagctcccgccagcggggagcggactacctctcagtctcgcttcgcgagccagctcccctgacaaggggagctgaaaaacagcaaggacttttgacatgaagattattacgcgcaaggattatgcgggaatgttcgggccgaccacgggagaccgcgtgcgactcggtgacacgaacctcatcatcgaggtggaaaaggactacacgcactacggtgatgaactgaagttcggtggaggcaaatcattccgcgacggcatgggccaaagctccgtgcagctcgacgttgaatcgccggataccatcatcaccaacgccctcatcgtggactacaccggcatctacaaggcggacatcggcatcaaagacggcaaaatcagcgccatcggcaaggccggcagcccgcagaccatgagcggtatcacccccggtctcgaagcgggctccggcactgaagctctcgccggcgaaggcctcatcgtcaccgcaggcggactcgacacccacatccacttcatctccccgcagcagattcgcactgccctcgccggtggcgtgaccacgatggtcggcggcggcaccggtccggccgacggcaccaacgccaccacctgcaacccgggagccttccacctgacccgcatgatcgaggccgccgaagcgctgcccatcaacatcgcctaccttggcaagggcaacgactccagccccgaaccgttgcgtgagcagattcgcgccggtgccgcaggcctgaagatccacgaggactggggtgccaccccggccgtcatcgacactgcactcggcgtggccgacgaaaccgacacgcaggtggctatccacaccgatactctgaacgaaggcggttgtgtggaagacaccatcgccgcgttcaagggccgcaccatccacacctaccacaccgaaggcgctggaggcggccacgctccggacatcattcgtgccgctggcttcccaaacgtgctgccgagttccacgaacccgaccatgccgttcacgcgcaacaccatcgacgagcatctcgacatgatgatggtctgccaccacctcgaccgcaatgtgcccgaagacatctctttcgccgactcgcgcatccgccccgagaccatcggtgccgaagacgtgctacacgacatgggcatcatctccatgatgagctccgactcgcaggccatgggccgcgtgggcgaggtcatcacccgcaccatccagaccgccgacaaaatgaagaagcagcgcggtccgctccccgaagacgaacacgacaacaaccgcaacgacaacttccgtgtcaagcgctacgtctccaagttcaccatcaacccggccatcacccacggcatttccgaatacgtgggctccatcgaagtcggtaagatggcggatctcgtgctttggcagccgtccatgttcggcgcgaagccggaaatggtcatcaagggtggctccatcgcctactctcgtatgggtgacgcgaatgcttctatcccgaccccggaacctgtctactaccgcgatatgttcggcgcgctcggccgtgcgcttggcaagtcctgcgccacgtttgtttcgcaggccgccgtggatgacgatatcaagggcaagctggagctgcagcgccaggtgttaccagtgcatggctgccgcacggtaggcaagaaggatctgaagttcaacgacgtgctcgccgacattcaggtcaatcccgaaaccttccaagtgacggtggacggcgaaccggtccactctgacccggcgtacgagttgccgcttacccagcggtacttcctgttctgagagaactggtggctctcctcaaaggggagagccacttggttttagccttcggccacgaaatcggtcacgaaatcggccacatctcgaatgaggtcgaaggcgtcgtcgcctcgggtggtcagtacacgcaagcagatgccattgattacgcggctcacgccgagctcgccggtgaagccgatggcgtctgcgtgttcatggatgcgagtgatgagcgcgtcttcggcggcgatgcgggcagtctcgatgcgctcgcggatggcggcggaggatgcttctctagttgcggcatcttgtacagcgtcgctagggtcgagttcgggcaggtgagcgtagagaacgccgcagtgggtgaattcgcgccacatgccgagttcggtgtagtcaaaagcatcaggttccaacagcatgcggtcagcaaaggccagatgttcgcgcggttgggcagcggcggcttccgccttggaaggccggcctcggcgatgtgcgtgctgttgcgccaattcggctgcggcggccttggtcacggcttcgggttcggccacatatacgcgcatacgattcgtaaaacgtttcatggcccaacgctcatccatcccaacgcggccacatgtcgccacatccgcatacacgaatgctgactcggcggaaatatgcgcggtggtcaggttcatgaatgagctgttcttgaacggaatcactgggaacggcaggaacacggctttggcattgccacgcgccctgagttcgatggtgcgttcggccgagccgtccgcggtgtcgaacaccttctcgtagctttgcgttttgatggtcgaatcggtgcctgggccgaagtcgatatcgatatgggcttcatcgcccctcaggaagccaggggaggcgagcatcacgacgaaatccgaatgacgtccgttggtgaacggggtcatcagtttgaacggcgcctcgaaataaatatcgtcgattttggtacgtccgtggcggaatgcagtggatagacgaaaagtgctactgcccatggacgaatcgctgccttcttatgattggtgcctgacgatgacatgggcaattatgccgcacttggtgcaacggtatgtttcggcccgtccgtttttggatacgggcgggccaaaacatcacatgtcctcgaacagcacgctcttcttgatccatgcgatgacgtcgtccactccggcaccgcccatcaggtcggtgaagatgaacgggcggtcgccgcgcatcttcttggagtcgcgggccatcacgtctagatcggcgtgaaccaacggggccaggtcggccttgttgatcaccagcaggtcggagcgggtgacgccggggccgcccttgcgtgggatcttgtcgccctcatcggtggcgatgacgtagattgtggcgtcggccaggtccgggctgaacgtggcggacagattgtcgccgccggactccacgaacatgatctgcacgtccgggtgggtgcgggccatttcctcacaggcctcgaggttcatcgagcagtcctcgcggatggcggtgtgggggcagccaccggtctccacgccgacgatacggtccggcgcgaggcgtgagtgctcgataaggaactcggcgtcttccttggtgtagatatcgttggtgaccacgcagatgctgtattcgtcagccatcttgcgggtcaggcgttcgataagcgcggttttgccggaaccgaccggtccggcgacgccgatgcgtacgtatgacatggggtttctcctttatgtgggaattggttaggtatgtggtttgcgggtgaggttatcctggctcccctccttgaggggagccaggataattagctcatgtagagcctcgagtacaagatttcatgctgcatggcggcgatgtcgaggtaagctccggagatgccgagatcctcgggcttcaacgtcatcgcgatattcaccgcgcgcacgaggcgcgggaacgaatcatgcagggcgacttggccagcgtactggctgagcggaatcgccttcgcggcgcacatggtaagcgcgctcaacagcgaatatccatacatgatggccgcgtcgcgcacgtcgttcgcatggtcagccgcgtacaggcccatcgcgatcgaatgcaggccacggcagcggcgctcgcgaatcagcccggcatacaggtcgagcgacggcgagccgtacaggccgtcggcggcatcgtgcagctggtggcgttcggtgtgatgctcgtgcacggcgatgatgctgttttcgcgcgaatccgcagcggatgcggtggcattgtcggcaggacttggcttggcgaacccacgatgcccatccgaggtctgcgcctggccggcatccatctgctcggccagcttgaccaggcgggtacacatgcgctcgctgccttcacggatttcacgtgcggattgcagggccgaggccagctcgtcaagttcgatgagtcgctcggccagccctttgcgggagactcgcgaatcggtggcgtacttgccggccagcaccatctgcccgatttccttgtacggtgcgacttcgaggtagttcttcatatactcctcgaaatcggcgccacggcgcaagaagtcgcgctgtacgaaggtctccatgccgttggacagcgcgaacgcgcccacggggaagacgctgtcgcacacctgcagcatggccagacgtcgcgattcggtttcgttgatgttcatggggctatcagtgggtgtgccaggtgcggccgccgtcgtggctgtgggagccgtccgggcggtgcagcacgccgttcatctcatattcgccgggctcaccctcacctgcgtcgtgtgtatgcacatccagatggccggcggcctcctcggccgggaattccttgtcggcctcggcttcctgctcctcctcggccacgtcgcccgtggtcttgttggtgcccggaatcagtgtgccggtgccggcgtgggccttgacgatcaggaagccgtcaaacccaccctcgatgatatgcggttcataaccgatcttcttcgtgtattccatggtcggatggtcgtacggcaccagcacgcggtcgttctcgaccttgagactcaggtggcggttgcccagttcgaagcacaggcgtcccatttccgtcatcgagttaaccggaatctcaatcagctgtgcggttttaatgcgtgcgaaatagcgcttgtcttcggtttcggcgagcacatcgccatccttgatggtcttgccaaccatgatgccgaactcggtgccgtcctcggccaccttgcgcatgcgcttcttatcggtttcgaaccagtcgaaggcaatcgacacattaagtttgccgtcgctgtactgctgactgatgatgttgccggtgatttctttggcgatcatccgttctccttggagaaaattgcttgtggcgtgagaatccccacgtccttcatgccacagtgtagagagcctgttgcgtcactttgtaacgaatgatcgaaatatgcaaaaaatatagcggaaaaatatccgaaaacacggaaaccggatatatggtacacggtgtgtcgctagtaattgcaagctattttgcatggttgtgcattagacgaatcacagttgtgatattacatatcacgttcctggagcgggaggttgtggtcgagctccgaaatcaacaaaaagagggaagttggatataatcgaagtacctgacaccgtcacattggcgatgcacattccggataatttcatttcgccgtccaccggggcgttgttctacgtcatcatgattccggtgtgggtgctgtgcctacgccacgtgatccgcaacagcacgccggagaagatggcctacctgggcgccggcgcggcgttctcgttcctcatcatgatgttcaacgtgcccacgcccggcggcaccaccgcgcacggtgtcggcggcgcgctgatcgctctgctgctcggtccccagtacgcgacggtctccgtgtcggtggccctgctgctgcaggcgctgctcttcggcgacggcggcctgatcacgctcggcgccaactgcttcaacatggcgttcgtgctgccgtttgtggcttacggactgtacgtgttgctacgcaaggtgctgcccgacggctggaaggaacgcgtggccgaattcgtgtccggctatatcggcatcacgctcgccgcattctgcgtggcgctggaactcggcgtgcagccgctgctgttcaaagccgctgacggccaggcgctctacttcccgttcacctttaacgtgacgattcccgccatgctgatcccgcacctggccgtagccagcgtggtcgagggtctggtgaccgtggtggttgtcgaattcgtgcgccgtaccgcaccggagattatcgaagacaatgcccgtgtgaacttcgccgagaccgccggtgctgacggcaaacaggtcgcgcacgccggactgcgcaagtctgcgtggattgcgctggccgtggtggcggtgctttccccgatcggcctgctcgccaccggcgacgcctggggcgagtggggcgccgaggacttcatgagtgccacggggctcaactacgtgccgcagtacatcgcccatggcttctcgtgggatgcgctgttgcctgactactcgctgcaaggtctgccggacatcgccggctacattctctccgcagtgattggcatcgccgtgctcactatcgtgttccgtctgctggcgctcgcggtgagcggcaacggcaagacatccgcgcgttgacgatacctgcatggatgcgtgagtcggaggattacgatcctccggctgacaagtcatccttcatcgaacacaacctggggcatttcggcagcgtactcgagcaggttggtcatgcgttgccgattgagtcgagcccggtcgacaaggtgctgggctcggtcaatccgggcgtgcggctgctgggcatactggccgcgattgtctgcgtcaacatcacatgcaacatgctgttctcgtacatcatgctggcggtggtgctgctgatgatggcgacccggccggcgcgcctgatgagggcgttgctcggcccggtgctggccgtatgcatcctgagcctggtcgtggcggtgccgagcctgctgattgggcagtacagtgcgccggtccggctggtggtgcgtgcgttcgtggcggtgtcgctggtgatcgcactggcgcgtacggtgccgtggaatcgcctgattgccggactgcgcgcagttggctaccctgattcggtgatttatatctgcgacgtgacgattcagttcatcgatattctcggtcgttcgatggtggagttgctggatgcgctgcggttgcgcagcgtgggccgcgaccggaccaagctgacgtccgccggccagttgatgggcgcgctgtttctgcgtgcgaatacgcaggcgcggcaaatggctgaatcgatggtgtgccgggggtttgacggtacgtatcatatccaccacgagcgtctgctgacgtggcgcaacggggtgtatgccgtgtgcattgctgcaatgattgcgctggcggtgtattcgggatgagggtggttcgaatgaatggagcccaataatgttcggattacagcgtaatcataaacaaactgcaaccatgcagccagataactcatggttccgcggcgacccgctggtcgaactgaatcacatcgacttttcctataaagattacggcgacgccgacgatgaaacctcgtcgcacgccgtgctacgtgatttttcgctgaccgtcgaacgcggtgagcgcgtggcgctgctcgggccgaacggcagcggcaagaccacgctgatgcgcatcatcaatgcgctggaatttccggactcaggcgagtatcggtttggcggtactccggtggttcgcgaggaagtcgaggcgaagaacagcctgttcgccaaagcgctgcatcagcgcatcggattcgtgttccaaagctccgacacccagctgttctgcccgtcggtggaagaggagattgcgttcggtccgttgcagatggggttgccggatgccgaagtacagcgcagagtcgatgacatggtgacgttgttcggcttggatcggatgcgggagcgggcgccataccgtctgtctggcggtgaaaaaaagcgtgtggcgattgcctgctgcatgtcgatgaatccggacctgcttgttctggacgaaccgaccgacggcttggacgagcgcaataccgacgtagtggttgaggtattgcgcgccttcactgatgccggcaagactgtactgttctccacgcatcaccacgacatcgtggagcggctcgacgctcgcatcgtgcgcgtgcatccgtcactatggcaatgacattcacgtggcgtctattggatatcttcatcgaaaaaagcagaaaggcatcggcgaggatcgcgagtccggcgagaactgcgatagtcgctttggtgatggttgccttcatgagagtttccccaaggtgttgacgttgatttcatgagattcgaaaaagagcgtatctaggccgaaccggacagtaagtcaacggtttctggaaaccagctgaaaaagctacggtattgtgaaatatgtctcatcggaatgggtcaagtttggcctagcgctcgcagtcgtgcgcgaagattcgttggattgattctcggtggattaagtcataggaagaaactagacaccttgcggtgtaaaaccgggaatcggaatggtgtaaaaccgggaatggaaatagtgtaaaatcgggaatgagaaaggtgtaaaatctatattgaggtgattgggtagctgagaaaggccggaaaatgaacgatttgaacaatcgtagtgataccttgactcaacctgattatcgtgctcgcgtggtcgatggcaggttaggtaagttacttaaagcattcggcgcggtggaaatcgtcgggccaaaatggtgtggaaagacatggacggcgctttcccgctcgcgaagtatggatcgtctggatgatgccgctacctttgcggccgcacagactgatccggcattggtactcatgggtaatgaaccgcatttggtggatgagtggcaagatgtgccgcaaatttgggatgccgctcgtcgtcatgtggatgacaatgcgaatcgcaaggggcagctgattcttacgggctcggccattccgaagggtcgagaaacaattcaccacagtggcacaggtcgaatttctcgcttgcgtatgtggcctatgagtctgtgcgagtcagggcaatctaccggtgtagtgagcttgtctggtttgtttgatggacaattcgagcctgccgaatgtgcaaccaacattgaagatattgccagatggtgctgtcgaggtgggtggcccgcaaatcttgatttggatgacgagtttgctctggaaattccgagtgaatatatcaagagtgtgcttgatatcagcgtgcccaagatgaacaagaaccctgaaaccgcgcgtgcactcatgcgtgcgctcgccgtgaacgtatcgcaggcaccaaaatatgcgacgctggctgcggatatggcctatggcgatgagcgccgtgaaccggatacgcagacagtaaagagctatttgggaatgctcaaggacttgtaccttctgacggatttggagggttgggagccgccactccgcgcaaagagtcgtgtgcgaaccaagcccaagcgatatttcgtggatccttcgttgcctgctgcggttttaggtgccgcgccgaatactctgatgcgcgatacacagacgctcggcgatctgtttgaaacgctgtgcattcgtgatttgaatgtatatctgtcggccatgccgggcgcgaacaatcgcatcgcctactaccgcgatgacaaggggcttgaagttgatgtcattatcgagttgtctgacggcaggtggggtgctatcgaaataaaactcagtgaccttaaggtgaacgatgacaatgcggataagctcaaatccttccgcgacaaaatctgtggcaaccccatggcccaagttcgcgaaccagagttcatgatgttccttaccggccgaggtgggaaggcctatcgccgcaatgacggcatactggtcgtgcccatcgcaacgttcggggcgtgaatcgggtaaaagaaaagaagcgccgaaccgcgaaagcgcctgtcggcgcaagggccgctcgcggcggcaaaaaatggagcccggggcttaagcacggtccgacgcggatacttagtatagcttgcgatggggctcgccgcgccgggggaggtgtggtgttggctggtagctgattgttggggtgcggttggtgggtctctccctcagtcacgggcatcgcccgtgacagctccctcatcagagggagcctggagcagggctactccaaccgtccgcgacgccagaggttggcaccgtgctggaaatccttggcggtggccatgaggctgccggcggtgtgcataaggcgggcggctttggtgcgcacggccttctcatcggcatccgaggagaaggcgccgttggcctcggcccgggtcaccatgcgccgcgcctccacgcgcaagcccaacgccaccacatcggtaaacgccgccgcacgctcaagcgccacggcaaaatcgcccacaaaagcaccggagagaatcgaatcggccaatcgcacgatgtcatcttcactgggagcctgatccacgccggcgatggcggaggcggtagtggccaccggctcacccaagcgccacagatgcgcgatcgagtcgcgattcgatcgcatccacgtacgcaacatatacagtcgccacagcacaccaggcagcgaatccggctcggcatcgctccatagttcggcgatttcatccacgccgaccgtctccaccaacgtgagcacccgctcaacaaccgccgggtcttcgctatggcgcacacgatccagcaatgcggcagcagacagatgactcatctcgctcaacgcctgcgggtccatgccaccggccaatccatcggccacagccgggtcgagctgagccgggcgcgaggggcgtgaagaacccatgcgagcaggtccgaatgccgctccggccgcacgcaacgagccgaagcccgggcccagactgccggcggcaccattgtgcgcggcatgagctgcagcggcagcggccgaggagttggatgaatcaggaaatgcgggtctagtagacaagcggttgaaccttctgaatatcgatgattttgggaccatgaggcgtcggagtgacgaacagcgccaccgccgtgccagtcggcatgaacggtgtcttggcgatcaggcgtttgctcagagacggcgcaacgcacatgctgcgcaggtgtccgaacatacccccaatcaccggccggtgcatgcatatcgctatgggctgacggcgctcaagtgcgaactcgatttcgctgagtagacactcccatgcggtgtccggcgcagcggcgtatgcatcttcggtgagcggatcgagatgaaccatgtctcgtccggtctgccacgcgaacatctccaacgtctcctggcagcgcacccaaggcgacgtggccagtcgggtcggattgaaacacgccagctcgcggttcagcgcgtatgccgcagccgcgccgcgcggcgtgatcggacggttcgcgtccgaacccttccacagcttgcgcgcttccgctttgccgtggcgcacgataatcaccggcaccgcgtccagtgcaccttcttcgacccgatcaacgaatagcgcgaggatgtccttatcggtggaatggctgagcttcttgcgggcctcggccggcgtcagccacaaaacttcgtcgatttcgccgatgtccgcccgatgcaccgggccaaacgcatgggtacgccgcaggttgtcgatggcgctgatcggcgtggccatccagaactggatatgcttggtatccgccgaccgatccttggtatggcgctgtttgctgccttcttcggacagcgggtactcgatgtcgcccagataagggccaagttccacggacaggcccgattcctcgccgatctcgcgtacggcggcatgccggtgcgattcgttcgggtcgaccttgcctttcggccagctccagtcgtcgtatttcgggcgatgcacgatgcacagttcgatgcggttgagtacgttgtccgctgtggctgggctgtcggcctgcgccgggtccggggtggaagccgcgtccgatgcgccgggtgctgccgtggtctcgccgtcagaatccgtggtgttcgcgatgatggtgccatcggtggcaatattggatttcgctgatggagatgatgcctgcgtcggctcggcatcatccttccaccggtacagaataccgccggcggcttccacgattcgtct

SEQ ID NO: 1445 - DNA, 2704 bp, Unknown
  R257_15m  MAG No. k141_20341
cgtccacacccacagccacgccccggccacagtcgaggtcgcaaccacagccataaatcccgttttcacagttacaaggcaccgatcccactgctcaatggcctatctccgtttcaaggggcggatctcggtgtctccggaggtctatctccgtttcaaggggctgcttatccatgaaaccgcaagtagtaacggctttacaccaccgtcattccaccattttgggtcagtttctacttgggcatcagccccttgaaacggagatagacctccggagacaccgaaatccgccccttgaaacggagataggccattgagcagtggaatcggtgccttgtaactgtgaaaacgggatttatggctgtggttgcgacctcgactgtggccggggcgtggctgtgggtgtggacgtggccgcgactgtgcgatgccgggcaaatgcgcaaattctattttcaggaaaagagtgctccgcattatgcggattcgtattcgggaacggaaatttggtgtgacggttgtctcagtcgaaggtctggcgtgtatatgcgcttttgcctagggtaataggattgcgcgcaatgtgccccaccggtatgtatgagtatgcgatcggtggcacacgcgactggacgtatgacgagacctactgcaataacgcggcagtcagcacggcgaggggaaacgaaccatgttcgacaaacgactgttccaattggcgcccggcttgaaaaaactcatagccggcaaagtggccctgatgtgggtaggtctgtttgccaacattggttttatgctgtcgctggtaatgctgctgaacagcttgctgaccgctgtggcaccgccgctgctccaatgcggcggcacttcgcaaggcgtggcctgccccgtgccgttgtctgatcagcacggcgcggatgtgctgcccatggctggcgacgtcatgatttacgtgctgcttgcgctggtctgtatagcggtccgttacacggccaccacgcatgccacctgtctcggcaccgaagccgccgagcgggtcaaactggctttgcgatccaagctgtaccgcaaaatggtggcactcggcccgtcctacaaaacccgcatcaagacctcggatgtggtgcaatccgccggcgaaggtgttgaacagattcaaagcttctttgaactgttcctgccgcagctcttctatgcgattcttgcgccaatcaccttgttcgtggccattgcgccgattaacgtgcccgctgctgccgtcatgctggtctgcgcgccgctcatcatcatcgtgaccggcatcgtctccatgaccgccgcccgcgccttcaagaagtactgggtgcgctacaccgatatgggcgccgcgttcctcgacaatctccaaggccttgagaccctgaaaaacttcgacgctgacgagcgcgccgccatcgagatggacaagaaagccgaaggcttccgcgtgatgaccatgcgggtgttgcagattcagttgcgttcgctgaccgccatggacatagtggcctacggcggtgctgcggccggcatcggtgtggcgttatggcaatacgcgcatattggcgatgcttttgccaatggtgcgtccggctggtcgccaatcgcactggcctcacatctgcctggtgtgcttgcctacgcggcatacggcctgcactatctcatcccgttcggggtgggctacccgctgtctcttaccggtctgctgctcattgtgctgctgtccgccgaattctttattcccatgcgtcagcttggctcgttcttccacgtggcgatgaacggcatgacctccaccaagcgcatcttcgctctgctggacaccccggagcccgagcatggcacggcgaccctgccggccaacgattccgattccgctgacgacggtctgacggtccgcttcgaccacgtcggctattcctatgatgatgccgggcacggcgactccaagtccgcatccgcaaagaccgataagcaaggtgaaaccagccccaattccgccgtcgctcctgcgctcactgacatcaccttcgccgcacggcccggtcagttcaccgccattgttggcatctccggttccggcaagtccacggccgcctcgctgctcgccggtacactggccggttaccgaggttcgctcacgctgaacggcgtcgaggtatccgatttgtcaggcgaaacactggccggagccgtcactgtgattggtgccagcagccatctgtttgcgggcgcattgcgcgagaatcttctgatggccttgcccgatgacgagattcctgattcgccggattccgtggactcccgtctgtggtccgcgctcgagcaggcgcgcattgccgacttcgtgcacgcacagccgaacggactgggcatgccgattgagtccgatgccgccaacctgtccggcggccaacgccagcgcatcgccatcgcccgtgcgctcctgcatgattcgccggtatttgtgttcgatgaggcgaccagcagcgttgacatggaatccgaagagctgatcctggatacaattcgcgaattggcgcaatcccgcggcaagacggttattatgatcacccatcgcatggccaacgccgaacacgctgatcaagtggtggtgctcgaacacggcaagtcggttgagaggggcacccataccgagctgatgacggcggacggcgtctac

SEQ ID NO: 1446 - DNA, 13824 bp, Unknown
  R257_15m  MAG No. k141_20972
gcagccgtccggctgcggaaaacacaacatcagagcgcacagagtgcgcctcaactcctactcgcgctcgttgaaaacagcccagtgtggaggcagttcgccgaggatgcgtttgtcgtcgtcggattgccgttgttggtcggtctgcatgtctccgggctcgagtttgacgccgtcagcgtcaaactgctcagtgcctttcatcaccacgcgcttgtgcttgcgcggtgtgcgccgtgtagccgagtattccgccatgattattcaacctcgcggtagatctcgccgatacggctgacgatacggtcgacttccttatcggggttcacgaaggcggcgacactccagacggtcatcacattccagcccaaggaaatgagatcctgtgccgacaaacgatgacgcctgcgcgtggattgcacggacataaagttcgcgtcatcggtctgcacggccaaggcaaacggcttgtccttcaatcccaccacgagcggaatcttcacgcccttgtcgaatccataatcaacagcagcgttcagtcctcgcgcgcgcaacctgtcggcgatatcgtcgaacagcacgttgccgcctgccgcatcacgcaacggaagcaccggacggtcgtcaagctgttcggcccacgtcaacatggtcttcaggaaccgaggaccggactggtgcagtcgttcttcatccaaatcttcggaaccaaaggccgacacaatatccaagctgtggtccgccaatgccagggcatccagcaacagtccgcgaccgcctgtgctttcgagcggaccgaactgctgaagcagacgtccgtgcgtggttttcgcatagcacatcgtcagaatcacgtcagtggcacgacctccggccacgtcacgcaaggaaaccagccgcacatggcgcaggaatcggcccatcgccttggatttgcctgccaacgacttcaattcggcacccaagcgtgtgcggaatgcgtcggtcaacatcacgaccacaagtcgatagctggaaggaaccacagcaaaaccggcggcacgttgcgtaatcagacgcaccacttcatcaatctccgactggctggattccaccagaccagaagacataaccggcacaccgctcgcttccacacggtggaaccgcaccccaccggcagccggctcggtggccacatcatagcgaacaggaccatatccctcggattcaaggaatgcggacaggcgcggcgcacggcgagacggggcagcatccacctcgatatgaggcaacgtgtcgatcagctgcttgacgctttcgctggttaccgtcgcgcagtgggcgatcaccaccacctgctgcacgcggccgatgatggacagcaactcgatagcgggaatgtgcgcgcacgcatcgagaatcgccacatcagccagcacacccggctcggtgagtgcggcgagcgtacccggcgaggccaccagaatcggcttggccgcggccagaatctccggatgatcacggcgaatcctgctcagcgacacactggcgcgccctgccagcacggtgtgcatctggttggcttcctgagtgcgggagaacagcatgtcgcacaggcggcgcatggattcctgcgacaccatcggtccgatggagcgcacgtgctccacatcgacctgtgcgaagcggtcggatgcggtctgcagcgcagcaccatcctggttggagatgatggcggaagaacgcacaatgtcctcgaacacggtggtccaccatgccagctgcacttcgccacgcacctgctccacgcccacccggcgagcgttgagatcggcgaccagttcgttaagtccggcagaggcgaattcctgctccagcaggcaacgctccggcaaggtgtccagtgccttgcgatcatccagcagtgctttcaggcgtgcttccaccttctcgaaatcggcggtttccagattgccgccggcgggtgtggtggaaagcacggtatccagcgcggtcatattgctgaccaacgcctcttgggtggaaatgatctcgtcgagcttgctgggcagcaccggccaaccgccgtgaggcacgaactgatgccactgctccccttgcttggtgactaccttcaacgcttcgtgcaagtcctcgacctgcgcgccgacgcgcagcagatccttggcttccttgacgtggcggcggcgctcccagaatcccatcgacgtgccctcggccttgcgctggctcttcggcttggtggcctcgatcatggagctgatgtctcgctcgaaaatctccggctggaacacgtcaagcactcgtcgcagattcttcaaaaccgtaacctgacgctcccactcgcgagtggtgggaggaaccgggaatccgcaggtctgcacggtgcgtgccacctgctcacgggtggcgggcaggaagcgacgcagcaaatcgtccacgcgctggtaagcggttaccgcttgttcttcagtggtgatggacgccttgtaccatgcggtgtcttccgggccgatggtgtattcgccgagctcgccggcacgttccatcttgctgatccatgtgtcaatatcgttggcgatactcagggcacttgactcgtcaagtcgaacgtgggtggcggggtgtgtcgggagcacggagatacgggccaggttctgaatggtctcgtatgcggacacattccacttatcgttgctcccgtgcaggtcgcccagatagcgggtcaagcgcgagcgcacgcccacgagttcgtcggccagctggtcgaatcgctgggtggcgactccgggctggaatccgactgcggcaatcagctgcttatcaagcgcggcgttggcgtgttcatcggatacatccagtacctgcgccttcatctcattggcggaggccgtctggatgaacagacgcttctgctcggccacgccgggcacgtacagcacggaacgaccattcatcaggcagcgcgatgcgatggccacagcctgctccgcggtgcccttcgggaaggtgccgtcgaccacgatgctatggccattggcagcaagtgacgcggcatatcgcaccgtattgtccacatcgccgacttcgtactcggcatgcgggtctacgtcgaaaggactgtattgcggaatattggcatctttgagcgcggtgcgggcggatttgtcgccggcaagcgcgtccaacagcacattgccggtggggccattctccagctggtcgatgaactgtcggctttcgctgatcatctgcgacgaggggtccatgaagcatccgagcacaatctggcgctcgatggcgaagccggagatacgctccgatgcttcggacgaaatacgggcgaacatcgcggaagtttcgggagtgccactgtcatagctggcaccgtcaaacagggaatcctcatccaagaacaccccctgctcacgcaatgcattgacgaacgcggcgttcagggtcacgcgaccggtgaatcgaatggtggtcgacaagccatcatcctcgatcgtgacgctcaccgggtacaacagcaccggcagcgcgttgcccctccacgtggccacaccgaccacgagcgacaactccgccacgcccgaaatcctgcgcttggcggcctggtcatccagtacgcgcccgatatggcgttcggcggccttaagcacacccgtgtcacggaacaacgaatccaaccgaacatggccggaagcgaacagctgggcgatgccggagggatgggcatgggtcatctccagcttcgcggccagttgattcacatcctcgagcggcgatggcggctgcatactgcggtattggtcacgccagcgacggatgcgattcagaccttccgtgagattctggttctgagtctggctctgggtcatctctcgactcactttccaaccgcttcgcggtattcctgatagcccttgttgtgagacagggcttcgtcaatatcggcctcgccacgggcggcgagccaagaatacatgtcgtcgtacaggtacggattcatggcgaggaacgccagtaattcgggatgacgggcgacttcgaactgaacgttgaaatcttgcgtggtttttgcctcgtcagaggtcaggccatcgacttcgactgccggctcctgtgctttcagctcgcccttggccacacgctcgaacaccgagccgggctcgaagaccggagtgtgtacgcccgtggagtagatatcagacgcttcatacgcttcggagaccgactgctgggcggtttcggtttcggtcgccagctgctgatcctcgggtgcgtcggttgccggttgagcggtttcaggctgggtggttgtcggctgggcggtctcagactgagtgttttcagactgggcggcttcggactgagtgccttcagaatgctgtgcaacagcgtccaccggctgagaatcgtcggtattcggagcggactgaacgttttcggctgacttgcttgcgccagccaccacatcggattcaacaaccgccgccgacgccactgccggctcgcttgtgctgggagcgtgcttaacaacggcatgggcgatggcatctaccgggacaataccggagatcctgctgtgcttggatgcgggcgttacagtcgtcgactcaggttcggtctgctgcttcggcagtaccacggagtccatggcctgctggtttttgcgttcggtctcctgctcggcatgctgggccaacgcatccgcgaacaggtcacggggtatggccggctcatcgtttttcgtcactggctgcgtgatattcagcgagccaagttcaagctcgtcgaccttgcgtcgaacattatccgcgctgaagatggcggtcggctcgccggcccgcaaatcaagaatatcgtcgacagacatatccgccgcatccggctcctgcggtgcttcgtgaaccgcatagccaaacaaatcaggcaccttaaggtcgagtggctttgccactggatcgtcgatacgaatgaagtccgcaggcacatcaccgaactgcatgcgcatgggagacgtcggcaacaggaactcgacattggccggcaagcgcaacaaatcaccattttcccgcaccacatacgatccattggtcgatccaagatcgcggaccgaagccgtaccattgctttttaccgtgaacatggcgtgccgtttggacatcgatttggtctgatcggcgacgtcaaggcgggtgttgtcatcatcggcaagggggcgtaacggcttacggccgatttccacgcattcccccggcttgacgctgatccggtcgacaccgttgatcttcaccgtccactcgctcaccgtgaccgccttcctggacacactatttgaccacactacgtgccattgtgtcatcttttaccggcttttggcggattactgggcacagaattgacaactttcgctcattgccagctttgtgattccacgccggatcgcgttctccgcctcgccctcgtcaactagtctactcagtatgcggaaaccccgcagcctgaaacacaggtgcggggttcctcgaaaagctgtgattgcggcttatgccgcacaaatcacttgagctcgacggaggcaccagcctcttccagctgagccttggccttctcggcatcttccttcttggccttctcgaggacggccttcggagcgccgtcgacgagagccttggcctcggccaggccgagggaggtgatggcgcggacagccttgatgacctggatcttcttgtcgccgacggcggagaggatgacgtcgaactcatccttctcttcctcagccggagcagcagcgccagcaacagcggcaacagcggcaaccggagcggcagcctcgacgtcgaacttctcctcgaaggccttcacgaactcggagagctcgaccagggtcatctcgccgaaggcttccagcagctcatcgttggtgtacttagccattatggcttcctttcaatcttggcggcggacgaagtggtagatccgctgcctaataaaccttattgtttaaattatcgaagcgactgattcatgccgtgagggcgtaaatcaggcagccttctcctgcttttcgcgcagggcgtcgatcgtacgcacagccttggtaggcagggcgttgaacaggtacgcggccttggccatcgatgccttgatgtcgccggcgaattcggcaagcagctgcgggcgggacttgaggtctgccagcttcttggcgccctcggcatcgtagacagtgccgtcagcggcggcacccttgatgacaagagccttgttgtccttggcgaagtcacggatgaccttcgcagcctcgatgaagtcgcccttcacgaaggtgatggcggtcgggccggagagaatctcgtcgagaccctcgatgcccgcttccttggcggcgatgcgtgccagcgtgttctttgccacggtgtaggaagtatcgcggcctagcttttcacgcagatcggaaatctgcggaacggtaagcccgcggtactcggtcaggtagacggcgtcagcgttacggaattcttccgtaagctgagcgactaccgcttccttttcgggcctcttcatggcgttccttcctaagtcggccgttgacttggagttcggaactttcggccgggcaacaaaaaagccctgcgcacaggcagagcaatataatctcgcgaagtgaccttcgccggcccttgacgggcttatatctctcaacctgcgctggcttggcgaaccaaacttcggaaatgcactcgcgcgcacttcaaccaacggtctgtggtttacggatgattagattacggatggtcagcgacattgcagaattcgggcgtgtcgcaaggcattacaacgtggcggcgtactgggctacggacgcggtgacttccttcagatagtcgagcgagcgacgccagtggccgggcacctcgatcgaatggttggcatccgggtattcgtgcacgtgcggggtgagcgcgttggcgcgggctcgatcgtagaacgggtcggcggtgccggcgcagatcagcggtgccgggccggagtatcgggagctggcggcgtgcgactggtcggccagttctgcgcggatgatcgcccttgcttcggccacgctcggagcctcggattcggcgacgatatcatcgccgacagccggcaccggaatcacccgggcggatggatcgaagtcggcgtgatgcagcaccggggtcagcagcacgaacggcagaccgtagtgtgaggccacatgtgggtaggtcatcgtcgtcagcgacttgccgatcagcaacaggcgagggccggacggggtgtcggaatcacggttcggcgagccagctgcgccatcggccagcacggtagcagaatcatcggcggcaacgccatccccggaatcaccggctttacccgcgccggactcgcgcgcggcggccatccagccgtcaatcgcctgattgaggaccggaatcaccgtggacaggtcgtcggaagcgttgcgtacgttcatgcggtcgattcgccagccggcctcgaccagagcctgggccgaccagtagagcagcggacggtcgcagttgtagccggtgccaggcatcagcagtacgcggccgtactcctgaccgggcttgacgacattcttcttccaagaggtgatgctgacttcgacggccggtttcatcgcgcgccttccttccacgggtgtgccctgcgtgtccctgagttgttccgaattattctggcagtcagtctactcccggatccgttcacgttacctccacaagctataatcggccacggttctgattggatgcgcagcgcctgacgcgcgttgggcaggccgatcagggcgagtcgcaattctcgccggggccagccgcagcattatgcgcgcggtgcgcagccccgcataaaaccaaggaagtagagagtaaatggagaagttcttccatttgaaggaaaacggcacgaccgtctcgactgagattctggccggcctgaccacgttcttcgcgatggcctacatcatcgtcgtcaacccgcagatcctgtcgcagacgggtatgccgtggggcggcgtgttcctggccaccatcatcgcggccatcatcggcaccctggtcatgggcctgttcgccaatgtgccgtacgcccaggccgccggcatgggcctcaacgcgttcttcacctacaccgtgtgcttcggcctcggcttcagctggcagcagaccatgtgcatggtgttcctgtgcggcctgatcaacatcctcatcaccgtcaccaagatccgcaagatgatcatcatggccatcccggagtccctgcaacacgccatcggcggcggcatcggcctgttcgtggcctatgtgggcatgctgaacgtcggactgatcaagttcacccccggcgacccgaaagccgcggccaagggaggcgccgtggcggcgaccccgagtctggccgacttcaacgacaaggtgctgtgggtcttcctgatcggcctcgtactggccattgtgttcaccgtgatgaaggttaagggcggcatgctgctggccatcgccatcaccaccgtgatcggcatcccgttcggcgttaccacctggtccaactcgcagtccatcagcgaaaccttctcccagctgccgcagaccttcggcgcgatcttctccgctgagggcttcccggcgctgttctccgacgtctccaagctgcctctggtcatcgtgaccatcttcgccttctccatgtccgatacgttcgacaccctgggcactttcatcggcaccggccgtcgcaccggcatcttctccgccgaggatgagaaggctctggagaacggccacggcttctcctccaagatggacaaggccctgttcgccgactccatcgccacctccattggcgctatctgcggcacctcgaacaccaccacctacgtcgagtcttccgccggcatcgccgcaggcggccgcaccggcctgacctccgtggttgtggcgatctgcttcgccctgtccgcgttcctggccccggtcgtctccgccgtgccgtccgccgcaaccgccggcgtgctggtgatcgtcggctgcatgatggccgcttccctgaaggaagtcaagtgggacgacatcgccgaagccatcccggcgttcttcgcagccgtgttcatggccttctcctactccatctcctacggcatcgccggcggcttcatcatgtactgcatcgtgaagacctgcaagggcaaggccaaggaggttcacccgatcatctggattgtggccgcgctgttcattctggacttcgtgtgcatggcgattctgtaacgctgattgacaacggattagcctttaaggattaatccgccgccatacggcataaaggccgggctctcacaagggcccggcctttgttgttgccacagtgatcaacacccatgagtaccttcgatgatcatccgccattcaatcaacggctggccatgactcggacatggcgcggcacggcaagcggattttgctgttgggcataacaacagacgagagaatagatccggtcgtgagcaacaggataggtgccatgcggtgccgtgtacaaactgttgtcagttgtcaacgctttttagcgtggcttcaatcatcttaatggctgttttccgccattcttgatgcatgagaatagttgtcaactgacaactgaatgtacatggcagcagcacgagtgccctattcaacatcgaaatatgtagcgcgaagaagccgaaaaaccaaaaggcttctataccgaatgaaacggtatagaagccttttggtttgcgattaagctcttctcacccgagagaagctagagaacgatcagtcctcgaatgccgaaccgttaagcgggaagccctgcgggcttcccgtaggtgagggggggctatgccgcgaccgatccgtgagagggctttagtcctcgaacggatcaaagtcgcgacggacgcggcgacgcgggcgctcagtgcgctcttcgcggtcggcgcggtagtcgtcgtagttgtcgtcggtggcgtagcgcgggttgcggtccgagccacggccacggccgccacggaaaccgccacggcggtcatcacgatcgccacggtcatcgcgatcggaagagcgacggcgacgcggacgatcatcatctcgggagtcgcgagcatcacggtcatcgcgatcgtcgaagtcacggtcggcagaacgacggcgacgcggacgatcatcatcgcgatcatcgcgatcgaagtcacggtcatcggagcgacggcgacgcggacggtcgtcgtaatcatcctcgaagtcatcggagcgacggcgacgcggacggtcgtcacgatcgtcgaagtcacggtcatcgcgatcggagcgacggccacggctgccacggcgatcgtcacggtcaccacggccacggccgccacggcggtcatcgcgatcgccacggctcggtcgggcgttgttctcctgatcctcgaaaccagggatggccagggagatcttgccgcgatcatcgacaccctgaacgatcacctcaacggtgtcgccttccttgagcacgtcttcgacggcgtcaatacgctcgccgttggccaggttgcggatctgggagatgtgcagcaggccgtcggtgccgggggtgaggttcacgaaagcgccgaacgacgtggtcttgacgaccttgccgttgtaggtttcgccggcctcgggcacgtgcgggttggcgatggaatcgatgatggacttggccttcttagcggcctcgccaccctcggaggagatgaagacggtaccgtcatcctcgatggcgatttcagcgccggtatcttcctgaatctggttgatcatcttgcccttcgggccgatgacctcgccgatcttctcgaccggaacggtggtggtgatgatgcgcggagcgaactcgctcatctcagccgggccgtcgatgcactcgttgatgacctcgagaatcgtggcgcgggcttccttggcctgctgcaaagcggcggccaggatgtcggcggggatgccgtcgagcttggtgtcgagctgcagggcagtgatgaactcagaggtacccgccaccttgaagtccatgtcgccgaaggcatcctcggcacccaggatatcggtgagggtcttgaagatgtgcttgccatcaacgtcgccggacacgaggcccatggcgatgccggcaaccggggccgtcagcggcacgccggcagccaaaaggctcagcgtggaggcgcacacggaacccatcgaagtggaaccgttggaaccgatggcctcggagacctggcggatggcgtaggggaactcttcacggctcggcagcaccggcacgagagccttctcggcgagggcgccgtggccgatttcgcggcgcttcggggagccgacgcggccggtctcaccagtggagtacggcggcatctcgtagttgtgcatgtagcgcttggactgcggaccggacagcgcgtcgatctgctgctccatcttgagcatgttcagggtggtgacgcccagaatctgggtctcgccacgctggaacagggcggaaccgtgcacgcgaggcacaatgtccacctcggcggacagggtgcggatgtcgcgcaggccacggccgtcgatgcggtagtcctcggtcaggatgcggcgacgcacgatctggcgctgcagttccttgaaggcgttgcccagctccttgtccttctcggcgtcgtccatgtcggtgaactcgtccgcgagcacctcgcgcacgtgctccttgatctcatggatgcgatcctgacgcggcagcttctcggcgatggagagcgcctcgttcagatcctgatgggcgatctcgtcgatgcgggcgtacagttcgtcggtgtactccgggaagagctggaattccttggtctccttggcggcgatcttcttgagctcgtcctgagcctcgcaaatcaccttgatgaacggcttggcggcttcaagaccaccggccacgacctcctcatcgggcttggtctgaccctcgtcatagatgaggtgccaggcgttcttgccggcaccggcctcgatcatggcgatggcaacatcaccgttctcgatcacgcggccagcgaccacaatctcgaacacggcgcgctcacgctcgctccaacgcgggaaggcgacccactggccgtcgatcagcgccagacgcacaccggagaccgggccttcgaacggcaggccggagatcatggtggaggcggaagcggcgttcagggcgatgacatcgtaagcgtcatcagggttcacggcgagcacggtctcgacgacctgcacttcgttgcgcagggtgtgcgggaacagcgggcgcagcgggcggtcgatgatgcggcaggcgaggatggcctcggagctcgggcggccttcacggcggaagaacgagcccggaatcttgccggcagcgtacatcttctcttcaacatcgacggtcagcgggaagaagtcgtagttctccttcgggctggaaccggcggtggtggtggacagaatcatggaatcgtcgtcgaggtaggcggccacggcgccatcggcctgctgggcgaggcggccggtctcgaagcgcagcgtgcgcttgccgaacgatccattgtcgattacggcctcaacggccttgatttcgggaccctccatagggttcctccttctttaattttctaattattcctacatactgtgctgcggtttggcgactcgcttgaaccgcaactgtcctcttcagcggacgtcacataccttgtttcgactggccccttggccgtcgttcctcgtgtcaaccccttcattcgggttctcttgtcggccttacctgctggcctatcctctaaccctcttgccgttgttgccgttggctggcgatatgtaaaacgcccgagcaccatcctaggtactcgggcggaagtcttcaattatcgacgcagacccagacgctcgatgagggaacggtaacgctcgatgtcgacgcgcttgaggtagtcaagcaggcgacgacggtcaccgatcatcagctgcataccacgacgggagtggtggtcgtgcttgtgctccttgaggtgctcggtcaggtcggcgatacgcttggacagcagagccacctggacctcgggagaaccggtgtcaccttcgtgcgtcgcgtactcgttgataatctgggtcttctcgtcagccgtcagtgccacggcgtcctccttattgtgtcgttgcgcggtgtttcgtgcaggttcgctcgaaacgctctctatccgcgggcgaaattacgccaaatgaaaactatacggcaggggccggactggggcacacgcgctcacacagtggtgagcaatccgccaaacaacaccacgagcagggcgatggtttcaatcacgaagtacagaatgaaacttgcccagcttttggtcagtacgttcagcggtgaggtcttccggataatcaccagcagacccacgaacatcagggcatatacggcgatgccgatcgccgcacccataatgcccagattcgcggcattcgccaggccggcctgcttaccgtagaccacgtacgtggaataccagaaattgagattgagcatactgagtcccgcgatgaactgctcgccggccaacccgatcacgaacacgatcaaccacggccaggacggcgagacgaccaccgccatcgccaatccgacgtacgcaatcaccacggtcacccaaccgaccagcgcgatgccttgcggagacactcccccgagcacggccacaatggagtcagtattatttaccgc

SEQ ID NO: 1447 - DNA, 8471 bp, Unknown
  R257_15m  MAG No. k141_21141
gcttcctgaacaagcaggaactcgatcgggacgtcgggcgaacaagagcacgaccgcgctcggaatcaccggttttgtgctttcaatcatcgcggtgctgatcagttgggttcctgtcgtcaacaatttcgcggcggtcctgggtgccatcgctctgccgtttgcgattgccggtatcgtcgccactcggcgcaaagggaaaaagcgcggccgtggcctcgctgtagccgctacgatcattgccgttctgtccatcgtgttcaccgtggcgactcagggcgtgtattccaaggcggttgatgatgcctttggaacaaccgacagttccgcgcaatcctccacgaaagagaacacgaagacaaaaacggatgagaaagccgccgataaggagggggacattgattccggcagctatcacatcaaactcgtatccgtcaccaaatccggtaacgactacgaggggaagccgactgcgatgctcacctacgagttgaccaacaagaagaaggaaaactccaacttcatggacgtcaacatccaggctttccaaaacggacacggattggacacggcgatctatatggatcagcccgaaggatatgattcggaatcctcaacccaagttattcaaccgggtgccggtaagacggtgaccgtcggatacgttttggaggatgagacttcaccggtcagcatcgaagcttcgggcactcttgacatgtccgacgcaaaggtcaccggagaattcccgttgcagtgatcacgctctcctcgcgcggtcaagcggggggcatcggggttgtagctcagttggtagagcgtttcgcccgcaacgaaaaggtcgcgggttcgactcccgccagctccacttcttttttggtgtctttctttgttttttcgcgtgttctcattgtgtttttgacttttctcttttacttgttatactgaatatgtccacataaaaatgaaagaggaaaaccaatgaacatcgcatactccttttatctgcaaaacgcgctcgaacatagcaccctcaccgatgaggagaagcaaggcgcacacgccttcctgaaattcctgtcaacctacaagcccacagggctgaacgtcagggagccggatttctacggttatggtgatgcgttcggccagtacggcgtcacctacttcgaccagcaaaccctcgaagactatggcatcgaccctgacaagctggacgcgcttcagcttgaccagctgatgacacgctggacggaagaagcctacgacatgctcagcggcgatggctgcgacatcatccccgactcgcttgacaacgcgatcaagacgcttggaatcgaccgtgaaagcatcgaggcgtgaaatcatgatgaacattgaagacttcaggaacatgttccgcgcacacttgagccatgaaatctgggacaagtggcgcaaaggacagcttgacgtgtccatgcgccgcaacactcctgacggatgcgaatacgaggaacttcccaaagaggcggcagatcagattcttgacggtggggaaatccattcctgcgaggatctggcagaccccaccgaggtgatttccgaccgatacgcctgttccctgtatggcatcaccacgttcaagcccagcgagtatgcgatagaagaagacttcccgaatgaggtggttctcctcgtccgtggttggagcgtcgctgattttatgagcgactggacgaagctcaacgcagtcgatgagtaaaagacagggaacagaatgtacgagattaaaagcatcaaagatggaacctacggcgcatacgagtattcgacaccagtaccagcagactacagcttcaagcaaatgctcgacatggcacgagacatcgccaacgagaacgggtatgaggcaagcatctacgacgatgagaacgagatggtcatcaccatctcgccgaaacaatacagcatgggagtagcggcatgagcaacaggaaactcgtcagcgtacaggaaatcaccaacatcgaacccatcgagggagctgatcgtatcgaagtcgcccgcgtattgggctggcgtgtggtggtcggcaaggacatgcatctgaagccgggggacagggtcgcctatttcgagaccgacagtctcctgccagcctatgacccgcgttacaagtcgttccaggagcgtggccagaagaccatgatcgtcggttccatggaagtcaccggccatgtgctgcgaaccgtgaaactgcgcggcgtgtactcgcagggtctcatcatgcgtttggatgaactcggattccggtatacgccggcagtcggcacggacatcaccgataaggcgaatgtgctcaaatacgaggagcccctgccgatgggcggcatgcaggccggccggttcgacgccccctgctccaagtcggatgcgccacgcttgcagacgctcaccgaccactgggaggaattgaagacattgaaggctacgccgaccgtgaaagtcgatggcaccagcaccacgctcagcatggacgaacgcggacatgtccacgtgtattcgcgcaactgggagctcgaccccatgtccgcgaacatgcggctcgccaaacgattccagttggacaagatgctctggccgggcatggccgtccaattcgaactgtgcgggcccggcatccaatccaaccggttgaaactgccggcccaacgcccgttcgtcttcgcagtctggaaagaccaccacaagatcgaccgcgaccaatggccgaccggcatgccgaatcttgccgttcccgaactcgacgaaaacgagtgggcattgacggggagcgtggacgacatgatcgccaaagtagacgggttgcgtggcaacgtcaccaaagaccgtctggacgagggcatcgtctggcatctgcacgaagaccagcgactgtccgagggattggcgaacgagcttggctccaaccggtgcttcaagatcatcaacaacaagtatctgacgaagaacggactataggcatggcatacccgatgttcccgctcgtatcggctcccgcatcctacatgccggtacccgtcgacctggtacagcgcctcgcttcgttcaccctggcccaccccggggagccgggaggccttaccgccgatgaggtcaggcatctgaacctgccctgcggctcctgcgggtatgagagcgaagccgtcgacgattggctcgacgaactggcggaccagcttgagaagaggtgacagtcttgaccaagacaatcatggtggacatcgacaacacgattgccgactatacgaacggtctgcgcgactatatccgcgaatgcggacgtgacatggacgaatgcccgtgcccggagccgacggcctacgatttcacgctgaccggcggatggccgttcagcggggatccaaaggcgttcacgtggtggcatacgcgtgccatcgccgacggcctctattcacgcgaagaaccctatgggggagccgccgaagctttgaaccagctgcacgatgcgggctggaacatcatcatggcgaccagccgcgcggatgactggcgcggcgaaagccaacgctggctgcaccgcaacggcttccagttcgacggctactacaacggcgacaagacgctgctcacgccggacgtgctcatcgacgacaggcccgtcacattggaggcgatgactgcgaagggcgtgaccgtactgcatcccgatcatgcgtactgcacggccgcgccgggccgcatgttccaccggtgggccgccgtgcccctgatcctgggaggcgtgcgatgaagccggaaatcgaagtcgaacgccgcgccggcatgatcacgggcgcctcatgcgggcatacgagcctcacctggctgccgtccgccggccgacacggcgtccgcacgtgggtgctgtccaccgatgacggcggcacgatccgccggatccggttgagccccggcgaaatcggctgtctggcgggcattctccaaacaatcgcgaataagggaggccgcgatgacgaacccgttggatgagagcgccgtgcccctgatcctggacgaacccaaacacgggagggtagggggatatcgatgatgatccgctccacatacgctcttcatgtcggaaccggcctcataatggaaggactgaattgatctacgacatcacacccatcaccttcaaccaactggatctgttgtctgccggacacccgcagggcggattccagcagacagggcacatggcgcatctcgccaccacggacgtggaggccacggatctgatcggcgtgacccgcaacggcgttctatcggccggctgcctgatcgcgtggacgcggggccggcttggcctggaaggcagcatctggctcggaccgttgtgcgcgctcgatgatccgaaactcctcgaacacatgacccggggtatccgtctcgccgcacgccgccgtcatgccgtgtccgtcacatgctggccgaacatcgaataccaaaggcatgacgctgtcgggaacccgatcggtgtccccgacacgatgatccttgacgcctaccggtcatgcggctggaggcatcagggattcgacaccggatacgggaaagtcgtcaaccgttggaattggatcagaaccttcgacggcatcaaggatgagcggacgctgctcgcctcatacaagccgcgcacccggtggagcgtgaaccgggcgagaacatcaggcgtgcgagtacgcgaactcggtgcggatgagcttggcacgttcgtgaacatcgaacggaagaccgcaggacgacgcggcttcacggcccgcgacgaagactactatcgccggttcaaggagacattcggaagccgagcccatttcatgctcgccgaaatccatgccaatgagcttctgaccggcctgaccgccgaacatgacaggctcgccgatcagctggattcgctgaaaaccagatacgaagcgcatgccacgacccggctcaaacgccagattgacgatacggcccgcaacctgaccgccctggaacgtcgcctcgacgaggcgcgcgccttgaccacgcatggtagcgtgatcccagccgcctgcgccctgttcgtggaacaccggcgtgaaaccgtgtacctgacagccggcgctctccccgaataccgggcataccaggctcccgccctgttggtccacgaaggaatgctccgcctgtgcgtcaacagtacccaaccgcgacgcttcaacatgtacggcatcaccggcgtattcaacgacccggatgacgaaggccgtggggtattggaattcaaacagggattcaacgggcatgccgaggagctggttggagcgtgcactctaccgaccagcacgatccgatacaagctcgttgaagccgttcacgcgattaagccgctgaagaaggccggccaaacagaagatggtcgttgacttcctccccacggctgaagccggggttttacggcgcgattcggataaaaatcaaactaagcatatacgagtttgacttattacgtacaaatgccgtacgattaacatatgatagaaaccacgaacaaagccagccgtttcgagatgcggctcacgccgtcacaaaaggaacgtctcgaccaagcggccgaaatcaaaggtctcagcacatcccaatgggcgttgtccaacctgctcgtcgccgccgaccgtgacatccaagaatcgcacgtactctatctggacgacgagcaatggaactcattcataaaatctttggatgaacccatgccgacgaagatggtagagctgcttgaaagcgaacctatctggaaatgagcgatttcacctttccacgacgactgaccatggaagacgacatcgatgggttcgactgcggcttaccggtcgtcaacaactggctacgaaaccagctgaagaacgccggcagacagcatacagccgtcgcctatgcgacattctcgaatggagtcctggcaggcttctacacgcttagcgcatacggtatcaatcacaccgaggcgaacggatggttaaaaagaaacagtccagacccaatcccggcgatactcttgggcatgcttggcgtagacatacgctaccaaaccatgcacataggttctcaactgctaagggacgcgaccttgcgcgcttccaatgcggctgaaatagtaggagccaaggcattattcgtcgaaccagcttccgattcggcgacaaaattctacgagcattacgggtttcgacatatcgaacgttcaacgaaaatgtttcttccgttgaaaagaaactgagttgacttcctcccggtactaaagcaccggaaggaagtcaaccggccctcaagaaccgggcttgcgcctcacgcaggtcaacctattcctctagcgagccattcggcggcggtgcgtttcgattggaagatgccttggcttccgttgatgccggtcgcatgccacatgtgtttccggttgatagtttcccgtcggagagtgccgacggtatgaccgttggcgaaaacggcgaacatgttggctccggttttaatcaggattaggttcatcgggctggttcctttctggcttgcattaatgctttgatgagctgttcggctttccgtctgcaaggcatgtgcccggattggacagcatggtcgaacatcccgtcgatggaatcttcgtcgaacggaaaaccgaaagagcatttgtataggattcgactcaccgtttcgatctgtcgttccgatacttgttcgcggcttttggctcctgcttcgtatccttgggcgaaggcttctatcggatcgtcggattggtggaacgagtataggattgcgtatgcttcgcaacggtattcttcggattgtgttgtcacctcggagtgctccttcggtatttgcgtggagtgaattccttaccaccccaaatgccctgtaatgggtatccgcagatttgattgtttgtttccgcgtatctacggcattgctctatcacagggcacgtgtgacagatgtggattgcttcccggcgcatgagctgactattgccgggaaaccagagttccggatcatagccggcgcatgctgcggatttgcgccagtcactcatgaccgccgcctaccgttgacggtaaggatttagttccggactccacgttctcaagcaggaagccggtgtactggaactgttcggtctgggccttggcctggcgtagggtgtcgaggcccacgcccgcgatgatcaggatcgtggtgccgccgaacggcagcttggcgttgaggccgagggccatgatcagcacggtcgggatcagggccacgaacagcaggtagacggcgccgacggtgttgagtcggttcatcacgtaggtcaggtagcggctggtggcgttgccggcgcggatgccggggatgaagccgccgtactgcttcatgttgtccgcggtctcgtccgggttgaacgtgatcgacgtgtagaagaagcagaagaacacgatcatcagcgcgtacagcgcgatgtaccacacggaggtggtgttcgccaggttggcgttgatccacttgacccaggactggtcggacttgccgaactgggcgatcagggtcgggatggcgaggatcgaggaggcgaagatcggcgggatgacgccggacatgttgatcttcagcggcaggtaggtggaggagccgccgtacatcttacggccgatcatgcggcgcgtgtactgcaccgggacgcggcgctggcacagttcgacgaaatcgacgaagatgaggatgaccacgagcacacccacgacgatgccgaacttggtccagtcgccgttcttgccgttggtgccgtagccgatctcccacagctgcggcaggaagccggagcagatggacatgaagatcaggatggacatgccctggccgatgcccttgtcggtcacgagctcggccatccacatgatcaggccggtgccgccggtcatgatgaggaccatgaccacgaggttccacacggagccgtccgggatgacctggtcgcagcggtagttgaacagggcaccggagcgggcggtgaccaggatggtggtggactgcagcacggccaggccgatggtcaggtaacgcgtgtactgggtgagcttggcctctccggactggccctccttatgcagggcctcgaagcgcgggatgaccacgcgcagcagctgcaccacgatggacgcggtgatgtacggcatgacgcccagcgcgaagatggacagctggagcatagcgccaccggagaagaggttcaccagtccgatgaagttctcctgggaggcgctgccgacagtggccatgcacttgttcaccacgttgtagtccacgccaggggtcggaatgaacgaaccgatgcggtagacgatgatgatgaacaggacgaagagaatcttcttcctcaactctttggtcttcagggcctggattagtgtcctcac

SEQ ID NO: 1448 - DNA, 39033 bp, Unknown
  R257_15m  MAG No. k141_21221
cgccgtgcgccgtgcggtgtgcgaactgggcttgagcccggtggacgcggtcgaggccgccacattgacgccggccaaggcgttcggcttcgaccggccgaacccggtcaccggggtgcctatcggcctcatcgcccccggattcgccgccgatttcaaccttgccgatccgaccgattggacggtcgaacaggtgtggtgcgcgggccgcaagctcaagtagcagtaggccgaccggttgacgaatggaaagcattcgtctacaagcatgttcaaatggtgacatgatagtatgttcatctcaccatttgaacgttattcacgtcgtaatacaagaatccgtaatactgctcgataccgcataaaaccggccatggtcgccacaagcgaaacataagtcgatggctgtggaaacgcaggagtaacacatcctcaccatagtcaggcggtaatccacgcccgcagtgatggcgtggaaacaagttatgagagaggattcctgttgaattccaagaagattctggccgccgccgtctccgtggccgccatcgcatccctgaccgcctgcggcggtgtgaaggatgacaccaccgcaggcgccgattccggcaacgccatcaccatcggcaccaccgataagatcaccagcctggaccccgccggctcctacgacaacggctcctacgccgtgcagatccaggtgttcccgttcctgtatgcccaggactacaacacctccgagctgagcccggacatcgccgccgatgacggtacctggaacgatgacggcaccgaattcaccgtcaagctcaaggaaggcctgaagtttgccaacggcaacgacctgaccgcttccgacgtcaagttctcctacgaccgcatcaagaagatcaacgacccgaacggcccgagctccctgctcgccaacgtcgaatccgtgaccgctaaggacgacaccaccgtggtgttcaaggattccgtgcctttcgacgtgactttgaagcaggtcatgtccagccccgccggcccgatcgtcgatgaggataccttcgacgccgacaagctcaccgacgccgacaccatcgtctccaagaaggccttcgccggcccgtacacgctgaccgccttcaagatcaacgagtccgccgcctacgctaagaacgactcctacaagggcctgaccccggccaagaactccgccgtgcaggtcaagtacttcgccgacgcctccaacctgaagatggccgtccaacagggccaggtcgacgtggcctaccgctccctgagcccgaccgacatcgaggacctctccaaggactccaaggtcaaggtcgtcaagggcccgggcggtgaggagcgcttcatcgccttcaacttcaagattcagccctacggtgaatcccagcccgacgccgacgctaacaaggccaaggccgtgcgccaggccgtcgccaacctcatcgaccgcgaagagctctccaccaaggtctacaagggcacctacaccccgatgtactccttcatcccggacggcctggccggtcacgatgacacgctgaagtccgcctacggcgacggcaacggcaagccgagcaccgagaaggccaagaaggtcctcgccgatgccggcgtcaccaccccggtcgacctcaagctccagtacaacagcgaccactatggctccgcctccgccgacgagtacgcggccttgaagtcccagcttgaggaaggcggcctgttcaaggtcgacctgcagtccaccgaatggacccagtactccaaggaccgcgtggtcaccgacgattccgacggtgtgtacccggtctaccagctcggctggttcccggactactccgacccggacaactacctgtccccgttcttccgcgacggcaacttcgtgaacaacggctactccaacaaggaagtcaacgacctgatcgtcaagcaggccggcgagaaggatgcctccgcccgtgaggacatcctcaagcaggtccagaaactcgagaccgaagacctctccaccatcccgctgctgcagggtgcccaggtcgccgtcaccggcacctccgtgaagggtgtcaccctcgacgcttccttccgcttccgctacgcctccgtcaccaagggctgatccagcatgagctcccctctttgaggggggagctgtctggcgacggcagactgaggggagcccaactcgtatgactcccctcagtcggcttcgccgccagctcccctcggagaggggagcctttattgctttatataccgattaccaacaccaaggagcatcgcgtgtcagacagcgccacagcgacctccagcaccactccggcgaaagccaagacgaagaagaaccgactgtcaggtagtttcttccgcttcgtgctgacgaggttcctcctcattatccccaccgttttcattctggtcaccatcgtgttcttcgtgatgcgcgccaccggcgacccgatttccgccgccctgggcggccgcctgacacccgccgaactccagcagcgcatccacgcggccggctatgaccgcccgctgatcgtgcaatacgtcgactatcttggcggcctgctgcacggcgacctcggcacgacgctgaccgataaccagccggtgatcagcatccttacgcactacggcgccgccacattcgaactggccttcctcgccctgatcgtggcgctgatcgtcggcatcggcctgggccgactcgccgcccgcaaacgcgaccgtgccgccgacgccggcatccgcatcttcgccatcctgtgctacgccaccccggtgttcttcctcggcctcgtgctgaagctcatcttcgccgtctggctcaacatcctgccagcctccggccgctccgacctgaactccgaaatgcagttcacccgtctggtatcgccgaccggcttctacatcatcgacgccatccagctcggcgacatgaacgtgctcgtcgacgtgctgcgccacgccgtgctgccggccgtcgccctaggcctgctgaccgccggcgtgttcatccgtctggtgcgcaccaacgtcatctccacctacaattccggctacgtcgaggccgcccactcgcgcggcgtctccgaaaagcgcctgctcaacaagcacgcctggcggccggccctgatcccgatcatcaccgtcatgggcatgcagatcgccctgatgctcgccggtgcggtcctgaccgaaaccaccttcgaatggaagggcctgggcttcatgctgtcccagtacctgaaggcccgtgacttcgtggccgtgcagggcatcgtgatccttatcgccatcatcgtggccgtcgtcaacttcctcgtcgacgtcatcgccgcgcttatcgacccgagagtgaggtactgagatgaccaccgcatcctccgacaagatcaccgtccccggtgacgaccgcctcaccaagctcaacgtcagcaccaagacgccgttctggaccaagattccaatcatcaaggaactgcgcgtggcggtcggctggcagaagggcatgctgatcaccggtctcgcgatcaccgcgttcttcctgctcgtggccctcttcgccccgctgatcgccccctacggccacgcccagatcaaggccgccgacggcacgtccttcccggcgcaggccgcgccctccgccgaacacatctggggcaccaccgccgccggattcgatgtgttctcccgtgtggtgtggggtgcccgcaccgccgtcatcgccatcgtcgtggccgtgctgctctccatcttcgccggcgtgctgcttggtttggtgtccggctactacggtggctgggtggaccgcatcctggtgatgatcgccgacgccgtctactccttcccctcgctgctgctcgccattctgatggccatcatgatctcccacggccagtccggcctgtggagcggcatcctggcctccggcatctccatcaccgtggtgtacatcccgcagtatttccgcacaattcgcgccgaagtgatccgcatcaaggaatccgcgtatgtcgagtccgcgcgcgtggtcggcgcctccacctggcgcatcatgaccaagcacctgttcaagaactccacccgcacgctgccggtgatcctgacgctgaactcgtccgaagccatcctgaccctcgccggcctgggcttcctcggcttcggcatcgagccgaccgccgccgccgaatggggctacgacctgaaccgttcggtttccgacgtgaccgccggcatctggtggaccgccgtgttcccgggcatcgccatcgtgcttatcgtgctcggcatcacgctcgtgggcgaatcgctcaacgatctggccgacccgcgtctgcgcgcccgcaagtccgccggcgaagtggtcggatcgatcgaagacacgtccgtcgacccaaacgagaagccgtccgcacgcaacgaggtgatcgccgaactcgacgcgaacgtcgacccgccggccaccgtcaccgaccatgacccgaccatcgtcgcctccgaatggaccggcgaaggcaagccggaaggcaaggagtgagagatgagcgaagacaacaagaatctcgccgatatcaaggacctgtccgtctccttcatgaccgacgccggttccatcaaggccgtcgaggacgtgaacttcaccattccgcgcaagaccgtggtcggcgtggtcggcgaatccggttccggcaagtccgtgaccgcgcgctccatcatcaagctgctgccggagacggccaccacctccggtgccgtctacctgtccaagcgcgatggctccgattcgctggacgtgctctccctgagcggcgaacagctgcgcgaagtgcgtggttccgaggccgcgatggtgttccaggagcccaattcggtgctgaacccggtgtacaccatcggctggcagattgaagagggcctgtgcgcccacggcatgaaggacaagaaggaactgcgcgccaaggccatcgacatcctgaagaaggtcggcatcccggatgccgaaacccgcgtggactactacccgcaccagttctccggcggccagaagcagcgcatcgtcatcgccatggcgttggtgctgaaccccggcctgattctggccgacgagcccaccaccgccctcgacgtgaccgtgcaggccgaaattctcgacctgctgcgcctcgcccgtgacgagttcgacgcctccgtgctcatcatcacccacaacatgggcgtgatcgcggacatcgccgaccaggtggtcgtcatgtaccgcggccacgtggtcgagcagggcgacgtggagcagatcttctaccatccgaaggacgactacaccaagcgactgctgggtgccgtgccgcgcatcggtcagaagctggtcgtgcgcgaccgcgagggcaagccgatcgagcgcaaggccgattggcgcgaacagccgatcgccgttgaggccaagaacctgaccatcacgtacccgggccatctcatgcagcccgacttcaaggccgtggacggcgcgaacttcaccatccaccgctccgaagtgctgggcctggtgggcgagtccggttccggcaagtccaccaccggccgtgccatcgccggcctgcagaaggtgtccggcggctccctgaacgtgcttggcatcgagatgaacggcgtcaaggagcgtgacttcaagcccaagcgcgcggacattggtttcgtgttccaggatccgggctcctcgttcaacccgctgatgaccatcgcggagaatgtggccgagccgctgctcgtgcaccacaagtacggttccgtggccgaggccaagaactatgtgggcgacctgctggagatggtccagctgccgcgcgcctacatgaaccgtttcccgcatgagctgtccggcggccagcgccagagggcgtctttggcgcgtggtttggcgttgaagccgtcgctgctgatcgccgatgagccgacttctgcattggacgtgtcggtgcaggccaaggtgtgggagctgttcaagcgactgcaggcggaaatcggcttcgcgtgcctgttcatcacccatgatttggcggtggtcgatatgctcgccgaccgcatcatggtgatgcataagggccagatcgtggagcacggcgatgccgaccagattatgcagcacccggagaacccgtacaccaagaagctgctggcctccctgcccgtgcccgacccgcgcgaacagcagcagcaccgcgcccacctccacgagctcctagcccaagaggcgtaatcgcatagcattggagctccctcgtcagagggagctaactttatatccgctagtactgctgcccatcgaactggaacagggcgtgggcgtcgccgtgttttttgttctcgatgtaagtatggaacagctccagccgctcgctcgtgctggccgccaagggagtgggcaggtcatccagatcgaaccagccgacgctgaggctttcctcgtcgcccacgaacggctcggcattgccgccgggcttcagggcgcacaggaacgaatgatccatgtacatggtgttgtcgccattggcgtaggtcagcaccttgtttgacgaggtgacggccaccaaatcggtgacgatggcatcgatgcccgtctcctccttgatttcgcgcaccaccgtgtccgccggctgttcgcccggctcgttgatgccgtagaccatcgcccattcgcccgtgtccgaacgacggcccaacagcagttgaccatgttcgttcagtacacaaccggtcacgccattgagccatagcagatcatggccgatcttcttacgcaattccaacacaaattccggagtaggcacattgcctccttagtagaaaaaaggagctccctctgatgagggagcttaagggttacttggcttgggcagcctgcttaatatggtgcgcttcacgcatgatttcattttcctcgcgcttgtcagcgttcggcgtcgcctacaatcagtccacaggactgattgctttacggctccgcatccacgcttcgacgtcgtcgatctgcttcgggatgccggcggaaatccattcggggccattctcggtcatgagcacgtcgtcctcgatacggatgccgatgccgcggtattccggcggaatcagcagatcatcctcgcggaagtacagaccgggctcgatggtgaagatcatgccgggcgtgatcttcgcgccctgataggactcatagcgggcctgcgcgcaatcatgcacatcaagacctaggtggtgggccacgccgcaggcgagccaacggcggtgctgctggccttgcggggacagtgactcctcgacgctcaccggcagcagaccccaatcgtgcagacgctcggcgatcacacgcatgcaggcgtggtggatgtcggaataggtggcacccggcttggcggcttcgaaaccggcctgctgcgagtccagcacggcctggtacagacgcttctggaagtcggtgaacttgccgttggtcgggaaggtgcgggtgatgtcggccgtgtacagggaatcgacctcaacgccggcatccaccagcagcatgtcgccggtcttcaccacaccggtattgcgcatccagtgcagaatcggggcgtgggggccggaggccacgatggagtcgtaaccgatggcgttgcccagctcacgggacacggcgttgaacgcgccttcgaggatacgctcggaacgcggcttgtcgagcgcggccggcagtgcggagagcagacggtcgaagccgtgcttggtggcgtccacggccttgcgcatctcgttgatttcgtagccgtctttgaccatgcgtgcctcggcggcgaactcgtgcagcttgtcgtcggatgcggagttcttgtccggatcggcgaaaccgttggcctcgcggatggactcgaccatcgaggtgatttcgggatcggtctcgctgaccacgcgcacacgcacggcgccggcctcggcacccacgtccttggacagggcgtcggccagctgggcgatgtcgtgggtctcgatgccggtcatcgcctgcatctccttgaggccagcacgcgggccaacccagtattcgccgtagtgggcggacatgaagaagtcctcggtggagttgtcggcgcgaggtgccacgaacagttccggagtgtgcgtcttgccggcggcggcttcgggggagtcggggtcgaccgggttcaggaccagcacggcgccggcctcgtaatcggaacccagaccggtgtagtaggcgaacgtggtgtccgggcggaacatgtaatcgcaatcattgttgcgcaccttcggctggccggccggaatgaccagacgctcgcccgggaaggctttgcccagcgcctcaaggcgggctggcgtgaacttggaggattcgagaggcttgatctccggatcatcgtcggcccagccggacttcataaactccttgaatgcagccgactgcgggcgcagcgagcggttgttcacacggtcgctcatcgactggttcgcgcccggcgccgtagcgcgctcctcggcctcatattccttgtccttggcggtgatcacttcacccattgccactctcctgtatgtagttgttgtcgaatcatcgattcccacctcatactagtcggctttatgcgatgtgccacgattgacggctgacggtaaaaccaagtacggaatttggacggtcttccggacatgcccatatggcgagtgcatcgggctggaatgcgggcccgtttattgttctcggtagggaaggaggggcatgggctggagcttgccgattgatattggcatattttgcgggctgaatccatgtgaacccatgcgatgaaggttcatcgcatcacgggacccgctgctctgcggatgcctccatctggggcactctggctttgagcagttttacccgcagcggagtgcgttcgatgacgtcggcgtatgtgaaatggacgatttcggtggcaccggctcgtttcagtccctcgtcgcgtgctcgttccttggccaccacctcctgaatgctgcggttatcggtcatggctgggtccacgtatttttgtgtgccgtcgtattcggccactatcacgcgcccgtcatcgagcttccatacgaaatcaacgcggtgctcggtattcgtctgcgggtcggtcaccgttacctgaatacgcggcgtgaggaagcgatcctcgatgatggtgcctcgcgcgagggattctccaccattctcgctcctttcgtttgcatagcgcagcaggcggaatactcgggcataatcgattctccattgaacgcagtcggcggctatctcttccttggttattcccttggcaagggccgagtcaaagatcggcaacgcaaaccgaaaatcaaggtctatagcggcctcgaccaaggttctagccggtgatatcagggataggccggaggcctcgtaatgtgtcttcggattgttcatatcgggcatatagacatgtcgtaagcgctgatggcattgacgagatccatgatcggaagtcacgatggttatgcagccatcatgcaaatgccattgatgttcgaatccataggcgcttactgccaccaagccgccaaaaacccactgaggatgctcttgcgcaagagcgcgggccatatgcaacgttcgctccggcggcgtcaaaccatcccagtatgcggtatttgcataaagactgggaatgccgtcatacactttcaacaactcaccactctgggcacggcggcgtagagcggtctgttccgcttcatttcttgaatagacgcatctcagctcattctgcgcggctgatatgagcgaggccactgctttgtgtgtcttcatgacgtcgagcgtagccggaacgaagcagcgtaagtatgaatttcagccattgtggttctagcctcggagcttggctgtcttggagtgagatattcccgataatttcaaggtattaggccgctaattcggaatagtggataacatacaaaacttatccaccatcagtaatgtcattcgaacaacgtgctttggggattcgaacaagatatcatcggcgaagacggatgtagctggtagagggcggcgaattgacggttaacggtgcttatgctttgtacgccgtcggtgctggttcagatattggctggcttctgtctgagtgtggaatctagcgtcggcgtgagtccaatggttgtatcgtggccgacgatttgctgcgatttattggcggcatagatccagggcttggacggctgccgacggtgagagcagtcataacagtgaatgagcctctgcgagttcaaaagatgatgtagaggacgtttgtgagagtcgtttccggggcaagacatggtcgattgacgatgttgaaatttctcagcgacggcagaatggcatgccttggcgaggaggcgacactgagaggcgatggagtcgggattaatccaggttttggccagctaccgactcgcaagagcatcatagcgtcggtgtaccgccagaagctggcactgtaccgacgctgaatagcatcagcgtcgccggacatacaagttttggattgcagccgactaagaatgggatgccgacggcaagagccgcattgcaactatatgagatggcttcactgtgcgcgctgcaggaaaaggccgcccgcgcggcggcgacatatgagacggtttcactgtgcgcgcacgataaaccaccccggcggctaggatagagggaattgagggagtgcggctccacgcgtgaaggcaagaatcccgaaccatgcagggcaaacctgtgcgaggggagcttcctgcgcatgcggaagcggaatatatgcgggcatgcgtagacatgacgagaatggcacgaacacgtaagtggcatacgcactccgaacggttcaacagcaacacgagcagaggtcagaagaggatatgtcattcgagcatccgaatcggaacaacgagagcatgcgggacgtcgaactggacatcatgagccgcccgccggagcataacaccaccaatctggatctcgaccggatgaacctgatgctcgacatcctgggccacccggagcagtcgttccgcgtgattcatatcaccggtaccaacggcaaaggctccaccgcacgcatggccgaggccatctgccgcgcctacggcatgcgcaccggcctgtacacgtcgccgcatctggagaagatcaacgagcgtatcgccatcgacggccagcagctgtccgacgacgatttcatcgacatctgggaccagaccaaggatctcgtggccctggtggacgccaagatggaggagcaaggcaagccgaagatgagcttcttcgaggtgctcaccgccatggccatctggaagttcgccgacacgcccgtggacgtggccatcgtcgaggtcggcatgggaggcctgtgggacgccaccaacgtgctcaacgcggatgcggccatcatcggcccggtggacatggaccacatgcagtggctgggcgacaccgtcgaacagatcgccaccgagaaggccggcatcatcaagccgaactgcaccgccatcatcgggcctcagccgcatgaggaagccgtcatgccgattctcaccgaagccgccgaacgcaaccacgccatgctcgtgcgcgacggctacgaaatgaccgtgtccgaccgtatggccgcagtcggcggccaggtcgccaccctgaccacgcccaacggcacttacgagggcgtgccgatcgccaagttcggcgagcatcaggcccacaacgcgcttgccgcgcttgccgcctctgaagtggtgattccggtcaatggcccgctggacggcgacttggtgggcgaggcgttgagctcggtcaagattcccggccgcatcgaacagatccgcacctcaccgaccatcattctggatggcggacacaacgtgaatgccgccgaagccctacgcaaggccatagaggaaagctacgacttcaagcagctggtcggcgtggtcgccatgatgcgcgacaagcaggtcgaggaatatctgggtgttctggagccgatcctgagctccgtggtggtcaccgagaactcgtggcgcgagcgtgtgatgccggccgatgagctcgagaagattgccgtggacgtgttcggccgtgaccgtgtgatcaaggaagcgaacctgcccgacgcgattcagactgccgtcaacatggtcgatgccgaggacgagctgggcgtgggctacggccacggcgtgcttatctgcggcagcttcgtcaccgccggcgacgcacgcctgatgcttgaggagcatgccagccccacgatgaggcaggccatggccgtccatcagccggcggtcgacccggacgattcggatcggccggcagacaaggccgaggatgaggccgccgacaacctcgaggattcggtgagcccggacgacttcgacgtgttcgacgtcctcggcctcggcaaggaacaggccagtgacgccggtaacgccggcaccggcacggccagtgccgacacaggcaccgacgattccgccgacgtccggtaacccgcatccaaggcacatcggatacccggacgcccgacatacggaaaacagtctcacgccatgtatctcaaggaactcaccctccgcggattcaaatccttcgcctccgccaccacgctgcgcttcgagcccggcatcacggcggtcgtcggccccaacggttcgggcaagtcgaacatcgtcgacgccctgacctgggtgatgggtgagcaaggtgccaaaaacctgcgcggcacttcgatggaggacgtgattttcgcgggcacgtcctcccgcccgccattgggccgtgcacaggtgagcctgaccatcgataattccgatcacacgctcgatatcgattacacggaagtcaccatatcccgcaccatcttccgcaacggcggctccgaatacgcgatcaacggctcgcaatgccgtctgctcgacattcaggaactcctctccgataccggtcttggccagcagatgcacgtgattgtgggtcagggacgattggatgcgattctgaaggccgacccgtccggccaccgcgcgttcatcgaagaggccgccggcatcctgaaacaccgcaagcgcaaggaacgcgcgttgcgcaagttggccaataccgaaacgaacctgagccgacttgacgatttgctgggggagattcaccgccagctcggccccctcggacgccaggcacgcatctcccggcgcgccgacgcgattcagatatccgtacgcgacgcccaagcacgcctgtatgccgaagacgcccaacgttcgatgagccgccgcgacacggtacgtcaagagcttggcgatgtgcgcaaccagctggccgtcgcccaacgtgaactcgcccaagtcaaagtacgcatcgaacaggtcgaggcgttgagctctgaatccagtccggccatcgccaaggccaaccaatactggcatgaattctcacagacccgtgaacgactgaacgcgctcgcccagttggccgaagagcgcagccggtcactcaccggccagatcgtcaccaacttcggtgaggatcccggcatgctcgtcaaacgagccgaggaactggagtctcaggccgcggcacaaaccaaggccgtggccgatgcgcgcatcgcactcgacaaggccaccgaggaacgcgccgacgacgagaagaagcttgcctcagtccgccagaccttgacggaactgcgcaaaaccgcacaggagcgcgatgcgcagatcgcccgactgcgcgaactcatcgcccgcgaggaatccgccgtgcaactggcgaccagccgcgccaaggattatgcctcccaacgcgacttgctgacttcccagcgcgacgatgcccagcaacagctggacgcattgcgcagcgaagcggactccattgccgacgatgacggtgccgcattggacgccgcgcgtgcgacgctcgccgaatgccgcgaacgactgaacgaactcgccgataagcagcgcgagatacagtccaagatcatctcgctcaaatccaaggccgatgcgcttgccgacacgctaggcagccgcaatgcctccggatcgttggaacgcgacacggacgtggcctcgcttggccgactcaccgacttcatccatgtggccgaaggctgggaagaagccgtggcccacgcgctcgaccagtatgccagcgccatcgtggtacccgaggcaggcaacatgttgcacgccctcgaacgcgctcgggaagataagctcggcaaagccgtggtgctgaccgcgagcattgccggcgatcccgccacagagccaggcacggagtcggaggagagtagcgccgagaacacggcggccgccccgcgatcgggcaacgcgctggcagcactcgtcaccgcgaacccggatgcaaagaacccggcacaggccgaagctgtcgtgcacaccgtgcgtctcctgctggctgatgtagccatggccggcaccgccgacgaagcacagcacatcgtggcatccggcgaagccatgcgggccgtcaccaagaacggcgagaccttcacacacggcgtggcggcggtcggcggctcttccatctctcaatcggacctgtctctggccgcccgtcgagacaaagcattggcacaggtcaaacagttggccgcccaagacggcggaatggctgagcaagtggccgaggccaaagccaaacgcgatgaagcggcccgactcgtcgaccaggaatccgccaaacgcaccgaagcccggctcaaagcccaacaggcggagaaatctctgaaatccgccacagaccgcgtcgcatcgttcacccgtcagcttgagcagctggataggaaaatcaccgagacccaagagaatcgcaacgagcatcagctcaagctcgacgatctcaatcgcgccttggcatcggcccggcaatccacagcggaacatgccgatttcgacgaacttgatgaacgtgaacgcacgctggagcgcggactgaacctgactcgcgagcatgaggtcgccgcgaaaatcgcgtggaccgaagcaagccgcaaaggggagtcactgagccgacaggccgggctgctgcgggacaacgccagagaagccgccgaacgccgcgcccgcatcgaggcgttgaacgatcgcagacgcgagcaggccgcacacctgcaaggcgtggccgatgacgcgcgagcagtggccgccatggtggagcatacgctgcatgacgtggccgccaaacgagacgagctgcaggccgccgcctccagccatgacgaggaactcaaggccctgcgcgcgcagcgcaaccagatcgagcccaaggtcaccgatctgaccgggcgcgaacatgccttggatgtaaaccgcgaacggttggccgccgaatccgggcagctcatgcaaaaagtgtccgacgaactcggtctcactttggaggaattggttagtggttacggccccgaacagccggtgcccgtgctggatgatgagggcaaccctgtgccgttggatgagacggaagctgaggctgagaccgaagagggagaaaccgggggagaaaccggcaccaacggcgattccgccctctttaagaccgtgccgtataaccgtcaggagcagaagaagcgtctcgataaggctcgccgcgatctggccgcactcggtaagatcaaccctttggccaccgaggaattcgaagcgcttgaggagcggaacaagtatctcaatgatcagcgcaacgatgtggtcaaatcacgtgacgatttgatgcagctcatcaaggatctcgattccacgatggtccaggtgttcaaatccgcgttcgacgataccgccgaggcattcgagcagatgttcgccacgctgttcccaggcggcaccggacgactgcgcctggaaaacccggaagacatgctcaccaccggcgtactggtcgaggccagcccggccggcaagcgcgtcaaacagctgagcctcctgtccggcggcgaacgttcgctgaccgcgctggcgctgctgttcgcgattttcaccgcccgccccagcccgttctatgtgatggacgaggtcgaggccgcgttggacgacgtgaacctgacccgtttgattaatgcgttcaatgagctacgcgcccatgcgcagctcatcatcattacgcaccagcaacgcaccatgtcgattgccgacgcgctttacggcgtaaccatgagagccgacggcgtaacagccgtggtgagtcaaaaactcgaacgataaacgaatggttcccgctgacaggaactggtaccacaggtgacagagggcggtccatatcgaaagaccaccctcagtctcgcttcgttcgacagctcccgccagcgggagcggggcggtattagcgcaatgccttgcgcacgccctgtacagtctgcagcgtcttgtagaagaccttcttgatgggtacgtcgcgggcgggggccaccggggtgatttcctcggtgaacttgcacttgaactcgttaaggcccttgagagacggcgcgaagtcggagccaatgcccatgagatcgtattcagtaataccctgcgagcctaggatgcagcattcggaatacagcagcttgtcggtcacatgcagacgcataacctcgttgcgcatgccggcatagtagcgcaccgcatgcgtgccgttcacggtgacaatcgaccatgccaccacacggtcttcaatacgtgcggcgaacacacggcaatgatcggcacccaacgcgccgatcatatcggaatagtcgctcatcggagcaggcgtgaatccatcgcgctggccggtctcgaccatcacatcgtaatattcggagaaatcggccagcgccttatccgtctcatcggcaacctcggccgggcactcgcgcagagacttgcgcacgtcacggcgtccacgacgcttcatccgagccagaatctcatcatcgccaccggtgacgtcgatgaccacggtctggtcgtacggcactgtggacagcaccttctccgtaccattggcgaaccaggtgtcgatacgcaggaacgcgatgttcttgtcggccttcttgacgttgtccacgatggcgtcgacgacctcgcgctcctcagcctcggtgggcttggcgacccacgccggcccatgcatcgagcgcagataatgataaccgtgcgtctcaaaatcgataaaggagatcacggcgaccaattcaccatcacgcttgatcagataatcgccccatggtgtgcgtccgtcgagatccgcctgaaaaccagaccaaaccttggtctgttcgataggcaacgtgatgccggccttctcggcttcggcttccagtgtggctccgtcaactttctccaacgtgatcattacgattcagctatcctttttcgttcgtatccgtatgtcgggtttctggtttggtcgtattgcgcgtgatctgatgtgggccaatcgggatccgatcaggatctgattggccggaatcccgtcacaagccaaacatgcgttcgacgacgtgatcgtcgccgtcgaacggcacatgcttgtgatggtccttgatccaacgctcgttgcccttgccgataatcagcaggatgttgaatcggtcggcgtgcgcacgggcatcgtaaatggcgttggtgatggccgtcggacggtcggaaatcaccgtggaggccacatccttgttcgtgatgtagccttgcatttccatgcagatgtcgatgaacggctcggtgtccgtatcttcggcggtgaaaatgaagttcgcgatacggttctcggcagcctcgacgatttccttacggcgatcgtaagccttgttgccggccgatccggtcaccagcgtgatacgcgggttttcctcgccccaacgctcgtagacgaagtcaagcagcgcggtgacggatgcgtagttgtgcgcataatcgacgatggcgagcgtgttcgactgcggatcgcggaactgttccatacggccggcgatacgtacggattcgatggcgtgcagtgcgtcggcgtcatcgagcgatacgccagccgcatgggcgatggcgatggccgccgccgcattgaggtagttgaagtcgccatcgatggacagatggtagtcgccaagggcctgatctccgtcggcgatgtggaaggaggcgtgctccgggtcggcgggccaggcgacgacgtccgcactggtgccggcattatccgcgtcatgcagggcgaaggtggttgcgccgatgccggctgcctccgcgtcctcccgcaacagatcggcgtgcagactgtccgcgccgagtaccagcgacttcgcgttggcgatgatctggcgcttgcaatacaggtaatcctcgaacgtggggtgttcgatcgggctgatgtggtcgggggagatgttgaggaacgcggccacatcgaaagtcagtccgtagacgcggtccaccttgtacgcctgggaggagacctccatcaccagatacttcatgccgttatcggccgcctcgcgcatcatgcggaaggcgtccatcgattcgggcgtggtcagatcggattcgacgtaggtgtggccgtcaaggcaattatcgaccgaggagaacaatgcggccttgccgccggagacggcgttgataagcgcctgcgtgaagtacgaggtggtcgtcttgcccttggtgccggtgacgccgatgaccgtgagctcgttctgcggatatccgtagaacgcggtggacagcaggctcatcgccttgcgtgcgtcgttgacgatcaggccgggggtggcggttgcggctgagtactcggtttcggccacgtatgcggccaggccggcttcgtcgatgccgttcagatactcggccttgaatcggcccttgcagcacagcagggtgcccggcgtgaccttgcgggtgtcgtaggtgatgccggcgaacggttcatccgccgaagcgatacgggccgggtcgtcggtccagacatccccttggatgatttcacgcagcagatggtgttccttgagcaggtcagcggccgaagccaaagtcaaagccataattgttactccctattatctagccgatacgccattctacaggtggggtgtagcgtgttgtggctcacacgtcatcgaccacgatatgggcacatgatttgattagaatggtgaaccgtgacgacaagcgaagcaactacgcaatccgggcagtcagccggatcgggcgagtccatggcagccaagcgcgccagattcgagcagctcgccatgcccgccgtcaatgcactgtaccggcaggcgatgaggctgaccaacaatcccgatgacgcgcaggatctggtccaggacaccttcgaacgcgggttcaaggccttcgactcattccagccgggctccaacttcgaggcgtggatgaccaccatcgagcgcaatgcctacttcaaccagtatgccaaggccaagcggcgcccgcagcgtgccaacgactccaccggcgaatacgacgattgggacatttacgatgccgccgaacatacgtcggacgggctcaagtccgctgaagaggaatatttggacgccttcgcgcccgaggaaatcatggccgcgctcgccaaactctcgccggaacgccggcaggtgttcatcgacgccgccatcgacggcaagtcctaccaacaggtggccgatgagcagggcgtgaaaatcggcacggtgatgagccgcctgaatcgcgcccgcacgcaactcaagcgtgagctcgcctcgtatgcgaaagagcgcgggtatgcgactggttcgtcggctggttcaccatccgcgaagttgagcgaaaacgttggtcgaatcgccgattccggccataatgaaagtagtgaacaaactgttggcagcaatggcgacacgcaagccgtagtgagacatagtcatgcgactcacgcccacacgccacaacagtcaagcaagctttcgggaaaggagatctgatgaacgatcagccggtagagcgtactcgccatatctccataacccgtacggcggccgatggcacggtaagccagaccgaagtgcatatcacggcggtgcatcatcgttcagtagataccggctcggccgctgcgtcggtccagacagacgtgcatatcgttacggagggcgactgttttgacccccgtacctgctgcgacgagcgtgaacaggcgttgattgccgcgttgcgtgcctacttgcgcccggatgtggcgcccgaatgtctgatggcccggctcaaggccacgcttgatcactgctgcggcgaagataagtaacgacatatacaacaaggcccgtctgatgtatcatcagacgggccttgagcgttctataagaaacgcgaagaatcaggcgttaggacgcttgccgtggttggcggccttcttacgacgatccttgcgcttacgtccgcgcatgcccatgatggactcctttgctgcagtaaaaaaataagccttcggaattatgccacataagtacgacgtgatgcaacacgggtgtccatgtggcgatgatcgtcaggcttggttattcggtttttcagatttgttcggcgtggaaggtgaccacggtggtgtagtcatcgcccggctcgagcacaaccagatccttgccggtgcggaaggcgtcggcgtaggcggtcatcggttcgacggccacgccggcctgacgagccttcccgccgatttcgttgccggtgcacacctgccaggagttgatggtcttgtcgccggtcagcgtgaccttgatgccgtcggggcgggtgaacgcggcggaagtgctgccgtcttcgccgcggttggtgatatcggtccaggcatcgtcgaagccacgtccctccagcgtggggttatcgcgcaggtcgaagatgccggaaaccggctcttcgccggtgggtagcaggtgttcgtctacggtcacgtgggtatcgcagtgcagctcaagacggcaggactcgttgtcggcggtaatggcctgaccggtggcgtgcttgccgttggccagccacgggtggatgccaaatgcccatggggccttcacgctgtcgttgttgtgcacggtgaaggtttccgtgagaccgttctcgtcaagtgcataagtggcggtgatggtgatatcaaacgggtagccggcgatgtcgggggagcgccaggagagcgtcacatgtgattcctgcaaatcaacgagctcccacatgtagcggtaggcgtagccgtgcagggaggattggcggtcgaactcgtcgatcggcatctggtagtcttcgccatcgaaagaatactgaccattggtcacgcggttcgggtacggtgccagcacccagccgttgcagcaggggatgaccttgttcgggtcgaaggggacgatgaggtcttcgccgcgccacttcagctcgcgcaggctggcacccagttcggtgacgacggcactccattcgccggacgagatgacatattggttgccagtgcgaggcttcaaagccatagtgcacactcctttgtgaaacagattgttaccgctcacaatcgtatcgcacaagtcccaagacgcggcggcacataaggataaaaaattggctcccctctggaggggagccagcgtaacggaactacttctggactacttcgtagcggaccacagtggtgtagtcgccattgggggcgagcgtcaccaagtggtcaccagtgcggaaggcattggccggggcggtcatcggttcgacggcgataccatacggatgctcggcgaacggcgcgccagtggcggtgtagcactgccaagcattgatcgtctcatcgccaatgagcttcacttcaataccgtccgggcgggtgaatgtggtggtggtcgtaccatcggcggcacgctccacgtcgacccaggcatcatcaaaggcgcggccttcgagcgtcgggccatcgttcaggtcgtagatgccggtaaccggttcggtgccggtgggaatcagcgcctcgttcaccgtcacatgactggcggccttgatctgcaggtggcaggcggcggagtcggcgtcacgctcggcggaagtcgcgccctgcttgccgttggccagccacggatgcaggccgagagcccacggtgccggctcgtcgccatcattgcgggcattgacggtcacggtcatgccgttgtcgccgagttcgtatgtgacggtcacggtcacatcgaacgggtatccgtccaggttggggaagcgcagtgaaagcgtcacggcgctatcggtcaacgattcaagcttccacatgtagtggtaggcgtatccgtggttcgcgttgttgcgcggtgcgggatgatattcgttgaccggcgcgcagtaatgcttgccattgaaatcgtattcgccgttttcgatgcggtttggccacggggccagcacatagccgttacaggtgggggtcaggtcgttgactccgaacgggcagaaaatttccttgccttgataatcgaatcggcgaatcttggcgccgagttcgcagatgacggcggaataatcgccatagtgaatcgaatactgatttccggtgcgtggtgttttactcgtcatggaatcactcccgtagtgaggttggtgggccggtagctcctgctatcgctggccccagtctagcgcgtctcctctatcgaggcggggattggcgatagccggcatataataaacaattcgtacagacacggtagcaatacgtggagtgacgagtctcacaccatcatgcgagaagcacgtggattccttggaaaccggtgattcgtgggagacgcggaaaagttgtgacggcagattcctgtaatccctgctttacactggaaaacactattgacgttcaggaggttccgatgaccaaaagcgttgtgctcgctgatccgcgaggcttctgcgcgggtgtggaccgtgcgattcttaccgtacagaccattctcaaagccgcggaggcttccggaaagctgacgcgcgaggatgggctgcccccggtatatgtgcgccggcagatcgtgcacaacaagcatgtggtcgaggacttggccgggcaaggcgcggtgttcgtccaggaattggcggagattccggatgctgctgcccaagcgggtattccggtggtgttttccgcccatggcgtatctccggtagtgaaggcggaagccgaacgtcgtggcatgcatgtggtggatgccacctgccctctggtgggtaaggtgcaccgtgaggtgctgcgtttcgtgcgcgaggggtatgaaatcgtctatatcgggcacaagggccacgatgaagcagtcggcgtggtgggggagaaccccgaacatgtgcacttgatcgagcatgaatcggatgtcgattcgttggattttgcgcccgacaacaagctggtgctgctctcgcagaccacgttgagcgtggatgagaccgccggcaccattgccgcgctgaaggccaagttcccgtggattcaagagccgccgagttcggatatctgctatgccacgtcgaatcgtcaggctgcggtcaaactggtggcccagcagtccgattgcgtggtgattgtcggatcggccaactcctcgaattccgtgcgactgatggaggtggcgcaggagggcttgggagagcgcggcaaagcgtatcgcgtggatgatgccagcgagcttgacccggcatggttcgagggtctggaatccgtaggtatctcctcaggtgcctccgtgccggacgaactggtgtccggtgtgattgacgctctgcaaaacttgggcttcaccggtatgaagtccgtcgaaaccatcaaggaaaacatgcacttcgtgctgccgtcggagttgcgcaggaagaagtagtcatccttggctcccctcaccgagggaagccaagaacggtcaccacgtgccgattggtgcggcaacggcgttcaagaccttgagcaggtcctgcgggttcacgcctacggacagtccgcgtttgccgccggagaccagaatctggtcgaattgcagggcgctttcatccaacacagtcttatgacgtgtcttctggcccaacggcgagatgccacctaccacatagccggattcacgcattgccaccttgggatcggccatagaggccttcttggcacctacagccgcagccagggccttcaaatccatatgtccgctgaccggtaccacgcccaccacacgctccgaaccggtgtccgccatcaacgtcttgaacacctgatgctcgtcgaagccgagcttggtggccgcctccacgccgtagccgtcatccatatggtcgttggagtgctcgtattcgtatacgtggaattccacgcccgccttctccagttggactgtcgccggggtggaacccgcgcccttatcatgcttgcttttctttgccatgattaccgttctactacgaagagacccccgcacaaggcgggggtctcacagcttagttctcaaacgaaccgtagcggcctagaccgcagtggttcactcggagatctcagcgaagtacagcagggtacggatcatgttggaggtgaagccgtactcgttgtcgtagaaggacacggtgcgagccagggtcacgccgtcaatggtgttgacgtcggtctgggtcgggtcgaacacgccaccgtgggtgtcgccgaggatgtcggaggagacgatgccctcatcgttgtagccgtagtaatcggtgtcggagaaggcagccttgaaggcttcgttgatctcgtcggcggtggtctcggtgttcagaacggtggtcagctcggtgacggagccgtccggaacctggacgcgctgggcgtggccctgcagcttgccgttcacggacggaacgaccttgccgatggccttggcagcgccggtggagtgggcgatggtgttgatggcggcggcgcgcaggttgcggccggtcttggtgccacgcgggccatcgagcagcatctgggtgccggtgtaggcgtggatggtggtcatgaagccggccttgatgccgaacttctcgtccagcagcttgaccatggcggccatggagttggtggtgcaggaaccggcggagacgatcacgtcggaagccttgaggatgtcgtggttcacgccgaacacaacggtcggggtggtgtcatccttggccggggcggagatcaggaccttcttggcgccagcgttgatgtgagcctgggacttctcggcggaggtgtagaagccggtgcactcgagcacgtactcgacaccgtcgttcttgacccacggaatgttgttggcgtccttctcggcgtagaccttgtattccttgccgtcgacgatgatggagtcttcggtggccttgacgtcaaccggagtgccatcgtcatgacggaaggtgccgtgggtgctgtcgtacttcagcaggtaagccagggtagccggggtggtcagatcgttgatggcggcaacttcaatgtcaccagcctggccgccgcgagcctgcagctcgaagatgcgacggaaggcgagacgaccaatgcgaccgaagccgttgataccaatcttaactgtcatgtaattctcccttgtagggtggccttggcgcgctttggcacaccgggccattgtttaccaacagttgctactgtaatgccgactctgtacacatggcaacgtttcagcgtgcgttttgggtaaaaatgccgtattttttgtgagcgctcacaatttggattgcccgcaaccgacatgtgattttcctctcctttggaggaatgtctcgaatcatcacgagcaagcgcgcggcatgcaagtcagcgaaccagcagcttggacacttcggtgtccagctcgccgatatcgccgccgaattcatggaatctgctcacctgtggcaacgccacttcgatggggaaggtgacgatcagtgtgccgcgtttcacgctgatggccgcgtccacgccgtcgcggaactcgttgctgaccccctgcaccaccgtattggtcagcgtgccgttcttgagctcgtatttcagccccggttcgttcacgccaagcgaaacatcggagtgggagaacgccgacaccatgcggccgtcctcgggcaccggatgcgcggggaacgaaagcctgccatcggtgatggccgtgacgatgagcccgtcgccatacagatacccgcttgccccgtgtcgggccagcagcgccatcagttgaatgccggaaatcgtatggtcaatacggccgccaagcccgccgtacacgtgaaactcgcggcaacccgccgaccagccgaccttcagcgcggaaagcatgtccgggtcgtccttcaacgcgggcagcgcgatggtgcgcacatcggtgcggggcggccggccctccagcgaatcgaagtcgcccaccaccacatcgggcacgatgcccaactcgcgcgtatggtcgagtccgccatcggccgcaatcacatacgcaccggtgggaaccacgggcgtgcccgcatagtattcgcccgcaccaaaaatcacgcatacctgagtcattatgcctactgtagccggtatccacccatcgacacacggtccgcgaatgtccgggcatgtggtaaacttcctatttggcttgaggaatcaagaaagcggggcaaccccacctggaagcctttcaaggcctcgggttcaaggcaaacagcctagcgattgcgatatacaacgcgcagtcgggaatgacgcaaagaactgatatgcgtctgcagaagctgagcgcatattggcgctggttttggcttgccatgaacccaaagcattgaacaggactccagcaaaggccccgccacggaattgaagtagaggattggagtcatcatcagcgacgaaccacgtattaacgacgagattcgcgtcccgcaggtacgcctgatcggcccgaagggcgagcaggtgggcgtcatcgcgacttccgtcgcgctgaacctggccaaggaggcaaacctcgatctcgtcgaggtggccccgaacgcgaagcctccggtcgccaagctcattgattacggcaagttcaagtacaacgagaagatcaaggctcgtgaagctcgccgcaaccagagcaccgcggaaatcaaggagattcgtttccgcctgaagatcgacgaccacgatttcgacgtgaagaagggccatgtgacccgcttccttaacggaggcgacaaggtcaaggtcaccatcatgttgcgcggtcgtgagatctcccgcccgattggtggcgtggaactgctgcagcgtctggccgacgatgtcgaggaatacggcaccgtcgagtccaagccgaagcaggagggccgcaacatcatcatgacccttgcgccgaagggcaagaaggtccacacccagtccgagcagcgtcgtcgtggcgccgagtcccgcgccgagcgtcaggctcgccaggcggctcgtctcgcggccaagcaggagtctcaggctcaggccgcggccgacgcgcagtccgcgatttctcagaagacttccgacaagaagcaaaccagcaaggagggcagcaatgccgaagatgaaaactaattccgccgcttccaagcgcgccaagatcaccggcaccggcaaggtgaagcatgtcggttccgccatgcgtcacaacctcgagcacaagtccgctcgcaagcgtcgtgaactgtccgccgacgatgtgctgcgcggcggccaggccaagaagctgcaccagcttctgcagaagtgagcatagggcttacccggaaataataagactttagaaagctgaggaatagattatggcacgtgtcaagcgcgcagtgaacgcccacaagaagcgtcgcgttgttctcgagagggcttccggctaccgtggccagcgctcccgcctgtaccgcaaggccaaggaacagctgctgcactcctttaactacaacttccgcgaccgcaaggctcgcaagggcgatttccgcaagctgtggatccagcgcatcaacgctgccgtccgcgctgagggcatcacctacaaccgcttcatccagggccggcgtctcgccggcatcgagctggatcgtcgcgccctggctgagatcgccgtctccgacccggacaccttcaagaccatcgtggccgccgccaaggccgccctgcctgaggacgtcaacgctccggttgaggcctgattgcttgaagtcgtgacttcacactagaaaccccgcttccgagcggggtttcctattattagcccccctctgacgaggggggctcccgcgcagcgggtggggaagagaacaaacacatgaccaacggattcaccagactcaccgagcagttcctcgtccacatcggcgtggagcgaggactcgccacggccaccgtcaccgcctacgaatccgatatcgccaaatacattgattggctcgaaacccgcggcatccacgaaccggacgccataaccaaacaagacgtcgaagactacatcgccgcccttgaccaggcgggggagtccgcccgctccaaagcccgaagactggcctcgatccatgaattccatcgcttcgcgctcggccagcacgcggtgactgccgacgtttctgccgcagtcaaggcacccaaaggtgccagcaccctgcctgacgtactcaccgtggacgaggtaacccgtctgctcgacgcggcggcagccggcggctcaaccgatccggtggtattgcgggacaaggccctgctcgaattcatgtacgccaccggctgccgcgtctcggaagccaccggtgtgaatctggacgacatcgacctggacgagcacatcgcgcgactcatgggcaagggctccaagcagcggcttgtgccattgggcagctacgcatgccgggccatcaccgcatacctcaatgcggggcgtggcgagctggaacggcgctccagcgccaagattcccgagagacgcgcactgtttctcaacaaacgcggcaagcgcatctcgcggcaatcggtatgggaaatcgtcaaagcaaccggggagcgggccggcatcaccaaaccactccatccgcacaccttgcgccattccttcgccacgcacctgatccaaggcggcgcggacgtgcgcaccgtgcaggaactgcttgggcacgccagcgtgaccaccacgcagatctacacgcacgtaagccccgaaaccctgatcgaaacgtatctgacctcacaccctagagcgcggtgagacacaccattttgcgacgcgtccgcccatagcggaatcgcggcggggggggggagcaccaaagtcggccggaaattcaaggcgtgacaatacagtacataacagcgaaccgtcagccaggaagaggtattcatgctgcagatcaaatcgatctcgaagcgctataaaaccggtgatttcgttcaacaggcgcttgacaaagtcagcctgaacctacgcgacagcgaattcgtcgcgattctgggtccctcgggttccggcaagaccaccttgctcaacatcatcggcggcctcgaccggtatgacgacggcgatttggtgatcaacggcatctcgacgcgccaatacaaggatcgcgattgggattcgtaccgcaaccacaccatcggcttcgtgttccagagctacaatctgattcctcatcagacgattctgtcgaacgtcgaactcgcgctgacgatttccggcatcggcaaggccgaccgtcgcgaacgtgcgcgcaaggcgctggagaaggtcggactcggcgaacacatcaataaaaagccgaaccagctgtccggcggccagatgcagcgcgtggcgatcgcccgcgcactggtcaacgacccggacatcgtcctggccgacgagccgaccggcgcgctcgattcggacacgtccgtgcagatcatgaacctgctcaaggacgtggccaaggaccgcctcgtggtcatggtcacccacaaccccgaacttgcggaacaatatgccacgcgcatcgtcaacctgcgcgacggcgtgattcgctccgactccgacccgtttgtcgtggatgagacggccgaacagccggccgtgcacaagacgatgggccgcgcgtcgatgtcgttcgtcacgtcgctggcgttgagcttcaacaatctgaaaaccaagaaggcgcgtaccctgctgacctcgttcgccggctcaatcggcatcatcggcattgcgctgattctatcggtgtcgactggcgtgaacgcatacatcagcgacatccagcgtgacacgatgaccgcctacccgatcaccatcgactcccagaccttcgacctgagcagcatgatgggcggccagatgggcggcgatgacggatacggcggcaagacgcacagaaccgacggcatctacccggacgaccgcagcgtcaagcaggcatccagcctgaccagttcgattaccgaaaacaacctgacccgcttcaagaaatacctggataattccaagagcgagattcaccagtatgtgggttccgccggtatccagtacacgtatgacgtgaaattctccgtgttcgaccacgaccccgatggcacgctggtcaatgcggacggcgtgacgatcggtgccagcgactccacttcaatggcctcgcagatggcgtccacaagctcgtccggcatgtccggcacctcgtcgatcacctcgcagcagatgtcgatgctgaccggcaaaaccgatgagaacgccgcgcccgactcgttcaatgagatcatgcctggagcggacgacagcaagctcgtaggcaaggtcatcaccgacaactaccaagtggtcaacggttcatggccgaagtccaaggacgaggtggtgctggtgctcgacgacaacaacagcgtgccgctgaccacgctgtacgagctcggcctgctgcccgcctccgactaccacgagatgatgtccaagctcaacgccggcgacaaggtcagcactccacaagacaagatcgactatgctaaggcgctcgaccagacgctgtacatgattccggcatccgaccagtacgtcaagggcgatgacggccactaccgattcatcggcaacgacaaggatgtaatcgaacagcgcctcgaaacggccaccaaactcaaggtggtgggcgtcgtcaaggcgaagaaggatgcttcggccacaccgttggccgctggcgtgggatacacgcgcgctctgaccaatgatctgatcgaccgtgcggcctccagcgccatcgtcaccgatcagaaggccaacccgaacacgaacgtgctcaacggcatgacgttctcgccctcggacgacgccaccaaggcggccgacgcgcgcacctacgtggtttcactgggcgtgacgcagaaggcgaacatggccaagtcgatgatgagtgccgggcagcggtccggtacgggcgcatcggatgccgctggtgctggtgctggtgctggtgctggcgctggcgcggcgggtgccggcgatcaggccgacgcgatggccgcgatgagcgaacagcagctcgccgacagtttcgactcgtatatcgccacggcttcgaacgacgtgcttgtcgcgatctacgaccagtacgtgtcgaccggcacctacgacgacaacctcgccgcattcggtgtggtgagtcgtgacgcgcccagctcgatcaacgtctacgccgacagcttcgaagacaaggaccacatcgccgacgcgattaccgactacaacaacaccgtctcgaagaaagacaagatcacctacacggattatgtggggctcatgatgagctcggtgaccaccatcgtcaacgtgatttcctacgtgcttatcgcgttcgtgtccgtctcgttgattgtttcctcgatcatgatcggcatcatcacctacatttcggtgctggagcgcaccaaggaaatcggcatcctacgcgcaatgggtgcctcgaagcacaacgtgtcccaggtgttcaatgcggagaccggcatcatcggcctatgctccggcctgttgggcgtgggcttgaccgtgctgctcgatattccgatcaacgccgtgttgcatcacttcatcggcaatgcggacgtcaatgccgccctgccggtgaccggcggcgtggtgctggtgatcctaagcgtggtgctcacgctgatcggcggcctgattccctcgcgcaaggcagccaagcaagacccggccaccgcactgcgcaccgagtaagcgcatcgacatagtacgagacgagatccataaacctcggaacactggaatgcccgctgcaaaacggtgttccgaggcgagcccggcgagtacattaggataggcgagcaggtattcccggcaaagggggcgagggcaacgatggacgactggcgagacatccgcgataaagacagcgcattccgtcaaggaacgctgcctatggcgggaacgtatgtcgttgcacccccagcgaacccggatgttgataaggtagacagtatgcctaccgatttgcttggacgtgaatacgaaaccttccccgcacccgaaccgctgcaacagcacggtccggcgcgtgtcattgccatgtgcaaccagaagggcggcgtaggtaagaccaccagctccatcaatatcgccggtgcgttggcccagtatggccgccgcgtgcttatcgtcgatttcgatccgcagggcgccgccactgtgggactgggcgtcaacgcgaataccgtggagaacacgatttacaccgcgctgttcgatatttccgtggacccacatgatgtggtgcagcacaccgcattcgagaacatcgatgtgattccggcgaacatcgatttgtccgccgccgaggtccaactggtcacagaagtgggccgggagcagatcctgaacagtgtgctgcgcaagctcaagtcggaatacgatctcatcatcgtcgactgccagccatcgctcggcctgctcaccgtgaacgcgcttgccgcagctgatggcgtgatcattcccgtggccgccgaattcttcgccttgcgtggcgtggccctacttatgcagtccatcgaaaaagtgcagtcccgcatcaatcccgcattggaagtggatggcgtgctcatcaccatgtacaccaagacactgcactgcgaagaggtctgccagcgcatttacgaggcgttcagcgaaaaggtgttccacacgttcatctcccgctccatcaaactgcccgattccacggttgccgccgcgcccgtggtggtttatgcccctgagcacaagacatcaaaggaataccgtgaggtggcacgtgagctcattgctcgcggcatcgtggcgtaacgattgtttcgataaacgatgaatgagacttccctttctcggctcccctctctgagggaagctgactcgcgtagcgagactgaggggagctccgcggaagccgaaatcagcacggaggaatccgccacttccggcttccgggtcaacctcgaggtctattccggtccgttcgatgccttgctcggcatgatcgccaacaacaaactcgagctgaccgaagtttccctctcctcgatcaccgaggaattcctgacatacgtgcgcgggctcgacttcacgaaaaacatggatgaggccagcgcctttctcgacatcgcctctattttggtcgaggccaaaagtgtggcgattctgcccggcggcgaagacaaccagtacgacgagcaaagtctcgaggcgctgcgcgaacgcgatttgctgttcgcccgactcctccaataccgcgcctacaagcaggccgccggtgatttccgggcgcgtatcgccgccaatgccggccgattcccgcatccggcggccatggacgagggcattgccgccatgttgcctgagctggtatggacgctgaccccgctcgaactcgcccaactggccgcccaggtcatcgccaacgcgcccgcctccgaagtatcgatccaccagctgcacgtgccgctggtcgatctgcgggcccaatcgctggtggtgcgcgaccggctgatcgcagcactggaatccaagggcgaccagtcgatgtcgttcagcgaattgacccgggactgcacttctcgtattgaggtggtggctcggttcatggccgtgctcgtgttcttcaaacaaggtgtgctgcagtatcagcaagatggtccgtttgccgaactgcacctgaggtgggtatccggcgtagacgaaacgatgaacgacgtgaacatttccgaaggcgattttgcgtaaggacggcgactggtgactgaacggattgacgcaacgaatgcaaccgagcacatggcggatgccgaatcgacggctgaatccgcaaaggccgaggtgaggggagtggaggagacgcgccccgaatacgtggatttcacggtagacgattttcccggcgggctgcccgcatgtctggaagcgattctgatggtcgccgaccagccgcagaccgccaccgagctggcccgcattttggcattggaccgcaacacagtcgaaggggcattgcaagccctgcacgatgactatgagggcgatgaatcccgtggcatccgcccgcgcggcttcgaactacgccgcaccgctcgtggctggcagttcgccagtcgcgccgcgttcgagccggtcgtctcatcattcgtcaccgacggccagactgcgagactaagtcaggccgcactggaggcgcttgccatcgtggcctatcgccagcccgtcacccgagcccaagtggccgcgatccgcggtgtcaactccgatggcgtgattcgctcgctcacggtacgcggccttatcaaggaagacggcgtggaccccgaatcccgcgcagcccttttggtcacctccgaatccttcctcgaccaaatgggcctgaagagtctcgacgaactaccctccctagcgccgttcctcccgtccgtcgccgaaatgacacagtcgaaatcggaagacacggaggtgatttcgtagcgattggggcccgctacctgaccaatattcgtgcgctagaccatccaatatgtgatttatggtcattgtgactataagtagtgctatgctctcaatgcggggagaacaaccggtatggaaagaggcatggcatgggattcggcaatgtgtccgagcgccgcagcgcaccgccacaggtcggcgtgtcagtggtgattctggcactcggcccgaaaggcgataccggcgacagtgccgccgattccggcaacgccgcgaactcggcccattcccgtctctggctgcccctggtcaagcgcgtccgtcagccgttcctgggctgctgggcgttgcccggcggcgacctgcgctccgaccggtcgttggaacagtccgcctacgcggccctcgaatcgaccacagacctgcacccgcgatacctcgaacagctgtacacctttggaggcccgacccggtctcatggcggattgcccatggtatccgtcgtgtactgggcgctcgtcggccagaccgaggccgcgggcttcgaggatggtgacaacgtacgatggttccccgaagacgaactgcccgagctggcgttcgaccatcgccagatcatcgactacgcgctgctccgcctgcgctccaaaatcgaatactccgacgtggccacccgactactcggccccacgttcaccctgcgccaactgcacggcgtctatgaggcgattggcggcgaaaccctcgacttggcgaacttccgccgcaaaatgcttgcctcgggagatcttgaagacaccggggagaaggtgcgcgaaggccgccaacgaccggccaccgtctaccgctacatccccaaacgacttgtcgagaacggtacgccccacgaatccgatggcgacgacatcgtggaactgtccagacaaggcgagcgtgaagacgctctcgacgcgctgattccatccgcgcgcatctgatttttcccgccgacccgcttcgggccggcatcacagacgtatataggaaaggaaccgctatgaccgcactatccactgcgccgtccgttgacgagatcatcgccaagctgggcgcgcaaagcacctgcgatgcaggactgacccaggacccatggcacttcgacaccaccacacccagctacggtccaggtgcctcgatgctcgaccgtctgcccgccaacgcgccgcgccagcaggtgctgccggacgaataccgcaaggcctccgacgaggagctgcagcagcgcatcaccgacgccaagcagcgtctcggctccaaactgttgattctgggccacttctaccagcgtgacgagatcatcaagcacgccgatttcgtgggcgactccttccagctggccaagaacgccaccgaacgcccggacgccgaccacatcgtgttctgcggcgtgcacttcatggccgaaaccgccgacatcctctccacgcccgaacagagcgtgaccctgcccaacctgtccgccggctgctcgatggccgatatggccaacatcgaccaggtccaggaatgctgggaccagctcggcgagatctgcggcacccagcccgacgccgatggcttgcagcagatcatcccggtcacctacatgaactcatccgccgcgctgaaggcgttctgcgggcgcaacggcggcatcgtatgcacctcgtccaatgcgcacgccgtgctggaatgggcgttcgcccgcggcaagcgcgtgctgttcttcccggaccagcatctgggccgcaacaccgcccgcgcgatgggcattccgctgagcgagatgccgctgtgggatccgttcaaggcacagggcggcgccgccgatccggccgattacgcccgcgccaagatgattctgtggaagggcttctgctccgtgcaccagcgtttcaccgtcgaacaggtcgaacgcgcccgcaaggcatacccgggcgtcaaggtgatcgtgcaccccgagtgctcgatgcaggtggtcgacgccgccgacggcactggctccaccgcgtacatcgtcaaggagatcgccaacgcacccgctggatccgccatcgccgtgggcaccgaaatcaacctggtgaaccgtctggccgcgcagtacccggacaagaccgtgttctgcctggaccctgtggtctgcccctgctccacgatgtaccgcatccacccggcttacctggcttgggctttggagaacctcgaagccggcaacgtggtcaatcgcatcaccgtggacgaagacaccgcccgcgaagccaaggtggcactggagcgcatgctgcgcgttcacccgtgacatgcttctagctcccctccctgaggggagctgtcaccgtaggtgactgaggggggggcagatgacgcaaaaacagaggaaagcaacacaatgagcaacactgaaatcgtcgtcgtgggcgcaggcgtcgccggactgtccgcggcactggccgtggccggcaccggacacgacgtgaccttggtaaccaaggccgaactggtggaatcgaacacctatcatgcgcagggcggcatcgccgcggccatcttctccgacgacgacccgaagctgcacgccgccgacaccatggccgcgggccacggcctgtgcgacccgaaggccgtggacatcctcacccgtgagggtgcggagcgcgtccgcgagttcgccgcggccggcgtccacttcgaccgcgacgcgcagggacgcatgctgcgcggcctggaagcggctcattcgcgcgcccgcgtggtgcatgccgggggagatgccaccggcaaagtgcttgaactggacgtctccgccatggtgtgcaagaacccgcgcatccacatcatcgagaacgccttcctcaaagatctcatcgtgcgggacggccacatcgccggcgtccgcctgctgatcgacgggcaggacaaggatctggccgccggccgggtgatcttggccaccggtggcgcgggtcgtatgtacccgtacaccaccaatccgccggtctccactgcggacggtctcgccgccgcatggcgtgcgggcgcccaggtcgccgatctggagttctaccagttccatcccaccgccatggccgtgggcgagcacttcctcgtctccgaagccgtgcgcggcgaaggcgcggtgctgctggacgaacacggccaccggtatatgaaggacatcgatccgcgcgccgaactcgcaccgcgcgacgtcgtggcccgcgagaacttccgcgtgatgcaggcgcaaggtggcaagcccgtgatgctcgacgtctcgccgatgacccgcgagaaccccgacctagccagcttcctggcccaccgattcccgaccatcgatgcctatacgcgttcgcttggcttcgactggagcaaggagccgatcccggtggcgcccgccgcgcactactacatgggaggcattcgcaccgatctggacgcccgggcctccattcccggcctgtacgcggccggcgaatgcgctcgtaccggtgtcatgggctccaaccgccttgcctccaactcgctgctcgaaggacttgtctacggacgccgcgccggtcttgccgccgtcgcggacggtgacgacgcggtctgggcacccgaaccgttcctgaactccgccaccggtgccgtggtcgaccatgcgccgatcgcgctggccgctcctgccactacggctgctgctgacgataccgccgccgacaaggtctgggaccgtacccgcatccagaacaccatgtggcatggcgtcggcgtgctgcgcgacgaggccggactgaaaaccgccatcgccgaactcggccaaggcctcgccgccgcaaacgcccaggctgatgtaaacgccgatggtgctgcaagcagcgttgaggctttggagaaccgcaacatcctcaccgtaggctatgtggccgccatcgccgcgctcgcccgcaccgagtcgagaggcgcccacgcccgcaccgactacagcgagccagtcgacacctgggcccactccgtc

SEQ ID NO: 1449 - DNA, 4185 bp, Unknown
  R257_15m  MAG No. k141_22186
accagttcaaggcctaacgcatcgtagacgccgaaggcgaatccggagatcagcgcgaagagcagcatgccgttttcgcgtgccgtgccggtggaccagacgccgagcccccatgccaccgccacgccgatggcatacagcaggcaggatgccgccaccactgcagtggtggcgatgttccgttcctcgatcttctcggagatcggcccagcggcccaggacgcgagcgcagcaccgatgagcgttgccgcggccatgccggcgatgaggaggcccgcgggaatggtcaatggcgcggaagtgaacaccacagccttgccatacacccaaaagcgcacgagataccacagaaagaccccggtcagtccaacgcccgtcatcatgcacacgcgagcggcgaacacacgggcgaatgcaggcgcatgtgccggcggacgcagctggtcaaacacctggctcgactcgaatcgttgatgtggctgctcctggctggaaggctccttgggcagcatgatcacggtcaggatgccggaaaccgcaaacagcacggcggtgtaggcaaacggcgtgaaggagtcgaacatcacgccgagcgcacccatgcatacaccaagcgcttggccaagcatcacgccgataccgtgccagcgctcaatgcgcggacggaatttgtccggaacccgttcgctgatggcgctggccaacggcacggaaatcatcgcataggcaaactgcatgagcgcccagaagaaacacagcactacgaggcctgtgttccgccccagaaccagcgtgatcagcgcgcacagcacgccacccgccaccatccacggggtacggcggcccagaggaatacgtgtgcggtcggacagcgcggagaccaagggcatcgcgaacatggaggccaccacgccaacgaccaccagcacggccagaggcaccaccaagtcagtggcgacgggcagcggacggccggtggacggattgatggtgaccgatatggcagaagcggtgtcgtagccgaacaaacgcgccacggcgttgggcatggcgatggtattcaatgctatccaaggtgcgccgaccagaatggaagcggcgaagaacccccagttgagacgggatacctggcccgtggtgggtcgctgaccattggcggcgaccatcggatcgcgcatatcgagatatgcagacgacagatcaggcgcaggggcatccacgctggccgcggcagcggcagcagccgacgaaccggcggccgccagacgcacggcctgggcctcgggctgatcggcggatgcctcgggaggacgccgacgatctttgatggccagtcgggccacggcatccttgtcttcgggactcaatgccttgtcgagatccgggcggtcgtcaatacccgggcgcacgtacggttccaacatgttgctgctctttctttgctctcatcaccggcgggaggtaccggccagctccgactgagcatgacccgcaaccccgccacatgcaaaaccgcccgagcgcactagcttcagtgcactgcgggcggtttgttttccatggacccagcttacgccggacgcactacttggagcgcgcacagcggagtggcgtttatgggccaacggttagtcgatatcggcaatcggcgggttgctcagcagatcatcagtctcgtggtcaccggcggcatcggtccaggcgaggctggcgaccggagtggtgttatccgtgccgagtccgcggccgggctcgaagatgagggcggccttggtcttgccgtcggcagcgatccagcggaaggtgatggatgtgtcgccgtcggcttcgtagctgaactcgccattgaatgcaggcagttcgttgcggaacttggccagggcgttcagggccttcaccaccgggcgctcgaggttttcgtcgatttcggcggtggagtagtaatggcgattgatgtcacggccgttgttggtcttgcgcagcagttccatgtcgttgcggccggcgagcgcgcccacgtagtagacctgcggcactccgggcaggaagaactggactgcgcgggcggccagatagtgctggtcgttgcagccgagcgcggagtagtacgtgctgttgacctgatagaggtcgaggttgctggcggcggcaccggtggcggcctgggattcgccgtgggtgttggcgtggatggtgttgaccagattatcgacgtcctcgtcgggcacgaggcccttgaggctgcggtcgagctgatcggagccgatgtcgatcacgccgatgccgtcgtgcgtatcgagcacggtgacggcgttgttcgggcggatttcggtccagtggaccacgggttccacgtgaccggtgaacagcgagtgcaggagcagcggcggcagggcgaagtcgtagacgcggtccaccttggaggcgatttcaacctgcttcttgtagtagctatgcacctcaatgagaatttcgaggcctcgcttgacgccttcctcgcgtaggcgggagatgagcttgaacgtcttcggagtcatgaagcagctggtgccggcctccttggcgccgtagcccacggcgtcgagacggatgtagctgacgtgggatgcggccatctgatcgaagatggacatgaggtattcccagcccttgtcggaatcggtgtcaatatcaacctgctgcggagtgaagctgacccagaccaggcgggtcttgccggcgaacttgtagtgggtgaacggcaggcccgggcgcgggcggtagatgccggccagttcctcttcggtggcgccgttcgggaagacggagctcatggtcagaaacatcgggtaatactcggattcctcacctttttcaagcacgtcttggaactgcttggactcccagctcatgtggttgacgatggcatcgaccatgatgccgtgggtcttggaaagttcagcgacgtcgtcccagctgccgagacgcgggtcgactttggtgtggtcgatcgggtcaaagcctgcatccgcaccatcgaacggagtgaagaacggcaggatatgcacgccgtcatacacgccgtcgaagcgggtgcgcaggatgtcggtcatcgagccaagagtgccatcgccgagacgatcggcgtaagcgatgagctgcactttgtttttcatgggacctcccttggttcatggatgcaggtgcaatgtgtacgcgtctgcctgtttgttgtttacgtatttgcatactcacgtatgcatcgaaccggttcgatattacctcgagaggggagtcaatgtccagtcacacagcggaacgcgcgtgtcgaaccggttcgatgcggtgttctatgcagcccagcctgtccgatccccactcagcgttccaacgcgcagcatcaacgcgtggtatcgcctggcaccagcgtcatgggaataagcacgttcggctcgaacggcttggggatgttcctgcgtgaagcgttagccgcagccacttcctcattggcaatagcctgcacgatatggtcggccgccgactgtgcgatcgccgagaaatcctgcgcgaccgcggtcagcttcatgccagccaaatcagtcaaatacgtaccatcgtaggcaacgatctgcagctcgtcaggaatggaaattccgcggctcaacgcttcgcgcacgcagaacgacgcgccaatatcggaactgaccacggcatcgacgccgtcggccgtcaccttgtcgagcgcattgctgaccgcacgatgacagccggcaaaatccatcacttcgccagcttcaacatactcgtatttcacgcctgcggaggtcaattcctgttccaacgtgaggtagtagcgcaccgtcgggaacgtggtctttcccaaatcgaacggtccttcctcgacttctccgcgcgcagccaaatcgaagaattgatctcgcggaccgccaatcatcaccacatgtttggcaccattgcggatcagcatctgcgcaatcaatcgcccaccctgctcgtggtcggatccaatcgaagaaataccgtctccaagcacacggtcgaacgcgacgatcgggcgatgaatcgacgtccaataatcgccgggatgcgaagtgtgagcacacatgacgatgccgtccatcatgtgccgacgcaacatgtcgacatactggatttcgccatccgtctcatctgcggtagagcaca

SEQ ID NO: 1450 - DNA, 5185 bp, Unknown
  R257_15m  MAG No. k141_22232
ctcggccatgagcttctcggtacgcgagtaatggcggttgaacaacgccaccgtattgccgtggtgcgcgaggttgcgggccagattggaacccatcgccgccaatccgataacaccgatgtttgccgtagcttcggccatcaccggggcttgtccgaagagcatatgaagcgctgctgcgaatggacggtgtacatgctcaccgagcatcccgacccggagtcgttcgtcaatcccgaccattggaagaccaagagaacggagaccgccggggacgacgggccggctccgggaaccctgaccgcagtgcaactaccggccccggacatcgacgcctacgaaagcgggttcggcatcagaaacggctggagcggacaatcgcaccgaccatgacacgcgcggataagacccacgtttctttacttaacccggaactcaacaaggaagcgctgggattcatcggcaaccgactgccgatggcggtgctacgcgaggaattccacatcatccaggaggggatcaccgacgcggccaccgtggacgacgtgatgaagtacagcctcggccgccgctggaatctggtcggtccgatcgccagcatggacctcggcgggctcgacgtattctacaacatcagcacctacctgttcgacggcatggacaacgacaccggtccgagcccgttgctcgccgagaagatcaaggccggcgacctcggcgccaagaccggccgcggcttcttctcgtggcagggcgaggacggcaagcgcatcatcgaatctcgcaacaagatgttgctgcgcgccctgaaggacgatgccgcggatgcggccgctgtggaagcgtaaggcacgaatgggggatcgctatagcccgatggctcgaacgcgataagacaaccgttattcttgccggcggtgccgtcttgccgaagactggcaagacggcaccgttcgccatacgaatgctgttgctcgatggactcgcccgataatacggcttttctactccagattcgcgtggtactcccacagggaatcgaggtcgatatcgcgtttgcgcaccatggacatggagatggcgtctccgaccagcagcaacgactgctcgaacaggctggtcatcggctgctggctcggcttggtgccgctgccgggcttgccggcggccggcacatggacgaacagatcggtgtactgcttcatcgggcagtcctcgacgatgccgatgcgcgccaccttggcgccgaaagacttggccttgccggcgatgaacagcgggaacccggttttgccggaaccggatccgacgatgagcaggtcctgcccgcagatggccggttcggtgatctggccgaccatcaccgtgtccacgccgaggtgggcgagacgtttggcgatggcttccaatgcgagttcgacgcggccgacgccgacgaagaagaccttgcgggcgttagcgatgagatccacaagtgcgtcgatctgcgtctcgtccatatggtcgagcacgtcggcgagctcttgcacgatgatccgctcgcagtcgcggaatgatgaggggaattgggtggcggcttcggttgcggcggtggttgtgatggtcatgatgatgctttcttgagtgtgggattgcggcaggcggagatgcctgtgggttgattgctcctccggtcggctttgctgacggctctcctcggggaggggagccaggggatcggcgtggagggtgtgttttcaagctgggccgatggcttcgagggggattgagaagaaaaatcagcgggggttggctgtggtctcgccggtggagtgttcgtaggcgtccatgatgaggcgccaggcctcgcggatatcgggggagcgcttgaagatgccggtgttgccgagcacgaaggtgttcgcgccagcctcgcgcatggccttgaagttcttttcgttgcaggatccgtcgatctggatctcgtagttcagtccttgctcgtcgcggaatcgtgcaagctgttcgattttcttcagggtctcggggatgagaggctcgccgctgtagccgatttcgacggtcatcacggtgatgaggtcgatgcgttccagcaggttctccacgtcggcgaacggggtgagcgggttgatggccacgcccgcgccgcagccgttctcgtggatgatgcgcagcgtgcggaaggcgtgcgcgcccagcgattcgacgtgcggggtgagcatcgtggcgccggcgacgaccagctggtcgatccaatggtcggggtcggtgaccatcatgtgcacttcgttgcgcagcgtgctcagcggcagcatctgctcgatccaggaggtgcacaggcccatgctgggagagaagtggccgtccatgatatccacatggtaggagtcggccaccgtgttaaggtattcgacctgcggggcgggattgcggaaatcgctgcaatagagcgaaatcgcgaaatggggtgctgggaatggagccgtcattggtgttcctttggggtacgggaaaaagatgaatgtgttgttggtcgcgttttgggcgcgattggccaagggtgcggcgaatcgtccttcgttcacctggctgtttcagggaatgagccgctactgcctgtcggtgcgcacggccacgcccatggcggtgagcgcgccggcgcagtccggcgtgccttcggtcacgatgacgtccagctcgttgcagccggcgattcgataggtggagatgcggccaaatttctccggtgtgatgaggctcatgaccttggcgccggccttgatgatcacgcgcttggtctccgcggattccagatacggggtggtgatgccgtgctccgggtcgatggaggagacgccgagcagcaccagatcgcaatgcagctgctgcagcgccgtcagggcggccgatcccacggtctccttggatttgtggtttatggtaccgggtagcatgttcacttcgacatggtcgtagtcggacatccacagcgcgacggccgggctgttggtgattaccgtgccctcccagtcgcgcgggaaggcttgggcggccagatagttggtcgagccgccgtcgatgaagatcacgcggttctcgcagatctcgtccatggccagttcggcgagccgctttttgacgtccgcgccaaggtcgacgcggttttcaaaacggctcagttccgtgtccggcttaatcgcgccgccgtgcacgcgctgcacggcgcccctgtcgtccagttcctgaaggtccttgcgcagggtggcctcggtgacgcccatctccttggcgaggtcggtgacgaccacgcggccgctgtcggcgatgcgcttgaggatgagctcctgacgttctgccttcatcatgctgggctccttcggctggtgtatgcggtggccgggcggtgatcgcattcggcgtgtcggcttccgtgtctcatcataacagagagttttcgttatttatcgattatgggtacattttcatttcgattcctttcgtttctatgttgacaactatcgtaaccttgtgttataactttgtcaacaagcaaagcgaaagacttcagaactaaaacgaaagatttcgaaatgcttggatggtttgtcgacacgctgatcgcttgacggcgaaacgctggccgataaccccataatgaaaacaaccgaacacagcagttcagacaaggaagccgaggataccgtcttccgcttgacgcgccgaaactgcgtaatatagccgcaaaagcgttgcgggacaacgcttttgcggtctttcgcggcaattatcagccgccctttttcgtgacatgcgatgacatggacctgccaactaggtgcagtattaggtgcagcgcgtgcgcgcatagccacggggcatgaaccggaagacgaacatgccgcgatacacgctgacgctcatcgactccaccaaccagaccccgccgattgtgctcaccgccgaatccaccagaaccatcatacgccagctgacgaaacggctggaccccacgcccgaacgcaggcgcgtgcagggctccggaggattcaccatggagcgcggacgcgtcaaggcgttccgcgagctcccgcccgaccccgcgaccgggaaccgccggcgcgccaccgcgttcggcgccaccagggccgaggcggagcgcaggctcaacgaaaagatagccgagctccagcgcgtcggacggctcggctacacgaagccgcccaccgtggccgaatggtgcgaccactggctgaacgacatctgcaaaccccacctcaaaccccgcacctggggcacgtacgcgtccgtcatcgaacgcaacgtcaagcccgccatcggcgccgtcaggctcgacgagctcaagcccgcgcacttccgccgcatggaacgctacgtcatggaggagcagggcaaaagctccggcaccgcgggcagcgcgtggcgcaccctgcacaaggctctggaggacgccgtattggagggcgtcatcgaacgcaaccccgccgtcaagggcaccgcgccccgcgtggcgttgaaggaacgcgccgccctgacgcccgaacaggccgccgacctcatcgccgcggagaccgacgacacctggcggctcatgtggatgctggccttcatgaccggcatgcgccagggcgaacggctgggcctgaccgaagacgaactcaggcgcgacggcgaccggctcatcatcctggtcgaatggcaggcccagcacctgacgaaacgcgaggtcgagggactgcccaagggcgtcgaatgcacgccgctcggcaacggcatgtaccgcacgcgccccaagaccgagaagggccgccgcgccataccattgcccgaggccctcgccgaccaattgctcgcctacatcgaacgccacggcgtgaacaaggacggcctcgtgttccacgacgacgaggggattcccctgaccggatgcgtggagcgcagacgctggtaccgggcgctggaccgcgtcggactaaaccacgagtacgtgccgcattcggcccgccacaccaccgcgaccatcctgaaccggcttgggctggacgacgtgacccgcaccgccatcatgggccacagcagggtcagcacgacgaacgagatctacacgcacgtcgagctcgaccggctcgtcgccgccaccgacggcgtggagaaggccatcgagggc

SEQ ID NO: 1451 - DNA, 12645 bp, Unknown
  R257_15m  MAG No. k141_22345
accagcgaggcgacagacagcacggcgaacagaatgttccatacgcccttgcccggcaggttcagcttcttgacccacttgatgccctgtagcttgccggcagcgatgagcgagccggtgaaggtcacagaaccaatgagaataccgagaccagcggtgatgagcaccacgatgtccggggtgccttccttggtcaggatgtcgttcagggccacgagtgcggcagcgccaccacccacggtgttgaacacggaaaccagctgcggcatgtcggtcatcttcaccttcttggcggagacgacaccggccacggcaccgatcaggatgccgacgaccagcaccaccacggcgacaatgttcacgaagcccttggcgaaaagcacgatgaacgccatgagcacggccacgaccatgccgaacgcggagatctggttacccttgcgggcggtcttcggagagttcatgaagtgcaggccgaccacgaacaggacggcggagaacaggtagacgaaccatgcgacgatgtcgatggcgccaacggttgcggaggtcattacttcgactcccccttcttctcgttcttgctggacttgaacatctcaagcatgcggtcggtgaccacgtagccaccaacgacgttcatggtgcccagcacggcggccaggaagatgaacacgtaggccagtgggctattggcttcggctgccacgatcacaacgccgacgatgacgatgccgtggatggagttcgcgccggacataagcggcgtgtgcagggtggcgggcaccttgccgatgacctcgataccgatgagcagcgcgaggacgaacagggtaatggaaacgccgagagtaggcatggtattccttcttccttacttctcggacttctcggcatcggcagcagctgccggggcggcggcacgaccggcaaccaccagcgcgtcgtcgagttcttcggtgagatcctggccgagcttgccgtcacgcacgaagtgcacgaggatgtcggccacgttgcgcgaaagcaagttggatgcggtcgtggagacgccggaggccaggtagggagcgccgatcagcttgacgccgccctcggtgatctgctcgccgacggcggagccctcgacgttgccgccgaggtcggatgcagcgcagtccacgatcacggcaccacgcttgagacccttgacgccggctgcggtgagcagcaccgggggcttgcggcccgggaccttggcggtggtgatgatgatgtcaaagccggcggccttctcatcaacggcagcctgctgctgagcctgttcttcggcgctcagcgcgcgggcataaccgccctcgccctggcccttggagaagtcaagtcccagatcaaggaacttcgcgccgagggactcgacctcgccctgggaggcgggacgcacgtcgtacgcggtgacgaccgcgcctagacgcttcagcgtaccaatggcctgcaggccggcgatgccggcaccgagcaccagcgccttggccgggcgaatcgtgccggcggcggtggtcatcatcggcaggaaggaaccgtaagcatcggcggcggtgatggctgccttgtagcccatcacggagttctgagaggtcatctcatccatggactgggcgctggaaagcttacggggtagcttttcgatggcgatgcccaccagaccggccttctcgagcgcggccacgtaatcggcatcggtgaaggaaccgagcatgccaatgacccactggccggccctgagcttggccacggtctcggcggacggacggtccacaaaaccgagcgcgtcggcttcggcgagcacctcgtcgcggctggtcaccttcgcaccggccttttcgtaatcctcatcggtgtattcggcggcaatgccggcaccggcctcaataatcgaggagactccgctcctcttcagccgggtgacgatatccggcgtcagcgcgacgcgggattccgtttcggacgtttcgttcaaaacgccgaacaccacggtggcttctgggttttgcgccatgagagccctttcttgttctacttcaaaatggacatggttatccgcatagaaagtgtagtcggaaggtaaagaccatgacttgagattccgccaatcgaaacagaaacgaacccgaaattagtgagaaatacgaatgtatccatgtgcattgcggatgaattgctcggaagtcgtccaacaatcacccggcatcgatcagcaaccaaccgctcagtaattatcgacaatcaccgtttcgtagctcacggttactcaacaatatcgggacctgtgcaatattttgccacgcactcccctaacccgccagaatcctacggttgcgtaaggtgacgagttcggtttgggcgattacaatttgaactttgagaagcgttcgcctcatggctggacgacactgaaaggtttacaggagcaagacttgtcggttatcaattccttcacgcagcacactatcaatctcacccgtaaggcgctcaggttgggatccgacttcgtccacccggtccacgacgacaccccggacgagcccgattacctgtctaacgccgacgtgccggtcgagaccaatatcgctttgcctcacagcgacgattgggacgacggccacctgaccgtcaccgacatcgaccccgccaccggcctgctcaccacctccaccgaaggcaatccgccgctggacgaaggtacgtccatctacgacctgtatgcggaccgcgccgaacgcatgggcgatgagccgctgtacacctacaagtccggcaacgattgggtgaccgtcaccgccaacgagttcttggctgatgtgcgtgccgtggccaagggcctgattcattacggcctgaagaagggcgatgccgtggcattcatgtgccgaacttcctacgactgggacctgaccgacgcggcgatcatggcgtgcggcggcgtgctcgccaccatctacgacaccgattccgccgagcagattcgcaatatcgtcaacaactccgatgcccgactgctgatcgtgcaggacacggacatgcgtaagaaggcggatgggtccgtcgaagagtgcccgtccctggagcacatcatcaccatcgagaccggtggcttggacgaaatcaaggcctacggcaccacggtctcggacgaggagctggacgagcgcatcgattcggtcaagaagaccgacctgtgctccatcgtgtacacctccggttccacggccgcgccgaaaggcgtggaaatgacccatgagcactactgccagaccgcgctgaatctgccggcctacatgcccgatctgctgcacgacaagaaaaacaccatcctgctgttcctgccgcaggcccattccttcgcccgcgccatcaactacatcgtcgtctcctcgaacgtccgcatctacatcgccaccggcatcaagacgctgatcagcgatctgcaggtggccaagcccactctcatgatcgtggtgccgcgcgtgctggagaaggtgtacaacgccgcgtcccagaaggccggccacggccccaagggcgtggtgttcgcctccgccgtggtggctgcgcagaactatatgaaggaagtctccgccaacggcaaggcaggtgcactgacccgcactcgccgcgctgccttcgatccgattgtctactcttcgctgcgcgaagtgctcggcggtcgcgccaagtggattgtggccggcggtgccccgcttgacccggaactgctggctttcttccgtggcgcgggtgtgcctgtatacgagggctatggtctaaccgagaccaccgcaccgtgcgcgttcaacccgctgggtacgccgttccacgctggttccgtgggcatcgcattccccggattctccctgcgcatcgccgaggacggcgaaattcaggtcaagggtcgtgctgtgttcccgcgctatcacaagaacgacgaggccactgagctgtcgttcaccgaagatggctggtatgccaccggcgatctgggccgcatcgacaacgacgggttcctgtacatcaccgggcgcaagaaggacctgatcatcaccgccggcggcaagaacgtctcccccggcccgatcgaggaggtcatccagcgttgcgagatcgtctcccaggcgttggtgctgggcgacaaacgcccgtttatctccgccctggtgacgttggacgagaagtcgttgcgcccgtggctcgccgccaaggggcttgacgagaacatgtccctcgaggacgcggcaaggaacgccgccgtgcgcgccgaagtgcagcagtgggtcgatcgggccaacgagggagtctcccgcgccgaatccgtacgcaagttcatcatcctgcccgaggagttcacccaggagaacggtctgatgaccgcctccatgaaggtgattcgccccaaggtcatcaagcgctactccaccctcctcaacacccagatgtacaccaagcggaagtaaaccgtatagcaaaagctccctctgacgagggagcttttttcgtctatacgccctagaagcctaggcgttctagttgcttggggtcggactgccagcctttggctaccttgacgtggaggtcgagcttggctttttggccgacaatgcggttgaccggggtgcgcagcttcttcttgacgtaggtgaggttcgaggcgcccttgccgatgatgatcggcttctgagagtcacgctccacgtaaatggacacgttgacctgcgccttgccgtcatagccctgaccggtctcgttgtcttccggatagtcgatggaatcgaccaccacggccagcgaatgcggcagctcgtcgtccagggtctcaaggaacgcaccgcgcacgagttcggcgatggtgtcttccggacgctcctcgctgatctgatcgtccgggtacatctgcgggccctcgggcgtgtgctcaatgagcacgttcttcacttcagccagattgtcgtgcttcagggcgctcaccggcacgatgtccgagaaatcggcgaaatcgttgatttcgatgagcttgttgatgagttgctgacggccaagctcgtcgatcttggtgacgatggcaatcagcgggatgcgccacttgaacgtaccgtcctcacgcttggtggcgaagtcggtacgcagtcgggaaagaatacgcttgtcgccggggccgatttcctggtcggcgggcagcaggaaggccaccacgtccacatcggccaaggattcgtcgaccacgtcgttcagacgctggccaagcaacgtacgcgggcggtggataccgggcgtgtccacgagcacgagctgcgcgtggtcggcggtcaggatgccgcgaatcgccttacgggtggtttccgggcgagaggatgcgatggcgatctgcttgccgatcaacgcgttgatcaacgtggatttgccgacgttcgggcggcccaccacggccacgaatccggagcgatacggcacgtcctgcttggtcacattctccgtttcaccggtcgcgtcgacttcggcaacgccggcaacatcggaagcatcggtgacgtcaatgtcatcgacgtcgttcgtgctgttgttctggtcggtcatatcactccttgctggcggtatcatcgccttcgacgggctcgccgtcagtttcctcatgggtcctgctattttcctcgccgccctcgacgtgcgccggttcgacgacgatggtggacaccttcttgcggcgtccggcggagtccacggcggtcagtcgcagaccgcgcgtcacggccgaagcaccgacaatcggcacgcggcccagaatcttggtcagcaggccgtacacggtatcgacatcgtcctcatcaatgtcgatctcgaagatctcctccagatcggcaatcggcgtacgggcgggcatcttccacttgttgtcgccgattttctccggctcggtacgctgggtgcggtcgtgctcgtcttccagctcgccgacgatctgttcgatggcatcctcgatagtcaccatgccggcgatgccgccatactcatcgaccaccacggccacatgttggcgggaacgctgcatctcatggaacaggtcgtccaccggcttggattcgggaacaagcagcggctgccggacgatggattcgaccgtgcgctccatggccgccgggttgaaggcggtggcgcgcacggcgtccttcaaataggccacgccgatcaggtcatccacatcctcaccgatcaccggcacgcgggagaaaccggagcgggagaacagtttcagcgcggaagacagtgtggagtcgcgctccatgcagatcatatcggtgcgcggcaccatgatctcgcgagtcaacgtatcagacagggtgagcacgttgcgcaacatttcggagacttccggatcgaagtcgttggactccaccagtcggtcgatggcggccttgccctgctcgagctgaatcttctcaagctcctcgtcgtcggacagatcggagtccttggagcggcggcccgaccccttggaaccggacttgtcgccaccgatgcgtgcgaacggcgtgagcttggtggccaacgacacgatgcgcgagttggaaatcatgatgtcgaccggcttggtcatgccggcggtgcgcgggcggaccagtacggagaccacggctacgataatcgcgaacaggaatccggcgagcagttcaacccacagttccgcaccccacagggatgcgatggaagacaccagtacgccgtcgagcacattgcaggcgatgcggaagaacgcacagctgccggcggtggcgtaacggtcggcgatgagccgttgcacgcgatgaatcttgtcgatcttcttcatcttgaggaactggcttgcttcggagtcggtctgcacctcgaggatgagattgttgaggctggctcgcgttacgcgggccacggcgccttcagcggcggccatggtcagcgaaagccagacgaacagggccgccacaagtacgagaatgacggtgacggcgatcagcgtggtactggaatactccataatgttttttcggtgtccttgaatgtccttgaacggtatagaataatccgaatttggtgtgattgatttggaagtttatttggaatcgaggtcgcggccagcaccgtgcgcggcgtcgtacagggccagcgcgtcgggtgtgccggcgggcagcgtggcctgcacgttggcatcgtggcgcagggcgaagaaggtgagcagcagctgtcgctgcaggccgaacatctggcgctcctgctcgggggtcacgtggtcgtagccgagcaggtgcaggatgccgtggatggtgagcaatagcatctcctgcatggtgctgtgcccggctgcggcagcctgttgggcagcgacccacgggcagatgacgatgtcgccgagcactccttccatcacggttttgccgtcgcctgggcgcagctcgtccatcgggaagctcatcacgtcggtcggaccttcgaggttcatccaacgcatgtgcagttcggcgatgggatcgggatccacgaacatgatggtcaggtcggactgggtgctcacgcgcatctggtcgagtacccaaatacccaaatcggagaagaccttggggtcgatgacccactgggtttcattggtgacgtcaacgctcatcgtctgtctcactttggttggttgaatccgcttgctggcgggcatcgaagtcggtatggttgcggcggcccttgcgttcgatgtcgcggtggtcgccggcgatggcggagtgacggtcgtaggcggccacgatctggccgaccagctggtgacgtaccacgtcctcggttttgagatgcacgaatgcgatgtcgtcgatgccgcccaggatgcgttcgatggtggccagtcccgagcgcggcacggtcaggtccacctgcgagatatcgccggtgatgaccatcgtggtgttgaagcccagacgggtcaggaacatcttcatctgctgttcggtggtgttctgagcctcgtcgaggatcacgaacgcgtcgttcagcgtacgaccgcgcatgtaggcgagcggcgccacttcgatggagccgtcgtccatgtaccgcttgagctggtcggcgccgagcatgtcgccaagcgcgtcgtacagcgggcgcagatacgggtcaaccttgtcgttcagcgtgccgggcagaaagccgaggctttcgccggcctccacggccgggcgcgtaaggatgatgcggcgaatctgcttgtcctggaaggcacgcacagccttggccacggccagatacgtcttgccggtgcctgcgggaccaatgccgaaggtgatggtgtgcgattcgatggcgttcacgtaggccacttgtccggcggttttcgcacggaccggcacgccggcggcaaaggtgatgacgccgggaaccgtgggcttgcggtacgtcgggtcgtgggagccggcagaacgtgcatgggcgcgttcgtttgaggtcgattgcgccagtttgtcatgcaccgggccgtgacctggatgttcgaggcgcacgtggttcttgagcacgttctggtcgagcatgcgacgcacggtgtcggcgtccataggcgcggtgtaggcggcttggatgatggtgttgaccaaatcctcggcctgtgcggcctgggcttcggtctgcttggagcgggagacgatcgccacgcggttgccgcgcacgataatcgtcaggtccggaaaggcgcgctccacctcgcgaatgacctcgtcaaccgggccgagcacggcgacggggtcaagttggggcgggatggtgatggtacgtgtagtcgttgccacgaagcggatattcccctactactcgtcgagcttttcgccggtcatcacgtgcgcgtgcacgtggaagacggtctggccggcgtcgagaccggtgttgaacaccagtcggtaggcgccgtgaaattccttgtcggcgatgttctgcgcgatggagacgatgtgggccagctcggtcgggtcgtcggcggcaagttcggcgacgttggcgtagtgcttcttgggcaccacgagcacgtggaccttggccttggggttgatgtcgttgaatgcgtaggtcgtctcgtcctcgtagaccttgctgctgggaatctgccctgcgatgatcttgcagaacaggcaatcgtcggattcgctcatcatgctccttggtttgatgttgctacgcaccagcttagcgcgtgggcgttactcgtaacgtcccaacacccgagacaacagcgacaacgctacaggaccggccgtcgcggctctcagaatattgtgccccagtacgcagctcaccgctccggccttgacgaaatcagctacctcctgctcactgatgccgccctcaggcccgaccaccacactgacagtccgcggccggccgtcctggagcgtgcgttccaccaactgcgtaaccttctcctctacgccggaccacgtatcggtagcatcctgatgcagcacaatcaccacatcgccatgcacgcaggccctgcggcagatggccacgacctccttgctggacgcgcacgcctccagttgcggtttaaaagcgcgccgcgactgctcggtggcggcatccagtaccgaattccacttcttgtccgtacggccgaccttccacttggcaatggatcggtccgcctgccatggcaccacttggtcgacgccgatctgcgtagccatatcgatggcctgctcatcatggccggttttcgccaatgcctgaatcagcgccaaacgggtgagcggctcgggttcgcgccccacttccacaacttcagcaagtccggcttcaggatcggccatcactgcctggattctcaagccgttgccgtcggaaagttgcaggctgtcccccgccttgagtcgcatagcctgcacagcatggcgcttgatgcgcgcgggcagggttagcttccagccggcgtgaagttcgtcgctgttcaccgggacatcgtcgacctgcgggtcgaaaagaaaaagggcatcagtcatgacttcaaggctacacgcgacacgccgggcacacgcgcgaattgcatccctgtaatttcatgctaagctatttactcgttgtccaaacgacacctgcccgggtggcggaatggtagacgcgctagcttgaggtgctagtgcctattttatacgggcgtacgggttcaagtcccgtctcgggcacagataaaccccttgcattgcaaggggtttttcgttatctgcacacacgaaaggccaccaatgcagttcatcacgctggacaccgttgacgacccgcgcgtcgaagcgtatgtgagcctcaccgaaatgcagttgcgcaatcgcttggaaccagccaagggcgtgttcatcgccgagtcccccaaggttatcgaccgcgcgctggccgctgaccgcgaaccgctgtcactgctggtcgaggaaccttggctggagggcatgaaagacactttcgacttcatcgacgggcgctggggcgcggatattcccgtctacgtggcctcacctgagcagctcaagcgtctgaccggctaccgtctgcatcgcggcgccctatgcgcgatgcgacgctggccgctgccctccgtagccgaggtctgcaggagcgcccgccgcgtggcagtaatggaaaacatcgtggaccacaccaatgtgggcgcactgatgcgttcggcggccgcgctcgatgtggatgccgtgctggtcacaccctcctgcggtgatccgctgtaccgacgagccgctcgtgtgtcgatgggcaccgtattccagattccgtggacccgtatcaccgggttcaacgacgacggtaccgaaaacaagcattactggccgttccagggcatcgacaagttgaagtcgctgggcttcaccaccgtggccatggcattggaggatcgttcgatttcgttggacgaactgacacgccgtctgcacgcgcctgacgaagatccgacgcatatcgacaagctcgcgctgatcttcggcaccgagggcgacggcctgtcccaccatacgattgcccgcgccgatttgaccgtgaagattccgatgagccacggcgtggatagtctgaacgtggcggcatccagcgcagtggcgttctacgcgacacgctaaggaatcgcacgcgctccgaaaaggccggatccttaaacaaatctacgaaactgttcatcgcaagttcacggcacgcgggggcgaaagccttgcatgttcgaatttttctgcaattattaactatgtaaaccgaatgcaaggaagcatccggcccagcagtgcggtgtcgaaagacgctcagtaacagagaggacagttacgatggccaagaatcccaagattctgtcgattgtgcttgcaggtggtgaggggacccgcctgatgccgttaacccgcgatcgcgcgaagcccgccgttcccttcggtggtgtgtatcgtctgatcgatttcccgttgagcaatctggtgaactccgggtaccgtcaggtcgtggtgctcacccagtacaagtctcactcgcttgaccgccacatctcccaggtctggcgtttctccccgctgcttggctcgtacgtctcccctgtgcccgcgcagcagcgtctcggcaagcactggtacctcggctccgccgacgccatctaccagaccatcaacatcatcgaggacgtccagccggacatcgtggtgatcgtgggcgccgatcacgtctaccgcatggacttcgagcagatggtacagcagcacatcgagtccggcgccgagttcaccgtggccggtatccgccagcccatcgaggaatcgaaccagttcggtgtaattgaggtcgatcccgatcacccgaacatgatcaggaacttccaggagaagccggccaccaccaccggtctgccggacaatccgaaccagattctggcttccatgggtaactacgttgccaacaccaaggccctgttcgaggctctggctctcgatgagaaggctgccgacaccaagcatgacatgggcggcgacatcgccccgtacttcgcttcccgcaacgaggccggcgtctacgacttcaactcgaacgagattccgggttccacggtcactgatcacgcttactggcgcgacgtcggtacgattaagcagttctacgatgcgcacatggatctgatcgcctatgtgcccgagttcaacctgtacaaccaggattggccgatttacacgatgtccggcaacctgccgccggccaagttcgtgcacgccggccgcgaccgtctgggccacgccaccgattcgatcgtctcccccggtgtgatcgtctccggcggtgaagtgcaccactccgtgctctcccccaatgtgcgtatccactcgtgggcacagatcgtcgattccgtgctgttcgacggtgtaatcatcaaccgccgcgcccgcgtgtacaaggcgattctcgacaagaacgtggtcctgaccgaaaactccactgtcggcatcgataccgagcacgatctggcccgtggcttcaccgtcacgccggacggcattacggttgtcccgaagaacaccatcgtcgatgactgattgaccagtccagacttggaaaagccccgcatcatgcggggct

SEQ ID NO: 1452 - DNA, 4276 bp, Unknown
  R257_15m  MAG No. k141_22360
ctcgctcggtaccgccgatgatgaaggtgccgtgcggggtctgcagcgggaagtcgcccatgaacacggtctgggacttgatctcgccggtgtcgccgttctcgaattcggcgttcacgtacagcggagcggagtaggtgtaatccttctccttgcactcctgcacggtgtggcgcggctcctcgaagtacgggtccgagaaggtcagggacatggtctgtgcaaagttctcgatcggggagatctcgttgaagacctcgtcgagaccggaggtgtgggccacggtgttggtgccgttagcctcatcctcttcgacacgcttcttccagcggtcggaaccgatcagccaatcgaagctgtcggtctgtacgcccagcaggtagggcacatcgatgggttccttgatggaaccgaagttcacgcgatccgacgccttgtgcagatcaatgtcatgctggtcggcgcgtgcgatgatggtggtggtgttcgtcgtagactcagtagccaatggacgttccttatcgctcgctaatatgtggtaattcccctgggagcgccggcatggccaccatatgcctatgcggacgcttcattgtcgacggcatgcccgcaatatgacacacctcatgcaaagtcaacagaatactgatatgcgaggacatttttagctcccgctgacgagggagctgtcgagcggagcgagactgagggagagacccagcgtccaaacaccaaccgcaggtcctaccccaccgtaaacgtcaccggatcgctcttcaccttcggatgatccttcaaactcagctgcgccacgtacgttcccgcattgaccttggcccaacccgactcatccgtgcattcggtgagcgtggcgttcgcattggtattccacgtgaccttctgaacgtccttatcacccttggacatcagcagcagacgtgaatccgccggacacacatcggacttgtaaatcgtttcctgaccggaagtaatggtgagcacacggccggaatcggacccgtccaccaaacagttgcctgacccctcgtgcacgatggtcgcggtgaaatcaagcgatcctcctaccggcacggattgggaggccgcggaaagctgcaatgtcacatcactggccgagcaatccttgacgttgctgactttcttcggagccggcgtggcgtcgcgggaaatcgcatacacctcgtcatggtgaatcatcgtgttcacggcaccgataccccggccaaggctgtacacgcagaatacaatcagcgcgattatcagcagcaacaccgtgccggccacgatacgccgacgacgatagatggcctgctgctttttgctgatcctgcgcttgcgcggcttgccggaacggtcgtttcgggcgggcccgccggatggcccattgtccccggtgccggctccgcgtgccgttctcgcgcctgatgtgttcctctgcactgccataacccttccagtctacggtcaccacacccatacacgcttggggagcccgccattttcacaatgtcagctgggtaatcgcaggccgccgtccagaatctcgatcaggccgtcatcgtcaaggctggcgatgcaggcggcaagctgaatctggtccttccaaagcttgtcggcatcttccctgggcaacgtgactccagcgggaagctcgcgcagcgcggcgagcaccagaccgcgcacctgtcgatccgtgccttggaatcgttggcgtgggcgggtgcgacgctcccccagtccggggcggccggccttgaggaacgcgcaatcgtcggcaatcgggcaggtgtcgcataacggcgatttggccgtgcagatcaccgcccccagttccattaccgactggttccatgtgaccgatgggcgttcgccacgatgcagtcgggagcgtttgccgccacggatagtgctgttcacggtatgttcggcgctaccggcattatcggcgacgtcagcatcgcgcccgagaatctcgtctttgggcagcatgcggttcgccagcgcgcgttcggccgggctggccgctcccccgcgcgattcgacgccaaggaacacacggctcagcacgcggcggatgttggtatcgatcacggcgattcgttcgccgaacgcaaagctcagcaccgcggaggcggtgtaatcgccgatgccgggcaatgcagtgagttcgtcatacgtacgcggcagtttgtcggcgtactgctcggccaccacgcgggcacattcctgcaagcgcaatgcacggcgtggatagccgagccgaccccatgcggtgatcacctcggccttgggggcctcggcgagtgagcgggcgtcgggccaacgttccatccagtcggtccagtacggcaccacacggctcatctgcgtctgctggctcatgacttcggataccagcacgccccacggcgtggcccgtccgaagcgccatggcaagtcacgcgcattggcctcccaccatgctcccaatcgcaaagaaattgctgtgtcgttcatcgttcttattcttagcagctatgacgaacgaggcaaaacacaacccccagagcacaccgaatccagccaatcccgaaaccaaagtcgagaaaatgttcgaatacggctatcgcaagtcgaattacgggccggacgagctggtgaccgacgcacacggcaaccccatctccgtggtggacgcgatgctttccgccgagaaggccgccgccaccgaaaccgtgacgccgcacctgtgctattactcgccgcgtattcccggcaacaccggttcggccatccgcctgtgcgcagtgaccggcaccatcctgcatctggtggagccgctgggcttcaacctgcgcgacaccaagctgcgccgtgcgggcctcgactaccatgacatggcccacgtggtgttgcacccgaatttcgacaatctggtggagtcgatgcccaattcgcgcatcatcgcgttcaccgcgcacgccaccaagctctacaccgaggtggaatacaagccgactgacatcctgctgttcggccccgagcccggcgacatccccgacccgatggacatcatggagggccctcatgtggccgaacaagtgcggctgcccatgcgcccgtccctgcgttccctaaacctcaccaactgcgcatccatcgccatctacgaagcctggcgccagctcaattttgcgggcggagcgtgaggagaaggcccggtgggccttcgagtagcgacgccgaacgaacgccgacaggcgcgagagcggaaacactgagcttcgcgcagtgatgaacgctgaatataaggctacctgcgtttcgaggggcggatttggcatccgccggaggtctactgccgcttcagggggctgtccaaggacgagaccccgagtatggccgttgaaatatcaatgcttgtactcggggtcttcatatatgccagcccctcgaaacggaagtagacctccagaaaggtcggaatcagcccctcgaaacgggaatagacctccagaaaggtaattcgagctggtatctgccttcaaagaggtacattcgagcgtttgcagaatgctatctgccttcaaagaggcaccgcaatcgagaaaccccgggtatgagtgttgatattccaacgctcatacccggggtttccgcatataggtacctctttgaaagcagatagctctccgcgaggggccaaatgtacctctctgaaagcagataccctaccgaatcaattcttgaagctgtgaatcggcgcagggattcggccgccacgggtcacgaaggcctcgcagctggtctggttcaccggaatgatcggcgcatagcccatcaggccgccgaagttggccatctcccctacgcctttgccttccaccggaatcacgcgcacggcggtggtcttctggttgaccatgccgatcgcggcctcgtcggcgatgatgccggaaatggtggctgcggtggtgtctcccggaatggcaatcatgtcgaggccgacggagcacacgcaggtcatggcctcaagcttttcgatcttcaggcagccattggttgccgcgtcgatcatgttcttgtcttcggagaccgggatgaacgcgccggacaagccgcccacgtaggaggacgccatgatgccgcccttcttgacctggtcgttgagcatggcgagcgcggcggtggtgcctggggcgcccacctgttcgaggccgatcttctccagcacttcgccgacggagtcgcccacggcgggggtcggggcgagcga

SEQ ID NO: 1453 - DNA, 37916 bp, Unknown
  R257_15m  MAG No. k141_23076
catggtcggcatggcgaagccgggctgggctggctgggatggctggccggcctgaatggcacccggtccggccgcagcgggattcgccgacgcataaccggctcccgtgccggctggcatcacgccggtgacgccgtgccctgcctgtgcgcgggccatgctggcggtgtagtccatgaccaggtcgtgcgcctcgatgaccggggcccactgctgggtgtgcgatgccggctgctggaactgttggggttgctgagactgctgaggctgagccgccggtcccgacgccggctgaggctgctgcaattgcgatgctgctgtgttcatactcccgagcgtacggagcgaacgcccagccgaccatcgggctgcggtatgaacctttctggatcaccggcccgctcctcatccgcaaggattagagatacgcagtcgacgcgacaatccatatatcagatgttcattgctcgagaagacgaggaacagtggaagaccggttcggaagctggaaccacaacagaccaagcaaaggagcccacatggccatcgcaatcgacatcccgcacacaccaatcgtgtccgtacaaaagtcgtacaacaggagtacgactacagagaataacaagaacagtcgttttgaaatgagactcacctaagagcaacgttccagaatcgaccaagcggccgagtccaaaggcatgacttcgttgcaatgggcattatcgaatctgctcgccgccgcagatcgggacatccatgaagctcatatcattcggcccaacagtaaagcgtggaatgatttcaccgcagcattaaacgaacctatgggcctacgtctgaatgaattgttggagcgtgatcccatatggacgtgaccaacttcactgagcctcggcacctgactgcgagcgaggatatttctggtttcgactgcggcctgccattggtcaatgattggctggtttccacacactaagtgcatacagcattgagcattcggaagctcccggttggctgaggcgaaatagtccgaaccccattcccgtaattttgctaggcatgatgggcgtggatatcagatttcaaaccatgcacgtcgacagtcagttactccgagatgcggtatttcattctctgaacgatatgattttcggcatatccctgaatcatctagaatgtttactccgctcaatgtccacaatcaccaatgattaatggctggagaccgctatttgacgccgaccattgtctgaatcgcattcagacacaacactcctcattgcgcgcagaccagcgagttccgccgagtcggcgatgtgtctcttcggcggttgatttaggattttccgcatgcgacagctgaccacaccgctaaaaatgccattttcgcactgacttggggcggaggtcgtggcgaaacgcacgagggaacgtgtgtcatccgatatggtcatgcccgccagacattgaagcgtcctgtctatgcgcggttgatgtcccggtggcggggtcaatcgatcgacatacgaaccgggacagattcggctgtcccggttcgggatttcggcctcttttggcgaaccgggacaggcccttccatgaacacccgatatatgcaaatccaaaaccccggaattccgccattccccgacggcgaccatcgcacgatagggcgtcaggtgaatgagattctgtcccggttgcccaaaaagaggcaaaatgacgaaccgggacagcgaaatctgtcccggttgtcccaaaagagacgaaatgacgaaccggggcagcagaatccatcccggtccacacgcggttcacacgcattacccaggtaaactcatcggcaaaacattggcccagccaacaccactaccgatgtccagcacaggccagctcgtccaggcgggcggcgaagcggggccagtcggtcttcatagcggtgaggagcttgcggttgggcacgtcgtcaatcgggacccagcagatttccatgctttcgtcgtcgtttgccttgggctcgacggtgtggccgggcttttcaaaggcaaacacggtggtgtaggaccacgggccatggtcctcgcggtaggagccgaccacctcgatgtcttcgggggtgatgttggcttcctcgtagctttcgcgcagcgcgccttcgatggacgattcgccgtccgcagtggcaccgccggggataccccacgtgccaccttcggcgctccacgcggcacggtgctgcatgaccacgtgagtcaccttgccgctcgccgggtcgcggcgagccagcagaatgccggacgcaccgttggtgccccaatgcttgcggccgcaggcgcagtccacccagccatcgccgggctgatgcacgttttcgaccggcggcagaatgccagcgtgctggttgcccgaggccttgctttccggctccagttcgccacggccgacattccacaggtcggtccacgtgatgcccagttcgccggccagatgccgggccagcggcaggctgaggccgatgataccgtgcggatcgccctcgatgctgtcgatgaacgcgccgccgaagccttccagcgtgaacgatccggcgacttccagcggctcgccggtgacgatgtaccgttcgatgtcgtcatcggtgaattcgccgaaatggactttggcatggcttgcgccgcgcacggtacgtccggtcgcgaaatcgatcaggcagtggccggtccagagttcaccggtcgcgccgctcatgcgcttcagtcgttcgcgggccacggcttcgctgtgcggcttgccgtagcattcgccgtccaggaggaacatcgaatcacagccgagaatcagcgggccgaccatcgcctcggtcagtcccggctgtccggcaatagcggtggcgatgggttcggtgatggtcggcatgtcgatgccggagaagtcgcgcgtggtggcgacttccgccttggaatagtcgatgggccggccagcggcggctttgcgcaggtcttcgacgacggcttcgcgttccgaatccttgatttccttggccttgagcgggtaggcaatcacgcgatcgccggttgcggcggcggcagtattggccacatcgcgatacgcacggtgaacggcctcggccttggctgcggcaagaatcatcacacgctgcttgatgctcaaatcgtcgacggtgacaccttcctcacgggcggccgcttccagcgcagcaggctcatccacgtgcgagacgcgaattgtggggcagatacccgccgaatacagcacgtcacggcggggcttggacttggaagcaagaattagcggaatggacatgacttaagtccttatgctcccgctggcgggagctgtcgaacgaagtgagactgagggtggtctctgccggtatggcggaccactctcagaccgcctgcggcggccagctcccgccagcgggagccttctcctcgacttagcgacgctcgatttcgacgccggcggtgttgatgggcaggtgaagcacacgccagtggccggaagcaagctgctccgatgcgatctggtcgatggcttcgcgggcgttgccgtagtgcagcacgagcacgcaggggccggcaccggagacggcggcggcatagcccttggagcggaagagcgcaatgagctcggtggacggcggcatcagggtaccgcgatacggctggtgcaacttgtcctgcgtggcggtgaacagtagcgcgttggactgggcctgagcggccgcaagctcgtcagcgaacggcgattcacgggttccgccagcgcaagcgcacgtatcggcatcctgagccggggcagcggcgacgccggacttgccctgctgggcggcctgggccagcaccatgggattcatcgcagcgggcagcagacccacgcgagacacgttgtagacggcgtccttgtatggcagttccctaggcagcgcctgacgggccttctcagtggacagctcatagtcgggcacgaacacggcggcggtgatggacgggtccaccgggtagttgacggcgtggaatccaccgtgcagcggttcaccaccaggaacggcgaccgagccgacgccttccgcggtttcgaagtcccaagagacggtcaggccaccgaacacagccggggccacattgtccgggtggccttcgatctgggcggccatatcgaagatggccggacggttgaggtcaccggtctgggcgaaggccgcggcggcggcgatgccggccacgatggcctcggcggaagagcccatgccacgagcctgagggatgttgttggtcgcttccagcgtgaagccgagtcggccgaggccgaacgtggcacaggcacggcggaaggtggagaccacgaggtgggtttcgtcgcgtgggagggtgtcggcaccctcgccgtggatgatcacgtgggcaatgccgtcgttcgggtcgtcgttgagcgtgaaagtgagctcgtcatggtagtcgagcgccagacccacggtatcgaagccggagccgaggttggcggacgtggcgggcacgcgcacgtgaacgctattgcagattgggttcatggttgttccttaaaaaggagctccccttgtcaggggagcttgggtattcagctttcaccgttcgaccgcctcatcagagggagcctagatggtgtcagtccagcacgcgcaggatggacgggtcaccggtgacgaagtcgagcgcctgcacggccttgacggtgttgcgcagggtttcctcgtcggtcaggtgggtcacgatgcgcaactgctgaatctcgccgtcgtagccggggtcggtcatggtgggcttcagatcctggttcacaccgttgatggagacaccgttcttggcgaactcggcggcgatggcggccagcacgcccggcttgtcgtggatcaggaagcgcacggcgaatgcagccttggaggcggtaatcggagccttcggcagattcttgtacagcgggatggacgggccggtgcagccagcagcaatgtggcgggcttcggtcaccacgtcgcccacgacggcggaggcggtcggagcgccgccggcgccacggccgtagaacatgaggtcgtcggcggcctcggccttgacgaacacggcgttgaaggagccgtgcacggaggccagcgggtggttctcgtcgatcagggccgggtagacgcgggcggagacgccggcctcgccgttctcgaccacggcgagcagcttgatgaccttgtgctcggcggtggcggcggcgatgtcgtcggcggtgatcttggtgatgccttcgacggacacgtcgtcgatggtcacggaggtgtggaagccgagggtggccatgatggcggccttgttggcagcatcgtagccttcgatgtcgccggtcgggtcggcttcggcgtagcccttggcctgggcgtccttgagcacgtcgtcgaactggagacccttggtggtcatctcgtcgagaatgtagttggtggtgccgttgacgatgccgagcatgctggtcaccttgtcgccgaccagggactcgcgcagcgggcgcaggaacggaatcgcaccacctacagcggcctcgaagtagatgtcgacgcccttggcctcggcggcggagtagatctccgggccgtacttggccagcagcgccttgttggcggtgaccacggaagcaccggattcgatggcggcaagcacgaacttgcgggccacggtggtgccgccgatgagctcgatgacgatgtccgagttggtggccacgctcaaagtatcggtggtgacgatggactggtcgatccacgggaacttctcggtttccttcgggtcgaggcaggcgacgccggtcagttcgatcgggcggccgatacgagcggacagttcgtccttctgctcgacaatcaggcgggcggtctgggagccgacggtgccggcaccaagcaggcctacgcgaatcggggtttcgctgttgtgagccaattcagggtccttccaaaaagttttctatatcccacgcctattttacggattatttccgacagcagaccgaaagtactcatcaagctgacggcccttttcgtattatgacggttttggccgcacattacagactgtcaggcgctcacctctgcacgctgattactcgctgacgtcgaggttgagtaggtcgtctacggtctggcggcggagcatgacgtgcgcgccggactcgctgacagcaaccaccgccggaatcagcgcctggttgtagttgctggccatggtgcggccgtatgcgccggtaaccggcacggcgagaatgtcaccgcgcttcaaatcggcgggcaactgcacctcgtgaaccacaatgtcgccggattcgcagtgcatgccacacacacgggcaagcatcgtttcagcggaaccggtgcgattcgccagacgcgcggtgtagtcggcaccgtagagtgccgggcgaatgttgtcggacatgccgccatccacggacacgtacacgcgctcggcaatcgggttgccggcactgtctttggcatcggacaagtgcacgtgcttgatggtgcccacgcggtacagggttacgccggcgggtgccacgatgtagcggcccggctcgaagctgatggctggcgcgggcatgccgagcgcacggttggtgctgttgaccgcatccgccaagcgagtgagttccacgtcaatgtccattgaatcttcgccatcggtgtaggccacggagtagccgccgccgaggtcgatttcgggcaggatgtaggcgtcggtggcccacagggtcttgcgcagcagcatcatgcgcttggccgcgtgaatgaaggcgtccgcatcgtggatgttggagccgatgtgcgagtgggctccgaccagttcgagtacgtcctggtcggcgaggatggtcttgagcacggcgatggacggaccgtccgcaatggcttccatcgcggcggccagcgccttgtctgtgtcggagacttcctcgtggctcaggtcgtacgggtacttgacgtcgtagtgcagctcgcgctctgatttctcggtcttttccgcgccattttccggggaatgcgtcgcagagatacgcgcgttggtagcggcaggcgtcacgtctttgagggcgttcagcacgtcgagcacagcggcgtcggccccggcggccagcagcggcacgccgaacttctggtcctcgtgagcagtggagatgtactcgtggccaccggcgtggacaccgacggtgacgcgcagcatcacacgggcgcgtttgccgagcctgcgggcgatggcggcgacgcgctccggctcgtcgggctcgtcgataacgattttggcgaagccctgttcgatggccagcgcgatttcctcatcggacttgttgttgccgtgcagcaccagacgacgtccgggaacgccagcggcgagggcgattttcatctcgcccatcgtgcaggtgtccacgaacatgccggcctcggtgaccaatcgcacgacttctttggacaggaacgccttgccggcaaagctcacgtgcgtagtggatgtgttgaatgcttcggcggcagcgcgcacgaagtgcctggcacgtgcgactacttcatcagtgtcgatgagatagagcggcgagccgaactcgtcaagcagcgattcggcggtacgaccgtggaatgtaatggcaccgtcggcattcacagccgtagcggccggccaaattggagaaataggcataatcacatcttctcgggggcggtgacgccgaggaggtcgaggccgttggcgatgacctgctggacggcgtcattgagcttcaggcgggcggcggcacgggccggctccgggttcttggcgatctccaaggccttgcgagcctcatcgtcgccacgggtttccggatcggtcagggccatcggcaccacgcgctctacgttgtaccacttgtgataggtggcggccagctcttcgagataacgggccaccttgtgcggctggcggtcgtcggccgcagtggcgagcacgctcgggaactgggcgagggcggcaagtacctcgccgtcggcctcggtgtcgagcagggccaggtcggcaccctcgtagctgatgccggcggcggctgcgttgcggtccacgttcttggagcgggcgtgcgcgtactgcacgtagtacaccgggttgtcgttggtgtgcgaggcgagcagggccaggtcgatgtcgaagttctggttgtagtcggagcgggccagcgagtagcgggcggcgtccacgccgaccacggagaccagatcgtcgatggtcacgacgttgccggcgcgcttggacatgcgcacgggcttgccgtccttcatcacgttgaccagctggccgatgagaatctgcatgttcttgccgggctcgtcgccgaaggccgcgcacatggccatcatgcggccgatgtagccgtggtggtcggcgccaagcatgtagatggccacgtcagccgggttttcggcgcgatggcgcttgtcccagtagtaggcgatgtcggcggcgaagtaggcgaactcaccattggacttgatgatcacacggtccttgtcgtcgccgtgcttggtggattcaaaccaagtggcgccgtccttgtcgaagatgtcgccgcgggacttgagctcttcgatggcggcgtcgaccttgccgtcggcgtacaggctgttttcatggaaccagacgtcgaagttcacgcggaagtccttcatggacttctgaatctcgtcgaacatcatcggcacagcgcgcttgcggaattcctcgcgcacttcggtgtcggcctcgccgagcggttcaccgtcgtcgttgaggccttgatcctggtgggccagtgcggtcaggtccacgccgtcggactcggcttcggcctgaacacgggcggcgatctcgttgatgtaggcacccttgtagccgtcgcacggggtttcggtctggtagccggcgtcgcccaagttattggcctcagcccaagcggcgaccagcgacttggcgaagcggttgatctgctcgccgtggtcgttgaagtagtattcgcgcaccaccttggcgccgttggcctcaagcacgcgggccatggcgtcgcccaccgcggcccaacgggtgccgccgatgtgaatcggaccagtggggttggcggaaacgaactcgaggttcagggtctggccgcccagatgggcattacggccgtattcgttgaccttgttgaggtgcttgtcgccatcaactgctggggctgcggcaagcacggcatccaccacggctgcagccgaggcggaatcaagggtgatgttgatgaagccggggccggccacctcgaccgtggcgatgccgtcggcttcagcgagcgcggcggcgaacggctcagccagatcacgcggcttcatgccggccttcttggccagctgcatggcgatgttggaggcccagtcgccatgcgcgcggtccttcgggcgcatcacggcgagcttgtcgacgggcggaatcagctcgtcggtcagcgtaccggcctggccggcggcgacgaggttgtgggcaatgctggaaatcagttcacttaaggcttcagggctcattcttctaaggataccgagaacggcgacacttgcggctcggtatgcctatatgccgtcaatcgaaagatatcgagaaaattcggcaaaccgaaatcgctggaaacattaagtttgctgaaatggcgcgaacgtcatgtaatggttctgtcttatagtgacagaaccactagttcatactgaactgtcactacacttttgtaccaaataagaatgggtcaaccgttctggcataatacagtgaagtcggaaacaggatggtatacgttcacgaggtcgcccggatccgactcggcgacgaagcgaggtacgggaactgtggtggggatgcgcgatgtcgccaaaaaggctggagtatcgctaagtacagtctcactggtgattaataacggtgagcatgtgtccgacgacgtgcgttcacgcgtggaatgggccatggacgcattaaattatgttcccaacgaactagcgcgcaatctctcaaaaaatcgcaccaatatggtcggcgtaatcatgccgacacttcggcatccgttttttgcgacattgtttgcttcattgcagactgcgcttgaggagcgcggcatgctcgctctgccatgttcgactagcgacatgaagcgtggcgaggaagaatatatcgatatgctccgacgccgcatgatggacggcattattatgggcgcacatacgtctcattcttccgactattggacgagtatcggtcggcccatcgtcgctttcgatcgatatcttggaccaggaataccaatgatcggctcagaccatggacttggcgcaaagctagccgccgatataataatccagtcgggagcgaagcatgtagtcaatttgtccggccccttatctcagtttcatgatttaccccgcgcagtggtggatttcggcggattgacagggctcaacacatctttcccttcgcttgaatattatgccgaaatcgacgaattgcttagggaagcaggaattcgttggaattacatggaagccggcgaagttgatgactttgcagcgcacgaacgcgcagcgcacgaagtttttgaacaatttcctgacgtggatgccatcgtatcgtccgatatagtggcttcactttgtatgcaggaagccctccgccgaaatatcaacatcccccatgatttgcagatcatcgcttatgacggcacattcgttgcgaaaatcgccggaatgcgaatgaccgccattcgtcaggattttgatgccattgcttcgacactgtcccgctatttgcttgatgagattcaggggaaacccactagcgaattggaagattcatacgcccaagtgctacctatgaccgtccaacttggggataccactcgctgatatcgcctttatactcatcccgcgtatttattcacatttgatccctgaatgcacgacacgccgtcgaaccggttcgagttaagccatttcaaccattcaaggacttattcaacttgcattcgaaccggttcgaatttatcatgtaatcacctgctcaagtgatcaggggatggcgactccgctaatcgccagtaaaacacacggaagtgtttgcaaaggagataatgatgagaaccaagaaaatcatagcgttcctcggatcgatggtaatgctcgccggcgtctcggcatgtggcacaaatgcccccactgcgagcaccacctctgatggcaagacaattatcaagatccagacattcaacaactacggctacggtaaatccacggcagagcgccccggcgcaaatttgtgggccgaatacgaaaagcagaatccgaacgtgaaaattgaggaaacggtggcctccagtagcgatgaagctcgcacggccttcaataccgcaatctcctccggctcgaatgcatacgatatctacggcgtcgacatctcttggatgccctctatccgagccatggcggacaagttcacggatctgagtagctacacaaaaaacaacagctggccggattgggtccgtcagggcggcgaatccacagatggcaagctaatcggagctggaacggatatcggcccaaccgctctatgctaccgcagcgatctctttgagaaagctggcctgccaacggatcgcgaacaggtgaaagaactcttcggcggagacgacgccacatgggacaaattcttcgaaatcggtcaatcatacacagaaaagaccggtaagcctttcattgattcattgtctgatatctcctacgttatgaaagctcagatggaggaagtatacgtatctaaggatgataaagtcattgccgcggatacggacatgaagaacatgtacgacatgctcgccaagaatgtgaacatctccgctggtttgtccacctggtctgatgattggaatgccgcgttcaaggccgacgatggcttcgccgtgctgacctgccccgcttgggaattgaacaacgtgaagggtaactccggagaggactttaccggctgggatgttgcagacgtaacacccggtggtgctggtgccaatcagggcgaatcctggttggtggttcccgaatcgtctccggtgaaaggcgaggccgctaagctcgttgcctggttgaccgcacccgaacagcaggccaaagtattcgccgctgcctccaacttcccaagctcggccgacgctcagaaactcgacaaggttagtggcaaattggatgaatacttcaacaacgcgcccgtcggcgaaatctttgccaaccgcgcagccgccattaagcatgtgccgtacatgaatggccagtattacgacatcgacactaagttcgctgacgctctcaatcgtctcgatgtgacgaaggagcagagtgcttcccagtcttggaaacaatatgaggatgatgtgaaggctctgtcctgagcgcctaaatccacataactaagagcgtcggtatgacattcgtctgaaatgccataccgacgctcatcgataatccgtagttcattgatcctttcgaggaatcggagccaatcatgagtcttatatcgcgtaaagcctctcgcgggggaagtaccaaattcgcgaatcttgcctataaaagcaccccctatatgtatatcgcaccattcttcatcgtgtttgcggcagttggtctgttcccgctgctctataccatgtgggtggctacaaggaattacaacaccatcaccggagacgccggctgggccgtatgcggctccacatgcggtagcagcgatgcaacttggctaggcaacttccaatgggtgcttcaacaacgcgacttttgggttgcgcttcgcaacacattctcgatcttcttcattagtactattcctcagctaattgccgcgatattcatcgcctgggtgcttaatgcgaaccttaaggcaaaaacattctggcgcatgggcgttttgctcccatatgtcgtggctccttctgcagccggcatcattttctcccagatcttctccgacaagatgggcgccttcaacgtgctgattcaagccattggcatgcagccaattgcttggcacgctaacactctagcctcacacatcgctattgctaccatagtcaatttccgctggaccggatataactcgctaatcatccttgccgccatgcaggctattcccaatgatgtcatggaggccgccgtagtggatggtgccggtaaattaagaaccttcttttccgtgacactaccaatgctgcgacccacactgatatttgtcgtcataaactccactatcggtggcttgcagatattcgacgaagtccagatgttccataatggcacatctgggtacggtggaccgaaccggcaatatctcactgtttcgctctatctatgggacttgggtttcaacaaagtgaccatcggccaaccaaatcttggccgcgcggcagctgttgcatggctactattccttgtaatcgtattcgtcgcaatgatcaatttcatgttgaccagattgctggcaaccggagactcttccgcaaagtctcgcaagcccaagcgttcgtgattacaccagccttcgcctatatgtgaaaggagcatcctatgtctttgatgtcgaataaacgcaacagtggcgaaatgagcgttgccgctatcgaccaaatctacggcaaatccgttgctagagccgctcgcaaaaagcgcggttcactaagcatgtcaggtggcgaacgccatccaggatggggaagttacgtagtactggtggtattcattctgtttttcctgttccccttctattacgcgatatccatcgcctcccaagacagccctagcaagcagtacggcgtacaagcattgattcctggcggcgccttattcgagaatgtagctactgcattcagagaaatcaatttctggcaggctctaggcggcacgctattcgtggccaccatcacctcattctccacggttctgttcagcactcttgccggctttgctttcgctaaactccgcttccgcggccgcaatggactgctgactgcagtaatcgcaactatgacgattcctcaacagcttagcgttgttcccctgtatcttttggccaccaaggccggtctctacggctctttgtgggcagtggcaatccctgcgctggtcagcgcattcggagtgttctggatgacccaatatctgcaagacgcactgccatacgaactcgttgaggcagccagagtggatggagcttcgatgattcgcacattctggtcgattgcactgccagcagcccgaccggctgccgcgatgttgttcctcttcactttcatcggacaatggactaactacttctggccgatgctgattttgggaccaaacaagaacagcatgctcacagtggcgtcttccgcactcaagggagcacattttaccgactatacattggtgatgtcaggcgttctgctgaccactgcaccgctactcgtcctattcgtcattgcaggcaagcagctggtatccggcatcatggccggtgccgtgaaaggctgatattagttggtgctgtgctcgctgacgaacgcagcaccaaccgattgtcatcgtagacagaaaatacaaggaacattatgacgacttcattgacttatatgccactaaatgcacattggacattgcacgcaatcgattgccgcaaggcacccaaatcattgcgagacgttcttcagcatggtattccagccgaggtacccggcgaagccacgttagacttgctacgcgccggcataatcgatgatccattcgacggcgacaatgagagcaagcagcagtggatcggcgatatggattggtgctttacctgccggttcaactggcataacgatggctcccaacgtcatgaccttgtggctcttggccttgatacatgcgcacatcttgtgctgaacggagtgccaattgcgttcacaaacaatgcgtttcgttcataccgttgggacgtgcgcgaacaacttcgcgaaggcgaaaatgaattaaccatcacttttctctctccagtgcgagaatctgagcgtagacaagcccagctgggagcttatccacacgcctatccgcacgctttcaaccaaattcgaaaacccgccagttctttcggatgggattggggcatcgatgtggccaacgctggcatcatccacaatatcggcattgaatcatggtcgggcgctcgcgttgcgtccgtccgcccgatagtagacgtgaaggctgatggcactggcgtactgactacatatgtcgacatcgaacgcgccgacacaagcaatgccaatgcgataaacatgacggtgagcctgaacgggttcgaaaccgccgaacaatcaacaacgctgattgacgaacacactacacgtggcattatctccactacagtacgtaatgcgcatctgtggtggccaatcggatatggaaaacagccgttatatgaagcaacagttgtcattgattcttcctccgatcagggacatgaagcatacgacatgtggaacggacgcattggattccgatcagttcgactgaataccgaagctgatgaaatcggccgcgcttgcgaaatcatcgtcaatgacgttccaattcatgcacgcggttataactggattccggacgacgctttcatgtcgcggctcgaccacaagacttatgagcgttcgattcaggatttggttgactcccattccaatatggtgcgagtatggggcggcggaacatacgaaacggaagacttctacgaactttgcgataagtatggcatcatggtttggcaagatatgatgtttgcctgcgccatgtatccagagaatccaggtaccaaagccgaagtcgaagctgaaatccgtgagcagatcatcaggctgtctccccatcccagtttggtgatgtggaatggttcaaacgaaaactacatggcctacgtagattggccgtggttcaaaccagggttgcgggatgatacggaatgccccgatcagtatggacgctccgaaaaaggctggggtgactactattactccgagctgttcccaacgctgatgaaagaattggatcccactcgtatttacactcccagcgcgccaatgagtttcacggaccataaatcgccaaacacagatcgtgatggcacgacacatatctgggatgtgtggaatgacgaagattacttccgatacgccgattacatccctcgctttgccgacgaattcggctaccaggcaccgcccgcatggagtacgttgactcgtgctgttcacgatgcgcctttagagccattcggtaagcaaatgctcgtacatcaaaaggccgaattcggcaatgaaaaacttgcaaagggcatgcgttcacatctgacaccgggaactttcgacgatgactacatcgacgctcaaggtaatcatagttggctgataccctccgataaatgggagaacatcgaggattggcattgggcttgccaactgcaacaagcgcaggcgattcgattcggcgtggcacacatgcgatcgctggaaccaataaatgccggaattctcatttggcagttaaacgatgattggcctgtaatctcatggtctgccgtagattatgacgggcatcgtaagcccttatggtacatttcgcgtgagtgctttgctccacggttcgccagtatccaacgcagcgtatccaatgcggctcgcacctcccgtcaatgggcagccaaacgattgccatatgactgcttggcactgcatatcgcgaacgacactcgcgattcgtggagcggaacatgggtcgtacaacgagttactttgaatggccaacaacttgcagaatgccaatatccggtagatatcgcggctgggggtcatgtacgcatcgaattagacgcagctctcgcggcattcagctccctctcagatgagattctgatcgcgaggacaacagacgggagcttcgctcgaatcatttacaatcccgccgaagtgatcgatcaaaatcttgcctcagacccttttaccgcaacggcaattcccgtcgaggaaggatacctgctgacggtagaggctcataactatgtacgcgacctattctgcatggtggataaagtcgattccaaggccagagtgaatggtggcatggccagcctgctaccgggcgaaacactgcaatggctaatccattccgatcacaacgttccccctgaagcatggacgaatcatcgcacactaaggtcggccaacgatctccatgaagctcaaattcatagagaactgaccgatatcgccggcatgaccgtcaaataatcagacgaatatttcaaggagatgagacaatgacgatatcattcccgcagaattttatatggggagtagcgacctccgcataccaggtggaaggtgcgacgagtgaggatggacgaggagagtcaatctgggatcggttctgtacgaaacctggtgccatcagcgacggatcttcgggcgcagtggcatgcgacagctaccacagatatgccgaagacatcacgattgcacagcagttgggtgtaaaagcctatcggttgtcgatagcttggccacgcatcgtgcctcagagagacggcaagattaatcaagcgggtatcgattattaccgccgtctactcgatgctttacgagaggctggaatcgccccctttgtaacattatatcactgggatttacctcaatatttggaagacaacggaggctggtctaatcgcgaaaccgctctgtgctatgcggattatgtcaaaaccatggctgaggcacttggcgaccgcattgcagtatggacaaccctgaatgaaccttggtgtacggcatatctgggttatggcaacggcattcacgctcccggaattcaggattacggcaaagctctagcggctgtacatcatctgaatctagcccatgggctgggcgtccaggccattcgatcagttataggagacaccgcacgtaccaatgtggtgctgaatttggctaccaatgtcatagatgaagatacggaagaaaaccggattgccaagcatcgcgcggacttaatcgccaatgaggtattccttggaccgatgttcgaggggtgttacgattccgagattttcaaagtgaccgaaaacgactcagattggtcattcatcgctgacaatgatttgagcacaatccatcagccggtagaatcactcggcatcaattactactccagcgcacacgtacgtcatgccggtctttcgagtactcgagtcagtacacgaaacccgttgccggcacaggacatagtcgaaattttgccgcctactggggaattaaccgccatgggctggaaccaagaaccacaagttctgactgctgaattgctggggttgagtcgtcgcttcgaaaatctcaaactggtggtgacggagaatggctcagcatggaatgatgttgtgagcgctgatcccgcgatgccgaatgggaaaatcatacatgacacacagcgagtgaattatctgaatcagcatatcgcagctgtcgccgaggcaatggaccaaggagcgaacgtcaccggctatttcgcttggtcgttgcttgacaacttcgaatggtcattaggctatgagaaacgtttcggcattattggcatcgattacgccactcaagagcgcatatggaaagattcagctttgcgttatcgtgagataatagccgctaatgccgtgtgacagatgaatggaacgtactatcacgcctacacctatcaccacgacataagcttcactttcacaagcaaataaatatcgcaacgagctctgtagattgacggcatagtgccgtacatgcaaagcatggctgtgttaccgcgggggcagtggattgtgtgcaatccaccgcccccccccctgcaatgttccgaaacataccaagcgaaaatcggccatcagcaatcccctgaaaacgttgagggctcgccggaaccgctatacataccgtcgatcggtatgtatagcgatcggcaacgccgcataccgcataccggagggaggccagcacggcacgtaacgcacaccccgaggtgacgcgcaatcgcattctcgacgccgcgcaacagctgttcatgaccaaaggctacgagcacacctccatccagaacatcgtggacaaactcggcgacctctccaaaggcgcgatctaccatcatttcaaatccaaggaagacatcctcgaagagctcaccaaccgggacagcgacgtgcaggacgacttcaacgaatcggtaatgggccgcagcgacctcaccgctctcgaaaagttccgcatattgtggcgccattcgatgaccgcacaggaccatgtgcagatcatgcgcgccgccatgcccatgctgagcgacccggtttcgttcgccgcaaacatgcggatctggagcaagcacctgcccgaacggttcctgccgctgattgaagagggcgtcaaggacggctccatccccaccgcatatccgcgcgaggccgccgagctgctctcgctcctgcccaactactggctgatgccgtatttctatccggcgaccttgcccgagatggagcaccgcgtccggtgtctggcagccatgctcagcgcgattggcgtgccgattttcgacgacgaacttatcgaaattaccgccagaggcatgatgatattcgacaggctcccctcagtcgcctgcggcgacagctcccctcagagaggggagccaaggaaaggctcacaatgaacacagcaataaaacgcaagaacgacaacagcacccagcgcccgctgcgttcccgcgacttcgtgctgttggtcgccggccagggtatttcgctgttcggcaatatgatgctgcaattcgcgatgtcaatgtgggtgctggacgaaaccggctcagccaccatcttcgcctcggtgctggcaatctccatcgtgccgaccatcctgctctccccgttcggcggtgtactggccgaccgcgtcaaccgccgcaccatcatggtggcgctcgacgccatctccgccgtgctcgtgctggcgagcgccatcgtcttcgcctccacgggcttccatatcgcgtccatcgccaccatgcaagtgctgctcgccgtgctcggtgccttcgaaaccccgaccgtgcaggccgcgctcccccagatgttccggcagcacggcccggccaccatgcgccaaggcatggccgtgatcaatcaggtccaacagctgagcagtctgctgccgagcttcctcggcggcgtgctgtacgcgatgttcggcatccgcctcatgatgatcatcaccatcgtgagcttcgccggagcggccgcgctcgaatgtttcattcgcctcggcgccccggatcgcggcgacgaggagctgcccactccacttgaagacctcaaggcaggcgtacgattcctcatcagagaccggccgaatgtattcaagctgctactgttcgcggcggcactcaattttgtgcttatcggctattccggcgttggcttcccgtacacgattcgtacggtgctcggcttcgacgccaccatctatggcattgccgacggcctgatcggcgtatccggtgtggcgggcgccttcaccaccgccctgttcgccgcgctcaccgtgctgatggttccgctcgccgagcagttcgaggactgacgatcggcgcgcacgccacatcccgtcagccagtcatattcgtcgcccataattgaatcaccgcacaaaaaggcacgaaagaggtacctatggccacgctcaacccccaatcattggtcacattgtggcagatcgaacagtatggttcgttctccgccacggccaaggccacgggttggtcgcagccggccatcagccagcagatcaaaaagctggagacacagtgcggttcgactctggtgcaacgcacctcgcatggtgtggaactcaccgccaccggttcgatgctcgcccgccacggcgaggccatcgccgatcggctggagcgggcggcccgtgaggtcgaggattatcggcatcatcggtttgctcacctgcatttggtggccccaccgtcaatctgctctactatcgcggcccgtaccgtggtcaagctcagtatgttcacggacatcgagctgagcctgattcagatggagccgccggaggcgatcggtctgatttcccaaggcaaggccgatgccgccgccgtgttccggtacagcagcatcccgaacttcctgcacatcggcgacgatctgaccttccagtcgctgggttacgatccgatgcgactgctggtgcaccgctccagcgacatcgccaaacgattcgaggagaccggcgaacccgtgccgctgtccgccgccaaagacgagcattggatcgccggctgccccacctgccgcgcaaatttggtgaaactggccacccgtgccggattcaagccggatatccgccactgcacggatgattactgggccacgcagaacctggtcgaggttggcatgggcgtctcgctggtgccggcgctcgatacacatatcaatctgcaaggcgatctggtggcctgtcccatcgccgacgattttgcggcgcgcgaggtcggcatcgtgactcgtgccggcgaccatcgtcccgcgctcggttcattgctcgaagagctcgagcgcacgtcactcaaatatttgagtgccaagtagtcggacagcgataagcaagcttgcgaacgccatcacgatttcggggagccagaccgttgagcagcccttctgtaccaggaacaatgacatgttatgagcatgaacaacgtttcccagtcaacgactttgagcagcgcaaccgccggcgcctcttgctttgatgccaatcacatcgacgtgacgaccatcgaagatctgaagcaggtcggttcggacaaatggacccgctaccccggctgcatcggcgcattcatcgccgagatggattacggtctggcgccgtgcgtggccgaagccatcgaagaggccaccgaacgtggcgcgctcggctacattcccgacccgtggaagaaggaggtcgcccgctcgtgcgccgcatggcagcgtcgatacggctgggatgtggatccgacgtgcatccgtccggtgccggacgtgctggaggcgttcgaagtgttcctgcgcgagatcgtgcgcgccggcaactccatcgtggtgccgactccggcctatatgccgttcctgagcgtgccgcgcctgtatggcgtggaggttcttgagattccgatgctgtgcgagggcgccggcgagagcagcgggcgcaatgatgaatggctgttcgatttcgacgccattgagcaggcgttcgcgaacggctgccatgccttcgtgctgtgcaacccgcacaacccgatcggcaaggtattgacgcgcgaagaaatgctgcgattgtccgacctggccgccaagtacgacgtgcgtatattctccgatgagattcacgcgccgttcgtctaccaaggccacacgcatgtgccattcgcctcaatcaaccggcagacggccatgcaggctttcacctccacttcagcctcgaagtcgttcaacattcccggcaccaagtgcgcgcaggtgattctcaccaatccggacgatctggaactatggatgaggaacgcggaatggtccgagcaccagacggccaccatcggtgccatagccaccactgcggcctatgacggcggcgcggcatggttcgagggcgtgatggcgtacatcgagcgcaatatcgcgctggtcaacgagcagatgcgcacgagattcgccaaggtgcgctatgtggagccgcagggcacgtatatcgcgtggctggatttctcgtcactgggcatcgatgacccggccgactatttcttcaagaaggccaacgtggcgttgacggacggccgtgaatgcggcgaggtcgggcatggttgcgtgcgtatgaacttcgccatgccctacccgctactggaggaatgcttcgaccgcatggccgccgcacttgaggcggacgggctgttgtaaaaaatcgcggctccccacagagaggggagccgcggaacgcccgaattaatcgaagtcggcacccaacgcttcgagtttgccgcggaagtcggcgtagcctcggtcgatcaggctgatgccgtgcacgtccgaggggcctgacgcggccaaggccgcgatcagatggctgaacccaccacgcaggtccggcacgtcgatgtcgcgtccggtcagcggggtcggtccgaagatcacggcggaatgcttgtagttgcgctgccggaaacggcacggcagcgagcccaggcactcgcggtacaactggatggtggcacccatctcgaccagcggcttggtgaagccgaaacggttctcgtacacggtctcgtgcacgatcgacaggccgttggcctgggtcagggccaccacgagcggctgctgccagtcggtcatgaacccgggatgcacgtccgtctcgatcgccacgggcttcaagtccccgcccggatgccagaaacgaatgcccttgtccgtcacctcgaatttgccgcccaccttgcggaacacgttgaggaacgtgatcatctccggctgggtggcacccttgacgaaaatgtcaccgtgcgtggcgagcgcggcggacgcccaggacgccgcctcgatgcgatccgtcagcgacgtgtgcgtgtacccctgcagttccttgacaccctcgatgcggaaggtgcgatcaacgtccacagaaatgattgcgcccctcttctgcagcacgcacaccagatccatgatctccggctcagtggccgcgcccgacagttcggtcttgccctcggccagcacggccgccagtaaagtctgctcggtggcgcccaccgacgggtagggcaggtggatcttcgcgccgtgcaggccgttgggcgcggtgatgtggatgccgtccttgtgttccttgtccaccgtggcgcccagcttgcgcagcgtctccagatggaagtcaatcggacgtccgccaatcgcgcagccgcccaacgcgggaatgaacgcctcgcccagacggtgcacgagcgggccggagaacaggatcgggatgcgcgacgaaccggacagtgtatccacgtcggccacatcggccagctgcacacgcgaggcgtcgatggtcacaatgccgttcgcaccgtccacatccacgtccacgccgtgcagacgtagcaaatcggacaccacatgcacgtcacgaatctccggcacgttcttcagcaccgacttgcccggtgccagcaacgcggcgaccatcgccttgctcacgaagttcttcgcgccacgcaccttgatcgtgccattcaaaggcttgccgccctcgacatgcaacacgtcatccggattctcagccacgccactctcctcaatcaatcaagattcaaaaaatgctaccgtccagtttgccataagccatgtgccgactccgtgaaatgcaccccagccgaactttgatcaccgtgcacaacggatcccataccccccgtcgaatcaaaccgataacgtgatcttcctcacatttgccgccacggtgttctccatacttctacgctacgattcagggcaatggcatcagacgccatggccacaagcaaaggagcattcatgaccacagtcgccgtcatcggctgcacgcacgccggcacgttcgccaccacctcgattctcgccgagcaccccgattggaccgtccatgttttcgagcgcaacggtacgctgtccttcctctcctgcggcatcgccctgtgggtgggcgaccacgtatccgacccgaagaaaatgttctactcctcccctgccgctctggccgaagccggcgcgaccatgcatatgcgcaccgacgtgacgtccgtggacctcgacgccagaaccctcacctaccgcgcgctggacgaggccggagaccccgccgaacagaccctcgctttcgacaaactggtcgtgaccaccggctcgcgcccggtcatcccgccgatccccggcatcgacagcccgcatgtgctgctgtgcaagaactgggatcacgccatcgccatcaaggaaaaggcgaaaaccgccaagtcggcagtggtgatcgggtcgggctatatcggcgcggaaatcgccgagcagttcagcgtcaccggcgtcaagaccacgctggtcgacggccttgatcgcccgctggccaataatttcgataagaccatcaccgatcaggtggcggccgcgttcgaggagcacggcgtcacgctcgcgctcggccagaaggtggtcgagttccgcgacaatgacgacgacaccgtcactgtggtcaccgaaaagggcgagtacacggccgaaatggcgattctggccgtcggcttcctgccgaacaccgacctgctcaagggcaaggtggacatgctgccgaacggcgcgatcgtggtcgacgactacatgcaggcgtccgcgccgggcgtgtacgccgccggcgactccgccaccgtgttctacaaccccaccggccagcacgattacattccgctggccaccaacgcggtgcgccagggcctgctggtgggccgcaacatcgagacgccgaccgtgaagtacatgggcacgcaggccacgtccgccgtgcagctgtacgatctctcgctcgccgcctccggcctgacccgcgccggtgccgaacgccgcgggctcacggtccgcgagacctcgctcaccgaggattatcgcccggacttcatgctcaccaccaccccagtcacgtcgattctgacctgggacccggaaacccgcaaggtcaagggcggccagttctgttccaaggccgatatctccggcgcggcaaacgtgatttccatggcgattcaggccggcttcaccatcgaccagctcgccaacgtggacttcctgttccagccgaacttcgacaagccggtctactacgtcggagccgtggccatgaaggcggcggccgagtaagacggctgtacccaccgcaaaaaagaaaccccggcgtgatgggcgccggggagagaaaggagagaagaagaaagaggttaagttatgcagcttgttcggccgtgattacatataacagcaacagtttcaatgcaacatgggcactgtctgggaatcgtctgggaatcacggcccgtacaggctgttgcttgtttttggagccgatttaccggctggccttgatcttgtgggccagttcggcgtcccacatcgcgccggtggcggacatcaccgagtccgcgccggcgtcacggtacgcctggtagtcggcgggcgagaccacgccgccgacgccgttgatcgcgaaatcgagcccgagcttttcacgaatcgcggccagacgggcgaccatgtcgaggccggcgccacgaatcgcattgccgcacacgcctgagtgatcgcggcccgcgccgggcagggcctgattgccattggcatcgaccagtttggcggaaatcgtattgatggtgctgaagccctgcacggtgccgtggcccacggtggaacgcaccataagctccagagcgtcgtcgctggggatgtaggcgagcttgaccatcagcgggatgtcgccgatctcctgcttcacggcctcggtgatgcggcccacgagcagcggattgtggcatagcaggcggttgtggccctcgttggggcagctggtgttcatcaccatgagcttggcaccggtctccttgaccaggcgggcggtagtggcatggtcggcgatgtattcctcctcgctcatgccctccacacgcgagccttggaagctcgggaccagcacttgaccgggaccggcggcctcgatggcggcgcgcatgtccggctgccagacgtcagggctctgcgagggcacaccgaagctgttggagatggaaatcggctgttcatagttggtgtcggccagcacgccttcgtccagttcggcgctgcccggcgtcagtgaaccgtccgccgacttggggtgtacggcgagcacgttcgggaacgggttgcagccccaggcgcgcgaacgcacggttttgtaggtcgccagatcgaaacccatgtggaaagcggccgtggtgaaacggctgttgagcagcgggcctgcgggaatgccgaaaggcaggttgaccggctggcccaaaaaggtggccaaggcaccctcggaggcaccctcgctggtggttccggcggcatcggcaccgttgccatccttcagcgcctcggcgaacgcgccgaacggcccttgctcatagttgtcttcgtaactgcggctgacatcgtaaaacggctcaaaatcactcatgcttcaacgataagccaacctgcatgcgcacacgcacactcaacccatcatcgcgccgacaaacgaaataatggcgaaagcggcattggctaccacaaagatgatgaacgtcggagctgcccagccaaagtacgtgtctggaatactacgattcgtacggtgatattggcgcatctctttgccgtatatcacgaatatgataatcgatccgatcacgccgatcacagatagcgacaatgagaatatcaaatatgcgttgtcatcaagatagttgccggcaagggtatcgatggcgccggaaagaatcgcattgttgaagatgtgcagtgcaatcgaccaaaccaacgagtattccatggccacgaatcccagaatcaggccaaagaggaacgcgaatgtgccttgcactacgtcgtcatggaacaggccgaacaccattgccgaggtgacgatggcgaagttcttgcccaacggcttgagctccttcatcagtacgccgcggaacagtacttcctcgcaaatcggagcgaccagcccaacgtacagccacatgcttacggtgacgctggattcggcgatgctgtctgacgtgggagaggcaagatcggtgcccagcatggaaaaagcgacctgcaccaacataacgatgccttgcacgcccatgcccagcacgatgaacatcaacgcccagagaggctgcatgcgcccgccgccatattggctgatgtggccaagctgattgggctccccgtacgagtcgcgatgctggccaccaagccagaattcgcaggtgaagatgtcacggtggcgcatgagcagcagaaatccgaacgcgacgaacaccgatatcaggctgatgatgccatcccactgcacgccggacaaatcgctcgcggttattacgccgacgataatggtggcgaccattgcgcccaagagcatcatgccttcataggcgagagtcagtcccattacacgattgaccaccttgcgacgccacgtgcgccatacacggcgaggatcgatcggcatgaccacgggcattgctgcgggcatcgtggcaggcattgcgttgggcattgtgactggcattgccggagccgtttgcacgaatggttgcggcgcagcggaatagggttgtggcgcgtagcccactggttgagcgtagtacggatgagcgaggggctgtggagccgactgttgcgccgggtatggggaataggcggattgcgccggatacgtcggctgcgtgggatacatcggctgggcaggatacgtaggttggacgggatatgtcgggtatacgagctgcgcggcgtattgtgcaggctgcacagcaggtattgcggcttgcggcacaggttgtgaaacaccttgtgaaacaatccgtggaacaccccgtgaaacatcttgtggaggtagcggttgtgcccatgcctccggctgacccgcatattgcggctgcatgctcggcccaggctgaacatactgtggcgtctgtggcatcggcgtctgtgactgtgccgcagactgcggtgccggtcgaggtggcaacggttgcgctgacagcgattgcgccggagccgtatcggaatcgttcgacggattcatgtcattcatggtcatgatgctcaacctaaccgtcattactggatgaatcgtgattatgtccacaaatgtgtacgaattcaggcacagtatttcgaacgctaggacggagttcatgagtgttgaggaaagcgccgccacgccggtgttggtggctgcggtggataacgaccgtatggcgttgttggcactgaagggaatattgccgcaactcctgcccgccgcgcaatggatgtggggcgcgggcaccagtgagacctttgtttgatgcgatgcaagcgacccaataatctcaatcagacacagagccaacggccctgggcctgcaattatggactcgcctttcggcgaggctcaatgctggcctcgctgctgtcgcagctcggcacagggcctgctgaaagcccaccgggctttcagcaggccgatcgcggctaaataatgccgcgatcggccaacggccctgtccagtctgcgtcctcaggctcgcgggcggactcgattctttcttcggcccagtgtttggcggggatggtcttgggcttgaaggggaacttttcggcgcgcatcttttcgtaggcggcgatgtcgtcctcgtgctgcagcgtcagatcgatatcgtcgtagccgttcatcagacgccaacgcacgtaatcgttgacctcgaacggcagggtcacgtcgccgcaagtgacagtgcgggtctccagcgagacagtcatctcacgaccaggctcttcctccagtagcttccacaggagttcgacggactcctgcggcataatcgcggccagcacgccgttcttggcggtgttgccgtagaagatgtcggcgaagctcggcgcgatgaccacgcggaaaccgtaatcgtgcagcgcccacacggcgtgctcgcgggaggagccgatgccgaattcggggccggcgaccagaatctggcccttaccggcgtattccggcttgttgagcacgaagttcgggtctcggcgccatgcgtagaacagggcgtcatcgaagccggacttggtcacgcgcttcaagaacacagcgggaatgatctggtcggtatcgacgttggagcggcgcagcggcacgcccacgccggtcagtgtggtgagtttttccataacaattttcctttcggggatctctcccccagtcagtcttcgactgacagcccctcgtcagagggggctcacgtgtattgactcagagatcggcgggagacgagattgtgccgcggatggcggtggcggcggctacggccggcgacgccagatgcgtgcgcgagcccttgccttggcggccctcgaagttacggttcgaagtggaaatcgagcgctcgttcggcaccagcttgtccgggttcatgcccaggcacatcgagcagccggcgttacgccattcggcgccaaagtccttgaacaccttatcgaggccttccttctccgcctgcaaacgcacgcgggaggaggccggcaccaccagcacgcggtggatgttctcggccttgcggtggcccttcataatcgcggcggcctggcgcaaatcgtcgatacgaccgttggtgcacgaaccaatgaacacggtgtccacggcgatgtccttgatcggcatgcctggcttcaaacccatgtatgtaatcgcacgttcggcggcggcgcgcttggtggcgtcggcgatcttgcccggctccggcacggaggcggtgatcggcagaccttggccggggttggtgccccacgtcacatatggaccgagcttggtggcgtcaatatccaccaccttgtcgaatacggcatcgtcatcggtcttcagcgtcttccagtacgccacggcctgatcccacagctcgccttccggcgcgtgcggacggcccttcaggtactcgaacgtggtctcgtccggcgcgatcatgccggcacgcgcaccggcctcgatggacatgttgcacacggtcatacgttcgtccatggtgaggttgcgaatcgcctcaccacggtattcgatcacgtaaccctggccgccgccggtgccgatcttggcgatgatcgccagaatgatgtccttggccgtcgcgtccgcgggcagcttgccgttgacgttgacggccatggtcttgaacggcttcagagacagcgtctgtgtggccatcacgtgttcgacttcggaagtgccgatgccgaacgccagcgcgccgaacgcgccgtgcgtcgacgtatgcgaatcaccgcacacgatggtcatgcccggctgggtcaggcccagaatcggggcgaacgcgtggacgatgccctgatcggcgtcgcccagcgggtgcaggcgcacgccgaactccttgcagttcttctccaaagtcgtcaactgcaacgcgctcgtctcatccgggttcgggcgatcgatatcaacggtcggcgtgttgtgatcctcggtggcaatgagctgatccacgtgacgcggcttgcggccggccaagcgcaggccctcaaacgcctgcgggctggtgacctcatgcatgagcatcagatcgatgtacagcaaatcaggagctccgtcgctgcccttgcgcaccagatgatcggcccagaccttctcggccagtgtcgttcccatagtgattcctccaaaaaattccgcgcgaggtattgtgttcgcgccttgttcgtggtattagcctatgtgcttgcgatgggcccggccatgagcatgccggatattgagatacggtcaaatgatggcctcaatatgactcggacccgactcgaacatgacctagtcatgactcggttccgctccagacatgtctcttcggcatccacgaacgccctttcaacttcatggccaccctgtgagacacttccccaatttgccatttcactatgtgagatggcataatcgcccttattatgactgattcccgggaagaaccattgaacaacagcttgaccgagtccgagccggttgaagacaccaccgccaaggacgatggggaaatccattccggcgttggcgtccttgataaaaccgtaaagattcttgacgcactggaatccggcccgtctacgctgggccagcttgtggccgccaccggtctcgctcgaccgaccgcacatcgtttggctattgcactggaacgccaccgtttcgtactgcgcgaccagcatggccgattcgtactcggctcccgtttcgccgaacttgccgccgcagcaggcgaggatcgtctgctgaccgccgccggcccgatcctgcagaccctgctcgatcgcactggcgagtctgcgcagatttaccgccgccaaggcgatcagcgcgtgtgcatcgccgctgtggaacgcacctccggcctacgtgattccattccggtgggtgccatgctgtcgatggaagccggttccgccgcccagattcttctggcttgggaggattccgaccgtctgcaccagggattgcgccacgccaagttcaccgccaccaagctggccgccgtacgcaagcgcggctggtccgagtccgtgaacgaacgcgaagagggcgtgtgctcgatttccgccccgatccgcaacgcctccggccaggtcatcgccgccatctcgatttccggcccgaccggccgcatgggtgccgcccccggacgccgctatgcgccgctggtgatggccgccggcaagtacctcaccgaggcactggtcaaagccgttcgctgaaacataccagtcaatccaaccgatagcccagaaatcccgcgtcacaacgaaagagacgcgggatttctgggctataggaacaagagtgtggtgttcgcgcaggatgggcaagatcgggtagccggcggtggcaatggtgacggacggtccgaacatcgtgtagtcgccgatccatatctccgcgtcgtcgaccatgctcatgaacgcgttgatgtagatgactttgccgaggtgtacgcgacggcatccgttgctcgcatgcaatggcgtttcgatgtgcacgccgtcgccgacttcggcgcacatgtctttgagcagttcggcgcgccgctcccgttcggtgggtttggtctggttgtattcccatagtttgttctgccatgcgagctgtccgtccatgatggccgggtcgtcgtagtggtatggcaatcccgcatccctgcgcgccgtattgtccatgtcgtagtcccttccgtatcggttcatcggtctcggcccatcccatcgtcctttgttcgggccggaacgcacacggcctttctcaccagcatgaggccgcccgcgctgaccgattcccatcgcaacgtcgccgcacgcccccacctcgcgcgccgtccgacacggtacggagcgttcccgatgcggtacagaccagaccggcaatggccacaggacgttccctctgacgagacgatgccgtaggcatcatgcaggtaatagcgagccgacaaaacgcgcgcagcgcgggttccctctgacgagggagctgtcggcgaagccgactgagggagagaccgcggccaaaggccgcaaaaacaccgcatcggccgcaggccgattcctatgaagacaaacacgccatgaatccgcacagtgtaggatagttgacaacacgagacgctataaggcaaggtgctcaatgacgacacaacccgatggaacatatgagatgatcatcacggccgagtcgattcagtcgaatgagcccgataccgattcctataccgacccttccttcttcgccaacatgggaagtgcgtatacccccgaagacgtcaagttcaagcctgcggacggcgaaccaatcaaacgaaatcgtaacaagggagaacgccggatctcatgtcagacactgccacgtctgacctgtcaggtattcgaagataagcttctcgaattgccgtacgacaagcgcgagtccttccccatctgtcggtacggtctggataagccgctaatcaccggcatcttccccgatgaggaacgtttcagaagcggctgcaagaactcaatcgaatacgtgcgttattggcgcggaacggatgtacagatgtatctctactgctggaacatcttctcgacgctattcttcgttcaggagtgtctgaaacgcttcggcaaaccgaatgacgccttcatcttgcggtatcgtcgtaagacctcccaagaagcctcgaatgctgacgcttcggtagaagaagaaaaaggttacgcttcacccgatgatgagaagtcccctgtctacaacaataagtattcgcagacactgttggattccaagaacatcatcttccgtggcgctcccggaaccggtaaaacctatcttgcccgccaaatcgccgccgatatcgtcagcgacggcaagcgcggcgattggtccaagcttgatgatgaacagcgcagacgcatcggtttcgtccaatttcatcccagctacgactacacggatttcgtggagggcatccgccccgataccgaggagacggatgcgacgggaactcacggcttctccatccaggacggcatattcaagcgtttccttgacaaggctcgggacaacgtcgaacagtcccggctttccaaggaggaacggagggaaccatccgttcgggaacgtctggacgcctactttgattctcttgatttcgacgacaatcagttcagaatctcgactggtaagcctttccaagtaaccaacgttaccgaacatcatgttcttgtgtacgctccccacggcatcaaacaggaattaagaatacgcgtccaagaccttctggcgcttatgcaatccagcacccctccaacaaatggtgaagacgtgcatcatattctcgagcgaaagcgtcgacagcgggaggactcctatgcattcgccttgctacaggaaatccaaaagcacaagccttcgtcggcttcacgagcatccgaaaaggttcttcggaaacccttcgtgttcatcatcgacgagatcaaccgaggtgaaatctccaagatattcggcgagctgttcttctccatcgaccctggttatcgcggccctgccggcaatgtgaccacccagtacggtcatgagctgtatgtgccggacaatgtctatatcatcggcacgatgaacgacatcgatcgatccgtcgacacctttgatttcgcgatgcgccgacggttccgcttcatcgaggtcaaggccgaagacgggttggacatgcttgaagaacttggaggcttgtcggaggaagccgagagccgcttgacgaagctgaatgagaccatatcctcccccgatatcggtttgggttcggattaccatgtcggccctgcgtatttcctgaatctttccaaatccgaatccacggcgaaagcgttcgatgacctttggcgtgatttcctgcaaccgctattgcacgattacgtgcgcggcatgtataacgaaacagaaatcatggagaagctgaaagcggcatatgaagatgcttcggattcgccgcagccagcggaacggtcggtatgagtaccgtatcgatcaaagacaactcccgcattgaggcaaccacgctggctcccgtcaaggatatcgtcgcggctgtgtccgatcgttccatagcccggctttcgcaagaaggtctgctggtgttcccgcagtcgattcaggattctccggacttggacgaatgccagatggtattggaaaaggacagtggaggctaccgctcagggaatctgatggggtaccttggctatcaagacgaacagttggtcatcgattcacgttttgcctcatccgcaggggatttcttcctgcaatacatgatgtatcgtgtactgaatattcccaacctgtcaagcctgagtattcaatccgatttatcgacgagactgttccaattccatgtattcatgtttccatactgtttacggggagctttaagacaagggatttatcggacatacattcagcacaagtacaatgacagccacatccgtggaagaattgatattccacggcatatcaccactaatattcctttcaccggcaatatcgcatatgatgtgcgcgagcttactgcagacaatcctctcacacagctgattcgtcacacaatggaatatatagcccttcaaccgtacggttccacgctattaggcaatatccgcaaggaggtacgttacataatcgaatgtactccctcatatcgtcgcgcaaaccgcagcaccgttctggaatacaatctcagacatccggtcaatcatgcgtattttacgcaataccgcatgctgcaacaattatgcatcatcattcttagcaatcagcgtcacgcgttcaacggtcaggaaaaccgacttcatggcattctcttcgacggctcctggctatgggaggaatacgtcgattccctgattggcgatagcttcttccatccgcgaaacaaattgaaagaaggaaaacaacacctgttcgaaggtggcacaggccctatctatcctgatttcatcagccgttccaaacaacatcccatcattgcggacgccaagtacaagcctatatccaatattcacaaagaagattactggcagattctggcatatatgtaccggtttgattccaaactcggcatcttcctctaccccgatgcgaagcaaacctcacgcaaggagctgcacatgctgcaaggaacgacgttccacggagacgtcaaagcacgggaggacatcatcgtggccaaactcggactgtcgattcccgatacggccgtcgactatgccgatttcatatcccgcatgtcaccatgcgagaaagcgtttcgaaccggattgctcaacaccttcaacacgtattgacgccgtaagtcgaacattctattccacgcgcctgcatggcgcgggatgatgaggaagcggtacaagccgcgaggaaggagccgacatgttattgcgaccatcgattcgaatcgtcgttccccgacgagacacacgacatatctcgaacgcctaagacacccaatacgtatgaaacgtttggagctccccaagttcaagcatcggaacaggacgaccgcctgttcgtcatgttccatgggtacggcaatgacgagcgtgagatgatccgcatcatcgacgctgtctacgccgccgcgagtgctcgcgcatgggcgacgccgtcgtctccctgctcaactcccccatgttcgcaggccgccgcaagatcctcgtcgggttctcccagggcggctatatgtcgtatcgcatggtgctcgagcatccgcacgtgttcgacgcggcgatcctgatgagcccgtcgttcaagggcgaggagtcgacggacctcaccggtttcgactccccacccgtttcctgctcttgtacggctcgcgggaccgcacgattccacctgcggaccagcagaccgcgcgtcgcgtgctcgaggccaccggccggctcgaataccgcgagtatcctggcatgggtcagccatcgtcgacgaggagatcggcgacatccgcgccttcctcggtctctagccggttccggacggaccgcccggttccgctcggtccgtccaccccgccatccgaccatccgtcacacacgtcacgcacccgtcaccgcccgcaatcggtgtcggcggcacgcgtcgccgccgtcacacgccgaggctgcgtccgatgacgccgaggaacgtttcggcaccggcacgcacgttctacggttgcacaggtttcccgaattgcgggtactccaggccgtgcaggtgatttcgacgtgaacggttcccgccgcgtagactgttttctccggaccaggcgaacctcctgcgtcgcaccccgaatccgtccgcaacggctggcatcgccatgccggaccttgatccaa

SEQ ID NO: 1454 - DNA, 10759 bp, Unknown
  R257_15m  MAG No. k141_23360
ccagcgcatacaagctatctcgagccacatacgcgaaaagggcctgcataagcagacccttttcacaaggaatcaacccctaactagcgcaagctagcgggcatcaaccgatcagttgttgtggaagccggagtagttcggggcttcggcggtcatcacgatatcgtgcgggtgcgattcgcgcagaccggcatcggtgatgcggatgaacttgccacgctccggcatctcggcgatgttgtgggcgccgatgtagaacatggactggtgcaggccaccgagcatctggtagagcacggcgttcagcgggccgcgatacggcacttcgccttccacgccttccggcacgaccttatcgctggaggtcacgtcggcctggaagtagcggtccttggagtaggacttcttgccgcgcggggccatggcgccgagggagcccatgccacggtacagcttgtactgcttgccgtgcaggagcaccttctcgcccggggcttcctcacagccggcgagcgtgccgccgagcatcacggaggaggcgccggccacgagggccttggcgatgtcaccggagtagtggatgccaccgtcggcgatgcagggcacgccagcggcacggcaggcctgggcggcctcgtacacggcggtgagctgcgggacaccgacaccggcaacgatacgggtggtgcagatggagccggggccaataccgaccttgacggcgtccgcgccagcctcaatcatggcctgagcaccggagcgggtgccgacgttgccgccgatgatctgcacgccgtcgaaggcggagtcgtgcttcaggcgggaaatcatgtcgagtgccagacgagcctcaccgttggcggtgtcgaccacgagcacgtccacgccagcctccatcagagcggaggcacgctgccaggcgtcgccgaggaagccgacgccggcggccacgcgcagacgaccctgctcatccttggtggcgtccgggtactgctcggtcttgacgaagtccttgacggtgatcaggccggtcaggtggccttcctcgtcaacgagcggcagcttctcaaccttgtgctgagcgagtagacggtgagcgtcgtccttggagatgttggacgggccagtgaccaggttctccttggtcatgacatccttaaccttcagggtgtcgtaatcctcggaggcgatgaagcgcatatcacggttggtgatgatgccgacgagcttgttgtccttgtccacaaccggcagaccggagatgtggaacttgccgcacagcttgtcgaggtcggccagcgtgacctcggggttgacggtcagcgggtcggtgatcataccggactcggaacgcttgaccacatcgacctgagcggcctggtcgtcgatggacagattgcggtgcaacacaccgatgccaccgttacgagccatggcgatggccatctcggactcggtcacggtatccatggcagcggagaggaccggggccttcatcacgatcttgcgagtcagatgagtgctggtgtccacttcggagggaatgacatccgtctcgttcggcaacagcaacacatcgtcataggcaaggccgagcttggcgaaaatcgggggaaggggagcatacgccgactgggcgtttaattcatcaaggtttgtagccatgtaaacactatatgaaaatgcgctgaccttcacgacacacgcttgtgagcgctcacttatccgctgccgggtcctgcacctcacccacctgcgagtcccgcgaatttgcaggcgaatcagtcatcgaatccgctgcctgagagccaatcgaatcccggctctcccctactgcagactgcgatttaggcactgtatgctgcgcgtttttacgtgcggattcgaacgtcaggttctcggcttggatctcgggaatacgatgccgcagataggggtacatcgtggctatggtcagcaccaccacagcgatggccatgcccacggccacgtgctgcgctttgaagaacagaatcgtcagcgaaccgaatgcgatcaacgcggcccatccccacagaatcagcacggcgccacgcaccgaatgcccgatcttcagcatgcgatggtgcaggtgcatacggtccggatgcatgggcgactggcctttggccaaacgccgcacaatcgccagacacatgtcgagcacaggcaggaacaacaccagaaccggcagcagaatcggcatgaacaccggcagatagatgctggcatgaatcgaggccgggtcaagacgtccggtcatcacaatcgaagcgcaggtgatgagatagccaagcagcatcgaaccggaatcacccatgaacagtttggcgggatgccaattatgcagcaggaagcccacgcagatacccaccatcatcacgtcgatcagcgtggccaacgaagcataactcggggaagaccgggcgatgatatacgaataggcggcgaacgctatgccaccaatcgccacgataccggccgccagaccatcgaggccatcaacgaaattgaccgcgttgatcgaggcgacgatcaggaatgcggtgatcgccatggacagactcggcgaggcggtaatcagcgaaccacccaaaggcagtgagatgatctgcaatccgccccaagccacgaatacggaaatcagcagctggccggcgagtttcagcatccaatcgagatcccacaggtcgtcggccatgcccagcagactgatcatgatgccgccggcaagaatcacccacatctggtaattgccgttgaacaatcccgagagaaaaggcagccgactggcgaatacggtagccacggcaaaaccgatcagcatgccaaggccgcccatgcgcggcgtgggaatggtgtgcacgtctcgggcacgcacctcgccaaccgcaccgatttcgatggcgacgtggcgaatcagcggagtcaccagccaggtgacgccaccggcgatggcggcaatcagtaggtagattctcatgcgccgagtcccccgccgttgaggtggagggccttgcgaatcacgttttgggcgatgacgccttcacgcaggatctcgatgccgtcgcgcgcgtacggatcggctttgacgacggtgctggagacatggccttgggtgggaccgccgtccagatacaggtcgacttcgttgccgaacgcgtcaaccgcctcctggacagtctgtgcgctttcgtcgccggaacggttggcgctggacgcggccagcggaccagtggccttgagaatcgcgaggcacagcgccgaattggggatgcggatgccctgcgtgccggggcgaccatcggcggtgtcggccaaagtctccaacgtgcagtcgggccgggctacggcaatcggcgagaacgcgccgggcaggaacgccgccgacaaacgattcagtggagacggcaggtcgagaccgagttcatcaagctggtcggtggatgcgagcagtacctgcaacgccttatagcgcgggcgacgcttgagccggtagatacggtcgatggcggccttattacgcggatcgcacgccactccatataccgtatccgttggaatgacgaccaatccaccatcccggatgacacgcgccgcctgtgccagcgattcatccgtgactttcagcgttgttccgccctccacgctcacgacacctccgttcgcctgtgtattcacaatctaccattgcaccattgcgccccgacttgcatagttcatcatcgctcgtttgccgtactgctgttttccgattcgccccatacgcacagaccgtagatacaatgagttcatccatgctctttcgcgaaattacaggagtgttcaatgagcggaatcaatgctgaatccaccaccatgcctcccgtcgaactgcgtatgccgcgcgccagcgagcgcgtgttcgccaacttcaacttcactgtgctggattgttgcccggtgacgattggcgagggttgcgtgatcggtgccggctcggtggtgacgcgcgatattccgccgcacaccgtggccgtgggcaatccggcccgtccgattcgcgaaatcacggacgcggacacctccgccctgcagtattacgcgcagtagcagcggcggccccgcgcctgtggctacttctcggcgaagagatagcggtctcggccggtccaatctttgccggtggaggcggtggcgaaacctgtggccttggcataggccactaatcgctcgccttgggtgagatcatgctccataaccaatacgccgccgggcttgagcaggcgccaggcgcgctcaataatgcgttcagggatgagcgtgccgtctgccgaaccgccgtatagcgccagttccgggtcccagtcgcgtacttctggttgttccgggatgtcggtttgtggcacgtagggcgggttggtgatgacgatgtcgatggtgccgtcgagttgcgccagcgtggccagtgacgtggcgtcggcgacttccagttggtaattggaggcgatggaggggtatcgtttcgcggttaccgccagattgcgccgggtccattcggcggtacgcggggataattcgacggcccatacttggctgccgggcacttcgctgactatcgacaggccgatggcaccggaaccggcgcacaggtcgaccatgcgcgggtggatcatgctgtgccgggtcagccagtcaagaccggcctggactacggtttcggtttccgggcgcgggataaagacgccggggcccacctgcaggtcgaggtagcggaaaggcgtgtggccggtgatgtattggagcggctcgcgtttggcgcgtcgggaaagcatggcgtggaaggcggcaaggatattggtgacggggtcggcctgaccacccccagtcgctgcgcgacagcccccgccggcgggggccagcgaatcgaggccctcccccatcagcatggccttgtcgatatcgcgtagctcggcgtccacggcctcggccagcaacagtttggcatcatgttcgggcgtctcgatgccggcttcgcgcaactgcgcggcggcttgacgaatcaggtcggctatcactgctggttggccagacggtcggcttcgtcggcttggatgtcggaatcgatgacggcctgcaggtcgccatcgagcacggcgtcaaggttgtaagccttgtaattcgtgcgatgatcgacgatacggttttccgggaagttgtacgtgcgaatacgttcggagcggtcaagcgaacgcacctgcgagtgacgcatgtcggcggcttcggcggcctcttgctcatgtttcatggccagcaggcgagacttcagcacacgcagcgcggcggcgcggttctggatctgcgacttctcatcctgcatgttcactgtgatgccggtgggcaggtgggtcatgcgcacggcggaatacgtggtgttcacggactggccgccggggccggagctcatgaagatgtcgattttcaggtctttcggatcgatctcgatctcgtcgtcatcctcgtcggcttcggggaacacaatgacgccggcggcggaagtctggatacggccctgcgattcggtgacggggatgcgctgcacacggtgtacgccgccctcgtacttcatcgaagcccacacgccgtcttcgggagcgggcgtgcccttggcgcggatggcaatctgtacgtccttgacgccgccgagctcggtggtgttctcggactgtacgttcacgctccagccacgcttctcggcgtaacgggtgtacatgcgcagcaggtcgccggcgaacagtgcggcttcttcgccgccggtgccagccttgatttccatgatggtgtcgcgtgcatcatccgggtcacgcgggatcagcgcggtacgcaacttctcctcggcgtcgggcagttcggcttcaagacgcttggcttcctcggcgaagtcggcgtcctcgccggccatctcctgagcggctgccagatcgtccttcacctgcaaccaggttttgtaggcgcccacgatggcacccagttcggcgtgacgacggcccagcttgcgcagcttgtccgggttggacacgacttcggggctcgccatctgttcttcgatggactggtactcctcaagcgcggttgccgccgccgggaactgttcgtctgccataacacgctttctttcgtacggtggtgtctattcggttgtgcaggtcaaaaaaatgtcaaagaatacaaaaacgccagtcctcgatcgggtatgccggagcatgccgaatcgaatcggactggcgtgaagtatgctacttgctcttcttgccgtagcgcttctcgaagcgagcaacgcggccaccggtgtcaagaatcttctgcttgccggtgtagaacgggtggcactgagagcacacgtcaacgaacatgtgatcttccttgccagcggtgcgggtcacgaaggtgttgccgcacgagcacgtcacctcaacggggtggtaatcaggatggataccctgctgcattttacgtctcctatggattcgggggacccgggtcgtcatgcccctatggcaggacgtgaaccggaacctaagggattgtacgcgcctatctggacgtgaagacgcgctgtgccgccgcaggaggcgacgcaaaagagtggggccgcaggggcttgaaccctggaccgggcgattatgagtcgcatgctctaaccgactgagctacggccccacgttcgctgcgtaaaacagccaacttgcaaagtgtagcatgaacccatcaacgccggcacacgcgccatgcacccatgccatgcacccgccagcacaacaagcggcatctcccggcgctacttctcccccatgtaccccaacgggttctcgatgaaccgtcgcaagcccatttcggccgcgccatatagcgagggatgcagcgccaccggcggcacgaacacgcggatcttcacattcgggtatcccagaatttccgaacgcagccggccttcaagcacggtggccagctcgtcgccgaagtgcgtccacagtccgcccaacagcaccgtatcgacatccaccagattcacggcggaagcgatggcggaaaccagcgcatcagcggcctgatcgaccactttggccacgtctggatcccccgcacgccaacgctggaggaatgtatcgatggcctcgctgctggtggcatccccatcctcggcaatgccggcagcctcgaccaaggcgcgacggcccgcaaacgcctcaaggcacccgtggcgcccgcagctgcacaacggcccatccatcgccacggacagatggccgatctcgccggcgaatccgtgcgagcccatcaccacttcgccgtcacgcaccaccgcgccgccgatgccgatatcggtagacaggtaaataaaggaatccgtgcgatccaccacattcaggaaggacgcacgttcggtggcataccccggaatctgagcgatggcggccatcttcgcttcgttaccggccaccacatccagccggcgtaccacgttgaaccgggtgaggttgacgttttcccaacccagattgcgggccaccaacagccacatgtcgtcggtgacgatgcccggcagcgcaagcccggctcccaccactttgcagccacgtcgtttgagtcggctttccaacgggaaggtcatcgcatcgagcttggcgaagatctcgtacgggtcagtgccggtcatatcctcactcacccactcctgaccgagagtgtcgccgttcagatcgagtgccaggcaaccgtagccatcggtgttgatctgcaggccgatgccggcgatggacccgccatgaatctccagcggcgtgctgggccgcccatatgtggtggagacgaccggctcgccttcctgcaccacgccactatcgatcagcatcgaggccaacagcgaaagcgtggccttggtcaggcccgtttccttggccaagtcggccctgctcatgggtttctccgcgcgcaacaaagtgtcgagaaccaccgacaaattatggttgcgcagatcctcctgattgatcctgcgtagacttgccataggctcctacctccttgcacccctagtctcgaacgccgcacaggcgctcacatccgtctatcgcacaatgatattgtgcgtcaaacgattgaaccagatacgcaccctcgcgtgtttccgtttgcaatcatacactgcaatacagtatagtttaatcgtctaacttattggttgtggcgcgccgagacttgcaagcgcgaccctcatcgaggaggaatgcatgacgagagtactggttgccggcgtagatacgtcaactcaatcaacaaaggtccgcattacggacgccgccaccggcgaacaggttcggttcgggcaggccaagcacccggatggcacctcggtcaacccggaattctggtgggaggccttcaccaaggccgccgagcaggccggcgggcttgacgatgtcgcggccctcgcggttggcggccagcagcatggcatggtcattctcgacaagcagggcaacgtgattcgcgatgcgatgctctggaatgacaccagttccgccccgcaggccgccgccctgatcgacaagctcggtgcaactccggccgagggcgacgaaccggacgacgtgaccgcccgcggcaagcagcgctgggtcaaggccgtcggatcctcccccgtcgcttcctacacgctgaccaaggtggcgtgggtggccgagaacgagcctgagaacgccaagaagattgccgccgtctgtctgccgcacgattggctgagctggcgtatcgccggctatggcccggtggccgagggcgaggacgctcatctcgaagccctgttcaccgaccgttccgacgcttccggcaccatttactacgatgccgcgcatgacgagtaccgccgcgatctcatcgccatggtgctgacccccgccgagggcgaggaagccgccaaggcccacgccgacgccattgtgctgcccaccgtgctgggcccgcgtgaggcagccgccgtcaaggccgaccccgccattgccggcaaggacgttgaaggcggctgcatcatcggccccggcggcggagacaatgccatggcctcgctgggcctcggcatggccgtgggcgatgtgtccgtatcgctcggaacctccggcgtggccgcggccatcgctgaaaacccggtgtacgacctgaccggagcgatttctggctttgccgactgcaccggtcattatctgccgcttgcctgcaccatcaacggttcgcgcattctggacgccggtcgcgccgcccttggcgtggactacgacgagctggccgaactggcctttaaggccgagccgggtgccggcggcatcaccctggtgccgtacttcgacggcgagcgtacgccgaaccgtccggacgccaccgcctcgctgactggcctgaccctgcacaacaccaccaaggagaatctggctcgtgcgttcgtcgaaggcctgctgtgttcccagcgcgactgcctcgagctgattcgttcgctgggtgccgagatcaaccgcatcctgctcattggcggtggcgcgaagtccgtggccatccgcacgctggccccctcaatcctcggcatggacgtgacccgtccggccaccgacgaatatgtggccatcggcgccgcccgtcaggccgcctgggtgctgtccggcgaggccgaaccgctgacctggcaactcaccatcgagggcgtggagaccggcgagcccaccgaagccgtgtacgaggcatacgccaaggcgcgcggctgatacgctgccagcacaatccatgagataacaactgaataacgattcctgatgaatgccgccatggcaagcatcgcgaagagccgctgttataccgcgctcctcgctgaagcacacatggcggcatttttcgtttcccacgcaatccacaaatacggctataatcaagtcgtttgaacaagtctggagattcttctatgaacgaccgctcccgtatgatgctgtacgccctgaccgccgtcgcatgcgtgatttggatatggcaatccgccaaagaagcaatggccgatggcacgatgatcagcacctcaaacatcatctttttggtatgcatcggcattgccgccgtctactgcgccgccaacgcattgatattgtggtggcgtcaacccagcaaggaggatgcggagaacgatgacgccgcggatacgcctgacggtaccgataccgacaccgcagatgccgagggatccgaggacgacaccgatgacgatgtcgaaaccgacgtcgcaaccacggatgccgatgcaccgccaaccactaatcgccagtaaccatcgttatcgttcgcccgaatcaagcgaatcatcccacttcagcaaaggaacattatggaagtaacaaccgtgtcaaccgtgatcagcgtggtgctgggcgtcatatgcgcgccttgcggcctgtttctggggctcgttcccatgaaggccgatctggtgaccgccaagcagtcaaaggcctcgcagatggtgagcttcatcgttgccatagtgttcatcggcttgctggtcgcaggccatgatctggagacctgggccatggtaatcggtctggtcatcggcttcgccgttgccaagattcccgcgctgcacgcctgggctttgcacaagtggccgttcttcgagcccaagaaagcggctcccgcccccaagcgcgtcaagaaagccaagaagaagtaa

SEQ ID NO: 1455 - DNA, 10369 bp, Unknown
  R257_15m  MAG No. k141_23626
catacggttctcgcgacaccactgccacaccgtctgctcgttgaagccctcacgcctcgcccattccctgacacgcatgacttaattatatcacacgaaaacaaactaaagcaaataatcaatctagcaggttataaccccggtgtatactggtttttgacactgtgtcaatgttgattcggaggttatggggaatgggcaatacgactacagcaagtgtaacgggcgcgcaagttgcaccggcgaaatcagccatcaaagatctccccatcgccaaagtgtgggcgtttgcggtcggccagttcgggtgggcgctgctttccggcatcatctccaactggctcgtgtatttctaccaacctgaccaggagaccatctcccaaggtcagaccgtattcgtgccgcagggcctggtcgttctcggcatcgtgaccgtggtgggcggcatcaccgccttcgcccgattcttcgacgcgttcgtggacccggccgtggcgtccctctccgaccgttgcgacgccaaatccggccgccgtatgccgttcctgaaattcgccgccctgccgctcgcggtggtcaccgtactcgtgttctggagtccgatcaacggcaccggctgggtgaacgcggcgttcctgttcgtcaccgtgatcggctactacatcgtcctcacgttctactgcacgccgtacaacgcgctcatcgccgaactcggccacgactccaagcagcaactcaccatctccaccgccatctccttcacttgggtggccggcacggccatcgcgtacgtggcgccggtgatttggggcgcgttcgtgccgatgatggggcgtatcaccgccatccgcgtgaccttcaccatcatggccaccgtggcgttcgtgtgcatgctggtgccgccgctggccatccgcgagaaggactacgtcaactcccagcccacctccgaatcggccatcgaatccctgaagcagacgttcggcgacggcgaattccgcaagttcgtgtgttccgacgtggtctactgggtggccatcaccaccttccagaccggtctgccgttcttcgtgaccagcctgctcaagctgccggaaaccaccacgaccatctacttcgtgctcatgaccggcgtctccgtgctgttctatctgccggtcaatatcttggccaataaggtcggcaagaagcgcctgctgctggttgccttcgtgatcttcacctgtgcgttcgcatttgccggcgcccttggttcggccgcgctcggcttcattccggcgatggcccagggtttggcgctctcggtggtcggcgcgattccgatggccgcgttcggcattctgccgcaagccatcgtggcgaatatcgccgacgccagctccaagaccaccggccaggaccgtcagggcatgttctacgcggctcgcacctttgcgatgaagatggggcagtccgtggccatgctgctgttcaccggcgtctccaccatcggcatggcgtccggcgcgggctatcgcatcgccgccgtgtgcgcggccgtgctgtgcggcttgggtggcatcatgttcgcgttctacaacgagaagaaggtgttgagcgtgttggaagcgtgattggggctgccgaagcttgattagcgggtatgcctactccgcctgctcgcccggctcctgctctgttgcgtcctgctgcaagatatccagcgttcgctcgtgcagtagctccttatggttgctgtcatgctgcaggaaatgcgcgtataggatgtccaggtaaatgagaatcggaaattgcggagagatgaccttgcccgcttcgatgttctcccgaagcgccagcagcaccacctcatcgcagtattcatgctgttctggagatttatgggaagtcatcagtactgtccttgctccggactccttggctttgcgcagtgccttgatcaccgccggtgtcttaccgctgatgctgatggcaatcaccaaacaggtgtcatccaacaggacggaattcatcatcatcacatcgctatcggtgatggcggtgatgatactgccgatacgcatgaaccgcagttgcatctcctgcgcggcaaggccggagctgcctcgcccatacacgtagatgcgctgataggtggacagcatgtcgctgagtgcgttgatctggcgctcgttgaccagcgcatagcttttgtccaacagttcctgataagagctgagcgcctgcatcgaccactggtcaggcactgtctgtgcagtgtcctcgcgcagatcttccttgtatttatagatgaattcgcgatacccggcaaatccgatcttcttggcgaaacgggagagcgacgccagggatacgtgcagaatatccgcgatattgggtgccccgaaatccatacgtcggcggttatggatgaagaagtccgcaacgactttctccgtaggcgacagtgtggcgtatacggcttcgatctgcggaatgacgtccttgtcaaaatgagccatgtttccgactttcttgcatgtaccggaaatgatagtacgcaccaagcataccagcgcggttccggtgatgtgcaaaacgaaggcttgtggctcgggccactggtttgcgtaggttatcgtcgagggcgcgcctgatgggaccgcccaaatagtcactttgggccatgatgccgccgccgaggatcacgacctcggggttaagcacatagcagatgttggctatgcccatgcccagataggtggtcatggtgttgatggcttcggcgcagtcggtgtctccctgctgggcaagttcgaatattcgtttgccggacagatcttcggcctgcatattcttgcgcgtggccaccctgcgcacgagggcggtggttgaggccaggtcttggaagtccccgcccggcaggtgaatgtagccgacttcgcaggcgctgccgcccgcgccgtgcagtacgcgcccgtgatcgatgtacgagcctccgataccggtaccaacggtcaggcacagcgctgttttggcgcctcgcgcattgccggcatgatattcggcgagacccgcacaattcacgtcgttttcgacttcgcagggcaggccggtctgctgttcgatcatcgatttcaatggggtcccggtgtagcgcggaatgagttcgctggagtaagcgatgctccccgtggcgcagtcgaccatgcccgctgtggatacgcagatgccgtataatggcgccgttgcagcatgggagaggtcctcgatgagccccaatacggtgattacgatgtgcggaccgccttgatccgcatgggtgggggtggaatcatgccgtacgaattgctgcgaagcgtcgtcgtagattccatatttgatggatgtcccgccgatgtcgatgcagatatagtgcgtcatgatttcacccctttccctctgattgcacagcttacagtgccgcgattgcctcgcggatacgggccgcagcctgctgggcgatgggcaggtcgtcttcggtaaggttctccagcggcttgcgcacgccgccgatgttcacgttttcgttgatgcgcagtacctccttcatcactgcgtacaggttcgcgtggccgctcaccatcagtgcgatgatgtcgttgacttggtactggatttcgcgtgcgcgctcaatctcgcccttgctcaccagctcgttgatcttgagaatcagctccggcataacggcgtaggtgccgccgataccgccatcggcacccatggcacggccgctgaccagctgctcgtcgggaccgttgaacacgatgaagtccttaccgcccatggccttgaagatctggatgtcctgggtgggcatggaggagttcttgacgcccgccactttcgggttcttcagcatagtggtcagcagcgagggcgtgagcgcggtgccggcgagctgcgggatgttgtagatgatgaagtcggtgttcggggcggcggcgctgatgtcgttccagtatccggcgatggaatattccggcaggcggaagtagatcggcgggatggatgcgatggcgtcgacgccctgcgcctcggcgtgcttggcgagttcgacgctgtccttggtgttgttgcatgccacgtgcgcgatgatggtggctttgccgcgcgcgactttcatgacgttctccagcgtgaccttgcggtcctcgacgctctggtagatgcactcgccggatgatccgccgacatacagtcctttgacgcccttgctgatgaggtgttcggtgagagcctgcacacgttcggggctgatctcgccgtcatcgtcatagcaagcatagaaggctgggaagatgccgcggtacttgttcggatcgatggtcatggtgttctcctttgttggtgggttggttgtggtgttggtgttggtaaacagtgttgttggcgtaggggcctattgataggggctacgcgggggcgagagccgcggcgaaccgtttggtgatgagctgcgggcgagtgatggcggaccccaccactacgctgtggcaaccaagctcaatgacgcgtttcgccttgtccggtgtatcgatgttgccttccgcgatgaccggatgcttgactctggctaggatgtcgcggatgatacggaagtcgtcctcatctacgcgatcgccttggctttcctcggtgtatccgatcatggtggtgccgatgaagtcgaaacccagctggtcggcgtgggcggcttcgtccactgtggagcagtccgccatcagtagctgatcggggtaggtgtgtcggatttgcacgacgagatcgtcaaggctttggccggcgggtcgggggcggtcggtggcgtccagggctatgatgtccggtttgactgcttcgagctcgtccacctcttccatcgtgggggtgatgaacaccggggagtccgggtagtcgcgcttgatgatgccgatgatgggcaagttgacgcgcagtttgatttcccgtatatcttccacggagttggcccgtatgcctttggcccctccctgagctgcggcgtaggccatttttcccatgatgtacggggaatgaagtggctcgtctttgagcgcttggcaggatacgatgagttgtcctttgatgttcggtggtggtttcattgcccctcctttcgtgtgccatcatcgtaaagcgctggaaatcgatttgtaaagttcgaccagccaaaaaagagtaaatagaaaatacttaccatgtaggtcgtggtgtagtctggctttaaatggctgtttatgattatttttgggctgatctatgttgtcgcagctgaaagttctacccacttcgttagtctaagtggaaattatttgcgctgacggataagctaaccgagtacggacgacatgatcgccgcccacagcacaaccgatgtgcacgcggcgaacataacagccctcgatggtgagggttcccatcacatcacagacgaacaggagggatggcggcatgaggagagaacgaagtgccataatgtccagggatacgcggttcgcgtatttgattaatatcccgttgattatctacttggtctgcatgttggcatggcctatttgctggggcttctacaccagccttaccaacaagaccatcggtggcggcaacggcgcattcgtgggattaaagaactacatcaatctgttgatggacccttcataccggtcatctatcgtgaacaccctggtgttcaccgcgatctccatcagccttaagctggtgctcggtctggcgatggccctcgcgctgaacaccaagttccgtggacgcaacatcgtgcgagcgctgctactcatcccctggaccctgcccaacatcgtggcggtattgaactggcgctggatcttcagctccacgggcggtatagccaactacatattgaccacgttgggcatcgcagaccatgatctggtgtggttcggcagtcccaaactggccatggccaccgtgatcatcgccaacgtgtggcgcggcaccccgttcttcgcgatatccattcttgcaagcctgcagaccatctccgccgacggttacgaggccgcgtccatcgatggcgcgaacatattccagcagttctggcacatcacgcttcccgagatccgtgacaccatcctgttgtcgacgctgatgtcgaccatctggacgctcaacgaattcgaatccgtgtggctgatgaccggcggcggcccaaacggctccaccgaagtcatgaacgtgttcagctaccagaccgcgatgaagagcatgatgctcggtaagggtattgcggtatccattctggcgatgccggtgcttattgcactgatcaccgtactcgcacgacacatggtgcccaaagacgggcgaaggtaaggagattacgatgagagaaaccaaaggcgtcaaaatcatcagccgcatctacatcattatttgtctgatcgtcgctctcggcccgatttactggatgatcaacacctccctgaaagggcagtcggagatttatagccaaaagccgaccttctacccgcataagccgacgttggaatcctacaaatacctcattcaggacaccaacttcctgcaggccgtgcttaacagccttatcatcgccgtggtggtatgtgcgttctccattttcgtggcgtacccggcggcctatgccatcgcccgcgtctcattcaggggcaagcgcacgttctccaaaaccatcctgttcacctacttgctacccacggccgtcatgtacatcccgctgtacctgatgaacgcgcgcatcggcgtgacgaacagcatctggggtcttgcgctgatctatccgaccttcactatcccctatgtggcgtgggtgctgatcccgcacatccaggcgattccctgcgacatcgacgaggcagcactggtggatggctgcggacgactgcgcatcatgtaccgcatcatcttccccctggcgttgcccggaatcatcgccaccacgatcttcgcgttcgccatgtgctggggtgaatacatgtacgcgttggtgaacatcacatccacctcccaacagaccttccccttggtgatagccggactcatattcggcgacatgtatccgtggggccagctgacggccggcgcgattctggcttgcgtgccagtggtcatcatctacatgctggcatcgggatccctggtcggaggccagaccgagggaggcgtcaagggatgatgaataggaaaggcacaaccatgaaaaccatgaagttcgcggccgcgggccttgccgcagccatgctgctgccacttggcgcatgtggttccgcttcggacgccaacacgctcaccatctgggtggagaaagtgttcagcgagaagtcgaacgaggagatgaagcagcgtatcgaaatcttctccaaggaaaccggcataaaagtcaattacgagttcatttccgccacggactatatgaccaagctcaacgccaccatcgaggcggggcgcggcattccggacatcaccacgtccgccgtgtccaaggtagtgaactattaccctggcaacccatacatggatatgaccgacatcgtggagcgcatcaataaggaccggccgtatctgaagtccgtgtacgagggcagcaagattgacggcaagctgtatttcgcgccattccgcagctcgtcgacgatgatgttcatccgcatggacaagctgtacgaggctgggatctacgaggtgcccactacctgggatgagctgttcgaagtagccgagaagatcagcgatccggcacagggcttctatggcctgggctggggctgcggttccacggatgaggacggcgacaacatcttccgcaacatcatgtggaaccaaggtggctacatgttcgataaggacggcaacgtcaccatcgacaacaaggtgagccgcaagctgatgcagcagtacaagacgatgtaccagaacaaggtgataccgccatcagccagcacttgggattccggcggcaacaacacctcgtacctcatgggcgaatccggcatcatcttcaacgcgccgaccctgtactactccatggcctcggacccatcatatgagacgctgctcggcaataccgccgtagtgaacctgcccaagggcgaggacaacgatgtgaagatgtcgttcgtcaccggactgtcgattatgaaggccagcaagaacgtcgacgcggccaccaagctcgtcgaatacctgctggacaaggactggtatgacggcttcctggaggagacggcccccgtgttcgcccccgtattccaggattccgagcaggtggacgtgtggcagaaggacgtcaacgccgaagtgctcaactacgtcaagacgtcggagggctactacggataccccgcacggtctaccgccgatcgcgccgtggcagccaagaacatgttcacctacccagaagcgaagatgctcaaccagatcgtcacggtgaataccagcatcgatgacgcgctgaaagacaacattcgcaagattgacgagcttaagtcgctgtttaccgagcagtgacgacagacgggcggcatcaatagtgccgccaccttgctcgcaccatcattcccatatcaatcatcacaagattcacaatataaaggagcaatcatgtcgaacatcaccatctggctggatctggaccccgacaaggtggacgtcagctacctgcagaacaagttcaaggaagacggctacaacctcatcgccgagcagatcgatttcgccgatgaagacaagaccatcgagatgggtatgaaggccgacgcagtgatcagctcgtccgaaccatggaacgagcgcacactgagcgccgtcaagggacaggtgaagtacatcgtgcgttacggcgccggattggataacatcgatctgccgttcgcggcctccgtgggtatccccgtgggcaatgtgccgggcgccaacgccgcggccgtggccgaaaccgcgctgctgcacatcctcaacctcgggcgtcgtttcaccacatgtgttgacggcgtcagcaacggcgtatggccgtcgaccgtgaccggcaacgagctggacggcaagaccgtgggcctgctgggctatggcaatattggccggcagctggtgcgcatgatgcagggatttgatgtgaacgtgttggtctacgatccttacctacgcgaccgctccgacgcgaacgaccgcctgcatttcgtgggcagcgccgaagaggtctttcgcgccagtgacatcatcagcctgcatatcccgctgaccgacgagacgcacggttccatcaacaaggagaagttcgcgctgatgaagccgactgcttatctggtcaacacatgccgtggtggcgtgattgatgaagctgatctgattgaggcggtcaccagcggcgagattgccggtgctgggcttgacgtgcttgtgcatgagccgcctgagaaggatgatccgctactacacctgccgaacgtgttcgtcacctcgcatatgggcgcggcctcgatggaatcggaatacaggtcccaagtcatcatcgccaagtgcattgaggaatactttgccggcaagatgccgtacaacgtgaaaaacatgtgagttgcgcctgcaccaccggtggtcaggttggcgggaggcctgccgttttgaggggcatcccattgtctgtgccactggtggtggcaggtctggtcggccttttgaggcgggccgtgacggtggatgacagacgactggtgaagatgagatgggtctgattgtggcgggtcgttgctgaagggctcgccacggaagaaaggatatgagcgtgtcggagatcattattgttagggatgaggctgaggccggtgagatctatggccgttgtgtggctgacctgatcaaagcaaagccgaatgcggtgctgggacttgcgacgggttcgagcccgctggccgcctatcaggcgctcgccaagatcgtgcatgacgagtcaatcgacgtctcccaagtgagtggctatgcgcttgacgaatacatcgggctgccgctgacccatcccgagtcctatcatgcgaccatccatcgcaccgtggtcgaaccgcttggcctggacccggccaaggtccatgtgcccggcgacgtactcaatggcactccgctcgaagacggcgacaaagtcgcgctggccggcccggcctatgatcgtgccatcgaagccgctggcggcatcgacgtgcagatcctcggcatcggcaccgacggccacgtcggcttcaacgagcccggttcctcgttggcctccggcactcgcgtcaagaccttggccgaacagacccgcatcgacaacgcgcgcttcttcgacaacgacatcaaccaagtgccc

SEQ ID NO: 1456 - DNA, 8360 bp, Unknown
  R257_15m  MAG No. k141_23724
cacgggggccaacgccgatgagaaagaggaagaaaaaaggatatagaggcttagatgctgtcgattattcagcgttcttcacggccgtcgcaatggacacggccgggtccaagaacggaatcagcgtggactggaaggcgtggtacagatcggacttgcccggccagaccgtgccgatcacgtggttgttcttgtcaagctgatggaaccaggaaccgccctcgtggtcgatgacatgctcatcgacatactgggcgaatgtggcgtaccagttggcgtacatctcctcgccggtggccgcatacagcgtggcggaagtgttcaacgattcggccagcgtccaatgcatgcgatcggtgaccacgggcttgccgttccagtcggtcgtgtaggcgagtcccacggtgccgtcggcgttccatgcgtcggccacggcacgcgcgaacagatgctcggcggcgtcgacgtacggctgtgcgccgtcaaggttggcgaaggagcttaacgcccactgcgtgatcaagcgggcccattcgatgccgtgacccggcgtggcgccgtacggcttgaactgatcatccttcttgtcgacgttgcattcgaggtccagcgaccaatcggacttgaaatgttcggggatgcgccactcgttgtgcttcgcccagccgatcacatggtcgatgatgcggccggcgcggacgcgataggtgttgttcccggtggcgtcggccacggccaggaatgcctcggtggtatgcatgttggcgttgagaccacggtacgggtcgagctcggtgaattcggtgttccaagtatcgacggccaaaccgatttcgtcatcccagaaatgcttgtcatacgtggcaagcgcctcatcaagcagttccttggcacccggacgtccggccagcagggcggaggatgcggcgagtatcacgaaggcatgcgcatagcagaccttgcccggagcatgggtgccgtccgcgaacacctgcgggtaccagccgccgtgctcgtcgtcatgaagaatgccggtcaatcccttgagcgccgcgtcggccagctcgcccgcacccggatatccgagcatgtcgccaatcgaatacacatgggccatacggctggtgatccacgtttcgacgccgtgggatgggtcaagggtgccgtcggcgttcagccagccggaaccgccgttcggcgctgggaagcctttgccgaacttcagcagctcataggtttcggaagccatgaaaatgcggttggcttcggtgccgagtgcataacgtgggttattggtcataatgattgttcctttccttaacgagaacatgcggtgggtgcgcaatgagcattcagcgggcacgtcttagtgcttcacacgaatgtcgaaatagtccatgaccagttcacaaaacatcatattcgaccagctgaaccattcgcgcgtgtacttggtcggatcatccacgtcgatgccttcgtgcatgagatgtgtaccggcgtcggtggctacaagacggtcgaggatatgcgccttgaagtccttgctgtcgctggtcatcgcctcgatagacagcgcgatcggccacacatagcgcggcggggtgtgcggtgagccgatgcccttgagatactcgccctcgtaatagtacgggttttcgtcgctgagcagcgtgcgtcgggtcgccagatacgtcggatcgtccggtgcgcagtaccccaagtaaggggccgccatcaaggagggcacattgctgtcgtccatgatattgacgtgacccaggccgtcggtctcgaacgcgtaaatcgtctcgccattgcggttcgtcgttttggcgtgggcttcgatgccttcggtgatggtgcggcgcagctcgccggcacgggcggcgatatcggcgtcatccagaatctcaccgccgaagatgcgttccagatagcccatcaccacggcggcgaacatgttcgagggtaccagatagtggtaggtgcaggcgtcgtcgctggggcggaagccggaccaggtcatgccggtgtacgtcaccggcgaccccttgccgtcattgctcagcgattcggtggggatgtccgtgtcgcggatgaagaaatacggggagcgttcatgatgctgctcggtctcgaagacgtcaagaatcttcttgacgccggcaatgaattcggcatcgaagtgatcggcgttgccggtgttcgcatacagcatccaagccaactggatggggtagcacagcgaatccacctcgtacttgcgctcccaaagccaagggctggagaaatcggaccggtcgtccttgtcccaggaggcgccgttcggttcctcgttgaaggcattcgcatacgggtcgatgatgatgtagcggaactgttgccgtatcagaccggcgatcaggttcgcaatatcgctgtcttcggcggcaagggccagatacgggcgcaattgcgcggtcgaatcacgcagccacatggccgggatatcgccggtaagcaggaatgtggtgccgtcgtcatgccgtttgaccgtggtggtcagggtgtcggcaaagcaggcattgaagttctcggcccaggcggcgtgttcggtgccacacaggtccgtgatgtgctgcatgaaatccgagaccgacttcggtatcgcggtggtcgtcataaattcaacttctttgtttgagggatatacatatcaaaggaacagcattattctaaaccgctttagttcatgacacgcgaaaggatgtgaagagcatgagtgtgagcgcaccatatgaaaaaccggtgagatttcctgttcggagaatctcaccggttgcgatcagtcgattcgtgaagtcgcacgaatggcggataaggggatgggtggattacttgccgatttcagccagatagtcgggcatctcggccgggtactgcggccaggcaccggcctgggtgcagacgtaggcggcggtgttgacggccttgcggtgggcttctgccagcgtgtcgcccagcaggatgcgggcggtgaaggtgccggagaaggagtcacccgcacccacggtgtcgttcacctcgacgtgcggagtgtccagcgtggagacctcgcccttgcgggagatgatggtggagtaggcggagccggcggtcagaatcacgtagtcaaggccgaattcctcgatgaaccagcgggaggcgtcttcgccggaggtgccgcggatgtcgaacatgtcgcgcagcagcaggagttcctcgtcgttgatcttgaagacggtggccgccttgaggagttcctcgatgaggtccttggagtagtggtcgccacgcaggttgatgtcgaagaacttcatcgcgcccggcttggtgtgcttgagcagctccgtgatggtggcgtgcgattcgggggagcgcagggccagggtgccgaagcagacggcgtcagccttggagaccacgtcgatgagctggcgggtgtacaggatgtggtcccaagccacgcccttgacgatggtgtactccgggatgccgttcttcagcgcgacctcgacggtggaggtcggccaggcgttgcgctggatgacggtgttgatgccggcctcgttggccttggcaatcagttcgtcgccgagctcatcctcgccgaccgcgctgatagcccagccttcggtgccgttcttcatcgcgtggtaggcgaagttgacgggggcgccgccggctcgcttgccgctcggcagcatatcccacagcagttcaccgaggctcagaacgatcggggtagtcatggttggtttcctttcctttgtttcttttaccgggtgtttcgtatggaacatcttgtgatgtcggcgcttggtttaggagacgtcgaagaacaccgaggggtgttcgaggaattgggtcaccgccactgctgcggcaccggagaccgccgcgtcggcggacagggtggataggctgatggaagtggaggcattgatttcggggatggcccgttcggccaccgtggcgcgcacctcatcgagcagtatcgggccggcttcggacacgatgtcgccgatgatgatgtgctcaggattgtatccattgaagatggtgacgcatccgtagccgacgtatcgggcgacttcgcggacaatggcgattgacgcttcgtcgccgtcgccggctttggcgaacagggcgcgggcggcttcggtgtgggtcatatcggccgcgccgggaaccacggtgccatcggcgatgagcatgtcgtgaatggcgggggtggagcagtagcgttcaaggcagccgacgttgccgcaatcgcaggggcggccgttgacgtcgatggagatgtgtccgatttcggtggcggcaccgaggaagccgttgatgagacgaccgttgtcgatgacgccgaggcccacgccttcgccgaccagataataggcgaggttgccgtcggcgtgcaccgacgggtcgaagagataatgtgcgagggctccggcgcgggcgtcctgttcgatgaacacaggcacgcggaaagcggtggcgaattcgtcgatgaagttgattttgcgccagccctgcatgctggacaccacggcggtgcggcctacattacgcaggtaggggccgggcaccgccatgccgatggccacaatggacgggtcgttgtcaagcagttgttcgacgcgctggtggatggtgacgatggtgtcgttgatggtgttgccgtacaccgtgggcaggttttcaaagctcagggtgttgccacacaggtcgaacacgccgatctgcaccagcgagcgggcgaatttgatgccgatgatgcggaaccgcgtggtgtcgagtttgagaccgatggaacggcggttcttggaaccttccaaatcgccggtctcttcaatcatgccggcctcgataaggcgtgcggtgattttggtgatggccgcgggggtgagttccagtgccttggcgatttgcgcgcgggagctgatgccgttgtgatacaggtgcttgacgatgcgggagcggttggattcggagacactggcttgggaagtggcatgggtggtgtttgttgccatcggtcttaagtcctccttgtctgcaccgttgcgagttgttccgctcgtctttgaatctgaacttgattaagatattaacgctgttaattgattgacgcaatcaatatgtcattcggtgtgtcgtgcatgtgagtgtcgtcttgggggaatttgttaagatggttgtcaatagtcggatgcacactgatatcaagcgaaacgttcgatgaagaacaggggaggactgatgtctgaaaacactatgaacaatctcaaaatcggtgttgacgtgggcggaacaaaaatcgaagctgtgctggttgacgcaatgggcacggtattgggttccgcccgtattcccgccaggcatggcaacgatgccgtgatcgaagacatcgtcgctgtggcacatcaggcagcgggtgagcgttttgacgaggtgagggccatcggtgtcggtaccccgggcacggtggattcggccagcgggcatgtgggcaatatcgtgaatctcgacgtggtctcgctggatatggggccgttggtctcgcagcgttcgggcgtgccggcccatgtggaaaacgacgtcaatgccgccgccgtcggcgcggccaccgtattgggcggtgcggacggcatggccggtaccattgcgttcctgaacttcggcaccggactggctgcgggcatcgtcgaaaacggcgtgctgatgcatggctatagcggcgcggccggcgaaatcggccatatcccagtcgaacctcatcgcctcaagtgcccttgcgggcaatacggatgcttggaaacagtctgctcgggcgcatccgtggggcgtctgtggcccaacgccgacccgccgatgcccgacctgattcgtcgcgcgaaaaagcgggaggccaaggccgtcgatgtgctggacatggtagtgcgcgccatcggcgacaccatacaaatcctggctcagtccgttgatccgcgactcatcatcttgggcggtggcatggccaaaaccggcgaaccattggtcgaggtgatcacggctgagctgcgccggcgcgaatcgcaatgccgattcctcgaaacgctggacctgccggcccggctgcgtctggcacctgtcggccaaccagtcggagccatcggtgccgccatggcggcgtagcctggcatagtgccggggcatgggagatggggcctcagatttgtctccgaggccccatctcccacgcagtcctatatcactttatgtcgtgctgtgccgcgcttggtcttgcgcgtttcgttgccggggtgaccggcttttatttggccaagtgttggaagaccacggcgatggcctcgccctgtacggtgatgtcaggtccgcattcgcagcgccgaatcaccgtgtgtttgtggaaggacgaggacgtggcggcatccagatattgctgggccgcgccgatgaacgtcgcgttgatgatgttcggctggccatagacgcatacgtctgccatatccaaaaggcccacaggcatggccagggcttggccaagatagcggcccgcccgagcaaggataccctgatgctgctccacgtctgccgcgctgagttgcttcttcaatgcggttccggaaatcatcgtctccaagcaaccgtgcttgccgcaagggcacagcggcccgtcaagatcgatggaaatatggccgagctcgccggccgcgtgcagttcgccgattaccggcgtgtccgagagcagaatcgccgaaccgatgcctctttcgatgcgcacgaaaagcatattcggcccgccttggccaaagaaacgttcggtgagcatggctgcggtggcgtcgttgctgacgtttacttcaagtccgaaatgttcggcgattggtgtggacaggtcgagattgttccagccgcgcatcgtggaggagcggaccacgccgttgtctaccacgccgggggaggcgactccgatgccgatgacctcgccatcggacatgcccagcatcttctcaatgagctcgatgatcacatccacggaaacgaatgagccggtgttcagggtgacttcggcgtgacgcagcggctggccgagcagattggtgactgcgccatgcagcaggtgctcctgcgtcaggtcgatgctgatgatgcgcagtcgatcgatatcgatgctcagcagtgtgcctcgtttgcctttgccgccgctgggtgcctgaccggtctcgcgcagcaatccttcctccagcatccgaccgaccacatcggaaacggccacgcggctcaatccggtgcgtcggccgagctcggcgcgcgaatactggttggtggggaacaacaacctgaagataagttggcggttcttgcggcgcacatcggcgggggaagccttggccgcatggtcgtcggtcgttgtgttgagaccgagatatgacatgtttcctcctacctgatggtgagcgagtggacggcgattgttgttccatacacagcttagacggtgaagcgcaatttcgtcgttgaaactgttatgaaacttcactaataaattccagtgtacctgtgtgaagcgtcaggaaacaccgtgagtgttcatgaggtccaaaattgttactatcattaacaaatagcgaatcaccaatcggcgctacgccgaacggtggttggaacgccgcgcggcacccggacgtgacaaggatgttgccattatccgcaagacgggcggcggtacagcgactcgcatcgggcgggccgcacggaactggaggaaaccgatgccggaaatcatcattgtcaagaacgaagccgaggccggcgagatctatggccgttgcgtggcggacctgatcaaagcaaagccggacgccgtgctgggcctggccactggctccagcccgctggccgcctatcaggcgctcgccaagatcgtcaaggacgaggccattgacgtttcgggcgtgcgtggtttcgcgcttgacgaatacatcgggctgccgctgacccatcccgagtcctatcatgcgaccatccatcgcactgtggtcgagccgctcggcctggacccggccaaggtccatgtgcccggcgacgtactcaatggcactccgctcgaagatggcgacaaagtcgcgctggccggcccggcctatgatcgtgccatcgaagccgctggcggcatcgacgtgcagattctcggcatcggcaccgacggccacgtcggcttcaacgagcccggttcctcgttggcctccggcactcgcgtcaagaccttggccgaacagacccgcatcgacaacgcgcgcttcttcgacaacgacatcaaccaagtgccc

SEQ ID NO: 1457 - DNA, 9239 bp, Unknown
  R257_15m  MAG No. k141_23747
ccgccggtcaagcgactgcttgagcagatctcgcccgacgcccagcacatgctgttctccgccacgctcgatcacggcgtggatgaagtggtgaacaccttcctgcatgatcccaaggtgcacgaggtcgattcggccaccaccgaacctgacctgatgacccaccacgtgttcgagaccacgcgcggcgacaagcacgaactcgtgcgtacactcgcctcgggcgaaggtcgccgcatcctgttcacccgcaccaagttccaggccaagaagctcgccaagaatctgacgcagaacggcattccggccgccgagctgcacggcaacctgaaccagaaccagcgtgatcgcaacctcgccgcattcgattccggcgacgtgcgcgtcatggtggccactgacgtggccgcccgtggcatagacgtcggcggcgtggagcttgtggtgcaggtcgagccgccggctgacccgaagtcctttgtacaccgctccggtcgtaccgcccgcgccggcaaggcgggcgacgtggtcaccctcgtgctgcccgagcagcgccgcgagacgcgccgcttactgaaccaggccggcatcaaaaccaagatgatcgaagtgacccacgattcgcccgaagtgcttgagcttgtgggcgaccgcgccgagcgcgtggatggttggagcctcgacaagtcgcagcccgtgggcaacccgcgcaagggcaagaacaggggcgccaagaacgcggcgggcgatgagtccggccgcagcggcaggcgcaagcacaatcgcaatcgcgaccgcgccgagcagaacgttgccgagaccggattccagcacgagaacgcaggcggcgagtttgttgccgaaggcgagccgcagcgcaagcacggcgacaaggccagcaagaaggccgtgaagaagaaccgcaaccgtgcggaacgccgcgccggcatgagcaaccccgaggccgagcgccgcgactatctgttcgagcatggcgatgaccgccgtaagggcggccgtcgcggcggatacggcaaaaaccgttacgacgagcgccaggacgatggccgcaacgagtacggcaagaaccgtcgcaatgatcggtacggcaagggcggaaaattcgacaagcgcatccatcgcaagaacgagaaccgcatcgtacgcgacgagcgttcagaaggtgccaagcgtcacgaacgccgcatgatcgccaaatacggcaacacggaaggcccaaaccgccgccattccaagaagaatcgcaacaatgcgccattccgtatgaagtccggacgccgttagtccgacagcgcgtatgaatcaggcccgacgacctttgatggtcgtcgggcctgattgtgttgtaggtcggtgttttcgatgcggatgcctgttcccgacatgatgtgtatcaatgtttcataaatatgttatatttatacacaacttgatgggagccacgctgtcatccatcatcgggttgttcgacggatcgcctatgcgtgggctggccgtcggactgcgggtcggcacatccggggtgggcatagcgctcggcccggtcatcggcggcatcctgctgcaacggttcgcatgggatagcgtgttctgggttgtgcgccgtcatcggcacgttggccattggcgccgccttcctgtgcctgttcggtttcatcttcctcacgacctaatggttccaggcgctgcgtgggtgttcggcgctcgagatggcgattgccacactgccgttcgcggccgtcatggccgcaggcatcgcccttgtccagggtcccgccaccgacacactgatgacggccgtgccggtcggcgaggaaggcatgggcagtgccgtcaacgacacgatccgcgaactcggtggcacgctcggcgtcggcatcatggggtcgctgcaggccggtgcgtacaccaccggcctgacggacgcgctgcgaggatcccacctgccccaggacatccttggcgcatccaaggaatccgtgatggctgccgaatccatttccggctccctgccgggcaccccgcgcagattgctggatgactcggtcgcatccgcgttcatggacgggctgcacagcgtctgcctggcggccatgacgattgcacttatcgccgcggtcgttgcgatcgtggccatgccaaaacggcggtaatggcctgtacgcaccctagaataacggatatgacgcaatcgcagccccgatccagacgcacgcccacccttgaaatccgcggaagaatccttgacgcggcgaggcggatcgtggaacaggacggcgtggacggtctgaccatccgtacgctgtccgcgcaggccgacgtgtcgcccaccagcatctaccagcacatcggcggcaagcaggcggtgtccgatgcgctcatcgacgcatacttcaccgatctgcgcgaacagctcatcgccattgacgaatccgatcctgtgctgcgcctgcgcagggcgggcataatctaccgcgaacacgcgctggacgcccccggtatttacacgctggtctggatggggcaggcgtcggactcggcccagcattgcctggaagccatcacgcagatcattcgatacggccaggcggcgaccgtgttccgtgacgatgacccccacctgattgcatcctccatctgggtgtccatacacgggttcatccaattcgaactgcgttccgcccaaccccgcacacgaggccgcgaacgggtcgaccggtcgtacggttacctgctcgacctgctgattcgtggtattcggcggtgaatggtgagctccctctgatgaggtagctcagtattgatacgctgtactgccgtcggcgttgcggatggtgaaagtgggggattgctcgatgttgaggtccacggtcagggaatgctgggcgtcggcgctcgtcgaacgatagacgaagtgcttgttttccagcttcacggcctcggtacgcgcatccatcagccatgggttgcgacggcgcagcgcgatcagcgcctgatgcagccggtatgtcggctctcccagcgtggacagttcggcaggggagtcggggaacttcggacgtacgtcgtcatcgccgccgaaacgctcctgcttgacgcccacatagccctgctcgtcgccgtaatagatgcttggcacgccgccgaccgtcatgagcaccgccaatgccaacgccgccttggccgggccaatctgcgatgcgatacgcgtcacgtcatggttgccgatgaacgtctgcggcacgaaggaattcaggaacgcgttgtgccgcttgagattccaatccagctcgaagaagttctccgtctccagcgcatgctggatcgacttccatagctcgtattgcgtgatcgaatccatcgtggattcctcgatgatgcgcgggtaatcgccatggatcacctcaccgaaaatccacgaatacgggtgtgcggctttgacctgcggcaacacgcgcgcccagaacgggctcggcacggcatacgcggcgtcgaggcgccagccggcggctccgcgatccagccaatggctcatcacatgggccacatagtcaacggtctcgtcagccgaatggtccagcgccaccagatccccgtgcccctcgaacacatccaaagcgggttcgtcattatcaccgacatgcgcgcggaccagaccatgccacgggttgtcggccggattcaagcgtccggcggtctcgtcaagcgccgcccggacggccggatgatcgcggctcacatgattgaacacgccatccagcaccacctgcaatcccatgtcccggcaggccgcaatcagctggtcgaacgcggcatccccgcccaatcgcacatcgatgtgcatatggtcgagcgtgtcgtatccatgcgtcgccgactcgaacaccggacccagcagcaggccggacgcgcctagatcgcgcacgtactccagccaagggatcatcgcgtcaaggccgcggccatggaactggcgcgggccggcgggcctgatatcggcaccgcagaagcccagcggatacacgtgccagaacaccccgtacttcacccaatcgggcattgtgcggctcgaatccgtgcttacaaccactgtgcacctcctgattgacaccgtgtccattttcgcacacgcatgaccgaatcctcggtagatggcgggaaatgtcgacgagcatatcgaagcaaagtatgagcctgcccccgttccgttggttggtgtgcaaggccgtgaccctgatctgcgctggcatggaccgccgccgcaccaacgggttcttcacctacgcgcagatcgtgggcgcggcggccatgagcttcatgcatggcgcgcaggacggccagaagttcatcggcgtgctgttactcggcatggcgttctgcaacggccaacccagcgtgaccggtgtgatgattccggtctggctcatgattctgtgcagcaccatcatgggcgtaggcacgtccgtcggcggtgaacgcatcatcaaatccgtgggccaggacatggtgaaactcgagaaatagcaaggcttctcggccgatctgtcaagcgcgctgtgcctgctcgtcatgaccgtgctcggcatccccgtctccacaacgcacaccaagaccagcgccatcatgggcgtgggcgcggtacgccgcctctccgccatcaacttcggcgtggtgcgcgacatgatgctcacctgggtgttcaccttccccggttgcggtctcatcagcttcgtaatggccaaactgttcatggtcgtgttctagaaaggaatccacccatcatggcgagacaaaaagacgtgttctacttcgacggattcctccgcagcgcggactacgcatgccaggccgcgaagctgctgtccgaggtcatgcacgacttcaatccggaccagctgcgcgaacgcatggacagcatgcacgcgatcgagaagtcggcggacgaggtgcgccacgacatgatggacgaactggtgaccgcgttcatcacgccgttcgaccgtgaggacatcgacgagcttggccacgtgctcgacgatgtgaccgacagcatcgaaggcgtactcaaccgcatgtactacgacaatgtgaccgacatgcgcgacgatgcggtccagatgtcggatatggtagtgcgtgccacggaaagcatctgtgagctggtcaacgaactgccgcgattccggcattccaagacgttgcgcgaactggtgttcgccatcaacacgatcgaaacggacgccgaccacctgttcatcgagtcgatgcgcacgctgcacaccacctgcaccgatccgctgcaggtgttcgcctggcatgacgtgtaccgtcacctcgaacagtgctccgacgactgcgagcgcgtggccaacaccatcgacagtatcgtcatgaaaaacagctgaggttggtttttcataacctccctctgatgagccgagccgtgaagaaaacgccggaggtgtttttaggcaagggtgagtgacaacgagcgaataagaggtcagctgcaagctgtcctgaatcgcgttcgaggtggcatcgcgaagcgatgacggagagagacctacttgaccaaaggcccctcaccgatgggcgttgagccagaggatggcgagttgggtgcggttggtcaggccgagcttgtccagtatcgcgctgatgcgattgcggaccgtgccttcgctcaggaacagtctggcggcgatgtcgcggttatcgaggccctcggcgaccagcgcggtgatctcacgttcgcgctcgccaagcaggccctcgatggaatcggcggtatctctggaatcgtcggaatcggcaggattcggagtccgttcggtgagcttgccgagcacttccgcgccgagcaccacctgaccggccatcaccgcctgcagcgcaggcccgaccgccgccacatcctgtttgatgagatagcccttggcgccaagccccatcgcctgcgcgatatacgactggtccgcaaacgtggtcaggaacagtatgcgcgcggccgggtccgtggccagaacctcgcgcgcggcatccaaaccgctggtgcagggcatctgaatatcgatcagcagcacgtccggtcggctcgccggcgtctcgaaataacggcgcacggcggcgtcgccgtcatttgccgtccatagcacctcggccgtgccggtggccgtcagaatcgtctccaacgactggcagacgatcggatcatcatccacgattgcgattctcatcaatccctcgattccatggtccaacgcttcttcggcacggatacgaacacacgccagccgccctcatacggcccgcaaaccgcagtgccgccaagggcgcgcacgcgcgattcgatatccgccaaacccatgccgcgcatcagctcatcggccgaaccacgcatatcggcaacgccgtcggcggcgagtcgcgagccgacgagcgtggcacgcatcgcacgcgggcgggcagcggccatccgggacccatcggactcggacacggccggccccggatcctgaatgaccaactgccagaacgcggggaagtctcgcaacgtcacgctcgcctcgcgcgccgcactatgatgcaccacgttcgacaatgcctcgcgaatcacggtcgcgaaacagcgcgagaccggcgcgggcgccttggcgatgtcgttggccagcgtcacggcgaaaccgggggagatgccgtcgaacgacgtgacggcatcatcgatctgcgcggcgaaatcagtgccgtcatcctcaagatcatgcaccgaacggcgcaccatcgtcatcgcatcatccaacgtcgcacccaacgtggcgaacccttgcgcggcgaccgtatcgttcgtcgcctcggccaccgtcctgccggcctgcgcctgcatgatcgcgcgggtcagcagatggcccacattgtcgtggatctcccgggcgatacgcgtgcgctcgccgagtgttgccatacgaacggattgggcgcgctcctcatcgatgtcggcgatgcgcgaacgagtggcccgcgaggattcgcgcgccctgtcctgcgcgtgcagcaacgcgcgccgcgcctcgtccgaggaggcgcgggcccggcccagaacgaatccaagcagggcgaccatcgtcatcaccagcgtctggagacggtcggtgccacgggcgaaccagagcgcgatcagcggcaacacccatatccagcgcgcggcgaccgaaagccacggggccgaacgtattgcatcggcaagggaacggcgagaggccgcggtccgcgagacactgggggagcggccgcttgccgcagtccgtgccccagcccgggctccggtcgaggcgagggccggcagctgtgcagtatcgtaggcgatgagcggcatgaacgcgcaccatgaaggcaccgccacggcgatgacgagatacgccgtacacaagacccaagaccattgcgcggtacgcagccattccaccaatccggcgacggaaacggccaacagcaggccggcgatgaacacgccatcgagccgcaccccgacaagccaggccaaagccaggcccaacacgagcagcaagcccttctcggccaacacgcgcatggcacctccccggctcgacgctcttccaccaccagtctagcggtgtgcggaacacgacgaacttgacgggcgtgcggaattattcgcatgacggtccaagacaacgggtctacacttcccgaatagatgaggcacaagcgtcggatgttgtcgacacaaccgtaaagggatgataccgatgattgcgcaaagccacagggcgtccaactattcgatggacgagatcagcctgatgccggtcgataaggtgtacaaggccatgcagaccgacgccgaagggctgtaatgacaaatgtcacgcctgtgcggccaagtcgtgacgtttgcctgtggcggcgtccggccccttcttgggatgatggaatcaccaaggaagggagtggctatggcaaccgacaacagagcttccgaacacgactcgacaaccaacccggctctggccgtgcacgtcagccaactggtcaaacgctacggcgacatggtggcgctcgactactttgaccttgacgtgaaccagggcgagattttcgggctgcttggaccgaacgggtccggcaaaaccaccgcgatcaactgcatcctcgcgctgctcacctacgattcgggcacgattcgcgtgttcggccagccgatgacgccgacctcctacgcgctgaagcgccgtatcggcatcgtgccgcagaacgtggccgtgttcaatgaactgaccgtcaccgaaaacatcgactacttctgctcgctgtacgtgccgaagaaaaccgaccgcgtgccgctggtcgaggaggccatcgaattcgtcggtctccaggacttccgcaagttccggcccggcaaactgtccggcggtctgctgcggcgcctgaacatcgcctgcggcatcgcgcacaagcctgacctgatcttcttcgacgaacccacggtcgccgtcgacccgcaaagccgcaattcgattctggaaggcatccagcggctcaaccaggccggcgtcacggtgatctacaccagccactacatggaggaggtcgagcagatctgcgaccgcatcctcatcatggaccacggccggcacctggcgctcggaaccgccgacgagctcaagaacatgatcgacacgggcgagcgcatcaccatcgaaacgctcgatctggcggattcggcgatggccgaggtccgtgcgctgccgtgcgtgatcgaagccacctacgacggcaaggaactcgacgtgcgatgccggcgcggcgaacacaacctgaccgacgtgctcgacgcggtgaaacgctccggcgccaacatcggccacctgaccagtcgcccgcccaccctcaacgacgtgttcctcgaactcaccggcaaggcactgagggactgaccatcttgcccctgctggcggggctcccgcgaagcgagtgggggtggccttgcaacaaccaccctcagtcggcttcgccgacagctcccgccagcgggagcaggtaaggagacatcatgtggaccacatttctggtcgcattgaaagcgaacctgcgcaatcgtcaggcactgttctggatgattgtgtttccgatcgtgctggcaaccatgttcaacgggttcttcggcggactgtccgagggatacgagctcaaac

SEQ ID NO: 1458 - DNA, 22655 bp, Unknown
  R257_15m  MAG No. k141_24256
cgtaaagctctcccacaaccgcggccatcagaacgcgctcctcgccgggctcatgaccgcgcgcgcctacggctgtgacgccgccatctccatggacgccgacctgcaggacgatgtgaacgcggtcgacgggttcatcgacggattctgcaacggcgacgaggttgtctacggagtgcgttccgcacgcaagaaggacacatggttcaagcgcaccaccgccgaagccttctacaaggtgttcgagtggatgggtgccgagacggtacccgaccacgccgattaccgtctcatgagccgcgagacgctcgacgcgctcagcgaataccacgaagtcaacctgttcctacgtggcatcgtgcccacactcggctaccagaccagcaaagtctactacgagcgcggcgagcgcgaagcgggcgaatccaaatacccgttgaagaagatgatcgccttcgcgattcagggcatcacctcgttctccacgaaaccgctgagcttcgtcaccggtgccggactgctgtctatcctggtagcgattggcatgttcgtgtacgtgctcgtctcgctcgggttcggccacgccatcgccggctgggggtccatgatgatctccatctggctcatcggcggactcatcatgctctccctcggcatcgtcggcgaatacgtcggcaaaatttatatggaatccaaacatcgcccccgttaccgcatcgaaaccacactgtaggaggggccggcggccagcggacggcccctcctacagtgcttggattatatctattttgtcctcatcacacgagtcaacgcgtatagcaatgccccctgcttgaggcggaaatgagaccgtcgccgttctcctgccttgctataacgaagaggtgaccattggcaaggtggtgcgcgacttccgtgcggcgctgcccgacgcggccatctacgtgtacgacaacaactccaccgaccgcacggccgaaatcgccgccgcgcccgacatggtcgccaaggtgctcgaaggctacgatatggtcatcggcgaccgcctctcctccacatacttccaggagaacaagcgcccgttccacaacttcggcaaccgcctcgtgcgcggctccatcaaccacctgttccgtacgcacgtcaccgatatcatgaccggataccgcgcgttcaacttcaccttcgtcaagacctatcccgtactctcgcgaggcttcgaggtcgagaccgagatgacaatccactcgctgaacaacaacctgcgactctatgagatgccaatccagtaccgtgaccgccccgaaggctcagtgtccaagctggacaccgtaggtgacggcatcaaggtcatgagcaccatcttccgcatgatccgcgaatacaagcccctccccttcttcggcggattgggcctaatcatcggcatcgtcggcattgtgctgtgcggcaccgtcaccttcgaattcgccaagaccggcgtggtcacacacttccccacgctgatcggcgcggtgatgctggtcatcacggggctgctgctcatcatcgccggcatcatcctcgacgtcatggccaagaacgaccgcaagaccttcctcattgacaccaacagattcgcatacaacaaaagacactgactaagcgccatatagaaacgtgatggggagcgcaacctacggttgttgtgtccccatcttttagcgtctagctcagactgtgaaaaacaatagaaaagcagaaagaacagcattgtggtatccatgccaccaaaactaccctaccgtcgtcaccgcctaacccgcttcacccccacaccaaacagcgaaaggccgatttcttttatgcatcactactaccaccaacacctcacatatagtgggacatatgtctgatgcttccgatgcctctgatgctgtttctgctcctttgactgtgttctcacgagtggcggcgaacgctgcgtggaagcggtgattctgctgatgggtttcgtgctgattgcggtgacgcctgccgggcatattccagacgtatgggcgcacacatatcgcattgacggcatcgttaacggggatgtgctggctcggccggtcgactcgaccagcatcctgcattcgggcagcggcaatgtgggcgggtgcgtgagccgtgattggatccggttctccatcgaccattacgacggttacgatccggctgccgtcaatgccgattttcttgaacggtacggcacgggcagcactgcagcgggcagcggcacgaacagcaccagcaccgcaaacaccacctgcgtggacacgccctacaacaatgcagcggttaattcacccttcgcctatctgccgcaattggccgcctttgccataggagcagactcaacgctcacccctggcaccacatacgtactcgcggaagtaatcatgttgctggtgtacgccggttgtatgttcgccgccgtagccgcactcccccgctggcgcttgcctacggccctactcttggtctcaccgccgttgatcttccgctattcgttcgccatctcggccgattccatggcacaggcgctgcgcctattgttcgcgtgtctgctgttttcctgcatggccgatccgcgtgccggcaacggacgattgaccgcgctcatgaccgtaggcgtgctgatgggcatgtcgaaattcacgttcaccccgcttctgctgctgggattcctggctttgataccgtggcatagcgccgtatccgaatctacagccgtaccttccgcagcagacgctgcacaggcttgagtaccacggtgtcggcgaccaccgcgaacgccaacgccgcgagcaacgtggctgcgaacatcagcacgctgatgcccgcgtacgaccatccgtccgtgggcgcgggaatccgcgggccgatcagcaccttggacagcggcgaatgcaccagatagatcgtgtaggagtatcccgccagccaggtgatcgccctgcgcagccgcgccgacgccggatgcacgtcgtaccggaagaacaggaacaccgcggccaccaccatcgcgaacgcaaccgtgaccgtgcggccaacctgcatctgctggccggcgaacaggtacggcgtggcgacggtccaggccaggacgaatggtgccaacgcatacacaccgtgccgtatacgcgcggacggcggatagtattccaacacgaatcccaacagatagtagaccagcagtccccgccaggggaacgactgcaggaacgtcaacgggtatccggcaagattgcagatctgctcggcggcggccacggcggcggccaggccgatcagcagccaggcgcccgaccggcctatcgcgcgcatcatcgcggccagaaacggcgtcgccagcacgaaaccagcgagcatgaatacgaaccaatagacggaatcgtcatacccggagaacagatcaaacaacgttccagacacagcgccgccaaccgaacgatgatcgatcaccaggtaggcgacgaatcccatgccgcccgcatacagcagatacggcacaatcagcgagataaaacgtttgtagtagtagcgcacgtacggcgcgaggctgctgggatcggcttggccggcaccgccgactgcccgggcatcagagccagagcccggcagacggcccgctgagtgggtgctcaccggccggtcggcatcgaatgtcaggttgaaccggcccgacaccataatgaacagcggattgcagaccatgaacaacgcgaacagcacggatcgcaccgtttccgcgctgccggcgagggtcatcttgacgggcatgtagttgttgatcacgtggacgccgatgaccaggcacatcgccaccacgcgcagcagatcgtagttcacgtcgcgcggcctgccggcgacgccggaaacggtggcgtcggaaacggcgacgccggaaacggaatcgggcatggtcatcacatggatcccgtcagggacttcagatcgaccgggcagctgatctggctcttcagcttgtccaaggtgtccaggccggccgagggatcggaggacgcgcccttatgcgcgtcgttcttgccgccgttcgcaccatcggcgccgttcgcaccatcggcgccgttcgtatcggccgggcactcatccgtcaccttaccgttggagcccgtctcgacgccatccgcattcaccaccggcgtggttaccacgttcagtggatgtgtggcatcgctgctgacccgaacggtataggcaatcgtcaattcttttccgggctcgatccactgctggttgaacataatgtactgacggtcatacaggctcgcggtgttggtaccccatgaatctatatcagcctgcacagcggtgatttcgccaccgtacggggcggtaagcaccacgcggtacagcatgccaccgagcactggattctccgagccgccattaacgaaatcaggcaacgattcggccttagccttagtcagcgtgttcttcatggtgaaggtgaccgtgtattcgtcaccgagctgatcttccgtaaactgacccagctgcgtgttacgcacggctgtcgtgatgcgcttatccagcacgccagaatacagggcgttctggctggccgaggcgtcgccgcaggtttttgtgaccgtggtggaggtcttcagataccaatcctgcttgccttgctgcagctccgaaagatagatgccggtttcaggtacctgactgtcagcagacaactcgccactggccttatcgtcgataagtccggtggcaatcagcgcctcctgctcatccggatcagccatccatagcttgaaatgaccgctagcgctggtatctctgattgccttcaacagcggggatgcggtggaagcattcgcgttgccaagcacatggttcataattgcttgagccgcttcggaaacgaagttgttctgctgctcgaagtccgggtaatccgtgtacaggtctgaagcgaagaacggcaccgtggtggtgccatccagcactcggccgtccgaaagcttgaccttgcctgtggctcccagcaatgcctggaggaatacgggatcgaatgacaatacacccgctacgttctcgtcttcgttgcctttctgatacagccacatgtatttgttcatctgtgccacacgctggaattcggggtcgatggtcgtggtggccgggtactggtcaaaagtgtcgccaaatacctggcgctccttcagcaccgtagcatccattggcttctcaggaatgtcccaaccagaagtggtggcgaaatcaccgatggtaatcgtgcccttatctgccgtgattgcggcgatggtgcccaccatgccgcccgccgaacgcagctcggccgggttctgcaccatcaccagatacgtgcgcttgccgtcctcgccaagcagttgcggtagcaagttaatgaggccatcgtattcgctgagcatcgaatccacggtcttgagcgcagccttttcggcttcgagcacggtggccaccttggcgacgctcggagtcggcaccttgttgagcttggtgagctgctgcgagatatccttatgcgcctgcttgacgatatccggcatatccatcagggcgctgacgtccaccgagccattcttcagggagaagccctgcaatcgtttggacaggttcagcagatcagtgaacggaccgttgaccagcgtatccacggaagccagcatttcgcgggcagcggtgatgtcgctgccaaatcgcgaatggtcgcggaagaagtcccactgcgggccgttcagctcctcgttgagatcactggtggcattgaccaactcttgggagatgtccgacagactcttatcgctgccgcagccaagtgccgaattggccagaccttcggcggatgtcagcacacgctgcgcatccgcggccattctcgagacggatgccgcgtagagcgtgcccacacaggtgacgctggccagcaacgtcagcagcagtacaaccaccactcgcgcccatatcggtgtacggctgaccagcgaacggccgttgccacccacgtgctggggagtcttcaggtttacgggacccgtctgctgatttgcagcgctattcgtagatgcggagcgattggatttcccgttaccggcatggcggcttctcctacgccccacagccttatggctcgaatgccctgaagtgaatcgcatacttatcctacccgaaaatctgctcagctcatactcttatccaacggcgcaaggccacgcttccggatgccggactccgggcgaatccggaatcgcagacatgccggagcacacgtgacgccacgcatatctcatgccagtgtaccgatgccaccgaaatagaccgagggtttatcccataccgggtgcaaatcccctcatgaccaccacatcgctgtcagaatgttctcagacttcattgaggggtataacagtattgcgcaagaaaacggtcactaaacgcaacaatagttaaagccgtattgatctgttcggcttaggagaacgggagaggtaattacatgttcgtcctcagcaacgcctggcgggccctgacacgttctaaaggacgtacggccctgaccgcgttcatcaccttggcggtcaccttcggcacagtcgccggactggccatcattcaagaagataccaacgcacacaccaccgcgtacgatcagcagaaggccacgttggccattcgcccgactgtggctacgtggaagaaggtctccgctacggactcggcttccaccaagcattacatgacgtggacctcatacaccgaatacgccacgctcgtccggtcggccaccaactcgttgaacttcacggttaccgaaaccgtgccgacccgcgtgagcggtgatttgaaggccctggacggcggatcgctgggctcggcctccgatgatgagaccggcggccagctcatttggcgagccttctggaccgaggatgccgccaaggccagcgacctcggtaccttcgaaatcgtggacggcaaggacctgagctacgacaacaagtcctccaacccgaacaccaccggcgcactggtctctgaagcgtttgcctccgccaacaacctgaaggtgggcgatacgctcaaggtggcggccgcctcggacgcccagaccacggccgagctcaaggtgcgcggcatctacaagtacacatccgaatccgccgtcgccaatccggtgacggccgcccgcaaccgcgagaacgcgatcttcaccaactatcagaccttcgccaaggccggactcgacccacagtccaacgacaagaccgcctccggctgggcggtgccggatctggacgtggtgttcgacaccggtgatcccgctacatacaagtccttggtatccaccctcaagaagtccaagctgcccgccaagggatacgaggtgtcttccccttcgctggaatcctacaacgcttctctggagccgctggatacgctatcctcgcgcgcgaagaccggcaccattgcgttggttgccgtgggcggcgtgctgttgctcatcctcgtgttgtcgggcgtgtgggcgcccaagcgtgacgacgagatcggcatggcactggtgtccggcgtcactcgcgggcgtttgggatggcagttcatgctggaagtgttcatcgtcaccctgcccttctacgtaattggtctggtcggaggcgcgttcgccgccaagccgatcggacctgctctggcatccggccatgccatcccggtgacatcggacctgatttggaccatggtctggtatggactgggttcaatcctgatcctggcgattcttgccgccctgcgccttgcgttcttcagcgcgaacaagctgttcgccgccgatggcgactggggcaccgtgagcgaggctgaggcgattgaaacggccgaaaccactggcgctgccgagaccgatgaagctgctgaggccaccgctcatgatgccggcgaggccaataagacgaccaccacaaccgacgatgcggaggcacaggcatgagggacaagaacaacgatcaggaactcgagaagaccactgacgcaacggctgacgaagtgacttctgagactgagacgaacgacgccattgaatccgttccagctgactccgtgcagttcagcgtgaccttcgatgacgttgatgacgaaggcactgttgacgatggtatttacagcgcactggcatctgccgaaaccggagcaaccgacgagaccagcgaggccgaagcagacgccatcgcttcggccaacgcatccgccgaagtgaccgagcgcaatgccgcccgcgtcaacgaaacactccgactggccaaaaccgatcacaaagacgcattggccgagcatgcggagcctcagggcaaagcggccgaacccaccatgacgctggcctcgcgtatcgatcgcgtgttggtgggcggcggttccgacgacattctgctcaagacctacccgacctttgccctgaacaaggtgacggtcgccggtcccaagggcaaggtcaacatcctcgatggcgcgaatttcttctgctactccggacacgcatacgcgctgctgatcagcgacgaccccgattcgggcatcaccgccgacgccaaacgtcgcgcgctgatgggcgtgatgagcggtttggccacgccggtgtctggcacggtgatgaacaagagcgccaacattgttgagctcgagcccgtggaactgcgcggccaccgtctgggcatcgtaccgcagctgcacgccgtgcagccgaagctcgacgccgaacaaaacgtgctgtacgccatggatgcgtccaaccgcaacttcctgaagcccaagccggtgatcgcccgcgaactgctgaccaaggtcggcttctccgaggccaccagcggcgtggccgtcggcacgttgcctttggtgcagcagcgtttggtggccatcgcccgtgcaatcagcaccgaggccgaagtgctgatcctcgacgagccgacacgagggctgaacgcggatgacgaggtgaccgtgttcgccgcgctggccaagctggcgcacaccggtgacccgaagcattgcgttatcgtgctcaccgcatcacgcgagatcgccgaagcagccgacacactcttcaagatctgatctgtccggtagcaatacacaccagacacaccagcacaggctcttgaagctcacgatgttcggatacataccaaacatcgtgagctttttcgatttcgaggggctgatttgcgtgttccgggaggtctacttccgtttcaaggggctggtcatccgccaaaccccgagtataaacggcttcatgccaacgtcattccgccgtttttacgccgcgtatacttgggcaccagccccttgaaacggaagtagacctcaggaggatgccgaatcagccccttgaaacggagataggcatgtcgagatgtccgaatcagctcctgacaatcctgatgcggctcattgccgcgctaatctgaggataaatctgaccgtacgaggcgaaacctgataatcatgaccggatatattcccacactggagcagatcgacgagttgcaccgcaaaatcgcgccgtccaaggcggcgtacgagctggtgcacacgcattgcgtgattgtggcgaccatcggctgccagatcgtgcgccggcagaacgcgctgttcacgcgccgctgcacattaccgaaggacgcggaggtaccgcccaccgcaggcgtcaccggcggtcatgtgccgccgcgtctgctcgacgagcatttagtactcatcggcggactgctgcatgacatcggcacctaccgcgtgttcaagcatgacggctctgacgacgaaccgctcaaattcagcaagaaacgctacattctgcacggtcttaagggctacgagtatctgctcgacgagggcgtggacgagtccatcgcccagttctgccgcaaccataccggcgtgggacttacgcgcgaggatgtggtgcgccaggagctgccattgccaccagccgactatgtgccgatgaatctcgagcaggaagtggtgatgtacgccgacaagttccatagcaagtcagtgccgccgaagttcctgcaggtcgaggcgtatacggcccgagccgagcgatttggcggagagaacaaacaacgatggctggatctggtggccaagtatggcgtgccggatattccggcgttggcggagaagtatgggatgcggatgatttgaggctcaaggccccctcgtcagagggagcttatgaagctatttcagatggaacggagacggtaggtgccgttgcggttggaggcgatgatcatctggtcgttctccagcacgttccagccttcctgctcatagccggaagaggagaccaccacaccggcggagtcgccgttgtcgtcgcgcagctcacggtagcgcatcacacggtagtcggcggcctgcgcgccacggccgtactcatcgtagatttccacgatgcgcgggctggtcttctcacgaccggcggcgcacagggcgatgagctggtcctcggactgaatcatgcagttgtagctggacttcgggtaggcttggcgcagttcgcgcacggcctgggccacggcctcgtcgagcgggaagccgaaaccgatgtattccagaatcaccgcgaagaagatagcggagtcggaacggccgccggtggagaggagcacgctgtggttcaccgggtatgagcggttggtgacgatgttgcggccattggcgtccgagatatcgccattgtggatgaagctcaggccgttcgcatagaacgggtgctggttctccatgatgagcggcagattggagcttgccaagcgcaggtgccagatggcaccgcgagacggttcgtcggccagcgtctcaaacgtgctgtcatgacgggccgcgatggtcgacttgtagattcgggtgccggtttccggggtgggtgcgccaccgtcgcgcacgtgcggcgcttcggcgggatcggaaagctgggctacaccccagccatcattgtggatttcagacagttcacggaaatcctcgacattgtcttgccccaacacggcgttgagactcaggttgaagcctgccgtcgcgtatcccagtaatctgcacatggtatttcaacttaccgaaaccgtgtggcgacgtgcggcgactgttataggcattctttatagaacgcatcagcgccgctgcaaactggtatgttatcgcttctgtttggaggagcgctgaggcttggcggcgggtttgccgttcttggccttgcccttatcgcctttatcgccctgctcagcgaccgcagcggcggcagcggtctcagcgatcttccgctcctcggccgatacggcggcatcgagctcctgtaccaatcgcccaagcccggacgtggtgtccatcgggtcggggacggcggccgggtcggccactgcacgagtcggcgtgggcgtcgtgatggtcttggccgtatcggtgcgcttcagacgcggtgggcggcgggtggagacgaacagcggctgcacctcgaccagcgggttgtaaggtgccagaccgaaccacttaaccggcgagccggccatgcggcggattgcgtacttggcttgcaacgacagggcaccgcgtgcggaaaccttggattccggcatcagggccttgtgaatcagcacgtaacggatggtgccgatgtccggatcggcgtcgaccttggggtaaatcgacttctgcttaggcagttcgccggttttggacaggtcgtgcatgatctggtggatgtacgccgggatggactgcgaaaccttgaagcccaaacggaagcgcacgcggtagatgtagttcgtgccgaagtcctccaccgagtattcacgggtgaacggctcgtcggtggtttccacgctgactgcccaccaagcacgggcacgcttggggtggtcggcgaagatggagaagaagatgtccgtgtcgagtcgcttggtttccgagtcggaggtcaggtacacgatgttgtccgcaaaatacgggatgcggaaatcaccgtgcagcttgtcgagcgcgggtaggaagtcgttgggccgcatgtgacggcgttgcgcacgttcgagcttggtgccctcattccacgtgtacatgacgaacagaatcgcggcggtcagcaacatggtgaaccaaccaccgtgcaggaatttggccatagacgcgatgaagaacatagcctgaatcgccaagaacagcacggtgaacacgatggcaccgacccgcttgccggaatgccataagtagacgccgagcaacacggtggtggtgatcatcgtaatggtcaacgccaggccgtacgcggcggagatgtgttcggaatccttgaagatggcgagcacggcgagcgtggccacgcacaacacgccgttgaccaccggaatgtacagctggccgcgcgtacgggccgggtaacgcacctgcagatggggcatccagttgaggcgggtggcctcggaaaccatggtgaacgcgcccgtgatcagggcctgggaggcgatcacgccggccgaaacagacagaatcacggccaggtaccgcacgttcggggtcatcatctggaagaacgggttgagcgacttcatcgcggtgtattgcgggttatcgctattggccaacatccacgcgccttggccgaagtagttgagcaccagcgcaaccttgatgaatggccaggtgaagtagatgttgccgcgccccacgtggcccatgtcggagtacagcgcctcggcaccggtggtcgagaggaacacggtgcccatcagggcgatgccggcagcattgtccgggctgaacaggaatttgatgccgtacaccgggttcagggccgcgaacacagaccagtcgttagagagattcgtgacgcctacgatggcgaggaagctgaaccagaccagcaccatcgagccgaatactttgccgatgctttcggtgccgcgcgactgcacggagaagagaatcacgatgatcacgacggtaatcatcagggtcaggcttgggttttcgtcgaacaacccttccaatggcggcagggtctgcaagccttcgactgcggaactgatggaaaccgccggggtaagtaccgaatccgcaaggaatgccgcgccgccgagcatggcgggaatcgcgagccatgcgccgtacttgcgaatcaacgagtacagtgcgaagatgccgccttcgccattgttgtcgatgcgcatggcgatgagcacatatttgacggtggtgatcagcgtaatcgaccagaagaccagcgacagcatgccgagcacggcctctcggtttacgctgccaagccctccctgaccggcaaggaaggtctgcgcggtgtagaggggcgaggtgccgatgtcgccgtacaccacgccgagcgccacgatcgccatgccccaggtaaccttgtctgggctggattgcaagcgggcccaccatcggccgaggccgcctttcgaccatgcgctggcgattttctcggcttccttggtttcggcttccctctgcttggcgagtgcctcgcgctcctccttggtgagagtgcggcgggacaccttgggagcgttggtaaaggtgtcggccctcagcagtgcttcttcttcctgtcgggccttggctttggcggcgccagcctgggctgtctgggcctttgaggctttttgggcgcgtgcggtcctttggttcgactcagccatacgttcagtcctccattgaggtggagatcatccccctcgcttatgtcaggtacatcatggtagacctcgttcacaattctgacaaattttacaagtcaacacatcgccgcgacggccgcacacccggccctcacagtccgtatacggcgcgggcggtatcgcgggtgccgcgcgccacatccgcgatggacaggtcgagcgtatcggccatggcccgcaaggtgtaggggatcatgtacggcgcgttggtgcggccacggtacggcatgggcgtcagatacggcgcgtcggtttcgaccatcgcatggcccagacccacaatccgtagcgattcgcggataccgtcattgcctttgtagctcacggtgccggagaagctcagataccagccatgttcgcgcgcaatctcggccatctcacggtcgccggaatacgagtggaatacggtgcgttcgggcgcgccgtcggccagcagggtttcgatgacctcgcgatgggagtcgcggtcgtgaatctgcatgggcaggcccagttccttggccagggcaatatgcgcgcggaaagcctcgcgctgcagttccttggcaccttcgccggtgcggaagaggtccatgccggtctcgccgatagccaccacttgctcggggtatgtggtggcgaggcgatgtacttcggcgagcgcgtcctcgaaagacgtgtcatggtaaggcttgtatttgaggggcagaccatccggccccggcacaccgcgatgcccgtggagcacggactcattggggtgtattgcgagcgccgcgtgcacgttacctggatgatcgagggccatctggacggcggtcatcaggtgcggcagctcgcaaccgcagtcgatgatacccccaatgccgacagattgcgcctgcgccagcaattggtcgacgtcgtacaccgggacttcgggctgccccttctcctgcgcctcatggctcatagcgcgcgcgaaagggattacggaggccacgtgagtgtggttgtcgatggtctgggcgtcgtccggcaatgcttcaggtgccggggcccagctacggtcgcgatggtggtgcttgctcatggtttctcagtgtaggctgtttctcagtgtaggctaccgtcagcaacgctcgtaaggcagtccggtaaaacgttcgactacacgacgggtatcgccaatctcggccgcctgaacttgccgtctcttgccacgagcgcaacattcccgggaaagtagcgcaaccggcaagcgagatggccaccatcctgccgccttttctgcctcatcagcccattttctacctcattttgataaaatatgatgcagaaaagttcgtatgatgcagaaaatgaggcagtatgagatcattcgactacatcgaatcaggtaagacgttgctcaccccgcacaccacgagtttgcttgccgcgattcacgaggcaaaagggcgccaaagcatacagacaacgatcagaccggatatattggagacgctggttgccgtcgcgcgcatccaaagcacagatgcctcaaaccgcatcgaaggtatttccaccagcgataacaggctcaacgatctcgtctcggagaaagccacaccgcgcaatcgcaatgaagaagagattgccggttaccgtgacgtgctatcagctattcacgaaagccacgactatattccgattaccccgaacgtcattcttcaactgcaccgcgacctcttccgacacacaccactgacctttgcggggcatttcaaggacagtgacaacgtcatcatcgaacgagatgcacacgggaccagcaccgtacgattcgccccaccgtccgcacttgtcacaccggaactgatcgaacgcgcgtgttccgcctacacgcaagcaatccgagatggacataccgatccattgcttgccatcgccatgttcattctcgatttcacctgcatacatccgttcaatgacggcaacggccgcatgagtcggctactcacgctcctgatgctgtaccgcaatggctatatggtcggcaaatacatcagtatcgaacaccttatcgagcaaagtaaaagcacttattatgaggcgctggccgcaagcacccaaggatgggacgacaacgccaatgattatgcgccattcacgaactacctgcttggcatcatactgtccgcgtgcaaggaattcgacgaacgcatcaatctcacggcaggcggcagagcgcagggagcaccgcgagtagccaccaagggaatgcggattgaagcactgcttgatcgatccctagttccactctccaaggccgatattctcgctcgcatgcccgataccagcaccaccaccattgagcgcacgctgaaatcactgttggactccggtacgatcatcaaaatcggtgccggtcgcagcacccgctatgtgaaacgccgctaaacgcatccttgtgcgcaacatctcgtcactcttccggcgctccgctggccacgcgaatcatcgcgtactgggactcgtagaggcggtagtacgcgcccttggcggcgagcagctgcgcgtgcgagccgtgctcgacgatctggccgtgatcgatgtagaagatctcatccgcgttctcgatcgtcgacaggcggtgcgcgatgatgaagcacgtgcgccccatgagcatatgctgcaggccggcctgcatcgcctcctcgctgcgcgtgtcgatgttgctcgtcgcctcgtccaggatcaggatacgagggtcggcgagcagcacgcgcgcgaaggcgatgagctggcgctggccggccgacagggtcgatccgcgctcctccaccaccgtgtcgtacccgtcgggcagttccatgatgaactcgtgcgcgtgcacggccttcgccgccgcctcgatttcctcgtcggtggcgtcgagcttgccgtagcggatgttctcgcgcacgttgccggaaaagatgaaggtgtcctgtagcatcacgcccatctgccggcgcagcgatgcgagcgtcacgtcacgcacgtcgtggccgtcgatcgtcaccgagccctcggacacgtcgtagaagcgcgacagcaggttgatgatcgtcgtcttgccggcgcccgtcgggccgaccagcgcgatcgtgcgccccggttcgacgtggaagtccacgaggttgaggatgttacggccgtccttctcgtagcggaacaccacgtcgttgaagtcgacgcgcccgcgaatctgcggcaggtccgccgcgtcgggcttgttgcggatctccggcgtgacgtcgagcgtctcgaagatgcgctcgaggtacgccgagcaggtgatgagctggttgtagaagttgccgatgttgatcaccggattccagaagttgttcgcgtagccgacaaacgcgatgagcacgccggtggtcacgttcacgcccccgaagcccatcacgccgacgaagtagatgaacgagatggtcatcacggagatggtctgcacgcccggccacatgaggaactggatgtgcacggcgtgcatccacgcggaacgcacctcgccctgctgctcctggaaggtcctgaactgggcctgctcctgcgcgaaggtctgcgtggtcttcacgccggcgatcgactcgtggatgtaggcgttcaggttgctctgcttgttggagagcttctggaaggcgcgccgctggaagatctgcagcacgcgcacccagatgatgagcaccgggaacaggatcaagctccacagggccagctgccagtcgatcacgaacatcacgatcagagtgatcacgaaggtgaacacgtcggagatcacgttgatcagaccggagctcagcgtgtccgaaagcgtgttcacatagttgaccacgcggatcaggatcttgccgtgcgggcgcgaatcgaagtagctgaagggcagcgtctggatatgcgtgaagatatcgcggcgcatgtccttgagcatgagctggccgacgcgcgtgatcgccaccgtgcggtagcgcagcccgaactcgtacagcacgatcagcgcggcgaggattacggcgaggatgccgagcttgccgaggtccttgttcgggatcgcctcgtcgatcatgatcttggtcaggtacggcacggcgacgacgatgcagctcatcgagatgacgacgacgagaatgcgcgccacctgtgccatatacggtttgagatatttgccgacgcgagcgatgtcgtggaggttgatggactcctccagctcctcatcctcgcggaatgtattgcgttgtgccataagtcctcttctaaaacccctgtgcggcgccggactggagtccgagctgcttgtggtagatgtcccagtagcggccgtgtgcggccacgagttcggcgtgggtgccgcgttcgacgatacgtccgtgctcgagcaccagaatcaggtcggaatccttgaccgacgagatgcggtgggcgatggcgacgatggtcttgccgccgtccatctccttgaggtgcttctggatctccgcctcggtctccatatcgacggccgaggtcgtatcgtccataatcaggatcgacggattgtccgcgagcgcgcgggccagcgacaggcgctgcttctgcccgccggacaggcccacgccgcgttcgcccacgacggtgtcataaccctgcggcatcgacctgatgaaattgtccgcgccggcgatctgggccattttctggatatatcggtcgtcgctatcatcgctggcaccaaaaccgatgttgccgccgatggtgtcggagaacaggaacgtatcctgcgccacgatgcacacctgcgagcgcaaggtggtcagcggccagtcgcgtgcgtcgatgccgtcgatgagcacatggcccacggtcgggtcgtagaagcgggagataaggctgacgagcgtggacttgcccgcgccggtttcgccgaggatgccgagcttggagccggcgggcacggtgaagtcgaggtccttgaggatcggggtctccgggtcgtccgggaaggcgaagctgacgtggtcgaagcggatgtcgcccttgatgtgcagcgggcaggacttgcgttcggcggactgctgggcaccggatgttccggaagccccgggcgctccggtagcctcatcatcgcgcttgacctgctcgacgattgtgaccgcctgcttgacggcttcggccgcgtcgggcttctccacgatgcgcggctgttcggtgagcagcttacgaatcttgatgcagctggcgttgaatcgctgccagtcgttgatgagccagccggactggcgcaccgggccgtcgatcatccacaggaaggagttgaaactcaccagattgccgagggtcatgtagcccttgatgacaagaaagccgccgaggccgagcgtgatgagctgcagcgagaagccgaggccgtccagccaaggcatgtacctgcgcgagttgtaggccagggccatgttgcgctgcatgtaatcgtcgttgtgctcgtcgaacttttcggtctcgtacggttcgcgcacgaatgccttgaccacacggttgccctcgatgttctcttcgaccatggagttgagggaggccagcgagttgcggatggagaagaacagcgggtgagcgtgcgtggacaggccgcgcgtgagcacaaaaatgaacggcgtgacgcaggccaggacgagcgcgagtcgccaatcgatagcgaacatcacgcacagggtgcccacgaacatgaccacgcagtcggcgatctgatagctcacccaactcaggcagtggcggatcgcgtcggtgtcggaggtcagacggctcatgatgtcgccggtgcgtgtgtggttgaagtacgtgaagtcgagctcgtgcagcttctcgtattcgtcggagacgaggcggtagaccgagttctggccgaaacgctccatccacatctggtagccgtatcgcgcgcccacgcggatgatggtcatgaggatcatcagtccacacagacgtggcagttcgtcggcatgtccgccgacgatgacgcggtccacgatgataccggacagaatcggaatggtcagggccatcgtgttgttggcgatgaacagtaggagcgcgcctaccacgcggggcaggtctggtttgcagtatggcagcacccatttgagattgcttgcgctggtatcgattcccggatcgacgtacatgtgaggagatcaccgtttcttggggattgtttgcttgtggtatggtgcggcatgctcctgcgccgcacgcggcaatcgctgccgccgcgattcacgatcagccgtgcttcgcactgcgcctgtcattggtcgcatgaccggagctctccttcatcggtcgaagcacgttcgactttcgcaaacgcgtattagtctagacggcctgcgtccaatcgcaacagcccacaactctgcgtgttccccgccttagcaacgcggcacggcccgctaagcgcaacattccccggaatgtgtcgcgcgaaacgttgcgcatgcggcaatgcacgctcgagacctgttgcataccagtcgaccaaattatagaatcataattaagtaaattacgattctataatttgcgcgtgtgcgccagggcagacagcaaagcaaggagacaagggccatgttcgtcgggcgagataaggagctttcggcactggaacgccgctggagctcacagcagttcgagtgcgtcgtggtctacggccgtcgccgcgtgggcaagaccacactcatcaaccgcttcctcgaagatcgccccacgattttcttttcggcaatcgaatccagcgcttccaagaatctcgaatcgttaagccgcagcattgctctgtatgaaaagggctcagaggcgttcgagacaacgcccgtataccgcagctttgaatccgcactggaagcggtgttcgcgctggccgcaaagcaacgcatcgccttcgtcatcgacgagtacccatatctggctaaagcagaccggaccatcaattcggtcctgcagcatgccatcgaccgccataaggatgacagtcagctcatgatggtgttatgcggctcttccatgtcgttcatggagcgccaggtgcttgggtatgagagccctctatacggcagacgcaccgctcaaatcaaagtggagccattcggctacgccgatgtccgcaagttcttgccaagatacagcaacgaggacgccgctattgcttacggacttaccgacggtatcccgcagtatcttcggcaactggacgacggcatcagcatccgagacaacatccgttggaacatcctcgacccaagctgctatctgtttgaggagccagacaacttgctgaagcaggagctgcgcagtccggccgagtacaacgccgtaatccaggccattgcctccggggcatctcggtcgaacaccatcgccaccgcatgccatatggaatcgtcctcatgcgccacctatttgcgcaatctcatcgatctgggaatcgttcgcaaggagacacctttcggcgaggacgctcctcgcaagacgatctaccgtatcgaggactcgttcttccgattctggtaccgatatgtgccgaacaacatgtccctcattcaatccggtcatgccgatctcgccgccgaccgtgttatgcgcactatctccgactttatggggcaggtgttcgaagacatctgcgttcagtggatatggtcccataacggtaccgaggcattgcctttcctcatgcttgatgccggacgttggtggggcgccaatccgaccacccgcagtcaggaggaaattgacatcgtggcttcaggagaaaaaccgaaaactctcctattctgcgaatgcaaatggcgcagcgtgccatccggtctgcagcagttggaagtgctgcgcaatcgcgccagactgctgcaccccgaaaccagccattacatgctgttctccaaatcaggcttcgacgagcatgtcgccgcccgcgcggcgcaagacggtacagtgacgcttgtcgattttgcggatatggattagtcggttcactccattgcggacggtaagggtgaagtaacagggctgggtcaatggaccgaacctctaggacgggcaacagacccaatccgcgacacattcccgggaaagtggtgcgcgttacatcacgctcaaacaacccagcatgtatatgggcaggtattcggctcgtccaacagtctccacgttgccatcatggaacacgtaggcatgtcctcacacgcttgtatctcgtcaagaaacagcagagtcttgcccggcgtaatttccgcgccggaaagtaccgataaccgcagtatcaggtcttcggtgtccttggccttgcttaccgtttcgaccgcctgaggcatttcgatgaaattcacctcagccacatgctcataatggtctgcaccgaactgctcaatcagcgtggtcttgcccacctgccgggcacccgtgaccaataagccctacttggttttacggttcttccaattcagcaactggccgaaccatatctcgcggcttcagtcatcctttatcatcagtattcggtagcggccctaaatcagctccgccatccggctcataatcactcgccaaccacgggcggaagtagctcccgactatccacagtgggacattggccagccaatcctgctccttgtaattccgcatcgacgtacggtaaccgcaaatcccgtatttgtcgcacagccacttcaagctacgcttatgacgctcggtaccagcttcggcctccaacggaatgattgcgccattacctgcaaagacaaaatcaacttctcccgtactgttcgcattcgaccagtacatcggtgtgatgccggcggccactaattgctggcaaacatactgttccgttaacgcaccacg

SEQ ID NO: 1459 - DNA, 7966 bp, Unknown
  R257_15m  MAG No. k141_24348
cggcaccatcgccggtgccctgaacgcgaacaaggccattgattccacggccgcttctgcactggtcaacgaattgctgtccgcgcaaggcgtgggaaacgatacgtcggtgatcattgaagacgcccaaggcaccgtcgccgccgaacacgagtcgaacactccacgcgagcctgcatccacactgaaaacgctgaccgcgctcgccgcctcatccaccctgaatatggcatccaccttggatacccaagtgttcctcacccaatccgatgacggcaccaatacgttgaccctcaaaggcaatggcgacatgctgctgtctgcaggcgattccgacgccaaccataccaacggacgtgccggtctgaacaccttggccaaggccaccgtggccgcgctcgcccagcgaggcatcacttccgtcaatctcgagtacgacgacaccctattcggcgactcacgcattcccgcaggtctgtcggaaggcggcgcggtcttaagcgactacaccgtctacttcacgccggtctcatcaatggcgattgatggaggccgccaatacaccgccgatacgcctgcgccggccgaccctgatgattcggccggatacccggaactgtcccagcacaccgccagcgacgtggccacgaaattcgccgaactgctccaatcgaacggtgtggccgttaccggagacgtgacggcaaacaccgctccatccggcgaaacgcctttggcctcggtgagttcggcaacactgtccgaaatcatggcatacacgttgcgacattcggacaatacgctggccgaggagttcggcagactcaccgctttggcgaaatcagcgacaaacagtcctgaaggcggcacggaagcggtcaaatccactctgaacgatctcggtctcgacacatccggtctgaccatggccgattgctccggcctgtctcccggctcccggctcaccgtacgcacgctggcggccgtccaacaacgtaatctgaccaccgagagcggtgctgctggtgcggaaggtctatccatcgcggggttggtgggcacggcgcaggatcggtatacggatgatgccgtggccggtctgctgcgcgtcaaaaccggcagcctcggcacggtcacgtcgatggccggcaatgtgtcccgtaccaatgggggagcgttgtcgtttgccgtggtggtcaacaatcctgaggattatgccgccgcgcgtagcgccatcgactcgttcatcaccaagctcgcggggctgtaaaagaggcatcaagggccatcaagggctacaaaggccgtaaacgtccataaacgcacgagtgcctataaccagaaaagggtggtgagtacatggcatattccgcacgattgcgcaaggccgtaggcgcggtccgaacaacgctgagcgccgtggaactatgcgatgtgcaggctcccgaattcgcgcagcatggggaccatgccgttgcctccgatgcaccactcgtgctcgtggcctgttcaggcgggcgcgattcgatggcgctggccgcggtaagccatatcgtatgcacgtccatgggcgtgcgttgcggtgtcgtgattgtggatcacggcttgcaggagggttccgaacaggtcgccggcgaggccgcggatcgttgccgtgcgttgggactgggcccggtcatcgtgcgcaacacaaccgtgcaggcacgcggtgagggcctcgaagcggccgcacggcaggcccggtacaacgagctgtgcaccgcggcgcgtgaatcaggtgccattgccgtgctgttggcccacactatggacgatcaggcggaaaccgtattgatcggactgctgcgcagccgtggcgtggatgcgttggccggcatgccgcaggtcttcacacgcagtggcgtgacttttgcgcggccgctgctgacccttactcgagacgaaaccaccggcatctgtgaagacttgggtgtggaatattgggatgaccccaccaatggcgatgcggtagacggcgagttgccgggcgactatccgttgcgctcgcgggtgcgccacgacctgctgccggccatcgaacgattcgctggattcaatgtcacccgccatttcgccgaaagcgcacagctggccagaatggacaaggagtatctggatcagcgatccgacgaggtgatgggggaggcggttacggcagttgaccggccggcatcgtcggcagcggtatcgaccgatacgccacgagcctgtgctgcagacgataccaacgattcgggccatggcatcggcctgatgatcggcgtcaaacgtattgcacgtgagccagaggcgattcggttgcgggtcatcgctcacgcgctgagccaggccggtgtgaacgccagtgccgcccagattgccgccatcgaccggctggtcgtcgattggcatggccaaggcggcgtctcacttcccagaggttattcagccaatcgcaagaaacacgtcattcgcgtgtgccaagatggagcgcatgcgaatcgctgacgttgaggaagatattgaccacgagctggtcagcaaagaacagatcgatgccaagatccacgagatggccgctctcgcgagcgaggattaccgcgataagaatccgctgctcgttgcggtgctgaaaggggccgtgaatacgctggtcgcgttcacccaggccatgagcattcctgtacagatcgacttcatgagcctttcgagctatggctcgggcacagtgtcgagcggtgaggtcacagtcaggcaggatttgtccgccgatgttcgcggacggcacattttgattgtggaggatattgttgattcaggacgcacgctcgcgtggctggtcgcagaactgaaacgtcgtggtgccgcttccgtggaggtcttcgctttgctgagcaagccttcccgccgagaagtggacgttgatgtgaagtacgccggctatgagattccggacgagttcgtcgtcggcttcggcctcgactttgacgaacgctaccgcaacctcgattcgatcgcggtcctcaagccgtccgtctaccaaggagtgcaagcatgagcttcccgcaagggccgggtaacggcaataatccgaacccgaacaacaaccgtaacaacggcaacccgttcaccaacccgttcaaccgtggcaataacgggaacaatggcaaaggcaacaacaacgagaaccggccgatatggcagtccccctggctgtggggtgccgtactcgtggtcatggtcgtgctgatgttccagatgttcgccggcggtggcacgaagaccattgacaccaaagatggtttcgcgctgatcaatcagggcaaggccacctacgccgagatcacggacaacaagcaggtcgtccgccttaagctgaagaacgactacaccaagaaaaacgccgacaccggcaaggtgaccaactacggcaagaacgtgcagttctactacaccttcgcgcagggcgcacaggtggccaaggccgtggagaacggtgatctcgaaaagggctggacctcgaatatcgagcagaccagcatgctgagctacctcgtcacctcgatcctgccgttcatcatcttcttcgccctgttctggttcctgatgagccgcatgggtggtgccggcggcatgctcggcatgggtggcaagaagaacagcggcaagctactcgatggccagacccccaccaccaagttcgccgatgtggccggtgaagacgaggccgtggccgaagtcgaggagatcaaggacttcctcaaggatccgtccaagtacaaggcgctgggcgctcgtattccgcgtggcgtgctgctgtacggtcctcccggcaccggtaagacgttgctggcccgagccatcgcaggcgaggccggcgtgccgttctactcgatggccggctccgacttcgtcgaaatgttcgtgggtctcggtgcctcccgtgtgcgtgacctgttcgatgaggccaagaagaacgcccccgccatcatcttcatcgatgaaatcgatgctgtgggccgcaagcgtggctccggcatgggcggtggccacgacgagcgcgagcagacgctgaaccagctgctcgtcgagatggatggtttcgacaacgacaccaacctcatcatcatcgccgccaccaaccgccctgacgtgcttgaccccgctctgctgcgtccgggtcgattcgaccgtcaggtgggcgtggccgcccctgatctggaaggccgtgaggcaattctgagggtgcatgccaagggcaagccgttcgtaccggacgtcgacctgcacatggtcgccgtgcgcacgccgggcttcaccggtgccgatctggccaacgtgctcaacgaagccgcgttgctgtgcgcccgtgccggtgcccagttgatcgacaaccgcgccatcgacgaggccatcgaccgcgttcaggccggaccgaagcgcaagtccaagggcatggctctggaagagctgcgcaacaccgcataccacgagggtggccatgcgctggtagccgccgccctgaacaacaccgacccggtgaccaaggtgacgattctgccgcgaggccgcgccctcggctacaccgccgtcatgccgacctccgaccgctactcgcagtcgcgcaaccaactgctcgaccagatggcctacgcgatgggcggtcgcaccgccgaggaaatcgtcttccacgacccgaccaccggtgcctcgaacgatatcgagaaggctacgaacatcgcccgtacgatggtgatcgaatacggcttctccgacaagctcggtgccatcaagtggggttccgacgatgaccagaccactgtgatggacggtctgcagccgcgcaagtactccgatcgcaccgccgaagtgattgatgacgaggtgctcaagctggtggagaccgcgcacaccgaggcgtggaccatcatcaacgacaaccgcgagatccttgacgagctggtccgccagctgttggtcaaggagaccctgaacgagaaggaacttgcggcgatcttcgcgccgatcaagaaggctccggtccgcccggtgtggctgtccaacgaccgtcgccccgactcggacaagccgccggtggagattcccgaaagccttaagcgctcggtcggcatgaagccggaagagaagacacgatgacgattcggcccgacctgttcatgtggtttctcacgtacgcaggccgggccgacgtcgttgtggacaatgacaagggagagatgagatgaacgaatatatagagtcttgccagcgggagaaacgcacatacgacgaggaaggcgtgcgcgaggccgtacgtctgttcctgaagtcgattggcgaggatcccgagcgcgaggggctggtggaaacacctgaccgtatcgcccgcgcgtgccgcgagctgttcgccggtctgcaggcctcgccggccgatgtgctggagaagcacttcgacgtggataccgacgaactggtgctggtcaaggacatcgaactgtattcggtgtgcgagcatcacctgctgccgttccacggcgtggcccatgtgggctatattcccgccaaggacggggtgatggggctgagcaagctcgcccgactggtcgaggtgtatgctcgccggccgcaggtgcaggagcgtttgacccagcagatcgccgacgcgctggtcgagtatgcgggcgcacgtggtgtgattgtggtgaccgaatgcgagcacctgtgcatgtctatgcgcggcatcaagaagtcttccgcccgcacggtgacctctgcggtgcgcggtctgctacgcaaccccgccacccgagccgaagccatgagcctcattttggataaatagtgtctactaagctccctcatcatagggagctcacttgggacctacatagaaggggaaacataatgactgatttgcaggcgttgcatgacactacgcacaccatggtgatgggtgtgctcaacatcaccgaggattcggtctcggacggcggcctgtggttggacccggccaaggcggcacagcacgggcgcgacatgatggccgccggcgcggacatcatcgacatcggcgccgaatccacgcgccccggcgccaagcgcgtgtccgaggccgacgaattggcccgcatcaccggtgccgtcaagacattgattccggccggtgccatattgtccatcgacaccacgcgcgcatccgtggccgccgctgcgctgagcgagggtgcccagatcatcaacgacgtctccggtggcacgctggacgccgaactgccgcacgtggtcgccgaccacgactgcctgtacatcgtgcagcattggcgcggctggctcgccggctccaagggcgcgaaccccgatcaagacacctccgtctacgagcacggtgtattgaccgacgtacacgacgaactcatgcgccaagtcgacggcgtgctggccgccggcgtaaagcctgagcgcattatcatcgacccgggtctgggcttctccaagcccggcatcgagcataacctaccgctgctgaccgggctcgagaccttccgcgccactggatatccggtgctgattggccagtcccgcaagcgcttcatttcggcgatgcttaccggggcgggtactgccggtgctgatggcccgaccatggcccagcgcgatgacgtgaccgcagccttgtccgccctgtccgccgaacatggcgcatgggccgtgcgcgtacacgacgtggccaaaagccgcgccgccgtcatcgccggcaacacctggcgcgaatacgcatgattcccctggctccctgttttggttgcttctaggtcttggctcccctcggacgaggggagctggcgccgaaggcgactgaggggagcatttgagcagaaagccttaccaatggacaccatcactcttaccggcgtacatgccaacggcacccacggtgtgctcgcctttgaacacgaacggccacaaaccttcgtcgtggacgtcaccctgcaccttgatctggccgccgccggtcaatccgacgatctcaacgacaccatcgattacggccgtgtggccaaggatatcgcggctgtcatcgaaggccctcatgtggacctgatcgagcgtctggcccaacgtatcgcggataagatccttgccgatgcgccggccgtcgcctccatcgacgtcaccgtgcacaagcctcatgcgcccatcgtcgtggcttttgcagatgtatcggtctccatctcgcgcgtgcgtgccaccgataatggacgcactgctgaagagcatgccatccataacgcggtggtggccttgggcggcaatgtgggcgaggtggaatccaccttgcgagccgccgttcgggagattgacgcgctgctcggcacacaggtgaccggtatttcgccgctttaccgcacggccgcgtggggcatggctgacggtacgccggatttcctgaacgccgtggtggagcttgaaaccacaatgggcagccacgaattgctcgccgcgttgcaaagcatcgaggcgaaccatgggcgaattcgtgagaatcattgggattccaggccgttggacttggacattatcgactttgatggcatcaccagcgcggatccggatctggcattgccccatccgcgtgcttggcagcgcgcgtttgtgctggctccctgggcggcgctgaatccgaacgccaaacttgccggagcccatgaggggcctgtagccgatttgctggccgccgcaccggaccgtaacgccgtgcagctcgagagcgaagactggatgctcggcgggcatgcagtcaagcaagaatcagcgtcggagtcggcacccgtctcacgcaaggcgattatttcgctggattccacctcgcaggatgtcgaacggctgttccgcgaaaccatcgtttccatcgacagtgttcctggcaatcaggtacagggcatctcgc

SEQ ID NO: 1460 - DNA, 14366 bp, Unknown
  R257_15m  MAG No. k141_24971
cggcaaggagcagtccatgaccatcaccggtggttccggcctgccgaaggacgagatcgaccgcatggtcaaggaagccgaggctcacgaggctgaggataagcagcgcaaggaagacgccgagacccgcaaccaggctgaggccttcgcctactccaccgagaagctcgtcaacgacaacaaggacaagctctccgacgacatcgtcaaggaagtcaccgacaaggtcaacgctctgaaggaagccctgaagggtgacgacaccgagaaggtcaagactgcccagactgagctgatgaccgccgcccagaagatcggccaggtcctctacgcccagcagggtgcggagggtgccgcggctggtgccggtgcggctggcgctgccggtgccggcgcttccgctggctccgcctccggttccgacgacgacaccgtcgaggccgaggtcgtggacgacgatgacgacaaggacaacaagtgatgtccgagttcaacaaggacgactacctgaacgacctgccggatccctcagatgctgaggctgccggccaggccgctcaggcctcttcaggggctgacgcctccgccgagtccgactctgcgcaggattcggctgcccaggctccttccaatgaaggagccgacgcggctcctgccgcagctgagggagagaagtcggatgccggagagaagactggtgaaggccagtccgattccgaagacaccctcacccccctcggcaaggccaagaaggaagccgcagactacctcgaagccctgcaacgcgaacgtgcggagttcatcaactaccgcaatcgcacgcagaaggagcaggagcgcttccgccagcacggcatcatcgacgtgctgaccgcgctgctgcccgccctctacgacatcgaccgcattcgcgaacacagcgagatggacgactcgttcaaggccgttgccgccaagatcgacaaggctttcgagaagttcggcgtcgagaagttcggcgaaaagggcgaggacttcgaccccaccaagcatgaggcaatcctgcacaagccggatgccgatgccgacaaggaaaccgtcgacaccgtggtggaagccggctaccgtatcggcgaccgcgtaatccgcgccgcccgagtagtagtagcctccccgcaaaactgataacggccagctcgttaacgagctgacattaccttggctcccgctggcgggagctggcagccgaaggctgactgagggtggtcaaacattgaatataaaccaccctcagtctcgcttcgttcgacagctcccgatgttttatgcgacgtgcgcaattgcgcactgctatgaacagcccactgggctgttcatccaacgggagccaaccataaagactcttcaagaaaggagacatgaatggctgaaaacgaatggctcagtaaagacttctacaaagtccttggtgtctccaaggacgcttcggacgacgacatcaaaaaggcgtaccgcaagctcgcccgcaagtaccaccctgacgtcaacaagaccaaggaagccgaggagaagttcaaggacatctccgaagcctacgacgtgctgagcaagaaggaagatcgccaaaagtacgacgcgattcgccagttcggcatgggcggcgcccgcttcgcaggcggttccggtgccggcggcttcgacgcttccggtttctctgatatcttcggctccatgtttggccagggtgccggtggcaacggttcgcgtatccgcttctccacttcgggcggcggccccaacaacatcaacgacatcttctcgatgttcggcggtgctgcaggtcaggacggccagtcgtatggcggctacggccaatcgccgtacggcaatgccggcggctatggctatgaggaggccccgcgccccgaaaacggcgaggaccgcaactccaagatcagcctgaccctgcgtcaggcggtcaagggcgctaccgtgtccctgtccgtggacggcaagaagttcaaggcccacgtgcctgcgggcgtcaaggacggccagaaaatcaagcttgccggcaagggcaagccgggcatcaacggcggcaaggccggcgatttgtacctgcacgtcaccgtcaagcccgatgccgcgttctcgatgcgcggccacgacatcgtcatggacctgcccgtaactgtgggccaggccgtggccggtggcaaggtcgaggccaaggatatcgacggcaatcccgtcaccttcaaggtgccggcaggctccagctccggtgccgaggtcaagctcgcgggacttggcgtccagtgcggcaaccagccgggcgacctgatcggccgcgtgcagatcatggtccccgccaagccgggtctggccgtcaagcacgccgccaaagaattcgacgaaaaagccggcgactatctcagcctgtaatcaggaggtgaacaatggcgcggttagccaaccaaatgaagcagttgtacgcgatgtgcgcaaccgcgctggtgatgggcagggccgatctcgacggagccgatgacgtcggcttcgacatcgaactgcccatcttcaccgtcggccaggcagccgaactgggcaacatccacccccagaccctccgccagtacgaccggctgggtctggtccgtccgcagcgcaccgatggcggcgcacgccgctactgcctgcgcgacatcgcccgcctgactcgagctcagcgcctaagtcaggatgagggcatcaatctttccggcatcgcacgcattttggccctcgaagaagagaatcgccaactgcgccgcgaagtcaaacgcatgcaaaccggcgaccaggagagcgttttcgccgcaggccgtgacggcaatatcgtggaggtacaacgctccaaccgcgcccgcctctggcgcaacgccatccgccgcgaaacccgcgaactgcccggccgcgataccgctgccgacaccacgcgcgaatccgactccacccccgccgattccaaatccatggtcctgtggggttggtgatttgctgttcggctgtcgtgcggagttggtgagataggtatatcgaatacgaatagttgaggattcactgcgacgtacggaggtaaccatgctgctcaaggccgtgttttgggatttggacggaacgcttatcgattcggagccgctttggcatgacggtgaaatcgagatcgcgcacaacaatggcggcgagtggaacgaggacctcggttgggagtgctccggcactccggtgccacacgtggcagaggtcatgattgcgcatggctgcacattgagcgttcccgaaatcgacaaacagctcaaggattatgtgttcaaggcggaggtcgaacgtctgccgtggattcccggcgtattggacgtgctgcactcgctcaaggaggccggcattccgtccatgctggtcaccacgtcgccgcgccgtatggcggagaacatcatgaagcagtccgagggactgttcgccggctacgtctgtggcgacgatccgtacgaacacaagccgaaccctgcgccctatctggccgcagccgacaagcttggcatcgcccgtgaagacatggccaagtgcgtggtgctcgaggattcctcggttggacttcaggccggtgcggcatcgggcgcgactctgatcgcgcagactggctggattcgcacggatacttccggcctgggccagttcgcgtccatcgaatcgtatgacggtatcgatgcggccgcgctggacggtttcgtgcgccagcgtcttggtgagtaattgattacatcaccgcgcatgcagttctcctcatgagcggtggaatgtgttgacgatataccagcgaagcacgccatatttgtaaagaagatggcagtaatggctgctatgaggttccggtggccccctcttgtatcggggcgactggtagggtatttgacggtttgcatataactgtctggttcattgggctggcagctcaatacaagatttaggactcataggaaacacatgggcttcgttaatttcatcctcgaactgctgaaggatccgcgtgccgcgattgccggttggattgccatgggcgtggcgccgaccctcggcttcatcttcctcatcgtatttatcgaaacgggtgtggtgttcttcccattcctgccgggcgactccctgctgttcgccgccggtgtgttcgccgctcccgatgccgcgaccggcaaggccgcgctgccgctgttctggctgctgccggtggtctggtgcgccccgattatcggcgaccagtgcaattacttcattggtcatttcttcggccgtcgcatcatccagtccggcaaggtgaaggccttgaccccggagcgtttggccaaaaccgagcacatgattgagaagtggggcccgctggccgtgttcctgggccgtttcttcccgttcattcgtacgttcatgccgttcatctccggtatttccggtatgcgttggagccgtttcacgccgttctcagtgctcggcggcctgtgctggtccacgttgttcacgctgctgggctacttcttcggtaacattccggcagtacaggaccacttcgagctggtgatcgtgctgattctgctggtctcgctcgccccgaccatcatcggtctgctcaaggccaagttcggcaagaagaagccggccaaggtgaccgatgctcagttggatgctatggaagacggcattaagaacctcgataagtaagcaagaaatgtagattaccgcataaggaatcgtcgtgaaaatgaaggccctgactgtgcatgtgaggtcagggccttttctgcatgagatgggcgtgaaacagcagcgtggttatccacatttgtcgtggacgacatgccggggtgtggataactcagcaagctagaaccacaatggtcgattcgtgttgagcattgaactcggacacgtttcaatcggcttatgaatagcaacaccacaccccgcgtggcgcgtaggattacctcgccagcggtagcacctccgggcattccgctgcccacggacgatgcgccaattccagcgtatcgctactacactccgccgcccaggccgttggcctcatgcgaacggcagagatcgggcgaggctccggcactcgccctaactacagacaccagcttccataacattgtaacgatgacgtcaggtcatggaggcgtggggttgagtgtcatggcttccatgcttgcatggacattggcgagacgtgaacacagctgcgttctcatagacgctgatttcgtggccggatgccttgacctgctgcttggtgtagaacgagagccgggcttgcggttcagccaagtcgacgcgcccctcggtcgtatcgagggtgaggcgatgaaccatgagctgatgatgtgggagggtgtgcgagtacttccctatgacccttggagcgcgcgccagcctgactggtgggaagttcaagcggccattcgggctttggcggaaacgaacgacgttgtcatcgtagatgccggtcagggtggactcattgagaccgtacccgatctgcgcagtggcctgcaggtgattgccgcggaattgtcggtaatggggctggccagagccaagtcgcaccggtccagattggattcatggggctgtgaagcgccacatatcgtaggtgtggaaccacgtggcgctccacgtgggagaggccacgtgggtattggcgaggcgcaggactatttgactgccacggtattggggcccatcaagccaagtgtcaatctgtgcggagacgtactggaaggcctcggcatcagatcggtgaccaaaggcagtcgcaaagccatgaacttgcttgccgatctcgtagaacaggccattcgcccggtttcgggagcttctcacaaggaccagtgatgctatggctgccgtcagcacgcgagccaatgaggctggcacagcgctcagaaccatattcttcggtctgctggatgacgtggcatctgacccgcaggttaccgatttggcggtgacctgtgatggccgcgtttgggcggaccgcggcaatggcatgcgcgaaacagtattgcatgtgccgttccgctcgccgcaagtagttcgagaatacgccgtccaactgtgcgcgcagctcgggcgcagactggatgatgcctgcccgatagcggatgccgccagtccggatggcatccgcgtgcatgcggtgattgccccattggtgccacaaggtgccgcgatttccatacgattccctgaccgaaccatggcatcgctacagcacctgagcaaattaggcgtattcccggctgcttggctgccgacgttcgtgggattggtgcgcaaacatgccacagtgctgattaccggcggaacaggcgtgggcaagaccaccttgctcaaggcgctgctggcgcaatgcgacgtgaacgagcgcatcgtcaccgtagaggaagttcgtgaactgggggaactgggacgcgacgatcatgtctcgttggtaacacgcgaggcgaatgtggagggcgtcggagccataagcctggcggacttggtcaaagcgacgttgcgaatgcgccccgaccgcgtggtgctgggcgaatgccgtggcgcggaaatcgtcgacctattgcgcgcgttcaattctggtcatcacggtggcatgaccaccgtgcatgcggacggcgtgaaccgagtaccgtccaggctgatttcgcttggattactcgccggagtcagtccacaggcgttgaccatgctggcggcaggcgctttcgacgcggtggtgcatttggagcgagtgaatggacagcggcgtatcacgcagatcggcgaactgcgcgtagcacatggtgaactggcaggaacaccgctggcggtatggaatggctgccatcctcctcggtatgccgccgaatgggggcacttcattgaacgatggggcatcgttcccaggccgagtggtggtgggtgatgatgtggtgtgctgttctggtggcgctcgccgtgctgatatggccggggaacaagtccgggaggctgtaccggctggcttaccgcgggcgcgcggtcgattccgcagccataaacgaacctcgatatgccgactcacctcgcgtgggcgttgcgcaggtgattacgtccgccatcgcgcgattgcgaggtggcggcacattggttgaagcattcgaggaacaatccagcagacgcttcgccactcatcgcattactgtggaacggctcataacggtgttcgaacagcggcgtctgcccgacgaatcaccagcgcaggtacttgaagctgcacgcggggtcgccgccgcagcggttttgagcgatgagctcggttgccaagcggtgccatgtctggaagcggtattgactgcttaccggcagatgaggctgatgcagaacttgcgatcgcaagcatgtgccgttcctaaagccactgtggggctgctgagcgcgcttccggccgtcactgtggcattgggcgagcttctgggagctagaccattggcgttcttgcttggatcgccacgcggtgtggtctgcttgacattgggaggatgttgttatgctgccggcttggcatggatgcgggcattgttgaaaggcatcggattatgagtacggtgtgggtacacgccgcggcaggctgtgcggcgattgctggttggctgtataaggctctgtctcgtcatgacagccgcttgccgggcgaggagccggccgtagcgcatgattgcgggtcgtcatggaccatactcatattgcgtatgttgcaggtgtccttgcgtcagggctcctcgattccccgggcgcttgacatggtgggcaaagccgtcggcggcgactgcggcgctcgcatgagcgaggtcgggaactccctgaccagaggggttccctgggctgatgcgtggcatgccgctatggctgttcagcatgagggtgcgccagctgatagtccatccaagggaaatacgaataccacgcaacgagatcttggcctgctgcaatcggctttggaatcgtcatggacgcatggcgatatgcctggtgtgcgcctcgaatccgccattgaacagctggaccgtgacgagcgtgctgctatcgaacggaatgccgcgaagctgtcggtaaagctactgatgcctacagggctatgttttctgccggcattcgtgctggtaggagtcattccggcgattgcgtccttcatgatgtgaatataggcgtgaactgagtgcgcttaggctgaatcttgttgtattgctcggtattgtacttggctgcgtttggttatccacatttgtggtggacgacacgtcgaggtgtggataactcggcaagctagaaccacataccccgtttttcctggtgcatgaagcgttgatagtccacagtggtatgcaccccgcgtcaacccggcgcgggggccaaccactcacatacgcatggggaaggtgcgaagccactgcgcagcttcccctccttaccgaaaggaacgccaatgaatacccctatccccgtcatcgtcgacgggcaggccggcatctttgcgcacagcaaggctcgtgtggccacgctgaacgccaaggcgaaagaacggctatgcctcatggacgcacgcatccgcgccctcatggctgagcccgaagaaggcgcagccactgcggaatacgcagtcgtactcgttgcggctacaggctttgcggcggtgctggtcgccatcctgaagtcggatgccatcaagacgttgctgaccaacatcatcaaacaggctctgaaagtcgggtgacagccatgaagaccatgagatgccggtggaggctcgccagactgccgccagacctatgcacgggatcggccaccgccgaattcgcgatcgtattgcccagcgttatcgccatcgccgggctgatactggcaatgggacgtgtggtcatcgtttccatggactgccaaggtgccgcgacggcggctgcacgcgagtttgtggttaccggtgacgaatcatccgcgcgcagcatagctgcggacgttgcagggggagatccccgcgtcagcattgcccacaacggccaatcgacgagcgtgatggtcgaatgttcggtactgcccggcccactggatgtcactccaacgcgggtcaccggcaacgctacggcgataagccaataactggtcggctgctggctgggcggccgcaatagaaaggaactgcggtgcagggaatgcgttatgaggagggatcgggcacgatggccggagccatgctggttatggcggtgggcattgcgctcgcggtggcggcaagtgtgggcaacctcatgatctgccagaatcgagcgcgttccctcgccgatctcatcgcctttgacgccgcgtatgcgctgtggcatgtggatatcggtgatccatgcgcgcttgctgcaaacatggctgaagcgaatggcgtcacgctgggctcctgctccgtgcgggatgaagacgtgttggtaaccatcaaggtggaaaccatggttccggtggcatcatccgtggagcggatggctcgggccggaccggtgaattgtacggaaggagacaattatcacaataatggaccgtaagcactgatgctctggcgggcttctggacctttggttaaggtgagagcatgagcgagagtgaacgcacagaacgccgtcgcgtggtggccatggtgggcaatcccacttccgataagggccgtggtgccaaggtggatgcgcgagtattgggactgctggaggacgccggccgtgcccataacttcgacgtcatcgacatcaccggcgtaagtttcgacgattccctgaaccaggcgcgtgaacgcgcgcacgagtacgactatctggtggtggtcggcggcgacggcatgatcgcactcggtgccaatgccgtgggttgcggcggtaagccgctgggcatcgtggccatgggctcgggcaacgatttcgctcggggacttaagctgccggtcaatcgcatcgaaaccgcagtggaaggtatcgtcggcgctatcgtgcgcggatcacacattgatgtggacatgggacgcgtgacctctttggatggtggctatgccgtgaacccatccaccggcggggaatacgagtaccgggagaacaagtctgccgagcacccgattgaccggtactatgcgggcatgctgtcctgtggtcttgacgcaagtatcaacgaccgtgcgaatcattcgcatctgccgaccggcaccatgcgctactttgcggcggtgctggtggagctgacgcatatgaagcgttatgggtaccacgtcaaggccacgctggcggacggtaccacggatgaacgagacatcatcacgccgttgctgacgattgcgaattcgcgtcatatcggtggcggcatcgaggtctcaccgtactcctgcttctccgacgggctgttggacctggtgtggatgaatcatgtgccgaacttcggtgaatgtgcggtggccatctcgaacgcctataacggcaagctgctcgcctcaaaggtgttcgggtggaagcgcatacgcgagatcgaagtcacgcgagccgcagaaggcgacgagccaccggtgctgatggcggacggcgaatacatcgggcatctgccattcagggtagtggccgaggactgcgcgctacgcgtgctggtaccgccggccgtagccgcccgtgaggtggactcccgacaggaagtgctcgacgccatcgcccgagacggtcgcgaccccgtaaccggccagttcgcctgacctgattatattggctcccctcattaggctgagccgtaaagcaaacagcccagtgggatgtttgtaggcgagggttcgacgatagtcgaaccagaagaaagtcagccgtaggctgtccgcaattgcggacgagctggccgcgaagcggactgaggggagtgcgggagagcggtaccagagccaatggccgtcagacctcagacgacatagctttcgatatgcagcgtctgcgccatgacctctttgatggttcggtcgctgatgttcggatgcgagcgaaccagcgagataagccccacgattagcgtgaagaatgtctcatggacgttggtgattggcagaccatgcatctgctcgaaatcacgtacggtggtctgggcaatgtagtcggcaatacggtccgccgcgcggtcaatgaacttgatatacagttcggcgttgccatcttggatcatacggtttgagaaggggctctcgtcggcgattagggaacggagcacatgcacgatgtcgtctaatgccttgttcacgttgcctgtttcgcgcgcttggttccactgcttcaacgtggtgaggatttcgtcgatgacgtcatcgagtactgcgtcggctacggcttccttgtcttcgaagtagtggtagaacagcgaacgcgtcataccgacttcgcttgcgatgtcggaaacggtgattttggagaagcctttttccagacacaccttgcgcgcggcttgcacgatggcgtcgcgccgggcaccgccacgggtggggcgtttctcgtcgaggatatcgctcatgggtacctcctgactacaaccgttattgacactatgttaatacaaagaaagcggttaataacaataaaaatgcggtaaccgttgtcagatgaatgtcgttggaatataaagagttttcccgattcggcagctatgagcccggtttatcttgactttttatcggttaattctgagggcaaaggtaggttagtagctatggcacttgcactgtatcgtcgctatcgtccggacaccttcgaaggggtcatcggccaggaccaagtcacggtcccgctgatgcgcgccttggacgaaggcaagcttacgcatgcctatctgttctcagggccgcgaggatgcggtaaaaccagctccgcgcgtatcctggcccgttgcgtcaactgtgccaaagggccgacttcccacccctgcggcgaatgcgaaagctgcaaggacctggccaccggcggtccgggttccatcgacgtggtcgaaatcgatgcggcctcgcacaacggtgtggatgatgctcgagaattgcgagaacgcgctggtttcgcccctgcgcgcgaccgctataagattttcattctcgatgaggcccatatggtcacgcagcagggcttcaatgcgctgcttaaaatcgttgaagagccgcctgaacatgtgatgttcatcttcgccaccaccgaaccagacaaggtgatcggcaccatccgttcgcgcacccaccactatccgttccgtctggtgccgcaggaagtcatgggtccctacctggagacgatctgcgacaaggaaggcatcaagcccgagcccggtgtgctgaaactggcgatgcgcgccggtggcggctccatgcgagataccctgtctgtgcttgaccagctgatggttggttcggtcgaaggcgtgatcacccatgatgccgctgtagccctgctcggcttcacgccggaggcgctgatcggtgaggcagtggatgcggtaatcaatcacaacggcgaagccctgtacggcgttatccagaaagtcgtggtcggcggattcgatccgagacgattcgtcgaagacctgctggctcgtgtgcgtgatctgctggtgcttacgttggccggggaccgtgcggaatccgtgctgtccgacgcggctgaggccgaggatatggacgatctgcaccgccaagccaaggcgctgggactgggcgcactgaccgccatggcagacatcatcaacactacgttgggtgccatgaccggagccatttctccgcgtatgcgcttggaactgctggccgcacgattgttggccggcagtgaatcaggctttgcaacagccgctcccgcgccagcttcttctggcatgccgcctgcggctgcttctccgacttcgactacgtcagccgcttccggtacgggtgccagtggttttgccggcgcatcgcgaggcgggtttgccggagcctcacatggtggattctccggtgctgcacgcaaccagcaagcagccgcgcctcagagcaccgcttcccatgaatccgctgtgggagacaatggccctgtcagcagcccagtcagcgaccggcccgcgggctctccgtctgcgcaacctgccgcagcaactgctgctgccaatgcctggggtgctcccgccacgtcgccggccgtcccggcccaaccggtgacctcgcctgcggcatcggataatcggtccatcgacgagaagtgggatgcggccgtcgccgctttgccggaaaccattcgtgaatatgtgtcacgagacaaggtgccgaccgtaaaattcggtcccaaccgtaagagtctgccttgtctgtcgatgacgttcgacaagtcgctgagccagcacgctttcgccttggccgtggacaacagcggtaagaaggcggcgtccgtggtgttggatgccgtgcgcaacgagttcggtgccaatgcggttattgcaccttctgcggtcgcggcgaatggcgagcgagtcgaatccgtcaaacgtatgagcccggagcaattggccaaggtcaagcagcagattgccatggccaaggccggattggccgcgtcgagtttgggcgcgggtctgggcattcatatggggagcgagccgaaagctccgaagccgactgcaacaggccaagccgaggatacggacgacagccatcgagccggccaatccagtgcatccacggcggcgaagagctggagtgacgatgacccttgggccaagccggccgtaagcaacgcttcaccgcaatctgcagacgggttcgcacctaacgagcccactgctgcgcctgcgcccgaagagcatcacaagaagcatgttgcggttccggacatcagtgacggtgttgatccgtgggccgctccggctgctcctgttgcacccgctgcgtccgttgcgtccgctggacccactggacagtccacggggcagccagccaccgcagctcccgctacggcagttgccggcgcaagcgatgatccatggaatcagccgcaatctcaggctacggcctcgctggcactgcaaccggtcgaagccgacccgtggaaccagccatatcagcagtctcctcacgatgatccgtggaatcagccgcaggggaaccatgctcaggcggctccgcagccaggagacgacccgtggaatcagccgcagtcccagactccggcttcttcggttcctcagacagtgtcgggcaatatgtcgggcgatgacccgtggaaccagccccaatcggttccgcagccggctgccggcgatgacccgtggaa

SEQ ID NO: 1461 - DNA, 6774 bp, Unknown
  R257_15m  MAG No. k141_25082
gattgcgatcgcgttgcctgtcggcatctggttgcccgatgtgctcggcggcggctcgaatctgattgataccgccgaacatgcgcgcgtcggcttgggaatgctgtgtctgctgttcgtggcgaagatgctgttcacatctacgagtttcggctcaggcgcgcctggcggtattttcatgccgattcttgcggtcggttcgttggccggcggcatctgcggtgaagtgttgcatcgattcggtgatctgccatccgacgcagtggcggtgtttgcggtgtgcgtgatgacgggcacgctcgccgcgtccgtgaaaacgccgatcacgtcgattctgttggctgtggagatgtctggaacgttgacgcacatgctgccggtcgcggccgtcgctttcatcgcgctgttggtgtccgatttgctgcgcaccaaaccgatttatggggagttgctggagcggtacgtgcgcgcgcaaggcatgcagatggcgatcgcaagccatgtgggcagcggcattatggaactgccattggaaatgggagcgattgcggacggcaagcgggtgcgtgacgtgcgttggccgtctgggtgcctgatcatcggcctgcgtcgcggcgaaagcgagatcgtgccgcgcggcgatacacggctgcgtgccggcgactatctggtggtgctgttcagtggcgaggaggagcgcgaggtgcgacctgcgatgcggcggctgtgtgatgcccggcttgactgagcctggctgaattcggctggactctggatgtacgaatttgcggaatcggacatccagggtgcatacgttggcgctccgtgtaaactcatatgcgttaggaaggtggcaaccgcggcccagctcgttgttgcacggcctatgggcggaacaacgctgtccgcggaaggccagtacagggggagcgcaatggaatcgcaagaacaatcgccgggagacgtggtgactgcgggtgaggactcacatcccatcacgcaggcaatcgacactgttgaggtgacgcatgctggtgcaaccgcgcccgccgctaacaccatggatccgcctacgattcccctggcgccgatgaaacgtatgcaggcgcggttcaatccgctcgccgacggactgatgtatgttgtggtgttcgtcggtggatttgttggagtcggctgtcggcatgcgttggatatgctcctgccgtcggtcagcgggacgccattcgttgtgggcacgtttgtgtcgaatatggtcgcctgcttcctgttcgcgatgctgaccgaattcatggcgaccgcttcgtggctgcgtcgccgggtgcggcaggttgtcagccgtggcgttgggctcggcttgctcggcgggctttcgacgatgtccggcgtgatgctggaaacggtggaaggtctgcacgagcggcatatcgccagtgcgcttggctatcttgcgggaaattttgcaggcggtttgctcactgccgccgccggcgtggttctgatgcaggcactgctgtcacggagtactcgaaagcgggttcggggtgcgttttcagctgtttccgtgtccgattctgccgaatcggacacgcagggcgtacgccatgtgaaagtggccgacgtggcgcgttctgccgcgcaggccgcaatggaagccgcgcagacggcccagcagattgcacagacgggacaggttccgcgagtcgaaacaccaaccgtgccgccgaccgccagccagcctatgcagacaggccgcgttccgcagattcctccgctggccgttcctcagctgacgcagccggcgcatccgttgctgcgcgagccggatactccagacttggggcagctgcccgagattcagcagtcgcagccaatccagcagccggccaacccgcttccacccagcttcgagcccaaaccgatcactgcggagatttcgcttgtcgccgacccgactaccggggaggtgcgctgatgatgtggatgatctgtctgttcggcggtctgggagccatggcccgttacgtgctcgacgtgtcaattcaacaaggctggaaccgcgagaatcgaagaacgaaccgcaacttcccgctatccacgctcgtcatcaacggcgtcgcctcgctatgcgcgggcatcgccatgatgtcctactattcgcaatcggtggatatggacacggtcatgatgttcgttgtcggatttctcggtggttgcgcaacattctccacggcgctcaacgaagtggtttcattgattcgccagcgtcgttttacgctggctctgggctatggaatagcaaccgtcgcggtgcctctcatttgcgtggccaccggtttcggcattgcgctgcttgccaatccggcgtaattttcacgttacacggacggtcgctgagtaacgtgaaagaaatctgagcgcaaccgcgcaagctgtttcctctcctacgttgtgaaaacaataagagaggaaaaaccaatgacagccgtaacgtatttcacacggcatcgtcgaccgggaatcgcaatgctatgttcgatttttgccgttctctcgatgcttttcgtactccctcccgccattgcgtccgcagccggcaccgctcaagccgtggatgaatgcaatccgacatccgacaacggttgcgtcaacggcattctgcaggatgccggcaaacagccgatcgccggcgccaccgtcaagttgtccggcaaggctacggcggagaccacaaccgcagccgatggcaagtgggcgttttccgttgccgatgatggcgactacaccgtcacgattgacgatgccgttgcgaaagagcatggcctgaagtcgagcagtgcgacggtcaccatcaagaaagccagcttcgacaagcagcgcggcgtcatccgcttcgatcaggccgacgatgccgctggcaacggcgcggccgaatcggcggacagcaagcaggggacggcggatgcagccggatcggcggacgccgcagcatcgtcagccaaaaaaggtggctccaatatcggcaaacgtatctggcagcaactgtattccggcattatcttcggtctgatgctgggcctgatgtccgtgggtatgaacctcgtgtatggcactaccggactgcagtccttctcccatggagaacaggtcacgctcggcggcctgatggccttcgtgggcacgcagatgctgcacatgccgctcgtggcttccgccatcttcgccgtgatcatcggcgcgctgaccggcttcatccaaaacgagatcgtatggggtccgctgcgccgccgccacgtcggcactatgcaacagatgatcgtgaccatcggcctgtccatggcgttgcagtacacgttccagttcttcttcggcggtgacattaagggtatcgtcaaatccgtgccgaacagcttccagatcggcccgatcaccacggacatgccgacgctgctgtccgcgctcatcgccatctgcgtgatcgtgggcgtcacactgttcctctacaagacgcggctcggccgcgccacgcgagccgtttccgacaacgcggcactggccgcagcgtccggcatcaacgtggatcaggtggtccgcgtggtatggattctctcgtgcgccatggccgccctatccggcgtgctcctcggcgtatacctcaacggcatctcttggaacaccggcgcgaccctgatcctgctgatgttcgccgcggtgacgctcggcggcctcggcaccgccaacggcgctctcatcggctcgctggtcatcggcatcgtagcggatatgagctccctcgtcatccccaacgacatgcgttacgccagcgcgctggcaatcctcatcatcgttctgctggtgcgcccgcagggcatcttcggcaagcagcaaagggtgggctgattcatggacttcatgacaatcatctccaacgcggcgggcgagctgatcgcccccaccacggcggcatatgtactggccgccatcggtttgaacattcacttcggcatgaccggcctgatgaacatgggccaggcgggcttcatgcttctcggcgcctacggattcgccatcacgcagtcgatgggctgcaacctgttcgcctcggtctgtgcggcgctcgcgctcgccgtcatctacgcgctgctgctcggcattccgacgctgaagcttgggcccgactatctggccatggtcacgttggcggccgcggaaatcatccgcatcgtcggccgttccacagccatgacgaacttcaccggcggttccgcgggcatctcgccgcaggatttcactgaaaagttcgaagcgctttccccactgcccgacggctcgaccacgttcctgctgtggacgtacagcaacaacatcgcgaattcctggtggctgcgtatcgtggcttggattttggttgcgatcgctgcgttcctgtgctggcgatggttccactcgccgtggggccgtatgcttaagggcattcgtgaggatgagaatgcgattcgttcgcttggcaagccggttacgaaatacaagatggaatcgctgattttgggcggattgttcggtgcgatggccggcatcatcttcgtcctgccgcgctccgtacagcccgattcgctcggccgtacagttacgttctacgtgtggacgattctgctgctgggcggcgcggccacgattctcggtcctgtgctcggctcctgcgtgctgtgggtgctgctcaccttcgtcaaggaggttatgcgcaacaccgttcccgaaaccctgatctcctccaatcagatcgaagccctcggctgggtgatcgtcggcgtggcgctgatgtgtctggtgatattcagaccccaaggcctgttgggcgaccgaaaggagttggctttccatgcctgatacaacgaataccccgaccaccggcgcgcagcagccatctggcgtgcagccgggagtgccgttccatgacctgaccaaatgggccaccaaagcgccggaaggcgagaccctcatttccacggcctaccgtgacaaagtcaccgaggatttgaaatttgtggagaacaagccgggtgtgcacaagcccgatccgattctgatcgccgatgacgtgacccgcaagttcggcggcatgaccgccgtggacgtgagccatttcgaaatcgaaaggcatggcatcactgcgttgatcggaccgaacggcgccggcaaaaccacgttcttcaatctgatgactggtttcgatatgccgaacaccggcacttggcagttcgacggcaaggacatggcccacgtgcagcctgaaaaggtggcgcgcatgggtatggtccgcaccttccagttgaccaaggttatgagccgtctgactgtgcttgacaacatgctgcttggcgctcccgtgcagcttggcgagggcatgttccgcgcgctgttccccggcatgtggaagaagcaggagaaagcgaatattgagaaggcggaagcattgctggaacgttttctgctgatcaaaaagaaggatgattatgcgggtgcgctttctggtggtcagcgcaagttattggaaatggcgcgtgcgttgatgtccgacccgcagctggtcatgctggacgagccgatggctggcgtgaaccccgcgttgaagcagtcgctgctcgaccacatcatggcgttgcgagaggaaggcaccaccgtgctgttcgtggaacacgacatcaacatggttcgacacatcgccgactgggtcaccgtgatggctgaaggcaagatcgtggccgaaggccagccgaagagcgtgatgaacgatccggccgtgatcgacgcgtatctgggagcccatgcgaatatcgacttgggtgacgactccgtgctggaagatttgaaggaggcctgaaatgagcgacaacgcaagtgtggcaagtgcggctggagtgtctggtgcggtctcggtaccccatgtgtccgattctggtgaatcggacatccaaggtggcggagacaagccgctgacccgcgcgcagattcatgtgggtgagccggaaggtgagccactgcttgacgcggtggatttggtggccggctaccttcctggcgtgaatattctcaatggcgcgtccctcacgcttcatgagggtgagatcgtcggcattattggcccgaatggtgccggcaagtccacgctgctgaagtcgctgttcggcctggtgcatatccattccggcaagcttctgctcaagggcgaggacatcaccaatctgcgtgccgacaagctcgtttcccgtggcgtgggcttcgtgccgcagactgaaaacgtcttccccagcctgaccatcgcggaaaacatgcatatgggcgctttccaggcgccgaagctgttcgaggagcggttcgactacgtatgctccatcttccccaagctcggtcagcgcaagaaccagcttgccggccagctttccggaggcgagcgccagatggtggccatggcccgggccctgatgatgaagccgtcagtcctcctgctggacgagccttccgcgggcctgtcgccaatgcttcaggacgaaaccttcatccgcgtgcgccaggtcaacaaggccggcgtctccgtggttattgtcgaacagaacgcccgccggtgcctgcagatctgcgaccgtggctatgtgctcgaccaaggtcgcaacgcctactccggcaagggccgtgatttgatgatagatccgaaggttgtctccttgtaactgggcaatctggaagaggaggtccagtaagagggcaggtagcccc

SEQ ID NO: 1462 - DNA, 21462 bp, Unknown
  R257_15m  MAG No. k141_25349
catccgccccggttccgtcatcgccgacctgaagatcgcccgcggtctcgactactacaccggttccgtctacgagaccttcctcgacggtgccgcatcactcggctccatctgctccggtggccgttacgacaatctcgcctcccagggcaaccgcaagtacccgggcgtgggcctgtccatcggcctgagccgactggtcagctacatgctgcacaccgccggcgctcacgccaaccgtgtcagcccggccgccgtgctggtcgctgtgtggaatgaagaggaccgcccggccgccaatcgtattgcgaaccaactgcgtgcgcgaggcatcgctactgacgtggcacccaccgcggccaagctcggcaagcagatcaagtacgcagacaaactcggcattccgtacgtgtggttcccggccaccgctgccgaaggtgcggaaggcgcagagcccgctggcgacgaggtcaagaacatcgtcacgggcgagcaggttgccgccgattgcacgtcgtgggagccggatactgtggttgcccagcaaaccgtcgaaatctgacgtattcgcgcgaaaaatcgaggagaaacaagataatgagccagacggcttacagaacacatcatgccactgaagtgaccgaggccctggtcggccagaaggtcacccttgccggttgggttgaccgacgccgtgatcacggtggcgtggccttcatcgaccttcgtgattcgaccggcctcgtgcaggtcgtcatctatgacgaggatatggcccgcccgctgcgcagcgagttcgtgattcagattaccggcgaggtgcgcctgcgcccggacggcaacgagaacacccacctggccaccggcaagatcgaagtcgtggccgagaccatcgagatcctcgccaaggccgacgccctgccgttccaggtctccaccgccctcgagaatgagtccgagaacaagctgcctggcgaggacgtgcgtctgaagtaccgttacctcgacctacgccgcccgtccatgcagcacaatctgaagctgcgttccgacatggctaaggccgcccgccacgcgctggaagacatggacttcaccgaggtcgagaccccgaccttcattaagtccaccccggaaggcgcccgcgacttcgtggtgccggcccgtctggtgcccggttcctggtacgccctgccgcagtccccgcagctcctcaagcagctgctcatggtctccggtgtcgagcgttactaccagctcgcccgctgctaccgtgatgaggacttccgcgccgaccgtcagcccgagttcactcagctcgatatggagatggcctacgtggaccaggaagatgtgatggccatgactgagaaggtcatcgccgccatctggaagtccgccggctatgaggtccagctgccgctaccgcgcatcacctggaaggatgcgatggacaagtacggctccgacaagccggacctgcgcttcggcaacccgctggtggaactgaccgagtacttcaagaacacgccgttccgcgtgttccaggccccgtacgtgggtgccgtggtcttcaagggcggtgccgccacgccgcgtcgtcagttcgacgcttggcaggattgggctcgtcagcgtggagccaagggccttgcctacgtggtcttcggcgaaaacggcgaactcaagggccccgtcgccaagaacctgtccgatgaggagcgcaacggcctgcgcgaggccgtcggtgccgaggaaggcgacgccgtcttcttcgccgccggttctcgcgagtccgcccagctgctgctgggtgccgtgcgtgtggagctcgcctcccgcgaaggcctgctggatccgaagaagttcgctttcacttgggtcgtggacttcccgctgttcaagcccaccgacgatccggatgatgacgatgtggctgtcggccactccaagtggacctccatgcaccacccgttcaccatgccctccaaggattggatcgacaagttcgacaaggatcccgagcacgccatgtccgattcctacgacattgtctgcaacggtgaggagatgggcggcggttccgtacgtatccaccgcgacgacatccaagcccgtgtgctcgatgtgctgggcatcaccaaggaagaggccgacgagaagttcggcttcctgcttgaggcattcaagtacggcgctccgcctcacgcgggtttggccctcggttgggaccgcaccgtgtccatcctggccggtgccgactccatccgcgacgtcatcgccttcccgaaggccggcggcggccgcgacccgctgaccggtgctccggccccgatttccgacgagcagcgcgccgagaccggcgtcgactacgacccggacgccgacgaaaactaatctacggagcgtataccgcctttcctcagcactcgacgcaccttagtgcgccttcggcttcgaacggcggtctccgcctgcgtagattaattttcgaggagtaatgctccggtgctattagccgcaaatggcccttggaataattccaagggccatttgctttttgcgggtggggcccaatgtgccaaatacctgccaaggggtgccaaatactccgcccgatggcacctccgccatgcggcaaacctcgcaccatgcggtgtccccccttggcgtttgccgattatcccccccatggggcggtaactttctcatggggcggtaaacaacccatggggcggtgaaaaccccatggggcggtaggtcaaaatggcttaattccgcggtttcacaatttcttcaaaccgccccatgagcaaattgccaccccatgagggaattgccgccccatgaggagcgatcgcaactccgtatttgattaatgttgtgaggctttgttgtgttttgcttgtttccgcctcctgtattcccctttgcgcgcattgatggtgaggctgccgtctattaatacccggcatgaaggttgaggacggccaggaagcggtatttgcatcgcggtggcaacctcttgtgcgaaggcacgttgtttggcggtattccacaggtcatcggcgaacacctcgatgacggtccagcccaattgccgcagacgtcgacgtttttgctggtcccgcacatattgtttgcggaagcgacggtgatgatcgccatcatattcaatagcgactttgtattgtggataagccatgtcaacggtgtaggtgtatccgttctctgaatcggtaatgccatattgtgtttgcggtatgggcaggccgaaaagcataagcgccaagcgtgtacgagtttcctgaacggaatccgatggttttacgagcttcagcgccgcctcacaacgcgcacggccaataacgcggtgaaaggccgttagtcgttgagtgaattgttcaatggcatatccataacgtctgatgagcgcttcagccagcaccactaattcagtgaggttgagatattgggcaaactgtatccacgcatccatgggatgcatgcaggttacgccgtttgaaaaagcgatactgctgaactttgcattccatatgcgatagtcgacattgtccaatgaagagcgggtccccttgctcctcaccgtcacataaaaatccttctgcggcaacgtgctgtgcctcggcaactccacgccgcataattccaatgcggtatacagcgagaaacacaacgtgcgtttcgtgcgcactttgcccagcagattccaacaggccgtgttcttggccgtggctttggcgtcaagatctttgcgcagatagttgttgatttcgccattgtgcggcgcttcgttgtatccgttcatgcgccgagcgtagcgcattccacggtggcacaggggcaaaaccgaaaaatggggataacttaagcggcgcgagccggttatccaccggcatatcgtgtgccgcgccaggttatccaccgcgcttcgggagtgtcgtccaccgtataacagcactcatcgtgtgcgaacagctagccacgctcaaaatgcctagcacatttatacgaatacgacatgggaaacggcgagaccagccccacacaatacaaagtgaccgccagccatgcgcccgactgcggcatacacggcagcaacgccaacgacaccaaggccaaacatggaatcagcagataggacaacacgtgcccgctttgccgtcgcagcaacgtctcagccaccacgcagcaggcaatcagcgcacagcagacgccgagcgatgcgcgactcagcgagaatgtatgccgatgcccaatgccgccttcacgatgtctgatgcggaaatgagacatcgactgagcaactgtgtggacatactgtgaacacgttggaaacgtcggtgtgctatcctcccactcatgtctgaaacgaacaatgaaacagcagtgcgttcgcgcacgacaagcacaacatcaccaagcaaggccaaattgaccccgctggttcccggcaaagaggacccgaaccgtccgctagtcgaactgacccacgtcgaaaagcacttcggtgctttgcacgtcctgaaggacatcaacctgaccgtcaccaagggtgaggtgctggtggtcgtgggcccgtccggctcaggcaagtccacgatgtgccgcaccatcaatcgcctcgagaccatcgattccggcgacatccgcatcgacggcaagcccctgccacaggaaggcaaggagctcgcgaacctcagggccgaagttggcatggtgttccagtcgttcaacctgttcgccaacaaaaccattcttgaaaacgtgacgttggccctcatcaaggtgcgtcacatggacaagaaggaagccgagcaactggccatggacctgctcgcccgcgtgggcgtcgactcccaagccagcaagatgccctcccagctctccggcggccagcagcagcgtgtggccatcgcccgcgcgctcgccatgcgccccaaggtcatgctgttcgacgagcccacctccgcactcgacccggaaatggtcaacgaagtgctcgacgtgatggtcgaactcgcgcatgaaggcatgacgatgatctgcgtgacccacgagatgggcttcgcgcgcaaggccgccgaccgcatcgtcttcatggcggacggccagattctcgaagagaacacgcccgacgagttcttcgagcatccgcagaccgaccgtgccaaggacttcctctcgaagatcctcacccactgacgaacccactgaaagacgggtacgcaatccaatgacattcaccaatacgttcaaacggaaggtttgccgcgtgatcgccgcgctcgccgccgtggcctgcacaatgtcgctggccgcctgcggcgcggacgaaaccggcaagatccgcatcggcatcaaattcgaccagcccggcctgggcttcaagaagtccggcacctacgtgggcttcgacgtggacgtggccaagtacatcgccaagaaactcggctattccgaagaccagatcatctggaaggaagctccctccaagcagcgtgaggccatgattcagaacggcgacgtggacatgatcctcgccacctactccatcaccgacgagcgcaagaaggccgtctccttcgccggcccgtacttcgtggccggacaggatctgctcgtgcgcaaggacgacaactccatcaacggccccgaagacctgaacggcaagcgcctatgctccgtcaccggttcgacctccgccgccaccgtcaaggagaagttcgcctccgaagtccagcttatggaacagcccggttacgccgaatgcgccactgccctgttctccggcatcgtggacgcggtaaccaccgacgacatcatcctggccggcctggcctccgcctcgcgcggcaagctcaaggtggtcggcaaaccgttcacgcaggaacactacggcgtgggcatcaagaagggcgacacgcagctggccaccaaaatcaacaacgccatcgtggacatgattcaggacggctcgtgggagaacgccatcagcgataacaccaagggcaccaactacacgcccgacgtacgctacaacccgcccaccccggacgaaggagaggaggcctgatgagcggattcctggaactcttcagccagtatgacgtgctcggcgcgtttctggtcaatatcgaactgaccctatggtccgccctgttctccctgatcctcggcgtgatccttgtggtgatgcgcatctcgccgatttcctcgctcagggccgtggccggtgcgtatgtggaactgttcaagaacctgccgctgaccatcatcatggtgttcatggtgctgggtgcctacgcgcagctgaagctcagcttctccgacaccttcaccacgaacttcttctggctcgcggtcaccggcctgagcctgtacacggcggcgttcgtgtgcgaatctctgcgttcgggcatcaacaccgtgccgattggccaggccgaggccgcacgcgcgctgggcttgggcttcatgcagtccgccaccgagatcattctgccgcaggccttccgaggctccgtggcaccgctcggcaacacgctgatcgccctgctcaagaactccaccgtggccgccgccgcatccgtggccaccgaaacatcctcgctgatgagcgagatgatcgaattccgtcccgacgtgatcatccaaatcttcctgatcttcgcgctcggctacgtgatcctgatcatccccatcggcatgctcaccacgtacctgtccaacaaactcgccgtaaggaggtgacggatatggccgatacttcgaattccgtgctgttcgacgcgccaggtcccaagggccggcgcaccattcgcatcgtcaactggatcgcgggcattctgttcgcggtggtgctcgtgtttatcctcatgcgcctgcacaacccgccggacggcgagaaccagctcagctgggagctgtggaagcccgccgtcgaacgagaggcgtggaccgacttctacctgcccggactgtggatgaccatcaaggccaccatcgtggccgtggtgggtgccgtggtgttcggcctggtgttcggcgtgggccgactgctgccgaacccgttggtacgtggcgtctccgccgtgatcgtcgagttctgccgtgcggttcccgtgctgctgctcatgatcttcttctggcgatggttcgcgttcgcgggcctgcccagcccgtcctattgggccgtggtgctggccttggtgctgtacaacggttcggtggtcgccgaactcgtgcgctccggcgtcggcaatctgccgggcggccagcgcgaggcctcgctcgctttgggcctgaccgaaacgcagtcgctgatggagatcgaggtgccgcaggccgtctacgccatgctgccggccgccgtcacccagctggtcgtggtgttgaaggacaccgccctaggctcgatcatcatgtataccgacctgctgcaggaatcgcgccgactcggctcgatgtacttcaacatcctgcagacgctggtcatggccgcggtgatctacttcatcgcctgctggctgttgtcgaggctcgccgaatggctgccctcgcgcatgcagcagcgtacggccgcacccgccgaacccgagcccgtggcgccgatcgccgccggcgacccgtccaatgtcaaccagatcgctgtggccaaggaggtcgaagagctgccgctgggcggtacgccgcgcaaataccatgtgcatcaccgtggcaccaacgcctcgattcgcaactggcggcgcacccgctacgaacagggatatgacgccacccagcccgagtcacaggttgacccggaaaccggcgaattccaggagtctcaaaagcctgaggacaagccagaggcctgacggtcagctcaatcgccgctaagccggcacgaagaatttactgagtgtttgactgggctccggctacgtagccttcacggaggataggttggaacatatgaagatgttccggcacctatcctccgtttttgctattgcgaccattgcgccgctggcgttggcggccacgctagccgtgacgcccgcaatcgcacaggccgaccagctgcccaacccggattgggtggcattgctctccgactacgaaaagaaatattggcaggcccccaccgatgccgaacacggtggcaaggtgctcgacgccgatacaatgaaactcgacgaagatttggccgtggccattaaccacaaagccgccgaaaatctcgataaggatggcctgaacgcccaacgcaagcgtgcgctcgtcgactccgatctgcaagccgaggaagccatgccggacgcgctcggtccggtgcttggcaaatatatgagcgaagggctcaaatccgggaaacttaacgccgtcgccgatatcttctcctttaacgtggcctccacctacgcctcaaaacgtgcggccatgcatccgcgcccctatctgaaccgtgcggaaagcagctacggcggcactaacgatctcgccggactgcccgccacgcttgacatcaagcaatcaccttcatggctcgaacacgtgcccggctactcgaacttgcagaaaaacagttcctacccctccggccacactaccggcgcctattcgtggggtatcgcgctgaccggcatgattcccgaactcgcgccgcaaatcatggcccgcacttcggaggccggcaacaaccgcatcgtgctcggcgtgcattatccgcttgacatcatgggcgggcgcattggcgcatccgcccagaacgggcagtactggcataacgaattcgcttcgtccatcgtgcccgcgtcccggcagctgcgggactatctggtgtcccgctgcgccgcggacggccacggcactaccctcgccgcctgcatcgccaacaccaaggcctccggttcgggcggctacaccaacgattttctggacccggtggccaccgagccggtcgcggaccaggcctcggccgtgcgcgtctacaccgcacgcctgacctacaccttcccgcaagacaccgcccagtccggcgctgatttcgtggcaccgcgcggggcggcggacgtgctgcgactggcctatcccgaactgcacgccgatcagcgcaacgcgattttgaaagccactgccttggattccggataccccctatggcaatcgagcgacggctggcagcgtatcaactgggccaaagccctgtgcgcccgcgtcaccttggataagcacggcgatgtggccaaggtcgagaccgccgaccaggtggcgcttaccggcccgagtgtggtcaatgcccagtacgccgacgcgggcaatcatccggcgtctgatggctcggcgggtgaaaacagtgccattgcggccgggccggatctcgccactctccatgccgcgcaacgaccggcgttgatcagcgtagccatcggtaccgctgtaatcgcgattgtcggcggaatacggacggttcgacgcaaatccaagaactagcttcagcggtaattcagccaaagttcagtttggagatctgccgagtttgccttcatacggtgtcggcttcatttctctctcatactctcggggtgtcatccgccgaagagcatcatgctgcggcggcacaacccgaggaaggaacgggagtaatgttccacaccaacaatttcaccgcgatgtcgcggcgcgccatcgcgctgctcaccgctgcggtgacactgagcagcatcgccctgatcggcgtgcccgctgcggctgcggacgagcagcaggccactgccgaacagaacacggctgccaaaccatccgtaatcatcaacgaggtctatgccggcaatacgaaagctgccggagacccggatagcaagcgttgcgattgggtcgagctcaagaacaccggctccacagacgttgacgtgaagggctggggcatctacgacagcggcaagaaagccaagaagcactacaccatcggcaccagcgaagtaacgaatacggacaccgtcatcaaagccggcggatatctggtggcatacatcgaccccgacaaggccgagcccggcctgggttccgatgccgacgaagcctatctgaccactaccagcggcgactttaccgatagcgatgtggtggattccacgtcatggaataccgatacaaccggcgtgaagaagatgagcgacagtcagtcgtggtcccgtaaggacgatggcactttcgcgctttccgatacgcccacgcccggtgcacagaacgtgttcgatgacccgactccgactccgcccgccggcgagaccatgaccgtggacgcatggtcgggattggccgatgtgaccacagtggatgccgaaggcgaatttggcgccaaaggacaaggcggcgaccacactgacggcaatctgtctggtctggtgtatgaagccggtaaagacggcaagcaaggcgtgctgtgggcggccgacaacgatctgaaccccacgctcggcaacaccgctgataagggccctggctccatcaacaagttcgtctaccagaacggcacatggcagcaggatcccactgatggctggaccttcaccaacaacggtcagaccaagggcggcaagcagctgcacttcaaggacggcaagggcggtgtggactccgaaggcatcacgctgatcaacggagattcatccaagggcatattcatcggcgccgagcgcgacaacgaaaacaagaatgtgccgcggccttccatcctgcagtatgacgtgaccgcgaaaaccaccgacgccaacggcgacggagcgcaagagctgaccgctacgcacgagtggaatctcaccgcagcactcacacaattcggcgtgacgctgggccacggagcggacgccaatcttggggtggaaggcatagcctttattcccgactcggtcctgaccgccaacggattccagtccaaccttgacccgaagaacgtagtgacctacaacccggatggtttcggcaatagtttcggcggtctgttcttcgccgcactggagaaaaccggccatatctacgctttcgcgctgcaaaccgtgaatggcgaggacctggtacatccggtggccgacatcgacctgccgcagtccgcggtgaacgccggctatgatggcccgcgcgatctgacttgggacgccgagcacaaccagttgctcgcccaaagcgacaatgacgcgaacaccggtgccaaaatcggcacctacgaattcaaaaacggtgtgctgcagctgaccaagctgaccgacactccggatgaaatccgtacgcagaacaccgaaggttttgccatcacccctgataccgaagccaccaaggtagtaaatggcaaggtgtacaagccggtgttctgggcagacgacggcgtgaccaatggccattcattgcgtatgggctatatggcaaccaatcagccagttcccgccagcaccaccatcaacctgctgaacttcaacgatttccacggccgtatcgacaagaacctcaccgtgccgttcgccgccaccatcgagcagctcaagggcgaataccctgactcatcactgctgctgtccgccggcgataatatcggtgcttcgctgttcaactcttcggtgcagcaggaccagccgaccatcgatgtgctcaatgctttgggcgtcaaggcttcggcggtgggcaaccacgagttcgaccaaggctatgccgaccttaccgatcgtgtgattggcaaggagggcgcgcgcaacgcccaatgggattacctcggtgccaacgtgtacaagaagggcaccacaaccccggctctgcccgagtacagtattcaggaggtgaacggcgtgaaggtcggcatcatcggtgcggtcactcaggaaaccggcacattggtggctcccggtggtgtcaaggacatcgaattcggcgatccggtggaggccgtgaaccgtgtggccaagcaactcaccgacggcgacgaatccaacggcgaggctgacgtgattgtggccgaataccatgagggtgcagcctccaatgaagatgacgccaccgccaagcccacgcttgacgagcagaaggccgccagccccgtattccagaagattgtggacgataccgatgcggcagtgaacgtgatcttcactgcacatacccacatgaagtattcgtacaccgatcccgcgcacaacaaccgaccgatcatccagaccggtagctatgccgccaacatcggccaagtggtgctcacctacaacacggccaccggtgcggtgtcttacgacaagtccggcaacacggccgtgcaggtggcttcgcagcccgccgacaaaaatgatccgcactacaacgattacgccgaatacaacgatggcctgctcgccgccgcgaacccgactgtcgccaaggtgaaggacatcgtgtaccaggcccttaaggtggccgatgaaaagggcggcgagaaggtcggcaaggtgtctgcggatatcaccaccgcattcaaggacggcaagcgtgacgaccgcgcctccgaatcgaccatgggcaatctggtggccgatgcgctgctcgattcgctcaaaggcgaggaccgcggcgcggccgaaatcggtgtggtcaaccccggcggtctgcgtgccgaattctgcaagtccggcaccaatgacgcctgcacgctcgatgccgacggcaatatcacctacgcccaggccaacgctgtactgccgttcctgaacaacctgtggaccaccacgcttaccggcgcgcagttcaaggaagcgctggaacagcagtggcagacgaacgcggacggcagcacgccatcgcgcgcgtatctgcaactcggactgtcccacaacgtgagctacacgtatgatccggatgccgcgcaaggccatcacatcacctcggtgaccgtcaacggtgagcctctggacctgaaacgcaactaccgtatcggttcgttcagcttcctgttggagggcggcgataacttccgcgccttcgcccaaggcacgaacaccaaggacaccggtctggtggaccgcgatgcttggatcgactatctcaaggacaacaatccggttgccccgcgctacgaccgccgtgcagtggccgtcaccggtatcccgaccggtgcggtcaaggccggtggctcgttcaccctgcacttctcgaagctcacgctcacctcgctgggcgtgcctgacgagacgaagctgaccgccaccatcggcgagcagatggtcggcgaagcacaggttgcgaatggcgataccgccgagctcaaggtcacgattcccgccggaaccaagaccggtgatatcagcctgaccgtgaccggtgcgaccaataagaccacggtcgctctgcccgttgccgttaccggagtgtccaccgggacggacgacaaggataacggcaaccatagcggtagcgtcaatgccaatggcagcaccaagccacagcagaccgaacgtacggccgataccggtgcctcggttgcgttggttgtggttctggcgacgctgttcgctgcgggtggcgtcaccatcgtggtcaagcgtcatgatgcggcgcgcaagtagcgcttgaagccgcgtgcgctggtcggatgcttcagcatgatgccgacgatttgccggtcggtgatgatctctttctcgtagcagatcgtgccgtcttcctgatggctcaggtatgtttcgggccgtttgccgcttctttatgtactgcaaacggacgggggattggccgatagggatgagagagaacggagagagtatgaagtgccaggtttgcggaacggagatgccggagggaagccgattctgcacggaatgcggtgcgccgatggcacagtctgcgccaagcccaagtcctcagtcgatggatggcccaacgctggtaccggctgctccccagcaggtgccagcgggttcgatgccgctgcctccaagtttcaacacggcgaccgcacctacttcgacattgtcgacggcgccaggcaacggtggcgctgcgcagccgcgttccggtgggtctgccggaaagaagatattgctggggatcgtctgatccaggcgtgataagcggcagcaacgttacggatgacgaagccgaaaataatgcaagcaaggcattggattggcaggtcgagcacgacaaggactccgcagagctgttctattccacgtataccgcacagctgtccagcaagcgtaagggtatggaggctgaaggcaagacctggaactaccgcgatattcttgcgcaattcatcacgatgcacaacaagaattcaaacgtactgcttatctggtcgggtgactggcccgcctacagcagcaattccgacaaatactatgtgattcttgccggtgagggcttcgactcgacagatgaggcttggaattggtgcaaagccaacaattacggtccgaacgactgcatgcctatagatttgcagtaacaggcgaaatgtgaatgtcgctacgttgctaggtctcctgagttacaagacgtacaatcgggagcatggccaaggacgacgacagaaccaacgagcctgaagaggccggcaagtggggtacggccggaaaatcctcaggaaagaacaacaagaacggcaagggaaaggaatccaaaaccgatcgacggatcgacaaggtattacagctcgcggtggatcgcatagacaccatcgactccagtgccagcgtgcctgaacgactggcgcgtgcggcgaaatccagtgaactgctcagcgccgtatggtcgttgccgcccgctcaacgtcttatgttccaccacggcatgcaggtcactgatgtcgaaggcgattccactcccggattcgacggcaataaagaggacgccgagaagttcatttcgatcagctcctccgaaatcgcccgataccagcggctcatgtacgcgaatggcgtcaaaggctcggcacggcggctgctcatcgtgctgcaaggcatggatgcctccggcaagggcggcattgtgcgtcatgtgttcagccaaggcgacccgatgggcatccattaccatggcttcggcaagcctacggccgaggagctcgaccacgacttcctctggcgtgtgaagcgtgaattgcccaagccggggtggattgccgtattcgaccgctcccattatgaagatgtggtcatgccgcacgtctatggcacctatcccgaagacgtatggcgtgcccgctacgaccagatcaacgatttcgaacgtgaactggccgccagcggatgcgccatcctcaagatcttcctcgtggtaagccaggaagaacagaaaaaacactttcttgggaggctggatgatcccaccaagttctggaaattcgatatctccgacctcgaggcccgcgaccgatgggatgagtacatgttcgcttggcaggaagtgttcgagaaaaccagcacggccgccgcaccgtggtacctcgttccggccgataaccgctggtattcgcgagccgtggtctccgaactgctgcgcaccaccttgaagaacatgaacatgacctggcctcccctcgaacccgaggtggaccccgacgaggtgcgccgccggttggcgtgagcgatcctcccattggcggagccaagcgcagggcacagctcttcgcatggctccgcccgctggcgggaggcgtcgcatagcgacggagggtggctcgtgccgtcggaataggccactaggtagactgagcattatgactgacgagaaggaatacggatccctggggcggctggcccccgaatgggacggcgacggacgcgaacggaatcttacggccgatgacatctacgaacggttcttcggctgggtggaagacgtcaagggcatcgagccgtggccgcatcaggaagaggccattatggatctcttggccggcgaccatgtgattttgaataccccgaccggttcgggcaaatcgctggtggcgctcggcatgcacttcgccgccctgtgcactggccgccgctcctattacaccgctccgatcaaggcgctggtgtcggagaaattcttcgacttggtcgaagtgttcggccgcgacaatgtcggcatgatcaccggcgacagccacatcaacgcggacgcgccgatcatctgctgcaccgccgaaatcctcgccaatcaggctttgcgcgaaggcacccatgccgatgtgggcctcgtggcgatggacgaattccattattacggtgatccggagcgcggctgggcgtggcaggtgccactgctcacgctgccgcagacccagttcctgctgatgagcgccacactcggcaatgtggacgccatcgccgacaagctctccgatctgaacgacaccccggacgtggatgtaatcgccgacgcgccgcgaccggtgccgttgagctacgaatacacgctcgacccgatggaaaaaaccgtggaactcgccttccgcaacggcgaaaccccgatttacgtggtccacttttcgcaggacgccgcattggagaccgcgcaagcgctcgcctccaccggtgtatccagcaaggaacagcgccaagccatcgcagacgccatcaaaggcgtcaagttcaccacggccttcggcaagattctgcagcgactgctgcgcaccggtgtcggcatccatcatgccggcatgctgcctcgctaccgccgcctggtcgaacagctcgcccagcagggtctgctgccggtgatttgcggcaccgatacattgggcgtcggcatcaatgtgccgattcactccgtggtgctcacggccctgaccaagttcgacggcaccaagatgcgccgcctgcgcgcccgcgaattccaccagattgccggacgagctggccgtatgggattcgataccgagggactggtgatcgccgaggctcccgaatatgaaatcgaaaaccagaaagccatcgccaaggccgggggagatccgaagaaactcaagaaggtcaagcgcaagaaggcgccggaaggttttgtgacctggaaccagagcacgtttgataagctcatcgacgctgaaccggagaccctggtcccgcacctgaaaatcacgcattcgatggtgctcaatgaagtggcgcagggcggtgacgcccgtgcccgtatcgacgatctcatcgacgattccgcgcagacccccgaccagaaggagcatctgcaccagcgggccgacgagatcttccaaaccctgttcgataccgaagtcatcgaaaccgaggaccgcaaggacggcggcaaggactactacatgacccttgatatgccggacgacttcgccctcgaccagccgctctccccgttcctgctggccgcgctcgaactgctcgaccccgagtccgacacctatgcgctggacgtgatctccatggccgaggccacgctcgaagaccccaagcaggtgctgcgtgcccaggagcgtcaggcccgagacaaggcgatggccgatatgaaggccgacggactcgactatgacgagcgtatggataagctgcaggagattacgtatccgaagccactggaagacatgctcgaagccgcgttcgatcagtaccgccacgatgtgccgtgggccaacgactactggctatcgccgaaatccgtggtgcgcgacatggtggaaaccgcctccgacttcaccggatacatcacccgatacaacatcgcccgctccgaaggcaccctgttgcgctacctctcggacgcctaccgcacgctggcgcgcaccgtgccgcccgaaaagcgtgacgagcaactcgaagacatcatctcctggctgcgcgtgctcgtgcgctccatcgactcctcgctggtggatgaatgggagaacgccggtgactcggctgaccaatccgaggctgcggcatccctggccgcgcccggcgcaaaaagcgcggtggtcgaggaccgtcgtggtcttaccgtgctggtgcgcaatgccttgttccgccgtgtgcagcttatggaccttgaccagccggacaagctcggcgcgctcgacaaggactggggctacggcgtgcacgaatgggaagatgtgctcgacgactactacgacgagcacgagtacgtgggcatcggcgccgaagcgcgctcgcccgaactgttcatgttggatgacaagcacgagaacgacgagcatacgtggaaggtgcgtcagattatcgatgattccgatggcgaccacgactgggccatcgaaggcatcgtggaccttgacgccacccaagacaccggcgaagtagtcttccacgactacaaggtgagtaactgattcctggctcccctctctgagggaagccaaggtgcagctcgaacgtctgttcgaacactggggtactataggacgttatgagtgagaacgatttgtttggggcggctgatgcgccggagtcgatgacacggccgttggcggtgcgcatgcgtccacgcactttggacgaggtgattggccaaacgcaggtgttgggccagggctcgccgctgcgccgcctcgccaatccggccagcaaaggcagtctcaccgcgccgagctccgtaatcctgttcggccctccaggcgtcggcaagaccacgctcgccaccatcgtggccggccaatccggccgcgtgtttgaggaactctccgccgtgacctccggcgtcaaagacgtgcgcgacgtactcacccgcgctcacgaacggctcgtgtcacgcggccgggaaaccgtactgttcatcgacgaggtgcatcgcttctccaaatcccagcaggatgcgctgcttcccgccgtcgaaaaccgcgacgtgacctttatcggcgccaccaccgagaacccgagcttttccatcatcaaaccgttgctctcccgttcggtggtcgtcaagcttgagtcattggagcctgatcagctcaccgaactggtgcagcgcgcgctgactgatgaccgcggtctcagggacgaggtcaaagccacggacgaagccatcgccgatatcgtgcgcatggccggtggcgacgcacgcaagagtctcacgattctggaggccgcggctggcgcggtcaccggcgacgaagcccgcaaaaagggcgcacgccgacccatcatcacctccgaaatcgtggctacggtaatggacaccgccaccgtgcgctacgacaaagacggcgatgaccattacgacgtgatttccgcattcatcaaatccatgcggggctccgatccggatgccgccatccattatctggcgcgcatgctgaaagcgggtgaagatccgcgcttcatcgcccgtcgcatcatgattgccgccagcgaggaagtcggcatggccgccccgcagattttgcaggtcaccgtggccgcggcgcaggccgtggcgttggtcggcatgcccgaggcacgtattattttggccgaagccacgattgccgtggccaccgcgcccaaatcaaatgccagctataacgccattaaccaggcactcgcggacgtggataccggcaagatcggcgctgttccgctgtatttgaggaacgcccccaccaagcttatgaaagagtggggcaaccacgagggctacaagtatgcgcacgattggcccggtgccgtggcgccacaggaatatatgcccgaagagctgcgtggcaccgagtactaccatcccaacgatcgcggctatgaacacgaagtcagccagcgtcttgccaagattcgcccgatactgcacggtgacgaatccgggcgggaggcgtcgcgggccgcggactgacggtcttaggcgcgccggcgtgaggcgcgaatgcggaacgcggtggccagacagcaccagccaatcaggcagataaccgtcatcgtggcaaacgtccatgtgccgccgacggcagtggcgtgagcaaactcagcggtgccttcttctcctgcgccggcctgagccacggaaagaatcgtggagaacagtgcggtaccggcagcgccgccaaactgaagacacgtgttgaaaatggcgttgccgtccggcttgaactcgggagagacctccgacaggccactggtcatcacattcgcattgccgatggaatagaacagaccgaaaatgaaatagaatccggcgagcagcacgggcgtaagctgcatcgagaacaccagcataagcactgggcccaaaatagcgatgccgatcggaatcagaatcggcttgaccgcgccgaacttatcgtagaaccagccgccaagcggggcacagacagcgccgaccagtgctccgggcagcaccagagagccggccacaaatgccgtggtgccgagcgagagctgtgccacattggtgatgacatagccgtagccgatggcgaccaatggcagcagcagatatgcgcaggcgtgtaacagtacggcgggatccttgagaatgccaaggcgcagcagcggggagaaggcacgcttggaactcatggcgaacacgatcaacaaggcgaggcccacaatcagactgacaatggcgataatgccggagcgtgtggctgacttgccggacaccgccgcactgatggccacgccaccttggttgagcgccagcaccagaccgaccaacgcgacaacaatggacccaagctgaatcgggtcaagataggcagcctcggtcggtgtcttctgctcaatgcacttcatgccgatgcatgctgcgattagcaccagcggaatggcgatgacgaaaatcgcgcgccacggcagcactgtggtcaccgcgccgccgacggtcgggccgatggccggagccacggtaatgaccagcgatcctacgcccatcaatcggccgatcttcgaacgaggagactgctccagaatgatgttgatcatcaacggcgtggccacgcctgagccaatgccctgaataatgcgggcgacaatcagcagcgggaaggcttgggcgacgatcatgatcagcgagccaacgatggccagaatcacagccgcaagaaaaatggttttcagtgcgaatcggcgcttcaaaaacgagctgatgggcatggtagcggccaccgccaacagataaatcgtggtaatccattgcacagtggccgtgtcgacatggaattcgcgcatcagtgcggggaaaagcacggtcatcacggtttcggtcagaatgccaatgaaggcaagtgagccgacagccacaatcgcgccgataagacgtgtgggaatcttctcgttatcaatatgctgctcaggcatacatgctcctaaacgttcggttgcaatgtatggaatgtaaggtttaccaaccggcgtaggtacctgtgcgtgcggataaaccggcaatcgtactgccttggctgcacgctatggaatcacaaaaccacctgtgagtgtacggttcggggcggacgctacggtcgatgcgcaatgggctgtcccttggtttggtggggtttgatggggcgggttc

SEQ ID NO: 1463 - DNA, 14417 bp, Unknown
  R257_15m  MAG No. k141_25383
ctccggcgccaacgaggccgacaccatcgagaagatcgacatcggcggcccctccatggtgcgtggcgcggccaagaaccacgccaccgtggccatcgtcaccgatccggccgattacgccttggtcgccgagcgtgtggccgacggcaccggcttctccctcgacgagcgcaagtggcttgccgccaaggcattcgcccacaccgccgcctatgacgccaccatcaacgaatggaccgccaagcactggcccaagccggcttcgctggacaccgccgaagtggacaaggacgatcagggcaccgaagtcgattccgccaagttcccggcacgattcacccgtacctgggaccgcgcccacacccttcgctacggcgagaactcccaccagcaggccgccctctacattgacccgctcaaccagaccggtttcgcccacgccgagcagctcggcggcaagccgatgagctacaacaactacgtggacgcggacgccgcctggcgcaccgtatgggatatggctcccgccattgccgtggccgtagtcaagcacaacaatccgtgcggtctggccatcggcgcgaccgcggccgaggcccacaagaaggctcacgcctgcgacccgatgagcgcctacggcggtgtgatcgcctgcaactccaaggtcactcttgagatggccgaaagcgtgcgcccgattttcaccgaagtcatcgtcgcccccgactatgagccggccgcgctcgaactgctgcagaccaagaagaagaacctgcgcatcctcaaggtggccgagccgccgaagggccacgaggccatccgccagatcgatggcggcctgcttgtgcaggacaccgatctgatcaacgccgtcggcgacgatccggacgcctggaagctcgtggccggcgatgccgccgacgccgacacgctgaaggacctcgtgttcgcatggcgtgcaatccgctgcgtgaagtccaacgccatcctgctggcccacgaccaggccacggtcggcatcggcatgggccaagtcaaccgcgtggactcctgccatttggccgtcgagcgcgccaacacgctggccgatggtgccgatcgcgccaccggtgcggtcgcggcatccgatgcgttcttcccgttcgccgatggtgcccaggtgcttatcgacgcgggcgtcaaggccatcgtgcagcccggcggatccatccgcgatgaggaggtcatcgaagcggccaagaaggccggcgtgaccatgtacctcaccggcacccgccacttcttccactgatcgggactctctgaggggagcagctcagccaaaacgcacaaaggtgggattccgcctgacccgtcaacgggtccaagcggaatcccacctttgctattcgcctgctattgtggtcacgtaaccgttcgacagaaggaatcgcaacatgcacaaccatccctatgtatccgaagcgcatgagggcaagccatggtttgaatggtgcgtactcggcgtcgtcgccgtcatcacactgctggttgctttcggatatacgatggccgccacggtcatacttgccgtgacggccatcatcaccgggcttgttcgcctgattcttcaggacaaaagcccatggaaagtgcgctcagtggcgttcgactccttcatcggcatcgccttgggaatcggcctgctgattacctacttcagcttctttggactcttcggcaacatctttttccgctgaatcgccatcagacgaggcggcctgatcgaagaattcgccatcgtcgagcgtgtccgcgttcgcatcggcatccgtctgtggaagatcggcggcagccggcaatttgggagtggtcatcatctgcgcgatgatcatgaccaacgccaccacagcggcggccaagaccgggctaatccagaacacccacagctgttgcagcggattttgcgtaagaccctcattcatcgcggccagtgcgataccggtggaacgggcgggattgagaccggcaccggtaaccgggtagctgatggcggcggccagaccataggcaagacccatggcaatgacatgacggtccgaggactcgccgtgatcacccagagaagacatggcggtggcaacgacaatcagagaggcaacgacctcgacgacaatcgccagcgtaatcgagaacgtaatgccatactgggtcagcagcgagtaagacacggagccgttctcgaaaccgttaacggccggagtcagccacactttggcagctacctgctcggatgtgggcagcagcttgaccacggcgaagccggcggcgatggcaccgatgacctgagcgatcacatagaggatgccatccaggattttcgtcttggaaaccagcacggaggctacggtgatggccggattcagctggccaccggacacgcgggagaagatggcggtgactgcggcatatgccaagccggtagccaacgcgaagaacacgatattgatgccatacacggccgaaccccatgtggagaaggcgtaaatggcaaagcacagcaggaagctgccggccaattcggcgcacacgcgcagggccagcggctgttgcttggtttcttccatgattgttcattccttttcatctgttggaagacgggcgaacccgcacaaacggttgccagtctagcagcagtcctacgttgcggtatgatatataggttggaattggctgggattccagtccgccaactctgaagtatgtatacaaatcgacagtctctgcgatgacagagtctgtccggccacgttgggagaacgatgccaaacgcatattcccgcgctgcgaaagcgcaagacgattccaattccattcgactccagaagctgcttgcccaagcgggattcggttcccgccgcaagtgcgaggacatgattaccgaaggccgtgtcgaggtcgacggtgaactggtcaccgagctcggaactcgcgtcgacccccataagcagcaggtgcgcgtagacggttcgcgcgtacgcgtcaatccgaaccacgtcactctggcactgaacaagccccgcaaggtgctctccgccatggacgacccgaagggccgctacacgttgcgcgacatcgtgggcgacaagtacgagcgcatcttccacatgggccgtctcgactacgattccgagggtcttatcctcatgacgaacgacggcgaactctcgcagcacgtcatgcaccccaagtacgaggtcgaaaagacctacgtcgccacactggaaggcaagatctccggcaccgtatgccgtcgactcgtgaccaccggcgtacagctcgacgacggctggatcaagctcgaccactgcgcgatcatcgactcctcacgcgaccacacgatggtcaaggtcgtgctgcactccggcaagaaccgcatcgtgcgccgtatcttcggctcaatcggcttcccggtcaagcgcttggtgcgcacccagatcggcccgatcaaactcggtgatttgaagcccggttcctaccgcgtgctgtcccagacggaagtccgttcgctgtccaaggaggttggcctgtgattcgcgttgccatcgacggccccgccggcgtgggcaagtcgtccacgtccaaggcgctggccaagtatttcggatacgcctaccttgacacgggcgcgatgtatcgtgcctgcgcttggtggtgcctgaagcagggcatcgatctggacgccgaaaccgtggatgagcgtgtcatcaccgaagcggtgggcgagttcttcaccggcgaccatttcgatatctccgtggacccggacaacccctgcgtattcgccgacgacgaggacatctccgaggccattcgttcctccgaagtctccagccatgtctccaaggtgtcgaacgtcatcccggtgcgcaacgtgctcatcgccgcccagcgcgcctacatcgcccgcgaggcgtcggccgactccttctccggggggttgggcatcgtggccgagggccgcgatatcaccaccgtggtgtccccggacgccgaggtgcgcgtgctgctgaccgcccgtgaggaggtccgtcaggcccgtcgcaccggccaggctgtcaagggcgtgggcgctgaggatgtggccgcgcgcgacaaggccgattccaaggtcaccagcttcctgaccgccgccgatggcgttaccaccatcgacaattccgatctggacttcgtccacacgctcgatctgctcatcggtgtggtcgaggacgccatcgagaaccaagaatacgagcagtatgccgccaatctcgaaggctatgagctggacgaaggcgatgaggatctgatttccggccgtggtttcacggaaggcgcgcgcaaggccggtcccaagccggtgggcgtgctggctgttgtaggccgtccgaacgtgggcaaatcatccctggtcaaccgtatcctcggccgccgtgccgccgttgtggaagacacgccgggcgttacacgagaccgtgtgagctatgacgcggaatgggccggcaccgacttcaagctggtggacacaggaggctgggaagccgacgtggaaggcattgaatccgccatcgcctcacaggcacagattgccgtgaccttggccgatgccgtggtattcgtggtcgatgggcaagtgggcatgaccaccaccgatgagcgcatcgtcaagatgctgcgtgccgccggcaagcctgtcgtgctggccgtcaacaagatcgacgaccaggccagcgaataccttgccgccgaattctggaaactcggcctcggcgaaccatactcgatttccgccatgcacggcaggggagtgggcgacctgctggacgtcgcgctcgacaagctcaagcaggccgagaagacttccggctacctcacgccttccggcctgcgccgcgtggctctggtgggccgcccgaacgtgggcaagtcgtctctgctcaatcagctggcgcgcgaagaacgtgccgtcgtcaacgatttggccggcaccacgcgcgaccccgtcgacgaaatcgtcaacatcgatggcgaggactggctgttcatcgacaccgccggcatcaagcgacgccagcacaagctcacaggcgcggaatattattcctctctgcgcacgcaggccgccatcgagcgctgtgaattggcgctgattctgtttgatgcctcgcagccggtatccgatcaggatttgaaggtcatgtccaccgccgtggatgcgggccgtgcaatcgtgctcgtattcaacaagtgggatgcgatggacgagttcgacaagcagcgtctcgaacgcctgtggaacaccgaatacgaccgtgtgatgtgggccgagcgtgtgaacctgtccgccaagaccggctggcacaccaaccgtctgacgcgagccatggataaggccttggaatcctgggatcagcgtattcctacaggcaagctcaacgccttcctcggcaagatccaggccgcccacccgcacccgttgcgtggtggcaagcagccgcgaatcctcttcgccacgcaggcgtccacgcgcccgccgcgtttcgtgatcttcgccaccggcttcctcgagcacggctaccgccgctacatcgaacgctccctgcgcgaggaattcggcttcgaaggcacgccgattcagatctccgtgaacatccgcgagaagaagaagcggaagtgacacgcgcgtaatttgccagatttcatatatctggtagattatctactcggtgcttttgcaccatcgggccgtagcgcagtttggtagcgcacttgactgggggtcaaggggtcgcgggttcaaatcccgccggcccgaccgattagccccggaattccgccacttctgagtggttgctttccggggcttttccgttttcagacaacatgagacaacatgacgacggacttacctttgtaagccattcgtaatggattaaacacggacttcatcttggcgtgttattggaattatcaccgacaattcaccgcctccgccccccgtcgtatgtgtttgccccaaacaggggctagactggttcctattgatttgatgaaagggacccgaattgaccgaaataaacgataaggcccaactggatatcgccgccgctgacgacaccgacgccgtcacctcggatatccccgaagaaaccgtaaacacccccgaagtggatgagactttcgagctttcggccgccaagatgcgcgagcacggcatgagcgaaaccgccatcaaccagttccgccatttgtatgacgtatggcgccatgaagaagcctccagctggattcgtgaggacgacatcgagccgcttggccacgtgcccagcttccacgacgtctatgagaccatcaaccacgacaaggccgtggacgccttcgccaagaccgcattcctcaagctcaatggcggtctgggcacctccatgggattggacaaggccaagtcgctgttgccggtgcgtaggcacaaggccaagcagatgcgcttcatcgacatcatcatcggtcaggtgcttaccgctcgcacccgcctggacgtcgaactgccgctgacgttcatgaattctttccgcacttcggcggacacgatgaaggcgctcaagcatcatcgcaagttcagccagcatgacgtgccgatggaaatcatccagcatcaggaacccaaactcgtggccgccaccggcgaaccggtgagctaccccatgaacccggagctggaatggtgcccgcccggccacggcgacctgttctccaccatctgggagtccggcctgcttgacgtattggaggagcgcggcttcaagtacctgttcatctccaattccgacaatctcggtgcacgcccctcgcgtacgttggcccagcacttcgaaaacacaggtgccccgttcatggccgaagtggctatccgcaccaaggccgatcgcaagggaggccatatcgtgcgagacaaggccactggtcgcctgatactgcgtgaaatgagccaggtccatccggatgataaggaagcggcccaagacatcgccaagcatccttacttcaacaccaactcgatctggattcgcatcgacgctttgaaagacaagctcgccgaatgcgatggtgtgttgccgttgccggtgattcgtaacaaaaagaccgtgaatcccacggacccgaactccgaacaggtgattcagctggaaaccgccatgggtgccgcaatcggtctgttcaacggttctatctgcgtccaagtggatcgtatgcgcttccttccggtgaaaaccaccaatgatttgttcattatgcgttccgatcgcttccacctgacggacacgtatgagatggaagacggcaattacatcttcccgaacgtcgaacttgatccgcgatactacaagaacatccgcgatttcgacgaacggttcccctacgccgtgccatctttggccgcagccaactcggtttccattcagggcgactggacattcggacgtgacgtcatgatgttcgccgacgccaaacttgaagataagggtgagccgagctacgtgccgaacggcgaatacgttggcccgcaaggcatcgaaccggacgattgggtgtgatttacaacacggtcgaacgataaaaaagatattatttttgtgaaatggcgctcaactgtggaaaaagcctctaagatagagtgagtgtggggaaactcatacgcacttataacgaaacaataactatacgtgaggactaatggcagagggcacaagcggacgtcggcgtttttccgacaaatggggcaagcacgagctggacgtactggctgtgttgtcatccgcgttcccgcaatggctcacatcccgccaaattgcgcagcgcgtcaaggcttacgccgactcgtatggagagctggcagatcaggccgccaaggccgcgttcgccaagcagttccagcgtgatcgcgccaagctcgctgcgatgggcattgccatcgaatcacggcagcctgagtactcgtccaagtcggaaggccaggacttcgcgtcctatcgtctgcagttgggcgacgaaccgcgcatccgcctgatgttcgagccggaagatatgccggtgcttgccgccgccaactatctggctcgttcgatgtcgatttcttccgagccggatcagtcccagctcacccagcatgtgtcgcgcactacgccgcgtgtgccgcagaccccgattcccgggcttggcttggattcgattgcgcctggcttggggacgcagcccattccggattcactggtcaaggttattgattcgcgtcgtttcgccgccaccgttgacgtggatggcgaacacctgaacgtggcatacaccgattccgacgatttggccatgtttgtgcttgagcatccgggggccacgattgtcagcccgcaagaggctgtggacgcttatcatcgccgtttgcacgccgccagccggttcactctggccgacgaatccgccagtcctgtgagcgcttcggtggtttccccgtcgattagtcgcgatgtgcgagagccgggtgatcccgagtctatcaaggctcagaacaagaagaacggctccgctttccaaacgggcagtgaggttgatcgtcgcctgcgtctgatgctgttcctctccgctcatctgggtgaggaattctcgatgagcgagctgggcgaacgctttatcggcaagccaaagaacgatgatgaactcaagaaattcgtcaacatcatccataaggacatcaacaccctgaccaccgtttccgacgatggtgagatggccggcagccagttcttcgatattgactggccgctgctggatgccgagggtattgtttccgccaccaattcgctgggccttgaacgtcttgccggcatttcgccgcaatacctcagcatgctcaccgcctcggtcagctacctggcgcattcgccgttgctgccggacaagcagcgtgggcaggccgaatccctgtatgagcgtttgcgccgtcatgtcagtcccggtcagaccccgtggctgagcctgaccggctatgagctggagccccgaagcttctccatcgtcaagcgtgcgatcaacaccgattcgctgttggacatggagtacaccgacggtacaggtcgtacccgccgcaagctggtggcccccgccaagatcttcattgacgaaggcgtgtattatgccgccgtctacacggacgttggttccgccgcacccaaggacaaaaaggcctacgtctccaaagacaagaccctcgacaaggccaacggcaagccgcgcatctggcaggtactgcgattggcccgtatcgaaaaggcggaactggtcaagcccaccaagcagatcaacatcccgaacatgccggtgagcgaactgcgcaagtggagtttcgacaacggtaccgacgcggtgttcatcaccgatcagcgcgatctggcattcatcaagacattgccgggcgctaccgtcgaacaatgcggtgccggtgaaaaggtgcatctgaccgtttcctccgattcctggttcgtggccttctgcatcgcccacgcgcgtcatatcacggcggtcgccccggaaacgttgcgcaccatgatcgtggcacgcgccgaacgcgaactgagcatcagcgagaacaagtaaggagcctttcatgccttggtggatatggctgattctggccctgttcatgctggccatgattgttgccggactcatctatgcagcccttcatggactccgtgccttgaaggacatgtccgacatcggcggccaactcggtgaacgcgtggccgcgatgggggagcccggcacctctgccgacaccagcgagccgcctctgttcactcagccgctcagcgtggcacagaatcgttatgccgaggcccatgcgaacgtgattcgcagcaaggccgccaagcgcgaacgccacacccaggcgtgggcccgctggaagcgattcaacaactaacggaaagcagcaatggcacgtcaccaacaccataagggcaatgccgattcccagacgctgagcccttcgcagcggtacgcatcattccaaaaggtccaacgccatcgggcgtccgcagcagcgcgattcgccgaatccctgcctttcgaactggacgacttccagaccgaagccaatgacgcgctcgaagccggcagcaacgtactggtcgcggccccaaccggtgccggcaaaaccgtagtggcggattttgccatttacctcgcccaggaacgcaacgtcaaagccttctacaccacaccgatcaaggcgttgagcaatcagaaataccatgatctggtcgacgtgtacggcccggacaaggtaggcctgctcaccggcgacacctcgatcaattccgaggcggacatcgtggtcatgaccaccgaagtgctgcgcaacatgctctacgagcgttccaccacgctgaacgcactgcgctacgtgattctcgacgaagtgcactatctggccgaccgattccgcgggcccgtgtgggaggaagtcatcatccacctgcccaagacggtcaagattgtcggcctgtccgccaccgtgtccaacgtggaggatttctccaactggattgcctcggtgcgaggcgacacaaaactggtgatcagcgaacaccgccccgtgcctttggaacagcacgtcatcgtgcaggcggacgaacacaccgagcccgaggtgctggacctctatcgccgcgacggcaacggcgagcagaccaccaaactcaacgccgaactcatcaaccggctcgaccagttggaccgcaaggccgcacgccggcgcggcgaggaacgccccgataagcgcaagggcttcggcagaggccgcggcggcaaaggcgccaaagaccgtgccccgaaagcggaacgccacaccccgcgccgctgggccgtggtggacgagcttaacttcctgggaatgttgcccggcatctacttcatcttctcgcgcaacggctgtgaccaggccgtggaacagtgcatcaacgctggactggagctcaccaccgatgaggaagtgaccaggattcgccgcatcgtggatgagatggtggaggggcaactcactcaggaagacctgaaagccctgcagttctccaagttccgctttgcattggaagaaggcttcgcttcgcatcatgccggcatgattgccctgttccgtcagatagtcgaacgattgttcgaagaaggtctggtcaaaatggtgttcgccacggaaacactggcattgggcatcaatatgccggcccgttgcgtggtggtagagaaactcgaaaagttcgacggtacaggtcatgtgggcctgacgcccggcgaattcacgcagctcaccggtcgtgccggtcggcgcggcatcgacaccatcggccacgccatcgtggtcgaccatcacggttttgtgcccgccacggccgcctcgctgtcatccaagcgtgtctacccgctgcactcgagcttccgacccacgttcaacatggccgtgaacctgctcaactccagcgactacgagaccgcgcgcgtcaccctggaccagtcgtttgcccagtgggaggccaacgaatcggcctggcagctggaatcgcagattaacacactgaagaacgcgctggccggatacgaacaggcgttcgcatgcgaacacggcgacttcaaacagttcatgaccctgcgtatggagctgagcgacatcgaaaaggaaggccgccgcaaactgaagcacgaagtgttcctgaccgatcaggagcgttcacgcgctttccagaacctcgaccagcgcattcgcgatttgcgcaaggcggaacacgagcatccatgccgcaactgcccggacctccagcaacacctcaaatggggccaccgctgggcccgcgagactcgagaactgcagcgcgtcaccgatcgctacgactcccgcaccgggtccgtggcacgccagttcgattgcatctgcgatgttctcaccgggcttggttacctcgaacgtcatgtcaatgcggccggccacattgacatgacgttgactgaaaaaggtctgctgctgcgccgcatctacagtgaacatgacctggaactgtgcgaggcgctgctcgccggcacgttcgacaagctcgacgccaacggactggccgctgtgctctcttcactggtatacgaggccagacgcgggggagacggcgaaccgaggcactacccgggcggcatctccgggcccatcgccatcgcttcgtccaagctcaagggcatttgtgaagacatcgatatcctgtgcgaggatcacggtctggacgagatgcagcggccggatttcggcattctcgacatcatgtatgaatgggcggatggcggttcgctgggatcgtgcctgtacggcaccgacatgaccggcggcgacttcgtgcgcactgccaaacgactggctgacgtgctgcagcagattgctgtcgcccagccgctgccgttcgacgggggagagcggctggcaggcctcgcccacgaagcggccgaccgggtcaatcgtggcgtggtggcctactccggcgtggactgacggggctgtttgacgggagtttgtcagccgacgtcggaagcttggaatagcggccaagtccgaactgttgcgtaaattagtagggttaaagatctttcaaggaggatgccgatatggcagaacgtagcctcaggggcatgagcatcggagcgaaatcgctggagtccgacgacaacgtcgatttcgccgcgcgaaacgatgtggcgtatgtatgcccgaagggccaccgcaccatcctgccgtttgccgagggtgccgaaatcccggacgagtgggagtgccgttgtggttccgtggcccaccgtgagggcgacgccgaccgtgagggcgacgaaatcagcaaacccacccgcacccactgggacatgctgctggaacgccgtagcgaagaggaactggccaccctgctcgaaaagcgcctgcaaatgcaccgtgacggttggattcccgactacgagtgatctcctactgaacaacacgtgaacttgatgcccagtcatcccgactgggcataatcattgttggaacaagtcgcattgtttgacgaccattcaaagcagtcgacatgaacaagggggagtggaatctcaatggcacagcatccgatgaaagtggtcctgttggatctcgacggcacgcttaccaagtccgacggcggcattatcggctccgtcatcaagaccttcgaagagatcggtcgaccggttccggacgccgccgaactgcgacgcttcatcggaccggcgattattgaatctctgcgtcgcaatcatgtgcctgcggaagatctggatcgggccgtggacatctaccgcagctactacggagaccgtgccgtgttcgacgatccgaacgagcccggcaacaaggtgcccggacgactggtgaacgtcgtattcccaggcatccgtgaacagctgctcaaactgcatgccgacggttactacctggcactggccagctgcaagcccgaataccagtgcatgcctatctgcgaccatttccacctgaccgaactgttggacggcatctatggtgcttccaaagacaattcccgtctggacaaagatcaggtgattcggtactgcttcgacaaaatcggttttgatgctgcagcgggggacagggccgtgatgatcggcgaccgctacaccgacattgacggcgcccacgcctgcaatttggacgccatcggctgccgctggggctacgctccggccggtgagatggaggaacacggcgcgtacgagatcctcgagaagcccgagcagatcgaagaagccgtaaaccgttatttccaaacgcactgaaacacaacggcgaggacttcttcatgatgggatgcgatggagcctgcgccgcgggcttcgacctggttttcatcggtttgccattgctgtcgctgtatgagattcccatgctgatatggttcatttggcgagcattccactggaaacgaaatgacaaggattggctgaaaggcacggcgattcttgcaattgcggtggtcgctccggtgctcctttggctgtcggccttttggctgtcggcctggtatgcgtggactagttgatacaggcgactgaatcttcgtcaaggataactaatctgacataacgtacattatcggctaactattcgggaatcttagtaacggcttaatttcaacggtctgcatttcgcacaggtaactgtgaatgcctctgggtggcccgttgtggctacgcatttggctacgcatttcacacgacgggagaccaacgatggcaatgggtggcggcggctcgacatacagaagcgccgatggaatctggca

SEQ ID NO: 1464 - DNA, 5583 bp, Unknown
  R257_15m  MAG No. k141_25850
gggttggatcaacgagatggtgacgctgtgcgagctttgcgacctgttcgtcgcttaacggtttgaccgcggaacgcggcgagggttttcctttggatgccatgcgttccattctgccaccacccattccgcttggttggaacgattgcactcatgcacgacgcacacacgaaatacaaaaaacgcggaatatacgaaacaggcggaactggtgtccgcttcaccttccatctgttccgccgttttctgtctttatgagcttggacgacactgcttcatttgcgtcgccacccttcagcccaccccctaactgcctatgtctgtgaggggaggatgggttctagtgatcattgcaacacttggtcgatttccgggagaatcaagtgggcgacgagacggaaacagtacgtggcatcgttgaacgcgagactgaacttcacacaggccgcccgcgccgtggacgtgtccaaacgcaccggcaaggtatggcgcaacgagcacacgcgcaccactgggcgcaatgaaaagccgagcgtggactggtaccgttcacccgtgaacaaacccaccaaactacataacgctacctcgaccaggccaaacgcattctgatcgccgacaggctcaaggccggtgactcgacacgagccatcgcactcctactggaccgggagccgcccacggtcagccgtaaaatacgcgccaaccataaccgcgtcaccggcgaatacgagccccactgtgctcaacaaacgtcagcggaccgattcaaacgacccaagacacgcaaggcatgaccaggcacgcgactatgagacgagattaaagccggcgtcaaacaacattggagacctgaatagatcagccaccgactgaacatggacttccccgataatgaagacatgcacgcatgcacggaaaccatctaccaaacgatctacatccaaggcaagggcgaactgggccgcgaactgaacaacgcgctgcgatccggccacgcaaaaccctcggatacatgaaacccagcgggaaaatcctcgaactcatcaacacaccaaccaagcggcacacaacagatgttgcaaccacccctagaatccgcccgtcatatcagacgaaagccgcatgattacgggagtcctggatcgttaacggcacgcgctatcatgaatccggagggcccggcaggcaatcaacggtccaaccatccccatgcgccgcgttcgtcgcatctacgcacacttcgacccacaaacccctcgcatccgagaccgggaggcggaaatgcacctcactgaagcaaacatgatctcatgccgctcagagtatttcctctactccgccacaccgaagatgcgcaactgcatgtactatccccatcgcgtcgggcttggcgattttatgcccgggtacagattgagtcggaccccgatgaacaacttcctcatcgcctacatcagcgaaggatcattccgcatccgtttcgcggacgtcgacgccattgcgcatgaaggccaattccttatcgtcgactgctatgagccacatcgcttctccactgatgaatcctgccgggatatctggctccactatgacgggccggcggcgagaaacatgtacgaatacatcgtggaacgctccggcaacatcatcgacgctgggagaagcggacatggtctccacgagatgcacgccattttcgacatgctcaaagcgggaagaggggcaagggaggccgaactatcgcatcacatcgatggcgtgttggcttcgcttgcgtccgcaggcaagtcgagcggcccgcacggcgacgccctgaacgtcatcgaccggtcgctgccgtatatcacggcacacctgaatgacgacctctcattggattccctcgcgacggtgttctgtatcgacaaatactatttctccaaacgcttcaaggaacgcaccgggaccacgccacatcagtacatactcaatgcgaggctcgaacgaggcaagttcctgctgcacaccacaacgctgccggtgggcgccatcagcgccgactgcggcttccacagccaaagcatgttctgcgccgccttcaaacgcgcaaacggcaaatccccatcgcaatatcgtgcagaactatcccagccgttccaatcctgaaacccagcaaagccaagatttcataaatattgaaaccgggaagccacgaaaacaacaagcgcgagagcataccatatcgtcagcggccaccatggaccgcaagacaaaagcccgacgtcggcgtcggggaaactggaacagggagaatgatctcatgacctccacatacgaaaccaaaatcaacgacatccacatgccctcctccatggcgcacgtcgtatgtctcggagacagcattacccacggggacaccggactggggtaccacgtgtcgcacccatggccggaaacggtgggggccatgctgaacattgacgttcaagggtttggccatgatggtgcaagcaccgtggactaccgcacatacccggagtgggaaatggcgaagctgcatcttcccgacgcggatttgatcgtggtggggcttggcaccaacgacgtcgacttggagaatgcacgcacggaggaaacggtgaaacctgtggtctctcgtttcgaggacctcatggacgaagcactcggcctatccgagcagcatccggcagtagcggtgctttccgtgctgcaattcgcagttgaggaaccaattttccgcgaacgcttcacattggaagacattgtggagatcaatcacggcatcgatctactcaatgaagcataccgccgcatgtgccgggtgaacggctggcatttcatcgattatgctcgcaatatcaatcagaggcgcgaactttttggcaattccatccaccccaaccagcagggctacaaccgcatggccgcattgctggccccccgcttcgccgcactgcttggcgcataacgccaatccgattccacctcatccgatcctccgcacctgcaatctgcaacgtcgcaccgcgggtgcaccggttgaatactcctcaccttacgaagggagatctatgtctcattcagcatcctcaacggacatgaagccaaagcacatacttggacagcggatggcctacaccttcagtggttttggccaagctgtcttctacaacatgatgagcacctatttcgtggtatacgtcacttccgcccttttcgccggagtggataaagacatcgcgaccaagctcgttggcattatcaccggagccattgtgatcatccgcatcggagagatcttcatcgacccactgctcggcaaccttatcgataacaccaacacccgaatcggcaggtttcgcccttggcaatttatcggaggccttgtcagcgcgatccttctgttcatggtgttcaccggattgttcggtttcgtcaacgtgaatcagacatggtttatcgttctgttcattgcggtgttcatcatcctcgacgtgttctattccctgcgtgacatctcgttctggggcatgattcccgcactgtccgaagattcacaggagagggcgctgtacacttccctcggctcgttcggagcctccctcggctttaacgggctgacggtcatcgtggtacccgtggtcacctatttcagcatgcagttcaccggcagaaacgaacagaaccagagcggttggaccgcccttgcgctcatcgtcgccatgctcgccatcatttcggccatgtccggcgcgttcggtacccgggaacgccagagtgcgctgcgcgccaaggcccaagataacggcaaccctcttcaggccttcgcggcgctggcgaagaacgatcaattgctatgggtcgccctgtcctacgtgttctatgccgtggcgaacgtcgcgacagcaggcgtgctgttctatctgttcaaattcgtactcgacaagccagcggcattctccattgcaggaatcatccccgtcgtcactggtctgttgatcacaccactgtaccctgtgatcaacaaattcattccgcgccgttacctgttcatcaccggcatgggtctgatgatcgcggcgtatctggtgtttatcctcgcctccacgaatctgaccgccgtcatcatcgcactcgtgctattctacctgccgtcaactctgatacaaaccacggccatcctcactatgactgacactgtggaatatggtcagttgaaaaccggcaagcgcaacgaggcggtaatcctctccgtcaggcccatgcttgacaagattgcgggcgccctctccaacggcatcgtcggattcgtggcggtgtccgccggcatgctcaacaccgccaccgcggccgacatgaccgcgcatgatattcagactttcaagacgttcgccttctacacacctctcgcgttcattgtcgtcagtctgctcgtgttcctattcaccgtgaagattgacgaaaaggaacatgcgcgaatcgtcaaccttctcgagtgccagctcggaagcaaggacaacgcttgacgatgccgcggacgttccgcgcttacaagccgcaccccgatcgccggtccgggaaacccggattcgattaatcgcgggtgcggcttttcgtacgcgcaaaatcgcgcacggcagcagcgcggatcggatggcacatcccacatgatgcaggtgccgaactcatgcacgcaccacaacgttgcgcagattgccgatgccttccacggctaccaccgcttcgtcgcccggtcccaagtgcccggacgcgttcgacgtgccggtcagaataacgtcgcccggcagcaacgtggcaaacgacgaaatcgcggcgatctgctccggaatgccgtggatcatgttcgcggttggtgccagatgccatcggcacggcctcaccgttcagcgtgaacgaaatcttggtgcctcgccagttgaggccgtcgcacgttacaatccacgggccgagcgagccggaagtgtcgaagcccttgacgcgcgtccacatgggtcgaggccttgcaggtcacgcaacgtcacatcggtgacgcaggtgcaaccgaacatgtaatacatagcgttttcgacggtgacattcttcgccacgcggctgatgaccacagccgcttccggctcgaagttcatgtcactagagcctgcagggtaggcaatcgggccgtcggaccgatgacggaggtggacggcttggagaagatcaccatctctttcccctaaattaagcgcaacaatttgtacactgaattactatgctctttgagaacgagcaacgacaacatgtaagcaaaaagccggtgcccactgttgtgaacaccggccttaccaagccaatcaagctatatcagcggtaaatcaggcaacaaatcagtcgaaatctgcgccgagagcttcaagcttgccgcggaaatcagcataaccgcggtcaatcagggaaatgccctgcacattggacgggccctttgccgccaacgcggcgatcagatggctgaagccgccacgcagatccggcacgtcaatatcgcggccggtcagcggggtcggtccgaaaataaccgcggaa

SEQ ID NO: 1465 - DNA, 8589 bp, Unknown
  R257_15m  MAG No. k141_25869
gtcgccgttgtcgagcatctcctcaagctggtcgctggtgatcgccttggcatcaattttatttttggctttcatggtatgcctcctcgttcttgcgcgatcggcgcacggatatgatgcggatgcgcttgccgcgtttggctgtaatcgccgtccaatgcctgccgtcgatcatcccgagcacgatgtggcgcacatcgtcgtttccgggattcggggcggtcagcgtcactggaggcgtcgagccggtcgacaagatcgcggccttccgcgtactacgatcagggttttgattctcgactccgtattagttatatacaaatcagttttatgtattgataaaagatatgtgtaacaatatcatggtttgtaaattcctaatccaagacttgaaagtaagtctatgcattgctaatctagttcacatgactgcagtgatggtctcgccggcgttaaaggcgcagaagcaagagctgagccttcaggatcgcgttacatacaacatgaaggttcttatcgccattcgacagacctctcagaaggatctggcgcaggctatgggaattgccgcaccgactctatcccagaagttcagtgggcgcacccgatggaacatggatgatatagaaaaagcctccgatttccttgatgtgaaaccggaggcattggtagcggggcatggatttgaaccattggacctctgggtataccagaggtcccaaggttcaaatccatgccccggagcgccttccggctgattttggcttcactttagccgcgtaggtggtcaagatggtgtgccatgacgaaaaacagggtagcgcccccgttatggcgtgaggatattgatggttggctggctgcgctgaaggcgggcggtcgaagcgagcagacgcttttgacccgacggcgaaagatggcatatacggcccgttgcctagatgccggcccctatgacgtgacctgcgaacgaatcaccgcttggttcgccgcacaggaatggaaaccggagacgcgcaaggcttaccgcaacactttgtccagctttttcggctggttgcaacagacgggacggcgcgcggataatccaagcgacggtttgccgaaggtcaagcgtccgcgcccccacccgcgtccttgcccggacaaagtgattctggccgcgttggcgcatgccacacccgaggagcggcttatgttgcggctcggtgccgagtgcggcttacgccgtggtgagatagggcgcgtgtccagcgacgacgtgatggacgatctggttggccacagcttggtggtcaacggcaagggtgacaaacagcgcatagtgcccttgcccgatgatctggccgatgagattgccgcacatgacggttacacgtttcccggacgtttcgggggccacgtcgaggaaagctatgtaggtgaccgcctatcgcgtttgctgggcgatgggtgggcggcccatagtttgcggcaccgttatgcgacggtgacgtggcaggccacgcacgatctgctattggtctccaagctgctcggccatgcgagcgtggagaccacgcaggtgtacgtggcgatgcccgacgcgcggttgcgcgccgggcttgacgcggtggtgttggccggttagccgagtcgctggtttacgatctgctgcaccttgtcgtagttcgctcctagtttcgcgcggcgttccgcgccgacgccgtactcgccgcgaatcacggcgtcggcgagggcgttgaggtccacgccagccgttgacggctggcttggcgtgggcgtgttcgacgccgcgccatggcgtgcgatgcggtcgagcctgtcaagatcataggtgccggggcatgacgttggccttggggagaggtcgcggtggcgtttcaacggtaggtcgccgtaggtcttgcggatgttgcggatgagttcgccgatggtctggtagtcgccgtctgactggcgggggttgcattcgatgctgatgcccttatcgttgcccatgctgttgcagcccactccgtcgccggtggcccagctgcggttgtcggggtctacgatgcaggcgacgcggccggcttcggcgacatagttcgcggatgcgccgcgtgacttactgcacagggtggagataacaccgttgaaggtgggatgcttggcggggtcgtcccaccagtggatgacgatgcaagcgatgccgtatgggcggcctggcgtgtagttggggctgttgtatttggtgatgtactcgaaggacatggtaggttcctttacttgttggggttggttttgttggtgtggaaaaggtctagtacagggctgtcggccagttcggggttgatttccacgaggttttcgaggatgctggttatttcggtgagggatatccagatgcacgcggcggtggcgatgggcacgctgaagccgagatcgatgtgctgttgcgcgaagtcgatcaggacgccgaggcttaccgcgaagatgtaggtggctttgtgccataggccggttctcattttctcgctgttgatgtcgtgcgcggcgatggctttggccacgcctgtgatgtagtcgcccacgatgagtgtgagggtgacgatcattgcgattgcctgtgttttgtccatttggttttcctttctattgttcctgcactgccagcaggtcgatgagggttatggccacgggtgacagataggtgaggtctatcggcattgaaacggtcctagtggaggtcagccacaaatagagggtattgccgactgtttgggtcgtgaacatgaattcgttggcggtgtaggtaagcccgtagtcgaaactgattcgcgcgacgatctggcttgctttgatttcggctgagccgaggtagatgctttgctggttggcgagggttccggttttgccgtgcgtgatggtgattctggtcagggggaacggtgagagggttagagggttgtcggcggccccggtgcctttgatgccctgcccggtggcgaacgtggcgggcgcgccgtcgcggccgcgcggcagtgtgaggttcagtgtctggtcgccgtgtgcgtcggtggtgaggctgcccgtcgccggttgggtgctgtccacgctggtgagcttgccgagagtgaggcggcgttgacggggaaggcccagacgaaggctgtaatcgccgtgttcgtcggtgccggttgcggcggtaggggactgtgccgggtcgagctgttcgctggtgacgcccttgattcgcggggcgcgggggattccgagattcagggttctcggcccgttgaacgtttcggaggcggtgtaggccgccgtgggctgttggttggggtcgagttgtttggccacggcgtaggtgatcggcggcttgttggcgattttccccacggccgtgtcgatgctttcggccatggcctgcatctgcgcgggcgcttggttgatgctgtcgcctgagtccgggtaggtgatgccccagggttgcgtctttttcattgctgctcctttgtggtgatcggtatgaggtttggtgtctgcgtccagattccgcggccgtcggcgaccttgtacgcgagtgtgccgccgatcatccaccagcacccctcgacggggtttatgccggtgtcgtcggtcagggcggagtaaatggtgttgtggatgcggatgggtttggcccatgtgtcaaaaagctgcgagtggctggaatggctcatgtggcgtgtgtcgaagatgatgccgtccggcatgagccttcggcattgttcgacggtgctttggttgagctttcttcgtgtgggttccgggtcgaacactttcaggtatccgaaggtttcggcggtttccttggagagtgcgaagatgaagtcggtttctatggtttcgcttttctcgccggccacgagggtggctggcaagaggtcgcctgcggttatagtgtgttccgattgcacgtattccggttcatagattccgtcgtcgttcaattcgtgcttgtcgaggatcgcgccggtgatggtgtaccggtcgaatggttccgggatgtcggcggtctggtctgatacgatctcgcggccggtgacggtcaacgcctggtagtcttcggcgtcgagcagcgggtagccgcagtaggggtctgccacggtgaagcccgtggcggtcagggtcgcggtggcgttcaatcgaactgggacaagctcattgccgtttgagtatgagttgcgtatgcggttcgtgaatcggagcagcgtcccgtccttcatcagcgtgtagctttttgccagcagcgtggccattgatgggtatgagccgagtttgacgtgctggtggtagtccgcgccgttggcgatcaggtagtttttcgtgtatgcctggaatatgggcatggcggccgaattggcgaggtagtccgttatggcgttggtgcgtgagagcgagttcatgccccagttgtatccgtcgccggtcgtccggttgttgccgaggcgggcgcgtttgaggttgaccatgtcgctcgtgacggtcgcgccgatcacccaaccgttttcggtgcgcgtgacggtgccgcccgcgttcatgcggcctttgaacagcacggggctgctgtaatcgtagtcttttttgccgtccagcacccattcgccgaaatcgccccatgtgcccggcatggtgccccatgtctttccgacgcgggaaaggtcgccccatgtcggctcgccgccgagcgttacggtcacgatggttccggcaagtctcgtgatgtccttcagataccagccgtgccggtcgagtatttcgagtttcataacgtcgggttccggcgcttcgagtggttctgatccgccccattcgatacggaaaccgttgatcgccatgagggcgtccagctggttcgcttgttggttggtggtgatttccttcgggccgaattcgttgccgtcccagtcgaggtagatgtgtggtttcctcatcgtctgctcttttccctgcgctctatgagcctgatgatctgtttggcggtcgcgtccgggtcggtgacgatgccggagacggttatctcgtacttgttgacgacggtggagccggagacgccggccatgccgatggcgaggctggttgacgccagacgccggttgacggtgcctatcgtgccgcgcacggtcgagtcgaagccggattgcagcccctgcgcgaagcccgtcatgatggcattgccggccggcaccagcagccgccggtcgtagctgatcgggcccttgtgggccttgatccagtcgccgatgccgccgatccagccggtcactttgttccaagcgctcttaagtcctttaaggaaaccgtcaatgatgcttttccccgcgtcggccagcagattccccacgtttccgatggcgtctaggatgcggccgggcaagcccttgaaccaatccacgacgctgttccacgtgttcctcgcaccgtcagccgcgctctggaagaacgcgccgatacggcccggcaacgactggaagaacgcgattatattgttcacgcaattgcccaggaacgcggtgaaccggctccatatctgccggcccgtctcggtctgggtgaagaaccacgccaacgccgacacaagagcgcctatcgcggtgaccacgatcatgatggggttggcgttcattgcggcgttcaacgcccactggccgattgacgcggcctcagccgccagattgaagccctgcaacgcggataccacggcgctgatgacgccggccaccttgaacgcggcgaaacctccgccgatggcgataagcgcgccgctgatgggttccgcgttggcgcttacccaatcgccgaactgtgtgagcttgtccgctagcgcttggatgattccggccgcgtcgttgaacgcctcgcccaccgtggtgccgatgccgccagcgtcggataagccttgcaagcccggcgctatcgtcgtggcgatgctggcgaacgcgccgcccaacgcggatagcgcgttgccaatgctcgataccatgtcggaaaacgcttggagcgctcccgtgtcgcttattccctggatgaactgttgcaagccgttggtggcgttctggctgaactggctgatctgattgcccgcttcggtcaacgcgccagtgacggccggctttatgaggtcgaaagcgtccgtaagcccgccggtgatagcggcctccaagttgcctagagctccctccatggtcttggtgctgctggcggcttccttggccacgtcgctcataccgagctgcataatcgcttggttgaactcggcggcgctgatttcacccttttccatcgcgtcgcggaaattgccggtgtacgcgccgttggccttcatggccttctggagcttgccggacgcgcctgggatggcgtcggccatctggttccagttctcggtggtgagcttgcccgcgccggcggtctgggtgagcaccatggccaccgatctgaacgtgtcggcgttgccgccggccacggcgttcaggttgccggccgcttcggtcaggccggtgtaatcgccgatgccgttggcggccagctgcgccgtcgtgttctggatggtggacagatcgtatacggtgcggtcggcgtaatcgcgcgccgccttggatgctttttcgacgttgcttgtgtcgatgccggcgaagttcatcgtggaaacaaatttgtcggtgctgtcgctcatgtccatcacggcgctgccgaacgaactcaccttgtcccatagggcggtgactcccttgagtgccgcgccgcccatgaacgagccgaacgccgccgccttgctggtggctttctggaacgccttcaccgcgtcgtcgctgttgcccgtgattctcacggacattatcgcgctatgagccattttcagcttcctccagttcctcggcttcctgcatcaggatttccacgcacgtgccccaatcaagctcgctggcctcctctcgccactgccatggcgtgccgccgaagttgcgggcgagcacgcacgagaggcggccgagcgagtcgtcaggccatgcggctagacggtagggtttccggtttccgcctcttcgtgcttgagaggggtcacgttgtccacggtgtccagccactcgtcgtacttcagttcggtgagctgcttcaatcgcacggcgatgtaggccgcgtagaacgtcatgcgaatctggctcgcctcgcccggcttccagccggccagctgcgcgtgctcctccatgcgcgtcagcacggccggtgactgggtgcgcacctcgtccacatgcccgtcggtgtaggtgattttcatatcgttcatggttatgctcccttgatctgcttcaatgtttgttcgatgaaccgcttgtaggggcgttgccacatgctctcgcttgaggcgacgccattgttgacgaacaggcgtggtctgatgccgcgcgcgggccaaccgtagttgatgacgccagcgtagggcaccgtctttcggccggcgcgtatcacgccggccttcatggtcgccccgacgcgcacgctctgcttgaggtgtccggtattgccgacgggcacgagcggcagcacgctacgcaaagcgatgtcggcggcctcacggttgacgcccttcaacgcctgcatgtccgcgccggccttgcgcatggtctgcacgaaccgtttctgcccgaccacataggccgccttgtccgtcactgggagaccgaatgggtgtaaggctcgtgctggaggttggtgacggggaagctgaaatcgttcgtgttcttgctcttcacgtcaccgcccatgctcacggggctgatttccacgtttccggtccacttgattccgcccttgatgttcgggacgaactcgaacggcagcgtctcgctcgcgtggtcgaagcaccacaggctcagcgagttcgagccgaagtcgtcgccgatggtgccttcgagcgtccaagtggtcgtcgtgctggtctcctgcgaaccgtcgaggaagttcaccggatcctcgctgctgttcgacgcgaccagctgcgccttgatgacgtcgccgctgaagtcacgcgcgtttgtcgtgtcggtgatgttcagcttgcccgcgccgagagtgcggatcttggttgccatgatttattcctcctgtatgtccaatgggttgagtgtgatctggtagctcgccagcgtgcccgcacccgcaagggaaaacgtgacggggcgcgcggtggcgatgttcaggccggcttcggccaaaaggccgatggccttggtgatggggtcgaacgcgccggcctgcgtcgcgggcgtgccggccaagaggtcgagacgccatgtgcattcgggtctgtcgccccacacggggtaatcgatgtcagggggctcgatgaacacggccaccgtgccaggcagcggccgggccttggccacgtcgccggtgacgaacgacccgatctcgcccagcgcggcctccaccatgccggcaagctcctggcgttccgtggctatccggtcgctcatgcgatcaccacgctccctgtgagcacgccggcggcgttgagcttcggccatacgctgcgcaacgggtcggtgctgaccctga

SEQ ID NO: 1466 - DNA, 23219 bp, Unknown
  R257_15m  MAG No. k141_26320
cgatgggttcgtattcggtgagcggttcgtcgggcatggtgccggcggctatcggttcggtctgctgctggtagtcggagtggccgagcgtgaactggtccttgacccagatgagggtctgccgccatctgaggccgatggattctactgcctgctggaattggacgcgcaggctgtcggagtgggccatgtagaacgggcagccgggcttgcagatcctggcagcgacttgcatggcctgtttggtgatttcgacggccttgttggggtcgttgtcgttctcgatggtgagacggtccttggtgccgccctggtatgcgacgccatatggcgggtcggtccagatgcatgatggctggccgatcatgccggccgccttcgtgacgagttggtcgtcagtgctggagccgacgacgagcaagctgtcaccgagcttccagatttggccgggcttcgtatacggcttcttcggcaccggaggcacatcgtcggggtctttgagctcgctgggcgcgggcttcgcggcggcgatgatctcggcgatgtcgtccgcgctgtatccggtgcccaccgtcggctgttcgatgctttccagaagttcggcaagcgcgtcggtgtcgtagccacccaagtcggcgatgcggttgtccgcgagcacgatctgcgccgcctgatccgcgtcaaggtcgacgatgacggcttcgatggtcgtccagccgaggcttttggccgcctgccatgtgtggtttccggcaaggatttcgttggcgatgccggtcttggtgcctttgttgacgacgatgggcttgtattggccgcgcgccttgaggctttcggcgattgctgccatgttgccgcgcctcgggttgcgatggtacggggtgagatcgccgatgggcatggtctcgattttcagattcgccatcatcggctcctttcccgcgcgcacgcgcgatggggtggtcaatatcggagggagaggtcttgcgggcacgcgggtagtgtcccgcccgtggctggttttgggattttaccgcccctccggggattgggcgaaggcttcgatgaatgcttcgacgccgttgttgatgagttggacgatttgtttgttgttcggcggtgtcgcgacgagtttcacgtttccgatgccggggattgtggggtcgatggctgtgggtttgatctcgattggcatgtctagttcgacgctggctaggtcggtgctgaggttgccgactgtgactccgatgtggagtgtgagtggcactggcctgatgatttgttcgctgggcattgtttgctcctatgctgttatgatccattgtctgctgagtgtgccgattggtgtggctgggtctttgttgccgcgcaggttgttgcattgcgtatggcttggcctgaagccggccgggtcatgctggagatcggggcgtttggtcaccgggtagaagtggtcgaggttgtacgagtcatcgctgctgttctgcggtgcgtcatagtcgatgggcattccacacagccagcagaccgcatgctcggccttgcacttcaggaagaacgccttgcggtccttctcgaactggcgtccgccctttctgacctttctgctgggagccgtcattctgtggcctcccttcgcgggatcgggcataagaaaaccccgaagcgcaagcgcccggggtttcaaagtatccaagtggttacaaaaataaccaacgctagtagttctagcggtgacagtttgcgtctgtcaagaccttcggcgtgtcacttgtctttgtcacgtcgggtgaaggtctgccagacatcccatacgttgtagaccggattgccgttctcatccacgttcaccggttccagaatccctcgtttcgcccacttggttatcgtgttcggcttgaccgccaccccataaggatccatccaccgcgcgatggccgccgcagtgccctgagctccaccgagagccagtctcaggacgctggcctgctgcacatccttgatccgccactcgcctcggcaacggtcacaggccttgtaccccgagaacatctccagctcagtgcaccacagctcatagccgcacttcgggcatggaccgatcatcttgcacgccggcggcgggttcagcatccgatccatacgctcggcggcgagcgcgatttgctcggtgatggtgtcggcgtcgtcgtgggtgaggaggttggtttcgtggagcatgatgcctttgaggagtgctgggacggccatgcctcggtgtgggtgtaggcctgcggctcgggtgagtttgcgtgtgagtaggtcgatgtcttgcttgagttgccatgcgtcgatgttgacggggatgggtgcgatgctgtgggtgccgttgccggtgctgcgtgccatgatgttggcttttttggcggcgatgaggctgagtatgggccagccgtctttgagggtttgcaggtggttgtggagttgttgggctggtgtgggcatggttcctccgggtccgtcagtgtggtttctgctgctgttcggttggcttcatgcccgttgcctattgtctcacgggttggtgttggtttttggcggtgatggtgggtattcgatgtagtagttggcgccgtagttgtcgtagatgaagctggcttcgcgggcgagcgcggttttgatttgtcggtaggtgaggattttgccgtggcgttcggtcatttggctacgcctccggtcactgggtcgataagttcgcagtcgattgcgtcgatgtggtcgccggttttgatttcgacgcagaagcgtttgatgtcgccggtggtttcgattttttggatggtggtttgtttgggttggtcgttgccggtggcgatggtgtagccgatgagtccgatggcggcgatgagggttgtggcggcgatgagtgctatgagggcgaagaggaggccggtgaattcttcgagggtccagtctttgaagatgtggttgaggagcttgttcattggttgtccttggtgttggtgtggtcgaggtggtcgaagtggtcgaggatggttgcggcgagcagtccgatggtgcagaaggcgagggtgagcgccacgtatgcggcgggtccccagatgggtaggagcacgatccaccagctccagtcggtgatgttggcgaggcggagtgcggtgaagacgacgccgaggaggttgatggagaggatggttttgccgaatgtggtgagggtggcgcgtgcgttgcgggtggtgttggtgcgtttcatgcggtgtggtccttgatctgtcggcggatggttcggtattcggtgatgtctctggtgaggcagtcgtggacgcggtgggtgccgtgctggtggtgttggtaggggttgtggccgagtgattgccataggaggcgcaggctggtcaggtcgagggcccggtagtggagttggttgacgaggaagccgtggtagtcgtgtcgttcgagcaggtggtcgatggcgggtaggtcgaagtgctggacgttggtgcctgcggggtggagggtgaggccttggttggtggtgagccggtcgatgaagtcggcgaggtggccggcggtttcctgttcgctgctgcctgcttgttcgcagtcggcgaggaggccgttggcggtgtgcattttcagggcgggcagcgcgatctcgaggagctggctggagtcgatgtggatgaaggtctcgtagcggccgtattcggtgttcgtgtcgaggctggtgcagatggctccgatttcgagtatcgaacaggtgttcgggtcgaggccggtggtttccacgtcgagccagaggagcgcggcggtggggttcggtgtgatggggtcgccgccgacggtgatggtgtgcgcgtcgcttgtgttcatgggtttcctagcctttcaggacggtgagggttttgatgtggggttggaggatcgcggtttcgtgtttggggctgatgctgaggatccgcatgcctttgaggttttgctcggcgtcgtcgagggtgaaccgtgtggcctggtagccgtctcgtggcgggcttgctttgagtcggccgtcgatgatggtgccggtctgggtcatgaggatgcagcgcgctccgtcgagctccgtgggtttggcggtgcgccagtcgatggcctcctggactttgccgttcatgcgatggcctcgagtccgtcgacgtggatgccgagttcggcgagttcgtccggttccccgtagcagatcagggtcacgatgtcggtgggcgccttgccctggccgaggagtctggccacggccggaatccatgcgcgacgggcttggtcgtcgggttggcggcatttgagcggcgtgctgctgtccacgagtttgcgcgccctgcgttccagctccgaagcggccggatccgaagcgtcggtcatgccggtgccgagtttggcgccgttcaggccgatttccttgccgcggcgcagccagttgcggaacgccggcgccgggtcggccggatacctgccgttggcggcgagcgcgtcgcggaatttggcgagctcgtagtcgaggtcgagtccgaacgcgtcggcgagcgcgatgtgcgactggtcgggctggaaatcgacgagcgtctggcgtggatccgtggccggcgtcgtcttcggcttggtcttcggttttgggttggttttcggttttttcgcgcgcgtactctctcttgacggttctattgacggttcctttgacggtttgggtgaagcctgtttcacccctaaagcgaagtgggtttcacccgtggggtgaagtgggtttcgcccgtggggtgaagcctgtttcacctgtggggtgaagcctgtttcaccggtgaaactggtttcgggggtgaagtctgtttcacccctgttttccgcgtcctgtcgcggttcttcgggtttttcggttttgtttttcttggggaagagcttgtagacgacgggtcggcgtcctttggcgtatttgccgacgagtttctggtcgcccttgcggatcagtccctttgcctcgagttttctgaggagaagttggatgctgcgttcggatttctcgacctcttgggccatggtggcgacgcttggccaggccatgccgtcgtcgttggcgtagtcggcgaggacgatgaggaggagtttggcggtgctgtcgccgtggagttttgttttcttggcgcgtgcgacgagttcgatgctcatgattcgcctccgatgatgatctgctggatgccgccgtggtgggacggctgctcgttgtcgtcgttgtcgtgtcctggttccggcgcatggccggtgggttgtttccagccgaagcgtggctcgttgtcgaggatccacaggtggcgcatgttggcaacgttctgcacgtaccgctgtggcgggtagcattcgacggcccagcagtcctcgcccatggtttcgttcttgatctgctgaagtgcgtcccagctgatgccttcgcggtattcgcccgtgtatcggtcgatctggacgcgggtgatggcgagccgtttcatgccgctgtcgcggtcgatgtagagcatggcctggtagtcgcggcttctccatgcgcgcaatggttccgcgtccgggccaggatagtcggggtcgtcgcggaattccttgagccagtccatgtcctgttcgaccatgtgccggctgtgcacgtggcggttcatgttctcgacgtatctgctcatggttatctccttttcagtaggtcgagcgcggttttgtggccttcgtcggtgagcgcccagttgtcgtagaagtcgggttggatgagcccgcgttcctccaatgcggcgaaggtgcggctgttgttggaggtggcgggcagcatggtgtggttgaagagcgcgatcagcagttccctcatggtgggcgcgagccggtcgagacggcctctggcttccctgcggctcatggctgttcctccgaatgccggtagaggctgcgtgatgcggcggcgagcgcccttcgggtctggttgaggcctgtgagcgcctgggtgaggtgttcgaaggtgtcttcgggggctccttggtcgcggatcgcgttgacgatgctgatgagcgtgtccgtgagggtgctggcggtgtcgatgcggcctacggcgagcgcctgttggcgtttcatgcgttgtgtttcgtgttgcgggctcattgctggtccttccgggtggtgaggctgccgtcgagtgcctgttgttcgcggctgctgggttggtggccgagccatgcgagcgcctggtagtagacgttgacggttttgagggtgctgccgtagccggtgtcgtcccatgtttcgggggtgatgcgtgcttcctggcgggcgagcatgacgagggtgagttggcggagttcctggccgggtttgtcggcccggcggcgcagctcgttgaggttggccgtggtgtcgaggtggtagatgccttccttcgggttcttgtgctcgtcgggcaggggtttgccgctgatctggttgtaggcggtgatcatctggtcgcgttggttggcgtcgaggccggtgggtaggtaggtgccggtgccgatggtttcgagtctggcgagggtttggatggcgtcgcgcatctgctggccggtccagtcggtgctggttttgcggatccactcgcgtcggaggcggctgctggtggtcgtgtattcgcgtagtttggtcttgcgttcgcgttccttggcggtgatggccttgagtcgttcgacctccgcggtgttttccgtgggatccttgggggtcgtgggttcggcccatccgtagcaggagttttcggtggtgaggatgaggctggcggggttgccgccgttgttcaggtattccttccatgattcggcgaatggtttcgacgtggtgggtgcgtgggtggcgccgtagccgtccatgtcggtccacaggttcttgaccttgatggcgtgcaggtggttggcggtgatgtattcgtcggcggcctggcgccattggttcatgcgtttgtggtcgcgcgcgttctcgagttcccaccgccagtccgggctttcggctttctcggcgagcttcgcctgcgtctcggggtcgtcgttgaattcagcgagcgcgtcgagctggccgagggtgagctggctgaagtccttggctttgccgcgggtggtctgcgggatgccggcgatcttgatgcggcggcgcacgaagctggcgctgcggccggttttgtcggcgagttcgtcgatcgatgcgccgaggtcgaggagtccttggtatccgtcggcttcctcgatgggggtcaggtcggcgcgttgcgtgttctcgatgagcatgatctcgcgttcctccctgtcggtgaggtcgcggatggtgcaggggatcatgctcaggccggctttgatgcaggcctggtagcggcggtggccgatgacgatccggtagaggggtttgccgtccttatcgttgccggccggggtgacgagcagctgctgctggagtccctgggccttgatgctggcggcgagttcggtcacgtcgcccacgctcttgcgcgggttggccgggttcggcttgagctgcgtggcggggatgtccacgatcagcgggcttgtggcgttggtttccatgggggcgggtcactgttccttgaggtcgttggacatggtggtgggcatcggggtgcggggcaggcgtttgcggcgtgcccgttggcgttggtgttcgagctgctggcgtccgtgcttacgcttggccatgcttgtcgtctccttcggtggtttcggtgatgtggaattcgagcctgtgcaggcctttgggtgcgatggtggggctcatccggtagaaggggccttccacgtgcctccagttgtcgtccggccataggcccgctttggtgaagccgtcgatgatgggtttgcctacgttgtcggcgttgctggggtcggcgcggcttcggccgttgggcgggtactgcacgtacacgtcgagccggcaatgctcgaagctcactccgtcgtgccggtttctccagtcggcagcttcggcccagccgaggcgtttgagggtctgcatgagccggttgtgcgcgtaccagttgccgtgcgagccgttgtcgttcttccacaatggtttggggatttcgacgacgatcacatgcgtcgtattcatcgtggcctcttcgcggttttcggattgtcgcccggatattgggcgcagactatccatttaccttcgtgccggtggtcgggcgccacctccacacggtaggcgcccttgggcgtgaaggccttgatgccgccatgcaggatccgctgcttgaggtttaacgcggcgcgacgctccatgttctcgccgatgacggcgatgcgtccctcgaatctgcgcagggctttggcgggtttcgaccatttactttccggccgtgcgggcttgacgtggatgtcggcgggccagtccgcgatgaaccggaccgagcgcagcaacgccagatcctcgtccttttccaccgtccgggcttcggattccactggtttcgtctcagtgggatccgacagcagtgaggccagcggctccggccgggattcggcgggcttgtcgccttcggttccggcccgcaccggctgggtgatcacgctcggcgtgacgccggggcgctgcaggccgtgtttcctgcagtaccgtcccacggcgagccgttcggactgctccagctggtcccagccgtcgcgcaaagcgatggcatacagttgttcgagctcctgctgcgtgtacttcggtttggtcatcaccactccccggtatcgaaatcgtcatcgttccctacggctcccgcataaccctgcgcgggagtcggcgcggcctggtatcgtccgccgttccggccaccgtttgttttcgtgatctgcacggtggcgcgctgcaggctggcagcgatgtcgtcgatgacgtatctcgtggaccatcgctccgtgccgtcctgcgcggtgaaccggtcggtcttcggccttgccaccgcgatcacctgggagcctttcgccagactcgcggcgatgtgttcggccagaccgcgccatgcctcgcagttccagctcgtgggcgtcagatcgaccggctggccggccgtgtccttctcccagccgctggacaggatgcgcaggttcacgaccggcgtggcctgtgcgccgacggttctgagctccgggtccgcggcgagtctgccgcggatgatgaccatgcttggatccttcgccatctactcctcctcttcctgttcgtcgtcggtgagatatggttcgagtttctgcaccgcccacggtgtggcgagcgccgcgccgcagcccacgtagacgatcagggcgatggtgttgcccacggggtgcatgcatccgtcgtgcgtgagcagccatgccagggcgagcagcgtgacggcggcgagcatgatggcctcgattcgtgtgtatggccagtcggttgtggtcttgtccgtgttcatgggttattcctccatgccgcggatccagcgatccatagcggctttcgtgaccctgcgtcggcctggcttgccgaagcggttcggcgggcggaatgtgtcgaggtcaccgttgttgatcgccaggcgtaccccctcgtagtcgagtgagtacacctgagcggcttgggcgggcgaccatgcctgccgctctcccagtggcacacggctcgtgtccttcaatgcttcggcgttcttcggttcgctcatgtcggtctccttagaagctcttgatcttggccgtgaggcgttggagaatctggcgcggggtgccggtgacgaacacgtgttcgccgccccagcccgcgtcgaggctgaacaggtggccctggttgtcgagcatgagctgggtgacgccgatctcgaacttgccgggcgcggtgctgaacacgatgccgtatggcgtggcgtccgtgaactcgtatctgccggagtcctccatgagcccggccagcgcttccttggttgtctcgttcataacaccgttcccttcgattcaagggaaaccatgaaattgaattcgaggaacagaaccagggccatcacgatccagaacaggatcggatgatcgtccgagaaaaaacgcagcagccaggccacgcctgccggtatcgccaaaaacaccatggcgcaggcgaaagccgccgccgttcccgtctgggggttcgagcagtcgcgaccccgcagcgtcgtgtacgaggtcacgaaccgcaacgctttcgatgcgttcgatgtgagggcggaatacaatggcgacaagtcatacgagctgggcgacatgcccaagggatcatccacgagcttcgacttcgttgaatcagcgatctggggtggggtgcaaacggatataaccatcagctggctcccttcacctgatgcgacgaagcgtgaacatctccggatggcgatgccggcccgtctatagacagcaggtgctgcagtgcggccgcgtccgtcagcacgactttcgtgacatggaccagcgcggtgccgttgtccaggtattcgacctgcagtggatgttcttcgaaccgggcgacctcaccgggcttcattccgaagaccgcggccaatcgagacctaagactttcaggcaatgacgagtaggaaacgttgacgcacatcacgccaccaacttctgcgagcgcggcaccatcgggactccattggttagctggaatccggacacgattcttatgatttccactgccgatggcgtcttgccgttggtcaactccttgtaccgctcctccgtcaatccacaggcggcaacaaatgccggatgactgagtttgcgctcctcttccaacgaggcgaggaacttaggggatatgaccagcccgtccatgtctcactccttaatcaaagtgtttaatttcttaaacgaactgtaccacaacttgaacggttgtcaaaccgtatttgatacggtatgtttaataaatgagacacatggttaggaggtaaacatgagtgcattcacgaaatggattgaggagatctccggcggcaatatgagcaaccgagagctcgccaaaaaggtcggcatgaccgtcgccacatttcatcgcaaatggacggaagacgcctttgtctcggatgatgcgatcacaatcgcacgagccttcggccgttcgccaatcgaagctctcgtaatccttggctcactgaccgaggaagaggccagcaaagccgcaaggggctactcgctatccgagtacacgaccttggagctcagccaggaactcttgcggagaattcaagcaagcgccgaagtccctgattatctcgacaaaccggtcgatgaggccgcaaagaaaattctgtagaatctacgtcaattgggcgcagggccatctccccgctcggcaatccatctagaatatgtgcctcaaaaatcgttagaatataaatcaccccggtcgctcgtgcgagcgccggggcttgattatgttgtttggcctatcgtatgagtgcggtagctgttcgtaatccgccttgggttccgatttcgattttcgacatggctccgttatctgtaatcaggtcgaggcatgccgcattgtccgtcaggtccagtgtcccgatctgctttcggccgattttgacctgcacgcccagcatgccgtcgacaacagtcttccgcaggagcgcccatagcagcgtgccgtcttcgtattgatccagcgtctcgctggcattgtcgttcagtttgatcggagtgcgtttggggccggtgatgtctttcttgtggggcattttgtttgcggttccccatgtggacatgtttgtctccgcgtcttctcctgcggctcttgccttctgagatgtcagagccccctgctgagtctgagatgccattggggatttgttttgcgtcatcaggcgggattcggcgagcgccgtcttgtattcctccgaaggggtctcagcctccggcatttccacgcggacgtcgagtttaacggctgcggttttccctgatttggtgtgggcgagcgcgacgccgccgatcttggggacttggtggtagtggcgtgaggtgttggtgggcgtcatccatccgatttgttcgccgtcgagggtgacgaggatggtgggttctcccatgtgggtgcctttcgggttttctcctcgttggagttcgacccagaaccatgcgccggctccgtactcattgagtttgtcctggtgttcttcttcgcctacgatttcgacgccgcctttggagggtatgacgattccatagggtttttcattgcgcagttcgattccggcgttggccatgtggcggctgcggaataccgtctgggttttctgccgcttctggcgcaaggtgatctgctcgtcatcgtcactgacttgttggggtgccgtgatggctttgagtctcttgtagcattccagggtgtctttggcatcggcgagcgctcggtgttcctcggttttgttgatgccggtgcgtcgcatgacgtcttggagggtgtggctggtggcagtcgggtatttctcccgactgagatccgcagtgtcgaaggtctcgttgccgaggttgggaagtccggcgtcttggaatgcctggttgaggaatccgatgtcgaattggatgttgtggccgagtatgggcaggtcgccgattcggcggcgtagctcgtgtatgacatcgacgattctcggttgttctttgagcatgtcatcgtcgacaccggtcaaattggttatttcaggcggtatcagaatgccgggattgataagttgtgagtattcgccaatcgattcgtcgtttttgacgtacacgattccgatatcgataatgccgcatgtcttcggactgaagccagtggtctcgagatcgagaacgatgtaatcggcatcagggtggtcaccgctttcgttacggatgtggtcgtctgagcttttctcggcatggaaacctgcggcaccggccacgaacggttcctcaggaaggtcaacagccgaggcagtggagtctagaatcgttcgcgcatcagcttgccctgtgatgccagctatgcttccctcggtcttttcggtcgcggttttggcttgctttctcttgaattcttccgggtctttgatcatgtcacctatgatccagagcaccaatcccacgaaagccagtgccaccgccacgattatcccgaatatgagccccaaaaggtttaccttgaatccggcaaccacgaacaacaacgcgaacagccaggctatggcggcgagcgctcggaacgcaatcatgccaatgattcttggtagggacgttttcttcttcgccgtatgctgtccgtttggcatcatgccccaatctatcgttttgcagccgtctcattgcggccctacgtagattttacagatggttgcggtcgtgtcgattgtttctgatttgacatacttgcataattgaggtatattagttatgtcagcaaaacagaacagtgaaaggaggtgaacatggacgaggtctggaaagcgatcgaagccatcggctccctgcttgtcgggattgcggccgtcatcgccgcgctcaagtccaacggcagcgagccatcgcccaagccgaagccaaaaccgccacgcaggcggcgcaggccacgcaggtagagcaagagccgtagattccgaataaccctactatccggagctacggctcctttcccagactaatccatgaatcatcatgaacgcaaaaagcgcatacaggttcgtctcgctggcatgcggcgcgatgtgcctcatcctcgccatcggcggacggaccatcgccgccgggatcttcggagccgccgccggcgtcttcggatacctcgcgggaggagaacgatgaccgaacgtttcctgagcctcaaggaggtcggcgagcgcctcggcgtgaagaatccagccgcgaagggctacaacctgccgaagccggacgcgctgattggcacgacgcgcggctggctgccggagaccatcgaccggtggaacgcggcccgtcccggtcgtggggtcggtggcggcaggccgcgcaaacatcccgttgaataggcgaaagccccccgacactcattgtgagcgccgggggctttcgtttgtttcgtttatgaggcttcctcaatgacctcggcttcgatgatgtcggcgtcgtcgtggaggtcgggtatggcctgaccgaggagtttggcgaggctggcttcgtctctgtgggtgtagtggttggtcatcgtgatgctggtgtggcccatgatggcggtgcgtgcgtcgtcgggcatgttggcgcgggccgtcatgctggcggtccagtggcgtgcgctgtggatggtgaccggtggaaggcccgcggccttcagagccttgttccagttgtagcgttcggtgctgctgcgtatcgggttgccgcgcgagttggtgaatatgagctggcgcgggccgatgccgagtcgtttgacgcgcgcccacaatcgctgccacaggctcatggatatgggcacgaaccggtgcgcggcgcgggtcttgggcgtggtgagccacaggatgccgtacaggtgctcggctttgagccaggcgggtatgacggcttgttccggcctgccgtattgctggatctgctgctgtacgttgatgccaggcacgccgtcgcgttgttcgagctcgtagggcatgagcgcgtagcgttcgccttccctcatgccggccgcgaacgcgagttcgaacagcagcatccaggattcatcgacgtccacggtcagggccggtccgcgtcgtttcgctccccggttgggcacggcctcgatcagctgcttcggctggtctggcgagaggatcctggtctcggtgggctccacccttggcggcttgaccctgcggcacggatccacggggatgagctcctcgagctcggcctggtcgagcatcatcttcaggctcacgaaatggtccttgagcgtggagggcgcgagccgtttggaaagcacgcgcatgcattggcggatatggtcaggggtcagctcggtgaggcggatacagccgatgacctccatgcacgcatggatcctgccggcgcgggtgcggtacgtggtgggcttgacgttgagccggtattcctccagccaccgctccgcgtaatccttcaggtacgggctcttggcgccgggcagcaggccggtgcgttccatctcggcgaccttcgcgtcgaaccgttcgcgggcatcggccttcgtccggccggtcgccgctatgaaccgccgcttgccggtcgcggggtcccggctgatctcgcggcggaactcccatcgtccatccgcgcggtggatgatgctgcccgcgcccttcgtgcgccgcgaccgtccgcccgtcttccgtgaggtcttcgccgtcatggtgttctccttgtgtccgagagcactcaatgagcgtccacgcacatggcgagaaccgttgcggcgagtgtcctccggtgtttccgaagtgcactctatttacactctatcgccgcgtaaaacggcggaatacgtgcgtaaaacggcggttttccgtaaatcgaaaaacggcgtgattccaacgttccgacactccggaccccttggaatcacgccgttttgcagggtctaaagaccctacttggaaacattgaatttgaactccacaatatctccgtcggccatgacgtagtcgcggccttcctgacggagcttgccttcctccttgatcttggccatggagccgtcggcggccacgaaatcgtcgtaggagacgatgtcagccttgatgaagcccttttcgaagtcggtgtgaatcacgccggcggcctgcggggcggtccagcccttgtggatctgccaggcgcgcacttccttgacgcctgcagtcaggaaggtctgcagtccgaggatgtcgaagcccacgcgggccaactggtcgagaccggactcgctcaagccagcgtcggccagcatttcgcgggcgtccgcctcgtcgagctcggtcaggtctgcctcgaactgagcgttgaggaacacggccggagccggggccacggatgcggcgagcttagcctgcaggtccttgttggccagctcgttgtcgtccacgttgaacacgtagatgaacggcttggcggtcatcagatgcaggtcgtagacggaatccttgtcgaagcggccttcgcgtgcggccttgtcgagcgtctcgccggcttcaaggatggtctttgcctgcttgactgcgtccatgtaggccggctcgatcttcttgcccctcagatccttctccagcttgggcagcgcgttttcgatggtctgcaggtcggcgaggatcagctcggtgttgatggtgtcgatgtcgtcggccggatccaccttgccgttgacgtggacgatgtcgtcgtcctcgaaggcgcgcacgacctcgcagatcgcgtccgcctcgcggatgttggccaggaacttgttgcccaggccttcgccttcggaggcgcccttgacgatgccggcgatgtccacgaaggtcaccgtggcgggcacgaccttttcggtgtggaccagcttggccagcacgggcaaacgcttgtccggcaatggtacgatgccggtgttcggctcgatggtggcgaacgggtagttttcggccagcacgttgttgcgggtcagtgcgttgaacatggtggacttgccgacgttgggcagtccgacgattccgatagtaagagacatgattccagtctagggagaagctggacacattgaacgtgcatgtggtgaaccggccatatgcaaaggcctccgagcatacggctcgaaggccttgactgtgatatgcgaatatacgcgaactctgattggcagtcagccgacgatggcgtctacggcgtcgatgaccgagccgcggaacccgtccttttcaagctgggcgacgcccttgatggtggtaccaccgggcgagcagacggcgtccttcatggcaccgggatgggtttcagtggccatgtagagcgcgccgacaccttcgaccatcttggcggcgagccggtaggcggtggctcgctgcagaccgtactgcacgccggcgtcgcccaaggcctcgatgtacatgtcagtgaaggcgggcgcacagccagccaccaccatggcgatgttcatatgcgcggtgtccacgcgctcgatgaggctgatggggccgaatagctgctcgaaggtttcggtttcgtcgtcggtcagggtgttgacggattcggtgacgagcacgcccttgcccacggccatcggagtgttcggaatggtgcactggatatggatgtccggggagtcgacggattcgccgtcttcggtggcgaacaggtcctggtacttcttgagattccagccggcggcgatggagacgacgatcttgcccggcctggcaagttcgtcggccagcggcttgacgacggcggcgatctggtagggcttgatggcgatgatgaccacgtcggcggccgtcaccacttccagcgcattgcgcaacggacgcacgccaagttcggcggtggtcttctcaagcttgtcgtagtgggcggcgcaggcaaccatctggccgccggcgaccacgcccgcgtcaacgaagccttgggcgatggcctgggccatgttgccatatccgataaaaccgatggtgaggttctgagtcatacgttttcctttcgtgcatgtatacagagctccctcatcagagggagcttgcttccttgagtcagaacagttcttcgaggtcgccccggttaagggcttcgtcatagagatgcttgaagacgagcgggccgtgcagaccatcatgctcgaattcgttggtggtccagtagtggctgttacccacgcggctcaaggtgtcgagctgcaggccggaatcgacatacatgtcgtcgaaatagacggcggcctgcaacggcacctcattgcgggccagctgttcttcgtcatagatcacgccgaagtgcgtgtcttccatgagcaggtccatggccggcttgaacgggcgcaatgcggcctcctgttcgaacatccacgggaacatggcctcgccggtgaagttgagcgggcgttcatcagcaccgaattcgggcttgccatcgcgcacgcgctgggcggcccaacgaatgggctcgtcaagctcaccgttggcgtagatgaactcctgcagcggccagtacagtgggcgcgacgacgtggcgttcatcactttggtcaaaaattcgtcagacaacggcgagtcggcagaagcggaaccatcgccatcaaggaaggcgtcgtcaagaatccaatggacacgctcgaagctcggcttcatgccaaagtcggatcccaagcactggaagcgttcgacggtgagcgggtcgccgttcggcatcagcgggaagccgtgggcggccatgccggcgatcacgccaagtcgatgctccacatcggtaccagccatcggattcagtacggaatcggtgagtttgccaacgaattcggcgacttccgcagtagtcggcaacttgtcggcgatggcggccacgcgctccttgtcctgtgggtagcgctcgtagaactgagtcgtcttgcgcaccatgcgcgggaaggtatgctcgtacacttcagcggcgtcggccggcacgtgcgggatgccgccggtggtgaagctggcgattacgccggccgggaacagggacagtgtggtcagggtcaggaagccgccgtagctttggcccatcgtcacccacttgcggccaccgaattcggtcaggcgcagatgttcgaagtcacgcacgatggaatcggcaaggaacttcttcaggtagtcggcttgggctcgtgcgccggccgcggcatcatcgtcgtgcgcggcggcgatgcgggccatggcgtgcgtgtccacgcgcgaggagcggccggtgccgcgctggtcgggcaggatcacccggaagtgcctgatggcctcctcgatccatccgtcggaggtcgggctgttgaggcgcgggccggcaccgccgggaccgccttgcaggaaaatcagcaggggcaggtcgtcatgcacgtgttcgggcgcggtgaccacgcgatagaacagtttgatggtttcgccgtcgaacgcttggcctggctcatggccggtccagtcgagcggaacatcgatggaatggtcctctatggccagtccgggcacgtagtatttgctcagcattgtcatggttcaagactctagtccataaatcctcctgaagagtgataccggttcgtcgccggacacgctagccttgcgcgttatggagattatggcgcgcgtgagggcatggtgcgcacgggagtcgacccgcacactgctatgggacacgttgctcgccgcagcgctgatcgccggctgcgtgccgttcatcggcgtcaccagccctgattcgacgggcggcatattgtttcccgcaactcaggcgtcgatgacgctgtggtcgctgccggtcttcgtgccgctgatgctgcgcaggtattgcccggagccggcggcctggctgttcgtggcgctgaccatcacgcatcttgtgttcggcccggcgatcatgtatttcgatttctacgccctgatcatggtgtattcggtgattctgtacggcaatccccgacattcctggcggttcatcgtcacggcgttcgtcatgggactggtcgcggcgatggtctggtcggtgtctttcaacgtgggtccgctgttcgacggaccttcctccggttcgcgcgtcatccgcgacggctggctgtccgatgccatcacgatgcccacatgcccggcggtcaccggcgtcgtgggggcaagcggcgccgtcaactgcggggccaagatgctcgctgacttcggcatggaggcggcgttcatcgaatcgagcgtgctgagcgtcatcatcatggccttgtggcagcgagcgcgcaacgccacgctggcggccatgcgcgagcgcaacgcttccattgtggcgaaagaggccgaggagacgcgcatcgcggcgctggccgaacgcgcacgcatcgcccgtgatatgcatgatgtggtggcacatacgctctccacgattattgtgcagtcggatggcggccggtatgcgggtgcgcatgatctggccatcgccaagcacacgatgggtacgattcggcatgaggccgaacgcgcgcagcatgatatgcagcgtctgttcaatgtgttcggtgcgagtggcagtaccggatatgccgacatcgattcgctgtttgacggtcatctggtggtgtcccggcatatgaccggcaaagcgcaacctgaccggctgtccgccgacgcggaaaccgccgtgttccgtcttgtgcaggaagcgctgaccaatacgcgcaaacatgcgggcgagggtgctaaagccaccatcgatgaaatctggtcaaacgatgtgctgtcgattaccgtatccgataacggccgtggcgcgacgtctgcagcagacggccataagcccggatacggattggttggtatgcacgaacgcattgagtcgttgggtggcagcgtgcaggccggcccagggccgaatggtggctttattgtggcggctacgattccgctctcccctgccgccccacagtctggcaccgatacggaggatccggtgctaaccgttatctcgcgtatacgaggattgatggatcgggcgcgccccaaagtactcgaccaaggagatacgcgtgagtcgaactgggtgggtcgatttgcgcagtggaccgagcggcactatcttctgatggacgttatcgccactatcgtgctgattgcgctatttgattccgccacgtatggcgatttgcaaatgatcggcaatgccccgtattcgccgaaccgcgtgccgactataatgctgacgattattatgctctcgcctttggcgttccgtcgccgcttcccagagggcagcgcgctggcgatggcggtgctgtctgctgtgcaactgttgttcttgccatcgattttgaccatcaatatgtttgcgatggtatccgtgtattcggcggtattgtatggacgagagtccgcttggcgctgggtgagcgtggcgctggcagccgattcgtggcttgcgggcatcaaggtgatggctgggtggaatggatacagtcagctgttccatctgtttttgcccgatggtagttccatgctctcaaaatggaggctggttttgtccggcttgctgccgggcgcgggaatcatgttggccggttttgcctgcattgcgatggctcgatggagccgttcgcgtggcgcaaacgctctggtgctgttgcgacgcgaggaggcgctgcgagccgagcaggagcggcaaaaggtgctggcggccaacttagagcgcaaccgtattagtgcggcgatgcaaaccgaagtactgaccacgctggaatcggtgattgcgcaggctgacgagggactggtgatgctcaacgccgaacctgcgcctgatagtatgcagattgaagcggcttttgccgcgattggtgctcgggggcgcgccgcattggctcatatgcgtcagctgttgagagtgttgcgtgaaaccgggttcagcgacgaggcccatgagggtgtgcagccggatatgcagttgcgaccggcggcttcgttggatagtcagatgcaacacgcgggaacgttaccccggtgagagacttgcccaataagaactcagggaacaatcagggtgtttatggagcggcgctccgataggaaacggatacagtggagagcatgaacgagagcagaagcattcgcgtgattattgcggacgaccaggagctggtacgtgccggttttgccatggtcattggttcgcaaccggatatggaggtggtcgggcaggcgtccgacggcgcccaagccgtggcgttggcggaatccctgcatcccgacgtggtgctgatggatgtgcgcatgcccggcatggatggcattgaggccacgagccgtattacctcactctccgccgcgccggacaacgcggccgattcggccagcccggccgccgacgcgaccgtctcggccgaatcggctgacgaccggccgacgcgcgtaatcattctgacgacgttcgatttggacgagtatgtgatggcggccatcaatgccggcgcctcgggcttcctgctcaaggacaccgaaccggaaacgttgctcaattcgattcgtactgtattccaaggcaatgcgattatcgcgccttccgccaccaagcgactcatcgaaaagatgatgcaggacggttacgcgcagcatggttcgctgaccggcgatgtcgcgcgctccggtgccgtgtacggttccgccgtcggcgtctctggcggtgcggccggcaacggtgccggctcgatgaccggcatcccctcccctgccggggccgcttccgacggttccaatacgtcacgcccagcatacaccgatcccgaactggatctgcttaccgaccgtgaacgcgaggtgctggtggagatcgcccatggtctgagcaatcaggagatcgcggacaagctctttatctcccttcccaccgtcaaaacccacgtggcgcatatcctcgccaaaatcaacgcccgtgaccgcgtacaggctgtagtcttcgcgtacgataacgggctggtgtaacaaaaaagctccctctgatgagggagcttattgctctacgcttcggccaaggcttcaactggtggcgttttgacggcccggcgggcgggtgccacgctggccagcagagcggcgagcgcggcgacgccgagcaccacaccgttggtggcccattcgaacgggaacacggtgtcgccgtacaaactaaacaccatgtaggatccgagccagccgaacagggtacccaataccactcccaccacgccggagacgagcgaaagcagcaacgcctccaccgccagcgagcgccgcagttggccgcgcgtcatgccgatggcacgcaaggtggcggattcgcgtgtgcgttcgatcaccgacagactcagcgtgttcgccacaccgaccaaggcgatgagcacagccaccgcaatcaaaccgaccaacaatgccatcatgccgttgatcatggtctcccattgcgtacgttcggccaccggaccggtcacggtaacaccagcactggcggagaacacattctgcacgttggtgaatacgtcgttcagcgcaacacccgcgc

SEQ ID NO: 1467 - DNA, 10235 bp, Unknown
  R257_15m  MAG No. k141_26481
gggcggtggtcgatcgcaccagcagctggacggggaaggtctcgtgggggatttccggctggcgtccctcgatgaggtcgagagccttcttcgccgcgcagacggccatgtcgtagggcttttgccgcaccgtggtcagccctgcttcgctggagaacgtactgttgtcgaacccggtgatcgacacgtcgtcagggaccgcgatgccgttgcgctgcaacttgaacagcaacgagatcgcttgggaatcctgatgaaagcagattgcggtggggggattgtcactggcgagcagctcggagagtgcggcgttggcgatgtcgtcgccggggtcgacggcgacgatgcgaccgtcgacaccgtccagctcatcgaccgcatcgcggaagccagagatgcggttgcgcgaactgaacccgagcgtggacgtgaactcctcgtacatgtacatgatgcggcggtggctgagcgccgcgagatggcggacgatcagcttgatgccgacccggtcgtcgatgctggccgacgcggtgaaatcgctggacgtgatgttgatgccgatcagcgggatgcgcgtcgtgttgagccgtttgatctccgaatggctgatcgcgaacgacgagacgatcacggcgtccgcgttgccgcgcaccggcagctcgtcgaagaacgtcctgcgcgcgtcctcgtcgccgatcggatagacgaccagatcgtagccggcgttgcggagcacctcgttgagcccctcgataagccgcgccgtgaaccattctattttgccgctgcccaccagcagtgccacgcggtaggatcgcccggatttgaggattccggccgtgcgtgagaccgagaagtcgagctggtccgccgcgagcatgaccttggtgcgggtcttttccgacaccatctcgggtttggagaatgcacgggacacagtggctgtggatacgcccgccttgcgggccacgtcttcgatgctggctttcatgcgttcctcccgtctgctgcccggtacgttgccgatgtggatgcggctcattgtatgacccgatcgttccgccactcgaaggggcgggtgtcggggcggattcatatatgcaacattgtagggcattgcagggcaaaatggaaactgaatatgtaatggtttacatttgcgacacgccgaagaaaaaacctatgtgcacgctcacattgttgcaatgtaactggttgcaaatgtaatgggttgtagatggtgggcaaccgacttgtcaaacaggctcgacgatcgtattctgttgcttgtcctcaaggatctacaaggaagtaggaagaaccatgaaccttaagaaagtatgctccgcagcgattgcaaccgtgagcattttatctctcgcggcgtgcggcagcggcaacaccggcactggcacgaccgacaccaacgccgacaagggtcttgatgtaatggggcagaccattcagtacgatccgaaccaccttgtcaacaacggcaagccgatccagctcgagtactggagctggggcagcaagggcgtcgacccggtctacgcgatgatcgagaagtatcaggagatctacccgaatgtgaccatcaagcccgtcaacgtcgcgtgggacgactactggaccaagcttccgctggcgctcaagggcaaaaacgggcccgcgctgttcaatgtccacaactcctgtgactccctgatccgcccgtacgcggccaactacgacatcgacacggccgcgttggaggccgactactctaccgccgacgtgcacgaggacgacaacggcaaggtcaagtacatcgactccgtgatcagtaccggcagcatctattacaacaagaccctgtggtccgaggccggcctgaccgacgacgacatcccgaccacgtgggacgagttcatcaaggtcgcccagaagctcaccaagaccgacggcggcaagatgacccaggccggcttcaacttcaacggcgacgcctactccgccatctaccagggcctcaactaccagaagggcgaactgctgttcagcgccgacggcaagaaggccaactacgacaacgcgacgaccaaggagaacatgcagttcctgcaggacctgtacaacaagtacaaggtcggatccgtcgatttcggcaacgactacacccagagcttcggcaacgggcagaccgcgatgatctacgcctggggccatatgggaggcacgctcaaggagaagtacccggacatcgactacggcgtcttcgccaccccgaccttcaccaaggacaccccgttcgcatatgaccgctacaacggcgaatccacgccgggcgtcaatggcaaccagaccaaggaacagcaggccgtcgcgcaggacttcatcaagttcatcctcgccaacgacgactacattcgtgtggcggcggccgaactcaactccttccccgcgaaggtgagcctgcagaaggatgaggacatcctctccaatccgatcatggccgctctccagccgcgcgtcgaccgcctgatctggcccggcccggcgcccgccacagttgaaaccagcggcaaggccgcattcgagaacgtgttccagaacggcatgagcatcgataaggcgctcaaggaagcacaaagccagatggacaccgacatgaagagctccgacttccagtcgatggaaagcaagtacgccttctacgacgaacacaagtaggccaagccgggccgttcgtcctcttccctgacaaccggccggcattggccggaccccgggccgcggcagggcgtttcctttcctcctccctgctgcggccaccaacctctttcgatacaggagcattagatatgagccagtccatgatgcaatccaagcgaggcgagatccgatgaaaagcaagaatgccgccggatccgcgctcagccgcattttcaccctacgcaacatcgcagtcacgttcctggtggtgtatttcgccgtcttcctcgcctacccgatattcaaggcgttcgccggcagcctccatgactggaacccgctggtcggcacatacgaatgggtcggactcgccaacttcgcgcagatcctcaccgacaagctgttctggacctccatgctgaacaccgtggtgttcgcgggcgtctccaccgtcttccgcatcgtgctcggcctcggtctcgcgctgttgctcagctccaagctcgtcaagtgcaaggacaccctgcggggactgttctacatgccgaccatcacgccgctcgtcgccgtttcgttcgtgtggatgtggatgttcgacccgcagttcggcatgatcgaccgtgtcaccggccttgacatcaactggctgcacgacaccaaatgggccatgcccgcgatcatcatcatgacgatctggaaggatttcggctacgcgaccgtcctctatctcgccggcatcatgaacctgccgcgcgacgtgtacgaggccgcgtccatcgacggtgcgaacagcgtgcagaccttcttcaagatcacgctgccgctgctcaaatccagcacgctgttcatcgtcatcacctcgctgatcagctacctgcaggcatacgtgcagatcctcgtcatgaccgagggcggcccgggcacctccacctacaccatcagctacctcatcttcgatcaggcgttccagaagtacaacttcggcgtcgcctccgcgcaggccgtcgtgctcttcctgttcaccggcgtactgacgctcatcatgttcaaggtttcgggagatacggatctgtcatgaacaagaaacgcaacatcgtcggttggatcctgaccgcactacttttcgtcgtcgccttcatcaccgtcgtcccgttcatctggatgctgatctcgtcgttcgccccgaacagcgagatcgtcaaggtgaccggcggcctgttccccacgccgtccagcgtcgagaactacgtgaacatccaggagaaattcaactttctgcgactgtttgccaactcgctgttcgtggccggtctcaaaaccgtcatcgcgatctacaccagcgccgtgctcggattcgtgttctccaagatgcatttccgcggccgcgacctactgttcggcgtggtgatgagcaccatgatgatcccgtgggccgtgaccatcatcccgcagtatgagatgttcaccaactggggtctgcaggatacatactcatcgcttgtgatccccggcctgatcagcgccttcggcatcttcctgttccgccagtccatcggcggcatctccgacgagctgatagaggcggccaaactcgacggtgcatccgacacgcgcattttccacagcatcatcctgccgatgagccacaacaccatcgccgcgctcgccatctttacgttcctgtggaactgggaggactacctgtggccgttcctgatggtcaccgacgagaacaagcagctgctcgccgtcggactgaaggcgttcaacggccagtacggcactgattacggcggcctgttcgccgcgacctcgctggcgatcgtcccggtgatcgtggtctacatgatcttccagaagcagttcatcgccggcatcgccaccggctccggcaagtagccggagcagcctgagacggcctgccgggccggttgggccatcggcctgagacggccccggtctgaatcggcctgagccggctgccggccgggcacgcgttgcggcttcccaccctgaccgggaggccgcaaccacataccatgcaccatagttgaatacagcacaacgcactttctcgcgaagggggagaaccatggcaaagtcgcctgatccgaaagatttcacagtggatgcccgtcccgtcatgcgcggggagaacgtggtggccggcgattgctggcgcatcgggctgatcaccgattcgctcgtacgcttcgaatggtccgatgacggcacgttcgaggatcgtcccacgcagacggtgctcaaccgcgatttcggggaggtggtgtcatacgccgtcaccgaacgtgacggccgcgtcatcatcgacacagcggccctgaccatcgtctacgaccagcagccgttcagcaaggaaggcctgagcgtggtcgtcaaaggcgtggccgacacccagttcaacacctggcactacggcgacgcccagcgcggcaacctcaaaggcaccgcccgcacgctggacgaggcggacggcgccatcgagctcggcgacggcgtgatctcgcgcgacggctgggccgtcatcgacgattccgccgccaacatcatcatcgaaaccgacacagtgaacggcaaggcgaacccgttcggcacctgggtatccccgcgcgccaccgccgaaacggacttgtacttcttcggctatggccaccgctacatcgaggccgtacgcgacttctatcgcctgaccggccccacgccgctcctgccgcgcttcgccatgggcaactggtggagccgctactaccggtacacgcaggacggctatctggccctgatggaccgcttcaagcgcgagggcatcccgttcaccacctccgtgatcgacatggactggcatcgcgtggacgacgtggacccgaagtacggttccggctggaccggctactcgtggaaccgcgaactgttccccgacccgccggccttcctcgccgacctgcaccggcgcggcctgcgcaccacactgaacgtccacccgcgcgacggcgtgcgcgcgttcgaggacgcctaccccgaagttgccaagcgcgtcggcatcgacccggccaccgaggagaacgtggaattcgacctcaccagcccggacttcgtggacgcctatttcgacatgcaccaccgcatggaggccgaaggcgtcgacttctggtggctggactggcagcagggcggcgtgacccgccagaagggtctcgacccgctgtggatgctcaaccacatgcactacctcgactcagggcgcggcggcaactggccgctcaccttctcccggtacgccggccctggctcccaccgctacccggtcggcttctccggagacacgatcgtgacctgggaatcgctcgccttccagccgcagttcaccgccaccgcttccaacatcgggtatggctggtggagccacgacatcggcggccacatgttcggctaccgcaacgaagagctggaggcccgctggtaccagctcggtgcgttcagcccgatcaaccgactgcattcgtccagctcgccgttctccggcaaggagccgtggaacttcaaccgtgacgtgagcgccgcgatggtggacgcgctgcgtctgcgccacgcgatgatgccgtacttgtacaccatgaactaccgtgccgccgaagccggccgtccgctggttgagccgatgtactggcagaacccggatacaccggacgcctacgaggtgccggacgagttccgcttcggcaccgagcttgtggtcgcgccaatcgtctccccgggcgatgccgccgcctgccgcggccgcgccgacgcctggctgccgcagggggagtggttcgacttcttcgacggccgccgatacgtctcatccgacgccgccggccgccgactggaggtctggcgctcgctcgaccgcacgccggtgttcgccaaggccggcgcgatcgtgccgttgcaggacgtcgcggaatccggcgaagcgatcaactctatcgccaacccgcaggccctgcgcgtgctggtgttccctggtgccgacggctcgttcgtcatgcgcgaggatcgcggcacgtggggcgccaccagcgccgacaccgcgatagcgttcacgtggggcggggccgatgcgtcgcccagcgccttcaccgtcgcgccggttaccggcgatacgtccgccgtacccgagtcgcgcgactggacggtcgtgttccgcggcgtcgcgccggtcgatgcggccagcggcgtgcgtgcatggtccggcgaggctccggtcgaggcaacggtggcgtacgacgaggcgaccatgagcctgaccgtgtccgtcgtcggtatcagctcggctgccagtctgcgcatcgagattcccggcggtctgcgcatcgccgacaatccgatcgaatcggacgcgatggacctactgctgcacgcccagatgctctaccgcaccaaggagctcgcgctgcaggcggtccacaagctcggcatcggcgcgatcggcgccctgcgcaccatgaaccgtggtccgcgctacgccaacgatttctggatcaccgacatgcccgatgcggtggccggcgcgctcgaagaaattttgctgcgcagctgagcccggttgcagttttctgcaacatccgggtgcgccccggtatgcggcgataagtttggcatggttgccgaagagcgtggcataccgggtgcagtgcgtgggatggccttcgcgattgcactcaccgtgcggtcagtggaaaggaacctttcatgcacaaggtgaaacagcacaagggcgtcgcggtggccgccgcggtctgcgcggtcgcgatggcggcctcgctcgcgacccacgccggcgcggccggggaccggcgttattgactggctggcgttatcgagtgattggcggtatcaattagccggcgttattgatgagccggtgttgtcgattagccagcgttatcgaccggcactgaagcatgcagtacccactgcccgcgtttctcccgtacatcccaatccccgtgcgcatgcagcacacgctcccgatagtacgcaagcccggaatgccgcccctcaagcgtcgtgccaccttgacgtgggcggtccgtcacatcaatggtgacgcggtcctgagcggcggaaaccagcaccacgtaacgctgcgtcggatcggcatacctggcgatattgccaaacaattcccgcagaaaatcggcgacaaacactgtgtctgagttattcagcgcatcgatgccccagcgacaataacgtcgccgacacaccccatgcgctgcaattgcgcgccgccgctggcaagtctgatggcaaggccgatggcgcgcccggtaacaaggctgatggtaaggctgatggggcgcccggtaacaaacccgacggcaagcccgaaggcaaggccgacggtaagcccgatcagcacgatgccgggcgctcgccggtggatttcggcggcgatctgtggcccggtgacgccatcaagcgccatatcaatcagcagcacgtcggtatgacgactgccggattggcattccaaaatcgccacggccggggaagtagtgctccatacgtcaacgatgcggccatggatatgggtcgaagtcgccagccgcgcgatgcaatccagcgcacaggcgtcgtcatccagaatgccgatgcggaaagtcgctggtggttcatgcgctgattgagtcgcgtccgacatgactccatacactagccgctccgccccgctccagtcaccccttgcagttttctgtataagtggattttggctccagacgcaccactccgtcatcgccgtcagtcactcccaaaaaaacttgagccaaacatactcaactttttgtgttgaaattgggaatagaacttgccaaatggaagttgagtgatgtaggctcaagtttggaaggtccaagagacgaccaatcggaacttgggcaaagaacgtaagaacaaacgagtaattaaggagcacacattatggcacgcgcagttggtatcgatctgggaaccacgaattcctgcatcgcaactcttgaaggtggcgagcccaccgttatcgtcaacgctgaaggcgcgcgcaccacgccgtccgtggtggccttctccaagtccggcgagatccttgtcggcgaagtggccaagcgtcaggccgtgaccaacgttgaccgcactatttcttccgtcaagcgccacatgggcaccgactggaccgtcgacatcgacggcaagaagtggaccccgcaggagatttccgcgcagatcctgatgaagctgaagagggacgccgaggcatacctcggcgagcccgtcaccgacgccgtcatcacctgcccggcatacttcaacgatgcccagcgtcaggccaccaaggacgccggcaagatcgccggcctgaacgtcctgcgaatcatcaacgagccgaccgcagccgctctggcctacggccttgagaagggcaaggaagacgagcgcatcctggtcttcgacctcggcggcggcaccttcgatgtctccctgctggagatcggcaaggatgacgatggtttctccaccatccaggtccaggccaccaacggcgacaaccacctcggtggcgatgactgggatcagaagatcatcgattggctggtttccgaagtcaagaacaagtacggcgtcgacctgtccaaggacaagattgcgctgcagcgcctgaaggaagccgccgagcaggcgaagaaggaactctcctcctcctcttccaccagcatctccatgcagtacctggccatgacccccgacggcaccccggtgcacctggatgagaccctgacccgtgcgcacttcgaggaaatgacctccgacctgctgggccgctgccgcacgccgttcaacaacgtgctgcacgacgccggcatctccgtgagcgacatcgaccacgtggtgctcgtcggtggttccacccgtatgcccgccgtcaaggacctggtcaaggaactcaccggtggtaaggaagcgaaccagtccgtgaacccggatgaggttgtggctgtcggtgccgccgtgcagtccggcgtcatcaagggcgaccgtaaggacgtcctgcttatcgacgtgacccctctgtccctcggtatcgagaccaagggtggcatcatgaccaagctcatcgatcgcaacaccgccatcccgaccaagcgctccgaggtcttctccaccgctgaagacaaccagccgtccgtgctgattcaggtctaccagggtgaacgtgagttcgctcgcgacaacaagccgctgggcaccttcgagctgaccggcatcgctccggctccgcgtggcgtcccgcagatcgaggtcaccttcgacatcgacgccaacggcatcgtgcacgtgtccgctaaggacaagggcaccggcaaggagcagtccatgaccatcaccggtggttccggcctgccgaaggacgagatcgaccgcatggtcaaggaagccgaggctcacgaggctgaggataagcagcgcaaggaagacgccgagacccgcaaccaggctga

SEQ ID NO: 1468 - DNA, 24268 bp, Unknown
  R257_15m  MAG No. k141_26655
acgcggggtggagcagctcggtagctcgctgggctcataacccagaggtccatggttcaaatccatgccccgctcctgcgggcgaggccgtcacgattatacgtgacggcttttcgtttatccgccgtcgtgccctacggggccgcatatccgatcggggcgatgatgtcctgtgaaaaaacaacatccaagcccgctctgggcagaatcaatcaatctatggctcgaccccctcaaggcggcgggctactccccccaacacgatcggcacgcgccgatgccagatgtccgcattgtcgagggcgcttaagggcgatctagggacgtggagggcgacgacctcgccctgctgatccgatccgccaacggctatctgttccccggccggtggagcggccacgcctcggtcgagaccacgcaacggtacatcgccatgcccgacgaccagctgcgcgccgccgtggaagccacgcgcctcgccgcctaggaggatcacgatgttccgtttccccgactcgattgtggtactaaattgattgtggtactaaattatggtaccataataagcatgatcgaatgcgaaccgtcagccttcaagcactggttcacacagccacagatcgactacatattccggcatccggtggccgtgttcgaggtgcagtcgagacacgccggcgacagggtcatggcgatcctcggacacccggacgagttcagggaacgccccgtggagctgctggtatcccagcgcacccgcaaggtgttccacgcgatggactgccgccgcgaatggctctacaagttcgacgactaaaaacaccaaggaggacatcatgagcaacgaaacagactgggacgagctctcggacgaatacaccgagcacacccccgccatcatcggcgagaccatccgcccgcaaagggcgatcacgatggatgacatcgacgacatcttcgccggccgccccctcgccgaccagccccgccggaaggccgacgtgctctacaaggcatacctcacgcccgacatggacgcacaggtgcgggcacaggccgaacgagagcacatcggcaagagcgctctgatccgcaaggcactggccgcatacctgaccgccaatcaggcacagcccgcgatggcctgacccatatacggcgaaaagcccccgaacctgccgcgtgatacggttcaggttcgggggcttcttgttattcggccttggatgccttggccttgaggacgctggcgccgatgacgacgccgatggtcagggcgacggcgctgatggtcgtcgcggccggatcggcccacgtccagccccatacggggccgagggtctgcacggacggtcacggtacgggacggtggggcgttgctgccggtggcgacgctgccgccgccgttgtaggtgacgacctgaccggggcgatatggatgaaaggcgatcaggcagctacggtgcccagggaagtcggcgatcataaacgtctcgtcgttttcatcgcggaccttcagttgtctaatccacgggaggcgacaggcgtgaagtttctcaacgaagcggaagccgggcacaagtcgtatgtcacaatcgacttcgtgcccagctcccgtccttctgctcagaagcggagtgcggttcaccatccagccgacatcatcggcatcatgccgcagcgggtcaacgtatcggccagcgcatcgtccagtgcttggatcggtcatagcaacgacgccaccgaacgacgatggacagtatggcgcctatcgccagagctgacacggccagaaccgaggcaagcgacacatcgccacccgtgacgggcagtgacgggcgagtgttgggcgtggttgcctccgccggcgccggtggcgtctcgggtttctccggttcgcacggtttctccgactcgcatgggggcaacacccgcacacgctcccaggcatcgtcataccggctggacgccggggaaacacggtcatccccctcgaaccgccaaacgaacacgtaccacccatgccgttcggcggtcagatgcatgggagcgccatgcgcgtccaacgccccggcgccgattttgaacgtgccgttcatcgcgggaatctcccaggtggccagcaaccggtggttgtcgtcttccgtggggacctctcccccggatggcttgtacgcctcatcgttggaggggttgtcgggatcgccggaccaccatacgctcaccgtcgcatacggctgatccgccgcgaaaccataggtttcatcgcccgtgaactggccgtggtccgccgggaaccccgatacggtgatggtgtcgctgagttcggcgccgatatccgccgaatgttcggtaaccgtcgacatgacttcgaccttcccgcgccccacgttgctttccgaagcctccatgaacgggctcacccagtcgccggtaaggtattcctgcgcccgtttgctttgctcgctccgccggaacacccacacccaggtgccaaagccgccggtcttcggagtcagataggcggcgtcaccgtccggcttggccatggcccgcacacgaacccgctgccccacaccggtgaaggacgccttgccataagcactcggctcataacccgaggacgccagccgggcgagaaaagcgtccgcgctctcccgtgcgttcggcgcgatgaccttgcccagatcgtccttgccgagcccgtcgaaatagtatccacgcgcctgcagcttcagaccgggcacccaatgactgccctcgtcccccacgccgctggtcacatcatcgaacaccggcgaagccgcatcaagcaccttatcggacacctgcgtggacaccgacggaacgaaatccttgcgcacctggaacgtcgacgacgaaccgccggcggaagccatcgaatcgaaggccagcatgtcctgagtgctgtccatgacgtgcatccgcccatactcgtatgtggtgttcgccgtcacctcgccggcgccggtcgcctcccacgcgatcgaggatccggcgctcgtcgacacccccgagaacgtgttgccgccttggatgaaccgcgccggcccctgcaaggtgacggtgaacggcactcccgcgatcgcgtcaccgtcgcggttcaccactttcaccgagatggaaccgctgcgcaaagcctcggcatcggtgcgttccaccgtcgtgcccgcaggcgtcttgccggccgattgatcccatatccgggccgccttcgccacgatctcgggataccggccttgaatgaccgccatctgtctcgcccactcgtcccgatcgcgcccgaagtgatcctgcacgatgatgccgatcgccgcatgggtggcggcatccgtgtcgcggtaccggtcaaggatccatgccatacgccgggcgttctcatcggaggcaagcaccgtggtggggcctatcacatagtcgctcagtttccccgcttcgatgcagtagtacttgttgcccgaagcgtccagccccgcgacaccgacgtaatattccatatcgttgtatggaaacatcacgtgatatctttcgtcggcgggcgtcaacgtcgcggcatacgccgtattcgccgagccgaacaccactcccaccattattatcagaccggtcagcatcgctacgatggccatgccccgttgccgccatgtcgttatcatcattcgtcctttcctggtacgttccccgcatactgcactgtgtgcgggtaggccacgatcatggcagattttcattcgctacagccgatttttcggcctatgtggtccgagcttgccgtttgtcggcgagttgtggataactcttccgccgagttatccacctcatgcggttgaccgaacgtttacctgcaagttatccacaatgtgcaacatatgttcaaaagcctctagaatagggccttatggcagcagtacaacatcgcgcgaccacgcgcactagtaataccgataacaacaccacgaagacgaagtcaaagacgacttctgcccgaaagagccccgcaaccaagcgcaagagagtcagcgccgaaacggcacgcgccgcagcagcgctgaaaggcctggctgtcgaagcccccgcaccgtccatcgaagcaaacgagcccggccagttcggccgcatcaatgtcatggacatcactcccaccgaggagcgtggcatcttccccgcccgtgtggaactcggcgaaccgtttgagatgaccgcccaagtgttcatcgaaggccgtaccaaggtgggtgccaccgccatcgtgcgcaacccgcgcggcaaggaaaccatgcgccgggccatgacctgcgtaaatcccggcctcgatcgttggaccgtgatggtcaagtgcggcgaacacagcgatctgaagccttgggaggatggctacgcggccgtcaagcgtcagctcggcgaatggaccgtgaccatcgaaggttgggaagacacgtacgtctcctggctgcatgacgcccgtatcaaggtgcgtgtgatggacgacgtggacaacgcgctcaattccggtgccgagctgctggcccgttgggccgcaaccccggacgccggcctgaccgcacgcgatcgcaagaccttggagaaggccgctgagaccatggccgatcagacgctgagcgccgaggatcgcctcgccgccggcgacaaccctaccatcgccgccctgcacgagactcacccgctgcgcgatggcatctcccccagccagccccagcgtttcaaggtggaacgcccgaagtccagcttcgcggcttggtaccagttcttcccacgttccgaaggcgccaccatcgatccgaacaccggcaagatcattcagggtacgctgaagacctcgatggccggcctcgaacgcgccgctgccgaaggcttcgacatcgtctatctgccgccggtcttcccgattggcgtgaccaaccgcaagggccgcaacaacacgctggtcgccggccccgatgacccgggctcgccgttcggcatcggctccgagctgggcggccacgacaccgtggatccgctgctcggcaccatggacgatttcaaggccctgtgccagcgtgcacatgaactgggtctggaaatcgcgcttgatttcgcactgcagtgctcgcccgatcacccgtgggtcaaggcccacccgaactggttccgtcacaagccagacggctccatcgccttcgccgagaacccgccgaagaagtatcaggacatctacccgatcgacttcaacgccgacatgcccggcatcgaaaaagaagtcgaacgcatcatgaatctgtggatcgaggcgggcgtcaccatcttccgcatcgataacccgcacaccaagccggtgcgtttctggcaggacgtgattgccgccgtgaccaagaagcacccggagatcctgttcctggctgaggcattcacccgcccgggcatgatgcgtgccctgagctacgtgggcttcacccagtcccactgctacttcccgtggcgcaacaccaaggacgaactggaagagtatctgccgatcaccaatggcgacgacggctactaccagcacaacaccttctggcccaccacgccggatattctcaccgcttacgtgcgagacaacggcgtagccggccactgcgtgcgtgcggtgctggcagccatgggctcgccgtcctggggtatctacaacggttacgaactcatcgagaacaagcagcgccccggcttcgaagagcagatcgacaacgagaagtacgaggtcaaggttcgcgattggagcaaggccaagcagtacggcgtggccgagatgctcaccgcgctcaacaagattcgtcgcgcccacccggccgcgttgagctaccacaacctcaccgtgctgcctacgtccgaccagaatattctggctttcgcacgccacacgccggccgaactgaccggtaccggccaagcggacacgctgattgtggtcgtgaacctcgatggacacaacgcacaccagtcgatgattcacctggaactcggcgagctgggtctgcccaccgaccgcccgctcaacgtgcgcgacgagctgaccggccgcgaattccagtggggttgggacaactacgtgtctctggcgccttgggcggatgtggctcacatcctgtccgtgcagtgatgcggtagtgcaacggtaatgcaacagtgatgccgttgacgtgcatgggtttatcgtgtgcgtaaaccgctagaaatcctccccttgaggggaggatttcgtctgtttagacatagtgtcggcataatctcagcacggtttcttgagttccgcacctgttttgcaggcgcaaacagggtattgtggtgagacgataacgtaactgtcgattttcaaggagaaatgacatggcagaaaccttcaacgtcgttgtggaaattccgcgcggctccaagaacaagtacgaagtcgatcacgagaccggtcgcgtcttcctggaccgtaccctgttcaccgcaatgggttacccggatgactacggctacatcgacggcaccctgggcgaggacggcgatccgctggacgctctcgtgatgattccgaactccgtgttcccgggctgcgtggtcgagtgccgcgccgtgggcctgtaccacatggtcgacgaggccggcggcgacgacaaggtgctgtgcgtgcccgccgacgttcgtttcgatgacatcaaggacatcgacgacgtcaacgagtaccacaaggccgaaatcaagcacttcttcgagcagtacaaggctctggagccgggcaaggaagtcctgcccggagactactggaccggtgctgacgccgccgagaaggaaatcatcgcggcacgcgaacgcctcgccaacgaaggcaagtgattcgattccgaatcgtcggcgggagacctctccggaggcctcccgcctttttgattcgacgtgcatcgcgtgatatagtgctggtgtatttttcagctaggcgtaggcggcgtgtaggaacgctggtcgaggcccatcgcacggtaatccggcgatgaaccttctgtcgcaccatgattccgataatcattcaaatcctgcttatttctgtttccgtagctatggatgcattcgccgtatccattggcaaaggtctggccgtatcccgcgtacgagtgcaagacgccgcgaaaagcgccctctggctcggcggattccagatgctgttccccattctcggctatttcgcggcatctacattcagcaaatacgtaacccgattcgatcattggatcatcttcgccctgttggtgttcatcggcggcaacatggttcacgaagccttcgaagaagatgaggaaaactccaaggagaccgcccagttcgattggaagcatatgcttcccctggccgtggcctgcagcatcgatgcgttcgccgtgggcgtaagcctgaccttcatgttcaccaaagcccatatggcattcgccatcctcagcatcggtgtggtcaccggactgttctccgctgcgggcctgtacattggccgcgcgttcggctcccgctggcaggagccggcgcagatcgccggcggcgtggtgctgattctacttggcgtcaaagtgctgttggagcatttgggcgttatcgcgttctgatttagtgtcataagccccttcaccagaaagggctattttgtttgatttcaccgttccaatgcccgacgtaggattgggatggaaattcgattatctgagaggcgtatcatgaccgagatcacccaggagggttggaagaacaaagccctgagcatgttgttggcccaactgacgtcctatgtactgctcatcgcagccacggtcattccctcccctggcaccgtccccatcatccctttgattatcgccgctctgacgttggccgcatttgtcgtgttctggccgttccgcggcagcatgctggatcgtatcgtcactttggtgtttggcgcgatttctctgattttcgtcatcgtacctttcccgaccggcaaggttccgccggatcagaccgctgcggatggctcggtacttccttggtattcatgggcactggccatgggcctgctgctggtggtgctggtggtcttctccttcgggcgccagatggctcgtgagaagcgcgaacatctcatccgcgccctgtcccacgccgtgacttcaggtgtggcggctctcgccgtggccggctggtgcttcctgcctgatttgggcgcgatgctcgccaagggcaccgttgcgggaactgttgccctgatcatcctcatcgttttgggactggccttggccgtggcctccacgttgtgggtgcgtgacgccgatccggacccggatatccgctatccgtggatcggtaccggcctgatgccggtaatgctgatgggcgtgaccatcgccgcaaccgcactggtgctcggccgtgtcatcggttgatggacgtctgccgttccatattccgcaaacttgtaacccatgtgtccactacaagcgcgtagaataatgaaaaaccgcgcgaaagcggcataacgccgctgacgactcgtacagccacaccaagcaattgcgtaacacattgcaggataaagggggattagcgtgacggatcttacgttgatgactttcgccagcgaccccgccaccgttttgccatcactcgccctgctttctcatcgcgtccgcgtgctgccgatggatgcagccagcttggtgaagatgccggagaacaccattctgtttctggatgcacgcgatgatctggcgaccgccaaaaccttgtgccgtctcatccacgcttccggcctgtccacgccaatcgtgctggtgctgaccgaaggcggcttcaccgtggtcaactcccagtggggcattgcggatgtggtggtcgccaccgcttccccggctgaagtcgagggccgattgcgattggtctccgagcgcggcaacgctcccgcagccgcagcagccggttctcccgccgaatccaccaccacggtggaagatggccagattcgctccggcgacctcattgtggacaccaacggctataccgcctccctgcatggacgccccatcgatctggcatacaaggagttcgaactcctcaagtacttggtccagcaccccggccgcgtgttcacgcgcgcccagttgctgcaggaagtatggggctacgactactacggtggcactcgtacggtcgacgtgcatatccgtcgtctgcgcgccaagcttggcggcgaatacgaacacctcatcggcaccgtgcgcaacgtgggctaccgattcgacccgccggagacggataaggaaactgccaccgcacagcaggccgccaaagcatcctctgccgccatcggcaccgatgacgatacccccgatctcaacaccgccgcctgacagaccagcagcgctacaaaccatcaatcatcgacattacgccgcttaggtccatacgatgagagaaaccaaatccgcgcgtctcacgcgcatgcatgacgaatacgacattctgcgccaggtgattccggcacccgcttgcgcactgcatttctcgaatccgctcgaattgctgatcgccaccgtgctcagcgcccagaccaccgacaagcgtgtcaacacggtcaccccggaactgttcgccacctaccccaccgcccgtgacttggcggccgcgaacccggcccaagtcgaagacatcattcatccgctggggttctaccgttcgaaaacccagcatctcatcggactggccacggcactggacgaacggttcggcggcgtggtgccgcgcacgatggatgaactgaccagcttgccgggggtcggccgcaaaaccgcgaacgtcgtgctcggcaacgcgttcgatatccccggattcccggtcgatacgcatgtgatgcgcgtaaccggacgactgcgttggcggtcggattggcggtccgcacaccctgatcccgtgaaaatcgagaaggaaatcaccgcctgttttccgcccgaagagtggacgaatctcagccaccgactgattctgttcggccgggccacctgccacgcacgtacccccgactgcgccaactgcccgctgtccgacacctgccctagctatgcgccgcccgccggcaagagcacgtccaagcgctaactcatacctcatcatggtgaattgcggattctaggctgaatccaccgctagactgaaaaccatgcagcacagcaagcggaacaatacatggtccaagtgggggatttttctcggagtcgccgtggcactcggcgcactcgtggttgcgggatggacgttcatgcaaaaccggttccagccgggatcatccctcgatgccgatgtgaccattggcatcgacgatatgccgcaatccttggatattcggtccgattcctctgcggcagccgagcgcctgctcgtcgacaatgtgtatgagacattagtgaccgtcgatcaagacaacaagattcagccgggactggcgacaagctggaagacttccgatgacggactgaccgtcaccctgacactgcaatcgggcgtcaccttctcgaacggtcatacgttggacgcctcggacgccgtgtggtcgttgcaacagaacgtgaccaacaaggtggcggacgtcgacgaattgggcgatctgacgtcggtcgccaatccgaacgccaccacggtggtcattacgcttgccaagcccaatccgacgctgctgcgagcgctgtccggcaaactcggcattgtctacgattccgagtcgtccagtgccgattatcaacgcaaggccataggttccggaccattcaccgtggccgatttccagcctggccattccctgaagctggcgcgcagcgatacctaccatggcaccaaagcggccagcaatatcgttgaatttatgcaatactccgacgccgatgcgctcagcaaggccctgaccgacggcagtctcgatatggcggcaccggtttcggcttcgacggccaccggtttgaacggcaaggacggcttgaccgtcaaggagggggccactacggataaggtgctgctggcctacaacaacggcatcgattcgctgctctccgacgaacaggcgcgtaaagccttccgctatcaaatcgacgcagccggcatcgcctccgcccaacccgacgcagccggagcattgggcggccccatcagcccgctggaacccggatacgaagatttgaccggactgtatccgcatgacgaaaaccaagctgggcagatgttctcctacttcggtgcgcaatatctgactacggtgaatctggtggttcccgaagaataccggtcgttggccgaaaccatcaagcagcagatcgagcggcagccgcgccccacggtgaaccttgaagtgctctccgatgaggattatgccaaacgaatcaaggacggcaaatgggaactgaccgtgatgagcatggacggcacggatgatgccggcatattcgccgaccccgattccatgttccattacgaccataccgaagcgcaacaggcctatgcggatgctcgcgccgccactaatgacgccgattatgaggcacgaatgaaggcgtacgcccggctgatcagcgaggatgcggccagtgattggctgtatacccgcaaatgcttcactgtggcgtccaccaaggtctccggctacccgacctcgatgatcaatcgtcgcatgccgctggccgggttgacggtgaagtaggcaaccttcagtcacggacgggctacgcccgatagtctttggctcactatcgttcgatcgttcgtatctcgcctgcgaacagcctactgggctgtttactgtacagttcggcttgtcatgcaacgtgcataaactttggctttatgactgaaggcaaatccatcatcaacgccaacctcaccccgctgcccgacaaggtcggtgtggacggacttgaggacaagtggcgcgccgtctgggatgaagacggcacctacaaattccgcaatacccgcgaccgcaaggccgtctactccatcgacaccccgccgcccaccgtctccggttcgctgcacgtgggtcacgtgttctcttacacgcacaccgatgtgattgcgcgttacaagcgcatgcgcggctacgacgtgttctacccgatgggttgggatgacaacggcctgcccaccgagcgccgcgtgcagaactactacggcgtgcgcgtggacgtgtccctcccctacgacccggacttcaagccgccgttcgagggcaccgatggcaagaagatcgacgccaaggatcaggtgccgatttcccgcaagaacttcatcgagctgtgcgagcgtctgactgctcaggatgagaagctgttcgaggccctgtggcgcaagctgggcctgtccatcgactggtcgcagacctaccacaccatcggccagcacccgcggcgcgtggctcagaaggccttcctgcgcaaccttgcccgcggcgaggcctaccagcaggacgcccccggcctgtgggacgtgaccttccagaccgcagtggcccaggccgagcttgagtcccgcgaatacccgggcttctaccacaaggtggctttccgctttgaggacggcaccccaatctacatcgagaccacccgccccgagctgctggccgcttgcacctcgctgatcgccaacccgaatgacgaacgttacaagcagtacttcggccaggaagtctactccccgctgttcaaggtcaaggtgccgattctggctcacccggccgccgaaatggacaagggtgccggcatcgccatgtgctgtacgttcggtgatgtgaccgacgttgagtggtggcgcgatctgaagctgcccacccgcccgatcattcagcgcaacggccgtatcgtgatggacaccccggattggatcaccgacccggccggccgtgaggtctttgccgaaaccgctggcaagaccacgttctccgcccgcaagatcatcgtcgacaagctgcgcgagtccggcgatctggacggcgagccgaccccgaccaagcgtatgacgaacttctacgagaagggcgacaagccgctcgagatcgtcacctcccgccagtggtatttgaagaacggcggtaccgacgccaagctgaacgccgagcttatcgagcgcggcaaggaactcgagttccaccccgacttcatgcgcgtgcgctacgagaactgggtgcacggcctgaacggcgactggctgatttcccgccagcgcttcttcggtgtaccgttcccgctgtggtacccggtgaacgcttccggcgagccggattacgatcgcccgatcaccccgagcgaggatcgtctgccgatcgacccgaccatcgatgtgccggaaggctacgacgagtcccagcgtgatgtgcccggcggcttcaccgccgaaaaggacatcatggatacctgggccacctcttcggtgaccccgcagatcgtgacccactgggctgagccggatgaggcctccaaggccctgttcgcttccaccttcccgatggaccttcgcccgcagggtcaggacatcatccgcacctggctgttctcgactgtggaccgcgcgcacttggagaacaagtgtctgccgtgggcccatgccacgctgtccggctggattctggaccccgaccacaagaagatgtcgaagtccaagggcaacgtcgtggtgccgaacgagccgatcgagaagttcggcgcggacgccgtgcgttactgggccgccgccgctcgcctgggcctcgatgccacgtacgacatcggccagatgaagattggccgtcgactggccatcaagctgctgaacgccaccaagttcgcgctggccatcggccgtgaggacgagaaccatcacgtgggcgctgccgccgagacctcgtggaacccggccgatgtgaccgaaccgctggatcgcgccgctatggccaagctggctttggtggtgagtcaggccaccgaggcgctggaatcctacgagcattccaaggcgctggaagtcatcgaatcctacttctggcagttctgcgacgactacatcgagctggtcaagaaccgcgcctatggcactccggacgagcacggcaatgtgccgtccgagaaggctgtgaagtccgcccgcaccgctctgggtctgggcttggacgccttcgcacgtctgctggccccgtacctgccgtacgccaccgaggaagtgtggagctggatgcacgccggttccggttccgtgcatcgcgccgcctggccggtcgtggacccgtatgtcgaggccgccaccggtgcttcccccgagctgctgacttgggccggcaaggccgtggagcagctgcgtaagatcaagtccgaggccaaggtctccatgaagaccccaatcctgtctgtggcactgtccgctgcttcggaaggtgtgaacgcgattcacgccgccttgggcgatatcgcgcaggccggtcgcgtggtcggcaagttcgacttggtggccaagcacgccgaggaatccgccgccgaagacgcgcccgaaaccgaggtcgccgtcgaagccagcgagctcggtgagccgccagccaagaagccaaagcactgagtgttgcgcacaacaacagtaggtctcacggcaatgccgctcgttccgagcctacgggaagcccaccgggcttcccgcttaacggctcggccagccaagaagccaaagcactgagcgttgcgcacaacaacaaaagaggggaacctcctattgaggttcccctcttttgttttttgacgttcggatgacacgactgtgggacggcacgcaaatatcccgcattgtaagctggcggcccacaatagcgtgggccaccacgcgtgtcaaacgttttatatacgcggcgtcccacagaccgaatcaacagatccttggaatttagccattcttcaaactatagttagctctgacttacaagagggtgtgggacgccgcatcgaaaaagccagtttttgatgcggcgtcccacaccgataacgcactttacgcgtattgggcacctgtcgcatgcggattttcccgcatacaccatcacaccgtcggaatcacgatgaggtatcgggtttcggcggttttttgttgcgtattggggctatcgagctgcgcgacggcctgcgccaagagcgtgccagcatcgctgatctccacggtctcattgatcagcgcgctcatgtcatgcttgagcagcgtgccgccagtgccaaagtcgaacagtactggagcggtgtcaagattgttgccggaatcgccagtatcgctcgacttggctgagtcgttcgttcccgaaccatcgctcttggacgaatcgaacttacctccaccaccgatggccgaagtaagaccacccgcatagttcatcacatcgccagcagacatggacatggtgtcatcgaccagtgaggccttggaatgctgcgactgctgctgttgcgcggctttggcctgcttacgggcggcatcggccttacgcttggcttgggaggcccgggtcttgccgtagaacgattgcgattgcgaatcgaccaggccagtcagtgcctgagcctcggtcaccggaccggaagagacatcaccggacgagccatcgccatcgctgccggaagccgaggacgcgactccttcgaactgatcggagaatcgcaatacaatctggcgcaaggccgtggctttgcccgtatgctcggaggcggtggcaagcgtgctcatcgcggcatcgaccttggattgagcgtcggcgagttcatcgctaccgttggtttcggcgatggcttggctctcgtaagcagtggcgcccgaagacgtgccgccggtcagggcgctcaaattggccgtgtagacgtccgtgtatttcatcgaatacggaatcattgcggcggagagctggctctggccatcggcgtattgcttggagcctcgagtggcttcctccgaagcctcggcggccagatcatccaccagtccggtggtgccttgctgctggatgcggcgaatcacctcatccaacgcatcgaccgcaccggcatgctgatgtgcggcactgacgttgttcaccgcgttggccaagtcgagtacggcttgtgccaaaggcgtatccccggacagttcgccggccgtgcccatcaacgccggcaactgggtggaggtaccaatcgatccagacaggtgcgtggtatatgagcccacatacgcggccatatagtcttcaaacgtccgcttatgggcggtttcgcgttcggccactacggacttgtccagcgcacgctcattatcgcgcagggtttgaagctgctcgatgagctgttgatgctccccggaaccggcgtcggtcagtgaatcgaccagtatggcggcagaggcgacgagttgggcgacatccgtatcggcagcaggctgtgcggcggcattcgcggcatcgggattagcaccaaccaccggactgctggaattggaaggcaatacggcgagcgccacggaactcatggagaagtctttggcgttcatatagcagctgaattccaagccggttgcggcttttccagctgcggcgactacggtattggaaccttgcgtggttaccgtaatggagttgtcagcggaaacatcatcggctacctgcgtaggcacggtaaaggcgacaaccgggatcgtacggttggcctccttggtttgcggcttaatatcgatatacacgccgatcagtccagatgcgccggcaacctcgtttgcctcgacgtttggaccgtcaagcgagtaggtgacgctgactttccatggcagggtggcggcggaagcggggatacgagaaaccttgaacgtgccggaatcactattggcggaatcggtatcagtggaaccgctattgccggaatcggcactggcgccattgccggcgccgcccttccctaccacataccaacggaccggctccccttcggcatcggcgacggcgtacatatcacttgccgtagcgagcaccggaccgtaatcaaccggagtcggacgagacatccaagcaccgccgagaatcgaagccatgcacaatgcgcaactgaccagtgcggcaccacatctcatctacgtatcccattcatacagtcggccactatgggcattccattcccgtattaatgtagtcgctgcaggcaacttgccctatagacgaatatccgaaaggtgcccattcgctgcgggcgaatcaggcgaatacgtcgagtacgcccgggtcgccaccggcatcggcgatgcgctggtggcgcttcttggcttcggtaaccacgaattcacggtacatttcggcaatttccggatcaagcccggcatcgatggcgatgcggtggaggcgttcgatctgatagtcctcacgcttggtgtcttcgggcgcgaatccggcgttggctttgagcacgccgacctgcgaggtggccttgaaccgctcggccagtaatgcgatggccgccgaatcgatgttatcgatggtttggcgcagcgctttgatgcgcgccaccgcttgtgcggtttccgggtgggccgccgcctgggcggagtcgatggtggtcctttgccagccgctgctcgtttcgctcatagattcgaggatactcccgattgcggctttgcacgatgcgcaaagtcagatatctcagatgtcatagtcgccgtaggggatatggctggcatccgcatcgccgaacatggccgcaccattgcccactcccaaaacaatcgaacccattgatacatctttcatctcatatatcgtcagcgtgcatgtgaacgttgacggcaatactacaactgcaatgtgatagttgatgtatttgcatcatatacggcaagggctgcgccccgtatcaatcggggtgcagcccttacactattgttcagcggtctggtcagttgccgttgaccgcgttgccggtgttggcctgctgcacgatggcggcgaggaagtcgcggttggtggcggtcttcttgaggcgcggcaccaacgtctggtaggcctgctcgggctccatgccgcccagcagtcgacgcagacggtagataatcggcagttcctgcgggttggtgatgagctcctcgcggcgggtgccggaagcgttgatgtcgatggccgggaacagccgcttgtccgccagctcgcgggacaggcgcagttccatgttgccggtgcccttgaactcctcgaaaatcacctcgtccatcttggagccggtttccaccagcgcagaggagatgatggtcagggagccgccgttttcgatgttgcgggccgcgccgaagaacttcttcggcgggtagagggcctgcgcgtccacaccaccggacaggatgcggccggaggcgggggcggcgatgttgtaagcgcgagccagtcgggtcatggaatcgagcagtacgaccacgtcctggccgagctccacaagacgcttggcgcgttcgatggccagttcggcaaccgtggtgtgatcggaggccggacggtcgaaggtggaggagatgacctcgccctggaccgtgcgctccatatcggtgacctcttcggggcgctcgtccacgagcaccaccataaggtggacctcggggttgttggcggcgatggagttggcgatgttctgcagggtgatggtcttaccggccttcggcggggagacaatcagaccacgctggcccttgccgatcggggaaacgatgtccatgatacggccggtgagcttgtttggggcggtttcctgcttcaaacgctcctgcgggtacagcggcgtgagcttggagaactgcggacggttgagcgcttcttcaacgctttggccgttgatggaatcgatggcctgcagtggcacgaacttctggcgttggttgcgacgatcgccttcgcgcggggcgcgaatcgaaccatggacggcatcgcccttgcgcaggccgtacttcttgacctggcccatggaaacgtacacgtcgttcgggccgggcaggtagccggaagtgcgcacaaaagcgtaggagtcgagcacgtcgacgatgccggccaccggcaccagatcctcctgcggctcttcgcggcggctatcacggtcattgcgatcgctacgattatcgcgatcatcatagcgacgatcatcatcggcgttgtcgcgatcacggccacgcatgcggcggttacggcgatcgttgcgatcattacggttatcgcgatcgttgcgatcgctacggtcgcggcggctacgacgcacaaactcgtgatcgtcgttctgctcgccgtcttcggacgtttcctcgtgcttctgcgtgggcagcgtggccaggatatcgtcgaggtcacgcacggtttcttcgctgttttccgcagtgcgacgacggcggcgaggctgctcgtcctcatcatcacggactcggcgaatcagcggaacttccacatcctcatggcgctcgcggcgacgctcggtaggcgctgcatctcccaaatcgagcgtggccagcagatcgccggcctcatcggccttcttgcgcggcttgcggcgagcgaaatcggactggtcgtcatcgcgacgatggcgggccgcacgcggttcggatgcggcatcatcggcggccttacgacgggtgcgtcgcggttcggtctcgtccttcttgacatcgtcggccacgggaagcggcaaatcgagctgcggttccgtggcggccggagccggagccggcgactgggtggccacgtcagcattgtctgtggtattggcctcagcggcatcggactgcggagccttgacgaccttggcggttttggcggccttgggagcgcgcacggtcacaccggccggcggctctccaccattgcgcgccgcctgcagggtggcgagcagctcgggcttgcgcatggtcgacgtaccgcgcaggcccatctgtttagcgagctctttgagctcaggcagcttcatatcctcaagattctggctatttgccactggttgccctttccataccgaacagacccatgcctatccaggcgttaagagtgattattgcggttgcaccgctcatgaatgttcgctgcgtctctgagttttcacgaacttcgtttactgtacaacgccaactcgaccaacgcaaaacggcccgccgaaaaccaaaaaagctccctctgtgacgagggagctcaacaaggtttattcacttttcttcgtggtaggacttttcggtgttgacggaccacacgttcttcttggacgtcttgccggtcttgatgttgccgacggcctccatggcggtggccatggagtggtccatgttgttgtagcggtgctggccgttgcggcccacgcagtagaggttgccgaagccgtcgaggtactcgatgagctcgtccatgtgctcgtaggtgtcgaagtaggcggggtacgccttcttgacgcgctcacgatgggagtcgatgacctcgtccgggccgttgatcacacgcatgcgggtgagctcggagatcgcgaacttggtgacgtcctcctcgctcatgttccagaacgagtcgccctcctcgcagaagtactcgaggccgacccacacggtgtcgtccacgttcttgaccaggtacgggctccagttgttgaagatctgcagacggccgaccttgtagcccgggtcctgcacgtagatccagcagtccggcacgatcggcggattgccgagggtggggatgttggtggtgttcttgagcttcaggtgcttgaccagcaggcccacggtcacgaagtcgcggtacggcaggccgttggccacctcggtcatatcggccggggcgggcttggaatcagcggcctcgggatcgtcgccggccgcgtcgatggcgttgaccaggtccttgaccggcatcgaggagatgaactggtcgccggaaagctcggtgcggttgccctcggaatcctcgtacaccacggaagacacggcgccatcggtctggcggacctcgaccaccctggcgtcggtcagcaccttgacgccggcggcctcgcaattggactcgacggtctcccacagctggccgggaccgtacttcggataccagaactcctcgatcagcgaggtctcgacctccgcgttggagcgcttcctggggctaagcttctggaaggcgttcttgagcacgcccatgatggacaggcccttgacgcgctgggcgccccagtcggcggagatctgggaggggtggcggccccacagcttctccgtgtagccctcgaagaacatcgaatacagcttgcggccgaaacgattgatgtagaagttctccaggttgtcttccggcagcttgtggaacatggacttcaggtagctgaagccggccaccatggtgagcttgaagcccatggccttcaacgtgttggggctcagcgaaatcgggtaatcgaagaagtggcggttccagaagatacgggacacgcggtggcgcttgagcatcaccttgtcctccgtctccggatcggggccgcccggctccatgtcgtggtcgcggccgagcttcttgtcatcataggagggtgcgccctgcaacggcagaacggtcttccaccaatccatgatgcgttcgtctttggagaagaaacggtggccgccgatatccatgcggttgccgttgtgcttcacggtgcgcgagatgccgccgaattcgcgggtcccctccagcacggtcacgtcatagttttccgcgccgccatccttgacgagttcccatgcggcggtaagtccagccggaccgccgccgataatcactacggattgcttgtcggtcattatgctccttataaacgcaaaatcagagacagtttactagaagccccggaatcgcacaccgaaagatgagcgaatgcttacagaattctcccgatatacgaccgatgcgccgtcttccatcagcagaaaggcgacgcatccaatcgtgaggtaggggtattcggcaacgctgcgtcacgcacagcgcggcgaatcggtttggtcttgggctaattcgtcagcgacgaaccttccatagattcagcgagattcctgcaagtgcaaacagcatcatcttctatcagccgcaagcaaacaagacacacgatggcaaggttacgaatctgaacttttgctatgcgttgtatgaacaatgcgcgacgccccgccgtaagatgacggaatgccgcgcattgtcaatacaggctgtatcagacgattgcctgtcagtgaatatcgtcgggaatgtcgatatcggttttctggacttcttcgacgttcacgtccttgaaggtcacgatgcgcacggacttgacgaaacggctggaacggtagacatcccatacccatgcgtcagtcagctgcacatcgaaatacacgtcctgaccagcggaacgcacgttgaaatcgaccttattcgccaagtagaagcgacgctcagtctccaccacataggtgaacagcttgatgacgtcacgatattccctatacagcgcgagttcggcgtcggtttcgtaattgtcgagatcctcggcactcatgcttgtttactcactcactttccgtatcgcgtttgcggccgcggcccagcgtacgccaccatgcttcctttgagggcttgcgttccgcctggccgtacggccagttgctttcctcttcgagactgtggcgcgtgttcttctgcgtatcgtcgtggtgcccggcctgtggctcgactggctgtgcggccgccggcgtctgggcctgggactgcacgtcactcgtcgtgacggcggctgcctcaccacgctgtgccggctcgggttccggcttgttctgctggatggcgatggaatgctcgcgcgcggacagcgcttccttgacacccgggttgtcctcaatcaagtgcatgccaaaagcgtcaagcgaacgaatcggatcgtactcgtcgaccaacgtgtccatgacgataaggtcctggtatttgttgttttcgacatcccacaacgcgtcgcgcgaggtgccggacggcacgaatccgagcgactggtagaccgaaatcgaacggctgttcttttccggcacgctcacccagatgcggtgcatgcccaggccggccggttcgggcgcaaagccgtaagtcatcacacgcggcatggcgtcacgggagtagccgcggccacggtactcacggcccaagatgatctggatgcgggcggacttggaccagccgtcgatgtcgatgaggaaaatcatgccgatgacattatcggtgctggccgcatcgagctgaccgtcatcgtcatggtcggcgtcagtcaatacggcccatgcgatggtgcggcgggattccgggtcgcccacgccggattcggcgggtgcctgaccggcttcccaggcttgggagcggcggacccatgtgtgtacgatggcgcgttcggtgaccgcatccttgccggtgatcttggatgcgccatagaaggcatctagttcatccaaacgagccaggtcctcgatggtggcggggcgcaggtgcaccatttcgccacggattggcggaatgacgatgctctgtggcagatcgcgcttcagttgcgcttcggtagccatgctcagcgtctcgttggttgcggtcatcggtatacatcccccggttcggcttgtttcggctcacggtccagtgccgaacatatcttactcgactgggtgaacgctggaaatgctctgagacgactttcttacagaatcaataaaggctcccgctggcgggagctgtccaacgaatttgaactggaggatttccctacaaataagtgctcccgctggcgggagctgtccgcgaagcggactgagggtggtcatccgtacatggcgaccaccctcagtctcactccgttcgacagctcccgccagcgggagccagtgaatctaatcagcccttgatcttgcccatgacgaccttggtgacggccttggcgtcggcctgaccgcgcgtggccttcatcacggcaccgatgatcacgcccatcggcttcatgttgccgctcttgagcttctcgacgacatccgggttggattcgaacgccgcgtcgacggccgcctcgatggcaccgttgtcttcgacgatcttgtagtcgtgcttcttgacgacttcatccggagtgccttcgcccttaagcacgccttcgacggtctgcttggcgagcttgtcgttgagcttgccggaggcgatgagcttctc

SEQ ID NO: 1469 - DNA, 22361 bp, Unknown
  R257_15m  MAG No. k141_26737
accaccaagcaaagcccgatggatcccgttcgacttgcatgtgttaagcacgccgccagcgttcatcctgagccagaatcgaaccctccacaaaaaaaaattcatgaaaagcatccgactagatgactctcaaacatcatttccaaaaaagaaaaagacgagcacgtccttaaggaaggacgccctcaaaaaacctcacccctcatcaaaccctcccgggtacccgaccaccacgacaggcaatcaggcgaggaatgaactggcaatcattgactataaagaagtagtacaaacacgctcttgagttctcaaaccaccaccacaccagcaagacaggaaaccaaccagaagaaggaacccgccgcgctgagcggcaacaggtgaataacttacacgcatgtttggattcgcgcaaatcgaggcgcgcaaaagcctcaggaatcgttgcaatcacacggttccttcggcgtgtcgcaaacagcctatttgcgctgttctgataccagaataatccgttttgcattgccgatgcgtaacaaattcatgcgttcaccggcgtgttgcaagaattcgattgcgtgaccatccaggttcaccttctcgcaaccggtcatcgcatatgcaaaaagggacttccctttacgggaagtccctttcagtagctattgaagctcgctagcctcaggccagggtgttcgggtcaaccggaacgcccgggttcatcgtggaggtgatggtcgccttggtcaggtaacggcccttcacggtggacggcttcagacgcttgacttcgtcggccacagccttgaagttctcgtccagagcggactcatcgaagctcatcttaccgatgaggaagctcaggttgccgttcttgtcgacacggaactcgatcttgccgcccttgatgtccttgacagccttggtgacatccatggtcacggtgccggtcttggggttcggcatcaggccacgcggaccgagcacacggcccagacggccgaccttgcccatcatgtccggagtagcaaccacggcgtcgaagtcgaggaagccgccctgaacctttgcgatcaggtcgtcatcaccgacgatgtcggcgccagcctcggtggcctcggtggccttcgggccacgggcgaacacgaggaccttggcggtcttaccagtgccgtgaggcaggttgacggtaccgcgcacgagctggtcggccttacgcgggtcaacgctcagacggaacacggcctcgacggtctggtcgaagttgtaggcaggcatgctcttgagcagagcgatggcctcgttggcggtgtagaggttgttgcgatcgacgcgctcagcggcttcgcggtacttcttggaacgctttaccatctgtccttctccttatcagtccgtaaccgtgatgcccatcgagcgagcggtgccctcgatgatcttcatgccggcctcgatatcgcgagcagacagatcttccatcttggtctcagcgatttcgcgaacctgcgccttggtgacagagccgaccttgtgggtcagcgggttctcggtacccttctcaatgccagcagccttcttcagcagagctgcagccggcggggtcttgagaacgaaggtgaaggaacgatcttcgtaaacggtgatctcgacagggatgacctgacccatcttgtcctgcgtctgggcattgtatgccttgcagaagtccatgatgttcacgccatgcgaacccagagccgggcccagcggcggggccgggttggccttgccagcctggatctggagcttgatcagcgccgagactttcttcttgggagccatattatggttcttctttctataacgcggttcgaatggtcgccgtcctcagatccgcttgcctgctatcacgctcggtcttgactcgttatttatccgtgcatgctgtaggcaatcggcctgtggtcggtctcctcccgcaacttatattgctgtgctgtgctagcgggtcttccctccagacacaagctttcctattatgcaaatccacccggacaacgcaaaaagcccgaccacgatggtcgggctctgcaaagtttggggttaatccagcttctgaacctggtggaagccaagctccaccggcgtatcgcggccgaagatggacacgagcacggtgagcttttgggtggtgggctccacgtcggaaacaacggcggccatggtggcgaaaggtccatcggtgacggtgacctgatcaccaacggcgtaggagacttcgaccttgcgcttcttggcggcggcaggcttgtcgccagcggccttgagtgcctcggaagcgatcatcggagccatcattgccacgacttccttgcgggagagcggggctggatccttggtcgggccgacgaagccggtcacgccttcggtttcgcgaacgatacggcgggcattctcatccggccacatacgaatcagcacgtagcctggaacacgcacgcgggtgatgactttcttgcccttttcggtgtgcttctcgacttcttccatcggcacctcgacctggaagatctgatcttccatgccgaaggaggcgacgcgggactcgatgttggtcttcacgcgcttctcatagccagagtaggtgtgcagcacataccacttgccatcaagggaacgcagggacttggagaattcgtcaacggcctgctgaccggcatcggtttcctcggcctgctcggattcgttgacttcttcctcgtcctcatccagagaaacggtctcggtctgagtggaagcaacgggagcggattcagtcgcggccggagcggcggactcaacatctgcattgtcgacggatgcgtcagattctgcggaaaggtcagcaaccggttcagccggggcagctgcctcatcggcagcagcttcggaagcctcgacaacaggctcctcagccggcacggcgtcgagattctcgagattcagttcatcactcatgcgttgttattcaccttaggttgtgcggatcagccgaacacccacagcacgagcttgcccagaccgaagtccatgcccgtgacgagggccatcagcagcagcacgaagataaacacagccagagaccagaagaacagttccttggcagtaggggttacgaccttgcgaagctcgtcgatgatctgcttgataaacagaccgatacgcatgaagacattcggcttgactaccttttcgctgttgttcgtcttagccattctgtacctcgcgtcagctgcttgattattgaaaacttggcagggaaggcgggactcgaacccacaacctacggttttggagaccgttgcgctaccaattgcgccacttccctaggtgaaaatccacctcggcgtgcattccgtagagaacgcttcgccacggcgaaaccgccaagttgttatagtaacggctccggtggattatcgcaaatcgcgtgtcgcgcgcatggcatgtgcgcggcacacgactcttctcagttagcccattccttgaatcgacgcatgccttcggctaggtcttcgtcggccagtgcgtaggagaaacgcaggtaaccgggagcaccgaaggcctcaccagggacggcggccacgtgggcctcatccaacagtgcggcggcaaaatcagcggacgtatcggacacagtgccgttgggtcccagcggcttgccaagcaaagcggtgatgtccgcaaaagcgtagaacgcaccggtcggagtcgggcagttgacgccctcgatatcgttcagagcagccacgatcgcgcggcgacgtgcatcgaacgccttgcgcatctcatgcacctcgtccagcgggccagccacggcggccagagccgcacgctgggagatgttggccacattggaggtcatatgcccctgcagcttggtggcggccttggccacctcaagcggcgcgaccatccagcccacgcgccagccaggcatcgcataggtcttagccacgccgttcagcaccagcagctgcccgcggcattccggcacggcggcaccaatgtaggtggtgcgcgcgtcgtcgtagttcaggtgctcgtagatctcgtcggagataacccagatgtggtgctcgacggcccaacgaccgatcgcttccacggtttccggcttccagacggctccggtcgggttgttcggggagttgacgatgattgccttcgtacgctcggtacgggccgcttccagagcctcaagcgagggctcgaagttcacgtcggcaccggcgaatacttcgaccggcacaccaccggcaatcttcacagcctcggggtagctggtccagtacggagcggggatgatgacctcatcgccatcgttgagcaagatctggaaggattcatacacggcctgcttgccaccgttggtcaccacaacctggtcggcggacacctcgtagccggaatcgcgcagcaccttagccgcaatcgcttcgcgcagctcgggcaggcccggcgtaggcgtgtacttgtaattctttgggtcaaggcaggcatctgccgcagccttgaccacgtttgcgggggtcgggaaattcggttcacctgcgccgaagccgataacgtcaagtccggcggccttcatggccttggccttggaatcgacggcgagcgtagcgctcggtgccacagtgttgatacggtcggaaagagtctgccattgcgccatagtcatggcttccatgctaaacctacagcacgaaaaatcgccagagccgcactatggtgatgggatctgtcgtgtgacagatcccatcagtcacacaagtacaagattgtcgcgatgaaccagtgggtgggcgtactgggggccgaggaaacgcttgagttgggcggtgttacgcccgagcatctgcggaatttcttcggaatcgaagccggcgaggcctcgggccaggtgttcgccgctttcggcatcgatccagaccggatcgccggcggaaaaatcgccatgcacttcgagcgcgccggccgccagcagcgaggcacgcccgccgcgaatcgcctggccggcacccgcatcgaccacaatagtgccgcgcgggtcggcggcgaagccaatccacagacgacgcgacgaaccgcgggccttaaccggtgcgaacacggtgcccaccggatcgcccatcatcgcagggcccgcgttcgaggcgcaggtgagcaccgtggggatgccggagacggccgccacgcgcgcggcctcaagcttggtgaccatgccaccggtgccgaccttggagccggagccggaaacctggatgtcgccaaatgcatcgataacgttgggcacatattccacacggcgggagccgggctgggaaggcggtgccgtgtatagcgcgtccacgtcggtaagcaataccaaagcttccgcgcgaactaggttcgcaaccaatgcggacagacggtcgttatcgccgaatcgaatctcgttcgaggccaacgaatcgttttcgttgataatggggaccacaccaaggtccagcaatcggtccagcgtgcgttccacattgcggtactgggtggcacgaatcgtatcttcggcagtgatcagaatctggccgacgcgaataccgaaacggccaaaagcagtctcgtagcgagccataagcaaaccttggccgaccgctgcggtggcctgctgagtagccacgtcggccgggcgttcgtcaaagcccagcgggccgaagccggccgcaatagcaccagaggaaaccagtactacacgcccgcccatcagtcgtatttgggcaagggcggcggccagagcgtcgagcttgcctggatcgaggtgaccgctcggctgcgtcagcgaactggaaccgaccttaacgacgatggttccagcggatgcgaccatgcgccgcacctcggcctgactcggagtgctcatttattcctcggtttcaccatcttcgctggactcaccgtggccgaacagactggtttcgtcatggcgatcgtcgtcaacggtcgggtcggcccagtggccggccttgcgttcggccatcatcgcatcgcgcacggcggcacgggcgtccatcatctcgtggtattgggcacgacgttcggcgttggagcggcggtgcatgcgcgggtcctgttcctcaagacgcagatccttgcctcgggcaccgaggttggagccatcgagcatttcggcaccggcggagatggtcggatcccaatcgaattcgaccatacgggcaccgcgaccgatgcgcacctcgtcaccagggtgggcacccttgcggcgcagctcatcttccacgcccagcttggccaagcggtcggccagatagcccacggcctcgtcgttgtcgaagttggtctgcatgacccagcgctccggcttgacgccacgcacctcgaagaacacttcgccattgccgagttcgcggcgctcgaccgtgaactcaagcgcactgccgccctcgtcagcgcgacgcggacggcggcccttggtctccaatggcttgataaccacgcgcgtctcctcttcggcctgctcgcggttggccacttcctcacgcatctcatgcaccagcgcagacaacgcgaagttgagctccttcagcccctcatgagaggcggtggagatctcaaagaccttcagcccgagtttctcgaactccggacgcacgaactcggccaattccttggcctcgggcacatcgatcttgttcagaatcacgatgcgcgggcgttcgggaatcgggatggcgcccaatggcagttcgagcttgtcggcgtagagtgccaactcgttttccagcgcgtggtagtcggacatcgggtcgcggtccggttcaagcgtggcgcaatcaatcacgtgggcgatgatttcggtacgttcgatgtggcgcaggaactccagtcccaggcccttgccttcagaggcgccaggaatcaggcccggcacgtcggcgatggtgtatcgagagtcgccggcgatgacgacgccgagattcggcaccagcgtggtgaatgggtagtcggcgatcttcggcttggcggaactcatcgccgcaatcagggacgactttccggccgaggggaaaccgaccagcgccacgtcggcgatggacttcagttccagaatcacgtcgcgttcctcgccgagttcgccgagcagggcgaagccgggggcgcgtcgggtcttgttggccagggcgatgttgccgaggccgccggcaccgccctgggcgacgacgcagcggtcgccctcgtgacgcaagtcggcgagctgtgcgccgggatgcttggatttgccctgttcgccgcgcgcctcaaagacgacggtgccgcagggcacgggcagaatcaggtcctcgcccttggagccgtccttattgtcgcccaaacccatggtgccgctgccggcgacacgatgcggcatgaaacgatagtcgagcaggctggtggcgttacggtcggccacgaacaccacggaaccaccgtcgccgccattgccgccgttcggaccggccaacggcttgtatttctcacgacggatgccggccgaaccgttgcccccatcgccgcccttgacatggacggttactcgatccacaaaatcactcatattgattaccttacaaaaaagccgcgtccttacgggcgcggcttgaaaaagcttgacgctatatcgctcaggcgatgacgtcgacaaccttgcggtcgcgacgcacaccgaacttcacggagccatcggtgagggcgaacagcgtgtggtccttgcccatgccgacgttgtggcccgggtggaagttggtgccacgctggcgaacgatgatgttgccggccacgacggcttcgccgccgaacttcttcacgccgaggtattgcgggttagaatcgcgaccgttgcgagagctggacgcacccttcttatgtgccatgattcatggtcctttctataactcaggcaatcgccgtgatcttgacgatagtcagcttctggcgatgacccttacggcgagcaacaccagtcttgttcttgtacttctgaatgtcaatcttcgggcccttggcttcatcgttcacaacctcagccttgacggacaccttggccagatcggcggcggcgagggtgaccttgtcaccatcgacaacgagggagaccgggaattccacggtatcgcccttcttggcgtcgagacggttcacgaggatgacgtcgccaacctcgaccttttcctgatggccaccggccttcacaatcgcgtacattatcgttccttttatgttttggaaagctaccttgcctaacacgcaccgagcctgcggtcagacaccgagtttcaaatctacaccaccatgcggactaaatcaaatgatttttgtccgcgtgtcaagcacgacacacctgttactcttccgccgtattgttggcggcgacggcagcggcggcaatctgagccagtttggctttgacgtcggcgctggaaccagccggttcgggagcgggagcggtgccgcgaccgtgcttgttggttttgacgaacgggtcaccaccgcgaagcgcgtagggatcgtcgtagtcggccgaaacggtcggctgatcatgcaggatgaaaccacggcccttgcaggtcgggcattcctcggagaacgcctcgaccagaccctggccgatgcgcttgcgggtcatctgcaccaaaccgagcgaggtgacttcggccacctgatgcttggtgcggtcgcgtgccaggcattcgaccaagcggcgcagcaccagatcgcggttggcgggcatgaccatatccacatagtcgatcatcaccatgccgccgatatcgcgcaggcgcagctggcgggcgatctcttcagacgcctccaagttgcagcgcgtcaccgtttcttccaaggacttgcccttgccgataaagcggccggtgttcacgtcgatggtggtcatggcctcggtgcgatcgatgacaatcgagccgccggacggcaggtagacctgacgttccatgcccttacgcagctgggagtcgatggaccatttgtcgaacacgtccttgccttcgtgctcggccgggtcccacttctccagcttgtccttcaggtcgggggccatggtgtcaaggtattcctcgatacggtcgtagaccttgtcaccttccacgatgagcttgctaaagtcgtcgttgaagatgtcgcgcaccacgcggatggccacgtcgggctcgccctgcaggagtttcgggcgcttgccgtgccagaattcctcgcgcttggcgttgatgcgctcccactggcggaccagtgattcgagatccttgacgatggcgtcttcggatgcgccttcggccgcggtgcggataatcacgcccatgtctttcggggcgatcttggagacgatgttcttcagacggctgcgttcgcgctccgaaagcttgcggctcacgccggtcatgccaccggagggcacgagcaccaggaagcggccggcaagcgtgacctgagaggtcaggcgggcacccttgtggccgatcgggtccttagtgacctgcacgagcaccgggtcgccggacttgaacgccagctcgatgcggcgcggctgaccttcgagacgagcggcatcccagttgacctcgccggcgtagagcacaccgttgcgggactggccgatatccacgaatgcggcctccatgctgggcagcacgttctgcacgcggccaagatagatgttgccgacggtctgtacttcctgaatgtcggagacgtaatgctcgaccagaacattgtcttccaccacggaaatctgggtgtggtgttccttctcgcgcaccaccatcaggcggtccacgttctcgcggcgtgcaaggaagtcctgttccataagctggctctggcggctgcgctcacggcggttgtcacggcggcgctgcttcttggcctcgagacgagtggagccttccacatcggtgatttcgtcgatgtactgctgcttgcgggagcggcggaccagcggctgttcgctgttctgactctggtcgtcggtgccctcgccgttcttgccgccacgacggcggcggcgacggcgagtgacggtctgctcctcatcgtcctcatcacgatcacggtcatgatcatcgcgatcgtcacgacggcgggaacgcgtatcctcggcatcgttctcggcggtatcgtgctcgccgttggcaccggtttcgccgcgtgagccacgacggcggcgacggcgcgaacgggtgcgggtgacgtcggattcctcgtcgccctcctcctcggcaatcggcgagtaggcgatatcgtccagctcgaggtcttcctcaatctgctcgacttcggcggctgcacggcgctcctgggcgttcagacggcgggagcggcgcgaacggcgggagtccgaggtgtcgtcggcgtcgaaatcgtcgtgatcggcgttggtatcgccggacgcggcatcacgggaagcgtcacggtcggcggaggcgcggccgcggtcgtcgcgatcgtcgcggcgacggctgcgcggctgggcatcgccatcgtcgtggctgcgcgagcggcgggagcgacgagacgggcgttcgtcggcgtcaacatcgtcatcacgagtgtcagcggtatcgtgcgcatccacggcggcgggcagcaccggttcctggaacagcagggacgtcatcggcttgccacggcgcacggtctcgtggccagagggcagggattcgaccgcgtcgaacaggcgctcatccggggtgtcctcgtgcgtatccgcaactgcacggcgagaacgacggcgaaccgtacggtcttcgtcatcatcatccatatccatagatgcacggcgagagcggcggcgaaccgggcggtcctcgtcgtaatcgttatcgtccacaaccgaacggcggcgggaacgtggggcgtcatcgtcatcgaaatcatcgacactgacagtgcggcgcgaacgacgaggacgatcatcctcgctatacgagtcgaccactgtggaagcggcgcggcgcgtacggcggcgggttggacgttcggcggaatccttggaatcgctggattcatcggaatcgccggaatcggatgacttggaatcggccgcggtgccggcattgggaagcgcgggggcttcgaacagcggggtgcgttcctgcacttgcagttccagggaggcgccggcagcaccggtgccgcggaccacgcggcggccgccacgacgacggcgaacaggttcgacgggctgggaggcggcggcaggcgcagcgttcacggctgcagccgaatcggcattggatacggttgaattatcggttccgtcgttgacgaaaccttcacggttgtcagtgggcacaatgctcctcgcggcgcgctgcatcacgacgcctatttccaggcctatacgcttgactcacaccacgctctcaccgtggccgcgcgaaaacgcgccgcgtaaaggcaacttcgtctcaagtctgtcctgcgggtggcggacaccggcgcttgcgttgtctcattctcgagagccgcaaggggatcgacgccatctcgcacgctgatggttatgcagaaccaccatcctttagtatgccacatattttgtgcgggcgtggcccggcgaggctgacgttctctcggctcccctccctgcggtgacagctcccctcagagaggggagctcgagaggtgtcagaccagccagtcggtaagaattgcggtcatggcggccaggtcggattcgggcacctgctcgtcgtgcttgtgcgccagcagcgggtcgccggcaccgaggttgacggccgggatgccgagctgggagaagcgtgccacgtcggtccagccgagcttggccaacgggtcgcggccggtgcgctccttgaccagtcggaccagatcttgggcgagcggggcgttcaggcccgggcgcgcggaggggctttcgtccttcatttcgatgccgtagccctcgaacacgccgccagtggccacatgctcgccattgccgagttcggcaccggcatccgcgcccatcatcagagccttggcctcggccagcgacttgtccggggcgaagcggtagttgacgtgtacgcggcattcatccggaatgacgttcgtgcctttgccgccggagatcagcgtggcgttgaggccctcgcgatagtcgagcccgtccacgttcacggtggccggctcgtaagcgttgagtcggctcaggatgtcggccgccttgtggatggcgttctcccccatccacgcgcgggcggagtgcgctgccacgccgtgggtcacgacgtcgaagcgaatcgtaccgttgcaaccgccctcgatgccgctgttggtgggctcgccgatgatggcgaaatcgccggtgatccaatcgggatgggcctcgacgactttgcgaaggccgttcttttcggcgacgacttcctcatggtcgtagaagacgtaggtgaggtcgactttcggggtggtttccggcgtgcggccgtcgagcgtggcggcgaggtagagcatcaccgcgtcggaggccttcatatcggtggcaccgcggccccacagcacgcggtcttcgggatgagcgtgggcgatttcttcgcgaatcagcgaatcgccgggctccagccacttcggtgggaaattgtcgatgaccggcacagtatcgaggtgcccggccaagatcacacggttcggctcgccgaagtcggtgccggccaccactgtgtcgccgtgacggcggacggtcaggtgctcttgctcgttaaggaaggcctcgacctcgtcggtgagggggccctcgtggtcggacacggagaagttctccatgatctgggtgagcaggctgttcagctgctcggcagtggatgcggtgcggttcaattcaagcgtcatgtgaacagcgtaccgcgtgggcggcgggcccagcacacccactacatgagattttgcggccgaatacatttttatgtgccacactggggtggcgaaagggaggattatgtcaggtctaatcagcgccatgcaaggcttctgcgttatcggcatcgtgattgcggtgggatatgtcgccgcacgaatgcgaatcggcgggccgtccgctcagatggtgctcaaccgtttctccttcttcgtatcgagcccgtgcctgatgttcgccatcctctccaaggaaccgatcttcgacatcttccatccctcgattatcgtggcgttcttctccgccgtgctggtaggcgtggtgttcctggtgctcaaccgcatgttcttccacctgaacgccccggacgccaccatcggcgccctgaattcgctgtacctcaattccaataacatcggcctgccaatcgccacctacattctgggcaatccggctctggtggcaccgattctggtcatgcagcaggccatcttcacaccggtgggcctgacagtgctggacgtgaccaccaagggcaaggtctccatcaaggaaatcgccaagcagccactgcatcaaccgctgcttatcggttcgctgctgggcattgtggtctctgcgatttccgctaaaagcggctggttcccagtgccgaaattcattttcgacccgatcgacatgatcggcgattcagcggtgccaatgatcctgatggcgttcggcatgtccctacacggcaccaagccgctgcagcagaagggcgatcgcccggccatcttcacggtcgcggtcctcaagaacatcatcatgccaatcatcgcgttcctgctcgcctatttcgtgatgggcttccgcggctccgagctgtacgcctgcgtggtactcgccgctctgcccaccggccagaacgtgtacaactacgcggcccgctacaacgtgggcctcaccttcgcgcgcgacggcattctgatgagcaccatgaccagcccggtgtttatcgcgatcatcgcggcgctgctgagctgagccggcaactgtaatcaccgtaaaaaaaacttccgcgaaatccaccgtaggattccgcggaagcctgagatatacactacttgagaatcgccttaatcgcctcatactgctgagcagtgagttgcaccgctggctcacggatcagggtggaaatgttcagtcccttggccttgaccgcacccttgatggcggagatgaacaggtcggtctgatcgtacagcgccatcaggtggctgatgcgttcggcggcctcaattgcggtgccatagtcgccggcctcatatgcacggtgcagcgtaacgaaggtctccggctccacattggtcatgccgcagatcacgccatcaccgccggagacgcggttgacgagatagtactcgtcgaaaccggagaacaccgcaaaccgtggattcacggccttgaccgcgcgaatcaccttgcgggtgtggctgattgtgtcgaccgtgtccttgatgccgacgatgttcgggtgcgcggcggcaagctcggccacaagctccggggtcaagtcgctgccggtgcgcggtgggaaattatagaggatcaccggaagattcgtcgcttcagcgaccgcgccgaagtacgccttcgcgcctcccgcagtagggccgaagtaatacggcgaaacgaccacgagtgcatccactccacttgcttcgactgcccgcgcgaagtcgatcacattgttcaagttggtatcgcccacgcccgcgaacaccttgatgcgcccggcgacatgcttggccacgaagtcgaccgcctgcttcttgacgtccagagggaaggcatagaactcgccgatgctgccaaacaccagcacgccgttgataccggcctcgatcagatgatcgagatgctgcccccaacgttcatagtcgatgtcaccgtcgtccttggtgatggtgatggatgggcagatgatgcctgagaattcggcgctgcttgtcatgattgttcctttcgtcacggaataggggtgccgcacaagcggcaccgggtttgcggcctctcccccagtcgtcctgcggacgatagccccctcatcagagggggcttgggtttagtcgatgttgtaagcgcggcgggcgttgttttcgaagaagtcctcgtcctcgccgaacgtgtccagcatgagttggaagtgcgtggcaaaggtcgagttgagttccacgaccggccagttggagctgtacagcaccttcttcgggccgaatgtgtcccgcacgtatttcacgatgtccgggtccaccgggttgtcgccggaaaccttgatatacgaattcggcagttcggccaacgctgcgagtgcggcgcacgattcctcatcaagcccgggcacgttgccgagatgatcgatgatgaccgtcacttcgggaacctgcgagaacgccttggccatgtcgcccagttccgggccacggttacacagctcgaatggcaatcccttggcggccatcgcgcgtagaccggcgatgaattcgggttcgagcgcacggccccgcggctcggaatccacatgcagcggttccctgatgccatcggcgttgatcgggacacgcatccaagggcttacccgtccttgcaacatgcgcttcaagatcagaggacttgcattctcgtacagcagccggtcctcgagctcatggtcggccgcgtcgacctccacgtatacgccgccgaggaaattcacgccaaacttggcgtactgtgcggctaggtcttcaatcgtgtacttgtgttgcagcgagggcaatcctgccagccatggcagatcctgcgcatccggatcccagatatggaagtgggaatcgattacgttgagtgtcatgtcaggcctccttcagaccgatcttggaaccccagaatgcgtaccatgccacgaacaggaagcccgggaccatcaccaggatggcgatctcgatgcctgccgcatcctgaatcacaccgagcagcagcggaatcaacgcggcgcccacaatgctcatcaccaaagccgaggaaccggtcttcgccgcggaacccttgatacctttcagcgtcagggagaatatggtcgggtatccgatggaaatgaacagatacgccaccatgaacgcgatgacggagaccttgcccaggccaaggaataccacgaacatcagcacggctgaaatggtcatgtatacgccaagaatcttcgcgggatcgaatttggccatcaatggggtggtggcgaagcgtccgatggtgaacagcagggaaagcacggaaagcatcatcgccgcggtgccggctgtgatgcccgcgccccagtgcttgagcgcgtaggcggagaagaccgccatgccggccacttgcaggccgatgaaaatgaactcggcaagcacgcccaatgcgaagtgcgggcgcttgagcaggccgaagaaggagctgttctcggaggaggcgccgcccgcggcctcctcttcgtctcccggaggcgtgggcagcttgaacagcgcgaacacggcgagcaccacgaccagcacaacgccgatcacaatgtatatcgtgcgggtatcattcaggaactgcgccttagcggcgtcgaagccggactcgcctgatgcgacggtggtgccgagaatctggccaagaatcagcgggccaacgatgttgccgacgccgttgaaactctgcgccatgttgatacggaacgattcgcccttttcatcacccagcttggtgatatacggattgcagttggtctccagcgatgccgcgccgagcgcgataacgaacatggcgaacaggaacaggccgtagctggccatgctggtggcagggatcaccatgaacgcgcccagagcgaacaggaacagaccggagatgacgccgcccttataaccgaaacgcttggcgatcaagccggccggaatggccatgacgaagtatgcgccgtaataggccacctgcagtaatgacgcttcggcgctgctgagttctatgtagtttgcgaacggcgagttcaacgcgttcacgaggttcatggtcaaaccccagataaagaacagtgaggtcaccagtacaatggcgatggtcgccttggaaccggttgtgtttttggatgtcatcattgactccttagtgatacgagtttccccgatattgcctagcgagaagtggaccaccctgggccatgttggtaaacggatgacccagggcgcgggtgatacgggcggcatacgcggatacggcgtacggatggagcaatgatcaaagctccggaattgccgcgcgaatattcgggaaagggctgcttgtcagctcagcgcacggtcaaggtggacatagccgccatcgacgtacacccactgaccggtggtgtggctggagcggtcggagagcaggaatgccgcttcattaccgatctcttcggtggtggtcatacgatgttccagcggaatcttgtcggtgatcaccgacaggcgcgcctgctgggccgcttcatcgccaaaggtcttgatccaatcggcatagagcggggtccagcactcggagacgactatggcgttgacacgcacgctatcgtgcaccaatgcggcggcccattcacgggtcaggcccaggatcgcgcccttggcggccgcataggcgctggtcttgccttggccggtaagcgcggtcttggacgagatgttcacgatggatccgcggctttccttgagatacggcacggccgcgtggaccagctcgtaatagtgagtcaggttgccgtgaagcgattcctcgaactcacgccaagtagtggtctcgagatccttgttgtcgttctttccggcgttattcacaatgccatcgatatggccgtacttcttgtatgttgcttcgacgacgccggcgatcttgtcggtgtcgttgaggtcaagcaagtgcacatcataggtggtggtgtactgctcgatatccttcttgaactcgtcgagagcgctgtcgggtcgattaatcaccaccgggatggccccctcctgggccagttgcagcgtgatgcctttgccgatgcctttgaaaccgccggtgatgatgatgactttgccttcgagatgcagatccatgggaactccttcgtccatccttattctgcgtttcatgggtgttccatgtcacgcccggccggggcttcggcaccccagccggagtggttgtgtgttgttgtgttgagttgtgttgttcagttatgaatttccagttgcggtcagccgcgatacaggtacttctcggccgtctccagcgtcatttcggtaccgttgcccggagcggtcggagcgacgtagttgccgtccttgatctcggtcgggtggacgaaatgttcatgctggttatcgacgtattcgatcatgcggccgtccatcgtgccggacacggccacgtaatcgaacatcgcgaagtggcatacggcctcgcacaggcccacgccgccggcgtgcgggcagacgggcttgttgaacttcttcgcgagcaggtattcgagcacgatctcctgcggaccggccacgcgggtggcgtcgatctgcatgatgccgaaggcgttggcctgcagatactgcttgtacaggatgcggctctgcatctgctcgccggtggccaccttgatggggttgatggcgcgcgcaatcgtggcgtggccgatcacgtcgtcggggctggtcggctcctccacccaagccagatcgaagtcgtggaacttgttgatccagtcgatggcggtgggaacatcccacacctggttggcgtccacggcaagacgcacgtcggggccgatggcttcgcgggccttggccaggcgacgcagatcgtcgtcgatgttctggccgaccttgagcttgatctgcttgaatcccttgacctgcgtctcctccttggcgagcgcgaccatcttctcgtcggagtagccgagccaaccgggagcggttgaatagccggggtaaccgacctccagcagatgcttgatacgctcggccttgcccttctgaccctctttgagaatcgcaacggcttcctcagggcgcagggcgtcggtcatgtagcggaaatcgagcgtggagaccagctcctccggctccatctcgcccagcagcagccacaacggcttgcccgcacgcttggccttgatatcccacaacgcggagagcaccgcgccgatggccatatgctccacgcccttttcagggccaagccaacgcagctgggaatcatgcacgaacaggtcccatgcaatgcgcatgttgtcgagcagttcctcggtgttgcgcccaatcagcacctgcgacatcgattcgatggccttgcaaaccacgtcgttgccacggccgatggtgaacacgaatcccacacccgtgatgccgtcgtcggcgctggtggaaatctccacgtacgcagaggaataatccggatcggggttcattgcatccgagccggaaagcgtcgttgaagtggggaatcggaagtcatacgtcttgactttggtgatggtactcatgtgttcgggctccttcgcctggtgtgaaccaacggctatatcgtacgtccgaataaagaaatttgcaagcctatttgcgaaaatttttattcaaggccggacaaagggcaagaaaacacggaattgttacggcacaatgcgtcataatggtgggaacaacgacgaaatcgtctcagtaattgaacggcgaatatccaagagggaagcaccgatggttaacgatacatccacccacaagctcaaggtcggcgagctcgcaaaaatcgccggcgtatccgcatccactgtttccaaagtcatcaatggcaggtcaggcatttccgacgagacgcggagacaagtcgagcaaatcctcaaagatcacggttactcaaggcctctggtcaacaccaaactctcccccaccatagagctcgtcgtcgaatacattgagcacaacggcacgatggaactcatcaaatacgcctcatactgggcgcagcaggcgggcctcgccatcacggtcacccagaccaaccatggcgatgccacggaagactgtttccgcggcatcatcgatagaaatccccaaggtgtgattatgcagcagatgggcggtctgaccactcaagcgaagtctttgttgaaatcgcgcagtattcccgtggtcatcatcgacccaatcgataccgtcgattcggatgtgatgagcgtgtccatcgataactggaccgcaggataccaggccggcaaacacctgctgtcgctcggccatcgacgcatcgccgttatccgggggccggcgaacctacagaccagcatcgcgcgctatagcggattcaccgccgctctgcaacaggccggggtggatctgccggagtcctatatcgaacagggcgactacttccccgccgaaacaagctatgaagcagcctgccggctgctggaactcaccgaccgacccaccgcgattttttgctgcaacgacttatctgcagtaagcacgtatcgtgccgcacgagagcataagatcgcgttgccaaagcaattgtccgtcatggggttcgacgacattttccccgccggccaactcatgccctccctgaccagcgtgcatcagccgttcagcgaaatagcccaacgcgccgtgcagatgatcatcgacagccgcaagggcaatcagggtgatatgcacgtcatcctccccaccagtgtcgtcacccgggaaagtaccgtaccgcctcagtcatcggcccgataatcggccagattcaagctggcggccacccgattggacgcgaacgcacccaccgaaaccagcgcatagcacagcacaagcccgccgaagaagctggccagcgtggccggttcggtcatcgaagcggcgaacagaggggccataagcagcatggaacagccgccggccacgatcaccacgatgttgagcggggtgagtacctcgatgaatcgcgcacggttcaaggtcttgacatcagtgccctccaacaccagcatgcgatattcgccggcctgatcgtacacgctgccggcctgcatcacaccggagctgaccgcggcaagcacagcggcgaacactagcgtcaggatgccgccggtgccgatgtcgcgaatgaacacggtggacgggtcgttggcgtcaccgaccacggcggccgagccaaagaatccgcagatcgaggtgatgccggcgatgaacacggccagtgcaatgccggacacattgcgccaggcgcgcttcggattgtcgagaatacggcgcatggcaatcatcgtggccgcgtccttgggccgtttggccttggccttggcgcgagcggtgaccacccaggagcccacgaggttcaccagcgcgaagcacagcagcatgaaaccgatgatcacgccgtacatcactacttcaccggcctgagccagcaccatcggattcttgaacagaagaacggcaatcaccatgatgacggcgaacaccaccacacgccagccggacggcagcgtagtcgcaacgcgtgaagtgacgccgagtggcgtgatggccacgcgccgaagcgtgaccagcgaagagatcagcgccaacacggtcacgccaacaagcgtaatgatcaaggcaatcggccccacccacagttgctcgaacgtaaacgtctgattctggaaatgcagcaacatgattagggggatcaacacgcagtaccccgcgatgccaatcagcgcccccaccaaggcctgcccagccgcatcaagcgccgtaaggcgaataacttgccccgtggtcgcgcctgccaagcgcagggatgcgagccgagcgtcacgacgggacgcagccaatcgcgcggcggaaccggcaagcgccacgaacggcacaatcagcagcaggcaggcaaagaacgccagcacgacgtatgccgtggcgtattgatccaggctgtggggattggcgatacgctgcttccagatttccgctgttccgggtttgcaagcgtcgagattgattgcgcatccaatggtgtggtcggcggaggcgcgccacatgaacccatgcacgccgcccaaaacggtgagaaagatagtggtggctgcggcaaaagcaatgatggccaacaccgaagtatgacccgcactgccacgcgagccggggcgatggaacaatcgccacaatgcgaaagcgctcatcgtacgcctcccagctggccgtcctgcatggtcacggtgcgcgagcagaacgaagcgacgttggggtcgtgggtgacgacgaccacggcggaaccgttgtcccgcgcggcggccatgagaatgcccatgacctcgcggccggtggcttggtcgagcgcgccggtcggctcgtcggcgaagaccacggcaggtttgacggcgagcgcacgggcgatggcgatg

SEQ ID NO: 1470 - DNA, 25414 bp, Unknown
  R257_15m  MAG No. k141_26974
agaccgagggctagtgttcgaggtctacatccacgtcccgttctgcttgcggcgctgcggttactgcgacttcaacacctacacggctacggatcttggtgcgggggcctcgcgcggcaactatgccaatatggtcattcgtgaaatggccctgaccaagcagtggcagctcgaccacggcatcgaggagccaccggtctccaccgtgttcttcgggggtggtacacccacgattctcgccgcccgcgatctggtcgccatgctcgatgccatccgcaagatctggagcatcgcgcccgacgccgaaatcaccaccgaagccaacccggacacggtcaacgaatattacatcaatgagctcgctgccggcggcttcacccgcgtttccttcggcatgcaatctgccgtgccgcacgtgctcaaaaccctcgaccgcacgcatacgccggccaacgtggccgcaggcgttaatgccgccaataaggccggcctgcgctccagcgtggatctgatttacggcgcaccgggggagagccttgacgattggcgcacctcggtcacgaccgccatcgacctcggcgtgaaccacatctccgcctacgcactgaccgtggaacccaccacgaaaatgggtcgtcaaatcgcggccggcactctgcccaaacccaatgacgatgacgaagcagccaaatacgaaatcgccgacgacctgttcgccgccgccggcctcgaatggtatgaggtctccaactgggcccgccccggatacgagagccagcacaacctcggctattggcgcaacgtcgattgggccggtctagggccaggtgcccactcccactacaacgcggtgaccgaggctgaccacccccagtcggcttcgctgacagcccccgccagcgggggcaagtccgaagccattgcctctgcctcagctgatggacaggccaacgccgaacttggagaaaccaacgccgaactaggtatgatcaacgcgcatgggaacaactcccaagaaattcatgcccccgctggcgggggctgtccggcggatgccggactgggggtggtttctgtctcacacggtctgcgcagctgggacatcgcgcacccgcgtttgtggggcacggccatcaacgagaaccgtgtgccgtgggccgatagcgagacgatcactcccgaggaaaacctcgaagagctcatcatgctcgggctgcgcctgcacgagggccttggcctcgaccgcatcaaccgcgccatcaacgatgcaggtatgagcagcacgccccagactctccgaaccgtttcggttgaccaactcgcccccatgatcagcgaaggcctgattaccgtatccgataatcatcgagtggtgcccactcgtcgtggccggttgctcaatgactcggtaatcgaacagttcttcgattacgtcggtgtatgagtcggtggtatggtgcgcggcagtcgccattacctgttcgctagttgtggttacaccgtcagagggagcttttttgttttaccggcgggggagggaaccgcgtaggactacgtccggggcgctttgcacgtagatcaggcggttggcagtgccgccggtggcctccgcgtcatcgcggttggacaggatgctgtccacggcggcctggcccatttcggccagcggcagatgcacggtggtcagtggtgggaacacgtcggcggagtaggggatgtcgccgaaaccggtgacgccgatttcctgacccggctcgatgccgttggtgcgcaacgcggtcatcgcaccgatggccatcacgtcgttgagcgcgatgattgaatcgatgcctttgccgtcgtacagtgcgccttcgcccggcttcagcagtccggatcgggccatttgcatgacggccgcatagccgtcggtgcggctgaacttaccgtttgccacggctttcgggtccacggtgatgcctgcctcgtccaacacttccatcacaccggccagtcgttctttggaggagcggtgtgcgtcatcgcccttgagaatcgcagggcgcgtatacccggaatcgacgataagctttgcgatggcacgcgcgccgacgtcgttcgccacgtccacggccgggaagggcaggttgcggttgagtacgaacacggcatgtccgccggacgattcgtactggatgagttccgtctgcaacgcctggcgttccggcgcgtcggtgtattcgctttcggagatgatgatgccgcgcggcctggtggatacggacttacgcaccgcctccaactcctcgtgcggggtggctgccacgccgatggtcacggagatgccgcgttcggccgccgccttgaccacgccttgcgacacggatgcgaagtagggatcggagatatcggagaccagcagcacgatgttcggtgcagtgcctttggccactgcctgagcataggcgttgggacgatagttgagcttggtggctgcttccatcaccttgacatacgattggttgcgtaccttgcgggtgctgccgttgagcacacgggatgcggtggcgatggagacctgggcttctttggcgacgtccatcaatgtcgctggcgattgcgccttatcgttctgtacggccacgatcgaatcggtccttttcttccctgaaacggaaaacatgtctaaacgcttaccgcaatgatatcgcagttttgcttgcaatagtagcattgtggattggaaagcctgaattttgaacaaaaataatcacgcgaattatggaaagcgcttaccgttccgcgtgtcgtgcggtatgctcgaagcatgacgcgatacttatgtgcccctgactccttcaaagagagcctgaccgccatggaggcggcccgggcgatggctcaggggattgagaatgccgaccacgatgccgaggtccgttgcctccccatggccgacggcggtgaaggcaccgcacgtgcgcttgtcgacgccactggcggatcgatgcacgccgtgccggtccacgacccgctcggccgacctgtcgaaggccacttcggcctgctcgccgacggcacgaccgccgtggtcgagacagccgaagccagcggcctcgcactgcttgaagccaaaaaacgcaacccgttgattgcctcctcctacggcaccggcgaactcatactcgccgccgtccgttccggagccaagcgcatcatcgtcgggctcggcggcagcgccaccaacgactccggtgccggacttctgcaggccctcggcgttcgtcttctggacgggaacggcaacgaccttaagcacgggggagcggccctcgctgatctggccaccatcgacatcagcacgatggacccggctctcaagaacgtctccatcaccgccgcctgcgacgtgaccaacccgctgaccggtcccaccggcgccagcgccgtgttcggaccgcagaaaggtgcctcccaggccgacgtcgccacactggacgccgcgttggcgcacttcgcgcaggtcatcgaaagccggctcggcgtcgctgtgaacgacgtgccgggcgcgggcgccgccggcggtatcggcgccgcgctgaaaggcttccttgacgccgaattccgtccgggcaccgccatcgtcatcgaacaatccggacttgatgcggccgcgcaatgggctgacgtggtgttcaccggcgaaggctccatcgacttccagaccaagttcggcaaaaccccggccggcgtggccgaaaccgccaagcgccacggcaagcccgtgatcgccgtcgccggacacatcggcacgggcatcgacgaactgcatgaggtcggcatcgacgcggtattcggcatcgcccccggtgccgccagcctcagcgaactgctggccgacgcggccgccaacgtgacccgcaccaccgaacaagtcgtacgaaccctacaactgaagcagcttcacaagctccctctgatgggccgagccgtgaaggaaacgccggaggcgtttccaggcgagggcttgacgacagtcaagccagccgaaggctccataattgcgggacgagctgccgcggcaaagccgtgactgagggggagacttgtggcgcagccgcaaaaaatggcatcggctttcagccgatacagtcattcgtctgcttctctccctcagtcagctgcgctgacagctccctcgtcagagggagccacacaattcggaaagaaagatatgcgcaccatgctgtacaccaaggtgaccagcatgctgagcaccacgggcatcgccagcgagaaatacgccttcggaatcggcgccttttcgaagagttcgttatccatttccgtcccttggtgttttcgttcttcagtcactgcgcgggatgccgttcggcgtgcatcacaggcattgtagaggcaacagtgtggacaacgggcggggggagtatctcatgatgcggtgagggcgttgatgatgacgcatcgtgtattggtggccgtgtgcatcgtatgtgaacctgtgctggcacggcgtacacacgatgggaaaagaaagaatatatggaccccgttgtcccggttattgttcagttattactgtgttgaattattgcgttattcaattattgtggtgtgccggccgattgcggcctgcgggggattgccttcgtatgtgtcgtgcaatctcatgaatgggatcgttcgctagattcagcgagcgtccttgttggcggcgttgatgatgtcggcgaacatcttggagtcggcgtagccggcgcgggcgatggcgtccataccggagagggtgaaaccgcgaatcatggaatccatgaatgacataatgtgttccttgtcttgacttgcaaagccgtgggctttgcgatgtgttgttgtttacgttatgagacgggccgtgtgtgagcggcgagtcagggaagaggctcagcgagcgttcttatcggtgtcgttgatgatgtcgagaatcatctgggagttggcgtgaccggactgggccagggaagtggcaccgtacatagccagaccgcgaatcatggaatccttgagagacatcatgtttcctttcgttggtcaaaaccttgtggctttgagttttgtttatcggtttctttctgaaaccggtttcagaataacgcagtccgatgacaaacgcaaggggactattccgctctcggcgtttctggcggaatatcgccgttctatagataccgttcggtagttaagaggctgtctagtcgactttctgacggtcttgttctgggcgcatggttttcacgaaatggcctcatgtcgcggaaatcgtacgctgagtcgtcgtaagcgtacggtcttcacgaaatggggtctcatctcgtgaagaacgtacactgagtcgttctgggcgtacggttttcacgaaatggggcctatcttcaccggattttgggcacaccggccttgagcagcttggtctcaagattgatggggcgtagcagatcctcatagaacacatggacgatttcggtgacgccctgttcccggagatgccgatcacgtctgcggtcgtactccattttcgcctggaggcttgcgcgattcttgttgctggtgtcggcgtatttggccatgccgtcgtattctgccacgatgatgcggccgtctgcgagcttccaacagaaatcgacgcgatatggcattgcgggattgtcgggattcatgaactgcacctgcagcaggggaatgccgaaagacaattcggtgatctggccacgcatcaatgattcgccgccgttttcgctcaggggatccgcgtacttcagcagcttggtcacggagacctcgtcgcagacgctttgaatcatcagcgactgcacctcttcgatggtcgtcagggactttctcagagccgaatcgtatatgggcagcgcctgtgggaatgggaatgccgcgcagtcgagcagcgttcgcgccggagtcgtcaagagaatgccattatgcttccgcgtcggaatccgattgatatagatgcggttgagacgcgcctcgtctccgccgccgatgccggacttcgaggcgatgtgcactgtgccgtcgtgcagggaatagttgtgctgcagtccgtatacgcacgccgcactcaaccccgcaaatacccactgagggtggattgcggacagcgcacgtatgacctgcaatgactgttgctctctggtcatggtgttccaaagtattcggtcggcgtacaggttcttatacggtgacaccagctccccggcatgcaggcgacgtttcagggcgcgccgttgcgcatcactggtgccatagcagcagcgacgctcctgcttcgcctgctgcagcagtgcagaaacttccttgtgttctttcatatctcgacgctaagggtgattttgattgttgcacaagctcaaccggcaaatgtgaatactatgtcacgcgaattgttggtgtggataacttgaatcgacgtcgacggctttgccgacggtcttgtcggaggcgatattagcctaggacaccttgctgcgccgccttccataccgagaacagtcatcagtgacaccgagggcatcttcagcgtatgttcttcacgaaatcagctgccatttcgtgaaaaccgtacgctcagaatgactcagtgtacgttcttcacgagatgaggccccatttcgtgaaaaccgtacgttgacgacgattcagtgtacgttcttcacgaaattagggatgatttcgcggaaaccgtacactcaccgcaactcagcgtacggttttcgcgaagttattgatttggatataggttccccgtcatgaactacaatgaatcgcggcgaaaaacggggaaccgaagtcggagcgcggctgaacggatatgggtgtgactggatgactgccatggtgatgccggttctccttgacgtacgcaacaacaacaactgacaacaacaggggagacaaggatggcgagaagtgcgggccgcacccgaccggtgatcaaggacgtggccagactggccggagtctcggcaccgaccgtctcccggtatctcaacggcaccgtcaatgtcaccgaagacaagcgtgaacgcatcgccaaggccatcaaggagctgggctatgagccgagcattgtggcgcgcgccctgtcgaaccgggagatggactccgtggtggtgttcgcggccaatccttccgccttctccacgtccgaaacgaaccatggggtcgaggccgccgcccgtaaacgtcggttcctgctcaatatcgtttctttggatgagtccgacatggactccgtcaaggctcgtgtgcgcatgggtttgtcgatcaggccggcgggcgtgatcgtctacgagtacgaccgggccggcatcgccgcactggaatacattcccaaagatatgccgatggtcgtggtgggtggcagcttcggcgacggcgaataccagatcatcaacgccgaaagggatggtggccgttggatgaccatgcatctgctggatctcggccatcgcaccgtgttccatgtggggcgcccggaaggaccgaccgataacacccgcaccaatgggtggcgtgacgcgctcaaggagcgcggcgtcacggtacctgacccaatcatcgtgcccgacgatgatttggaggagtcggtcaaggctgggcgcaccttgggccgtcgtggtgatgtgactgcgattttcgccggcaacgacgagaccgccatcgctgtgatccgaggtctaagggaggttggtcgccgcgtgcctgctgacgtgagcgtcgtaggctttgacgaccgcaacttcggtgccatgtggaatccggcgctgaccagttacacccagaacttcctggacatgggggagcggtccttccggatgctgttcgaacagattcaggccaagcgtgccggcgatgacgcgccgccctcgcaggtcgaagtggtgcaaggcaagccgtgtctgcgtgcctccgaacgcgcgtacggcgacggcgaaatcgcgtagtcgatggggcgtgcgtatcaatcgatagtgactgtagcgcattcatatcgtgacgaggagtctcccatgccgaactgtaagcgcttacctcaaatagttcataatgtgatttacgtcatactaatagatgttctgaatcatagtgttctgcaaggattccttgcggaaaatggctatttatcaacagttttcgaaaagtccgcatgatgggcgactgtgagcacactttatggtaatcgttttccgtagtgttattgttacagtgtgacttttgaacaatcggtaactctgaagactcagccccagacctcgggcactatctcagcggcagacgccgcgatgcaatcggcccgcgacgaacgcatccccggcaaactcatctgcgcgatcgtggccgtcggctcactcgcattcttcggcatcctgaccgaaaccgtgatgaatgtgctgttcccgcagctgatgggcgtgctccacatcagcgaggccaccatccaatggctcgccaccggctatccgctggtcgtgtcgattactgtgccgctcagcgcatggctgcgccgtcgcttccgccagcgcagcatcttcctggcggcaacgcgatgttctccacgctgcagcagttcacgggtgcggccggcaccactgtggtgggctaccgtgatctccgtgttccagtccggctcgggcaaggtgggttccgccggctatgccgccgccaccgtgaccggcgcatagattgactacgcgatcatggctgtggtcatcgttatcgttatcgtgttcgtcgccatgctccacgccctgcgtaaccggaagtagatggtaagtcgagtggcaccatgctaccgcgcaatggctgggcatggagttttggctaggaatcgttcgacaggcgttggcgcggccgctgagagcattcgcgtcgaaaggtttgccggagctcgttcggcgtggaatgggccgattcaccggtgattgttggtcaaacagccaatgctgacccttctgccaatggttagcgaggttcctatcataagcatttcggagagcgatctcgaaaaaggcgacatccttcacgaggatttgaccaaggtcaacattccactcgtataaagtaaggctgtaagcgcatcttggtggcaagcgtcaaggtatgtacggaatcgcggggcggaaagccactcctcaatccactgcggattggtaataacggatgattgtaacgcatgaatcacgaggcccccttacctcgtattgcaatgccccggtgacatgaaaaacggcggtcaacacggggcttgtacattaaggatacaggaagggtagttgtaagttgctgatatgccgtgttttttacgatagtcatcggcctctcccatacggcggaacaggaactggcggatgccgagatgccgtgattcggcgggagggcctgtactggcccagtccttctgctcggtagcggtaccgctacgccgactcttcccgacgctccagtgccgccgatatcagtgaatgcccagcctgatgtcggtagagttaaggctattggcttggtctcgacggtgagacttctccaatggccaatatgcactgttgcaaaggagtatgcggtatgcaaccaatcaaagccattcaatacggctgcggcaaaatggcgaagtacacgattcgctatatgcacgagaaaggcattcaaatcgtcggtgccatcgacgtgaatccggaagtcgtgggcatggatgccggtgtgtttgcaggcatcggccccatcaatgtgccgattcgcgccgatgccgaggctgtactcaacgagtgcgacgcggatatcgcggtagtcacgctattcagcttcgagaacgaaatcgccaccatgtgcgagcagtgcttggcccgcggcatcagcgtgatcaccacctgcgaggaatgcatctacccgtggaccaccgatccggccaccacgaaccgtctcgacatcatcgccaaggaagccggtgccaccatggtcggctccggcatgcaggacatctactgggtgaacatggtctccaccgtcgccgccggatgccacagcatcaagaagatcaccggtgcggtgagctacaacgtcgaggattacggcctggctttggccaaagcgcacggctgcggtctgaccgccgaggagttcgaggccgagcttgcgcatcccgaaaccgtggtgccctcgtatgtatggaattccaatgaagcgctggcccagaagcttgggcttaccatcgcatcgcagacccaggccagtgtgccgtatttcagcgatgtcgacgtgtattccgagacgatggacgagacgattccggtcggcaaatgcatcggcatgtccgccgtggtaaccaccgaaacgaatcagggcatcacgttggaaactgcctgtatcggcaaggtgtacgggccggatgatggcgatatgtgcgattggaagatcgagggtgaaccggacgtggagttccacgtggtcaagccggcgaccgtcgaacatacgtgcgccacaatcgtcaaccgcattccggacgtgctcaacgcgccagccggatatgtgacggtcgatcagctcgatgaaatttcatatctcacgtatcccgccgcgctgtacgtggcatagacccatattttcagggatgaaggccggcactcataagggtgccggccggtatcaggcggccagagtcgacgtgcgtggcatcacctggaactggatatggtcatgggtgatgtcatcgggccgttcatgccgtaggttcgactcgatcagcgtcaccatgcgatcgataaccgtacgagccattgcggggacgtctatcgccacagtgctaatgggtgggttggcgcagtcggagaaggggatgccgtcgaatcccatgagccgtacgtcgtcgggcacgcggatgccatgttcggtgagttcgcggagcgcgccgatcgctatggtgtcagacatgcacaggatgccacaatcgcccgggacaggcgtcaggaccgcaagcagcatcctgctcggcatcggcggcgacatcgccaacttcaaaagcgcggcccacctggccgcccacgccggcatcgctccggtcaccggccagtccggcaccagcatcaaaaggcgagaaaccctccagacggggcaacaaacgcttatagactattgcgccttgtataaatgcgaactgccagtcaaccttaccgttgactggcagttcgcatttatcgctcccgctggcgggagctgtcatgcgaagcatgactgagggtggtccacagccgccaatccgtaacatcacccaacgcagcatttcacgatacggacgtttccgtatcgtattttcgtgtggtcaaatagacatttcgggcgaaaaagttcgaaatacccccataactggccataaaaacaattgcttgagaatcactattgacttttatggcgactcggtatatggacacgcgaaacgaaaatgacatggagcaacggtactgtgtcaacagcaatgaacgaagaggcacgattcccttacgtgcccacaagcaattgaggtgattccggtgacattcaaagccccgctcgatctcacggtccacgctccggacggtatgtatgatcccgccaacgagcatgacgcctgtggtgtgggtatggtcaccactttgaacaagcgtcctgaacgcaaaatcgtcactgacgccattgaggtactggtcaatctcgaccaccgcggtgccgtgggtgccgaggagaacacaggtgacggcgccggcattctgatgagcatgccggatgagttcatgcgtgccaccgtgcccgccgaactgcccgaagccggccactacgccgcaggcatcgccttcctcgaccgcgacatcgaaacctccggtcagcaggaacaggccattgccaagatcgtgcgcgaggagggccttgaagttctcgcatggcgcgtggtgcccaccaacccggacggcctcggcctgcaggcccttgccgccatgccgggattcaagactctcgtggtcgcctctccggacggtgctctggccggcgtggacttggatcgcaagaccttccgcatccgcaagcgcgtcgagcatgaggtaggcgtctacttcgcttccctgtccgcccgtaccatcacgtacaagggcatgctcaccaccatgcagctcacccacttcttcgaggatctgaacgacgagcgcatgaaggccaccatcgccatcgtccactcccgcttctccaccaacaccttcccgagctggccgctggcccagccgttccgtctgctggcccacaatggcgagatcaacaccattcagggcaaccgcaactggctctccgcccgtgaaggtcgtctgagcagcgaactgctcggcgagttcgagccgctgctgcccatcaccactccgggctactccgattctggcaccttcgacgagtgcctcgaactactgcacctcgccggccgttccctgccgcacgccatctgcatgatgctgccgccggcttgggagaagaacccggatctcgatccggacgtgcgcgccttctacgagtacaacaacacgcttatcgagccgtgggatggcccggccgacatcgtcttcaccgacggcacccaggtcggcgccctgctcgaccgcaacggcttccgccccggccgctggcagctcaccgacgacggctacatcgtgctggcctccgaggccggcgttctgccggagatcgcgcaggagcacatcgtgtccaagggccgtcttgagcccggcaagatgttcctggtcgacaccgccgaaggccgcatcatccccgatgaagagatcaagaagaccctcgcctcccagcacccgtaccgcaagtgggtggaaggcaactcggtcgagatgagcgatctgccccgccgcgagcacgtgagccactccggacagtccgtccagcgccgtcagcgtgccttcggctacaccgaagaggatctgaagctgttgctcactccgatggccaacaccggtaaggaaccgctgggatccatgggtaacgatgcgcctatgcccgcactctccagccgcagccgcatgctgttcgactacttcacccagaagttcgcgcaggtcaccaacccgccgctggactgggagcgtgaggagatcgtcacctcgctcgaatccgccatcggccccgagcctaacctactggccgattccgagctgcacgccaagaagatcctcatcccgctgcccgtggtcaactctgatgagatggcccagctcaagcgccttgacaaggcccgcatcctcggcggctactatcgcccgtacgtggtcaagggcctctaccaggtcgccggcggcggcaaggccctcgaagagcgacttgacgagatctttgccgaaatcgacgaggccatcgccgacggcaagaacttcatcgtgctctccgaccgtgaatccaaccacacgtggggcccgatcccgtccctgctgctgacctccgccgtgcagcaccacctgctgcgccgccacacccgtacgcagatctccatggccgtcgaggccggcgacgtgcgcgagattcaccacgtcgcactgctgatcgcttatggtgccgcctgcgtgaacccgtacctggccttcgaatccgttgaggatttggcccgtaacggctacctcaaggtcgacgcggacaccgccgtgaagaacctcaccaaggcgctttccaccggtgtgctcaagatcatgtccaagatgggcgtctccaccatcatgagctaccgtggcgcacagctgttcgaggctgtgggcctgagccaggaagtcatcgacgaatacttcaccggcaccacctcccgtgtgggtggcgtgggccttgacgagatcgccgaagaagtggccatccgtcaccgcgtggcctacccgaaccagtggagcgcatccccgcaccgcaacctgcgcacgggcggcgactacaagtggcgtcgtaccggcgaggaccacctcaacgatcccgaggccatcttcctgctccagcagtcgacccaccgtggcgactaccagatgttcaagaagtattcgcaccacatcaacgacacgtcgaaccgactcatgaccctgcgtggcctgatgaagttcaacaacaaccgcaagccaatcgacatctccgaagtcgagccggcctctgagatcgtcaagcgcttctccaccggtgccatgagctacggttccatctcacaggaagcgcacgagacgcttgccatcgccatgaattcgattggcgcacgctccaactccggtgagggcggcgaatccgacgatcgtatcaacgacccgcagcgctacagccgcatcaagcagatcgcgtccgctcgcttcggcgtgacctccgattacctcgtgcacgccaccgacctgcagatcaagctcgcccagggcgccaagcccggtgagggtggccacctgcccggtgccaaggtcccgccgtggatcgccaaggtccgtcacgccaccccgggcgtggagcttatctccccgccgccgcaccacgacatctactccatcgaggatctgaagcagctgatcaacgatgcgaagatggccaacccgaaggcacgtatccacgtcaagctcgtttccgagttcggcgtcggcaccatcgcggccggtgtggccaagtgccatgccgacgtggtgcttatctccggctatgacggcggtacgggtgcagccccgctcaacgccatcaagcacgccggcaccccgtgggagatcggcctgtccgaaacccagcagacgctgatcctgaacggcctgcgctcccgcatcgtcgtacagtgcgacggcgagctcaagaccggtcgtgacgtggtcatcgccgccctgcttggtgccgaggaattcggcttcgctactgcggccctgatcgtggaaggctgcgtcatgatgcgcgcctgccagaagaacacctgcccgcagggcattgccacccaggatcctgagctgcgcgcccgctttaagggcaagcccgagtacgtggtcaacttcttcatgttcatcgctgaggaggtgcgcgagatcctcgcccagctcggcttcaggactcttgaggaggccatcggccacgttgagtgtttggatcaggacgaggccatcaagcgctggaagtccggcggcatcgacctgaccaacgtgctcaagcaggccggcccggtacccggcacgatcctgcaccagaccatcgagcagaaccacgagctggagaaggcactggacaacaagctcatcgaacttgcccagccggccctcgaacacaaggaacccgtgcgcatcgaaatgccgattcgcaacgtcaaccgtacggtcggcaccatggtcggctacgagatcacccgccgttacggcgaggaaggtctgccggacgacaccatcgacatgaccctgcacggttccggaggccagtccatcggtgcgttcatcccgcgcggcgagaccatgcgcatctacggcgaagtcaacgactacgccggcaagggcctgtccggcggtcgcatgatcgtgcgcccggaagacaacgtcaccttcgacaagcacagtaacgtcatcgccggcaatgtcaccggtttcggcgccacgtccggccagatgttcgtggccggtcgcgccggcgaacgtttcggcgttcgtaacggcggtgccacgttcgtcgtcgaaggcgtgggcgaccacggttgcgagtacatgaccggcggcactgttgtggtgctcggccccaccggacgcaatttcggtgcaggcttctccggtggtaacacttatgtgcttgacctcgatatgaagaaggtcaacccgagtgccatcaagtccggtgcactgctcttcaagtcgcttgatgccgaaacctccaagctggtgtacgcactggtcaagcagcatgtcgaagagaccggttcccagttcgccgcggccctgctggaggactggaacgaaaccgtcaagcggttcacgcacgtagtgccgaagcagttcgtggccatgacgaaggccatggaagaagccaaggccaacaatgtagatttcaatgcgcccggcgcctgggaaaaggtgtacgagcaggttatggaaggagcgcgctgacatgggcgacccgagaggattcctgaaggtccgtacccgccgagagttggctgaacgccccgttgaggagcgtatcaaggactggttcgacgttcacgccgaaaccggcctgcaaccgtggacccaaacgcaggcggcccgctgcatggattgtggcaccccgttctgcatgaccggatgcccgctgggtaacctgattcccgagtggaacgacttggtccgtcagggcaagtgggaagacgcctacaaccgtctgtccatgaccaacaacttccccgaagtcaccggccgcatctgcccggccctgtgcgagcaggcctgcgtgctcggcatccaccagccgccgaccatgatcaagcttgacgagcagaccatcattgaccaggcatgggatttggactacgtcaagccgctgccgccgcagcgtctgaccgaccagacggtcgccgtcgtcggctccggccctgccggcctcgccgccgcacagcagctcacccgcgccggccacaccgtcgtcgtctacgagaaggacgacgccatcggtggtctgatgcgttacggcatcccgaacttcaagcttgagaagggtctgcttgaccgccgtgtcaagcagatggaggccgaaggcacccgcttccgcaccaacgtggaaatcggcaaggacatcacgtgggatgacctgcgtgaccgttacgacgccgtcgtagtggccatcggctcccgcgtgccgcgcgatatgaagattccgggccgcgagctcgacggcatccacttcgccctcgacttcctgcccgacgccacgcgccgtatcttcggcgtcaagccggtgcacgacatcaccgccaaggacaagcacgtcatcgtcatcggcggtggcgacaccggttccgactgcctcggcacctcgatccgtcagggtgcaaaggacgtcaccgtgctacagatcatgccgaaagagccgtcaagccgtccggacaacagcccgtggccgaccttcgcccgcacctaccagaagacctcctccatggaagagggcggcgagtacatctactccaccgactccgtgaacttcgagggcaccgaagaggagaaggccaaggtcaccatcgacaactcgaccaccgccgaaggcttcgtggccgatgagcgtggtcatgtcaccggcttgaaggtcgtctccgtggctcccggcgaaaatggtccgttcactcgccagcctggcaccgagcgcgtgctgcccgccgatctggtcctcatctccgtgggcttcctgcatccggacaccgagaccatcctcgaccagctgcccgtcgaactcgacaagcgtggcaacatcgctcgcaatgacaagttcgccacctcccaggatggcgtgttcgtgtgcggcgatgccggccgtggccagagcctcgtggtctgggccatcgccgaaggccgctcctgcgccgcagccgtggacgagtacctctccaaggaaaagagcgagctgccggccccgatcaaggccagccagcgtccgatgatgctgcctcgctgaatactgttccaaacagaaacatgaaaatcccttcttcatgaggggatttttgcgtttctgggattaattactgccttgagtcttcagtaatgtttatatttcgagaatattgcatacatggttaacatgaagctcctatggtgtctttcgtcgccaaaaagacgacgccagaatatttgggagagattcatgaacacacgtcatgtcacttcactggtcgcggccggtgcggcaatcgtcatgctgctcagcggctgcggatcgaccggtacctccaattccagcaatgcttcagattccaatatcatttccgtgtacggcagtgagccggcacacccactattccccggcaacaccactgaggccggtggcggcaaggttgtagaccagctgttcgcaggtctggtgacctacgatgcgaagggcggcatccacaacgaggtagcagacagcatcacctccagcgacaacgccacgcattacgtcatcaagctcaagagcggatggaagttcaccgacggcactccggtgaccgcgcactccttcgtaaacgcatggaattacaccgccaacagtgccaacaagcaggccagcgccagcttcttcagcacaatcgaaggctatgatgatctgcaaaagccggacgtggaccccaaggccacgctgagcggcctgaccgtcgttgacgacaacaccatcgatgtcaagctcagccagcccgactcggcattcccggtcaaggccggcagccacgcctacatgccgttgcccgaatccgcgttcaaggacccgaagaagttcggtcagcacccagtgagcaacggcccatacaagttcgtgtcctggcagcacaaccacagcatcgaaatggtgaagaaccctgactacaagggcaatcgtgtcgccaagaacgatggcctgaacttcaagatctatacctcgcccgattcggcatacgccgacctacgcggtggcaacctggacttcacgaacacgattcctgacaccgcacttacctccttccaatccgacaagtcgctgaaggcatacaacgagcccggtggcaatacgctcaccttcaccattcctgaatggctggaacacttcggccagaacgaggaaggcaacctgcgtcgtcaggccatttccatgtccatcgaccgcaagaccgtcgccgagaagatcttccacggcaccgccacgcccgccgtcgacttccttgcagccccaatcagcgcctactccaaggaactcaagggaaatgaagtactgaagtacaacccgtccaaggccaaggaactgtgggccaaggccaacgccatctccccgtggagcggtgagttcggcattgcatacaatgctgatggcactgcgaagaactgggttgaggcaatctgcaactacatcaagaacacgctggatatcgatgccaagagcatcccgatgtccacttccgacgaattcctgtccaatgtggattcaggcaagatgacctccgcataccgtagcggttggggccctgattatccatccgcggacaactatctggtacagctgtacgattccagttcggccgacggcaagggcggcaacagcggcaactacaagaaccccgagttcgatgccatgatggacaaggctctttccgccccgtccaccgaggaagccgacaagtattatcagcaaggtgaggagattctgctgcaggaccttccggctatcccgttgtggaaccagaatgccaccgcagccagcacctccgcagtctccggcgtcgcattcgactacggcggcggcccagtgttcaccgcactgaccaagaagcagtaagcagtaagtaataaacagacagcgctagctccccgctggcgggggctgtcggcaaagccgactgggggtggtctcaaacagcagaccacccctaatcttgttatatgagcgagctcccgtaagcgggagcaatcgagaacatacaggagcacattaactatggaattcaccgtatccggcactaccgtgcgattcgatgaacgaacaatgcagttcgcttttacgcgcgacggtgccgaatggaatacctgcgctgatttcaagccgaccctgcaatgcgcgcaaggcaccttcgcgttcgcggatgccacttccatcacccatgagcagcgtgaaaccggcacgggaaccggcattcgcagcatcttcaccggctttgggcacagcgcatactcctttgaaacctatgtatgggtggagcgtgcctcaggcgatgtgctcttcgaatggattccgctcaatgagcaaggcctgaacatcaccaatgtgacgtggcccacagccatggacttcgattgcgccgacgaccatgacacgacactcatcacccatgagcaaggtgtgatgatccccaacacatggcctaccgccgtgagcaccaaagatatcgccttcgacggccgcttcgaaacggctggcggttacatgccgtggttcgcgcagctccgcgcagacggacacgggtatatcgccatctgcgaaactccatggaatgccggttacggcatcgaccatcccagcaatggcccgtacacccatatcaatacttggtttgagccaagcctcggcacaatgaattatcgccgcgtggtacgctaccagttcctcgaacacgccgatcacacggcggtgtgcaaggcctatcgttcgtacgtcaatgaacgaggtcgcttgcgtacgctcgtcgaaaaggcggcgcgcaatccctccgtgcgtgacctgattggtcgttcatgggtgcacatcggcatcaaaaccaaagtacagcccgactcgtactactacgataaggaccaccccgagaaaaacgagtcactggtcaccttcgcacagcgcgaaaagcaaatgcgaacattgcacagcatgggtgcaggccgactgtacatgcacttggatggttgggcacagcccggatacgacaacgcacaccccgactatctgccggcttgtcaggaggcaggcggctgggaaggcatgaagtcgctggtcgacgcctgccatgagcaaggcgatattttcggcacgcatgaccagtaccgcgattactacttcaccgcgcaaacctttgatgccaacaatgcgattcgtctggcagacggtacgatgcccgaacacgcacgctgggcgggcggccgccagacctacctgtgcgccgagctcgcaccggactacgtacgccgcaatttcgccgaaatcgccgcgcatggcatcaagctcgactgtgcatacttggatgttttcacctgcaacgaaggcgacgaatgctcgaaccccgaacaccgcatgacccgccgcgaatgctttgaccgccgcaccgaatgcttcgaatatctgctctcgcacggcatcctctcctcgtccgaagaggtatcggactgggcagtgccaagcctgatattctgccattacgcgccatacgacttccagatgcgctcacccaacgagccgcgccaaggtgtgcaggtgccgctgtataacctcgtctaccatgattgcgttatcgaaccatggatgatggagcgtgtggtgaacggcgacgattacatgctgtacgccttgctgaacggcggagctccatacctgattcgcgatgccgcatacatcggcgttgacggcgacatggacgacgaacagcgcgctcgcacggaaaacgacatcgaacgctgccatgcggtcgctgcattccatgagcgggtcggcatgcaggaactggttcgtcacgagttcgtggatgatgatccgctggtgcagcgttcggtattcgcggacggcactgcggtcacttgcgacttccatacgcaaacctatcgcatcaccgattgaccgcatcactgactgaaaaaacaatgacacacagtgggttccgatggactggtggcaaattgccgccgataagcgggtaatatagccaacagtgtcaccgtcgaaacaggagtagtgaaatgccgaatcgtgcagaacgccgtgcccaagccaaagcaggccgcaggggagtgccgtcgcagtatgaccagacccgtggccgtggccgttcgggaatgattgacgaatatcagctgcagcagaagtcccagcgtctgcaggacggcaccgacggcaccgaatggaagcccagcggcggtacgattgcggaccccgaaaccctgctgaccactaacccgaactacacgaatccgaagatgttcaaggcaccgcattcgctgcgtcagtggttccgtgtgggcagctggacgctgatcgccatcgcgattatcgcgttcttcgtggttatgtggctgccaagccatccgatgtggctgatcatcaccgtttccgcggtgttcattgtgggtgtgctgagcctgttctttacggctggcgattccaagcataatccgaatttggatcagaacggcacggcagtctgatcttttgcccggtaaatccggcttgaaaagcaaaacgcacgacggaagttgtgcgttttcttgtatgcggtgccctaaagtaagaagtgcttgagtttctttctgacgcacgaaggagaggcagtccgatgaaagttgatattctaacccgcgaatacccgccgcacgtctatggtggggccggtgtacacgccgaggaactgtccaaggtgcttgccgagcgcatcgacgtaaccgttcgtgcgtttgatggcaagcgcaccgaggcggacattcctgctatcccgaatgctgccgatgctaagggcagcttgaaggtcgtcggctatgacacgccttctgagctggctgatgccaaccccgcattgaagaccttcggcgttgatttgcagatcgccaatgatgtggacgccgacatcatccacgcgcacacctggtatgcctgcttggcgggctacatggccaagatgctgcacggtactccattggttattaccgcgcactctctggagccgttccgcccgtggaagcgtgagcagctcggcggcggctacaatctgagctcctgggctgagaaggatgcttacgagcacgccgatcgtgtgatcgccgtttccggtggcatgcgcaaggatattctgactgcttacccgaacctcgatccgaacaaggtggttgtggtgtacaacggcatcaccatggccgacttcgctaccccggcaccagacgatccgggttggaaggtgttcgagcgttaccacatcgaccgttcgaagcccaccctgctgttcgtgggccgtatcacccgccagaagggcctgccatacctgctcaaggcactgcacctgatttccaaggacattcaggtggtgctgtgcgccggtgctcctgacaccccggaaatcgccgaagaggtcaagatcgcgttcgccaagctggatgaggaacgcggcaacatcgtctggattgaagaaatgctgccgaagcctgagctgaatgctttggaacacggctgtgatgccttcatctgcccgagcatctacgagccgctgggcatcgtgaaccttgaggccatggcctgcggtctgccggtcgtcgcatccgccactggcggcattccggaagtcgtggtcgacggcgaaaccggctatctggtcccgatcgaccagctgcacgacggcaccggcacccccaccgatccggacaagtttgtacacgatatggccgccgctatcgacaagatcatggctgaccccgaactcgccaagaagatgggccaggccggctacgaacgcgcccgcgacgtgttcagctgggagaccatcgccgacaagaccgtggaagtctaccagtccgtgctcgacgagcagaagaagtaagtagcgctgcaacgagtgctcccctcagtccggctgcgccggccagctcccctcaggggaggggagccagaatattgtctcttggctcccttctttgaggggagctgtcaccgtaggtgactgaggggagtcatatatcgtgtttcttggctcccctctttgaggggagtcgtccgcgaagcgtactgaggggagtcctcagatcgcgaatcatagttagtatttcactcatgacaaacaccgtcctccaactcgacaacgtcgaattccggcgtaaccgtcgcgtcattatcaccgacgtgaacctcaccatcaacgcgggggagcgttgggtgctgttcggtccgaacggcatcggcaaatccaccgcggtcggcatgctggccacccgcaccttcccctcagagggccgtgtattcatcctcggccatcaactcggcaaatacgacgtattcaaactgcgcacccgcatcggtctcgcctctgccgatctgggccggcagttccccgagttcgaggacccgctggacgccgtggtcaccggcctgtccgccgtgaccgggcgctggcgcgacacctacacgcaagaggaatacgcccgcgcccgccagctgctgcgcgattttcgcgtctcctatctggaaggcaaggagatgtggcgactgtccgaaggcgaacgcacccgcgtattgatcgcccgtgcgctgatgggagatcccgagctgctcatcatggatgaaccgaccaccggccttgacctgggcggccgcgagcaggtgatgcgcacattgagccgaatcggtgaagagaactccgagcgtgccgtggtgctggtcacccatcgcttggaggagattccggccggtttcgaccacatcgctatcatgggacgcaagccgattcccgctgaggacgccaccgaagcgggcgtggattcaatgggtaatcccggtgctggcaccattatctacaccggttcgttggagaatggcctgaccgacgaacgcttgtcggaattgttcggtatgcccatcgaagtccagcacacccacggccgctgggccgcctacgccgtgtgatgcttgtaggtttttaggcgggattttcttcgccccctctggagggggctgtcagcgtaagctgactggggatccaaccagttacgaaggcaaccatgacaaccaatagcaaactcgtattcatcgatatcgacggcaccctagccgacgaaaaccacgtcgtacccgaatctgccagaatcgcttgcaaacaagcccaggccaacggccacaagctcttcatctgcaccgggcgttccgtgccgaaaatcgaacgcagcatcctcgacctcggtttcgatggcgtggtttccgtggcgggcgctcaggcgaatatcggagacaggctgctgttccagcatctcgtccctcctgaagcggtcgatgcggcgatggcgtattttgccaagcatcatatcgagagctaccaatggcaaggtgcggatggcatgtacatctcggaaggctaccgtcaacatctggaatcgaaaggcaagacctggaatcgtggcgaattcgcgcgattctggcacctgttggatgaggtggaggtgccgactggctcgactttgggacagacgattcgtgtgagcaaggggtcatacttcacctcgccgaatcctgacgtgactttcgaggagactcaacgtgatttgagcccatggtttgagctcgtgcatggttcgtatgacaatatttccccgaacaatggcgaactactcatcaacggcatcgacaaaggtaccgctgtgcgcgacgtggcttctttgctgggctatgccattgccgacaccatcaccatcggagactccgacaacgacactgccatgctcaa

SEQ ID NO: 1471 - DNA, 11303 bp, Unknown
  R257_15m  MAG No. k141_27066
aaccttccgcatacagcacgccaagcgccagcgagctctttcccgaaccggagacgccggccacgcccaccagttcgcccagcggaatgtcgatgtcgatgttcttcaggttatgcacgcgcgccccgcgcacttcgatcgcctgcggccgctgatcgttgctcatgctcggcactgctccgccgccaccctactgtctgacctattatcaagcgtcacgccgttacctctttctcgacctcgccctagaccgccgccgcacgagcttcatggtctccagtatcatcacgaccaacgacggcagccgagaggctttcgctattgagcaccgcctctcgcatgcagttcgccgcgtcattaccgaaactatccgcgtttggcataatgagttcacgggcggcgggcataatggcaatagaagtccatccacaccgaaggagccccgaggatggaactgcgcgtcctgcgatattttctggcggttgccgaggaaggcaatatcacatgggccgcgcagttgctgcgtatttcccagccgacgctctcccgtcagctcaaacaattggaagaggaactgggcgtcacgctgttcgaacgcggcagtcacaccatcacgctcaccgaggaaggccggatgctgcgcgagtgtgcgcagaccgagtcaatacgagttcctgcgcaccggcattacaaagcactggtcagcgatggttcccggaaaccacccgctggcggaacgcgaatcgttgaccccgcagaatctcaaggatgtgccgctgctgttcccggtgcgcacgcccatacacaatctgctgctgaactggttcgggcaatacgccgatcaaggcggagctcaacgccgggtatcacacgccggaacgcacccatgagcttttcgaggaactggtgagccatcctgttgaccccacgttccggttgaacgcgccattccgcaccgacttcggccgcgacgaacacggcacgcagggagccgtcaagcgagggcgtgaaggtggcgaccacaccgaatacggccatgccgatcgcgccgccgcgcagaccggcagcttcgccaaggccggccatcgcctgcatatttccacaccggcggtggccaaacagatcaatacgttcgaaaaagaatacggtctgacgctgttcgaccgatcgcacagtggagtgcaactcaccaaagccggcaaggagttcgtcgaggacgcgcagatgatcgtgcgccaatgcgaggagattctacgccgtgcacaacggcgcagcaccgacggcatcgccaccgtccgccttggcgtttccatcctgcaccccggccgccgcatcctcgacctatggcagcgcgatgccggcaaacacaccgacatccgcctggaactggtgtcgatgcccgatgactccgaagcgatcaacgacatcgtcacccatctcggcgaagacgtcgatctgatatccacggccttcgacaccggctattgggacgacaccggcaacaccctcgccctcgattccgagccgctgtgcgtggcggtgccgcgcaatcacgcattggcgagacgcgcacggctcacattgaaagacctcgaaggcacacgcatccgcatcctcaaacgccatcgcggcgccaacgacacggcccgggacctgctggaacaatatccggccatcgatctgatcgacatcgaccattacgacctcgacacgttcaacgactgcgccgaatccggcgacctgctcatctccaaaccgatgtgggccggcattcacccgcagctcgtcaacgtggccgtggactggcccgaaccggtcatcatgcactacggactgctctacccgctcgacgcaagcccggcgattcacacattatggaatttctcgccgcagacggagatctcgaaccgtgaccgtccaacgaaaccgcgccgatgctccggcgtgaagtgcggtaatctctaagaaaaggccattgtgtcgagatggcggggcaacgggcagcgttgcggatttgggctgaggccccgtcgcttgcggtgttacatattgtgacgatgaggagggcagcatggaggccgcagagagcaggcagccgacgattttcgatgtcgctgcggaggccggcgtctccaagtccatggtttcccgcgtgatgcgcggcgaagggggcgtgcgtcaggagaaggtggaccgtgtgctcgccgcggcgaagaagcttggatacgtgccgagcgccatggccagcgggctcgcctcgaagcgcacgaaaacgctgggagtggtggtcaggaacgcgaagctgcctttctatgggttccttcagggcgccatgcagaagcgggcgcgtgagcgcggctatcagatggtgtccatcagcggcgtggaggaactgtccgcggatgatgcgcgccaggcgctgcgcgatttgatcgccctgcgcgtcgaggggctgatcgtatgctccgccatgcttgcggtggaggatttcatgccgttcatcgaccggatcccgttcgtgatggccgggcacgaggacacgacgtgcaccgtgtcctcggtgttttgcgatgaggaggacggcggccgcaggctcgcgcaatacgtccacgacttcgggcaccgggaggtggcggtgtttctggtgcccagggaatactcggtcagccagtacggccgcggcatggccatgatcgagctgctcgggcagctcggcatccgcgtgaaggtgatggatatgaaaggggccgaagaggttggaacgctggtggacgaggtgctgtgccatcccaggatcaccgcgtatatgtgtccgtccgacgtggtcatgctcaatgtgatggacgagttgcgccggcgcgacgtttccgtgccgcaggatgtgtccgtcaccggctatgacgggtttggcccgctcgcgtcgccgtaccttggatttaccacatatcggcagcctttggaggagatcggttcccgcgctgtggatctggtgctcgagcgtctggatggcggggaccacgccgtggaggcgctgccagtaaagggggaattcatccacgggcgcaccgtggcgctgccacgttggaaagacgggcgatagacgggcaataggcggaacggaagccgcatcccgcgccgcaatcccatgcacccgcgcgtggtggcgacggagcgatagcacccgtcgcccgaggatgcatcacagtggcagcagatcgagcccgttggctgcggcatagcccaggatccaggccatgggcagggttgccgcccatgcgatgaggatcctgcgcgcctcgccccagcggaccttgcgccagtcgttcgtctggcaggtgccgatgagcgcgcccgatatggactgggtcatgctgaccgggcttcccagcgccgagctgacgagcacggcggcggaggccgcccacagggtgacccagatctgccgggaatccggcacgatggtgccgcgctgcaatgcggctgctcccttgggcatgccggtgagcacgccggccaggaacgtcgcggcgacgattgcggtgatggcggcgctgtgcgtggcagttcccaaatcgactcccatggcggtgccgaacaggacgatcatcttctgcccgtcattgctgccataggcgatgcaggtgagcaggaatccgaggaagaccatggtggtcgaggactgcggggttctggattggaacagcaggtagatggtgcgggagatggcgaacgccaccagaggcgaaagtatcgctatcccgaggacgcgcagcaccagatgccattggggatgtccgccggcgaagccggctccggaggatgctccgaccagggcgagcgtgatcgaggtgggcacgccgcctccgttgagcgccagcagggtggccgatgcggcgacgagcaccgtcgccagcaggagcggactttgtccgccggatccttcggaggagaccatggcgacgatggttcctccgactcggctgttggcggccggcagcaaggccaccgccgtcgccagcatcaggaagggggccgccgtgacgcggcgcgcggccttgaggttgatggccaccaggggagacccgtcgttccttcctccaagcaggcagaacaccaatgccaacatgggaataacccacatatctcaccctccttgctgagaacgctcccaatactgtaattattgagtttataaatattagcactgaattcagcgaacgttcatctttagcctgaaatggctgtatatcgtcgattagactttcttatgtcgaaaggatatactatgaatcactgggagcgctccgaagatggagtgacctcccccccatacaacaacggatatagatagcagcaaatcagcaactcgatacgccgcgtccgtcatcggaacggctgcggctcacaaccaaaagacgtaaaagggtattacccatggctctcggcaaggcaatgccggagccggagaaagaaaggaagcgcgagatggcgtcatcaacccatttgtcgcaatccccgcacggcgccaagacgcacggcggacgcacggcgaacgttctcgttgcgaagaatcgcctgaccggtgcggtcatgctggttccggcattggcattgctggtcgtgttcgtgttcggcccgctggtgcgcgtggtgatgatgagcatgcagggcacggacatcttcggttcgccctcaggcttcatcgggctggagaactacaggacggtcttcacggacccggcgtttgtcaaggtgcttatccagacgttcctctacgccgtgctggtcgtggcggggcgcatcgccttgggcgtgctgctggcgattctgctgacgaggcacatcatgggcatcaagatactgcgtgtggccacgacctcgatcgtcagcgtctcggtggcggccgcatcgctgggcttcctggcgttgttcggttcgagcggcgtgatcaattcgatcatcgagaaactgggcatccggccggtcgggttcctcaccgacgcgaagtgggcgttcttcacggtcaccttggtgaccatctggaccggtctcggattcgcgctgatcctgttgtgcgccgcgatcgacggtgtggaccaggagatcctggaggccgcgcgcatcgacggcgcgaacgaagcccgcatccagtggtccatcgtgctgccgctgatcacaccgacgctgttctacatcgccgtgaccacatgcatcgaggccctgcaggcgttcgcccagatcaacatcctgaccaagggcggaccaggccaggcgaccacgaccatcacctacaacatctacaccaccgcgttcaacgcgggcagcgcgaatttcggcatcgcgtccgcactgggcatcgtgctgttcctgttcgtgttcgtcctgacattgctgcagttccgcttcctggaaggcaaggtgaactactgatgatccgcaagacctcccccgtgagccagggcctgtgggccgtgctggccctgatcgtgaccgtgctggtcatgctgccggttctgtacatctacgtcggcgcgttcttcttcgacgccaacggcctgttcaagggcttcaccctgggcaatttcatgcgcgccatgtcccagatgcccctgacccagcagctgggcaacagcatcgttgtgaccgtctgccagaccgcgggccagattgtcaccgcgttcctcgcggcctacgcgatcgtgttctgcaacctgaggcgcccgggcatgtggatgatggtgttcctcatgagcatgatggtccccggcgagaccacgctcctgtcgaactatctgaacatcgccaactggggcctcatggacacgattccggcgatcttcctgccgttcctcgtgcagggcttcaccgtgttcctgttccgccaggcgttccgctccttccccaaggagctgcgcgaggcctccctgatcgacggcgccggccacctgaggttcatggtcgacgtgctcctgcccatcgtcaagcccaccatcatcgccgcgaccatcaacgccatggtcgccgcctggaacggctacttctggcccctgctcgtgaccaacaagcccgagcaccgcaccatccaggtcggcatcacccagctgagcggcactgacggctccaacatcggcgtggtcctcgccggagcggccatcgcggtcatcccggccatgatcctcacgctcatgttcaacaagtccctgcgcggcatgagcgtcgcgggcagcatcaagtaacccctggccgcggccgtccacgcgacggctgcggatcgtgggccgatccccatccgtacgacacaagaaaaaccaacaaaaccattttttccggccggcggccgtcgaaggccgtccggcgcaacgagaaaggaaacctatcatgaggaagtcaaccctgctgaaggcggtcgccgtcgcggtcctgcccatgctcgccctgtccgcatgcggatccacgtcggacaccaacgccgacgccaagggcggcgagcagaccgtcacgttctggtactcgaactccggtccggccgtggacgccatcaaccagctcgtctccgagttcaacgacgcccacaagggcaaaatcaaggtcgaggcctcctaccagggctcctattctgacgtgcagcagaagttctccgccgccgtccaggccaagtccaccccgtcgatcctgcagatgaacgacacgtccaccggctacatgatcgacagcaagatgaccaccccggtctacaagctcgccaagggcgactccgatttcgacaccgccgacctgcagcccgtggccctcaagtactacagcgacgacaacggcctgctgtccctgccgttcgccatcagccagcccgtgacctacatcaacaacaagctcgcccaggaggccggcctggacgtgtccaacccgccgaccacgttcgacgaggtcgtggactgggccaacaccatccacgagaagaccggcgcgtacggcttctcgatgaacatggtcgactcgtggattctggagatgctctccgccagccacggcgagctcatcgccaccccggacaacggccgcggcggcaaggacgtcaccggtgtgaacatgacctccaagactcagctcgacatgttccagaagatcgttgacatgttcaaggacggcaccgccctgaaccccggcaccgactctagctccatgatgaccgcgttcacctccgacaagctcggcctggtcctgacctcctccgcctcctacacgtccctgctgcccggcgactccacctcgaacgtgaccgtcgcccagttcccgcatgacgcctcgaacaagaaggccggcaccccgatcggcggcaactccctgtggatcgtggccgccgagcactccgaggccgagcagaaggccacctgggaattcggcaagtatatgatggccccgcacgcccaggccgtgttcgccaaggcctccggcaacctgttcgccaacaccaaggccgccgacgagaccgaaggcaaggaggccctggccgacccgaacgtcaaggtcttctacgagcagctcgaggccaacccgtccaccagcgtgtccctgggtgcccgcaccggcgcctacccgtccatccgcaaggacgtgatggcctccttcaacgaggtcgtcagcggctccaaggacctcaagaccgccatgcaggaggcccagacccagtccgctaaggacatcgccacctacaacaaggccgcaggcaagtaaacacccgcgatacccgcaacccaatcggccttcccgccccggtcttctctcccggggcgggaaggcccgtatcacccatagcctcccggcagcagcaaaggagccgacatgaacaccgcagccacccccattcgattcggacgcgaacaatacgcgcagatcaacgccaatctcaaccaggcatgcgcccgctcgccgttcgtcatcgccgcccaccgcggcaccccgcgcggcgacattcgcgagaacacgctcaacagcgtcctcgccaccaagcaagtcaacgcagacatcgccgagatcgacgtaatccgctccaccgacggcgaatacttcgcgttccacgacggcactgaaatggcccgtctacgcatcaccgacgacatcctgtccaagactgccgccgaactcgacgaactgcgctacaccgaataccccggagcctactacggcaacgtcgaacgggtcgcgcacatcctgtccaacgcgcccgacatcctcatcaacatcgaccgctcctggcgctactggggcagcggattcctcgactggctcgaccagttccacctggaaagcaagctcatcctcaaatgccccgtcaccggaggcttccagcaggccctccacgaccacgacgtcaaatacatgttcatgggcatgatccagaacccagacgaactcgatctgttcgtcgacgacgagcagatcaacaccgtcggcgtggaactcgtcgccaccaccgaggacaccccgctcgccgaccccgcgatcttcaacaggatcaacgaactcggcctgtacacgttcgtcaacgccctcgacctgggcaacggatactgcggcctcaagggcatggacgacacccgttccatcctcgaaggcccccaggcaggctggggcgccctcctcgccctcggcgccgacgtcatccagaccgactggcccgagaaactcgacgagtatcgccgggtcatctcctgattccggcgggtctccgcgatttccactcagcggctcctctgcgtttccggacctgcctgaaacggcgcccgttctgggctggtccggaaacgcagaggccgctgccttcgccgcgacaacgaacgaaagaaggtgccacaatgccgtggttcagcgtcaagaacgcgctcgcagaggatcccgtcatggggctgctccgggaacaggtgacgacaacccgcaaaggagtgtccatcgcgttggacgccgtcgaggggcatctgagcgtcgatgaatccagaaagagcgtcaacgatatcgagcacgagggggacgaggtccgttccaaggtcgttcacgcgttggccaaggcctggaccacgccgttggaccgtgaggatttgttccgtttctcccgatccatcgacgacgtgctcgacaacacccgcgatttcatacgcgagatccatctttggaaaggacatgccggcgaacacgccaatgtcgcgttgacccacgtgaacgtcgccctgcacgatctggaactcgccgtgaccgcggaaggcgccgacatgcgccgatactgtctcgaggccagcaaggaatccgcccgcgtgcggcgcgcctacgaatcggggcttgcagccgtctacaccggcgaaatgagcatggacaccctgaaaacccgagatctgctgcgccgcgtcgacgtcataggcctgaggcttggggagtcctccgacgccatcctcgacgggctcgtcaaacgcgggctgtgactcaccggaataccgcaaagggaaaggcgcgaatatgcgcaggaaactgattcttgatttggatacgggcatcgacgacgcgctggcgatcggatccatcttctcgcgtcacagacagtgggccatatacaacggcagcttgatgcgttctccatccacttcgagttggcggggatgcagaacgtattccttgcccaatcgttgggcataccttttgcggaatttgtcgagcgaagatacgccgtatcgtttcgtggatttcacttcaatcgggctgatgcgaggcttcatcgcggcattatcgtattcccgaacgatgaggaagtctatttccatggttttcgtggcatccgccctatccgagcgcgagaagaaatacagtttgcgcccattcgcccggaattgctgagccaccgcattctccaccagcatcccttcgttgagcgagagtttatcgaacagaatatcccggtacacatcatccggcgttgtctctcgatcggcaaacgcctgcgacaccagcaaaccggtatccgccatatagcatttgaatgaatcgttatcttcgtacaatcccagccccaccaaagggtcagtcgaattacggcacaggttcaccaagcgggcgtcttccaaccagaagaacgccgaatcgtattcacgagatcgagcatccttgtcgaccgatgccagagtgaatcgtttctcacgcttggacagctgccctggaatctgagcgaaaatgccccgcacgcggccggcatcgccattggcgaacttgccgatatcatcactgtacagctgcaggatgccacgcttgatcaaatccacctcgccaaaatcgcgctgctcgacataatcggcaaccgcctgcggcataccgcccaccagcagatattcgcgccacagcctcatcgctcgtttgtgcagcgcatcgggcaacgggaccagacgctcgaacgatttgcgaatcgtttcagcaagcagctcctcccccatggcccagcagaactcctcaaaatcgagcggccccatgtccattttccgttcctcggaggggatgacgatattcgccacattcctcttgatggagatcagcgaaccagtttccacatagtcataccggccatccgcaaccagatatttgatgagctccctcgccgccggataccgctgcacctcgtcgaaaataatcaacgattcacgctcgtacagtcgcttgcggtaatacgcagacaacagcatgaaaaatgtgtcaaagtcatcacgctggttttcgaagatgtcgcgaacgtcgcgcggcaaacgtgtgaaatcgatgagaatatatgacttgtactgagtgcggccgaattcctcgacaatggtgcttttgcccacacggcgagcgccttcgatgagaagagcctcacgcccacccgctttttgtttccatgcgatcagcttatccagcatcttgcgcttcaacatgagcaatcacctcattacacgaaaacaacagtatgggcatatgctattctacacgaaaacagaagtatagaggtagccgattctacacgaaaacaacggtataaggacgcaagccgaaccggctcacccccaatctctcccccatcacaccggcggcctgttcgattgtgcggttttgtgcgaatggctcacacggttcttagtgagaaccgttctctgcgcacctgaccctagaaccggatcagcgccttgatgaccttgcgctggtccatcgcctcgtaggcgtcctggatatggtcgaggtcgtactcggcggtgaacacgcgaccggggttgatttcgcccttgagcaccgcatccagc

SEQ ID NO: 1472 - DNA, 11239 bp, Unknown
  R257_15m  MAG No. k141_27395
acgtggagcaactacgctcggacgtcaaccggtacgtgtggtggtacaaccaccaacggctccactcgaccctcgggtacctgagccccgtggagttcacacaacaaggaaaaaccctctagaaacagtccaacacaccgtcgccaatccacgcatgatccgcaggcgcatccgggagggccaaccgttcatgttcctcgacgaggggctcgcggcagccggcccagtgccgtccacgaacaacctcgtcgaatcatggaacgcgcgcctgcgcgacatgccgcgccgccaccgcggactgcggctggtcagacggctgaaggcgatctgctggtggtgccaccagcacacggaacggcccgaaagcgacgcgtggctcgcggccaacgcgatgaccaacgaacgactcgagcgcctctaccggcgggcatgggagagaagcccgcagagcatgcacgagacgttcggcattcccatgagacacggcaccggcatcgactggaacgagttccacaccagggtcgaatggcagtcgaacgactagaccgccggacatacattttggcctataaccccgaatacggacgttcgcatcaaaaacaaaaagggttccgggacaaaccccggaaccctaaaggcggataaggcgagattcgaactcgcggaggctttcacctcacacgctttcgaggcgtgctccttagaccgctcggacacttatccatgctgccaaaatggcaacttgttcattatgccacattctgccgacctggcaaatcggagtttcgctgagcaagtctcgagtgtatgccgcttgagacatgtcagatcacaatcccggaattcgcccgaagcgctggcattgcgtttacgcgccaagcactccgacaggaattacatacactccatcatcgcgttgatacgcgaactcgccgacccccaccaacaccgccaagaactccggttcacgggttcgcgcactcggatttctcagcagcttatctttcagtctgcatagatttgccgatgcctcagggactttatcctcactggacttaatttcgatgccgccccaccgtccatcggacaattcaataatggcatcacactccagaccggaatcgtcacgataataccgaaccggttctatcccaatatcgaggagagatctcgcatacaccaacagatcacggatgcatagattctcaaacagaaacccaaaagtctggcaatcgccgataagagcagcaggactcatgcccaacattgcggccgcaatggaaggatcggcaaaataccgacgcgccttggtctggagtcgctttggatcccgtgccggcgggacccagccctttatcggatcgatgacgaacatgttctcgaacatggccgtatacccggataccgttctctccgaaatgaaatcgtcaaggttttcttcagtaccgtacatatccttacgtaaggttttgaatgtcacagcttgactgatattgcgcgcaagcgaatccagcagacgacgagccacatcaggatccttgccttgcctgggcacactctcagtcagcgtgagtcgcatgtattcccgaatcagaatctgtgcgtcagatacaggcagagccaccgcctccggccatccacctcggcatacggcatccaacaacatttgtgtacttatctctgattttgcagcggcgaacttatgttcaaacagtccactgagacttaccgcacctgtcgagagtccggactcatataaagtcagaggattcatacggatacgtccgattcgtcccgcaccactatggttcggccgattctcattgagaggagtggatgaaccggtcagaatccactgacctttattcgcggaatcatcgtcgacgcgatgacggacttcatcccatatagctggagcgagttgccactcatccacgatacgagggcgataggctttcggcttgatgtcgctcgccagagaatcggccattccgcgcacctcccgttgtttcacgtccgccatcgcaataatccgaatttctcaactaccaaaatccgaatgttgcaacgacgaaaatccgaatattggtggtggtagaagcggtgacggggccactctgcattgagcggtctctctcagtctcgctacgctcgacagctcgaacgcaatttaaggacagctttccagctgccattttatttgctcaccgtcgttcgccttcgcctaaaaacgcctccggcgttttcttcacggctcagctcatcagagggggcttggaattttgtttacgccacctgttcgtggacggaggcattgacccattgggtctgctggacgttgtagccggagaagatgccgatgtcgagcatgcagtcgcggtaatcgcggccgtgggcgatggtgatgtagctgtcgtccaccaatcggttatgcgtgggatccagtccgacccatcggccatcctgatacacctcgacccaagcgtgggtcgcgccctctcccccaagcaaaccggcaatgtagcgcgcggtcaatcccacatgccggcacacggacagcattacatgggcataatcctggcatacgcccttgcgctgggccaaggcctgttcggcggtggtgcgaatcgtggtggaaccgggcgtatacacaaacgccttgtagacctcatccatcacttcggcggcctgctgcaccggagtggcgtcggcaggcaacgcagccaagcgttcgcggcatacgtcgatcatcgcctccacgttcgggccgggaatggtgagcgctgaattgaatcggtacagcggtttataggcttccttatggatatgcgcattgtccacgaaggcgatgccggtcaccgaatagctgaatatgtcgtgcggctcggggatgaatccggtcatcaccacggagccaaaggagtcgatggtggtttcgagttcggtttcgggctgaatcttcacttccacgtcaatcacctgttggcgagggccagtggcgggaatacagcgaagctggaacctgtgatcggtgaccggtgcgctgaaggacagcttcatctcatagtcgaacacgagttttttcacaacgtctcctgcacttacacacgagccggcaaccggcacattctcgggataacgacactacagccatggctgaggtatggtccgcgcgctcacagtccacgcatatattccggcaattcgccgatacgcatcggccggcactcgggcgcacggtttttcgccataccaccatagcatttgaacccgtcagggcgaacgtcgggttaggggcgcttggcatccatgttcatggagctcagtgagcccatgtctttgatggccagggcgctgacacggccggaataatcgtcaaggtacttcttcagcaggtcggcgacttcctgatacccgcgagacggcagctgaccgaccagccagctcagcccatcggcgaagcaactaggcaacggcatgccgtcgaggatcatcgagtaggaggcgagcttcctaagcggggcttccatctcctccatcgtcaggccgaagcgcgtgtacaggtcgatgcgctcaagatacttgccgatgaagatgaacgccttcagcgtggggtcgaccggcgaattctcgatgccgccccagaaggcgagcatgtcatcggtaatatcgcgctgcttgtagatgtcctcggcgtcggccgcgtatttggcggcatcggtgatattggtcatcgccaactccacgtactgcaacagacgcgagctcaattccgggcgcagaatcacggcgttgttgaatgcggaggttacggccgaccgcaccgaatcagggttggacccgtcgtacaggaagctgttcacgaacccgtcgaagtcctcgaaatcttcgggcaggtcgagtgcgtgagcgaacggacggaaggcgtccacatcggtgtccatcacacgatcgtagaacgggaagaactggttcagcgtggtgaaggcgcgctcggtgtaccgacccagccaatacaggttgtctgccttggaagcggtgaccagagacaacgagtggcggcgggactggctcagcaggttcgccacctgcacttcagcaccgtattcatgctccacgccggattcgggtgccaacacccacgtatccttgaatccgccaccctgcgacgagttgacgatcatctggccgggcaccgacgagtatcgagtcaagcccgaataccacacgtgcgtgtttttgccggtgaccacaaaggcacgcaaatcgcatttgcgcggcgacatctcaccggtcttcgggtccaccacatcgatatcgcggaactgaatcacctcttgggcgatgaatcgacgaggctcctccttgatccggttggcaagctcctcacgtgcggcagcatccagcgacgaaccgaacaccacgccgtaaccaccggcttcggccacatccttgatgaccagctcgcccatacgattcaggacttccttacggtcggcctcgaacatcggcatatacgtgggcgcgttgttgagaatcggttcctcgccgagatagtacttgatcatctgcggcacgaagtagtagatggccttgtcatcggccgcgccgttgcccggcgcgttgacgatggccacgttgcccgcgcggtaggcggacaggataccgggcacaccgatcaccgaatcaggattgaaggcaaacggatcgaggaattcgtcggacagacggcggtagaccacgcccacacggtggcgtttgccggcgtagtcgaggaagtagaccttgttgtccaccacttcgaggtcttcggggaaggccagtgcggcgccggttttctccgccagataggcgtgctcgaagaacgcggaattgtagcggccgggggtcagtaccacggcgatgccctcagtggacacaaagtccatggccttgcgcagtaggcgcgggtattcgcgattgtcgcggatgtgcacgtcgcggaacaggcgcggggagatgcggcgctcgatgtcgcgcacgaacagcgggtagctggcgcccgaggggatgcgcaggttgtcttccagcacccaccagcggccatcttcaccctggaccaggtcttcgccggcgatgtgcgcgaagatgccgccgggaggggtcacgccgttgacctgcgggaagtagccggccgaggtgtatacgtattcctccggcacgacgccgtcatggatgatggccttgtcggagtagatgtccttcagataggcgttcagggcgttgacgcgctgcttcaggcccttctccaattcgtcgtattcgtcggattcgataatgcgcggcacgggatcgtacgggaagagccggtcatggtattcgccgttcttgtagatgccgaagcgtacgccgttgcgggacagctcgcggttgatcgcctcgcgacggtttaccagttcatgggccagtctgcgtgctgcggattcgatcatcgtgcctgctccttgctgtggcggcttctgtggcctcaagcggttaggcgtttcgagcgcacgctgacgccgcaagccgtaaccgggtttgatggttacaacctaaggcggccccgtttcagcaaacgcgcgagaatgttacaggcaggtcacttcgccgaccgcactcgtctcgccgaccgcgcgcatctcgccgaccgcactcgttacaatgaatggctatgacacgactgcgcattgacttggcctacgacggcggcggattctatggctgggccaaacagcccaatctgcgtacggtgcaaggcaccattgaagatgcgctgcacaaggtgctgcgggtgccggccgatgatgcggccgaaccgttgcgtctgacggtggctgggcgcaccgacaccggtgtgcacgcctcccaccaagtggcgcatttggatgtatccgatgaggtactgaatcgctgcgtaggtcacatgaccattccggtcaccgaggcgctgactcgcagactcaaggctgtgctgccttcggacatcgtcattcatggcattgccgtggcaccggccggtttcgatgccaggttctccgcattggagcgcacttatgtgtatcgggtcgccgatcgttcgtccgagatcgacccgcgcctgcgtggatgcgtgcttaccgtggatgaatcgctggatctggagcttatgaaccgcgcagcctcattgaccatcggcctgcacgattttggttccttcgccactccgaatccgggaggcactacgatccgcgaagtcaagaccgcctattggcggcgggtgccgatcactcccctggtgccggatgcgatggcatcgcatgaagcatatcggactccgtcgctggagtccggactggcggtgttcacgattgtggcggacgcctttgcccgcaatatggtgcgctccttggtcggctcatgcatcaaagttggttcgggacgcaaatctctggaatggtttgccggcaaaatggccgagccagtgcgtgaaggctcaagcgggccgattgcgccgcagggcctgactttggagcatatcgcataccccgtcgatgatcagctggccgcaagagccgaggccattcgagccgtacgtacgttgtagtttctatgaaacaacgcaaaagggctggaacccaaacggattccagccctttcagctagcttggcgaaacgctattcagctcactcggccttctcggcgtcagcggcttcctcagcgggagcctcagcctcagcggcggcggtctcctcgaccggagcctcagcggcctcagcctcaacggccggagcctcttcttcggcaaccttggcggcggcttcagcttccttcacaacagccttcttggcaaccggctcggtgacgagctcgatcacagcggccggagcggcatcgccaacgcgcggggcgatcttgacgatacgggtgtagccaccttcacgctgctccatctgctcggcaatctgggtgaacagaatgtgcaccacggacttgttgcggatgacgcgcatcacgcgacgacgggagtgcaaatcaccgcgcttggcgaaggtgatcaggcgctcggccagcggacgaaggcgcttggccttcggcagcgtggtggtgatgcggccgttctggaacaggctggtcgccatgtttgccagcatgaggcgctcgtgtgcggggctggaagccagacgcgggcccttcttaggtgtaggcattgggtttactccttatatgtccgttcttcaggcaagcaggtgggcatatgcccgaacatccgcttgcctagtgaacgaacgattggtcaaagaggcagatcactcgtcttccggcgagaagaacgtaccaccttcgagattattggtatcgaaggccatcggcgaggacttgaggctcaggcccagggtctgcagcttctccttgacctcatcgattgacttcataccgaaattgcggatgtcgagcaggtcctgctcggtgtgggagacaagctcaccgatggtgtggatgccctcacgcttgaggcagttgtaagaacgctgcgtcaggttgaggtcctcgatcggaacggccatctcggggttggtctcctcggccaccggggccggaccgacctcgacgccttcagcctgggcgttgagctcacggcacaggccgaagagctccaccaaggtggaaccggcggaagccaccgcgtcacgcggggagatggcgggcttggtctccacgtccagaatgagcttgtcgaagtccgtgcgctgttccacacgggtggcctcgaccttgtagctcaccttgagtaccggggagtagatggaatcaaccggaatacggccgatctcatcattgtcctgcttgttcatctgggcaggaacatagccacggccacgctcgacagtaaactcgatctcgagttcgccatcgtcggcgagggtagcgatgtgctgctccgggttggcaatagtgacgccggcaggcggggtgatgtccccagccacggcttcgcccttgccgctcttgcgcagatacatgaccacaggctcgtcatattcgctggtgagcacgatgcccttgatgttcagcaggatctcggtgacgtcttcctggacgcccggcagagtggtgaactcatgcagggcaccggaaatacgcacagaggtcacggcagcacccgggatggagctcagcagcgtgcgacgcagcgagttgccgagcgtgtagccgaagccaggctcgagcggctcgatggtgaagcgggagcgctgcggattcagagattcctcggtaagagtcggacgctgtgcaataagcactgtggttatcctttcagcttgaactcggtggtgcactcaccggtcaggcggttttggatggatttggtattgctgagtgctcagacgcgacgacgcttcggaggacgaacgccgttgtgggcttgcggggtgacgtcggtgatggaaccaacctcgaggcccgcagactgcagggaacggatggcggtctcacgaccggaacccgggcccttgacgaacacgtcgaccttcttgacgccgtgttccatcgccttgcgggcggcggactcggcagccataccagcggcgtacggcgtggacttacgggagcccttgaagccgacatcaccaccggacgcccaggacaccacggcaccggacggatcggtgatcgaaatgatcgtgttgttgaaagtggacttgatgtgagcctggccgaccgggaccgacttgcggtcacgacgacggggcttacgagcggcttgcttaggcgctgccattgaccctcgtttcctagtaacgaactttgttgttgacgttcgggcgatgggatgaaatcatcccgtggcccgaatcatgccaccgactacttggtggccttcttctttccggcgaccgtgcgcttcgggcccttacgggtacgagcattggtcttggtgcgctgaccgcgcacaggaagtcccttacggtgacgctggccttggtagcagttgatctgaatcttgcgacgaatatctgcatcgacttcacgacgcaggtcaccctcgatcttgtagttggcttcgaggtagtcacgcagcgtaatcagctgctcgtcggtgagatccttgacgcggatgtccgggctgataccggtcgcggcaagcgtttccttggcacgagtgcgacccacaccgaaaatgtaggtgagggcgatctcgatgcgcttctcattggggatgtcgactccggcaagacgtgccattgcgattccttcttgttgccgtaggtcttgcacccgctcgcccggttacccggcacgggcctacgtacccgtggttcagtgtcgttcccttgcgggaagcactgtgagagagtgccttatttacttagtgccgctggagaatctgctctcagccctgacgctgcttgtggcgcgggttgacgcagatcaccatgacgcggccgtgacggcggatcacgcggcagttttcgcagatcctcttcacgctagggctgaccttcatggttatccttttcttgtgtacctttacttgtaacggtacgtaatgcgtccgcggttcaggtcgtaagggctcatttcgagcacgacacgatcctgcggcagaatacgaatgtagttcttacgcattttgccggaaatcgtggcgagcacgatgtgcttgttctcgagttcaacgcggaacatcgcgttaggcagtgcttccactacctgtccttcgacttcaatcacaccgtcttttgccatgtgcctctagtcctattccgttggatgattactatggcatatccgaagacacaccaactgtcaactatatacgcacatacccctgtacgaacactcggcgtgtcgcacaggggtatggaaacgttgatgtggtatttcggcatcactccggcttgttggccgggctgccgaacctactactcgaggtggctgatgatacggccgctgatctcgtcgatgtcgccgacgccgttgaccacgacgagcaggccacgggattcgtagatgtcgagcagcggagcggtttccttctcgtaggtctccaggcgcttggcgatggcctccggagtgtcgtcagcgcggccctgctcggcggcgcgcttcttcatacgctccagcagcacgtcgcgggcggcttcgagggccaccacgtggtcgagcggagtgtcgaggtcggcgagcatctcgtcgagagcggtgacctgggcggcgttacgcgggtagccgtcgaggatccagccgttcttgcagtcttccttggccagacgatccttgacgatcttgttggtcagggagtcaggaaccagctcgcccttgtcggtgtagctcatcgcctcaagaccgagttcggtcttgttcttgatgttgtagcggaagatgtcgccggtggagatggtggggatgttgaagtgctcggcgagcagagcagcctgggtgcccttgcccacgccctgggggcccatgatgagcagacgcatggtggtctccttttgtgtcggttattaatacggttttggctcccttggttaggggagccattgagttatatgtggaagaaagattgctccgtcgtggaacagtccactggactgttccactcctcgcgcggccgcctgcccattgcgggcgaccgctgccaagcgggcgtcagccttctttgtggtccacgttttcgaacaggaagccggtgtactggaactgttcggtctgggccttggcctgacgcagggtgtcgaggcccacgcccgcgataatcaggatcgtggtgccaccgaacggcagcttggcgttgagtccgagagccatgatcagcacggtcgggatcagggccacgaacagcaggtagacggcacccacggtgttgagtcggttcatcacgtaggtcaggtaacggctggtggcgttgccggcgcggatgccgggaatgaagccgccgtactgcttcatgttgtccgcggtctcgtccgggttgaacgtgatcgaggtgtagaagaagcagaagaacacgatcatcagcgcgtacagggcgatgtaccacacggatgtggtgttcgccaggttggcgttgatccacttgacccaggactggtcggacttgccgaactgggcgatcagagtcgggatggcgaggatcgaggaggcgaagatcggcgggatgacgccggacatgttgatcttcagcggcaggtaggtggaggagccgccgtacatcttacggccgatcatgcg

SEQ ID NO: 1473 - DNA, 8520 bp, Unknown
  R257_15m  MAG No. k141_28091
gctccttcgcggccttcgaatcggtcacctgcctgacggcggcgtcgagcttcgccttggcgtcggtgtacgtcttcgggtcggtcacgcccttcttggaaagggtgtcgttcgcctcgtcgatggccttcgcgaggctgtcgcgggtggcggtgtccgcccccttcccatccgtgtccttgagggtctggcccgcgccgtcaataccctgcttgagctggctcttggcggtatccagctccttcgccagcttgctgtccttgacggccttgagcgcggcgttgagcgccttcgcttgggcattggcctcgtccgcgtccgtggcattggccttcttcgcggaagcgagctgccacgccagccactcgctgggggcgtcgttggggacgcccttgagcgccttggccttactgatggcggcgtcgagcctgtccagcagcttcggctccttgagctgatccgccttctatgtggtggcggtggcctcgtccacggccttcgagagcgccttgtcggcgttctcggcttgggctaccgcctcatggtaggcgttgccctcgtggtgcgtccagtaggcgtagccgccgccaatacccgccagcgccacgaccaccaccgcgacgatgacggcggtgagcttgatggatttagcgtccctctctggcttgaattcgctaacaggattttgcattactttctccgtctctttgattgggtttacgcggctcattgcaaaccctcaagattcatagatcaaagggcttagatgcatgatgtcatcgtcgatggtgaaaaaatgaaggctcagctacctatacggcaccaaacggggcatgccgttgatgacaatacgcggtttgtcgatgaatttgttggttacccaagtgcctcgatcatccagtgtctcgaattcggggctgtagacattcggcgggtaataaacgtatctctttccctcgtcatccatccaagtctttgatccattgctcagggtctggaaagtgcccttggccattggatgcgattcgatgccgcctccgggcaacaggtcgattagcgtgcagtccccgttcaaggtgctgcctccgccggcatttcctgctggtccccaactcccggcgaaagccgagcatggtgttgagttggcttgggcgctttcgcttaccgcgttcatggcgtcatccagttgcttggatgcgtcggcgatgccgtttgcgtccttgccgtccttggccttgttcgcgttgccaatggcggtctgcaatgcggatcttttatcggagtcggcgtccgaaccattgctattgagcaggtcctgcgcctgcttgaccttatcgtccaacgccgtggaagcatcgacgagcgttttcgcttccctggcatctgatatggctttggccgccttctgcaaagtgcgtgttttcttcgtcagcgtcttggccccgcgatccgcctggctggcgttacggtcaagctcattcgttggcattgacgttcggcaccctgggatattgatgtcctgggggatatccttctcggcttcggcataggcgtcgattagcttctggtcgcccacgtcgtcaatggtgagtttcgacgtatcggcgttgtcggagaccgtcttcctgatgctggcggcggcatccgcatatcggcctaccgacgattcgcatgcggcgaaggccttgccgtgcatggagcgcataatccaccagccgcccactccgcctccaagcgccagcacgacggcgaccgccacggcaacgataatccatatacgcttcttacgcttgggcacgacgggcgattccggcctgccattatcgcccaccggcggagacacaagcgtctcactgttgatgtcgccgcccatatcagcggccttcgccccgcagttcatgcagaatacggcgccttgcggcagttgcgcaccgcaatagctgcacaccatcatcgatgctcctcttcttcgatattctccggcgtcattatttatcggcagcttccatcggaacattggggtccgtcatagccctccggcgcgaaatacgactcccacgcattggcgtcgattccatcggaaactgcgtgcagcagcatgccattgggcgatgcgccgctgggaaccagctcgaacttcaccacgctggaggggaaagcgtcgcatgccgcacgttcctcggacgaagtctgagacgcatcgtaggcgcatttgcccacacccgtccaggcataccgcccattggccttctgtttgaacgaatccctgtcataggagccagcttgccattggccttggtgcatggaggaagccgtgctgcagtcggccttcaacgtgtaggtgccgaaggccgaccccaacgttcggtagtcaccggcccaggcggcgcaccgattcgattcgtctttcccgggcagcgcatccgtcgaatacgtggacgcgaatgtggaagagatctgttcgacaatttggtcaccggccgccttctggctcgtggggtaggtgaattccaccgtccgcagtacatccggggcataaagctggtgcaggtaggtgatcgtaccgttctcctcccagctggcgacgaattctcccggcatcaccgccttgtaggagtatttcggatcatcgacatcgaacacatcctccatggccccgttggtcacgttgaacgatccccacgtcgtgatggtcatgcccagctggtcattggtgaacttacggccatcgccgttgtcggattccggctgccacgcgaaatcctccggtacatcaatcgcaaaagcgaaccgcgcattcgtgtagtgcttggtcttcggccgattggtctcgtcgttccggatcgtattatcgttgtcgccgtccgatttcttggccgcatccgtctccttcttggttgtgttcgtctttttatgttccttgatattgatatggctggctgcaacgcccttgccattgtccggccccatgatggccacaccaatagccgcgctggccgccaccacgcagactgcaaccgctgcggcaatcatcggccagaccgagaccctgtgcctgacccgattgccgcattccgtgcaaaacaggtcctcgggtttcaatggccgtccgcattgccggcacaaacgtgcttttgtcatgacacaacaccccgcagatacccgtatcctccaaaatcgatgcgatcataccccagagaaaagccgtcatctggaatctgggcgaacagtggagactgtatgcccttcggatagaacgtcgcatcggaagcatatgagtcattggaaatgcgccatgaatacgtcccatcggcattgcgacggaaagaaccgggcacgtaattcgccacgattccgccatataatcgcgcgtaaccacaatccgcgtgcaaggtgagaaagtcatcgccctgatacagggaatactcatccgcgaaagcggcacagcgcgtcagatcggcgacggtcttcctcctgacgccgtgggtctcgccgttcctgccgtcctccggtacgtccccggtttcatcggcggtctcgtcggacatcgttcctcccggtctgtcgttctgctcttccgagtccatcatagacaacgggatactacatttatgtagtaatcatatataatactacatttatgaagtaatcatgtatgcagtggtgcgcttgggtggaaccatgcacgagcgcatatccgacgaactcacctggcggcagtacgccaaggggctcggcatacgcctgcgccgactgcgcgaccaacgtggcctcagccaggagcgcgtggcctcggacgccggactctccacggtgcagtaccagcggcttgaatcgggaggtttcgccgggcccacgcccaaccccacctccaagaccctgatcgccatcgcccagatcctcgacgtcaccatcgacgaactcctacccccgccatggcccgacctacgcacgaagtgatgtgtcacgaagcgtccccatgtgctagaatcggcatcgtttaaggttcacatagccgccttggacatgaaaaacccaatgattccaagccttgcgaaacctcggcatgtagccctgtgggctatccgtaggtgaggggagcggctgtgccgcgacggaaaatccggaggattttcggtctgtaggcaacgtgcgagccgacaggcgagccagcaaaacgcgggcgaagcccgtccaaaattgctgtaccgttgccatagtgctgtgagctccctctgatgagggagctgtcgaacgaagtgagactgagggagagatcccacagaccaatcactcccgccttacaataaagccatgaagcgcatcgatgtgaatcatggctggcggttccgttcaattggcaaggaccgcgatacggcagcgcggcagccagtcacgctcccgcacgatgcgatgattcacgagtcgcgcgaccctcgcgggccgcacctcgcgattcatcgaacgaggacatgacggcgtggccagctggtcatgggcgggctatgagggccgcgacgccatcgtgcatgtcaccgatgaccgccgcattgtggttgatgcaggcgggcatatcgccgtcggaccttctgccgaagctgtggatgtggaggtacaagtggactctgtggccgcacaacacgacctgcctgccaatgccgaactgctcggcgtggccagcgccaatcccatcaccgtcgatgaactcgccgacaatacctgcaccacctacttcggccgagcccaagctatttggcgaataccagccgaaacgtctggtattgcctgcagcacaaacgccctcatgccatcgtcatgacggtacgataggtacagtcgatgcccggaaaaccgacccgggcatcctgcgggaaggatgtaccatggtcaatgcggatttcgctcagttgcgtcacgcctacgactccgggtgtacgcggcccttggcttggcgacgggcgcaattggatgcgctatgccgtctggtagcggacaatcgtgatgctttcgtggctgcggccatggccgatttgggcaaacccgcggcggaaaccatactgatggagctgaatctggtggccggcgaggcgcagttcgtccgcaaccggctcggactgtgggccgcgcgccatcccaaggcgatgcattggatgctgcaacccgccgccggctggacgatcgccgagcccaagggcgtggtactcatcatctcgccatggaattacccggtgctgttggctctggagccaatggccgacgcgctcgccgcaggcaacgccatctgcctgaagccctccgagctttcgcccaacacctcgcgcctcatcgccgaactcgtgccgcaatatcttgaccccgagtccgtgtgcgtggtcggaggcgggcccaaggaaaccggcgaactgctgaaatgtccgttcaaccatatcttctacaccggcggtgggcacgtcggcaaaatcgtcatgcgtgcggcggccgagcacctgacaccggtcacgttggaactcggcggcaaatcaccgtgcttcgtggaccgtacggtggatatcaatgtggccgcacgacgtatcgcatggggcaagttcaccaatgccggacagacctgcgtggcacccgactatgtgctcgccacgccggatgtggccgaggctctggccgagcgcatcgccgtagccatcaccgaattctatggcgaagatccgaaggcctcgcctgattttggtcgtattatcaacgatcgtcattttgaacgactgtgcaagctattgccggtcggcaccgtgccgtctgaggagccgagctcgccgctggtacaggtggcatcggcggtaggcgcggccatggatatggtcgggcggcgcttcaatgtcgcggctgccggacgcggaagcgcgggggagacagccggtggtggcaccggtagcgcgaacaatgcggcgaagccggcggccggttcgaatacggcagccgctgatagtgatgcgactgcctcggccgctgttgagccgagcgagattcacaaggtgcccggcgtattcgatccggccgggcgaatcgtttgcggaggcaaggtcgatcgcgccgcccgatatatcgcgcctaccgtgctatacggcacgtcaccggatgcgccggtaatgaaggaggagatcttcggcccgattctgccgatcctggtggttgaggatgccgagtccgcaatccgattcatcaacaagcggtcccggccgttggctgcatatgtgttctcgcgcgatcacgaggttcggctgactttcgaacgtcagaccagctccggagctttgggatattcgttgccgttgggtcacctgctgtccagccgactgccgttcggtggcgtgggcgcgtccggcatcgacgcctaccacggcaaagcaggcttcctcaccttcagccacgtcaaaaccgtggttaccaagccgcagttccccgacactctgcgcctcgtgtacccgcccttcaatgaagccaaggccaaactgttcaacatcatcgccaaattcagctagcgtgatatcgctcgctgatattgggtgatggcgttgtcatagtgacgttcgctgtcccggcagccacgtcaatcgattgattcgtgtaccgggccagatttttctgtcctggtatttgatttcgagtcattttctgcttaccgggacaaaactgacgccgaaagtatcgtccgcgtattacgaaaatggcggaatagtgcggttttgcatggaagggaattccaaatattcctatattcgaggtgttcaactgtcctggtttgcgaaaaagagccgaaatcggctaccgggacagaaaaatctggcccggtagccacgtcaatcgattgacatggccaccgggccaaaaatatgcggcagatgcgccgcttctgttacttcagggctttgaagccgatgtcgtggcggtagaacagtccgcgcagctcgagcttgtcgatgatcgcgtagaccttgtcctgagcggacttgatgtccggggcggaggtttcgacgagcaggacacggccggagttggcaatcagaccacccttgtcgtcggaggcgacgccggcatagtagacatgcgaatcctcgtcgacctcgatctcgggcacacgggcacccttgatgacgttctccgggtagccgttggaggcgatgaccacgccgagggtggcgttggactcatcccagatgaattcgggggtttcgccgtcgagaatggcggagatgccggcaccgaggtcggaggtgagcttcgggagcacgacttcggtttccgggtcgccgaaacgagcgttgaattcgatgaccttcggtccgtcggcggtggcgatcaggccggcgtacaggatgccggtgaacggcgtgccttcctcggccatgccttcgacggtggggcgcacgattttctcgatggcctcgtcgaccacggactgcggaatctgcggcaccgggctgtaggcacccatgccaccggtgttcgggccttcgtcgccatcgtgggcgcgcttgtgatcctgggagatcggcatcggccagaaatcagtgccgttgacgaagctcatcagggagaattcctggccgtcaaggaagtcctcgataacgaccttggcaccggcggagccgaagcgatgatcgatgaagatgtcttcaagcgcacgctgggcggtgtgctcgtccatggccacggtcacgcccttgccggcggccagaccatcggccttgatgacgatcggcgcgccatgctcgtgtacgtaagcctgagccatgtccaagtctccgaacgtctgatatttggcggtcggaatgttgtgacggtccatgagctgcttggcgaagtccttggaaccctcgatctgggcggcggccttggacgggccgaacgccttgatgccggcggcggcgaaatcgtccacgatgccttcgatcagcgggacttccgggcccacgaacacccagtcatagccattgttcttcacgaattcgataagtgcggcgtggttcgactggctcagctgcgtggtgtggatgccgtccttgagcatgcccgggttgccgggagccacggtgacttcgtcaatgctcggtgccttgagcagcgtgtaggcaatggtatgctcacgcgcaccggagccgatgaccaatactttctgacccatgtttttccttcctaaagtctttggctcccctctttgaggggagccggtatctggagctacttcagtacgatttgcgtgtcggtggtgtcggtggtgatctggccgagcacgtaggcgggttcgttgttgtcggcgagcagcttcagcgcctcgtccttgcgggcggggtcaatggccagcaccatgccgatacccatgttgaagatgttgtacatctccttgtgatcgatgttgccggccttctcaagcacgtcgaagatcgggagcacaggccaggtgccaagcttgatctcggcggccagaccgtccggaatcatgcgcgggatgttctcgatgaagccacc

SEQ ID NO: 1474 - DNA, 10802 bp, Unknown
  R257_15m  MAG No. k141_28311
caggctccccactctgaggggagctgtcgtagtgagactgagggaagcataacggctcaggccagctcacgcgagcactccccccagtcgcttacagcgacagctcccctcagagaggggagccaaggttaccgcctattcagtgtcgatcacagctggccgacaaggtcgaggctgggctcgatggtttcctcgccaggggtccagttggcggggcagacctggtcgccgtgctcgtggacgaactgggaggcctgcacgcggcgcagcagctcttcggcgttgcggcccacgttggaggagatgacctcgtaggccacgaccttgccctccgggctcacgatgaagtcgccgcgctcggccatgccatcggcctcgttgtaggtgtcgaggtccttggccagcagggcggtcgggtcggcaagcatcgggtactcgatcttggcgatcttctcgttggcgtcgtgccaagccttgtgcacgaagtgggtgtcgcaggagacggagtagatctcgcagccgatttccttgaacttggcgtagttcttggccaggtcttcaagctcggtggggcacacgaaggtgaagtcggccgggtagaagaagaacagggaccagtggccgagcacatcgtccttggtcacttcgtggaactcgttgttctggaatgcgttcaccttgaaatcggtcagttcatgctgcagaagagtcatcatcggtcctttcgggaattgttaatcttcaagcgtttaccaccacctatcgtagtgtggcggcacagggctcgcacggacagaacatatgagccttatcacaccagccacagcccttgtgctgactatcatcacggcccacccttaaacaggattgagattgtgagcgttctcattatgctttgggcaaagccagattatgcatgcagtcgcgaatccgcacttccaatcgctactatgggtaccagcagtccgctgataatggaggtttcatggctcagtcagacgttgaacaggaatcgaccgcaaatgcgacgtggagccgtatgctccaaggcaatcgccgattcgccgaaggcaagcccgaccacccatggcaggacaaggagacccgccagacgctgcttgatggccagaacccggatgccgcggtgctctcctgctcggactcgcgcgtacctccggaaatcatttttgatcagggcctgggcgacctgttcaccgtgcgcaccgccgggcaactcatcgatagcgcggttatcgcctcgctggagtacgcggtcaagaaactgcacgtcagcctgatctgtgtgctcggtcacgagcactgcggcgcaatcgaggccgccgagcaggagctggacgacctgatgcacaccatcacttccgaagccgacggctcactggaggccgcggatgcgatggacgacctcgacgagcacatcgccgccgccgaatcgattattctgcgccaggccggcatgtccgtctggcaggcgcgcgaagccgagctcgacgcgcatgaagacatcgagcgcgtacacgtggcccacaccatcgagacgctggtggaacaatcccccatcattcagcaggcattggctgccgaccagctgatgatcgtcggcgcccgttaccagctcgacaccggcaaggtcgaggtgctgagtttctgaccatcagtcagaccccgttcaccgggggtaatgcggtcgtggtacatctgtgtgcagagagatcgaagaacacggaagtctgaaccaatgccacctgcccttactattcactacggatccgccacctatacccccaatcctgcacgtgccacgaccatcgggcgtgcgccggattgcgatctggtgattcacaacccgtacgtatctcaccatcatgctcgcgtcacctttaccgacgatggttggctcttggaagacacgggtagtgcaaacggactgtccatcaacggcattcacaccacttccgtactgctgctgaacagcaccaaagtgacgctggcacaaggtgccaccatcgtctgcatcgtcggaaccagcgggccgtccacgccggcacagcccccgcgacgccctgcggcaaacgtggcccagcctgcgctaccgccggcaccatcagcgcaaccggcacaacccacgcaactcgcgccgcaacaggcacgcccagtagtgcaacccacaccaccagcaccgcaaccggcacaaccggtacaaccgcaaccaacgccagccccgctggccccgcaccgcgtatccccggccctcgcgcacctgcaacagcaaccccgcccaacagcagtggcaccgacagcagtatcgccagtgccggtatcacccgcatcaccatctccgtctccctgcgcatccccttccccatcgaatgccgccggcaccgttctggcaggcagcacgcaagcggtaaggctcgaatcccaactcaccaccaaccgcgtgcacgggtccttcagccccgagcacgacaccacaggcgtcatcggccgcgatacctcctgcctgattcgcatcaacgattatctggtctcccgcaaacactgctcgctggaaaccaccagcagcggcatcctgctcactgacctgaactccgccaacggcacttacgtcaacggccgccgcgtcgcgaagatctggctgcgggaagacgacgtcgtcaccgtcggcaacaccgacctgatcgtgcatgaaggcgtgctgtgcgaccgcacgccgtttgtcagcaacgacgcggttatcgccgaaaacatcggactgaccgtgggcaaaggcacccggctgcttgacggcatcaacgccgtattcgccaagggcacgctcaccgccgtaatcggaccttccggcgccggcaaatcaacattcacctccatcgtcgccggtctcaacagccccacggacgggcgcgtgctgtttgatggatacgacgtgcatcagaacatcgaactgttgcgcagccgtatcggattcgtgccgcaggacgacgtggtgcaccgcaagctctctgtggacgcggcgctcgaatacgccgccaagctgcgcctgcccggctcaaccaaggccgagcgcgccgaaatcatcgacaacgtgctcaatgagctggaactcacgtctcgccgtaagaatcgcattgacagactgtccggcggccaacgcaagcgcgtgtccaccgctatcgagctactcaccgaacccgaactgctgattctcgacgaaccgacctcgggcctcgacccggcgctggatcttacggtgatgaccatgttgcgccaactggcggatgccggccgcgtggttatcgtggtcacccattcactgtcgtatatcaacaagttgtgcgataacgtgctcatgctcgctcccggcggccatccggcattcttcggcaccgtgcaggagatgagccaggcgttcaacggcaaggaatgggccgacatcttcaacgatgtcgccgaatctccggaacgggtgtattcgattactgattcacgccagcgcaccatgcaggccgagtccaccatcacgcggcacaccgagcatgagaaaccggcaaagccattccgcatcaaacagaccatcactctggtgattcgtcagctgcatttgatcatcgccgaccccggattgctgatcttcctgctgttgctgccattgctcctaggactgctgtcgctggttgtgcccggttctcatggcttgggtgagcccgatttcaaagacgccgccaccgagccgaaccagctgcttgtgctcgtcatactgggtgcctgttttatgggatcggctttgtccgtgcgagacatcgtctccgagcgagcgatttacggccgcgagcgcgcggtgggtttgtcgcccacgtcatacaccgcctcgaaactcatcgtgatgggtttgcagaccttgttgcaggcggcgattctgaccactgcggtcagcctcggcaagcccggcccggaccatggtgtggtcactgattccggcatacccgaactggtgttggcgatttggctgactgcgtggacttccgcattgttgggcgaagtcggctcggcgttggtgaagtcgggagaacagacgatgccattgctggtggtgctggtcatggcccagttggtgttctccggcggcatgattccggtcaccggccgcgacagcctcgagctggtcagcatgatcttccccggacgttggggcttctccgccgccgcctcggatatcgggctcaacgatctgctgtatggccccaccaaggtgccgatgttcaaaaaggatgatctgtgggagcacaccacggatcagttctggttcaacattggcattctggggattatggtagtcgtcttcaccattgtgctgcgtatttgcgtcagcaatgccgtggccaagatgcgtcggcgctcatagaactggatcgaaactagcccacaaccggcttacttcattcattaggtcaattatgcgttcatttggtcactgcactccaacactgaccattgaaatgccgccattccaacgcctcaccatgccgacaacccaccaaatgaacgcgcaacctaccaaatgaatgaacccagccctatatttggtgctacaacgactgcaaatactgccccaaatgcggcaccgcaaattccagctgcccatgacctgccgggcggatgagtttgtccttgaatcgtcgaaggcgagcagcgcatcggaaacaccggtcgacacgtcgtccgcggtaatgacatttgaacctcgatgttgtgtggattgccacatgtagtagccaacaagctgcaccatgtacgggtatccttcagactggcgagcggcttcaagcgcatcttccccactgatggtcttgccggaatccgcaactgtttccaggaacgcattcttgacgtctggaagcggcacgttatccaattcgcggcgtagcgcacggcgcaggaatgtggttacctcgttatccagcaaatcgttgaccatatacggcaagccggcaaatacgatgacaacgcccttcttatcctcatcaggcgtatcactttcatcggcatccgtaatgacgtgctgcacggctgtagcaatagccaccaaatcatcatgcgaggccgcttgcgtctcatcgatggtgatgagaatgcccttccccttgccgagtttcttactgcccagccagcacaccccaatttgacgtgccgctcccctagagttgaagccatgtcacttggtttgaatatcctcctgatttttgtatttctcgttatcggttccgtgttctccggcaccgagttggcattggtctctctgcgcggctcgcagatcgagcaaatggagcaggaggacgctcgcggcgccaaagtcgccaaaatcgcacgtgacccgaacaccttcctctccaccgtgcaaatcggcgtgacgctctccggcttcctgtccgcctcgttcggtgcctcctccatcgccccctacctgattccggtggtcgaaagctggggcgtgcaccccggcatcgccggcggcctggtgaacatcatcctgaccctcatcatctcctactgctccatcgtgatctccgagatggtgcccaagcgcatcgccatgcagcgcaccgagcagatcgcgcgcgccgtggtgcccgccatcgacgccttcgccgccgtctgccgcccgatcatctggctcatcggcaagaacacgaacggcatcgtccgcctgctcggcttcgacccgcagcagaccgagtccgaggtgtccgacgacgagctgcgcgtgctggtcagctccaacaccaacctttccaaggacgaacgcacgattctggacgatgtgttcgacgcgtccgaaaccatcgtcgccgaggtgatgcgcccgcgtgccgacgtggtcttcatcgagggcgaccagcccctggccgaggccgccgcgttcgtacgcgaccagccgtactcccgttacccggtgaccggcaaggatttcgacgacgtgatcggcttcgtgcatgtgcgcgatctgctggacgtgcgcgatccgaacgccaagatcgtgcgcgatgtggtgcgcgaaggcatctccctgcccggcacctccaagctgctgccgagcctggaactgctgcgtaagcgcggcatccatctggccgtggtcatcgacgagtacggaggcacggacggcatcgtgacgcttgaggatatgaccgaggagcttgtgggcgatattcgcgatgagtacgatctgcccagcgagaagggcggcgaacgcaccacccgcaccgcgttcgtcaatggtgtggccacgatcgaggccagcatgaccattgaggacttcgccgatctgaccggcatcgaattggaggacggcccgtacgagacggtcgccggctacttcctgtccaagaccggcaagatgggtgcggtgggcgacgtgctgcattccgacgacggctacaacatggtcatcaccaaggtggatggccgccgcatcgaaaccatcgaagtccgcaaagccggtgccccggaccatgcgccactgccagccgaatcacaaagcgacgatgccaactagccacgtgatattcaccacctattcgttcggcccggggcataaccaaaaatcgtagaattatatggacaggttccacctactgaaagaaggaacattatgacacttgcatttgttgtgccgggccttgatgaagcggccagtgagaaggccatcgccatcctgcagaaccgactgagccaggagcaggaggccgctctggtcctcaagcacgcgcactggaacgtgaccggcccgaacttcatcgccgttcacgagatgcttgaccccgaggtcgaggccgtgctggctcaggccgacgagaccgccgagcgcatcgccactctgggcggcaccccggacggccgcgcggacgccatcgtgcgcaaccgcacgtggaagtcgttcgacgccgagggccgcgtgggcaccgaggagtatctcaaggcgctgatcgagtactatgacgccttcatcgccgacgaccgcaaggccatcgccgagctggacgagctggatgtgatcagctccaacatcatccaggaccacgtgcaggaactcgaaaagttccagtggttcatgcgctctcacctggcataagtaaaagcagtattccgtggctcccctcaaagaggggagccactttcgtctcacgtgaaatagagagtctccacatacataagttggaaaagtgtataaaactccccattttgaggttggaaaacgtagccaaaaccgcattcttatagttggaaaagtgtaaaatatgcgctataaacagttggaaaacgtgcccagcatagatgcaaggcctacaaatgactggagattctcatgctgcgaagaaaaatcgagacacagctggaagcttggagatccgcgccgaaacgcactgcactgctggtcaccggagcccgtcagattggcaaaacctatatcatcaggcactttgcccaacagcattacgaccatatcgccgagctcaatttcatcgagaaccccgacctcgttgcattattcgatcggccccgcgatgccaaaaacctactgatgaggctggaactggccgtaaatacgccattagtacccggcaaaaccctgattttctttgacgaggtccagcgttgcaaggaaatggtcaccgcaattaagttccttgtagatgatggtcggttcgattacgcgctttccggctcgctacttggagtcgagctcgaagatatacgctcggtaccggtcgggtacctgaccgagctggatatgtatccactggatttccaagagttctgctggtcgcagcatatcggcaacgacgtattcgatatgcttgccgaatgctttgccaagcaccaggaagtggatgagttcattcatcaaaggctcatggagctatactccaaatatctggtcatcggcggcatgcctgccgcagtcgactcgttcgtggcaaacggcagcgttgcggacgtgcgcactatacaagagaacataaagcgtgaatatcgccgcgatatcagccaatacgcgcgcaaagaagaccggctgcatatccgcgctatctacgatttggtgcccagcgagttaaataacccaaacaagcgctttaccttcgccaaaatcgaaaagaacatgagattccaatcggttgcttccgatttcgattggctggtcaatgcggatgtagccgtcgccgcgtacaacgtggacgaaccgtgcacaccgttggagatgagcaaggaacgtaacctcttcaaactcttttacaacgacgtgggtctgcttaccggctcgtttctcaagaaaaccgcgctcgacgtactcgacggcaaccctgatatcaactacggttcaatctatgaaaatgcggtggcccaagagctacgcgctcacggatttgacctgtactactacaacagtaagaagcttggcgagctcgatttcctcatccaagaccgcaacgatcacgtgctgccgattgaagtgaagtccggcaaatcctacaaacgccatcgcgcaatggacaacgtgctcgcccaccctgaataccatctcaatacaggctatgtgcttggcccgtgcaacgtctcagtcgaagggaatgtaacctacctgcctgtatacatggccggcatgttccataacgaatgacgggccgcacacttagtcaacaagtacaggccggtcagatggttcggactggtcagagggcccgctctgatagttaggttggtctgaacggactggctgggctggttggtctgagtagctcggctggaccgatcggttcgcccttgctggccttcacactgcttcagctccagctgaagttcgctgatgcgccgttcgagttcatcgatgcgccgcacttgtggcgaagtgagactaaggggagccgagagatggctcacaggccgagggcaccggccacggcctcgtgttcgggatcggcctggccgatgtgtacgttgacgtgaatttcgtcatcgcccggctcttcgagaatgtcggactgggattgcagcatgctcggcttcatgaagtggccttggcggtgggaaaggcgttccatcacctcgtcgaatgtgccctgcatgtagacgaacaccacgccttgacggcgcagcttgtcgcggtagatcttcttcaacgccgagcaggtgactacggcgggctcgccggcggccacgcgctcgtcgatccacgcggcgatggtgtcgagccaaggccagcggtcttcgtcggtgagcgggtgtccggcggccatcgagatggtggcgcattcggaccatgcgaacgaatccgatcaggccatcagccacatcgccggcactgaagcctgacccgtcatcgtcacagcaccacgcggcggttgaggtcgcgacgcagcgtcttccagccgggtaggtaggcggtcatgcggcgttggaatccggcgccatggccgctttcccacagatgcgtcatctcatggaccaagacgtattccaggaattgcggttccatcaatcccaattgaaggttcatgcggatgcggccggttcgcggcgtgcatgatccccagcgcgaggccatgacccgtagcgtgatatgtgtgggctgccggccgatgaccggcccccacttggccagcagctgtggcaacgcggcgttgatcgcggccgccgcttgtcgtttgcgttcgtcggtccagatttgggagcggtcaaaatacggctggacgttcgtaccggcttggcccggcccggcgtcgccgattctcggacgactgatatcaccggttttcggacggccggcaacgtctccatcatggccgctggcaccagctacgccacgacctccgttctcgaagcctgcaccctcgttcaatgccatgatggagcgccgttgcgcctcagccatgcgctgctgctgggcgagaatccacgaatgtcgctctttgacgaaatccgcgatacgactctcgctcatccgcatcggtgcggagatttcgacgcggccgctcggcggtttgatgcgcaaatacaggtttttgatgggtttgcgcgtcaggtgcagatggatgccgtcaatgtccaacgactgcccggcggcagcggaccgaacggatttcggcgcaccggacttcggagcggtggattgacgacggcgataaggcatgcaagtcattcttacacaacggcggacaacaagcggcacacaatgccgcccctcacgaatcggcaaccggcgctgctacattcaatccgcataccaactgcccacaccggagaaggtcgcgcaggagaaggcctcgctgctcgagatcgacgacagcttccagaagatcgtcctcgtacgcgacgtggtcaaacccgtccgcgacgaacacggcatcctcacgatgagcgtctacgatttcctcctcgacccggacagcctgacgatgtgacgccggacggccggcaaatgccccggaacgcagcccccccactcctcgaacaccgccttcgcggtggccgaggacaccatgacgagacagccgagcatgatggcacccagcagagggtgccgaagttcgcgatgacgtactgccacaggtccgacccgtccgtgtagccgtcgaagcgcagcgcctcgacggggacgagaaatccgtcaagcgcatgcgcggcgtcagatacaccgtcctgaagaaccccggcaagctgaccgacagacggtccgaggcgtccgggaacctgcggtacacggaccccaagggccggccctaccgttc

SEQ ID NO: 1475 - DNA, 12870 bp, Unknown
  R257_15m  MAG No. k141_28453
catcgaaacccaccaccagaagcacgccctatccgaggcgatgcgcgtggtcggagacatcaacaagtacatttctgccaccgaaccgtggaagattaaggacgaccaggctcgtctcggcaccgtgctgcacgtggccgctcaggccgtgtctgacgcgaaccacctgctcgcgccgttcctgccgcactccgcacagaaggtgtgggaggcgctcggcggcaccggcaccttctcgccgctgcctgagctcaaggaagtcgaggatctcgacaagcccggcttcacgtacccgatcatcaccggcgattacgagctcggtgtgaacgtgcacccgtggaagagcgaggcaatcgaggtcggcgccgtggtgcccaagcccgcaccgatcttcgccaagattccgaccgaggccgtggaagaggagctggctcgcttcgatgaagcgctggctgctcgccgtgccgccgaagccgagcgtctggccgccgagaaggccaagctcgccgccgagtgattcggcattgctagctcgtagctgacgggccacctcgcacatgaagtgttgcgaggtggcccgttgccgtatgtgcggtcaagccccgacaatgcgaggccggttgtcggcgggcgtcacaaattcgtcacactccgccaagacttttcccagacaagcacatcaattcgccaagcatggagcggttatatagaagatgtcaacggaatgaagttcataccggtggcgaggttcttcgaaccccataactgaacccttcttctctcttctctctcacccggcggccccctccgccgggtttctttttttaatgctgggaatgccatgggccgcatattgaaaaaaggattatggcagagtgctgtctgtttacaataaggcattgctgttctagaaaataacaaagaaggggggactgatgatgtataccgtcacattttcgggcaacctgactcaagcggaatcggccttggtcaagcgaggcgccatacagatcgccgcgttgctggccgcaaaaatcactggccgcggactcatcatcaacgacggtgacaccgaatactcatgggatttcttcctggtcgatgccagcagcgatgagcggcacacctttgacgagaggctattgcggatgctgtccgactacatccacgccggtttccccgatgccgtgatccgccacgccaagcacgaggctccaaagctcggcaaataatattggtcgcgtggtgagtcccatacttccgtcggaatatcgctatcgcgatatggtcgcatgcctgttgcgcattgaagcgttcgacctatgcgcagttgatgttccggtgatgacggcaaccgattgacgcgattaccgggacagatttcgctgtcccggttcgtgatttcggcttctttttgggaaccgggacagccccccctgtaaacgcccattatccgtaatcccaaaaccccggaattccgccgatgtacgatggcgaatattgcacggtggggtgataggtgaatgaaattttgtcttggttgctcaaaaaggggcgaaatggagaaccgggacagcgaaatctggcccggtccacacataaatcgattgacatcgctaccgggacatcggacacggacaccgagtcgcgcagcgtcggcgcaacatggatactgtacgactttcgcgataaacgttatattcttcgtcgcctccgccgggcgagctcatcgagtggcgttgccgtcaaagtgaaatcgaatacggcacctcgcaatgccaactgccgcccgacccggtaggcgagttcggcttgggatggctcatcggccatgttcgcggcagtggcgatgatgacgatccaatgatgatgtcgcagcagttcgcgcttgtcgttgtcccgccgccactggtttttgtcggtgcgatgatgatcgccgtcatattcgatggcgacgcgaaattcgggccaagcgagatcgagcgttatcggcgcgccgttgctgaatgtcgcgccgggcaccgtgtaatttgtcacggctggcggaagcccgtatttcgtcgtcgcgatgcgggtctttgattccatcggagagtccacgcggggcgtaatgaatgcaagagcgatcatgcacttggattttgcgttgaatttcgggagtccagtgacttgccgcacgaagtcctgataaatgccgtcagcagtgcggccgttcgccagacccggcttgcgggcgattgccgtaaggattgcgtcgccaagtatgaccagcgattcgagcgatatatgagcggcgagttgtgcccaagtgtgtatcagatccagtgcgtacacatgtttgttgatacgcacattgtgcgcatcgctcagcggcttccagatatgtggtgtcgttggcggcacgatggcacgtattcgtgtgcggtgtgagtcggagacggtatggagctcggcggggtcgatatcgcaatccttgggaagcggcacggattgcagtatcagcgatgtggccatgccgaagagcaccggttgcccgagctgttgcgcggcgtccgtgcatcgtttaagcatttcccgcttacgttgggtgagggtttcgctcattgctggcgacacagggcctgtaatcacagttggcgcggaactcgccatacgtggtgatgaacgtagctcaggattgatggtgcgcgcagacgcaacgcccggtgtgtggggccgggtccagccggacggttcgtcgtcgaatacgccgggcggtggagtgggcaatatgtcgttcatgacgccaccgtagcgcagcggtcacatgctcgccatgaaaaccggggtatgtggctctagcttgcgggagatgtggataactctgtggataactagttcggaacaattagcgaggctggaacctaccggcaattggccgatgatgacggcacttttgctcagctcagccgcgatagtctcgaataggtgcggccgggcgtactcgcataacgtaatgccccttctctctgaacagagagaaggggcattcgaatatatgctcccgccagcggaacgtcagcggcagcggcgggtgagtggctgccaggggtcgagctcgaccggttcggcggcgagcagggcgcgggtggcgtcgtcgaggtattccttgcggatgatgagctcggtaacgtagcggtcgaaccaggcgtcggacatgacgtagtagccgtccttgccggcgtccttgccccagctgttctccaccttccagcggttcggcttgccgtcctcgccgaggttcacgccggtgaaggtcatggcgtggttgctcgggctgtcgccgtattcgaggccgtgggccttgtcgccggtgaactcggtgccgaacagctggtcgacgcgcaccacggactggtcgaagaagccgtccttgcgcagggcgaactgcgtgcagtcgcaggcgaaccagatcgggtggccggcggtgagctggtcaagcgcggccttcttgaacacgtccagcggcacgttgacgaactccatatcgccagcctcgaccacgttcgcgctgaagcggatgcggtagcgccggttgaacgggcggttcttgagtggggcgttggccagcgtcgcgaaatcgttgacgtccaccggcacgtacttcttgtagaactcaagcggggtgatgccgatctcgcgaatctgcgggcgctcgtccttaccggttttcggcttgtcggacttgtccttatcgcacttgcaggccttggcgtcggatttgccctcgcatttgcaggagtcgccgcacttgcaggattcggtcttgccgtctgcgtcggcctcggccttgcacttgcaggcctcgcccttcttatcctcatcgtcatccttggtgcgcgcgaagaagtcgaacttctccggcggctcgccaagcgacacggcgcagatgcggtacacggtgcccatgtactcgtccttcagcgtgcgcagctcgtcctcgccagcgcccgcagccgaacggcggcgcagctcggccgcgaactcgcgcagcttggagttgaggtactgcttgaaatcatcggaattacgggagttctcagactccgggtaggcgctcttgggcaccagaccgtacttgttcaccagcgcggcgaacatctgccaccagccgccgtcgtcggacgggccccagttgatggcctcgaacagacgcgaatcggtcgcctcgtcgagcgtgcgcagcacgctctccagataagtgttcgacttctccatcgcgtcccagaagaacaggtaggtctcggagaactcgaaatcctcaagattccagcgatgcatgagttcgtaacgcagcgtgttcagggaggcgaacatccagcagcggccggaacgctcctgattggtgatcgaaccttgcttaagttcgatggagaagtcgcgcggcagcgcacgcacgccgcgatagtcggtggccgccttgagcacgccggccgaaaccgccgcgtccgccgcgatcaggttggcgcggtccttgttgaaatcctcggtgtacgtacgcagaagttcgggtttgatggcccgtgcgctggcgtctgtcgtcatgatgcccctgtctgatgctgatgatgctgatggataatccgttgccggcggcggggactgtcaccatccgggccggcggactgctgacacgaaagtataaggcatgtccagcaaaggctcaggaaatacaaaattaacaaacggatgtttgcccaatatacagtaagtgttttcgcggttttccgtacaggaaaaagtcggaaaagtcaatacccatattccatatattggactcaatttgtggttttgagcgggggggggtatcactttcccagttatctgggaggtggttgggtgttcaagtacatcatcaagcgcattgtgaactacgtgatcatgctgttcgtggcagtatcgatgacgtatttcctggccagcgcattcatggatccgcgttcgaactacatgtcgcgcaatccgcatccgccgatcgcgtcgattaaccggtcgctcgatctggccaacatcaacgaccagacgccggtcgtcatccgctatttccgctggctcaagggcatcctcacccagtggaactggggcctgagcccggaccagtcgccggtggcgccggccatcgcctcccgtatctccgcttcgctgcagctggtgacgctcgccaccgtgctctccatcctcttcggcgtgagcatcggcgtgtacacggccatccgccagtacaagtggcaggaccgcgtgctcaacaccaccgcaacgttcttcctggtggtcccggccgccgtcatgggcctgatggtggtgctgctggccatcaacttcaacaacatcgtgggcagccgcgcgttctacgtgaccggcctgcactcctaccaaggctccaacccggtgctttgggtgtttgactatctgcagcacctgatcctgcccaccatcgtgatgacgattccgggcatggtgggctaccacctcacccagcgcacgtacctgctcgacaccatgaacgccgactacgtacgcaccgcccgtgccaagggcctgacgctcaacgcggccattcgccgccacgcactgcgcacctcgctgattccgaccgccgtggatgtggccttctccatcgccggcgtgttcaccggcgcggtgatcaccgaaaacgtgttcgccatcaacggcctgggcatgtacttcacccagaccatcgccaacaacgacatcaacggtgccgtggccgtggccgcgttcggtggcgtgtgcacgctgtccggcgcgctgctggcggatatcttctccgcctggcttgacccgcgtatccgactgagctgagccccgcgcaaaggacgatctaacatgatgaacgacaacgaaaacatggtctccgacgccgccgcccaggatatggaactcaccgatccgcagggcagcgaaccgcagtccgccgacgccaggaacgcccaggaggcttccagcgccgacgacttccaccgcaccggccgcatgcagctgtacgtgcgccgcttcatgcgccgcccctcggccgtggtgggtctggtggtgctgattctgctgattcttttggcgattttcggctcgaaattctcccagtggagctacgatgagcccgatttcgccgccctcgcctcgccgccgtccgcccagcactggctgggcaccacggtcggtggctcggatatgtacgcgatgatcatccgcggcctcggccgttcgttgaccatcggtatcttcagctcgttcggcaccacgatcatcgccgccctggtgggcacggccgtggcgttcttcgaaggctggttcgagcgcgtgggcatgtggctgctggatatgctgctcgtcgtgccgtccttcctgctcatcgccctgatcgtcggcatggcggccggcggcagcgactggctgtggctggccatcggcctgaccgcattcggttggatcggctacgcccgtacgctgcgcacgctgaccctgagcctgcgcgatcgcgaatacatccgcgcggcgaagttcatgggtgtgccgtccttcaccatcatcgtgcgtcatctggtgccgaacctgggttcggtgctggtcatcaacaccgtgctcggcgtgatcggtgcggtcaacagcgaaacctcgctgagcttcctgggcctgggcatcaaggcgcccgacacctcgctcggtacgctgctcaacgccggccagtccgtggtgcagacctcgccatgggtgctgatcttcccgtccgtggtgctggtcgtcctgaccttctccgtgcagctgatcggcgacggactgcgtgacgccatcgacccgtactcccgttccggcggcaaggccgagtgagaggggagacgggcatcatgagcgacgaacgcaacgcaagcaacgtaacaaccaacaccaaccccaacaccacaggagcgcaaggcatggcatccgaaccggtgatttcagtacgcgacctcaccgtcagcttcgcctccgaagccggcaccgtgcacgcggtgcgcggcatgaacttcgacctgtaccccggcaagaccctcggcatcgtgggcgagtccggctccggcaagtccgtgacctccatggccatcatgggcctgctggacaagaacgccagcgtcaagggctccatcacctaccacggcgaggaattgctcagcaagtccgatcttgagatgagcgagatccgtggcaagggcatcgccatggtcttccaggacccgctctccgctctgaccccggtgttctccatcggcgaccagatcaaggaagcgctggtcacccacaatccgaagatgaccgaacagcagattcacgaccgctccatcgagctcatgaacctggtcggcatcccggacccggaggaccgcctgaagtccttcccgcacgagttctccggcggcatgcgccagcgcgtgatgatcgccatggccattgccaacgacccggacgtgatcatcgccgacgaaccgaccaccgcactggacgtgacgatccaggcccaggtgctcgaagtgctgcgcaaggcccagcgtgaaaccggcgcggccgtcatcttcatcacccacgatctgggcgtgatcgccggcgtggccgacgacatcgtcgtcatgtacgccggccgcccggtcgagaaggcggacgtcgactccatcttcgaccacccggccatgccgtacaccatgggcctgctgggtgccgtgccgcgttccgaccgcgaacgcaacagccgcctggtgccgattcctggctctccgatgaacctggtcaacatgcccaagggctgcccgttcgcgccgcgctgcccgctggccaccgacatatgccacaccaccgagccggccatggagccggtgccgggccgcccgggccagttcgtggcctgccaccgcacccaggagatcgtggacaagggcctgaccttccacgacgtgtacacggtggccgaggccgccaagtcgaagttcgccggcatcccgcgcgacgaacgcaagatggtgctcgacgtcaagcacatgcgcaagaccttcccgctgaccgccggcggattcctgcgccgtaagatcggcgaggtcaaggccgtggacgacgtgacgctggacgtgcgcgaaggcgagaccgtggcgctcgtgggcgagtccggctcgggcaagtccaccacgctcatggagatcatggagttcaagcagccgcaggacggcgagatcgagatgttcggcaccaagctcgaacacaagattccgcgcgagaagcgccgcgagctgcgttcggccgtgcagtatgtcttccaggacccgatgagttcgctcgacccgcgcctgccgatctacgacatcctggccgagccgatgaaggtccagcactactccaaagagcagatccgcgaacgcatcggtgaactcatgcgtctggtggagctgaaccccgaccaggtggaccgcttccccacgcagttctccggcggtcagcgccagcgcatcgccatcgcgcgtgcgctgtcggtcaacccgaagctcgtgctgctcgacgagccggtctccgcactggacgtgtccatccaggccggcgtgatcaacctgcttgaggacctgcagaacaagctgggcgtggcctacctgttcgtggcccataacctgtcggtggtgcgccatatctccagccgcgtggcggtgatgtacctgggccgcatcgtggaatccggcgacaccgaagacgtgttcgagcacccgttgcacccgtacacccaggcgctcatcagcgccgtgccggtgccggacccgaaggcggaacgcacccgccagcgcatcgtgctgcagggcgaggtgcccagccccaccgagacgttcgaaggctgcccgttcatgggccgctgcccgctcatgcccaagctgagcgccgaacaacaggcccgctgccgcggcgaacgcccggcgctgcggccgtatgacacttcccgaccgagcggccatcaggttgcatgccatttcgcatgacggtcggaaccatatagaggaggaaataacaatgaacaagacacgtaagctgaccgcgctcgccgcggccactgcggcgcttgccatgctgcttgccggctgcggcgcgggcaatggcaacggttccagcaatgcctcgagcgccaccgaaccgccggccggcatcgattcgtcgtacaccggcgacctgcccatgccgaaggtcaccgagcgttacgacaaccaccagagccgtgacaacgtcaaggacggcggcacgctgaccctgtccatcgtcgaaatcggcccgaactggaactacctgtcttccgacggcaacaccggctacatgtccgagctgtggagctggtaccagcccagcctgctcatgaccgaccaggtcaatggctccccgattaaggtgaacccggacttcctgaccgacatgaagctcgtgagcaaggacccgatggtcgtgcagtacgacatcaacccgaaggccaagtggaacgacggctccgacatcgactggaccgccttcaaggccacgtgggaagccaacaacggctccaacccggactacaacccgccgagcaccgacggcttcgaccgtatcgctagcgttgagcagggcgacagcccgaagcaggtcaaggtgacctacaagaccccgtactacccgtggcaggaagtcttcggcgctctggtgaacccgaaggccgccgacccgaagaccttcacccagggctgggtgaagaacccgcacaacgagtgggccgccggtccgtacaaggtcgactccttctccgactcccaggtcaccttcgtgccgaacgagaagtggtggggcaacaagccgaagctggacaagatcgtctacaagcagatggccgccaccgcctccctcaacgccttccagaacggcgagatcgacgccgtggaggcctccaccaaggacgacatcaaggccatccgttccgtcaaggacgcccagctgcgcatcggctacagcaccaagacccgcgtgctggagtacaacggcaagtccaagccgcttgacgacctgcaggtgcgtaaggccatcactcaggccttcgacgtgaacacctacaacaacgtgcagttccagggcctgaactggaaggccgagcagccgggctccgagctgctgctgccgttccagaagggctacgagaacaacctgcccgccgaggccaagtacaacgtggacaacgccaagaaaacccttgaggccgacggctacaagatgggcaaggacggctactacgccaagggcggcaagacccttgagatctccttcactttcttcggtgacaacgccacccagcaggccctcgccaacgcctaccaggcgatgatgaagaaggccggcatcaaggtcaaggtcgtgaacgtggccgagtccaagttctccgacaccgtgtcttccggcaactaccaggtgctgccgatggcttggcaggctccgagcgccatgaccttcgtgacgtccgccccgcagctgtacacctccgacggcccgtccaacttctcctacgtgggcagcaagaagatcgacgagctcgtcaagaaggctggcagcctctccgactatgacgagcagaccaaggctgtgaacgccgccgagaaggaagccctcaagctgtatggcaccatcccggtctccaacccggcttcgtacctcggtgcgaagaagggcctggccaactacggcccgtccggcttcgccggcaacctgccgcaggacatcggctggcagaagtgatgatgtctgatcggatgtctattgacatctgactgatgtctgactgacatggccaccgcgccgggaacggtcggccgcacgcatcgactgcatggctttcgatgccggacgcggcctgcggcaggttcccggcggggtgtgaccgcggcagcatatgcctgactctccttatttctgcatatgatgctgcggttgggaagcctcccgtttgcgcgcttatgcgtcgcgcgcgaacgggaggcttttgcatacttgccgcgattccaccccggcaacgatttgtccaccttgctgcccgcgcggctgaaaccgtatccaccttcctcttcccggatttgtgtcgctgacggttgccgagcgtcacaaatccgggagatagtcgcccttacttgttgtcagaacttggtgagcccggatttgcggatatggtcctcccagccacccggcttaggcagtgtgaccagttccctcattgtcacggcagggatcgcggccgccacgatgcacaagcccaaagccacggacgtgactgagtaaccccagtgttgcatggcgatgccggacagaaatgtgatcaccggggcagcaatcgtctcaatcatgcccatgccggcgaatacgcggcccatatgctccttgttgatgagcaatgattggaatccgttgattaccgcattgccggccggtagggccagcagcgaaattgccagaaacgccatacgcgcaagaatccacggagccagcgctgcgccgagcgcgccgatgctcatcagcacgtagaacgatacggcgactatgccgccgcgcacatgctgaaccagcacggaagagatgagcgagccaacgatgacgcccacagacacagaaacgttcatgaaactggctgacaccacatgtgatgggtcggagccgatcgagagcaccgtaatcagcaggaacgagttgaagcacgcgaacgccagcgcgctcgacaaaatcaggcgacgttcgaatcgctcgctaagaagccagcggaatccggaaaacatctcacgccaatactgtgacgcggatgatgtcgtggtcgttgcctgctcgtcagcggcctgagtgatgttggccgcatcgccattctcatcggcctcatcgtcggcaagggcgcggccctccgcattggtccgcccgccacgatgccagtattttgtgatccgcatcgccgccgcggtttccaatagattcagcagcgcgctgactgcgaatggcagccatagaccgccgccgatcaatacgccacctactggtgcgccggcgagttcgagggcggcatcgcggccatcattgaggcttgacgccttgggcagcaattgatcgggaacgatgcctcgtagcatcgtgttgctcgtggttcctaggaggcctgagcgtatgccgaggcatatcgcaagtaccatcagcaccgggtatatgagtaatcccgcccatcctagggccgcgcatatgccgaacagtgcgaaaccaatcaggccgaacgcaatcataagttttttgcggtcgtacttatcttgtaccacgccacctggcagccgcaataccgacgatatcatggtcatgattgaatccagcagcgtcgcctgtgccggtgagcccgtgacggtctgcgcgatgagtggcattgcgaaaccttggatacttgatgacagcgacgtgcatgaatccgctacgaaccatttgccataatccgtgccgcgccatagcgacttggtggtgttgctatgtgaactgtgaccgttgggctgtgttgaagattggttgttgactgttccgatgtaatcagccattgtgatcatctccgtattcatcgatgcttgagatattctattatgttcgtcttcaagcgccgcaccggactcacccccggccaataccgcgacgccttccccgcccgcctttacaacaccgtgtgattagggaaggtcagggtactaaccctgggaaaagtgcagtattctgcattattaaccctaggaaaaatgtaattttggacaatcgcaaccctaggaaaaatgtagaatacgcgaattgcaa

SEQ ID NO: 1476 - DNA, 8328 bp, Unknown
  R257_15m  MAG No. k141_28483
cgcatatgtgccgagcatttcctcgggattatcggccagccaataacgctgatccagtcgttcgcatgccgcacggtcgcacaacgccacgccgggcaggatgaaccgttggtagcgccgccacgcgtcgaatgactggttgacgcccatggtaatgaaatcgaacacctgttcctgtggcaaggagtgcgtcagcttgggattgggctgtgcaaccacatgttcggccacatgccggccggtatgctgcgggtccacgaccggcgcgatcaatgccataccggccactcggcgaggttcgcgcgccaatacttcgcggacaagcgcaccgcccatcgagttgccgaccatggcgaatggagccgctttaccgacaaggccgtcaatggccgtttgcagccaatccgccatttccggcagcccgcaggcatgctcgggcaatgccggcgtacggccgaaaccgggcagatccagatatatacggcgaattgaatcattgccgtcaaacgccttgtcgagcatcatcagcgaacgatggtccacacccatgccatgcacgaacacgacgggcaatccatcatcattgccctcaatcgcgcagtacggctgcaattgtgccatgtgtgcctctccttcaacccggtacaaatcgcctttcacacaatagcggcagcagctcccctggtgtcagagcaatcccgaccgccattctcggtttcgaggggctgatttcgtggtttggggacatccacttccgtttcaaggggctggtcattggccaaaacccaagtacgaatagcttcatgccaacgtcatttcaccgttttggagctgtcgctactcggccatcagcccctcgaaacggaagtggatgtctcggaacgagcaaatcagccccttgaaacgcaaatagacgattgcgaatcgacttatcagccgcgtcgaacttgcaatagagatgtcggtgtatcattccccggtctgattgcgcggatgtcaggaagcgtgaagaattgtcacaaagtcgcgtgatggcgcagccgccgttcaggtggatatgccacgctgtcatgatgacggccgagccggaacacggcaaatctcgcatgctgcataggccagccggtcacggtcagccatgacaccgaaatattggaggcgcaatgggacaacaggtgcggtgcggcagacgccgctcccatggcgcgggcgcgctgattgcagccgtcatacttgttgttgcggtgctgatcgcggcatggacgctgctgccacggctattcacgcctcacgagaccgcgcgcacggccgaggaagcatattgcgcggcggtgtcgtccgacggagcccgccgcaccttgacgcctgatcaggcgcagaacgcggcgctgattgcgaacatcgccgtcacgcgcggactgccggatcacgcggcgacggtggccatcgccacggccatgcaggagtcgaggctgacgaatctggactacggcgacttggattcgctcggtctgttccaacagcggcccagccaaggctggggcacggcggagcaggtgtccgacatgacctatgcgacaaacatcttctacgaccatctgctgcaggtgccggattgggagacgattccggtggaggacgccgcgcaggaggtgcagcgctcaggctacccggaactatatgccacatgggatgcgatggcacgcgcttgggcctcggggctgaccggcgaacggtcggcgggcgtcacgtgcgcgttggagccagcaacctcctcggacgcggacgggttggttgccgccataagcgctacactgccgaatgtcaaggtctcggttatgcccctaaatggcaaaaccggcacgaacaacggcgctgcgaccaatacggccagcacaacgttgacgatcacgctgccggacggcctgtccgccgacaaccgcactcgactttgctggcagacggcaggctggctggtcacgcatgcacgtcaatacggcattgacgcactgcacgcggacggcatgaattggaaccgcaaagccggtacatggaccggcaccgaaaccgccgagcagaccgtcaccgtcacgcttgcgtgatgtgacctataacgccatcgcgaccacaaatccgactgactggagcctacgccgtcgatgccgcctgaggcacgatacggatatgatttttactcgttcgaatgagcccaatccacgacggcttcgatgttattgccatccgggtccagcacgaatgcggagtaatagccgggatggtacgggcgcggaccaggagcgccattgtctcggccgccggcggcgagcgcggctgcatggaacgcctgcacggcttgctgactgtcagccaggaacgcgatgtgtgtgaccggcgtgaccggcgaagcctccgcctccggcccgtcaatcggcgacacgtagaaatcggagtgcagggttccgtcatccacgccgaatccgagcgtgggctcatgatgcgccttgacgatatagccgagcggtgcgagcgcctgtttgtagaatgtgatgctacggtcgatgtctttcacgtgcaacgtcagatggtccagcatggtcttggtcaccctcccctggttcttgtattcgattgctgcttgcagtgtaagcccgaacgtttccaacagggccgcgcatggctatgatgagagcaatcgcacgtcgagttcgagacaatattcaaaacgaatccaaggcaatagggggaatgatgatgaccaaggcactgattgtggtggatatgcagccgacgttctgtgaaggcggcgaactgggagtcgaaggcggcaacgcggtcgccgagcggatcgccgattatgtgaacgcgcatcgcagcgagtacgcgtatatcgcaaccacgcaggactggcatatcgagccgggcgcgcactggtcggcggaaccggatttcgtggacacgtggccgaagcatggtgcggccggcacgccgaacgccgaattgcatccggcgatcaaggcgctgattatccatcatcatttcaagaagggccagtattcggcggcatattccggttttgagggcatcgaggacaataccgaccgtatccagacccgtgaggaggttgcggccgagcaatccgccggcaagacgctggccaatgcgctgaaggccgccggcgtgagtcgcgtggatgtggtgggcatcgccgaatcgcattgcgtcaaggacaccgcgctcgatgccaggaagttcggtttcgaggtcaccgtgttcgaggacctgaccgtaccggtcagcgaggagctcggtgtcgcggcccgcaaacagatgacggcggccggcatcacattggccgagtcccgctgatcaggccggatatacccagagcgagcgcacgaacacttccgtatattcaaggccgacactgccgcatagtcgcctagtcgatatgtgaagaaggcttttatggttacgatgctgctgacttcgatattccgcaacgcctcgtccgccgtgcatgaagtcgaaccgcatccgcaaggcaagcgggtcgcgttcatcccgacggcgagcgccgtggaaccgtgggggccggttcactcggcgttgagcaaacacgcgctgcaacgcctcggtttcgaggtggagcaactggatgtggaagatgtgccgagcgggtccgccgaacgcgtcacgcgtagcatcgccgaggccgactgcatctatgtgggcggcggcaacacgttctttctcctgcaggagttgcgccgcaccggtgccgaccgggccatcatcgagcaggtgcgcgccggcacgccgtacatcggcgagtccgcgggctcggtcatcacggcacctgacatcggctatatcaagctcatggaccgcacggacaaagcccccgatctcaccgattacgcaggattgggcttggctgatttccgcgtggtcccccaccatcatgcaacggccatgggccacgccgcacaacgcattctcgaccggtatggtgccgatctcagtctcaagcccctcaccaaccggcaggccctgcttgtcaaggatggcaaaacccggctgctgcgatgatgcgggtcgtcggcccgtcgcccattcggcatcaccgtggtgtgtccggcctgacatgcctatcgagcggcatcaatcacacagcaatgtggctgggaacctcgccgaacgtcaacacctgcatacatcagcacggcaaaatctgccgaaatcgcccggcgcacgagatgccagccggccccatccgtcacctcagtgccgtaccgggccaggcatggccttgagcaacgggatgaatccggcgcacagtaccagggccacgacggcgagtatctgccagtgggcggagccgagccagccgccccacgtgccgacggtgccgccgatcgcatacgcgaacctggcacggccgctgaatttggccaggtcaccaccgctcagcagcagttgtcgcgatacgatcacgccatgcgccagcaggccatagccgaggttgttgatgagccatccgacgcacaccgcggcaaactcgggaaccagtacggcggcaagggaaatcgccgtggcgattgccccgatggcggacacggcgcgcatgccgagttttgcggagagtcgcatgtagacaaacgatccgacgatgctgcccacgccgccgaatgcgtagaccacggtcagcatatcgctgccgtaccgggagccgatgcccagcaacgcatagcttgcccacagcgacggaatcagcgcaagcagcagcgatgcgatcagcagtctgacccgggtcgagcgggtgaccggagtgcgctgcggcgcgtgtgacgtgtcggccgccgtggattcgtcggcggagccgtcgccgtcatcgccgcccgcaccatcgttgccgaatcccggcatgaactcgcgggtgcggaatcgcgtcagcgcgcaggcaaatgacagtgccgacgaggtgagcagcatggccatgatggaggcgttggccaaggccgatccggcaacctggcccagcaacgtaccggccacgctggcaatcacggcgacgtagccgctgtacttgacgagcatgtcatcgtcgtcgccggccgcatccacctcgaacacttcggaggccacgtcgatgacctgcccggtcatcagcagcaggcatgacagggccagcagcagccacttccaatacgtccaaccgttgggcaccagcgcgaccgccaggcacagtacgccttccacgccctccgtggtcgcaagcgaacggaacgagccgaaccgctgcacgatccatgcggatatcggagaagcgaagtcgatgaccagattgaacgtcttgcggaacgcgatcacccatgccggcagtccgacgatcagaatcgaaggaatcaccgacccctcgaaaatcgcgttggacagcatcgaaaacgtcatacccaccaacgcccatcgcaacgccctgctcaataccgacaatccgcgcataccgtagttccttgtccttgccagtgtaacggaattatgacttctcaatcgtccccccgctgtctaaatgaaagtgcaacaccctttcactggttatctggacaatctccaatctaaagggtgttgcactttcatttagacagcgccccccatatccgcatgtcactgctgccatcataatgagccagtagacgcctttaagcgttctgacaaccatggaatcgaaaatcgctatgcacatcatagaacagcactgccaaggcaagaggtctgaccagtcgctcaatgaggacgggctgatcatcaccgatggtttcgcggcagtggtggatggagtgaccagcaaaagcgtgcaccatcttgccggccttgttcttggccgcgtccagcaccggcgcgaggcctgcggcccattcgcgcaccgaacggccggcgagcatgtcgttgccgcccacgcacacgatcagcacatccggccggtcattgatatcgccgatcatccggtagcgcacacgtcgagcggtcgcgccgagcttgccgaccgtacgccaggccaccggccgaccggtacgcttgcgacgcgcgcggcaagcagcggcataatgcctttcgactggtcgtccacgccacatccggccaccaatgaatcgccgaccatgacggcaagaatcggcttcacgccgttcgcgcctttccaatcggggccgatcggcgccttgatatccaccacgcgacccttggcatcgaacaaaccgaaccgtttgcccttcggctcggacgccaacttcacccggcccttggcccacataccctcaatcggagcaacggcagcatcaaatcacacgcaagattcccacgccacccaacatagtccgccctcctcgacctcgttagcggccagtagcaacccatattcgaaaactcgataaccatcgtcaattcgcataatttgaacgttttaggcgttttggtcgctttggacgttttatactgtgatagataaaaaggaggtcaccatggcagaatccgacaaactcaccattccacgaacaatccttccatccatcaacattgacgacataacgacattggaggcattcaccgcacgatttcttgatgagcagatcttcatcaaagatgccagcggcgtggagactcccctaccttcgcagctttgcgacgccgtcaggcagacggccatccttctcgccgaaggcaaaagtgtaacgatcagtgccaccgaacaagatctgactaccgaacaggcggcggcaatgctcggcatttcgcggcaaacactgataagactgcttgataaaggacttattcctttttcacgtccgtccaatcaccgtcgcatccggctggaagacctgcttgaatacaagcgagcctcgaaacacaccaaggattgcgccctgagccaaatgatcggcgtcggggaagacgccgaattgtacgacctgcccgagccgaccccgcaggaagccatgcatgcggtatcggaggtaaggagagtacgggccgatgctgtcggtgtttcttgatgccaatgtcatctattccatcaccttgaccgatgttctgctcaccttggccgagcatgacctttttcttcccctgtggtcgcctaacgtattacaagaagcacaggaagccgcctcccgaacactgcctgacgccgcacaacaagccttccgaaaaagactgataatgatggaccaggcattccccgaatcctccatacatgttgaggaatcggaatggagccaattcgatctgcctgacccggatgatcgtcacgtacttgcggctgcggcacagggacaagcagacgcactggccacgcgcaatatcaaggattttccccagaaactgcttgactctttctccattcaggtcatcacgccagatgatttgctctgtgtattacttagacgaaatccggaagccacagctagcgccatacgtgagcttatcgattctcgacatcggccaccgataaacattcccgactttgctaaaagacttgaacgctctggcgcaacacagtttgcagccgctattgcgcatatacgacagcctctcggcaatcattcgtactttgaccagtaacccatgaattctggatgaattggggtgaaccggcggggctggaggcgagcgggcggcggattatggggcacaatggtgtcaaggaggccgccatggtcgatgactatactgccaaaatgactgagctgatcgaactcatgcgtctgatcggcaacgatacgcagcagtgcgaggtcaaggaatgcaagcgcaagatctcctcgaccatcaccgatacgctgtccgcgttctccaacggctccggcggctggatcatcctgggcctgtccgaaaagaacgggttcacgccggtcgagggattcgacgcgcgcgccatgcaggaggcgctgagccaggcgtgcgagaagatgacgccggtggtgcggcccgtgatcgtcacctgcccgttcgaaggcgcgaatctggtgttcgcgcgcatcgacgaaatgctgccgcgcgataagccctgcttcaccaccgcgctcggaccgcacggcggctcgttcatccgcaccggcgacggcgaccggcgcatgacctcctatgaggtcgaccggctcatcgaggagcaccagcagcccacctacgatctggatatcgtgcccggcgccacgaccgatgacctcgacccgcagcttgttgccggattgttggcgcgcgtgcgcgaacagcatccgcgcgtgttcgccgaccgggacggcatcgatgtgctgctggatctgcaggtgttgc

SEQ ID NO: 1477 - DNA, 4771 bp, Unknown
  R257_15m  MAG No. k141_29046
tctgccaactgagctacgcaggaatattcaattttcatcccgtccggagttacccgttcaggtgagctcctgcgactgggcttgaaccagtgaccgtccgattaacagtcggatgctctgccaactgagctacgcaggaatgtctgctgtgtttgagatttctctcgcgcacaagtcacacatcttacatgcttgccacgaaaaagcaaattacatgcgtgtagggcatgtcgcgccgaattccgcagaatcggactcatcgaatacccactcatataacatgatgacgatgcggcgatactgtcacgcgaaatttcattgtggataacttcggaagctggaaccacataggtcgttctggctggacatcctgtttcggacccctcaaggtgggtatcaccggcaaagaagccggaatcgcatcacactcacactatggggaggaatctcatgaatgcaccactgttgtttgattggcgtcgcgacgaagcccgacgtgccggcaggcggcgtcagcaggcgcgtcagcgggctcaggaacggcaacggcgtatggatgccataatcgcgttggccgccgttatcggcctgctgcttgccttgggagtgggactggcatccacgcctcagcatgttgcgcatgcggatactgcggtgaccggagatgcggcatacacggtggaggatttcaccgatatgtctgatctggcgtggcgcaatggcaatcagtgcgaatcccggttcgactggccggtcgacgatccacaggtcgaacaacagttcgagcggccgatcaacccgtgggcaccaggtcatcgtggcgtggatcttgctgcggagcaaggtaccgtgattctgtcaccacaggcagggaccgtgagttttgctggcaaagtagctggcaaagatgtggtgagtgtacggcatcgtggaggtgtcacgtcgacattcgaaccggctgttaccgagctctcggtgggggatacgatctcccgcagacagcccgtaggcatcgttgagggcaactcggaccattgcgaagaccgttgcctgcattggggcctcaagcgaggaacggccgactatcttgacccacagcaatatgcggggagtcgaaaaatcgtactgaagccgtcatgattcagcaatgtttgtcggccggaacagggccgtacggaagaggcatcgcaggcggctagcggcgtgacgagtatgaatcacagaccggcatcggccaaggagatatatccgggggcgatcagcgcggacttgagattgctggcgctgacagccagcaacggttcgttgatggtcgggatcttcttcacgccgcctacctcggagttcctgattgaaggcatggaattcagcgcttcgttcttgttgagcttggcgcagacctgagcgatatccgtggcgatggtctgtctgtcttccatgccggtcatccattgcttgccattgacgatggatgggatgttcgagacgtacgcgccgtatccggtcaccagaggccattgcgagtcacggtccttgtcggaagcggaggtgtccttatccgcatcgtcatcggaactggatgagtcgtttgcgttgtcgttttcaggggatttgatcgggtccggcactgcgtcgcggctgagatccttcttgccggtgatattgccgacaatgcccgagatggtgatctgcggattgatatcggcggcagagccggtgtatcccagatcgtccaattccttgacgacctcggaggcgatatagtcgttcatcgtgatgatgccgtcaatacgggtgagtgtggactgcccgtcggtttttgccagacgcttgtcaagcactttcgcagtggagccttccttggcggcatcgtaggccacggcttgccaatcgttttccgtggatttgccgtccaaggtgcctgaagggctttccacaacgcccttctgatagtagcagcccagtacctgccagataccacggaacgcctcttgggcgaacgtggaatcgttggcgttgcctttttcgtccacggcggtgtatggcagcagcacttcaatgtatttggggttgtctttactggccttatccaacttgagtttggacaccatcttttccgcctgtagcttgccgatggtctgggcgtccgagaacttgacgaaggcgtccggcctatacccctcgatgctgttgccgagcaataccacatgcatgccggattccttggccagcttgagcgatgagaccagccggtccacggcctgcgcctgctcgtccgatgcagtgccgtcgctctcagtgttggacgagtcatctttggaagagctgtcttcggaagaatcaccgtcagaagtagctccctcatccgtggcatcgttggtgctcaggttctggctgatgtaatcgccgtattggcgagtggaagcgtcggcctcgactactggagccacgagcaatgtcatgttgtcgggcgcgatggcaatgccggaatcgtccgtggtgttattcgaaagatgatcgaccacaaagtcttggatggcgcggctttgcttgtccaacgagtcggacgtcgtatgatcgatatcgcctttcttgaaaccggcgtcgaccagggccttggttaggtcgggcaccagcttcgcccatttgttcagtggcgtctgctgattcagcgtaatgccgtccgaaggcgtgaacacggccacgccgccggcagaattggacgtcaccgtggtttgaccatctacaacggtcttattgtctgaggtgcacgcggtcagtgacagcaccatcgcgcaggatgcgacaatggcggcgagcagggtggttgagcggcgtgcgaacaccataagcggcgaaacctcctcaagcgggcgtgaaaacaaactgaatcacgattctagtaggccgtatacgaaaaagtcccggaccagtggacaaatcgccacatatccgggaacaattaggggtatttcgcgcgtgtatcgaacaactgtcatgattgtcgtgctgaggaacattccagatgaagcacgacaatcatgacagttggcgacatgacatgacccatgtaggtccgcacgatgtgttcgatgatttactcggccagagccttggccaggttctcgtccagcgcgttcatgaagccgtcggtgtcgagccacggttcgtccgggccgatgagcatggccagatccttggtcatctgaccaccttcaacggtgtcgacgatgaccttttccagcgtctcggcgaagtgacggacttcgggcgtgccgtccagatcggcgcggtgcttgaggccgccggtccacgcgaagatggaggcgatcgggttggtggaggtcttctcgcccttcttccagcggcggtagtgacgggtcacggtgccgtgcgccgcttcggcctcgacggtctggccgtccggggtcatgagcacggaggtcatgaggcccagcgaaccgaagccctgggccacggagtcggactgcacatcgccatcgtagttcttgcaggcccagatgtaaccgccgtgccacttcagggagctggccaccatgtcgtcgatcaggcggtgctcgtaagtcaggccggcctcggcgtacttgtccttgtattcggtctcgaacacctcagcgaagatgtccttgaattggccgtcgtaggccttcaaaatcgtgttcttggtggacaggtacaccgggtaatgacgcatcaggccgtagttgaagcaggcacgagcgaaaccgcggatcgaatcgttgacgttgtactgcacctgggccacgccgccgtcttcgccgtagttgtagaccacgtgctgaatcggctcggagccatcgtccggagtgaaggtgacggtcagctggccggcgcccggaaccttgaaatcggtggccttgtactggtcgccgaatgcgtgacgggccacgacgatcggcttggtccagccgggcaccagacgaggcacgttgctcatcacgataggctcgcggaagatcgtgccgcccaggatgttgcgaatggtgccgttgggggacttccacatcttcttgagaccgaattccttgactcgggcctcatcgggggtgatggtggcgcacttgacgccgacatggtgcttctggatggcgtgggcggcgtcgatggtcacctggtcatcggtctcgtcgcggtgctcgatgcccagatcgtagtagtcgaggttcacgtcgaggtacggcaggatcaggcgatccttgatgtccttccagatcacgcgggtcatctcgtcgccgtcgagttcgacgacagtgccttcgaccttgattttggccatgcttcctcctgatagatggtgtgaagatgatttagtcatagcgcatgtttgtaacgacttgaagcaatcgtccggtccgtgggaaacgaccttgttggcgtcccacccgggcaataggcttacaaccatgtctcaggaaattgaaatcggtttgggcaaaaagggccgtctcggctacgcactcgacgatgtggcgatcgtcccctcccgtcgcacccgcgaccccgaggacgtctccacctcttggcagatcgacgcctatgagttcgatgtgccggtgatcggcgcccccatggattcggtgaccagcccggccaccgccatcgccatgggcaagatgggcgcgctcggcgtgctcgatttggaaggtctgtggacccgttacgaggacccgaccccgctgctggacgaaatcgccgggctgccggccgatcaggccaccgagcgtatcca

SEQ ID NO: 1478 - DNA, 12695 bp, Unknown
  R257_15m  MAG No. k141_29155
cgaaggcccgctgccgcagacccgattcgtgctgcgcaaggccctcgaagccaagctgccggtcatcctgtgcgtgaacaaggtcgaccgccccgacgcccgtatcgaagtggtcgtcggcgaaacctccgacctgctgctcggcctggccgacgacgtgcagcacgagggcatcgaccggaaccttgcccagctgctggagatgccggtcatctactgcgccgccaaggccggctacgcctccgtgaaccagcccgccgacggtggcctgccggacaacgacaacctcgagccgctgttcgaggccatcatctccaccatcccggcccccgaatacgaggaaggcgccccgctgcaggctcacgtggccaacatcgactcctccgacttcctcggccgactcggtttggtccgtatctacaacggcacccttgagaagggcaagacctacggcctgtcccgtgtggacggctccctcgagaacttccgcgtctccgaactgctgcgcacgcagggcctcgagcgcaccccggtcgagtccgcgggccccggcgacatcgtggccgtcgccggcgtcaacgacatcatgatcggcgagaccatcgtcgaccccaacgacccgaagccgctgccgctcatccacgtggacgatccggccatctccatgaccttcggcaccaacgactccccgctggccggcaccgagggcaaggaccacaagctcaccgcccgcatgatcaaggaccgtctggaccgcgagctcatcggcaacgtctccatcaaggtgttgcccaccgaccgccccgacgcctgggaggtccagggccgtggcgagctggcgctggccgtgctcgccgagcagatgcgtcgcgaaggctacgagctgaccgtcggccgcccgcaggtggtcaccaagaagatcgacggtgtggtcaacgagccgatggaaaataccaccatcgacgtgccggaagagtacatgggtaccgtcacccagctcatggccgaccgtaagggccgtatggacggcatgaccaaccacggctccggttgggtccgcctgcagttcaccgtgccgtcccgtggtctgatcggcttccgcactgctctgctgtccgccactcgcggcaccggcatttcctcctccatctccgctggctatgctccgtgggctggtgccatcaccattcgtcagaacggttccatggtttccgatcgtcagggtgtggccactccgtatgccatgcagcgtctgcaggcccgtggcaacttcttcgtcgaaccgcagtccccggtgtacgagggtcaggtcgtgggcgtgaacaacaagcccgacgagctggatgtgaacatcacgctggccaagcacatgaccaacatgcgttcctccaccgctgacgtgctcgaaaccctgaccccgccgatcaagatgagccttgaggagtccctggacttcgccaacgaggacgagtgcgtggaagtcaccccggagtccatccgcgtgcgcaagatcatcctcggccgtgaggactggtacaagtggcgcgccaagcagcgccgccagaacgccgcccagcagggtaagtgatctggtgcgactgtagccgaccattctctctggctcccctctctgaggggagccaagtttattcctcgccaagtcatatccccacctatactgaaacgcatgactgtgaagagcactactgaactgcgtccgtggtcgtatcgccagaacgcgctggtcaaatcgttgatcacgattgcggcgggcgtggcttccgcctttgtgggcacgttcgcccaccgtatgggtgcagaactgagtattccgtatggtctggtgctggcatttctgctgatcggcctatcgacatggtgcgcccgttcgcgcatgggcgcggtcggactggccctgcacctcatcgcctcctcgctgaccgcatggggcatggcactgaccaccacatccggcaaggcggtcatcgtcgccggattccaaggcgacatgccgttcttctcccagcatgccggctacatctggctgtacggcctgatactggtccaagtcgtcctgctcattcttcccgcccgctggttcgttattcccactcattctgaatcgcgcgcgtaactatatatggcggcacatttccgggaatgcgtcgcgtatcggcgggcgtaggggattacggccgctaccatagaaccttatggcacgcatgaaactgttttacttgggcccggaaggcaccttcacccatcaggcggcaatgacggccgccgaccagttcgccacactcggcgacttcgacctcaccgccctgcccgacgtgcccgcgatcatgcaggccgtacagtcgcgccaaggctggggcgtcatcgcatgggaaaacaacgtcgaaggctatgtggtcccgaatctcgatgcgctgatcgacgcccccgacgcggccggcttcgcccggatcagtgtggacgtggccttcaacgccttcaccgtgcgcggccacagcatctgcgactgcaccggcaaccccgtcagcgcccacccgcacggcctggcccaatgcacccggttcatcgccgaacaccatttgcagcccgaacccgcatcctccaacgccgccgcctgccgcgacctgaagcccggccgcgtggcgctcggccccagcatctgcggcgaactctacgatctcgacaccctcgccgaacatgtgcaggatttcgatggcgcgcacaccgaattccttgtcatcgccccgcgtgatgtggtccaggaattcaacgcccgcgcccaccgcaatgacgccggcgacttcgaaaccatcatcaccttcatcccgctggtcaccggccccggcgtgctcgccgacctgctggacgtcctgcgtgatgcggggctgaacatgaccagcttcatctcgcgcccgatcaaaggccacgacggaacctacagcttcatcgccacccttgacgccgccccctgggagccaagattccgcaccgcactggaagagatcgccggacacggcgactgggcaaaaaccctggccgtctacccacgccgcgaacgcccgaacccgccggtcgacgcctggatgctgcccgagggcggcgtccacatcaccaatcgcgcgtcggaaggctggcagtacgccgagggagcaaggaaggaactgctgtggtagacacagtcggaatcgtcggactcggattgattggcggctcgctcgcacgccgcctgaccgagcgcggcgtacgcgtcatcgcgtggaaccatcgctcgcacccctacgcccaggccgaagccgatggcattttctgcaagagcacgctctccgaactcatggatgccgagccggatgtggtcgtgctgtgcaatccgctcaaggcgatgccctcaatcctcgccgccctagccccgcttatgggcgaccatccgaacaccacgctcaccgacgtgggctcagtcaagggcatggtccgcgatcaggtcaaggctgccgcgctggggaagtgctacgtcggcgcccatccgatggccggcaacgaactgtccggctggcaggccgccgacccgcatctgtacgacggtgccctatgggccatcaccgtggacgagtccacggactaccgccgcttcctcgacgtcgccacgatgatcaccaaggacgtcggcaaccgcgtcatcgtcgtggacgacgaaacgcatgacaaggccgcggcgatgatctcccacatgccgcatgtggtgtccaccgcgctgatcaacgaactggtcgccaacccggaccgcaacatcgccgccgcgctggctgccggctgctggagggacatgacccgcgtgtccctgaccgacccggaccgcacgcgcgcgatggtcgaggaagactcgctgaacgtcgaagtgctgctgcgccgcatggcggcacgtctgaccgatatggccgaccaactgcacgctggtgccgacggcgagcaggatgtgatgggattcttcgccgaaggcgaccccttccgccggtacaaggccgccgtgacgcgagccggcatcaccgctgcacaagctggtacggccaccgcgcagcaagccggcacaactgccgccggattcccggaacgcgagctcgccgtccccgaagccggctggcagcagaccttgctgttctccgcacgccggggagaagccatcaccggtttcatccatccgcgtcaggccatcgtccaactgcgccccgccatgtaactgcgccccgccatgcagcccgtgtgcaggttcccctcgccgcctgtcacgaagaaggctgcgcgagggggatgaagttcccgcttgttttcgtgagaagaccgtgtggctccgctgttcgaaagacccaaaggagtaaggtagtctgtaccgtttttcgggaaatgcattgaagtgaatgcggcggatggttaaggggatgatgacgtatgacgttaccaaggcagattccgaccggtgcccgcgtggtggtgcgcatcaccgacggcattgacccggtcgaccaccgtatgaagttccgcgactatgtggggcatgtggtttcctgggatggatacacgttggagatggtgcgtgacgccgccgccaatggttcgcgcccggcccagaacgtgaccatccatcaggaacagattgccacattgaaacccgtgccggagcggcgcaacacgccaccccggccgtaacccaaggccataaagaattcggaggagaacgagagtgtcatctacgcagctcgacggcgatatcgactccttcgtctcctatctgaagtccaaccgcggcctgtcagcgaatacgctcaaagcgtatcgcgcggatctcacggcatgcctgcatctgttcgagctgcgcggcgtgaccgatctgaacgagatcacgctggatgatctgcgcagctggatggcggtggaatcgcgcgatcacgcccgcagcagcatggcccgcaaaaccgtggccgtgcgcgggttcttcgcgtgggcctatgagcatgggctgaccaccaccgacccggccgccacactgatgactccctcgattcccagcacgctgcccgcggtgctcaccgaatcccaggccgagcaattattggatgtcgctgaacatgccgttgcaacaaaccagtacaaggacgatgggggagcggcagccgcgtccggcagcggcaagacagctgataagtcggccgataccgtaaaccgcagtgaggcacccgcccgtgcagacaagcgcgacaacgcccgagtcaccgccgaatcgcagcgcaacgccgcgattctcgaactgctgtatgccaccggcatccgtgtcgccgaactggtgtcgatggatatcgccgacatcgacttctccactcgcaccatcaaagtcaccggcaaaggcaacaagcaacgcgtggtgccgttcggactacccgcccagcgtgcgctggagacttggctggaacaggggcggccggtactggcccgtacggcaacggatgcagtcaagtcccgtgctgccaacgccctgttcctcggcgcacgaggcggccgtatcgaccaacgcatagcccgtgacatcgtgcacagagcggcccgagaggccggcgtgccggacatcagcccccatgcgttgcgtcattccgccgccacgcacatactggacggcggtgccgatttgagggaggtgcaggagatgctcgggcattcctccttgaaaactacacaacgctatacgcacgtctccatcgagcagctcaagaaccgttacggacaggcctttccgcgggcgtgaccactatgtggacattggttaacaaactcagcaaagactgaacctagccggcaagaacccctgaattttacatgggtgtaacaaaaaatacactgcttgtctcccaagtgcgcaaaaatgacaggtaatcagcaacggggttggattgttcgagacatcgtgagatgcaagtctcacggtgacggggaatccagccccgtttgcatgaggcggggctgagacgtcctgcaacctaatgaataggagaaatcatatgaagaagaaagctcttgctttcgctgccatggcttgctccgtggccatgctgctgagcgcctgcggcggctctaacagcaacgctgcctccggtaacaccgctggctccaacatcatcactgcgtacaactccgaaccgcagaacccgctgatcccgggcaacaccaacgaaaccggcggcggcaagccggtcgacctgctgttctcccgtctggtctccttcgacaaggacggcaaggcttccaacgaagtggccgagtccatcaccccgaacgatgacgccacccagtacaccatcaagatcaagtctggctggaagttcaccgacggcactccggtgaccgctgagtccttcaccaaggcctggtcctacgtggccaacgccaagaacgcccagaagtgctcctccttcttctccaccatcgccggctatgacgatctgcagaaggatggcctcaagggtgacgagcagctctccggcctcaaggtcgtggacgacaccaccttcaccgtcgacctgaaccagtccgactccgtgttcccgattaaggtcggctactcggccttcgccccgctgcccgagtccttctacaaggacccgaaggccttcggccagaagccgatcggcaacggcccgtacaagctggaccactgggatcacaacaaggaaatcgccctcgtcaagaaccctgactacaagggtaacgagcagcccaagaacgacggcgtgaccttcaaggtctacaccgacgactccgccgcttaccgtgacattcaggccggcaacctcgacgtgatggaatccgtcccggccgccttcaccaagaccttcaagaccgacaagaaggtccaggcttactccgaggtcggctccgtcatccagaccttcaccatcccgtcctcccttgatcacttcaagaacgacgaggaaggtcagctgcgtcgtcaggccatctccatggccatcaaccgtgaccagctcatcgacaaggtgctcaacggcaacgccgccgccgccaccgagttcacctccccgaagaccccgggctactccgactccctcaagggtgccgacaacctgaagttcaacgcctccaaggccaaggaactgtgggccaaggctgacgccatctccaagtacgacggccagctcaccttctcctacaacgccgatggtggtgccaagccgctttacgacgccgtcgtgaaccagctcaagaacaacttgggcatcgacgcggccaccaacccgatcccgaccttccaggagttccgtgacgccgtcaccaaccgtcagatgaagggcgccttccgtaccggctggcagcctgactacccgtccgccgagaactacctgtggcagctgtactccaccgctgctgctgacggcaacggctccaacgacggtgactacaagaacccggccttcgacgacatgtgcaagcaggccgccgccgccaagtccgtcgatgacgccaacaagctgtaccagcaggctgaggaaatcctcctcaacgaccttccggccatcccgctgtactactccaacgcctccggcgcggcttccctcaacgtgaagtccggctacgccttcgattggcagaacctcccgacctacaccgagatgtccaagaagtgagtctgactcactgaacggataccgttaggcagttcggaaataaagggcgaggatcgcaagatccccgccctttttgttgtgtgaggggtgcttgctcacgccatcgggaaccaagttaaagtatccactatccgaccgcaaccatggacatatccaccagcattgcccaatctcaaaccttgcgttaacgcaaatttacatatcacagtccgggcatgcggtaaactgtcggagtatttatcgaccggcgggggcgtactataccctttctggccggtctaggaaataaggagcaaccgtatgggtaagtatcttctgcgacgcattctgcagatgattcccgtggttctcggtacgactcttctggtatatgcccttgtattcgccctgccgggcgaccccgtcaaggccatgttcggagacaagcctgtcaatgaggccgtcgcagcccagatccgcgcagaataccatctcgaccagccgttcatcgttcagtacttcatctacctgaagaatgcactgaccctgaacttcggcgataccttcgccggccagcccgttctcgacgaaatcacccgcgccttcccggtcaccatcaggctcggcttgatggcgttcgtgttcgaggcgattttcggtgtggtcttcggcattatctcgggcctcaagaagggcaagtggtacgacaccgttatcctgatcgtctccctgctgcttatttccgtgccgaccttcgtcaccggcttcgtcatgcaatatgtctttggtattcagtgggcgatattgccggtgacggcaggcgccgaccccggcttccttgatctgctcatgccggccatggtgctcggttcggtgtcgatggcctatatcatccgactgacccgctccgaaatctcctccaacatcgccgaggattacgtgcgcaccgcacgtgccaaaggtatgtcgaacggtcaggtcatgctgcgccacgtactgcgcaactccctgattccagtcgtcacttacctcggccaggacatcggcgccctgatgggtggtgccatgatcaccgagcagatcttcaacatccacggcatcggcttcctcacctaccagtccattctgaagggcgaggcaaacctggtggtgtccatcgtcacgttgctcatgctgattttcgtagtgtgcaacctcgtcgtcgacatgctgtacgcggccctcgatccgcgtatccgttacgcgtgatagggaggagtgagtcacatggcaaacgaaaccactgaaaacgagctcaaccagaccggcgagccaggaaccgaatacttcatggaaaccctgcccggtcaggaccgttacgtagctcctctcgacgagaccccgttgcaggacgtcgattccgtcgacgaatccgcaccggccaccagcatgtgggccgacgcatggcgaaccctgcgccgcaacccgctgttcatcatttccggcttgctgatcctgttcatcatcgtggtggccatcgcccccggtctgttcaccaagcaggatccgaacgcctgcgatctgggcaactctttgagccccgcctccgccggacaccccttcggctacgatctgcagggctgcgacgtgtacacccgcgtggtctacggcacccgtacctcactgtccgtcggcgtgctctccacgctgctggtcgtgattgtcggtaccctgatcggtgccgtcgccggcttcttcggcggttgggtcgacgcggtgctgagccgtatcaccgatatcttcttcgcgctgcctatgctgcttggcgccatcgtggtgcttcagatgttcaagacctccaagtccatctggaagatcgtgctggtgctgacgctcttcggctgggtcggcgtatgccgtatcgcccgaagcgccgtgctggaatcgaagaacctcgaattcaacaccgcttccacggccctcggctccacgcctgccagaaacctgttccgtcacatcctgccgaactccctggccccgatcatcgtcatcgccaccacctcgctggcctcctacatcgtggccgaagccacgctgagcttcctcggcgtcggcctgcccaccaccacggtgagctggggcggcgacatctccagcgcgcagaccaacctgcagaccgatccgatggtgctgttctacccgtccgccgcactggccatcaccgtgctcgcgttcatcatgatgggcgacgccgtcaaggacgccctcgatccgaagagccgtacggcctgagcgaggggagtggagaatcattatgactgacaataccaacgccaagatgctggctatgcagaaagagcatggtccgctgctcgaggtcaaggatctggccatcgacttcaccaccgacaccggcaagccggtgcacgcggtgcgcgacgccaacttcaccgtctaccccggccagtgggtggccatcgtgggtgaatccggatccggcaaatccacctccgccatggctgtgctgggtctgctgcccggcaccggtcacgtggtcaacggctccatcaagctcgacggcgaggaaatcgccggtgccaagcagagcgagttcgacaagctgcgaggcaccaagatgggtctcgtgcctcaggacccgatgagcaacctcaacccggtgtggcgtatcggctcccaggtcaaggaggcgctgaaggccaacaacatggacgtggcccacgagaagcgctccgccctcgccaaggccctggccggcgacgaggtcgaagtcaagggcaacgacgacgagaccttcctcggcaccaaggaactgcccgagctcatgaccgaggccaagaaggccctgaccgaagccggcgtgtccggcgaggccttcgacaaggccgtcgcccgcttcaccaacgaatgggttccgggctccgaaacccgttggcgcgtggccgacgacctcatcaaggccggtgtggccgatgatcaggcctggtacctcgccaagaagtacgtcatcggctccacaatggatgaccgcatcgcgggtctgctgtccgaggccggactgcccgatgcggccacgcgcgcccgtcagttcccgcacgagttctccggtggtatgcgccagcgtgcgctcatcgccatcggtctggcctgccgccctgacctgctgatcgccgacgagccgacctccgccctcgacgtgaccgtgcagaagaagatcctcgaccatctgcacatgctcactgactcgctgggcaccgccgtgctgttcatcacccacgatctgggtcttgccgccgagcgcgcccagcacattgtcgtgatgtacaagggtcaggtcgtcgaatccggtccgtccctcgaggtgctgcagcacccgcagcacccgtaccccacgcgactcgtggccgccgccccgtcgctggcctcccagcgcatcatctccgccaaggagcgcggtgaggacgcggacgccctgcttggccaccacatcgccggcgaaagcacgcttgagaaaagcgagcacatcatcaccgtcgaccacctgaccaaggaattcaagctgccccgcaagaaggagatgttcaaggccgtcgacgacgtgtccttctccgtcaagcgtggcaccaccctggccatcgtgggcgaatccggttccggcaagtccaccgtggcgaacatggtgctgcacctcctggatcccacttccggcaaggtgttctacgaaggccgcgacacctccacgttcaaggccaaggatctgctcggtttccgccgccacgtgcagccggtgttccagaacccgtacggttcgctcgacccgatgtactccatcttccgttccatcgaggagccgctgcgcatccacaagattggcgataagaagtcgcgtgccaatcgtgtcaaggaactgctggacatggtcgagatgccggcttccgtgatgggtcgttacccgaacgagctctccggcggccagcgtcagcgcatcgccatcgcacgagccatggctctggatccggacgtcatcgtgtgcgatgaggccgtctccgccttggacgtgctggtgcaggatcaggtgctgcgtctgctcaacgacctgcaggccgaaaagggcctgagctatctgttcatcacccacgatctagccgtggttcgccagatcgccgatgaggtcgtggtgatgcagcatggcaagctcgtggagcacgccaccaccgatgaggtcttcgaccacccgcagaagcagtacacccgagacctgctcgacgccatccccggcggcaagctccaactcggtctggactgataatctgcgtttgagcgcattgtattgggttctttccatccgtggaaagaacccaatattcgtatgtgcaggtttgcatgatggttcgcgtgggacgaaaggcaaaaatcggtgttttcccgatgttgtcccacaatttgtgggacaacatcaacatcaatcgatggacatgagtgttgtcccacaatagatttctcacgaagcccggaattacgccattcttggcgtagtcgatgattactcatgatgcggggcgtgggacgacccgcgaaaatcatcgattttcggatgttgtcccacggaatacgtcatacctcgtatgtgattgtgagtggggcgtgatcggaccagcgcttgtcatatgtgggtgccttgtcgatgacgaatccgcgtgcggtctccgccaactcgggcgtggcgaactggtagtcgattctccagccgacattgttgtcgaaagcgcgccctcgctggctccaccaggtgtatggcccctgaatgtcgccggccaacgaacgcatcacatccacaaactcgtattcgtccagccacttgtccacgtaggcacgttcttcgggcaggaatccggcgtgtttctcattggccttggcgttcttgatatcgagcggcgtgtgtgcgatgttgaaatcgccgcataatacagcctgcttgccgccatgtgcggcttcatcacgaagcgcgcccatgcgggc

SEQ ID NO: 1479 - DNA, 5520 bp, Unknown
  R257_15m  MAG No. k141_29515
gaacggcaggatccgccgctatctgcccaaaggaaccgggttcgaggacttggcccaggaggacctcgacgcgatcgtcggggagatcaacgacaccccgatgaagctcctcggctacaaaacgcccaacgaggtgtgggacgaggagatcgccaggctacaatcgaaggcagccagcccgaacacaagcgttgcacttacaagttgaatccggggcgttcacttcctgtatacccggtgtggcataatagccaaggcaatttttgggctttgcctaagctagtttgaatttgaaataggtgaataacgtggcacagactactaacgacatcaagaacggatccgtcctgaacctggacggccagctgtggaccgtcatgaagttccagcacgtcaagccgggcaagggccccgccttcgtacgcaccaccatcaagaacgtgctctccggcaagatcgtcgacaagaccttcaacgcaggcatgaagatggaattcgagaccgtcgacaaccgcaccctccagtactcctacgaggacggcgacaacttcgtgttcatggacatgaccacctacgaccagatcatggttccgaagaccctcgtgggcgacaaggccaagttcatgctcgaaggcaccgactgcctggtctccttccacgacggcaccccgctgagcgttgacctgccgggctccgtggtcctgaccatcacccacaccgagccgggcctgcagggcaaccgctccaacgccggcaccaagccggccaccgttgagaccggagccgagattcaggtcccgctgttcatcaatgagggcgaccgcgtcaagatcaacaccgaggatggttcctacaccggccgcgagaacaactgatctccgcatcctcaacagacgaccgaccgtataaaggactaggacagcagcagtatggcacgttccaccgcgcgcaaaagggctctgaacaccctgtacgaagccgacgaaaaaagtcaggatattctcgccctgcttgacgagcgcatcgcacatcccggtgcccagaccccgcttcccgactatgccattgaaatcgtcaagggcgtggccgagcaccgtcgtcagatcgacatgaccctggacgaacactccacgggttggaaggtccgccgtatgggcgtggtcgatcgcaacattctgcgtatcgccgcttgggagattctgttcaacgatgatgtgccggacaaggtcgccatcgacgaggctctggcattggccaagaccctgtgcgatgacgattcgcccgctttcatccatggcctgctgtctgcggtgtgcaccgccaagaacgcagcaccggcaccggagtccgcggcagaagaggccgatgaggaatcgtccgattccgatgccgccgcatccgagccgaccgatgagggcgatgtttccgattcgcccgattcgtccggtgcatccgacgagcccgctgccccgtccgctgagattcagccgacggtcgattagtcatttgttgttcagcctccccattcgggaggctttttcatgggcggacacttgtgtcgccacacattctcaagtcggcaccttgccgacagccccgccagcggggtgagactttgcgcccaacggcgtgtgagtctgcgctggccgttaaccttggtacgaatacccgaaaaacataagggggttttggtgagccagaacgagtccgggaccatcgcaattccgatgtatgacaaggacgatgcagtcctcgttttggaagatggacaggtatatgtgggggcgccatacggcgccctcggcgagacgaccggtgagatcgtcttcgccaccggtatgaccggataccaggagacgctcaccgatccgagctacgatcgccagatcgttgtgcagacgttcccgcacatcggcgataccggcgtcaacagcgaagaccctgagtcctcccgcatctgggttgccggatacatcgtgcgtgatccctctccgaacgtgagcaactggcgtgccgagggcagcctggacgacgacctcgccaagaacggcatcgtcggcctgagccacatcgacacccgtaagctggtgcgtcacctgcgttccgcaggcgtgatgcgcgccggcatcttctccggcgacgccctgaccgaccaggccaccggcgcgctcaagaccattgagcagctgctcgaagacgtcaagaacacaccgcagatgcagggcctgagcctgtacgacgaggtgtccaccaaggagacctacaccatcgagccgtgcggcgagtacgaaggcaaggagccgctgtacaccgtggccgccgtggacctcggcatcaagggcatgaccccgcaccgcatggccgagcgcggctgccgcgtgcacgtggtgccctccaccatcaccttcgccgaaatcgagaacctgaacccggacggcgtcttcttctccaacggtcctggcgacccggaacaggccggccccgaaatcgagctgctgcgccaggtgctcgacgccggctacccgttcttcggcatctgcttcggcaaccagctgctcggccgcgcgctcggcttcggcacctacaagctcaagttcggccaccgcggcatcaaccagccggtcaaggatctgaccaccggcaaggtcgaggtcaccgcccacaaccacggcttcgcggtcgatgccccgatcggcaagcaggtcgacgcgccgtttgagaacggcaagtacggcaaggtgttcgtctcccacatcgatttgaacgacgacgtggtcgaaggcctgcagtgcgtggacatccccgcattctccgtgcagtaccacccggaggccgcagcaggcccgcatgatgcggcctacctgttcgaccgtttctgcgaacttatgaagaacaactccaaggaaggtaagtgatatgccgaagcgcaccgacatcaaatccgtgatggtcatcggctccggcccgatcgtgatcggtcaggctgcggagttcgattactcgggcacccaggcatgccgcgtccttcgtgaggaaggcatccgcgtcatcctcgtcaactccaacccggccaccatcatgaccgacccggagatggccgacgccacctacatcgagccgatcgccactccgatcctcgagcagatcatcgccaaggaacgccccgacgcgcttctgcccaccctgggcggccagaccgcactcaacgccgccatggcgctgggcgaggccggcgtcctgaagaagtacaacgtcgaactgatcggtgcctccctggaagccatcgaccgtggcgaggaccgtgagctgttcaagaaggtcgttgacgaggccggcgccgaatccgcccgctccgacatcgcccacagcatcgaggaagtcgacaagatcgccgagaagttcggctacccgctggtcgtgcgcccgagcttcaccatgggcggcctgggctccggcatcgcccacaacgaggaggagctgcaccgcatcgccggcgccggcatccattactcgcccaccgacgaagtcctgatcgaagagggcatcgagggctggaaggaattcgagctcgagctcatgcgcgaccgcaacgacaacgtcgtggtcgtctgcccgatcgagaacgtcgacccggtcggcgtgcacaccggtgactccatcaccgtggccccctgcttcaccctgaccgaccgcgaataccagaagctgcgtgacatcggcatcgccatcatccgcggcgtgggcgtggacaccggcggctgcaacatccagttcgccgtccacccggccaccggccgcatcatcgtcatcgagatgaacccgcgcgtctcccgttcctccgcactggcctccaaggccaccggcttcccgatcgccaagatcgccaccaagctggccctcggctacacgctcgacgagattcgcaacgacatcacccagtccacgccggcctcattcgagccgaccatcgactatgtggtcaccaaggtgccgcgcttcgccttcgagaagttcccgggcgccgaccccaccctgaccacctccatgaagtccgtgggcgaagccatggccctggccggcaacttccaggagtccctcggcaaggccatgcgttccatcgacaagcgccacatgggcttcaactgggatggcgagaagccgtccgccgaagaagtggccgaactgcttgaggccatccacaccccgaccgaacaccgttacctgcagctcatgcgcgccatctggggcggcgccacgctggagcaggtgttcgcggccaccaagatcgacccgtggttcctgaagcagatcttcctcatcaacgagaccgccatgacggtgcgcgaggccgaaaccctcaccccgaagctgctcaagaaggccaagctcgccggtctgtccgacgtgcaggtggcccacctgcgtggcttgggcgatgaaggcgagaacaccatccgcgagctgcgctggacctacggcctgcgcccggtctacaagaccgtcgacacctgcgccgccgagttcgacgccgccacgccgtactactacagctgctacgccgacgaaaccgagctgcgcccgcgcgagcgcgaggccgtgatcatcctcggctccggcccgaatcgcatcggccagggcatcgagttcgactacacgtgcgtgcacgccgtgcaggagctcggcaaggactatgacaccatcatggtcaactgcaacccggagaccgtgtccaccgattacgacatgtccgaccgcctctacttcgagccgctcaccttcgaggatgtgctcgaaatctacgaggccgagaagaggatgggcccggtcaagggcgtcatcgtccagctcggcggccagaccccgctgtccttggccgcgcgtctgaaggccgccggcgtgccgattctcggcaccaccccggaatccatcgatctggccgagaaccgcgagctgttcggcgaggtgcgcaagaaggcggagaggaacgccccgcgttacggcaccgccctgagcctcgaagaggccatggacgctgcccaccgcatcggatacccggtgctcgtgcgcccgagctacgtgctcggcggccgtggcatggaaatcgtctacgatgacaagcagctcaacaagtacgtggaccgcgcacttgccgaggccaaggccgataccgtggtctccggccgcctgccctccccgttgctcatcgacaagttcctgcaggacgccatcgaaatcgacgtcgacgcactgttcgacggcgaggaactgtacatcggcggcattatggagcacgtcgaggaggccggtgtccactccggcgacgccgcttgcaccctgcctccgtccaccctgtccgacgaccagattcgtcgcctgcgtgaaggcacctacgccatcgccaagggctgccatgtgcagggcctgatcaacgtgcagtacgccttcatggccaacacgctgtacgtgatcgaagccaacccgcgcgcctcccgtaccgtgccgttcgcctccaaggccacc

SEQ ID NO: 1480 - DNA, 18185 bp, Unknown
  R257_15m  MAG No. k141_30309
cctgaacacgtacgccgccgccttcgccgaccgccgcgtcgaggtcgccggcgccgtgtccgacgcgttcgacgacgcgctcggccagacacccacggacgggcatttttgaacaattttcctccgggcgtgtcgcagtcctttcggtggttttccatgttaccccgatgttacccggcacgtcatccctgacgctggacggtgcccgaaacggcttgattccgccgtttccgaggggtcccgattttcgcggaaagttaccccgtgttagttcgaggggttgattcgttggttttcgcgggcttcgttgattgcgtttttgttgcaattacgccgttttcgtgacattcgcaggattcgttgattgccgccgatttcgctgttatcaggggtcatcgtgtctgaatcgtgtctgagctacaaacacgatgacgagcaccatcaatcggctaaagcgacaagatgactgaggaacacctacacgtatcaatatgttccttccatcttgacgtacatggatatttcgtcatcgttatacgaaatcaagccatcagggtcccactcgtcttcggtgacggtatcagttacatcctcacctgtttcgatgtcaattaaactaacctcaagaccggcatctctccagttgtctcgtagtagtgcgggatcgctaaagctatcgcttgcagcttgttcttctgcatactcataacttggacgagactcgtgctgtgatgattccaaagcgggcgcgatgtatttgtcgtaattgcccccgccaggcaaaaaagtgaaaggcataattactagccaaaaaaggaaaggaacaccaaacagaagaagccatggcgctaacgcctcgatgagcccatctatgattcgcgacccgatagacgattgcttattttcatagatgacgggcgacgtcccttcagagtcagtcacatacgattcatcatagtcgaatgaggatccgccggaatacgagtaggaggagccgttgcgggtagtgttcttcgttgatcttttatatggggcacgcgaataggtacttttggttgcagacgtacccgccttgcgtttcttcagattatcgctatccaaagaacgtattgccgttgaaattggattatgcactgcggtgctaaccgatcggactttgtaagatgctgtacgaacggatttgggcacaaccgccttacggactgtccttcttacaggcctcgtagctgtatggatagggtgtcggacagcattctttaccttgaaagcttttcggatagctcccatgcgtcacctcttgtcggtcctgctcaactcaccagttctatggtactgactagacggcccataataatgccactcgcagtgggttgcgcatcaactgggacagcaaggtgatgcgcaacaatcagtctagctttaataagattcggggtctcgtatatcgacttcgcgaacctcgccataaatggcggcgatgtcgttgaggttgatgcggaactggctgcgggcgtgcggcgtccacctaccatcggtaagggtggctttgtctccagggtcatagaccgccttgccgtccttgaacgcttggaggaacaggccaaagctggtggagatgccgagagtaacgagcggtccgaactcgaccgaggtgttgccgtcgttgtcctcgcgcaggtaaggcacatatgctgcgcgattgtgcttgcgttgccagtgtccaagcagcttcagatacgaccatccggcggcaagggtccgcgtgcccttttcatacagggcgatcatgccgttggggtcgaaatgcttcgcatcagtgaaaccctccagcaccagttcgagctttgcgcttggcttgtcctcgccctcacgctgaatgtcgccggaggtgaagtagtagctggtcggattgccgtcctcgtcggtggtgtgcacgtgcccatacttgagcacgaaatccaccgtggacagacggcccgtctcagggagatcgggctgcggggtgaagagcgtgactttatggttgtagcgacgatccaaggacttttgcttgatggctttgagctcccagatgtcgaagtccgggccgggaatggcgttctctcccacgccgagttcagcctccaacgtgaagccaggcgcgttctgtgcggtataaggcttgtcgatggtgccatcgttgcgcagacgccacggaacaatcttgtggccgacgatgttcatcaatgcctgttcaagtacggagaactcgtcctgctgacgctgcgactgataaacaatcgggcacagatgtccagcctcgaaggtctccatgccaagcacgtactgtgctgccggggattcggcgccgactacgagcgccaccacgcggacgacctcgccggaagcattcttcaccgggccaaggaacaggcatcgattgacctcatggccacgcttcgattcgttcagaagctccgatggagcttctgaacatccctgaaggaaccccgaaaaacgtacttccgggtattgcgggtagtaacagagtttcgcgttgggggcatcgaactgaccgttcggtgtgacccactgccatgtcacgggaatctgaatgaccggattaccagccttccgtttctgcgatttagccggggtatatgacggttcccccaacgggaaaaaggacaaatccgatggatcgttagccaaccatatctgctgtttcgagttgttgttcgcaacaagtcgtttgacccaaatgctacttgcaccagcgttggtgagcagttcgttgactcggctgatgtcggccgtgtcataccattgacgggcttcattgacgtgggtatcgcacatgcaaccacgatacccacgaacaacggacaatcatcggcacgacaccggcatttcagggttagttctcgccggctccggcgaccgccagctctcgggccttctggatctcatccgcggacttctccgcatcatccagaatcacgccttggtcgccttcagccatgaccttgaggatgtgggggcgcatgattcgcgcgacctcggcgatggcgggtactaccacgctattgccgaactggcggtaggcctgcgtgtccgacactgggatgcggaagtcgtccgggtatcccatgagtcgggcacactcgcgaggagtcagacggcgaggacgctccccctcttgagcgacgaggatttcgctgccgtccttgtggtagcgggcggacagagtacgcgagaccatgtccggggtaacgagcccgtagccgaaaccatggcccaaggcctcgtgcttcttccggtagtcctgaagatactgccacagacgcggggtgagtgtgtacttgtcctgcactttgttgtgctcgaagtcgaagtacttgtcaccgtcccacggcagatagggctcggtgccgtcggtcttgtgaaggatgtcggcgagcaccggctgatggtcggggaacctgaggtcgtcccacgtgaagtcggtcttggatcggaagccgacgatgtagatacgctcgcggtgctggggcacgaagtgctggccgtccacgaccttccagtgcacctcgtagccgagctcgttctgcagagcgtcgaggataaccttgaacgtacggcccctgtcgtggctggtgaggttcttcacgttctccagcaggaacgcggcgggacgtttggcggcgatgatgcgcgccacgtcgaagaacagggtgccctgcgttttgtcacggaacccggtctcccggccaaggctgcgttttttcgagacgccggcgaggctgaacggctggcacgggaagccggcgagcaccacgtcacagtccgggatgtcgttggcgtccacctgcgtgatgtcgccggccatggtctcggcgaacccatagttggtgcgataggtgcgcgtggagaactcgttccactcgctggagaacacggcatgtccgccggccgaagcgaaaccgcgacggatgccgccgattccggcgaacaggtcgatggtgtggaagtcggtgccggtttcgtgcgtggtgccgtagtacagttcctgcaatgcgggaacgtagacgggcttgcattgaaccttgcccgtctcccagcgctccacggtggacgtggacaggccgagcgattcggccagctggcgtcgggtcatgctttcacgcagcttggcgataagctcgtcggcgtcatcgatggtgttctgtggcattgcattactcatagggacgaatgtatttcataatgacgacaaaagttcccttttgtgtcgtacatatgtttcaagcatggacaaccgtctgccttgatggataaataatggctacttgacggatatatatctgaaatgtagtatttgagttatggctgaaacgaagaatgaacgcttccgacggctcgcggaaagccgtggtaacaggctaatcagagaaatacagattctgggaaacctgtcgaaccggaagaactacgagtacacgcccgaagaagtctcggccctgttcggccccattgaggacgagctggctaagacgaaggggcttttcgacgaggacaagcctgcgggcggaaaggtgaggttgtcatgaacgacagcgaatatgggttcctattcaaaccgaacgggaacgaggaacaagggccgtcgaactccggcgaggagatcttcagtgacgacacaatagcccaagccctcgcccgtgaactcggccagaactcacttgacgcgattgccaaagatgacgcatggcccgtgacgatggtcttcgagctccaccgcatgaaggtggaggacatccccgatgtgaacaacctcaggcggcacctgcgggcggcgctgggccgataccctgacagcccaagattgcaagaggcggtcaagacgcttgacggcgagtgcattgacgtgctgcgtgtgggcgactatggcacaaaggggctgtcaggcagcgaatccatcgccgacagcggctccgtgctcacggcgctgactcgcggctccggtgtgagcgtcggcaagaccgacgcaggtggctcgttcggcatcggcaagtcggtcggcattctgtcgtccctcgtgcgcaccgaattctggaccacccgtacccccgattccgacgagaccgtgttcgccggctgcacgcaactgaccacgcatcaggtccccggatccgacgacccccgccagctgctaggccccatgggcacctacacgctgctctccgatatgcaggactaccgctacctgcgcgaccccgcaccgctgggacccttctcacagagaaccgaacctggcacggatgtgtacatcatcggctactcggccgcgggagacgatccgagactcgagcaaatcagggacgcgatgatcgacaacttcatggcggctatcatgcgcgggcacctcgtggtcgacggcgtcaccgacaagggacgcggatggcatctcgattcgggcagtctcaagcgcgtcatcgactcgatcccggatccggagcgcaggaccgtcatgcaggcgttccacaacgcactcctacagccccctgtcgtcaggaacgactcccggctcggggaaatgaaactgtacatcaacatcgacgactcgctgccacgcaagctgaacaccatcgtcatgcgcaagcctttgatgaaggtgcgcgcctacaccaacacctccatcaccgccaagtacgcggccgtgctggaatgctcctcgccgcaaggcaaccgcatcctcagaggcatggagccggtgcgtcacgacgactggcaggcggcgcgcgacaagcagaacggcaaggccgtgctccgttccatcaagaagttcatcctcgaggagctgcgcaaacgtgtccgtcgcgagctcggcgacgaaatcaccatcaagggcctcaataccctcctgccgtccgaactccaaatcgacggcaatcccgaccgccacggcgtccgcgcctccaacgggccgggcagcgaacgcgagtccgcctcattgcagggccgtgagaccacgcccgaaccggtcgccaacaccggcggcaagtcggtgaacatcaccctgaccaaacccgcggtcaccgacgaggacggtagccccgcatccaccgggcgtcagcgcggtggacaggccaagcgcggcaagcacgtcgcaggcatcccggccacgggacggtccgacgacggggcctccgccatcgacgggagcaatctgtccatgcgctactggtacgacgcgaaaagcggcgactacatcctcgtgctgcgctcgaggagcggcgatacggaaaagggagcgctccggctcacggccgcgctcgacggcacattcggcaactacacgccgcccatcgagacggcggtggacatcagcggcgcgaccccacgcccgctcgacgtcaaggaaggaagcatttccaccgtgaaagtgacaagcaaacgccccaccaagctgcgggtgcatatcaagggcggcatccgtcttcaactgggggtgaagtgacatggccacggcatcattcccaatccctgtgctcggcaacggataaggagaggaacgcgacgtcacctccgagtggcgcgtcggcaacttcaccttcgcatccggcaccgaggatgtcaccattcattttcgagtcttccatgacgaccccgatctgaagcgcctcctcgacaacggggacgcccggatcatggcgaggtggaaatgctcgtccacgatctcctccggctatctggacctgatcagggacaccccgcacgcggacggtgccacatacgtttcgtccctcgaccaaaggaccgttctcggacccgtcgtcgtgagcgttttcgccgtcgccgtacgtcccgtcccggacttccgttggtcccgccagcacgaggactatggcgacgagacgttcgacgtacgtactggtgacctgctgagcgtccccacggacttcacgttcgacccggccaagctctacgatccgcagaacccgcctctcaactcgatcttcaagatcgtcaagagcgaccagccgcgggcgaagggcatctcggccaagtacttcgaggacagccagatcatcatcaccctgtccaaggagctattcgaccagatgcagctaattgaatccgcgaacctcaaactcacggccatcgtcctgcctgtcctcgttgatgccatcgacttcatccgagccaacgagggccagggcgaggacgaggacgtcatggaccgccaatggtgcaggaccatcaaacgactcatggaggcgaacggactgaacgacgaccttcgacctctcgaaatcgcccagaagctgctcgccaaccccattgacggatacgccactgaagtggcagcccagcaggagaacgaggaggtacaggcatgaacgacctgacatgcaacaagcagttcaaacgcgacaccgtcaccctgattctgaccaagctggacgacgccgccacacccggagacttcctcgcccagatcgacgaattggccgtcgaccccgaccagctgctcgacagggatccgatcgatctcgaggaaccactgtccacgaaacgacctgactcagtcaacgcggaaatcctcttcgaggccgtcggccagattgaccgcgttaatgccgcactgccgggactctggacctacatggcattcagcacctgccgccagtacatgaccgaccgctggccgctcgacggcgtacgcaactggaagaacagggtgaaacaacgctggattctgccgaccactcccagccgcggacgactgattcgacatggcatcgcccgactgtggtgggccgccgaactcacctacgacggttcgctcgcccatacattgagcaaagccgacgacgacccgtacgcatacacgaaatgggtgttcgcggtcgaaaaccgactgctgcagctgttcgatcgctccgtaggcgagaatccggacgtcatgtgggccgtcatggactccatgcagcacggagacgactccaaatcctccgatgccatcgccgacgtgggtcgcgacgtactgctcgaaatgtccaccagacaacttggtctgctgaatccgatggaacttgagtctgtcatcaacgcaatccgaggacagaatggcactgcgcagtaaaaaacaggccgtcgtttcctcccaattcccaataggaaaagggtggaagcgacggccgtgttcgtcatatctggatttcgcgtctcagcatcattcctgaggctcatccttgctgagtttgccgctgaacgcctgattcaccagcgtgtagacggcttgggcgacgccgataacgccggtgaggacgatgccccacccgtagccgtggaagccgttggtggcggcgatagcgatcacgccgagcaggacgctcacgccgagactggtcaggcccacgtagtcggcggggatgtacttcttgaacgcttgcaccaaggctggcgcgatgagggcgacgatgccggcggcgagggtggttgctgcggaaatatccatgagtgttctccttaggttggttggtcgtaggtatgggaactgcggccttcggcatggtgccgaaggccgcaaacgcaaacggacggcggcatgctcagtagtgcagctgctgtccgggatagatgaggttcgggttcctcaggttgttgagctgggcgacgcgctgccagccggatgcgccgaagatgccgctcaatgtctctccactcttcacgacgtggatccgcgtgccggtcgcacctgtgctcacggtcggcgtgctgttgccgcggtagaccacggtctggccgggccagatgcggttgatgttgcccgagggcacgctccacgcggtcacgggccacagcccggtgcgcgcggcaatcccgctgatggtgtcgccggaacgcaccaccacgctgtagccggcacccgcgtcatccggcacggcgccggcggattgttctcgctgcaggatccatgcggggcccgcggcatcgacccggatggcgaatacctcgccgttcacgaatgccatcgggctccaatcagcgtgaagccgttcaaaccgccaagacggcggccggcggaacgctggaacccgaatatccgtctgtcggacaaagaggtccgactgttcacccgactttggaggcgaccattatgagcatcatccaacccaaacgccacgccaggtcccggccgcgcgccgttcccgtgccggagaccacgcaccaccggctgcgccgcgtctacccggcggccatccagttcctgcgccagcccgccgtgacgagcgggttcggcaccgcggccggcgagacgcgcgaatgcacgtgcggctacaagacccgcagtccccaacggttcctcaaccatctcgaagagaaagccatcatcatgcccgtagcatccttccaagcgccccgcccgttgatgacgcatcgtctcgtggacaccgccaagcggggcaaggtgttcatctgctcgtgcggccacgacttcacgtcgctgagtctcatgcaggagcacatccgctacgccgacaagatcgaggtgaacggccatgagtgagcagcatctcatcgtcaccgagtacgacggccggttccactggtggtgctcatgcggttgggacaccggtagccgcgtccagctccaccagcatctcggcagcgtgaaaggggtaaggccatgacccgatactgcgcgaaccttgacggcaagcatgcgggcgggctcaacgtgtgtgcctcgtgcgcccggaagttccgcgaggcgttgggctcgatagccgtggatacgcccgccttgctgctgattgcggcacgtcaggccggcaccggcgacaacgaccgtaccggcgtacgcagcaggtcggcgcacgcgccgctgctgatacgcgaacaggcgtgggaactctactgccaagcggaggaactgatacggctcgcggcactccagtgcggttgcccgccggcaacgcgcaggacggccagcgtgcctgagctcgtgcgcggcatcctcaaggacgacaagctactgctcacggcatcggacgcgcgagaatggtggaggaacgtcgtggacgtggccggcaaggtgaaccgcatggtggatccaccggccacgcgggtggcgttcggcgcgtgcccgttctgcaagcacggagtcgtctggggcgtgccgcgcgctcacatgggcgaatgccgttcctgcggcgcgcaggtgaaccgcacctacgtcgccgaccggctgctcgacaagctcgccaagtcggagaagaagggcacgcccaagcagctgagccgtgaatgcgccaaggccggcatccgactgccggcagcgaccatccgcacttggatccaccagaaacgactcacgcccgaccaacacggccacgtgactctcagcggcatcgtgccgctgctacggcgtcgcgcccactagaatgtcaaacgtcccgtcccggtgtgacgggacgttctgctgaacacatatgaggagttcgattatgggaaggtgataaccatgaagcaagtattccgatttgaaggcgaggaacatccgcttggggagttccgcggatggcttgcggccgatccggcgcgtgcacagaggatactggaaggattgcgtctcatggatgcggccgaggccgagagacgttcgcaggatcccaacatgcccggatactacacgcgaggccggcacatcgacgtgcttgtcgaggccacagagcggggtgtcattccgaacgactggacgatatgccacacgcgtgaggaaatagatgagcatatgcgcgacatcatcgacgacccggaaggctaccagccggcggagagcgtcgagagcgtgctgagcgacatgctcggctggaaggagctggaacgttacgacgcggatgccgaggcattgggcatgagaaaccgcagtatctactgggatgtctgcaagaagctgaaggcgatgcgcaaggaagcgggagtgagccttgacgagatggcccgacgcaccggtctgagcgccacggccctctggcgtgccgaaaacgatctgcaccgcgtggggttgcttgatttgctgcccgattattgcgcggcgcttggcaagaccttcgagatcaccatcagggacgccgatcagaagtagtcccgaatcgataacggccccgttctccacgatgggagagcggggccgcattgtgtagaagttgtaatgagccggtggaatcgggtaaaaggaagtcgccgggtgaatcagcgacacgccggcaatatgaggcgtgtcatgggggcatcgtgtctggtcgtgtctgaaaatcgtgtctgaatcgtgtctgaggcggatagaaagaggggagaagagagaaacgaaaaagcccggaatcgttgaaattccgggctttctggtcggaccagcgggatttgaacccgcgaccccttgtggcagggagaaatgcacggttatgcatggttgtgccagcctatgccatgaaggccgaacaccgccgccaataccccctaattcgttcctcgcatggcgttttcatgcatgaccacgcataaccatgcgcattgtatccaacccggggacaatgtgaaggaggtacagcagtaatgcatattgaagagcgcaaggtgaccgttcgcgaggtcactgaaggatatttcaacgacgccgaggaaggcgttgtcggctacgacgagcagttggacatccgtccgaagtaccagcgtgagttcgtctacaaggacaagcagcgcgatgaggtcatccgtaccgtgatgaagggcttacctctgaacgtcatgtactgggttgaccgaggcgagcagtacgaggatgacccggacgagccgaggtacgaggttctggatggccagcagcgcaccatctcgctgtgcgagtacgttgacgggtcgttctccgtggacgacaggtatttctacaacctgccgagtgaccggcagaagcagattctcgattacgagctgttcgtgtacgtctgcgagggaacggattccgagaagctggattggttccgcatcatcaacatcgcgggcgagcagcttaccgaccaagagttgcgcaacgcggtgtatgcgggttcgtgggtgtccgacgccaagcgctatttctcgaagacgggttgtgcggcgtctacactcgcagacgattacctgcagggttcgagcatccgccaggagttcttggagacggccatttcttgggcagcttccgccgagggcaagtccatcgagggctatatggcggagcatcagaacgatccgacggcgcaggcgctgtggagctacttccgctcggttatcgagtgggtgcaggctgtgttcacgaagaagcgtaaggaaatgaagggtctcccgtggggcttgttctataacgagcatcatgagcgtcgcgaccttgacccgaaggcgcttgaggagcatgtgagcgcgctgatggcggacgaggacgtacagaagaagtcgggcgtctatgagtacctgctgacgggcaacgagaaggcgctgtccatccgcgcattcgaccagcgtacgaagcgcgaggcatacgagcgccagggccacaagtgcgccatctgcggcgaggagttcgagttcgagcagatgcacggcgaccatatcaagccgtggagccgcggcgggcacacgacacccgacaactgccagatgctctgtcgcgattgcaacctgaagaagggcgcgcaggaataatgagagagcccgtcgctcttttgagcggccggtctttgaccaaccagaagcacagaaccccctcacgttttccgcgagggggttctgtagttacgcaattcgaaaagatgactgcttggaggagaagcattccgcagcagaagaagttggggcttccggttcctccgcatatgcctgttacccacgatgcgagcaaggcattgtggcgtggtttggaacccatcctatgtgtgggggatgatggtgatttccgtcctggaattatcagatggctggaggaaattcgcaccgaggtgcttgactcagaggagcatgtgctgaatatggtggcgatccatgctcaaggcatgacttatggcacgcaaagcagtgtgttcgaaaccggcatcgatgacaagctgtctctcaacatggtgatgttccgtcatgattatgcgggtatcgccgctgtggtggatgtggttaagagcatggataaagcagtgacggctttgacgatgttcgttcggaatctgcgatcggcggcgggtgaccatagtggaaaaacccaggagatagccgaccagattcgtgagagcgcgtatgcggatcttgacttgcttttccgtgacagattggcgaactttgacgagtctcaagaccccgtgacgtactccaatgcatggttggatgaggtccatcggttgctgttggcgatgggacgggattacttgagtcagtcgccggtgccggttttcgaagaacatgaatccggaaggttttctaaaaagaacctgtaatcaaggctgatgtgtaaaggagtcgggggaatggatagaaacttctcgttactcgatgatggctggattccggtttaacgcatttcggtctgcaacccgagtttttcagcaatcgtttccaagtccgcaggaagggaaatctgcccatcctcgtccgcaacggtacgaaaaaacgcccaactccaaaaacatgttcatcagggggacgtgatgaacatggcaaatcatcgcgaagcccgccgaaacggctgattgttttcgatggttgtggaattggcccccacggatttcccattgggcatcgaccgggaccgatgaccgagaagacgcccctgggtaccggaatacataagagcgttccgtgcggtcaagccgcattccttgtccgcttatgctcggcggattgccatcgtttacgtgggcaccgcttcatccccgccccaatccggccccgtccacgggagacggccggatgcatccttcccctctcccgcgacgcatagcctccgtcatgaccgattcgaagaaaacaccctacgtacccatcgaaaaccgccccctgctgggcgtgccggaggccgaggcccttaccggggtgccggccaagatcatccgcgcccaggtacgcaacggcctgctgaaggcgcgcatggcgggcagcacgaccatgcgcatccgccgcgccgacctggacgcctggctcgacgcgctgcccgcctggcacgcataaggaaaccccacttgcgtccgattgtggacgaagtggggttcttcagaacaccataggtgcagtgggctattctggataccgcgaaagccctactgccggctatgttccgccctatgcggccgtcagatgtggaagtacaccatgaagcgctccgaaatcaacgccaccatcaagcagttcgagaccctgcttgatcagtaccggttccgcatcccgccctacctgtccttcaccccggaggaatgggccgacaagaaccatgagtgggacgagatccgcgacaacatgctcggctgggacatcaccgactacggcgaaggcgacttcgaacacaaggggctggcgctcatcaccctgcgcaacggcaacgtgaaggacccgaagtacaccaaggtatacgccgagaagatcatgatgagcatgcccggacaggtctccccgatgcatttccactggaacaagatggaggatatcatcgtgcgcggcggcggcaccgccgtcttccacctgtacaacgctgatccgaagaccgaggagcgtctcgatacaccggtgcttgtgtgccgtgacggtcgccgttactacgtgcccgccggcgaagacatcgaactcaatgaaggcgaatccctgactttctatccgtacacctaccacgagtactacatcaaggaggactccgtgccgacccttgtcggcgaggtgtccatgtgcaacgacgacaacatcgacaaccgcttctacgagccggtcggccgcttccctgaaatcgaggaagacgagcccgcctaccgtctgctgtgcaacgaatacccggcggccaaggaagactgaatctcgataagcgcaactgattgcgcgataagtggcccaacccaatgtgctcctgcaggcgggagccggctcgcgcaacgaggctgagggtggtctggtaatgattgccaagactgccctcggcgcttcgcgtcacctcccgccggtgggaggatgcttccgtagtcgttcgaccgttgccttccgtcagggaagcattattcctttctccatttttctttctggtcttagccccgctatgcccgaaaccatcttcaacctaggattcaccatgcccaacaccaccacgccatccgtggtcgccatcggcgaactgctgtgggatatgctccctgacggcagaaaaccgggaggcgcacccgccaacttcatctatcacgtcgcgcaaaacggtgtccaaggaaccgccgttaccgccgtcggcaacgatgacctcggacgggaccttgtttccatcctcgccgacaacggcgtcaacgtcgccgctcaagtcaacgactatcccaccggggtcactgctgtcagacttgatgacaatgggattcccgagtacgacgtcgtcaaaggtgtcgcgtggaatcatatcgaatttactgacaatgtacgcgccctggtgcgtgccgccgacgcgatctgctatggcaccattgctgcccgtgaggcatggggcacacgcgacaccatctatcagatgattgacgctgcacgccccgatgccattcggttgtttgacatcaacatccgctccggattcgtcaacaaagaagtcatcacccgattcctcgaaggtgccaccgttctcaaaatcaacgacgaggagctgcccatagtggctaacctgttcggtcttgactcgccgggcaaagatatcagatcgcagcagcgagcaatgaggacactctgcgaaatgttcaatttggatgtggcgattttaaccgctggagacgcctacagcattgtgatggggcatgacgaaatctcgattctgcccaccccgcaggttgaagtggcagatactgtcggtgcgggtgactcgttttccggggcgttccttgcctacttgctgcgcggattcgcaatccctgccgctcatcgtcgtgccgttgacgtctctgcgtttgtgtgcagccagtccggcgcttggcctcgctacccgcaggagctaagagagcagcagcctcacggcctgtcgtcgatcggatccggcaatccacttcagtaatcggcctctcgccatccgaggcatcctctcatccggcacatcttcaatgaagaaggattcactatgtcacaacacaacattgttccccgccttgccatcagcgctgcgctcggtgggctgctgtacggctacgacaccgccgttatcaatggcgccaccgcggtcatcaaggaacattttcacaccggcgacgccgtgctcggcctcgccgtcggttcggcgctgatcaccgggtgcatcggcgcactgctgtccgggcgcatcgccgacaagatcggccgcgtgccgatgatgaaaatcgccgctgtctgcttcctggtctgcggtgtcggctgcgcgttcgcgccgaacatcgaaatcctcgtcgcattccgtgtgttcggcggtttcgcggcgggcatcgcctccgtggtcgcgcccatgtacattactgaaatctccccggctcgggagcgcggcgtgcttggctctctgcaacagctcggtattgtgctcggcattttcgtctctctgttggtcaacgcattgctcgtgcatatcagtggcggtgccggcgcgatgatgggaccaatgatgacctggcagtggatgttcctgtgcatgtgcgtgcctgctttgatttacggggtgctggcattcacgattcccgaatcgccgcgctaccttgttgcgcagggtcgcatggaagaggcggccgtggtgttgaagaagattggggatgccgaaatcaacgtggacgagcaactcgcatccatccgcgcgtctctcggtgctgaccgcaagccttcattccgtgaccttatcggggcaaacgaccggctgaaaccagtggtttgggcggctatcggcttcatgattctcaatcagttcaccggcatcaacgtcattttctactattcgaactcgctgtggagcgccgtaggcttcagcgaaaagaactcgtttaccatcaccgccatcacttcgctggtcaacatcgctgcaacgcttattggcatgatgcttattgatcgtgttgggcgtaaaccgctgttgctcgcgggatccatcggcatggtcgtggctcaaggagggcttgcaatattgtttggtacggctccgatggctaacggctctcctgtaatgggttcggtgactggccctctggctctggtgtgcgccaatctgttcgtggtggcgttcggcgtgacttggggcaccgtctcgtgggtgatgctctctgagatgttcccgaattcgatgcgcggtgctggcatggccgttgggactgccacccaatggctgtccaactttgtgatcaccgtttccttccctgtattgcttggcgtcaatgtcgggcttgtgtatggtctgttcgctttcttcgcgatggtttcgttcttctttgcgctcaagtgcatgaaggagaccaaaggtgtagcactggaagatatgcaagcttgattgtgccgacggtatggaaagtacttaccctttggcgcaacagggtgtttggcaagggtgcggcgcaatcgcgtagccgacttacggagctcaggctgttgatgattggcgttgacagcctagtgccggattgaaatatcaataatcgttaaggagtaatgaaccgatgagtgtcaataaaaatcaagtaatcaactcaaccagcacacgagccgacatgctggcccacgtgggcagccttcagcaggccgcccacgtgcgcccgatcgaataccaggaaggccgagcccacggcctcaaggccatcgagatgaagaacggtccgttgcgcttcgtgtccatggccgaccgcgccctcgacgtctgccagttcgaataccgcggcgagaacctcaccttcctgtccaagccgggcctgaacggccgcaaccagttcgacaccaacgggctggag

SEQ ID NO: 1481 - DNA, 13853 bp, Unknown
  R257_15m  MAG No. k141_30331
ccccccgcgccggttccggaaacggtccgactgcaggatgcaccgggccgtgcgacacatgtcaacttgcgtattcacgccaaactcaattgagcaagccgattctcgtaaatggccagaagcggaacaacgccacaccttggatatcgtcgtatggcactagcccattgttgccgtcgtcaagatggtatcgagaatctctggaattggagcgattatcaccaagcacgaacacgttgccgtcagtaacggttacggaaaaaggactgtcgcttggattcacgccggacttaagataagcgctttcatcaatgggtttgccgttgaccgtgatgggctccccggatcccttgcaggcgacggtatcgccgggcagaccgatgacacgtttgattaggtaacgattgctgtcgattatcgacatcagattggtgggaagctgctccccctccatccagtctgcgggatctttgaacacgatgatgtcgccacggtgcagtgcaaagagtctcggagtcaatcgcgaggcaaatacgcggtcgccgatttgcaacgtgtcttccatgctacgggatggaatcacatagacgttgaacacgaaggtgcgtcccagcaacacgaccagcatcaccgcgatcaccgtcagcagatagccgcgaatttcactccaaacggagggctttcgcgcatgtctcctcgactgtccacgcgcttttttgctatgacgccccaccatcatatcctttccgaccggtaacgcaacaccatagtcctcaaaccatgccgttacctacgcccatgtttgagctcagctgtcacaccagcggttcgcgcacgtctagttcacaggcgatgccggtttccttgcgggcccattcggccgcctgcagtgcggcgatgttccataatgcgcacggcactccgccaaggtccggatgcgatgcccagaatgtgaggtcatcagcgtatgcggtgatgaccgattcttccgtgactggcatgatcgtgtggtacagacggtccgcaagcgtggccacgaattcgttggccgcggcgaacgtgtcgataagatgctgttcggcggtcaccggcgggccgaccagctcccaggattcgacgtccgtggcgctccaatgcgcggcttcgccgtccacatcgcgttgcaaagagacgaacagcctggcgaactcatccgaagtcagtcccgtaacccggcgtcgggttgacaattcaatcggagtcatcagataccgttcctttcgcttcgttcattccgttgtctcgctggtttgatttgctgccaaccggtacaaagcctatctcgcacacctcacgatagcccaaaccaccggcatggccatgattgccagccctacgaccagtgaccatgaggagccggcgattccggtcagattggtcatggcggcggagacgtcatacatgccatgagccacgatcagcggtgtaatcatgcccatacggcggtacagcagcacggcgagcactgcaatcagcacacgcggtggcgtgccgccggcacaatgtcctatcgagcatcgccgcatgattcgtgcggtccacaatcgaggcagcatcggtttccattcggttcatgcggccagactatcgcccgttcttgccgattgcctgtaagcaggttcggatagactggcgcgagaacaatgcgagaaagaggcaagaatgacccggaaacggtcacaacagcacgacgcacaacgcaaaccgtcctggcgcgtacgctggaagaccatgcgccgagccgtaggcatggaaatccgcgaacacaaaagctcattcgcggtctatgtggtgctgcgcatgctggtgctcgccatggcaatactccagttctttaacggcgactacgaaaatgtgttcctgtgcatcctgacgttgctgttgctgttggcgccggcgttcatccaggtgcagttccgcatcgagctgccttcggcgctggaagtcatcgtgctggtgttcgtgttctcgtccgagattcttggcgagatcagttcgttctatgagatcttcccgttctgggacacggtgttgcacacgatgaacggcttcctcgccgcggcgatcggcttctcgctggtcgacctgctcaaccggtccgaccgggtgaagttcgagctttcgcccctgtatctggcgatcgtctccttctgcttctccatgaccatcggcgtgatctgggagttcttcgaattcggcatggaccagttgttcggattcgacatgcagaaagacgccatcatgcattccatcagctcggttatgctcgaccccacgcacaccaaccatgcgattcgcatcaacgacatcacccaggtcacggtcaatggccaagacttgggcctcggcggctacctcgacatcggtctgatcgacacgatggaggatcttatcgtcaacttcatcggcgcggtcgtgttctccgtgttcggcttcctgtacgtgaagaaccgcggcaagaaaaactccatcatcagtcggttcgtgccgcgccgcaagtccgccgaccgcgattatctgcgactggtgatcgatggcgggagcgcggctgatgccaaggccaaagccggcggtgccaacgctgacgatagtgctaacgccagtgcggccggcaccgattcagctgatgcagccggagccaaagccggcaatgccgacgccgctccgaccgtcaccgccaagccctgagtacgctctacagcactttcgaagcatcgaaacggtagtgcccggtgaccgtcatgtgcttcttgaaggcgaagtagtcgttttcgcgctgccgctgcgccatgttgtgaatcacgtacggtgcacgccccgcgatcggccggcggatagccgccctgatagtagccggaatcgtaagccggatggttttcggcgtccttgcgcgcacccgccacgatatccgcgtaatcgtccacaccattgtcattgaaatcgaccgaactggcgactctcgaatacttgcggtccgcctcgccgtgtgattcgatgattcatgaacgtattcgggtcacactgtgatcgtccgacccgccgcccgcacctcccaatccgcccggtgcttgaacttgtgggactttggcggtatcgcgaccgcagcatcgccatgctcatctccagccatcagctcaacgaattgcaggagttgtgcgggcgattcctgttcatcaaaggcggccggcttgcggacgaattcgccggcgaacagaagcggatcacggttatcgagcttggccggccgctcggtgtcgcgaaacgtgcggcggtcgcggctttggatccggccgccgtcattcatactgattctgccggccgtgaacctgttcaactccgatttcatgaaagtcagcggaaagaccggttcggtgagtgtgctggatttcctcgctggcgagttcgtcgtacagaacatgctgatgctgccgatggtggtcatggcctatctggtggctggtgccatctatacgcccgtggcctccggccgcatgttcctgtacaaggatctggaccgcgccacgatcatcaatgcgaaaatccttgccctgtttggtatctacgccgtgtacgtggcattgcagacggtggtgacggtcgctctctacatcctgtacatcgcgcgcttcgactacgcttccggcacactgctgccggccgcaggtgcggacatcgcttcggatgtggcctccatcgccggcatcctgtgcgccggtgtggtgactatactggtggtggccgcccttgccacccggttctcgaccggcagtacgagagcgcggaccacaccgtgcacctcgatgtgaaggtggacgaggatacggtgtggcttaacagaaagcaattggccttgctgtttggccgcgatatcaaaacaatcggcaagcatatcggcaatgcattgagggaagagctcaatggattttcagttgtcgcaaaatttgcgacaactgcatctgacggtaagacataccaagtcgagcattacaacttggatatgatcctgtcggtcggataccgcgtcaaatccaaggaaggcatctaatttccggcgatgggccaactcagttctgaagcagcatctcgttgatggttatatcatcaatcgcaagcggcttgacgcacttcacgccgtcgtcaaggtgctatcgaggcccaccgaaccggaaattgctggcaccgcagagatcttggaacgatatttgccgagtcttgtgctgcttaacgactatgacacaggcaatgtccctatacccaaggacgacgagtcccagtgggtcttgacctatgaggacgcgatgctgttcatccggtcgatgccgttctacacgcaatccgatctgttcgggagggaacgcaacggttcgttccaaggaatcgtcgcaggactctaccagacgttcggaggcgaagaactgtaccgttccacccagaagaaagccgcgaacctgctgtatcaagttgtcaaggatcacccgttctccgacggcaataaacgttgtgccgccgcactgttcgtgtatttcctgaacggcaacagtatactgggcgacgatgactcccctgcttgtggagggtaacgccttggcggcgatgacgctgatgattgcgctgtccgcacctgcggggaaggacacgatgatcgccttggtcgagaacttccttatacggcatgaatcgcaggagatcaattgagagaccgtcaatgaagggtgcacatcaatcacgttctagcattgcgcgactatctgtacgagtcgtctgaacgatctgctgggagtgctcttcgcggaaaaccaacagcagaccggaggccgcatccactatgtgttgttcaacccttgggccgtacgcagcaatgaggcattgaacagtttcgattcgccactgatgaagctgctggcgcgtgccatttacgccattgtgggcgtcagcgtcgaggaggcgattgcccccatcacccacttgatcgacaacccgccgcacaccgcgctgtcagcgttcatcaagaccaaacccgtcgatctcactatgaacaccttcgacaggggcaaggcggtccggttggacgatatcaccaaaagctgctgaatcgctagctgtcatagcacaaggccttagacagaacacccagaaatcgaacgggtagatggatcgcgtctccccttgacttccggcaagcacacgccaatcatggggcgtatgggtattgcaatcaaacgtatatatgaagagccgactgcgtcggatgggtatcgggtgctggtggatcgcctgtggcctcgcggcatgacgaaagagcgtgcggcgttggacctgtggctgaaggacgtcgctccctctcccctcctgcgcaaatggttcggccatgaccccgccaaattcgcggaattccgcatgcgttacatcgccgagctcgacgccaatgccgccgtggacaatctgcgccacatctgcgcggagcatcccgacgtgaccctgctctatgccgccaaggacccgcacatcaatcacgccctcgtactgcgcgattatcttaactgaatattgactcaggacgaccgtcgtttcagtccatctgctagattctcgccgattttcgtatctttgaatcgaagtgcacagtcgtcactccttggattgccaagtaaagggatgcctccaaaccaaatcaatccgtcatcgattatggcaaaatcggaacacgattcgacggtccggacaatgcacccaatagcacgcagccgattaatattccgttctattcgtgttctggttgccaccgcagcagtcgccggcaaacggacataaacttcgatgagcgctttcctgtcggccagtcggagcaattcatcgtcaattgcgctgagtccctgttgtgatacatattcagccgagataatcagggaacgtgcgcaaccggcaatatccttgcggagtatctctgcataattcgtggctgtaacgataccgccttcgaataatccgtcagaccgggtgtcgagcaacgcatccgcagcatcttcgccctgcgtcgcggccgtcatgcaagcgcgcaacgcttccgcctttgcactgagcatgtccattttctcagtatggtcaggatttaccgaatatccttgatttgcgtatgccttcagccgttttcgatacatgacagcggataaaggcacggtcacgtcgatgtaatcatagacacgaacctcggtcttgccatcattctcgcgatgaagtcgccctacatattgcgagagagtaccctcaaacgagaccggagcggcaagcagaagcgtgtcgaaacgcttctgatcgaatccttctccgatatagctacccgtagccactacagtcaggctctcattattcggcaccaaggatagatcatgcatttttttggttattcgctgtttgcggtggggcgggcatgggttagtgtttcgggttcgatttcctgtcagaaaaaataatcgagtgcgggattacggccggtaaggctcctgctgtggatgcggatgcgcgtcagccttacggtgatgctttcccaaaacgcggattatacgaggtgtgggacggcacgcggattcggccgttttccgcccgccgtcccacagcgctcgctatgaacggttgtgcataatcatggagctgcagcgagaatcggcgttattccgcggtttctacagtcgtcggtgtgggacgctacggacgttaaacggttgacttgtctgccatcccgcgctcttgagggacggcgcggacgacaaacgattgactcgtctgccgtcccacagatattgggatgtgtgcggctgcctgctgtctatagcgggtgtcggtcaccccccaccgatcgccccccaccggtcaccaccctgcttggcggaaatacgcaactcgactttctgtaggcatcatggcggcatggcgacggcggacagtcgaagagatccccatgatgcctcaacagccatcgcccacacacatcacagctatcaaccgcaaatatcaagaggccgaaaatctatgagacaagcaaccccggaaagcctcagaccctacaaatggctttattgcaagggtatatgccggttcaaactccactaatagaacaaatagaacagccggcttaggtacggcgcggcaaatggcgcaaaccggccgcgatagtagtagcgtggtgcataccagtacaaccatgcgaggagaacagccatgatcaatgaggaatacaaggccatgcttggcggcaagtccgtgattcgcgggctgagcgagtacgccacgagccgcggtgctgaaatcggctaccagaacgtgttcgattacagccttggcaatccctcggtgccggctccgaaatccttcaccgacgccatggtcgacctctacgaaaacggcgatccggcggccatccacggctactccccctcgctcggcatcccgtccgtcaaggacgcgatcgccgaaaacctcaacgaacgtttcggcatggcatacaccggcaaccacatcttcccgaccacgggcgcggcgggcgcgctgtcccacgcgatgcgtgcggtgaccaagccgggcgacgagatcatcaccttcgccccctacttccccgaataccagccgtacgtcaagggcaccggtgccaagctgaccatcgtgccggccgacaccgagaacttccaaatcaacttcgacgcattcgaggctgcgcttaacccgaacgtgcaggtcgtgcttatcaacaccccgaacaacccgtccggcgcggtgtattcggcggacacgctcaagcgtctggccgcgatcctgaccgccaagcaggccgagtacggccacgacatcttcctgatcagcgacgaaccttaccgcgaaatcgtgttcgacggagccacccagccctacccggccagcttctatgcgaactcgctgacctgctactcgtggtcgaagtcgctgagcctgccgggcgaacgcatcggctacgtcgcggtgaaccccgcagccaccgacgccgacctgctcgtgccgatgatgggccaaatctcgcgcggcaccggccacaactgcccgccgagctcgatccagctgggcgtagccaaagtcatcgaccagaccgccgacctcaacgtctacgagacgaacatgaacctgctctacgatgcgctcaccggcatcggcttcgacgtggtgcgccccggcggcacgttctacatcttccccaaggcgttagaggacgacgccgtggcgttctgcatgaaggccaaggaatacgacctgatcctcgtgccgtccgacagcttcggcgtgcccggatacttccgcatggcctactgcatcgacaccgagaaagtcaagcgttcgatccccgtgctcgaaaagttcgcccacgaggtgtacggcctgtaaacacgggccgcaagtaacaaacacaagaaaggggttgccatggaatacaccgaagacgccgatcgtcgcgaactgctgctgcacagcgcctatgactccgatacggtccgggccatggagcgacccctgctggacaaaggcgtgccgctgatgcgcatggccgcccaggccgcggcccacatggcggccggtatgctggacgacgaggatctggcgctggaggacacgtcgatcgtgctgctggccggggccggagacaatggtggcgatggtctgttcgcggccgccgcgctggcccaggagggcgcgaacgtcactgccatcgccgtgggccggtcgctgcatgaggccggattcgccgcgctcgtgcgcgccggcggcaaggtgctggtgcttgacccggcagccgatattcccggctgcgcgtccgggttttcctccggtgaggccggtgagcgattgcagaccgccatcgccgtggccaggaaatcgcatctgatcatcgacgcgatgaccggcatcggcattcaaggctcgctacgcggcattcccgccgcgctcgcctccgcccttggtctcgacggcgagtctcccgatgagcccgccctgccgaaccatgagtcgtcaggcgattttccgctggtacttgctgtggatacgccatccggcgtcggtgtgaacgatggttctctgcccggcccgtacattccggccacggtcacggtcacgttcggcgcgatgaagccgtgcgcggtgctgccgcccgccacgttcgcctgcggccgtatcgagttattcgatttcggattcgatatcgacgacaaggatccggacgtcgaggtggtggataattcgttcgcgtccgacgcggtccgtctcccccggttcgaggattccaaatactcccggggcgtggttggtctggtgaccggctcgcagcgctaccccggtgccgccgtgctcaccaccagcgccgccgcccgcgcgaacaccggcatggtccggtatctgggcccggagcgcgcgcagaacatggtgctcaccgcactgccggaagccgtgatcggcaagggacatgtgcagtcctgggtcgtggggtccggcgtgcccgaggctagcgtcgagggcgccgacggcgatatgcagcgggacaccatcgccgcattgctcaagcattacgcgctcggcagcgaggatgagaacaaggacgcctacgacatgccgccaatcgtggtggatgccggcgcactcgacctgctgccggagcgtgtgcccggccaggtggtgatcacgccacatgccggcgagatggcgaaactgctcaaccggttcgaaaccaccgccagcaccgcggagcatgccgattcgcacgagccgtacaccgccgacgacgtgcggctgaacccgttggccagcgcgaagcgcgcccacgagctcaccggtgccaccgtattgctgaagggcgcggtgaccatcgtggtggatgaggaccacgtctatgcgtcgggcagcgcgccggcctggctgggcaccgccggcgcgggcgacgtgctggccggtctgaccggctccctactcgcccagcaggatgacgtggccaccacgggcgagaccgtggcctcggccgcctacctgcatggcctggcggcggcgatcgcctccgaatccgagcagcagggctggcaggagccggaactgatcggccgcgagcatcgccagcgcttcatgacgctcggccacccgatcgtggccggcgacgtggtccacgccatccccgaagccatcgccgacgtcatctcataaccttgttgacctccctctgacgagggaggtgtctcggcaaaaccaagacggagggagagaaacataagcctcaaactccacatacctcgacctatacacaaaccccgtacactaaatcgcagacctcacccagcgacccaaacacacaaggaaccatcatggccaactcccccatcaccgacgtgattttcgacttctgcggcgtgctgctggactggaacacccgcgcatgccttgaaggccgattccccgatgaaatcgtggaacgcatctgcgccgacgacgacccctgcggcttcttccactacgaggaccgcatggacgccggcgaggatttcgcggacatctacccggatgtggtacgcgaacaaggccaggaactcgccgacatcttcaagttctacatcggccactacgcggacgcgctgccccgcacgctgccgggcatggtcgaactgctggcggatttgaaggcccacggctacggcgtatggggtctgaccaactggtcgcatgagaccttccacctggccttcgagaagtacccgcgcctcgaacagctgctgcagggcaccgtggtctccggcgtggagaagatgcacaagccgaacgccgacatctacgagctggtcctgacccgcttcggtctcacggccgagcgctgcgtgttcttcgacgacaccgccaagaacatcgtcggcgccaacgaggtcggcatccacagcatcctcttcgagaacgcgtcgcaggcgcgcgaatcgctcgccgaactcggcgtacgcctgtaagtcgccaaatattgcgtcgcggcagttgaagtctatggacccgtccttgacgacggtgaccggccgtttggcgaccggcatgtcgcactgttcggtgagcacttcaacgacgcggcacgcggcaccatgcgcagaatcatcatgaaggcgttctggatgttcatcacgtcggcgccgagcctggtcatcaggctcggcgtggagaagcggtcgatactggagaaggagaaggtctggatggcatcgtactggtcctgcctcaggttaccaatgtggcgcatatcccgttacacagcgtccgcgatatgcgaggcatctcatattgtgtcgccatagtggattgatgaggttataaacccgtgtggcgaccatccctagcgatataaatagactttatgacactgctgcagctgaaatacatcgtcaagatcgtcgagtgcggctcgatgaacgaggcctcccatgccctgtacgtctcccagccggccctgagctcgtcggtcaaggaattggagaacgagctgggcatcgagattttcacccgctcctcgcagggcatcgccctgaccgtggacggcgcggaattcctgacctacgcccgccaggtgctcgaccaggccgacctgctcgaagagcgttacaagcatgccaagccgcgcaagcagctgtgccaggtctccacccagcactacatgttcgccgtcgaggctttcgtggagatgatcaactccattaagtccgacgaatacgagttcacgatccgtgagacccgtacacgtgacatcatcaaccaggtggcgaacatgcagtccgagatcggcatcatctacctgtccgatttcaataaggacgtgatcggcaaactcctgcgcgagaaacaccttgaattccatccgctcttccgcgcccccctgcacgtgttcatctcacgggacaacccattggccgccaaaaagatcatcaccatggaggatctgaagccctatccgttcatccagtacgaacagggcgaggaaggctcgttctacttctatgaggaggcggtctggccggaatactcccccaagcagatcaacgtgaccgaccgcgccacgattctgaacttcatcatcggcctcaacggctacacggtgtgcaccggcatcgacaacggcgacctcaacaatgagaagatcgtcaccgtgccgctcgacaccgacgaaacgatgctggtcggctggatcacgaacgagcgttccaagctatccaaggccgccgaaacctatctcgacaaactcaagtccgtagtcgccgaccacggctacaagctcatcgattaggagtaagtaaaacaggcatggtcagcagtgagatatactgcgattaagccaaccccgctggggaaatggaagtaagagccggcccctgagtatctcaggggccggctcttgcgctattgagactgactggcaaaaccagtttgatggcctccggctacttggccgagattaccgacgtggcggctgtcgtggcgaagcctttgagcacttcaatcatcacgtcgcgatcttcgacatcaatgttgcgggccgcggcgagcataatcggcagtgactgtgtcaaatgcgaagtgaggtcgccgaatgtgtcgtatccgccagcctcgaagatggcaaacaggttttcgatgaacttgcggcgatgctcgtcgtcgtattttgccatccatccgttgatcgtgcgtgccaggtatcgcgcgctacttgtcagtccatcagcctgtacgaattggccatgatcgacttgccagtgcagggcaaaatgctgcatgatgctggcaccgtcgctgctgaccaccgtatagccgtcttccacatgctcgcgggtctcaaacagcatgccgatgatcgacgatcccggtaccgatttatggattttcggcgcaatgcgcgcgtacccatcctcatcgaagaacgcctcatcgaagcctggaccatcgtgcgaatacacggccgtgatacgtccctgaatttcgccgggcacattggccgccgcgtataccgccagattgccgcctttggaatggccgccgaccataatcggcccggcccagcggccggcaatatcagtcacataccgcacagcggcctcctgcgaggcgaccggacggcggaaggccatcgtgaaatcctccttccacccgacgatcgaactgtcggtgccacggaaagccacgtacagcgtgccgtcgcccagttcgaagacgcaggccgagaactgtttggtggtttcggcgtcgaattcatccacgtattcgccgacgcgcaggtcgcgccagcgcgggctctcccccatcgcacgcagcagatcgacgttcatctgcggcgaccacaccttgccgaacatggcgtcatagcattcggcgcgtagcaggtcgcggatggagaccgtgggaatcatgccgctgacgtccgccgaatcctcgtgatagcgcggcacgttatccggcatgcgcgcgtaggccagctgggacagggcgagactgtccgcctcggtgaacggcagtgcggcgaaggtgtcgaaatgttgccggatatcgtcggtgatgttccccatggcggcctttcttgttcgaatgtaacgaacctacggtaattctacgccgagcgggttttcatcacaggcgagtcggtcccagagtttaaaaccctatctcgccttcaaggggctgatttggccttctggagacatctatctccgtttcaaggggctgttcatccgtcatatcccgagtatgagcggcatcaccccaacgtcattccgccattttcatgctgc

SEQ ID NO: 1482 - DNA, 10274 bp, Unknown
  R257_15m  MAG No. k141_30870
acatctgaatgtacgttatccggtgtcatttatagtcaatctgaataccgatacgcagcgttcgatcatggtgcccgatttctttcagcgtatgcttgatggtcatggcggttccttccgcgaagcattacgtgagttttgttatgtgaggattgctcccgaatatcaagaaggtctcctgcgactgcttgactatgatgtcgtccgtagccggctcaagtcggaaggtgcagtgcaatgcggttacgtgaagaacgacggtgagcggttcatgttgacgattcttaccgacaacagatccgcggacgagaccatgtgggtgttcgaacgtaaggacctgccgtagcggaaggctcgagaccctcaggggcatggccctgggcttccgcaacctcgacgccaccatcaccagaagcctgctgcacgccggcggcttcagacacgccatccaaacccacctctgacacatgcccttacacgccaaaatcggaagagccggaaatactacaacacgctgattgttgtatgtacaactgttgtatatgggtctcttgattatgaatttgaacatcaaacactccctcagtcacctgtggtgatggctcccgatcaagacggagcggaggttgctaacacgaaggaggagaacgaatgagcgataccgcagaggcaatcgcgcaggcgcgcaaagccgtcgaacccggtagacctaagcatgtactgcgcacgctgggccattcgattcgtgaatacaagaaagccagcatcctggctccggtgttcgtggcggtcgaaggtattctggaaatcctgattccgaccatcatggcttcgctgatcgatgagggtatcaccggtggcagcatgccggccaccgtcaagttcggcgtgattctgctggtgtgcgcgatggtttcgctgggtgccggcttcctgtccggaaagtacgcggccgtggccggcgcgggcttcgccaagaacctgcgcaaggaccagttcgagaaggtgcagggcttcagcttcaccaacatcgaccggttctccaccggttcgatcgtgacccgactgaccaccgacgtgacgaacctgcagaacgcctacatgatgatcattcgtctgggcgtgcgtgccccgatcatggtggtcgtagcctggctgttttcgttccgcatctccccgtcgatttccatggtgttcctggcctgcatcccgatcctggccatcggcctgtgcggtctggtcgtgctcgtgcaccccgtgttcgagcgcgtgtttcacacctacgatgcgttgaacaacgtggtcgatgagaacctgcagggcatccgcgtggtcaagtcctacaaccgcgaatccttcgaggtctccaagttcggccgcatctcccagcgcatcttcaaggacttcaccaaggccgaacgcatcatgagcttcaacatgccgatcatgatggtgtgcgtctacgcctcgatgattctcatctcatggatgggcgcgcagcagatcgtcgcttccggcaataatgcggcgttgggcctgtccaccggcgagctgacttcgctggtcacctatgccatgcagattcttatggccatgatgatgctgtccatgattttcgtcatggtgattatttctcaggcttctgccgagcgtatctgccagatgctgcaggaggaaagcacggtgcagaacccggcacagccggtgactgacatggccgacggctccatcgaattcgaccacgtcaccttccgctactccgacagttccgaaaagcccgtgcttgacgacatcaacctgaagattcgctccggcatgaccatcggcatcgtcggcggtactggttcggcaaagtcgtctttggtgcagctggtgccgcgactgtacgacgtgagctctggctcgctcaaggtcggcggcgtggacgtgcgcgactatgacattgaggcgctgcgcgatcaggtggccatggtgttgcagaagaacgtgctgttctccggcactattgccgaaaacctcaggtggggcaacccgaacgccaccgatgaagagatccgccatgccgcgcagctcgcgcaggccgatggattcgttcaggaattccccgacaagtacgacacgtacatcgagcagggcggtaccaatgtgtccggcggacagcgccagcgcctgtgcatcgcccgtgcgctgctgaagaagccgaagattctgatcctcgacgattcgaccagcgccgtcgataccaagacggacaagctgatccgcgccgcattccacaacgagatcccggacaccacgaaaatcatcattgcccagcgcgtggcctccgtgcaggaatccgacatgattcttgtcatggattccggccgtatcatggcctccggcacgcacgaggaactgctcaccacttgcgacgaataccgttccatttacgaatcccagaccaagaaccaggctaagaccggagaactggccgctgccggacaggctgctgagtcatctaccgctgagccgtccgaaaccgtgacggtgacagtgaccatgcccacggccgataccagcgcagctgataccaatgcagccgataccaaggaaggagaagcacgatgagtaacgaccagagtttcaagaatcgcgagcctgacatgggcaaagccgaccccggaaccatcaagcgcatcttcagctacatcttccaatacaaattgcgcgttatcgccatcgtggtgtgcatcctgatcggtgccgccgcgcaggccggatccgcgctgttcctccaatcgctgattgacacctacatcctgccgatggtgggggaatcgaaccccgactgggctccgttgctacgcgccatcagtctgatgggctgcctgtatgtggctggtatcgtgacatcctgggcttggcagtggctgatcatcaccgttgaacagggcacgctcaagaagattcgtgacgatatgttcgcccaccaacagaagctgccgatccgctacttcgacagccacgagcacggcgacatcatgagccactacaccaacgacaccgatacgctgcgccaggccatctcgcagtcgttcccgcagatgttctcctcgattatctccgcgattgcggcattgctgtccatgctgtggctgtcaatcccgttcactgcgttcgtgattgtgttcaccgttctgctgtatttcatcgtgcgcaagatcgtgagccgttccggccgctacttcgtcaagcagcagcagtggatcggcgacgtgaacgccttcgtggaggagtccgtcaatggtcagaaggtcatcaaggtcttcaaccatgaggacgccactcagaagaccttcgatgagaagaacgaggaactctttgaggcgtccgccgaggcgaacacttggggcaatgtgaccatgccggtcgtcggcaatatgggctatctgctctacatcctgctcgccatcgtcggtgccgccgtttcgctggccggcgtcaatgacatcggtctgaccggtgtcaagccgctcaccctcggcacgctcgtctccctgctgaccttgtcccgctcgttcatcaacccgatcggccaggtctcccagcagctgaccatggtgatgatggcgctcgccggcgcctcccgcatcttcaagttgatggacgaacccatcgaggaagacaagggcaccgtgacgctcgtgaacgtggaacttgggccggacggccgcaccatgaccgaagtcgaccatgagaccggccactgggcgtggaagcgtgagatcggcgacgatggtacgaggtctctgaaggccgccgaaaagctgcgcggttccgcctgcgaggtggcgatgaaggccaaggagcaggcgatcacctcgcctgatgggcgttatacgctgctgcgcggcgacgtgcgcttcaccaacgtgaccttcggctacaacccggacaagccggtgctgcacgacatcacctggttcgccaagcccggccagaagatcgcgctcgtcggcgccaccggtgccggcaagaccaccgtgaccaacctcatcaaccggttctacgacattcagcacggtcagattctgtatgatggcatctccgtggccggcatcaagaagcctgatttgcgcaggtctttgggcattgtgttgcaggacgtgaacctgttcaccggtaccgtgatggacaacattcgttatggccgtctgaacgccactgatgaggaatgcatcgaagccgccaagctggtcaacgcggacagcttcatccgtatgctgcccgaaggctaccagacagtgctcgagggcgacggctccggcctgtcccaaggtcagcgccagctgatttccatcgcccgcgccgcggtggccgatccgcccgcgctgattctcgatgaggccacgtcttccatcgatacccgtaccgaggaagtcgtgcaggccggcatggataacctgatgaagggccgtacggtcttcgtcatcgcccatcgtctgtccaccgtacgcaactccgacgtgatcatggtgctcgaccacggcaacatcatcgagcgtggctcgcatgacgagctgatcgcgcaaaagggcgagtactatcagctctacaccggcgcggtggagctggagtagtttgacggcaaattcgcctggttgctgatgagattacaaagcggcatatgtctcaggggacatatgccgcttttgttgtgcatgagaagcataagtcttggtgggaattgcgagtattggtgaggggaagggtacattggattgtggtctgatgatatatgagtcgcaaggaggaggccgagatggcattcgtgacgttgaaggatgtcgcgcagcgggctggtgtatcagccgctgccgtctcccagattcttcacgataaaggccgtttctctgatgagacccggcaattggttctgaaaacgatcgaagaaatggggtatgtgccggaccagcgtgctcgctccatgcgttcgtcgggtaccaaaacagttggcttgctggttcctgatttgtgcaatccgtatttcgccgatttggttgcttcgatggaggatgaactctaccggcatgggatctccactctgattggcacgtcttcggaaagcgtggaacgccaggatgtgtttatcgagaatcttttgggccaacgcattgatggggctatcgtcgtaccgcagggtgtgaaatcccccggagtgcaatcgttgatacaacgagacttgccgttggtgttcgttgatcgtcgcgttcccggtgtcgagtcggtgccgtttgtggtttctgatccatatacgggcattcgtgaggctcttgaagaactggtgcgtctgggccatcgacgtgtgggctatatgtctcatccttcgctcgaatcgttcagtattgacgaacgagagaccgcgtttcgggaggctgccgccgatttgcttgccgacggcgatggcgttgtcgcagcttgcgactccacttatgaatcgcgtgccgctgcggtagagatgctgctgggtgcaggggtgagcgcaatattgtgcgcatattcgccggatgcgttcacggtgattggactgctgcatgaccgcggggtggcgattggcgaacgcatgtcgttggtgtcgttcgatgatatttcggcgtttaccgtgatgacgccgcgcatcgccgtgatttcccaacaggcggatctgatggggaagcagggtgtggagctattgctgcaacgcatccgttcgggatccatggatggcggcatcacgcattccgtgcccacgatgttcatcaaacgcgaatctgtgggtgaggttagttccgcgtccgtcgccaatcaatcagcggaagtgtgattcaagcggcttcgagaggaatgcgcggatacctttgacacgcaggtagatgaggcattgacaatagtgatttaacgttttatcctcagataagccgatgatgaaacgttaaatcatcgggagtcagagatgacccagcggctgttatggaagcaaaggagcacttcggtggaaaagattattctggattgcgatcccggtcatgatgatgccatggccatcatgcttgctgtaggcaaccccaaaattgacctagtgggtgtgaccacggtgggcggcaatcagagccttgaaaaggtgacgtacaacgcccggtccgttctggaaatggcgaaggccacggacatcccggtgcacgccggttgcgataggccccttgtccgcaagcaggaggtcgccgcatcgattcacggcgagaccggtttggatggcgttgaattgccggttcccacccgtcctctggattccggccatgccgtgaactggattatcgatacgattatggccagcgagccgggaacaatcacgcttgtgccgaccggtcctctgaccaacatcgccatggccgcccgtatggagccgcgtatcgtagaccgcgtcaaggaagtcgtcctgatgggcggcggataccacgtcggcaattggagcgccgtagcggaattcaacatcaaggtggatcccgaggccgcgcacatcgtgttcaacgagccgtggaagctaaccatggttggccttgatctgacccatcaggcgctgtgtactccggaggttcagcatcgcattgatgccatcggcactgatttgtcgcacttcgccagcggacttatggacttcttccgcaagacctatcaggataatcaggacttcatcgatccgccggtgcatgatccctgcacggtcgcctatctgattgatccgagcgtggtgtcgactcgccgttgcccgctggatgtcgaaatccacggtgacctgacactgggcatgaccgttgccgacctgcgtggcccggaaccgtccgccgaggaatgccatacgcaggtcgcggtgaaactcgacttcgataagttctgggatctcattgtcgatgccatcgttgctatcggctgacggacgaagaagaatgcgtaaaaggacaagggaatagtcatgtcgacagtcaaatccgaacaaatgcttgatgagggcggcaagtccattgtcgctttgatggctgcgctgatggcggcgatcttcgctttccagctcaacgcttccatgctttcgccggcgcttaccactatggagcgcgagctgaacaccagcagttcacagatcagcctcacccagacggtcttcttcaccgcatgtgcgctgttctcactgttcctgcctcgactgggcgatctcgcaggccgcaagaaagtattgctgggcatgctgagcatcaccgccatcggctgtgtggtctcggcgttggccgtgaatgtgcccatgctgatggtcggtcgcgtgatgcagggcgtatgcggaccggtggtgccgatgacgctcatcatgctgcacgccaaggtgactgaggatgccaaatatgcgcgactgatgtcgattcttacctcggtgaacggcggtattggcggtgttgacgccatcctcggcggctggcttgccggcacgttcggcttccgttccgtgttctgggtgatggtcggtgtcgccgtggtcgcaatcgtgctggtgtcgatgttcgccgatgaaagcacggccaaagagaccccgaagatggattgggccggtgcaatcgttcttggcatcgccttcctggcagcctatctagccatcaacgaaatccagaaactcggcgacgcgaattgggtgctcgtcgctatcgaggtggtagcggctgcggttgccttcgtgatcttctggaaggtcgagaaccgcaatcccgcaccgatggtcaccacccactatctcaagcagccgcgcacctggggcctgctgctcaccacattgctcaccatgaccggcgtgttcgccatcatgaatggcgttgtgccggccttggctcaggacggtaagttcggcaccggattgggagccgacgtggtgtcgttcgccacgctgaccccatatgctttggttggtctggtcttcggcgtggtcgccggtgtgcttgcctccaagttcggctaccatcgcatgctccgcgtgggcattctggtcagcttggtcggcgtgctgttcggcgtatacgttgcacacttcccgagcgtatgggccttgctggttatctcggtggtgctcggtgtggcatacgcgggcacggcgaacatcatgctcaacggtttgggcattgtgctgtcgccggacgacaacccaggatacttgcccggcctcaatgcgggcgcgttcaacctcggcgcaggcttgagctatgcagtgctatatgccgtgatgaacgcattcgcgagcttctcgggcggcattgccggttactcggcggcaatgatcgcgtcggccgtgcttctgggccttgctctgctggcttcgttcgccatccccaagcttgaacgagccgaccagtagtcgttttcgcagctgctgcccccatattcctgccagatgacgctggcaggaatatgtcatcaatggagagaacagacagttgccaagaaagggcagacaccatgaacaaactcattctcgatctcgacaccggtgtagacgacgcgcttgccattgcctatgcgctggacagcccggaagtcgaactcatcggcatcactggtacttacggcaacgtgccgcttgaccaaaggtgtgcgtaacgcgctcgccatcaccgaactgctcgatcatccggaagtccctgaacgaattcatgacccgtattaccgcgctcgctgagcacgccgagtaaaaggacttcgcatgtcaaccaataccgcaactgtgaccgccgatccgtgggcggacccgaagaccagcaattcgatggccattggctttattggcgcaggtttcaccgtgaactcgggcttcgtggtgctcacgctgttcgcctgtgtgttctatacgggctgtggcctcatgtattcgccggttgtgtgccgcttatcggcgtgatctactatctcgtcatccgcaaaaagatcggcgagtgatcgttggctctattcgtcaacgacaacgaaaggaaatgctatgacagcatctgacattcttgcggcacttgatcgaatccaaggcacggtttgcgtcgtcggttcgatgaatgccgattacaccgtggtcaccgagcgtctgcctggaccgggggagactgtcaccggcggcccgctgcaagtgttgcccggcggcaaatccggcaaccaggctgctgctgcggcacgtattggcgccactgtttacatgtttggagcggtgggttccgatgccaatgccgagttcctgcttggtgcattgcgagaagccggcgtggatacccagcacgtgcgtcatgtaccgggggccagcggtaccacggtcatcaccgtggacgcgaacggagagaacacgattgtctactctccgggctccaatgcgcaggtcagtgttgattatatcgaggcgatgcgcggtgaattgacttcggcgaatgtgcttggcctgtgcttggaaagcccgatcgagaccgttaccgcggctgcgcgtatcgggcatgaagccggtgtaccggtactgctcaacaattcaccgtttacgccggtgctgccggacgagctggtgcagcttgccgatatcctgctcgtcaacgagcatgagatggcgcagatgttcggtatcgccgaacccgaagacggcgactggtccggattcgactggctggctgcggccgatcgtatgcgggagctcgggttcgaccgggcgattgtgacgctcggcggtgatggctcgatggtgctggatgcatcatgtgctgttgcttcggtgacccgcatcgcaccggttctggtcgaagccgtggacaccaccggttgcggcgactcgttcatgggtgccgtgctggcaggactggcctcaggctttgagctgcgtgaagcggctcagctggcttcgttcgtttctgcatatgcggctaccggtctgggtgcccaagcgtcttacggttccgccgcccagattcgtgagctatttgtgccctgaccggttttcggtagtttctctcaatggcctcaaccagcacgtcatattcgtgctggttgaggccattgcattaggggccgcgtatatgaacaatccccgaggcattcgccgacgaactgctggaattaaccaacgaacaagggcgttgcacttctaaatagacagcgggcgtgagttacactatgtagtaaagttatttactgaaatactgcgtattgttacgtactgaggcgtggaaggctcaactatggtcacgatgaaggaa

SEQ ID NO: 1483 - DNA, 12722 bp, Unknown
  R257_15m  MAG No. k141_31877
cattcgcgatcgaggcgttggccgaggacatcgagctgctgaccgccatccgcgaggccggacaggaggtgtatatcaatattcatcccggcgcgcatgtgggccaaggcaccgagaccggctgccggctgatcagcgaggcactgaatcaggtgttcgagcgcgcggccggcgtcatggtgcttctggagaccatggccggcaaaggcacggaatgcgggcgcaacttcgaggagctcgccacgatcatggatggcgtggagaataaggcgaacgtcggcgtcacgttcgacacctgccatgtgttggatgccggctacgatttggtgcacgactacgacggcgtgatgcgccagttggatgaggcgatcggcttggccaaggtcaaggcgattcatgtgaacgattcgcagtttggcctcggctcgcacaaggaccgtcacgccaatatcggcgagggccagctcggcatcccgtttttcacgcgactggtcaacgacccaatcatggccaagctcccgatgatcctcgaaaccaaggagcagacgcccgccacgcatcgcgacgagatcgagttgttgcgcggattggtgcaaaagtagtcgtagtcgaccaatgtcgagcagaagagacctgtttttgactgatggccatacgaggttagttatcagcggggtgttgattgatccgtcttcatatacagctgcatagccggttccagctgcaagagctcaaaacagacgcatgggttcggtggaatccaatggctgaataagacgtttgccgtcactgttcagtggcgcgacttcgtgaaattgcagatgccgggaaagcatggtacccgcttcccgcatggaatctaacagtgcggctccgtcaacggagcggtccagccatgaggcaaccatattccgaggcgccagcaggggcatgcgatcatgcaccttgacgaactcgtccgcggcagggcaggtgatgatggttgcggtcagctgccatggcgatgcgggagacggcctccaccatgagtacaggccggccaaagacaatagttcatcatgtggtgcgtgaaaatagaacggcctgcgacctttccattcgtagtagccggaagcggggatgatggctcgcatggattttgtggattcggcgaacgccggcttgacatgcgcagactccacacgcgcattatatgtggggtagctcagcactttgctggcgctccatcgcggcaccagcgaccaataggcaccggtcagatgacggcggccatccttgccctgtgccaccacgccaatgttctgcatgggtgcgatgttgtaggaaggctgtggcagagtgtcaacgcgcacgtcatcctcgtctaccgcgaactgtgaggccacggcatcccaatccaaatcaagcgcgaatctcctgcacatgcgcccagtctatgccatcaatggaatcaatcccaggccgtatgaccgatattcatggcgattttcctttttgttggccgctctggttccgtagcgatacgaaccaacgaggaatagcccagaatgtaggacgggttcggcaatcgggacggggcgtgacctagagtggcgcatgaacgaacaccaacaaagggaggaccatgtcggttttggacgaactggtggcgggagcgctggaggatcagcgcgcccgtgagctcaccgtatcgcttgaggacgtgaagaaggccgcgctggcggccccggctccgattgacgcgacacgatggcttaagcgcgccgacggcatccccgtgatcgccgagatcaagcgcgcgtctccgtccaagggccacctctccgacatcccggacccggccgcgctggcccgcgagtacgagaagggcggcgcaagcgccatctccgtgctcaccgaaggccgcagattcctcggcggccttgacgatttcgacaaggtccgcgccgccgtgcacattccggtgctgcgcaaggacttcatcgtcaccgactaccagatcttcgaggcccgcgcccacggcgccgacctggtgctgctcatcgtcgccgcattggacgacgcccagctcaagcacctgctcgacctggcgcacgagttgaacatgaccgtgctggtggagacgcatacccgcgaggagatcgaacgcgcccgcaaggccggtgccaaggtgatcggcatcaatgcgcgcaacctgaagaacctcaaggtggacgtgaacaaatacaacgaactcgcggccgatctgcccgatgacgtcatcaaggtggcggaatccggcgtattcggcgcggtcgaggtcgaagactacgcccgcgcgggagcggatgcggtactggtcggtgaaggcgtggccaccgctgatgatcatgaacttgcagtggaacgactagtaaaggcaggagcacaagtgaaagcatccgaaaccaccccgctcagcgaacatcagggaccgtactggggacagttcggtggccgctatgtgcccgaggccctcatcaccgccctcgacgagctggagcgcgtgtacacgcaagccaaggccgaccccgaattccacaaggagttcatgacgctccagcagcgttacgtgggccgtccgagcccgctgaccgaagccccgcgcttcgccgcactggtcaagcagaagaccggtctcgacgcccgtatcttcctcaagcgcgaggacttgaaccacaccggcgcgcacaagatcaacaacgcgctcggccaggccctgctcgtcaagcggatgggcaagacccgcgtgatcgcggagaccggcgccggtcagcacggcgtggccaccgccaccgtgtgcgccatgctcggcctcaagtgccgcatctacatgggccagatcgacgcccgccgtcaggccctgaacgtggcccgcatgcgtatgctcggcgccgaagtggtcgaggtgaccctcggcgacaagatcctgaaggacgccatcaacgaagccctgcgcgactgggtcaccaacgtcaaggacacgcactacctgctcggcaccgtcgcgggcccacacccgttcccggccatggtgcgcgacttccagaagatcatcggcgaggaagccaagcagcagctccaggactggtacggcatcgaccatccggacgcgatctgcgcctgcgtgggcggcggctccaacgccatcggcgtgatgaacgccttcctggacgacgagcgcgtgaacctctacggctacgaagccggcggcaacggccccgaatccggcaagcacgccatccgcttcgcccccggcaccggccagctcggcatgttccagggcgccaagagctacctgctggaaaccgacgaaggccagacgctcgacacctactcgatctccgcaggcctcgactacgcttccgtgggccccgagcacgcatggctcaaggacatcggccgcgtgaactacagctgggccaccgacgaggaggccatgaacgccttccgcgacctgagccagaccgagggcatcatccccgccatcgaaagctcgcacgccgtggccggcgcgtacaaggccgccgccgatctgaaagtcaagggctatgacaaggccgtgatgatcgtgaacatctccggccgaggcgacaaggacatggccaccgccggcaagtggttcggctacctgaccgacgatcaggccgccgcgcttgatgtgaccggcgcccacggcaatactgtcgcctgaacaagaagaggagattgttgattatgaccaacgaagcaaccacgccgtccggccagccgctgggcatcagccacaagcccagcaagtcggtcgctatgttcaccaagttcaaggccgagaacaagcctgccttcatcggctacctgccctacggcttccccaacccggacgtctcgcttgacgcctacaagacgatggtcgagcacggcgtcgacgccgtggaaatcggcctgccgtactccgacccggtcatggacggcccggtcatccaggctgccgcctccatcgccctgaacaacggcgagaccatcaagcgcgtgttcgaggccgtcgaaaccgtggccaacgccggcggcgtgccgctcatcatgagctactggaacctcgtgtaccactacggcgtcgagcgtttcgcccgcgacttcgagaacgccggcggcgccggcctcatcaccccggacctcatcccggacgaggcgggggagtggatcgaagcctccgaccgtcacggactcgaccgcatcttcctggtctccccggactcgtccaccgagcgcctcgaaaccgtggcccgcaacgcgcgcggcttcgtgtacgcggccgcccgcatgggcgtcaccggcgaccgcgccaccatcgacgcctcgcccgaactgctcgtggagcgcacccgtcaggccggtgccgagaacgtgtgcgtgggcatcggcgtgtccaccgccgaacagggcgccaaggtcggctcctacgcggacggcgtcatcgtcggctccgcgctcgtgcacaccctgctcgcggacgacaacaagaccgcacgcgacccgaaggaaggcttgaagctgctcgccgccaagagcgaggaactggccgaaggcatccacaacgcccggtgaacacccggtgcgcctcacgcgggttgtgccgtgacacggtagggtagtcacagagcatcaagcacaacccgcgcgtggacacaccatgagcaccagcaagtagaggcacgatgaatctggcttatattccctcgccgaccttctccaagttcgagatcggcccgttcactatccacatgtacgcgatctgcatcctgatcggcatctgcgtggccgtatggatcctcaccacacgttggaagcggtacggcggcaccttcgaccagattctcgacaccacgctcgtcaccgtgccctgcgcgctggtgggcgcgcgcctctaccactgcatcaccacgccggccgactacttcccgcccaccggcaacttggtcaacatcctcaaggtgtgggaaggcggcatggccatcttcggcggcatctccgtcggcaccttggtggcgttcctgtggtgccgccacaagcactatccgttcgcgatcttcgccgatgccatcgcccccgcgctgcccgtggcccaggccatcggccgactcggcaactggttcaaccaggaactctacggctggcccaccacgttgccgtggggcctgaagctcaacgacgcggacgccatcggcaaatccgaaatctgctattccggcgcgcaatgcccggactacagaaccacgctgttccacccgacgttcctctacgagatgatctggaacctcatcggcgccgcgctcatcatctacctcggccacaagctcgccgaccggctcaaggccggccagcagttcgccatgtacctgatgtggtacggcctgggccgcacctggatcgagaacgtgcgcatcaactactccacggtgatcctgggcctgaggaccaacgtgtggaccgcgatcatcgtcttcgtgctcggctgcatcctgttcgtcgtgctctaccagtacggtccggaccccaaggcgcaggcgcgcgggcttgcggcggtcaccgccgacgagctcgaacgccagagcatcgaaggggaacagcttcgccagaagaagcaggccaagcgcactaagtgacaccacaataaacagcgccgaaacagcgcgaaacacgggaccccaagtcccattgcacagataaggtaggaaaccatgagcaatatcgcaatcgcacccagcatcctgtccgctgacttctgcaacctcgaacgtgatctcaaggccatcgccaacgccgacctggtccacgtcgatgtcatggaccatcatttcgtgccgaacctgaccctgggcgagccgatcgtcggccgcatctgtcaggtcaccgatctgccggtcgacgtgcacctcatgatcgaggacccggaccgttgggctcccgaatacgccaagctcggcgccgcctccatctccttccacatgggtgccacccacgcccccgtgcgtctggcccgacagctgcgcgagatgggctgcaaggcctgcttcgccgtgcgtccggccgaaccggtcgagccgatcttcgatatcctcgacgagttcgacatggtcctcatcatgaccgttgagcccggcttcggcggccagaagttcctcgacaaccagatggccaaggtccgccgcctgcgcgatgagatcacccgccgtggcttgaagacccgcatccaggtcgatggcggcgtgagccccaagaccgcgcacatcgtggccgaggccggcgccgacgtgctcgttgccggttccgccgtgtacggcgccgagaatcccgcccaggccatcgatgacatccgcaccaaggccgaggccgcgttcaaggcctgagctccaagcctgaaccgcaatccacctttcatccataaccgcaagaaaagaatctgaatcacatgaagacgtttgaatccctgttcgccgaactgtccgaaaaggcccagacccgccccgaaggctccctgactgtcgacgagctcgacaagggcacccacttcatcggcaagaagatcatcgaagaggccggcgagacctggatggccgccgaatacgagggtgcggaccgcaccgccgaggaaatgagccagctgctctaccacgtccaggtcatgatgatcaagcacggcctgacgcttgaggacgtctacaagcacctgtgagaggaacgcaaatgctgagaatcgcagtgcccaacaagggcatgctatccgaacccgcgtggaacatgctggccgaagccggctaccgtctgcgcaccaaccctcgccagctggtcgtgcaagatcccgacaatggcatcgagctgttctacctgcgtccgctcgatatcgccgtatacgtgggccgcggcgccatcgacgtcggcatcaccggccaggatctgctcaagaactccggtaccgccgcgctcgagcacatgccgctcggctttggtgcctcgaccttccgtttcgccgcaccgaacgaatccccgatcaccactctggaggatgttcagggcaagcgcgtggccaccacattcgataagctcgtacacgactatctggtcgagcacggcatccaggccgagaccatccacctggacggtgcggtcgaatcctccgtgcagctgggcgtggccgacctcatcgccgacgtggtctccactggcaccaccctgcgcaacgccggcctgcgcgtgtttgccgaaccgctcatgcactccgaagcctgcctgattcgctcgccgcgtctgaacgagcaggatccgcgtctggccgtgctgacccgtcgtctgcaaggcgtgctcactgcacatcagtatgtgctcatggactatgacattccgatcagcaaggtcgccgccgccgtggccgtgacccccggctttgaaagcccgacgatctccccgctgcacgacaaacagtggaacgccgtgcgagtcatggttcccaaggccaaggtcaaccagctgatggatgatttgtacgaagtcggcgcacgcggcatcatcgttaccgctctgcaagcctcccgcatgtagactgttagtcgatatgaccaaccagaaagtcaacgccagatacagtccggaagcacgtgacatctatttcaccgtgcccaatttgatcagcgcgctgcgaatcatctcgattcctttcatcagcgtgctgatctccaagcatgaggtgattgcggcgctagccctgatcgccatttcctcggcttcggacggactcgacggcatcatcgcgcgcagattcaaccaagtgagcaagatcggtcagattcttgatccgatcgccgaccgactgctcattttctgctcgattctggccctcagcgtcgccggcatcatcccatggtggatgctgattatcgtgggactgagggatctgtggatggcgattcaggtgctatggcttgcccagtacggttatggtccgctgcccgtgcatttcgtgggcaaggctggtaccgcgctgctgatgatttccatcgtcagtcttattttcgccgatttgggcaccagtacgttcttccacttgctctacatcgccgcgctggccgccggcatctggggcatagccatgtattggctcgccggatatatctataccaagcagggcgtcggattgctacgcaaggaactgggggagaagtatggcgcttgaggccatggccccggtctcgttccccatacccaaggagaatgagccggtacgacgccgcgccgtgttctcccactcagtccgaggcgcggaatcgcatcatgcgctttccccggatgacgccgccgccatccgcaccagacgtcgccgtaaaaccaacgacgattcgcttcagctcatcgatgatcttgtcaatcgtccgatggatccgatgttctccgactcacgactggtccatgagcatcgttcgaccttctccatctggtttaatcgcatcgtcgtattcatcatctgcgtcggcgttggctttgcctgcagcctattcgtgcaacagttgcaatccgatccgcgtaagcaggtacggcagactttggccacgcaattggagaatcgcaactcgcagatagacgaactcaccacggacgtcaataatttgcgatcccaagttgacgaacagtccaagaaaatctccggcagcgtgaaaagcgacacgcttatccaagacgaaatggtcaatggtgccacggtggtcgaaggcgaaggaatcaccatgacgctggccgatccaatcgcggcaagccagtcggatcaatcctcctcgacgagagtcggcacctccacgaacatccgagtcatcaccgatctggatctgcaacaactggtctccctgatgtttcaaaacggagccgaagccattgccatcaacggtaataggctcggcgcgcaaacctcgatacgcaaggccggcgggcatattctcatcggcatgaccgcgatacaaagcccctataccattgaagccataggcgataagagcgccttggccgaagcgatgggggagaagagacttgcaagtctttacgattccttcaaggaagccggtatctacccgcaggtgagcaaatccaattcgattacacttgaggcagcagtcactggcgaagtgaagtacgcggaaaggaatgaataatggcagccgttctgggactgatcatcggcgtcgtcatcggcgtgttcgtcaagccggacattccgatcatcgtgcagccatatctgccgattatggtggtcgctgctcttgacgccctgctgggtgccgcgcgagcctatttcgagcgcagcttctccgaccgcgtgttcgtgatctccttcctcgccaacgtggtgacggcaacactgctcgtgttcctcggcaaccagctcggcgtcggttcgcagctgcagacggccgtcatcgtcgtactcggcatccgcatcttctccaacgtgtccgcgatcagacgcttcatcttccgaggctgacaagggtactgacgtatggcacgtaaagcacaatcagacaacatgctggagaaaatgcgcgaccagcatgcacaagacaaggtcaacgaccggatggaaaccgggtcgttccccacggtgcgcaagaagccccggaaggatctcaaccgggccagcaacaaatcacggctactatcctcgattctcattgctctgatgtgcgcgctgctgggtttcgcctacatgagccagatcaataacactaaatccacgtacgaaacgatggacgagagcgaactggtaaggctgctgaacgagtcgaatacgcaaatctcgaatctcgagcagcgtaaaacccagttgaacagccagctcaactcactgaaatcggcggctaacgagcaggagcaggcgcgtaagatcgccaagcaaaacgaagagaccagcggcttgatctccggcagactcccggcgaagggccaaggcgtgaccatccggatcggacgaggctcgacgactaaagtggacgcctcaatcatgttcaacctcattgaggaactccgcaatgccggcgccgaggtaatcgccatcaataacgtgcgcgtcatcacctccacctacattcaggacgccgaggaaggcttgatcgtggatggcaccaccatcaagcccacatacacggtgaaggccatcggcaatccgcaggagctgtccaacgcagtcgatatcgccggcggtgtgggcgctcagctccaggtgaaatacggatccaacgtcaacgtgcagccttctgacagcatcattatcgacgaagtacgcgaagctacgcaaaaccagtatgcaaagacggtagaataggggattatgaccaacccgattcctagcgcaggcgaaaccaccattatcggcctgcccgcgattaatgtactgcccattaccaccaccggcgatcgaccgctgactcaagaggatctggacaccatcaccagattgtccgagggaacggcattgctgatttccgccaggggagcggtctcaggttctcgttacttgcttgacgaggatgaaatcaccgtcggtcgtgatccgcgagctgatattctgctcgacgactccaccgtatcccgtcagcatgccgtgttccgcagggtcaacggtcagttctttgtggttgacgcaggaagtctgaacggcacctacgtgaaccgtcagcgtgttgatcaggcgtcgctgaagaacggcgacgaaatcatgatcggtaaattccgtctcgtgttcttcacgaaatccgccattatttcccaatagtccacacccagcacggggttagactgattgcagaaattgcaatcatgtgattacaccagtgtgagtcacatgcgagacacgcatgagttaggggagtgccatgagacagacagggctgcatcttcatgtttcgcttgaggaccgtcagaatctgaacgctgacgcgattcagggggagttgttctccaatgtcgatactgaggagatcaagcgcggctaccgtggcactgtggcctccaaggtggccggcatcacgtaccgacagctcgattattgggcacgcaagcagattgttgagccgtccatcacgccgtctcatggctccggttcacgccgactgtactcgtttaaggatgtggtgattctcgctgtatccaagaagctgcttgatgccggtgtgaatctgcagaacgtgacggcggccatcggattcttgactcaacgcagcaccgatcagctggccaatgtgaccatcatgtgcgatggtcaaaacgtacatgaatgcacaaccagcgaacagatgctcgaactgttgcaaagcggtaaggcggtgttcgccgtgtcggtgggttcgttgtggcaccagattgagacggccttggaacaggaagaatatgttgatcttgaggccaagccgctgacgattgccacgggccgtccgattgatgaactgaccgccatgaggatgcgcaagaagctcgaggcacagcgcttgcaacgcgcaaccgcctgatacatgtatggttgttggcgacttgccggctttggtcggcaggtcgctttgttgtatgtgttgcttttgttgcctgccatcttatgtttttatatgttgcggtgattattatgactgattggaggaccgggtgaacgggattgttgtcggattgttgccgggcgttctgtggatggtcgccgtcatctttgctgtgtccatcatcactataacggtcagccgaggccatctgttcacgccgaaacgccggcgaccgccggtcgatccggtcgactggtcgatggtgaaaacgcatttcatgtcgtttgcggcggcgctgattccgtttcccgtgttgacgtttacagcggatttgatggatgctcgcatgctcgcgttctacgaccacgcgcaattgcccggtgcaatcatcatattcgtgctggtgctgttggaacttgtcgccatgtatctgcaggcgcgcaacgcttcggaatccgcgatggacaagcgtttgggcgttgcttctcaccggaataaggatgatgttgcgaagtagccgattctctgcggcgaggctaatccgcagctagatactactggttcggctaaaatcaccacatactattaaccgataatgtacgctgtgcgacagtgatttgaccggacttcaggaatggctttatttcaacggtttgaagccatgctaatcagcggtttggaccggagcctgccaaaggtagccaaacccgtatatgacaattggctatgggggtggagcgacccacggcctcagcttgcattgccctttgccgcgggtcggtttcatcatacccggcactcctgcccggcgagtttcgccaagctggcgtcgggcacatcgaaccacgccccgcgtttggcgggcgacaccagctccgcgcccaacccgtgccccggcgtccatctgcggacgagccccgatgcgtcgcggtaggccaccgtgccgcgctccgacctccagaaaccctgccattccggcgtctcgcggctcctgtcgaagtcgaagcagccatccctcagaagggccatgagatcggggtcgacgggttcgccggtcacagggtcgttgacgaccagactcaggtcggcagcgttgcgccccccggcggagatgcgccatgacttcggcagaccgccgggctcgaacgtcacgag

SEQ ID NO: 1484 - DNA, 53530 bp, Unknown
  R257_15m  MAG No. k141_32812
caccatgccacctccgcgaggcgtgagcatgctgccctgcaggttgctggccagcacgaacccgccgaccgcttccttctcgattcgtccggcggcctgttgagctgcccgagaaaccgcgatcgtggatagcatgctcgccgttatgatggtcaatactataaggagcactatggttcgtactcgttttctgagcacatagcgcaccgaccgtgcaacgaacgtcatcaatacctcctgtgggccttgggcttttcgcccaaaatgcgaaacatgccgcgtttcgccggttagttagccgcgacaatacatgatgcacctcaagatacgggaagagatacgccttgggcgaaaaacggaacagcggcgaatgtcgtttattctggattttggtccgtctcgggccgcgtcgatgcgtcggcccgagaggaatcagcgctcgcgcctcaccttcgaggcggcgaacacgaggagcggcagagcggcgaacgcatagttctcgcattggatgtacaggtatgcgaccaggacgagccagcagatgacggtcttgtgccagacgccggattcgcccgaacccgcgccggcaacgccatcaccactattgcccccggcaacatcagcaacgtcggcaacgtcggtgacacaaacaccgtgcgccagcccgtcggacgatgcgccatccgcaccgccacggcataccgtcctcccgcgcgtcatgcagaccatcgaggctccgaccagcatggccagcccgatcagcccgtattcggcgatgacgctggtatacgcgcacatcgtccacaccgtgtccgcgttcacgccggacgcgaatcccgtggccgcgccgccgttcataccaagaccgtccagcagccgtccggctttggccgcgccggcccacaccgcattgatgatgttgcccgcgccataaccggtgagcagcgtccacggatgggtgagcaatccgcatatcggatcgaggctttggtagatccgcgcgaagaacgagccgtctccctcggccccgttctccgcgatggcggagagtctggaatccgccagcacacccagcaggcccagtgcgcatgcgccgagaatctgcagcatgccccggacgcggcgtgcgccgtcatgccaatcggtgcgcgccacaagggcgatcagcaacgccacgacggaatcgatgacgattctggtgccggcttgcatgagcaccgcgccgacggcatacgtgacgatgaggtcacgcagccgtttggcgtagatgcggtcgcgcccgcgcatgagccacatgagcggaagcagtatgccgaacaggtgcatgccgatatagctgggctcggcgaacaggaactgcggacggccgccgccccacaccgagttgtcgctgatgtattgccggtacatgaggtgcgagaaatagtcggtcaacggtttggcgcgcagacggatggacagccattgcacgacgcccactccgaaggaaacccagtatgatgcgatgagaatccgcaatggcgtacgccacggaatgcgtttgatgtcgaacgcaagggcgatcgcacccaaagtggcgagcacgcccagcaatccggtgatgctcatgaacgcggcgttgaggtggatgccgaacttcagccatcccgggatggacaggattatacagaccaccggtaggaggaacattggcaggtaccggttggctgcgatgcgcagttgccgccaattgcataggcagtacacggcgaacagcgccggactgattggcgaccagaacggcgcgtacaggccaagcgtggtgccgtccaccggaagaaaagcgacggccagcaacagccaaatgacgttgcgttcctgcgatgtcagaaatcgcaggaacgaccggtattgcggtcggccatgatggttgcccgcgtcgatggtgtcgttgcgtacgcatgcctggttcatgtgattctccctccccgtcaaccttactcgttcatcacgatgcgcggacggggcatgctttccccgccgaacgtgcaatggcccgaacattgacaaggtcgcaccgagcccccatcattggcacattgtgcgatctcgtcgtggctggctgacgaaataatgctggccgaccggttacattggttcggtacagtgacggcattattggccactggatcaagcgatttgcggcagaacgacgaaagcgacacttgggcgaaaagaggcaggcatgactacgaatcgaccgctcattgcggtgactccgctgatagattacgggcgcgatagtctgtggatgctgcccggatatatggaggcgataatgcgggccggcggtacgcccgtcatgttgccgctgaccgatgacgccgacattcttgcacaatgtgccgaacggtttgacgcgtttctgtttacgggtgggccggatgtgggaccgatggttggtgcagtggcctccgccaccggccgtagcgaggtgctctctcctgagcgcgaccgcatggagtcgattctgctgccggccgcaatggcttgggacaagccgattctgggcatctgccgcggcattcagttcatcaacgcggcactgggcggcacgttgtggcaggatttgccaagccagcatccgagcgatatcgaacaccatatgaatccgccgtacgatgcgttcgggcacagcgtttccttggtgcccggcactcccctggcttcattgttcgcggggcagactgagattgcagtaaacagctaccatcatcaggcggttcgtgatgtggcccccggtctcgaagtcatggccgtcgcgcccgatggcgtgatcgaggccctgtaccggccggcaagccacttcctgtgggccgtgcagtggcatcccgagtttctctacaaggtagatccacgctcgcaggcgatttttgatgcgtttgtggagagttgctaacagcggattttttgcgtgaccacgaaagcataatcgagattgccacctcatgccaacggttccgcaccaggcagcggcgcgtctgtgttatctggaaacatggctgcatcttgctggaaaacatcacctgaagtattctaaggtcattggatgttatttttttatcacataaaatatcatttttttatacagcatgtgataaaaatactgataccagcatcattgacttgttgtggaacggtaccccaaatgcgaactatcattcagagaccaatagggacacactagctaggtatatgactgtgggaggtttcccctcgtatgcaatgccctccatacctattgcagagagcgatttacgtttttccgtaaaaacggatatcgataatgttttgggcgataccatacttcccggagagcgattggataaagcaatagctgatgccatactcaaagagttacttgcagtccctggcgggattttgaatgtaaaaagaatatccgacactattcattcgaatccctccaccattgagcgatacatcagtattttcatgcgccgattcctaatctccgccttaccgaacctacgctcagcacctggtaagcaactgtttacccgcgcaaaaatacatccagtagacacgtcattcagcgttgaaacaatacgacaatccggcagagattttcataatgatcgcgttctgtttggcgagctttttgaatcattcgccgtcaatcaaatcattccggaaatacaatggtccgatatacaccccgacgctttctactggcgggaaactggcaataagcccaaagaggttgatctcgtgctgctacacgataatcaacttgtcgctttggaaatgaagtccaacaataccgtggaccgcaaagatttttctggtattgcagcattgcgcgacagcgacaagcgcttccaccgaggctacgtcttatacacaggagacaaggtgcagcagttcactaacaacatatgggctctgccaatttcatcattgtgggacagtgacggattccagacagctacttcggatgctgaacattactcattatcggttccatcagttttacctattcggccgtccgacaccgatgtggcagctcatgccaatgcccctactgatgccaacctgtttttaagctactgccatgcagacaacgaccacctcaagggggcaatacttcaattcgtgaatgatattatcgacgaatacaattacgagaccagcaatacactcgggttattcgtcgacaagacctctataaactggggtgaagattggcgtcaggcacttgatcgaggcattggtaatgcaaatatcattcttccaataattactcccagatatgtgcgcagtgaggcctgtcgtaaagaactgctggatttcaatactcgggtcacggaacatggaccgaatcgtatacttccattgatgttgcaaagcatagatggcatgactggaattagcgatcgtgatcctgtttgggacatcgcgcataatcgacagtatctaccagtgggcgatttgcgtttaatgtctgctgaagatcgtcaaaagagaatccttgaaatcgtgaaagaacttcgcgcagtaatagaggatattactgcccgatcacaatctgatgacacatcagagtcagttgtgagcaagtttaagggagacaacacaccggatttattgagtgcctggaatgagatagaaaaacttacaccacaagttaatgtgggcgcgcaagaatttgccgtatcatttcaaaatatctcaaagacattaagtacccatcccgctcctgcgaacggcaatgcgtctgtctattcctcatgggcgatacaactatcagaacaactacaacctgacattgattcgctcaacaaggcatcggataatctgtcagaactatggaataacgcctatgccgtcatgtctcaatacgtgggcttcattcagagccttccacaaggcgctctacgcaacagccagattgacagcatgggaacaacattcgatggattgcgtacttcgctatccatgcctccggaagtgacacagatgctgccccttattcgtatgcttggtaattttgcgcgtccccttcgcccatttgctgatgccgtcaaccaatcattcaatgtaatcgaaaatatgggcaccatgacggctgcattacaaaatcagcttgatcgcatacctcgataaatcggaattcaattcagtgcgcatcggattaatgcgaatcatctaaaccacctaaaaggggctgctccggtttcccggaacagccccttttagcggtagcagtcagcagactgatttagtcatcggtgctggcttgccagcgctgattggcgcgtgcggagaccgccgtccgaaggcgaggggcgtacgaaggtacgtcgaacctgaggaaaggcggtatacgctccgccaatcagtgctggttgttgagacggtggtacatctcggacagctccagttccttctcgaactggcgagcggtggtgttctcgtcgatgacggcgagctcaacaccggcgatgcgggcgaagtcttcccaagcctcacgaccgacggaggtggtcatgcaggtgtggtgagaaccaccggcggtgatccagcactcaacagcggtcttcaggctcggcttcggctcccagacggcgcgggcgcacggaagctccttgagggagccctgcggctcaacgacgtcgacgacgtccatgagcaggcggaagcgttcgcgaacgtcggacatggagaccacgacggcgtccttggtgggcttgccggagaagaccaggcggaccgggtcggccttgccgccgatgcccagcgggtggatctccagcttcggcttggcgatggtgccgatggacggggaaacctcgagcatgtgggagcccatgtcgagctcgtcgccctcggtgaagttgtaggagtagtcctccatgagggaggcgccaccctcaaggccgtagcccatgacggcgccgatgcgcacgaggacggcggtcttccagtcgccttcagcggaaaagccccagccgtactcggacgggaagcgctgtgggccaacgcccggcagctgtggcagagcgccgaggtcctcgaaattgtcgacgccggcggtgcagccgttggcgcgcatcatgttgaccatcgcggcctcttccttggcggcgatgaacagggagtcgtacttggcgtccagcagagccgggtcgacgtcgtacttggccttgtagtcctcgatgatctccttgacctggtcgtccttgacggcgtcgtacgcagcgacgagctcgttgacggcccaagtgttgatggaggcgccgaacacgcgctcggcctcggtcttgtcgccctcggtgacggcgacgttacgcatgttgtcgccccagcgcatgaccttcatgttgttggaggcatcccagccggcgcaggcgcgggcccaggtgccgaccttctcgacgacctcaggatcggtgtagtggccgacgacaaccttgcgcttgatgccgaggcgggagacgatgtaaccgaactcacggtcgccgtgggcggcctggttcaggttcatgaagtccatgtcgatggtctcccacgggatttccttgtggtgctgggtggccagctgcagcagcggcttggtcagcacttcgaggccgcgaatccacatcttggccggggagaaggtgtggcaccaggtgatgacgccgatgacgttcggattggcggaagcctcgaccatgaactccttgacaccgtcggaggacttcagggtgggcttgaggacgatcttggccggaatcttgccggtgttgttcaggtagtcgaccatttcagcggagtgaatggcgacctggcgcagggcttcctcgccgtacaggtcctgcgagccaacgccgaaccagatttccttgccctcgaaggggttttccataaccatagggttacttcctttacttctttgtttatgggggtttgtttaagtttcattcgccgaccgaggctcccctcagagaggggagccaagacaccaccgtgctggcggagtcagcgctgatttgatgtgtgtgcccgcaaggcgcggaaggcgaaggcgtgcgaaggtacgtcgagccttccgcaacgcggcggacactccatcaaatcagtgctggccgtagacgttctggtagcggtcgttgagcttatcgatgtcggcctggtcgatctcgatgatgtcaccgagctgacgggcggcccacatggtgtgagcgacttcctcggtcatggcagcggccttgacggcgccttcagcatccttgccgatggtgaaggggccatggttctgcatgaggacggccggggacttcgggtacttcttgagggtctcgacgacacccttgccgatcgcctccgagccgatcagacggaacgggccgaccggcaccgggccgccgaactcgtcgcccatcatcgtcaggccgcacgggatgttctgaccagtggcagcccaagcggtggcgtaggtggaatgggtgtgcacgacaccgtagacgtcgggcatgttgcggtagatgtaggcgtgggaagcggtgtccgaggacggggcttcggcaccgtcgaccacgttgccgtcaaggtcgcacacgaccatggaggacggggtcaggtactcgtagcgcaggccggagggcttgatgacgaacaggtcggcggtgtgcagacgctgggaaacgttgcccgcggtccacacgaccaggttccacttgatcagctgctggtgcaggttggagacgacctcacgaacctgcttgacctcggcgcgaacctcggggccgtaatcagccaaagttgccattattggttttcctttccactgtgatggatggacgttttttcaaaatctcaaggacctctctcaatagagggaggtcagaaaggcttacttatcttcgaggttgatggtttcgatggcagcgtgctcgatgggcagacccttggtgaagcgggtgaagaagtcctcgaaaccaaccacatcggaagccaccggcttctcagtggtggactgggcgtccttgaacacgaaaccatcaaggaagtcagcgaggttgctgtgatcctcgttggtgttccacaggtagttggcgagcacggccataccccaggcaccaccttcggcggcggtggacatgaccttgatcggggtgttgaaggcagcggcgagaatcttctgagccaccttcggagtggtgaagatgccgccgtggcccacgagagagtcgacctgcacgtgctcctgcttggtcatcacgtccatgccgatcttgaccggggagaacgcggagaacagctgggcgcgcatgaagttgccgagggtcatgttggcttcggggctgcgggcgaacagcgggcggccttcaggcagaccggccaggaattcgccggaacggaacggatagttcagcaggccgccgcagttggcgtccacgtcgtcggcgatggccgcgcggaacaaggtgccgtacagcataccggcatcaaccgactggccgatggccttggcgaactggccgaacaggccgacccaagcgttgaggtcggaggtgaagttgttggcgtggctcataccggccagatcgccggccggggtggtgaccaagtcaacctcagggtggagggccttgagcttgtgctccagaaccaccatggcgaagatggaggtgccggcggagacgttaccagtgcgtacgcgcacggagttggtggctaccatgccagtaccggcgtcgccctcaggcggggcgagcacgatgccgggattcagggcaccggacggatcgagcagcttggcgccttcctcggtcagctcgccagccggagtgccggccacgagcggctcaggaagcaggttctccagcttccacggctgggctgcgacctcaggcagagcgtcgaacttctcgatgaatgcggtttcgtaagtgtgagtggtcgggtcaatcgggaacatgccggaggcatcgcccacaccgaggaccttctcaccggtgagcttccagtgcacgtaaccggcgagtgtggtgaagtaagccacctcggagacgtgctcttccttgttgagcacggcctggtacaggtgagcgatggaccaacgctcggggatgttgtactggaacagctcggagagcttcttgtgagcttcggaggtgttggtgttctgccaggtgcggaacggcaccagcagttcgccggcctcatcgaatgcgaggtaaccgtgcatcatggcggagaagccgatgtggccgacgtgcgtgagcttctcgccataggcggtctcgacgtcgttggccatggaggcgtaagcggactgcaaaccgccccagatctcctcggtggtgtagctccacagaccatcctccaagtgggaggcccagctgtagtcgccggaggcgatggtctggaagttgtcgtcgatgaggacggccttgatgcgggtggagccgaattcgatgcccagcgtggtcttgccagcgtgaatcttctcggcgatgtgggcggcctgctcggccgcgttgtcggttgctgccatatctttcctttgccttggagcgccggcgctgttatccccttccttggggaggatgttagcgctcacaacttcaaaaaacattgtaccgatgacctgcattcgacacaacttataccgtgtcacgcatcataacggtttgataacagcgccaatttaccgccgaggagccggccccaaggaccgccgagcacgcacctcggcgggaatcagccccatgccgtgctgggtggtcaggaaggtcggctcgccgccctcccccagcaagcgcagcgtctcgcgcatggcggccacgccgagcccctcgaaatcgggatgcacggtggtcagcggtgggtacatgttatccacgccagacatgtcgtcgaatccgaccacgctgatgtcttgcggaatccgaagcccatgctcatgcaacgcgcgcatgacgccgacggcctgattgtcgttcgcggcgacgaccgcggtgggcaacgccatgccccgacgcccatactcatcaatgagatgattcatgtgcgcatatgcctcagaggcatcccacgtatgacagcgcacgatctgtgaatcgatggatcgggaggcggcgagcttgcgccacgcatccagtcgggtgtgggcgtcgcgccattcgttgggaccggcaaaatacagagccgatttgtgcccgtattcgcccagcaaggccaccactttggccattgcaccccactggtcgataccgaccagtgcagtgcgacgcttgttttcggtggagataaggcccaatccctcacgcacggtcatttggccgtgggtggcggtgacgatgacgcgcggctgagtgactcgcgcacggcaggcggcggcgaacatcacgtcggtcggggtcaggaagatgaaggcgtcgacgttctgctcgttgaaggtgtcgcacaggttgtcgaattcggactgcatgcacaaggcctcgtggaccatcatcacgctcatgaacagaccgtgttcgcgggccatggattcgatggatgagatggaggaaatcgggccgaagaatttgaggcctccggcgatcagccctatggtgcgcgaacggcgggaagccagtgcgcgcgcggagttggaggggcggtagccgagttggtcaatggcggcctggactcgcgcacgggtggcgtcggaaacgtccggcgagtcattgatcacacgggagacggtttggtggctgactccggcgagcttggccacttcgaacatggacggacgtttgcttggcttgcggctggtcaccatgctacctaacctccccgctggcggccggcacccatgcgcggccaggcttgtaccttaatcaatactgactttagcgcgtccacaacagttttgcgttagcgctcacactgtcgtgtcgcacgcggctcaggtcaggtgccatgagacacgatggagcggagtcggcccgtgttcggcgatggcggcacggtgtgcggcggaaccatagcccttgttatgagcccattcgtaggcggcgtaacgtgggttgctttgcgcgaggtcgaccatcagccggtctcgggtcactttggcgatgaccgccgcggtggcgacggtggcgcaatgctggtcgcctttgactttggtcgttatatcggctggaatcggcacgtccggcgcgtcgaacgtgttgagcgccttggtgatgtaatcgctcggcccgtcgagaattccggcgactttgggcagggcgcgaacgctttccccacaatttccaatggattcccctacggagtctcccggacgaccttccacaatctcccccgcagccttttttgccgtcaatccccctccaagccgtaagccaagttcgcgttcgacttggctgagcgcgcgcagggcggccacgccgagcgcataggtgatgccccattcgtcgatctctgtgttgctggcctggcctacggcgtaggccgcgcaccagtcgcgcagttcgtcgaaaatcgcctcgcgcctatgttcggtgagcattttggagtcggccacgccgtccggtacgccgaggtaggtccgcccggacagttcggcggaatcatcgccgtcaagcggcgccaaatcacaggcccagatggcggcgcacccgaccatcaccggaccggcgagcgcgccgcggccgacttcatcgaatccagtaataaggtcatagccctgggccgcaaggctgcgttccaagtcaagtgtcggggtaatcatgcgcggctcccatcgtctcacaatggttaggattcagacggtccaggttcaaatggttcaggattcagacggcccggaactcaatcgttcaaagactcacacggttcaaaaaagactcaggaatttgagccggaagcgtcaggcacgtccttgaagacttcgtggtggtcatcaatcgcaccaagccggtcaagcggccagtatctcgcgattccgactccgaccacatcggagatgggaaccaagccgcgatcgccgtcatcctgatgatagcgggagtcggcggaattggcgcgattgtcgcccatgacgaacacgtggccctcggtcacggtcaccgagaacgggaaagcgctcgggtccacgccggggcgaatgtaggaggtctcattgatggccacgccgttgatggtcaccggctggcccgcgcccttgcattcgaccacgtcaccgggcaggccgatcagtcgcttgatgaggtacccgccaccgggagcgctgctctgctcctcgttcaaccagttgttgggatctttgaataccacgacgtcgccgcgctgcagatcgaagatcttgggggtgagcttgctggtcaccacgcgatcgccgggcaccatggtgtccatcatcgagcgcgaaggaatctcgtaaaagccgacggcgaaaatgcgaatcagcagcacgataagcacgggaacgccgcaccacaggaaaaagtcgcgtagggtgaagtggtcatcatccatcgatgatgctgccgcggcattcgcgccagcggaagaagcggcgtgcgccgggcgcgccggtgccgggggaaccggggacggggcgatgccgtggtcggcgacttggaacgtacgggaatcgcgggcatcggcctcgtcatcatacgaggtctggttgctctccggattgtcggaaatcgggaattcgccgttatcctgatcgtcctgcataccatctcctcgcgattcatgctgccggatatgaggggtgccggcgcccgtccatcatacgtggaaaatacggaaacagcccgaaaccgaaacggttccgggctgaatttcacggtttattcgcgcacctgcatcatcaggcccacgattgcacccgcgaatcgactcacttagcggagttgtcgcggcgctcggcaatacgagcggccttaccgcgcagagcgcgcaggtagtacagcttggcgcggcgcacacggcccttacgcacgagcttgatggagtcgatggacggggagtgcaccgggaagcgacgctccacaccagtgccgaagctgatcttgcggaccacgaaggtctcacgcacgccagcgcccttacgagcgatcaccacgccggtgaaggtctggatacgggagttgttgccttcctggatcttcacgttcacgtcgacggtgtcgccgggacggaaggccgggatttcctcagccggcttcatgtgcttggcgtcaaaagcctcaacagcgttaaccattgttttccttcagtgctgccgcatatcagccacagatctggggccatccacgcgattgcgcatcacgtgcgttggcctgttctcgttatccctcgggtttgcccttgggaagcctgccgatccgccgaaagtcaggccttgcggccgttcggactggacccatggagacgtgggcttatgcggcggcccacttctcgacacagcaatcgtcaattgtacggattattgcggacagaacggctgtcggatggcattccaacaccaaggcactgcgacgtagttgacagacctgcaggcgggctttatcttgggagcgtcggtaggcgaggctaccgcagggatatgggttgctgccgctaacagtggagacactgcacgcaggtcagcagttcttgtcggatcaaggcatgaactaacgcaattccaccgccctgcgatgctgaagcttgaacgatggctcgaatcggcggattcgaatactttccgcccctcctgctggtcgcatggataccgacgatggtattgatctggcgtttcagcgcacggcttgaaggaggtgagagtccgatggacggtgattattccagtagttccgccgccggcaacagtcatagttgcggtggtgatgaccatgttttcttatattccgttatccggaagtcgggctctcgcctgtagtgttccttggctccccggataacccttgcataattcgtctttcctatgcatagggaggtcttttcatgaccatgttttcattcaatcgcgtcggtgcgcgtccaaatgcgtcggcccgcaacccttccaccgccgcgtccgaccgccagccattcgccgtgcgcctggcctccgacgtactagtcgcggccggtattctggcgctgttcggtctgatcgcttggattctgccggcgatcggcgaaccgatcggcccgaaaggagtgccatcacaagtcagtacgaatctcgccgacctgccgtattacgcgctgcgctcggtgttccgtatgttcgtggcactgttcttctcactggtgttcacgttcatctacggcacggcggccgcgcgctgccgccgcctgagccgcgtgctgattcctctgttggatattctgcagtcggtaccgattctgggctttctttcggccaccatcaccatctggatggtgctgttccccggctcgatgctgggcgtggaggccgcgtcgattttcgcaatcttcaccagtcaggcctggaacatggcgttctcgttcacccggtccctgaccagcgaaccaactgaactcgacgaggcggcccgctcactacagctcacacgctggcaacgattctggacactggacgtgccgaacgcgatgattccgctgctgtggaactgcatgatgagcgtgggcggcggatggttcttcctgaccgcctccgagatgatctcggtgaacaatcgcacctatgcgttgcccggcatcggcagcttcgtggcacaggcggcggccgaggagaatctcgcggccatctgctgggccatcgtgacgatggtgctggtggtgctgcttatcgacgtactgctgtggaagccgctgaccgcgtgggcggagaagttccgcattacgcaaagcgagtcggcggtgcgcaagaccagtgtggtgctgaccatcattcgtcagtcacatatcgatgagatggtggcctggctgttcaggcctgtcggcgacctgttcgacacgctggcccgcccgttgggtcggaccggtggacgttgggcggcggacgtgaagtccgcacgcagccgcgcgcttgacgtggtattcacagtgctggtgttggcagcgtgtgcgttcggactggtgcagcttatgctggtgattcatcgcgatgcgggattcggcgagctcgggcaggcgttcgtgttgggcatggtgacgttcctgcgcgtggcgctgcttacgctcgtctgctcggtgatttgggtgccgattggcgcgatgatcggcatgaatccgcgcgtttcgcggtttatgcagccgattgtgcaggtgctggccagcttcccctcgaacttcacgttcccgttcgtcacgctctggttcgtggcatgcagcgtggatatcaactggggcagtattctgctgatggcgttgggcacacagtggtacatcctgttcaatgtgatcgccggggccagccagattcccgacgatctgcgtgagatgacgcgcagcttccagctggggcgctggcagcggtggcgcgatttgattttgccggcggtattcggctcgtgggtcacgggcggcattacggcggccggtggggcgtggaatgcctcgattgtctcggaaatcgtaagttatggacggcatacgctgaccgcctccggcttgggcgcgtatatcgccgaggccaccgaaagcggcaacaccgtgaggaccatcatcggtgtggccgtgatgagcgtgttcgtggtggccgtcaaccgcctgttctggaacccgctgcagcgcatggccgagcgccgtttcgcactgaactaaagacttaaggagaataatatgactgttgcaatggaaaccattcgttcgctgcgggcggtgaccccgcagaacaccatcatcgaagcccagcacgtcggccagcgcttcacggccgacaacggcaccgaactcactgtgttcgacaacatctcgttcaacctgtacgagggcgagatcgtggccattctgggccgttcgggtgccggcaagtccacattcctgcgtgcgctggccggactggtcaagccgaccagcggcacggtcaagtatcgcggcgaggccctgaccggtccgaatcccggcatcgcactcgtgttccagaccttcgcgctgatgccgtggctcaccgtgcaagacaatgtggaactcggtctgaaggcgcgcggcgtaccacgtgcggaacgcaccaaactggctctggatgccatcgacatgatcggcctggacggcttcgaatcggcgtatccgaaggaactgtctggcggcatgaggcagcgcgtgggcattgcacgcgccttggtgctgcggccggacgcgctgttcatggatgagccgttctccgctctggacgtgctgaccgccgaaaacctgcgtcaggaagtgctcaagctgtggtcgagcgaacagcgcagcatcaagtcggtgcttatggtcacgcataacatcgaggaagccgtggagatggccgaccgagtggtggtgttgggctcgcacccgggccatctgattgccgatgtgcgggttgatctgccgcgcccgcgagaccgtcacagtgtcgaattcgaggcgatggtggaccgactgtacgcgattttgaccggacaggcctcgcagcctacgcaacaagccgaggctctatcgccatcggcatcgctcacgaacgcacccgtcacggacgcatctgtcacggacgcatcagaccttcagcccgccaagaccatcgagaaaatcaaggagcatccgctgcccaacgccacgccgggcgggcttgccggtctgctggatgtggttgccgagcatcctcacggcatcgacttggcagatttggcctcggctctttcgttcgaggtggacgacctgttcccgctggtggatgccggtacgatgctgcgcgtcatcgtggtacgcgacggccatgtgcagatcaccgaggcgggcgactcctggcataaggcggacattctgcgcgccaagcaggtgttcgcctcactggcgatggaacacgcgccgctggtgcacaacattgagcatgcactgcggaagtctgcggaaggcaagctccgcggcgagctcatgctggacctgctgcgcgcccgttacgccaacgacgaggcgcatcagcagttcgccatcgccgtggagtggggccgttacggcgagctcttcgattacgatgccgatgacgatctgctgagcttggatgaggcgaataagggcgaataagcgaatcagccacgtgagttggctagatagtgcctttatgcctgcaaacagatgccgaagcggaatatgaccatgttcgactcatctgactgacagcaatccgtatatgcaaagtgcccggcatccgaagatgtcgggcactagtcgtgagagagactccctcagtcagctacactgacagctcctctcacccgagggggcaccagaggaacgaatcagaactcgcgacgtgggcagtcgccagactgcccaccagacagcacagccgcggtcgcgcgaatcacgaattctgaccgagcaaagcgaatcagaattcgcgatttgcgcggtagaacttgatcaggctctgggtggaggcgtcctgggcggcgagggcgtcgtcgtcctgggagatggccggggtgatctgcttggcaagctgcttgccgagctcgacgccccactgatcgtaggagtcgaggccccagacggtgccttccacgaaggtgatgtgctcgtacagggcgatgagctcgccgacggcgaacggggtcagggccacgccgaagatggaggtggtcggacggttgccggtgaacacgcgggccggaacgatctcctccggggtaccctcggcgcgaacttcgtcagcggtcttgccgaacgccagagccttggtctgagcaaagtagttgcccaggaacagctcgtgcacgtcctggtcgccatccttggtcgggttcggggtgttgacgaacgcgatgaagtcggccgggatgagctgggtgccctggtggatcagctggtagaaggcgtgctggccgttggtgcccggctcgccccagaagatctcgccggtctcggaggtgacgggggtgccgtcccaacgcacggacttgccgttggactccatggtcagctgctgcaggtaggccgggaagcggtgcaggtactggtcgtacggcagcacggcgtgggaagcaaccttgaagaagttgcggtaccagacgttcagcataccgagcagcaccacgacgttcttctcgaacggggtgttggcgaagtattcgtcgatctcgtggaagccgtgcaggaactcctcgaagcgggccgggccgaagacgacggccagagaggtgccgacggcggagtcgacggagtaacggccgccgacccagttccagaagccgaacgcgttgttcgggtcgatgccgaattcggcgaccttctccaggttggtggagacggcgacgaagtgcttcttgatggcttcggcgttcttctcgtcggagccgtcgatggcgcccttggccttgagctcttcgagcagccaggtgcgggcttcacgggcgttggtcagggtctccagggtggtgaaggtcttggagacgatgatgaacagggtggtctccgggtcgaggcccttggtcttctcggccaggtcgttcgggtcgatgttggagatgtagcgggcggagatgcccgcgtcggcgtacggcttgagggcctcgtacaccatgacgggacccaggtcggagccgccgatgccgatgttgaccacggtttcgatcttcttgccggtcacaccggtccactcgccggaacggaccttgtcggcgaaggcgtagatgcggtcgagcacctcgcgcacgtccttgacggtgtcctgaccgtcaacgatgtacttgccctcgtcttcgaccgggcggcgcagcgcggtgtgcagcacggcgcggtcttcggtgttgttgatgtgcacgccggtgtacatagccttggtgcgctcatcgagcttgacggccttggcaaggttggcgaacagctggagggtttccggcttgatcaggttcttggacagatcgaagtgcaggtcgccggcgtcgaaggacagcttgtcgacacgctcggcgtcttcagcgaaccacttcttgaggctcacgccttcggcctgaagctcgtcatagtgcttctgcagggcagcccactcaggggtctgggtggcgtcaacgggcggattgatggccataggattccattcctttcatcagtgactggagcgccttcgctcacggctcggatgcgctccgtatcaccaaacagaatactcacaaattcggacatgaacagaacaaaaatcagtcagcgatgtcggattgccatcgtttgcattatcgaacagttcgtggcgcggcacaaccgtcatcttcaaccgagcggtcacgacacaaccgccaagccgccgattggacttttcgcggagatgtcttatacttaatttcttgtgcgcggctggcgaaatgccttccgcgaaccaagccactttagctcagtcggtagagcggctcactcgtaatgagcaggtcgtcagttcgattctgacaagtggctcggatgccctaggctggctggtctgtaatggctgtccggcctagggttttgtatatcttccacacctgtggaaacgcggatatgcacgcgcgagtggcggaattggtagacgcgcaggatttaggttcctgtgtctttgacgtgtgggttcaagtcccatctcgcgcaccggcttgagcctcctggaaacattggatcgccaacgattccgggaggctcttcgtatatgcgtgaggcaattgcaagcccttgcggacgcctctacatatggcaatgccaaggcggcaaatataatggtcacagcattgtgggtctgagcctgtgcgccgtgagcctgtgtgagccaaggagagaagtgtatgtccgccattcttacgccggttggcctattgctgatcattctcgccggctatctgttcaagcggttcggcctgttcgggcagaaggattatcgcgtgttgcaaaccgcggaattcaacatcgtgctacccggtgccatcgtatactcgttcgccaccaatccgcatgacatctcgctgctgcttatttcggtattcgcattcctgtttgcttttatcccgatcgtgttcatctttctggccacccgcaagcgcaatgtgaccgaccgtgccttcctgatgctcaatggcgccggcttcaatctcggttgtttctctttcccggtcgtccagtcattctggggtgcgggcgcggtggtgccggctgcgatgttcgatatcggcaactgcgtgatggtggccgccggcaccaatgtgctcacccagcaactgctgcatattcagcccggcaaaacacttgccgaacaacacgccggttcggttcccaccttgccgtacgaaaagcccaaggatcgcgacgccaaacggcttgcccgccgcgcattgctgcgcaccatcggcaagagcttcttcggctcggtgccgttcgacacgtatctgctcatgatcgcgttgaccgtcgccaacgtgaagattcccgattggatcgcctctataacccagccgttgagcggtgccaacgcgctggtgtcgatgctgatggtgggcatgctcatggatttgccccagtccaagcatgatgtgaaggaagtcatggccgtcatcgcttggcgtataccgttcagtgtcgccttcgcgttgatctcgtggttcctgctgccgttctcggcttcgattcgcgccgtgatggtgatctgcgcgttggctccaatcgccattttctccacgctgttcaccgacaaagtactcggcaacgccaaactggccggcttctcgctggcaatcaccgcgatgatttcactggtgatgatggcatttgctcacgtgctgatgggcgtgtgagcaaatgcgcgagtaggcacacgacgggcacacggcgggcacacggtcaggcgagacgcagcccacataggttcgtcccccggccgccagctgctaccggtgcagcagcttgtgcgccagattgctcacgccgaagcggaacttgtccaccggcaacgtgaatttgcctaccatctgctcgacgtagccgttgaagccctgcttgaattccagcacgccgcggccctcgtcgttcggatcgtcgaacacgccggaaatgccgtagaagttgtagcggctcacaccctgttccacacacaggtgcagcatcgcttcgtactgaatcagcgccgaggcgtagaacggcttgtactcctccaacgaaccggaatactgatagaccacctcattggggtgactgacgaacattgaagccgctgccggcagcacatcgcccttcttggcatatccctccacctcagccagacgcttgtcggcggccgcgagattgcgcgattcctcccccagctgacgttcgatgcgcgtggtcggacgttcatcgtatttcgtctgcagctgtgcgaccttggtctgcaaggcctcgcgcttggcggtcatatccgccacatattcggcgatgtggatttccgcgagcatgaaatgcgcatccgcgccatacgcctgcttgaactggcggaaatagtccgcgccgcgcgtcgcgaacccgcggcgttcaccggtccgccgttcgatatcggcgaacacgtcgaactcgtcggggccgatttcgcgaacgtgcacgcccatcgactgcgcccgcttgacgctccattgagcgcgtttgccgaatgatgccagcagttccttgccgttggtgatgccggtgagatccttgacgtacatccactggcagaccacgtcataaccggtatggaatccgccatgcgtccagccggcatcggtgaatccggtcagcagtgcatcgttcggctcgccgtcgggctgcccgtccgaggaatacagacggtaggcgacgttaggccagcatgccacggaaacagcatggtggcgacgggccgattcacgaatcgcctcggttatggcccgcagcagagccggatcatcgctaatgccgatggggccgaaatatacggagccatctgcaccgaaacgaccattgaggtacagaatcacgcagccggctaccagattgccggatgcgtcgcacacgccaacgcattcggcttcatgcccacgaatcttggcaagacggacctgcccggaccattgctgaaagctgccctggcttgtggcttcggaaagccggtcgaactcttcgggcgtaatcacgccaaacgtatacgtcgtatctgttcgattcgcagtcgcgctcatctcgtcgtcacctgtgccttatttctgtgtccgtgctcgccactgtttgtcagcgatgcagcagcttgtgtgcggcttcggatacaccgaagcgcagtccgtccaccggcagcgtgaacttgcccggaagctcttccacgaatccgccgaagcgagtcttgaactgccagacgccgtaggaaggatcgttggcgtcgaaaatgccggaaatgccgtagaagttgaagcgctccacgccacgggcgatgcagtcaagcatcgcctcgaagtggattagggaagacgggtagtaatccatgaaacgatcgtcctcgccgctggacaggcagacgacctcgttcggatgccagaagtagacaccggcttccaccggaatgaccgggccgtccgaggcgatgatgccattgacttcgccgatggtcttttccagcgccgtgatcttcttgtctgcggtggcgatgcgcttttccagcgttgccgggtcggaggcacccttcttggccgtgccttccggccgctgttgcgcgcgctggagcaggcgttcgaggttgcgcttgtctttggaggccgcattcagcttggattgcagggtgtccagatattcgtcgaaatgggtttcgaccaccttgaactcgatcaggtcgccgaaggtatcgaacagacgctcatagtaggccagatcgcggctcttgaagccttgacgtgcggcgctcatatcgcacagcttgacgaaagtgctcagttcgccgcgttccagccggcgcacgcgcagaccggaatcctgggcgatgcggatgttcttacggcggtacttggagaacgaggccagcagttccttctcattatgaatgccgtcaagccccttgacgaagttccagcggttcaccacggattcatagcccacggtgaagccgccatgtttccaaccgaagcgggccatgttgtccatcatcgtggtgtccgggtcgctggtcggcttgccgtccagatcatgcagacggtagactgcggccggccagcaggatacgctgatggcgtgatgggccttggccgaacgacgcagggcttcggtcatcgcctcaaccacctgtggattgtcataatcgcacagcggtccgcaccagaccgagccttccaaaccgaaacgggactgcgtgtacaccacgtagcaggcggcaatcagcttgtcaccgcgcttaacacccacatagtccaccggaccgttgaacgcacccatggcggccatctgcgaggtctgctggaaactaccttgcacttgagctgcggagaacgcatccagctcggcaggagtgatcttggtaggggtgagtgaggcgacgcctgcatcggattgcgtcataatcgaaccttcttacttgtcgttactctgatcgttactctgggctctggaacggcctgtgtgctgcgtccgtttaccgcgacagcagcttgtgcgcaaattgcttcatggcataggcgaccggtttgaccggcagtacgaactcgcccggaagttcctcgacatatccgttgaagccctgcttgaactccagtacaccacgcccctcgtcatcgggatcatcaaagacgccgtcgatgccgtagaagttgtagcgagacagcccgtgttccacgcagaaatgcagcatcgcgtcatgctgaatcagcgcggaggcgtagaagggcttgtactgctcgacgctaccggagaacaggtagatgacctcgcgcggatgctccacgaatagtgatgccgcagccggcagcacatccccgtctttggcgaactcggccgcctcgttcaggcgcttttcggctgccgccagattgcgggtctcctcccccagctgacgttcggttttggtggtggggtgttcggcgtttttggcggtcaatgccgccaccttggccgaaagcgcttcacgcttggccgtcatgtccgctacatattcgtcgatgtggatctcggcaaccataaaatgcgccttgttgccaaacgcttccttgaaacggtggaaatatgcttcgccacggtattcgaagctacgacgttcggcggtttgctgctcgattcgtgcgaatacccccaactcgtcgtccgacagctcacgcacatgcacacccatcgattgggcacgcttcacgctccactgggtgcgcttgtcataggacttcagcagacttttctcatcggtaatgccggtcagatccttgaggtagcgccaacgtggaaccgccgtgtagcccacggtgaaaccgccatgagtgaagccgatcgcctcgagccgttctatcagcttattgtcgggagcgccgttctggtcatccggcaaagaagctccattggtgtcgcgaagccgatacggggattcaggggtgatttccagctgtgaagcaccctttgccttggcatggcgtttcagcgcatccatgaagaaggtcaatgcttcggtgtcgtgatagtcgcacatcgggccatcatggatggccgcaaatgtagagaatcgagagcggtgagtttcgaacagcgccgccgcgacgatcttctcgccctccttgagggccagatattcgacgtcgatcccctgcgcggcgcgaaggcgtcccatcgccgaggtttgttggaaattgccttgtggatgcctggcggagaaatcatcgaactcttcgtctgtcaacttcaccagcacaaaatcacgcatgcttccctctgcctccgagtcaatcaggctcaccatgctagcataacgcgcacacgacgaatggggtccgagcagatgagatgtgcacatcgttcgcactattgcctccacaatggctcaaagaacaatggcccgaagatgctgaacgtccggcttgcgttgaatcaaacgcagtgctatattctctacttggctcttggagccacgccaccttagctcagtggtagagcatccccctcgttcgtgggaaggtcggtagttcgattctatcgggtggctcttgttcatcaagaaggccgacgcactaagcgccggccttctttcgtatcgcccttgctaggtcataggcgcttgctagacacttgcccgattcgggaggggctgagttgctgagccgcgactcaactgtggcttagtcgcggctcagtgcagttagacagcctagacgacttagtgcagcagcgcctcgatagcggggaccaaggctttcagcgccttgcctcggtgggaaatcgcattcttctcggccggagtcatttcggcgctggtcagcggctcgccttcatggtcaggctcagtgctgacgcgaccggcaggctggtcgtccgggacgaacagtggatcgtaaccgaaaccgtgttcgccacgagcctcgcggatgatacgacctggcatgtcgccgagttccactgtctccgacttgatggcgtaccgggcatgcaccggggcagggctcccatctgcagccgtggtgtaaacggtgatgccgtcggcagccactccaccggtcacgtcggcactggcctcggtgtccgggaccaccagcgcggcggcgcagcggaagcgcgcggtacgcttgtcatccggaatatcttcgatttgggcgagcagcagcgcattattggccttgtcgtggccgtgagcacccgcccagcgagcagacagaatgcccggagcgttacccatcacatcgacgatgagacctgaatcatccgctacagcgggcagaccggtacggatggccacggcgcgggccttgagcagcgcgttctcctggaaggtgacgccggtttccaccgggtccggcaggtgaaggctgccagcggacaccagttcgatgttttcggcatccgcgccaagatcctcttcgagaatgcggcggatttccacaagcttgccttcgttatgggttgcgacgacgatttgcatgggttctcctttaagaaggctccccttgtcaggggagctggacattgcagaccgtacggcttccagccgacaacctcccctaaaggaaggggagctggcttagtctagggacaaagcggcacgctgggcggcttgcagttccttgttgcccttttcggccaagtcaagcagggtgccgagttcggcacggttgaacggacggtgttctgcggtgccctgaatctcgatgaaggtgccggaaccggtcatggccacgttcatgtcggtcatggcctgactgtcttcaatgtatggcaggtcaagcatcggggtgccgttgatcacgcccaccgatacggcggacacatagtccttaagcacgcggctggcggacttgatatggcggtgcttctccgcccaattgactgcgtcgaccaaagccacgtacgcaccggttacggaagccgtgcgagtgccgccatcggcctgaagcacatcgcagtcaagctgaatctgattttcgccgagcgccttcatatcgatgacgccacgcaggcagcggccaatcagtcggctgatttcgtgggtacggccaccgattttgccacgtacggattcacggtcggtgcgttcggcggtggcacgcggcagcatcgagtattcggcggtgacccagccgaggccggagtccttgcgccaacgcggcacaccaggggtaaaagtggcggtgcacatcacgcgcgtgttaccgcattcgatgagcacggagccttcgggggcgtcggtgaagtggcgggtgatgcgcacggggcgcagctcgtcgaccttgcggccgtcggcacgaattatttggtgattgccaagcatgtctttgatttcaaccatgcgccccagcatacgccatccgctctatgcctggatagcaactcgtcaaccatcatcaaaccccagcgcaatgtcattccctgcttacatatccattccatgacacttggctgcacgccactattttcttatgcaccactcgcttacagagtcaatgcctgcgtacctgatgaggattgggaaagatcgtccgctggaataagaatgccatattccatgaaatcttggttgaattgcttgcgctgcatagcgttgagttcgtaatcgattaacggcaaatatgtatagtccatgtcatgcaacggctcttcatatcgatgaagcacgtgcataattgccgcgctcggcagtggggaccaccatccatccaagccataccggtacggaggaaccaatgtcaagcgtctgttccttgggttgatatcccaacgcagaaaacggtataaaccagcgagaaacgcaatccagcacgcatcgttcacccgtgcaaccgctcggacgaacgatatacgttgatgttgaacattccgagcatgaatcagattgacgcagagcatcttcaacgtagaccaggtcgctccgctttctattgcatcgaaatcaggaggcctacgcagttgcgccaacaacatgtgcaattcgtcttccggaatcgtttgcgagggggccacggcttctaggtgaagaccaaaaccagcccgctcaagcccctcggccaaaacatcaaacaacatacctctttgcccacgcaatactcgaccaattgcagaccgatccaaaccagtacgctgtgcaagctcataggcattccaaccagtctgcgacatcacttcattcagcacagccgcacacgaattaacagggcaaccagataccacaccgtgatgcacgacatcgcactgttctaacgctcgatgctctacagcgcgccgctctgatacgtcatcgttgcccgccgcgttctcatcattgagagtttcactcatcgaagtcaccttgcctcggccgatttcccggtcatttcatcaaaccgcaatcatcatatcccacaatcccatgacgatacgattcgtcatatcccacaattcagagacggtatgattcgtatcgcatcagttcacacgattcttcaacgattgctccgcaaacgattgctctgcacgcatcacggcattctatcggcacactattcctcccaatcagcccaacgcaacatcacacgcaacatcacacgcaacacccctcacgcaacacccctcacgcaacactgcgccatctctgtaacatcaccgacaacacggcaatcccacaacgtctcggtgcaatatcctctgaaatggtttggtttttcactccacctcatcggcatcctgaccaggataggaatatgtgtcgttccgcaccatgtacaaaacgttgtcaactgacaacgttcttcaaatcaattggataagacaaatggccatttcccgccaattcatctgaatcaagacgttgtcaactgacaacaaaatgtacattgcaacagcatgcacatatacatatttccccagtgaacagtaccccccccccaaaaaaaaacaggggggccaccctcagctggaaccacgtccggcgaaccgggacgcagttcagcccgaggggacgcggccaatacagccccgggacacagccacagggggtgcaaacacgggggtgcgaccggggttggatctccccgcctcgacggcgaccacaggagtgcggccaacacagacagaggggcacagacagaggggcacagacagagggaagagtagccaatgtaaccaaagggatgcggccagtgagatacggtcagaggactttggtctctgtggtcgaaccgttaagcggacagcccagtgggctgtccgtaggtaaggagagcagctatgctgcgacggattcctatggagacgaaagttctcgtcagagaacctgagtctccgtaggaatcactggctcgcccttcatgaggctctgcgcggtgatgggcagttcggacaacgccttggcgtggtagtcgtgggcggccatgatggcgtcatggccctgccactgagcgtcgatctgcccatgatccacaaagtcgaccagcaggttcttccacgtcggttcaggcgtgaaaccggccagcttctcctccgagccggaaatcacgtgttcagcttcggctaacgcgtattcgtaggagcggaatgccagtttgcgaccgggcactgtggccttgtccttggatttcttcatgaccggaaccatcgtgccgtcagcgccttcacgttcggtgagcttgtacaccatcgcacaagtgggagcgccggagccggtgaccagcatggtgcccacaccataggagtcgaccggcgcggtctgcaatgcggcgagcgcgtactcatccaaatcgttggtcacggtaatggtggtgttcgtggcgcccagggcgtccagctggttgcgcacacgctgggccatggcggctaggtcgccggagtcgatgcgcacgccacccagttcgggaccggccacctcgacggcggttttcacggcttcctcgatgttgtaggtgtccaccagcagcgtggtgttcttgcccaatgcctcgatctgcgattcgaaggcgtcacgctcggaatcatgcaccaacgtgaagcaatgcgcggcggtgccaatggccttcagaccatacagctgggcggccagcagattggcggtacccttgaatccgcccactacggcggctcgagcggcggctacggcggcccactcgttagtgcggcgtccgcccatatccatgcaaggacgatccttggctgtcgacgccatacgtgaggcggcggaggccactgcggaatcgtagttcagcacggatagaatcaacgtctccagtagcgtgcattcgccgaacgtgccttcgacctgcaaaatcggggagttcgggaagaacatctcaccttcgcggtaaccgcgaatcgtaccggagaagtggaagttctccagccacttaatggtctcggggcttaccacgtgacggtcggccaggaacttcaggtccgcttcgtccaagtggaaatgttccagcgcatccagaatgcggccggtgccggccaccacgccatagcgacggccttcgggcaggcgacgcgtgaacacctcgaacacgcatttgcggtcggcggtaccgtctttcagagcggcgtcgagcatcgtgtattcatacatgtcggtcatcagagccggcgaataatcgaccattgcaaggcctttcctacataagtggtgaagttgcacctaagtgtagtccgggcaaagccatacagcccactggcgaagcggtagactcgatgcatgagattcatcgtggcgttgtggcgctttgcgatcgccggtttctgcttcgtgggcacatatgaggcatggtccaaaccgcagttctgggtgtatttcacgttccagaccggtttcgtgctgggcatcgtgatgctgtgggccggcgcggccacactgctcaaaggtattcagccgcctgcatggcctaagggatgcctgactgtgtacgccatagtcaccgcactggtggcgttcttcctgatgcctccggacgacccggcatacgtgccacaggttattggcatcatgaccaatacgatgctgcacaaaatcgccccgattatggcggttatcgatttcgtgctattcgacccgcaccggcgtttccgctggcattacatgttctcgtggctggcgtacttccctgcatacttggtcttcgtgctggcccgtgcgacgatttggccggggtccggaccggcggccggcggcagtccgtatccgtacgacttcatcaacctcgacgcactcggctggcaagggttcggcattagctgcggcaagctggccatagcgttcttcgtgatatcgctcgttgtctggctgctcgaccgcgcactgccgagcaaggccttactcggatagacgcgcccacgatcgacgcacatcggtcttagtgcccagccggcatccagctcggcactcgatggcctcagcattcaatggaataggcgcggtttttgtactcgcgccaatccggccagtcttcaccggcgtagagggctgcatatggaactgcgtggccacctgacgaatggtgtaggacaccatgactccttactgcggcgacacgccgaagcgtcgcagccgtttgcattcaagttcacttgaactggaaccttagtatccaagaacacttacgaatgccactcgatcggcgtcggtttgcccatcgcagaccagcatccgtaagaacaaaaatgacattgtaaggagactcaatgttcgagccaaccaccacctacgctcccaacccgcaccgttacgacacgatgacctacaaccgtgccggcacctccggcctcaagttgccggccgtctcactcggcttctggcacaacttcggcgacatcacgccattcgaccagatgaagtccctggtcttcaccgccttcgacaacggcatcacccacttcgatctggccaacaactatggccccgaacccggccaggccgagaagaactgcggcctgctgctcgccaagtacttcaggcaccaccgcgacgaactcgtcatctccaccaaggccggctacgaaatgtgggccggcccctatggcgacctcggcagccgcaagtacctgctcgccagcctcgaccagtcgctcgaacgcctgggcctggattatgtggacatcttctaccatcaccacccggacccggaaaccccgcttgaggagacgatgggcgcgctggctcaggccgtgaactccggcaaggccctgtacgtgggtctgtccaactacgatggtccgacgatggagaaggccgccgcgattctcgccgacctgcacgtgccgttcatcatcaaccagaacaaatacaacatcctcgaccgcaccgtcgaggagaacggtctgaaggagaccgccttcaagctgggcaagggcctcatcaccttctgtccgctggcacagggcctgctgaccaaccgctatctcaacggcattccggccgacagccgcatggctcacgatccgcgattcctcaacgattccgccctgaccgagaaactgcacaagcaggtcgtggacctgaacaatctggccgccgaacgcggccagacgctggccgagatgagcctggcatggctgctgcacgatggtaaggtgacctccgtgctgaccggagcctccaagcctcagcagattctcgacaacatcggcgcgctgaagaacacccacttcagcgacgaggagctcaggctgatcgacgagatttcggatcggtgaccattttggcttccctcgctgaggggagccaagtaccacctttagcgcgtcatttcttcgtagatgcgcttgcaatcggggcaaaccgggtacttggacggatcgtgcttgggcacccagaccttgccgcacagggcgaccaccgggcgaccggtcgcgcgtgattcggcgatacggtccttagaaacataatgtgcgaatcgatccgcgtcgccgccatcgtcacgaaccggagactccttggtttccgggcgttccagcaccgacgtgccggcaccttggtccgggttgcgcagcggttcggcatcatcaacgaacatctcggcaaaagtcatggtgcacttctttcctcgtattcaacgattcgactgcactccatcatagattcccgtcgttacccgcgaaacccattggcgcgtaatccgcacacctccacacacccatgtcgcgcatcacgccaccccgccacatacaatgccacataacaatgccacacacaacgccgcaccgacgccacatacggcaccgcacacactgcctcatacgccgacgcgacaacaatgcacgctcggcagcacgaagcacaccattcgcggtaggctataaggcatgactatcgcagtatgccccggctcgtatgaccccgttaccgccggacacttggatgtaatcgagcgctcggcgcggtttttcgacgaggtgcatgtggtggtggccgtcaacgccgcgaaaacaccgatgttttccgaagccaccagagtcgacgtgatccgccgtgcccttgacaaagccggttgcaagaacgtcactgtttcttccaccgacggcctgatcaccgactactgcaagaaggtcggcgccaccgttatcgtcaagggtctgcgccagaacggcgactatgaagccgagctcggcatggcgctggtcaatcgcaagctcgccggcatcgaaaccctgtttttgccggccgatccgattcttgaacacatctccagttccatcgtcaaggacgtggcccgccatggaggcgacgtgaccggcatggtgcccgattgtgtcgtgccgatgctggccgatgccctggccgaggaacgtcagcggaaggactgatgcactaatgactatgagcgatgaccaccccactggatacgtcgatctgaccaaaccgaatgcggacgccgcatcgtccactccggagccgtccgccccggaaccgcccgcgtctacgcaagccgcgccggcacccaccgaagaggccgatgttctcgccggatcgccgcccgccgcgcctacccctactccggcacagatgcaggccaaagcgcaggcccaagcagctcagcagacccgggcacaagctcagaccgctcaggccgccggcactcgcccctcgttcatgaacgaaatgcccgacctgcgagaaaccacggacgacgacccggccacggtcaagagccgcgaggaattcaccacggtgtatgacatcatcgaccagctcgaggcggcactgggcgaagcgaagtccagcatattcgcccccggcatggtgaaggttgaccgcgacgaattcaccgaccagctttccgagttgaagaaaatgctgccggtgcagttggagcgcgcctccgccctcatgcgcgaggccgagcgccgtctggaatcggcacagacccagtccaacgccatcgtcgcctccgcacaaagccgcgcagccgacatgatcaaggatgccaacgaacaggcacagttcctggccggccaagagaacgtcaccgagcttgcacggcagaaagcgcgcgcgattcttgaccaggcacagaccagagccgaccatctgacccaaggcgcggaccagtactgcactacggtgatggaagggctgtcccagcagctcggcaaactcagtcgggatgtgcaggccggtcttaacgtgctggaagagcgccagcgtgcggccggcgaacagatgccgcacctgacgctgaacgactatcccgaagcccagtaacgccagcagcaccagcaacatcagtaacgcgaataacgccagtaacgaataactccagccaacatacgaaaggcaccaagaacataccatggcacgagttgaagattccccgtgggccattccggtagcgcagattgcttcgcgcgccggtcaatccaagccgattgacgccgatttcccggccccttccggcattggcgacagcatcgtcggcatcaaggatggtgagcccgtacatgtgagcgggcagttcgattcgattgtggacggcctgatcttcaccggccgcctggtcgcgccattcgtcagcgagtgcacgcgctgcctgaagccgattgacgaggactggccggttgatgtgacggtgttcttcccgtatgagtcgggtcaggacaaggccaacggcaagggcggcaagaacaagaaggacgacgagatcgacatcatcgccggcgaggacgagtcggaagacacgtatccgctgctggagaacggcgcattcgcggacatcgaggcgatgatccgcgacacgctggtcgaatcgctgccgttgcagccactgtgccgaccggattgcaagggcctgtgctcgcagtgcggtgccgatctgaacgaggatcccgaccatcatcacgatgtgacggatatccgttttgccggattggcggggctcaaagcccagctcgaggccgagcagaacggcgagcaggccgagtgacgcgcgcctgaacggagtttgtacgagccgtgcgttaagataacggacgcttaagctcaattgttcgaacgaaatagaggatactcaaatggcactgcctaagtacaagacctcgcgcgccaacacacactcgcgtcgcgcgaactggaaggccaccgctgctgcgaccgtgaactgcccgaactgtggcgctccggccctgccgcacatggcttgcccgagctgcggtaactaccgcggccgcacctaccgctccgccatccagccggctcacaccaagtgagtcctgcgataacggcttgaatgaaggccctgccatcgacgggtggcggggtcttcgcataagtgcaccattacgtacaccatcgcattgcaaacaacacaacacaacacacaacacatcaccatcgcgtgaaggaccatacaacaatcatgagtaatgaaaccccacagcagccgacgccggccaacgagcttcttgaagcgttgggcaccactctcagcccggatctgctcgtgcaggcactcacccaccgctccttctcgcatgagcaccccggcgtggccaattacgaacgcctcgaattcctgggagacgcggtgctcgaactggtctccactgaaacgctgttcaccattcacccggatatgaccgagggtcaactggccaagatgcgcgccaaggccgtctccgaagacgcgctgagcgccatcgccaaaaccaagctcaaggtgggcccctacattctgctgggtcacggggaaaccgagcagggcggcgcggagaagaactccattctgtgcgacatcgtggaatcgctcatcggcgcgaccttcctggaacacggcatcgacgaggcacgcaaggtgattcaccggcttattgacgacacgctcgccgaagtggccaccgagggcccggcacttgactggaagacctcgctgaccgtcaaggcgcacggcctcggcaaggatgagccggtctaccatatggaggtctccggcccggagtacgcgcagatcttcaccgcgcgcgtctcattgggcgagaacggcgacatcatcggcatcggtaagggctccagcaagcgtaaggcgcagctggcggccgccgaagcgggctggaagtcactggactcgctcaagacgcggactaagtaagcccgctgtcagatttgcgaatagactgataccaacatgagcgacgagtcgtgccggggccacaagtctcggagaagcgactggaatcagacacgcgggcacccggccccatcccaaggtcgggcaggttcgcggcaaaatctatgaggtgagaggaatcatggctttacccacgcctttgcaggcattcagcggcgtgccgaaaatcaacgcggcccccgataaacagaccatcgtcgatggcgagaagatgactggcgcccaagcgctggtgcgttcgctggaggatctcggcgtcgaggacgtcttcggcattcctggcggcgcgattctgcccgtctaccacgagatcaaagacaacacgaagttccgcttcgtgcttatgcgccacgagcaggccgccggccacgccgccgaaggctacgcactggccactggcaaggtgggcgtgtgcatcgtgacttccggcccgggtgccacgaacgtggtcacggccattgcggacgcgaatatggactccgtgcccatggtcgtgattaccggtcaggtgggcgtgcaggccatcggcactgacgccttccaggaggcggatatcgtgggcatcacctacccggtgtccaagcactccttcctcgtgacccgcgcgcaggacattcctcgcgtgctttccgaggcgtactacatcgccaacaccggccgccccggcccggtggtcgtggatctgaccaagaccgcacagaccggcgacatgtactactcatggccgcagcgcatgattctgcccggctacaaccccaccaccaaggcgcacggccgtgtgctgtccgacgcggcgaagctgttctctcagtcgtaccgcccggtgctgtatgtgggtggcggcgccgcccgctccaacgccggcgcacaggtcaaggctctggccgacctgaccggcgcccccgtggtcacgaccctgcccgcacgcggcatcattcccgactccgacccgaagaacctcggcatgctgggcatgcacggtacgattgccgcaaccggtgccgtgcagcgcgctgacctgcttgtggccatcggtgcacgtttcgacgaccgcgtgaccggcaagctcgacgccttcgcaccgaccgcccgcgtgattcatattgacatcgacccggctgaaatcggcaagaaccgtcagcccgacgtgccgatcgtgggcgatgcggctaccgtgctcgacgacttgattcccgaaatccagcgcacgcaggccattcagggcaagccgaatctggccccctggtggaaggcgatcgacggctggcgcgaggaatacccgatgacgtgggatgagccgaccgacggatcaatggccccgcagtgggtcatcaaaaagctctctgagatggccgatccgtccaccatctgggtgaccggtgtgggacagcaccagatgtgggcttcgcagttcatcgatttcgagaaccagcacgcttggatctcctccggaggcctcggcacgatgggctacggtctgccagccgccatcggcgcatccgtgggctcggcccgcgagttcgagggcaagaagccggtgtggctgatcgatggtgacggttccttccagatgacctctgaggagctggccgccgcgttcctggaccacgctccggtgaagatcgcgattctgaacaactccgtgtacggcatggtccgtcagtggcagacgctgttctacgagcaccactactcgcagaccaacctgctcgatggcgaggcgcacggtgccgatggtgcggcggcactggtcgacggcgatgcgccgctcgaagtgcctgatttcatcaagttggccgaggcatacggctgcgtgggtatccgcgcgttcaccgaggaagaggcgattgccgccatcgaaaaggcgaaccagatcaacgaccgcccggtactgattgatttccgcgtgtggaaggatgcgatggtgtggccgatggtagccgccggcgcttccaacgacgaggtgacgtacaagcccggcatcaagccgctgaccggcggcaccccggctccgggaaccggtccggacgagcatgcgaccggcgtgttcgagcacgagaccgccgctgccgctgcgagcgagcactgaggagaggagaacactcatggctaactatcctgcatcccagcctggttcccagcgtcatacgctgtccgtgctggtggagaaccgcccaggcgtgctggcgcgtatcgccggcctgttcgcccgtcgtgcgttcaacatcaactcactgtccgtctcccccaccgagcgtccggacatctcacgcgtcacggtgaccgccgacgtggaggccgtgccactggagcagatcatcaagcagctcaacaagctgctgcacgtgctgaagatcgtggagctcgacccgaactccaccgtggaacgcgaactggtgctcatcaaggtggccgccgacgaatccaaccgttccgacgtgctggagatcgtgcgcctcttccgcgtgcgtgtggtggacgtgaatccggaatcgctgaccattgaggccaccggtgccgaaggtaagatcgatgcgctgctggggcttttggagcattacggtgtgattgagctggtgcgctccggtgccgtggccgtgacccgcggcccgcgcgccctgagcgaaaaggtcgtcggttccgaggttaccgggcgctgattcggcgactgcggggagacccagtccaagctcaaagggcggatgtgcatgatgcatatccgcctttttcatgcgtgcatacctcatcacccgtgctgcaagcaaaatgacagcaccttatgctagcattatgacagcaacaaggaggtgcatcatggcaacattgaccatccgaaaaatacccgatgagcagattcaacagctcaaagaagtggctgagaaaaacaaccgctccatggaatctcaggtgcgatccattcttgaagaatggctggccggcacggtggcgcatgaaatcacacgaaagaccaatttctacgacgagatccgcgaattcatgaagaacatggattttgagggactcgacaagggggaactcccactatccgagcgaaattccgccgattcccgaccgccagtatcttttgaataggaatcggccatgattattctggacaccaacgtcatcagcgaaatcatcaagaaacagccagacgaacacgttgccaattggctgaggaaccaagatacaagcaatctggcaaccaccgccatcaccgtcgccgagttgttggtcggaatatgtcgcatgcctgaaggcaaacgacgaaagtacacagatacgaccgtcaagctggcgcttatgacattagaggacaggacgttcgcatttgacacccaggcagctgcggattatgcccatatccttgtcgaacgcgaacgcaggggcacacctaccagtattcaagacgccatgattgcggcaattgcctgttcctgggatgcggccatagccacgcgcaatatcaaggacttcgaaggtaccgacgtggaattgattaatccgtgggagtttgcatagcggtaggccccggcaaactaccgaggccttgtgaacgttacggtttctcccgctactccaattgttcggagagttcgagccattcggcttcgagattatcgctttcagtattgacggcggtgagttgttcattgagcttgttgagaccctcgtagtcgctcgggtcatgggcggccatctgtgcctcaagttcggtcttccgctcttccagtttggcaagcttgcgctcgatggcattcacgcgcttggatgcctcgtggaaggccttgccggtgagcttcgaggtggagtcctcaccgttattggctccctctgacgagggagctgtccgcgaagtggactgagggagagatgcagcaacattgacggcggccgccttacccctaccagacttcgccgagctgctaccggtgcccgcgaagccaggcgtgtcagccggcaatcccttgccgttcttaatagcctcaaccatatcgaggtaatcctgcacaccaccgggcagatggcgtaccttgccgccaatcagcgcgaactgctgatcggtgacgcgctccagcaggtaccggtcgtgggatacgacgatcaacgtacccggccaagtatcgagcaaatcctccatgacggcgagcatatcagtgtccagatcgttgccgggctcgtccatgatgagcacgttcggctcgtcgagcaggatgagcagcaactgcatgcggcgcttctgtccgccggagaggtcgcggatcggcgtcatcaactgggcggattcaaagccgagacgctccatcaactgtcccggcgttacttccttgccatccacaatgtagctcggcttatagcgggaaagcacttccttgatcttgtactggcccagtttctccagctcatcaagacgctgcgagagtacggcgaacttcacggttttgccgatgttcacatggcccacggtcggagtaatcgaaccgtcaatcaacttcagcaatgtggacttgccggcaccgttcgcaccgacgatgccgaaacgatcgccggggccaatcagccaagtcacatcgtcaagaatctcgcggccggaaaccgtcaccttgcgtgcagccgaggtgacaccggctgcagcagtgccatcatccgaattcgttgcagcagtgtcaccgccgatggtttcaccacccgtgttcatgcgacgaacctcgcgatcgtcagcaagctgcggattgccgctctcagcctcggccttcttacgcgcttcctcagcggcctcgacggcttccggcacgccggcgtccaccaggcgcaggtcagtcatgtcggtgaccgccacctcaacggaaccgtgcagctgcggctcggcgtacatggcgttgaccacatccacgcgggaagcggacgcggagagcgccgccacatccgggtcgatatcggccatgccctgcggtttttcgaaaatctgcgtcacgtcgaccaaatcgaccacctgtttgccgagacgtgaggtggccatttgcttcagttcaagtgtgttacgcatcggcggcacgtcggcaataagctcgcgcgcggccttgacgtggaacttctgcttggtggaacgggcacgggcaccgcgcgaaagccatgcgagctccttgcgggccagattgcggcgcttcgtttcacgcacatcagcctggcggtcgcgttcgacgcgctgcagcatatatgcggaatacccgccctcgaacggctcgatcacgccatcgtggacttcccacatcgattcgcagacctcgtccaagaaccagcgatcgtgggtcacgagcaacagagcgccctggcctttggaccagcggttcttcagatgttcggcgagccagtggatggtgaccacgtcgagatggttggtgggctcgtcaagcgcgagaatatcccaatccttgagcagaagtcgggccaaatcggcgcggcgacgctggccgccggacaaggagccgaccttggcatccagactcatgccgccgagcaatacctcgacgatttcacgggaggtgttgtcggacgcccattcgtagtcggcgcgcccctcaagtgcggcttcgcgaatggtggcgttgtcgtcgagcggatcgcgctggtcaagcatgccgaacgtgagtccgccgcgcttcgtcacgcggccggaatccggctcctgggtgccgcggaacaggtgcagcaacgtggatttgccgtcgccgttcttgccgacgatgccgatgcggtcgccctcgaaaacaccctgcgtcacatcagtgaagatggttttggtggcgaaagcgagcgaaacgtgttccagtccaatgtcataagtcggcatgactcaccaatgtagcgccacgcttgcccagcggcggcccacaaacgttatttgttcagcgtctgagcgtaggagttgcagcgggccgcaaaaccggagaacacttgctcggcgagcggatgcagtagctgatcgtattgggcgaattgctcgcgcaattgggacttggacccacccgcggccttgagatccttgaccatgctcggctcatccagccattcgtccagcagcgagccgcacacctcaagatggaactgcatgcccagcgcggatcccagtcggaatgcctgcaccttggtggaagacgaacgtgccagcagctggcctccctcgggcaagcccaccacgtcgttatgccagtgcagcaccgtcagctgcttatcccacatggagaagaagtcatgcttgtccacacgcttgatcggcgcgaacccaatctccggcgcatcacccttgcgcagctgcgcaccaagcgcagtggcgataatctgatgccccaggcatacaccgagaatcggcttgcctgaagccacggcggcacgcgccaacttggcttctgccttcagccccggatacttgtcgtaatcaagcgcgcccataggcccacccatgattaccacgccagccagttcgccgaaatcaggcaagtccggtttctttttgtcgacgatattcatcgtcaccgtctcaagaccgatgtcctcgaggttcgacaatatgcgtcccggacgttcccatgggacatgttgcaaaatgagcacttgtggtgtggccatgacttctattgtggcacgagcgttccccgtttgcgtaacgagcagggcaaatccatgaatctcgcagtttccgcagcggtcaaagacgtgttctcgcgagactgttgtcccgcttctcatccgtctgtcacctcgttcgggccccgcctgtgaagcgttcaccaagctcttcgagtaacgattcagcatgtctggttcggaccctacgcttgagcgttatgggaaacagccaagaaccgcaggatttcaacatttccgtcatgccttcaagcctgacgccggtgcatgtcgccaaggccgcagaaggcctgaatctgtatgacaccgcctcgcaccaggtcagccatttcgtgccgctcaaaccgggcgaagtcggcatttatgtgtgtggcgccaccgtgcagtcgtcaccgcatatcggccatatccgtgccgccgtggcgttcgacatcgtgcgccgctggtttttgaagctcggttacaaagtcacttttgtgcgtaatgtgaccgatatcgacgataagatcctcgataaggccgcggccgccggccagcgttggtgggcccgcgcctattactacgagcgcgaattcaccgaggcgtacaacacgctcggcgtgctgccgcccaccgtggaacctcgcgccaccggccacatgtcggacatgatcgacctgattcagcgcattctcgacaacggccacggctatgtggtcacggatgcggacggcaagcccaccggcaacgtgtacttcgatgtggcatcctggccgcattacggcgaactcacccaccagaagcagacctccgaagtcgatgaggccgctgccgtggccgaccgcatgggcccgtccgtggacgccaccggtgccgacaagtacaatccggtcgacccggccgacgcctcccccgacaagcacgacccgcgtgatttcgccctgtggaaggcccccaaggacaccgatcccgaggatgcccgttggtcgacgccgttcggcgtgggtcgccctggctggcacatcgaatgctccgccatgtcccaccgttacctgggcgatggcttcgacattcacggcggcggtttggatctgcgcttcccccaccacgaaaacgagatggcgcagacctgcgcggccggctacccctctgctgcgcgctggatgcattcggcatgggtgaccgccaagggcgagaagatgtcgaagtcgctgggcaccggcctgtccgtgccgagcgtgctggccgagcattccgcttgggtggtgcgttacgctttgggctccgtgcagtaccggtcgatgctcgaatggtccgatcaggcgttggtcgaggcgcaggccgcatacgaccgtgtctcgaacttcatcgagcgcgccggtgtggcactgggcggtcagccttctcgcgaggaggttgctgccgtctccgccgacgatttgcccgccgatttcgtggccgccatgaatgacgacgtcaatgtgtctggtgcaaccgccgcgatcttcaccgccatccgttccggcaatacgttgctttcacagctggctgaccgcgccgattccgaaaccgccaaggccgaggtgcgtgaggcgctgctcgccgtgcgtgccatgctcgacaccttgggtctcgacccgctggccgagccgtgggtgtctgctggcggtgccgctgatggcacggccgagtcgcccgaacatgcggcgctggaggcactgattgccgagcagctcaacgcccgcgccgaggcccgcaaggccaaggacttcgccaaggccgaccagattcgcgacgccctgaccgaggccggcatcgccatcgaagacggcccgcagggttccacttggagcctgaagtagccgcttcaaacccatcaatcagtcaaacacgaagtccacgtccacgatgtgcaggcgcttggcgagctccttctccagcgagcgcttgcattcgatgaggtcagctacatcaatggtttcgccgatgccgctcagatacacgtcaacggtgtagttcatgccggtcttgaagatcagcgtctgctcgtagtcggtgttggcaggcagatggcgctgtgcctcggcctccacgtaggcgttggtctcatcgtcgtcatgcacgccgccgaccaattccacgaacgcctctttgagcacgctgaacggctccttgatggtcaatgccaccaaagccacggtgatgaagaaatcgccggtgtagtgcaggaagtcaagcggaccgccggccggtagcagcatcaggaagatggcaaccacgccgatgccgaacgacatcgatccgtcgaccaacgtgctcttgcactcggcggtgagcatggtgctggaatcgccgatggagcggttggaacgccggtaatacgtgtataggctgaagcacacgattacggtcaggatctcgtagatgaccaccgggccggtttcaatgcgttcgccggacccgaacacgaagtagtcgtacgctactcggcacacgtcaatcagcgaatacaccaacaacgacatggtgaaaatggccttgcagatcgcgtagatgggttccagtgcgaacatgccattggggaagcgctcggtggttcgcaccgtgcgcgacgagagatacaccgccaccattccggacaggacggaaatcgcggtgaaggagaagtcgaggaacatggccttgaggccggtcatgaagaacacggccatgccggctaagacctgcagcacgttgatgacgataccaacgatcagggctttgcgttcgagtagtttttgggtgggcatcagtgggccttccttattgcacggcatgtctgcgttggcccgaacgtcatggttcggagcgcacggcagtctgcgtataagcggtgtccagcgattttcaaaacagcgtaagcattccaaaaaacacaggattctttacggtttccatggtatcggaagcactcgattggcttcgccacgagcggacggcacggcatttgccgtctgaatgcccaacatccctgactactacgcgacgcattccccggaaagcgtcgtccccaacaccgcaatttcccgcgtggcggctagactgttgcccattatggcagctttttcatctttgacagacagactctcgaatgcgttcaagcatctgaagagcaagggcaagctttccgaggcggatatcgacggtacgatccgtgaaatccgccgcgcgctgctcgacgccgacgtggcgctcgacgtggtgcgttccttcaccggcaaggtgcgtgagcgcgcactgggcaccgaggtgtccgacgcactcaaccccgcccaacaggtggtgaagatcgtcaacgaggagctcaccgacgtgctcggccaaggggtcgatcgtccgctgaacttcgcaaagaacccgccgacgatcatcatgctcgccggccttcagggtgccggtaagaccacgctggccggcaagctcggctactggctcaaggattccggccacacgccgctgctggtggcggccgatttgcagcgtccgaacgcggtgacgcagctgcaggtggtcggcgaacgcgccggcgtgcccgtctatgctcccgaaaagggcgtccaatccgatggcggcgaggccgtcgcagctccgggccagacctccggcgacccggtgaaggtggcccgcgattccatcgaactcgccaagcagaagctctacgacacggtgatcatcgataccgccggtcgtctgggcgtggacgaggagctgatgaagcaggcccgcgacattcgcgatgccgtgcaccccaacgaaatcctgttcgtcatcgacgcgatgatcggccaggacgccgtcaagaccgccaaggcctttgacgagggcgtggacttcaccggcgtggtgctctccaagctcgatggcgacgcccgcggtggtgccgcgctgtccgtggcgtccgtgaccggcaagccgatcctgttcgcctccaacggtgagggcctgaaggatttcgaggtcttccacccggaccgcatggcctcgcgcatcctcgacatgggcgacatcatgacgctcatcgagcaggcgcagaagcagttcgatgaggaagaggcccgcaaggccgccgagaaaatctccgaaggctccttcggcctggacgacttcctcgatcagctgcagcaggtacgcaagctgggctcgatgaagtcgctgctcggcatgattccgggcatggcccagcaccgcaaggaactcgagcagttcgatgagaaggaaatcgaccgcaccgaggcgatcattcgctcgatgaccccggccgagcgccgcgatccgtcgattatcaatggttcccgccgcgcccgtatcgcctatggttccggcgtgacggtttctcaggtgaacgctttgctgcagcgtttcgagcaggccgcgaagatgatgaagcgcatgtccaatcgtggcggcatgggcggcggcatccccggcttcggcggcccggctatgggcggcggcaagaagaagggcaagaacaagaagaaaggcggcaaatccggcaatccgatgaagcgcgaggccgaggagaaggcattgcgcgacaagctggccggcaaatcctccggttcgaccggcggttccgccttcgccaagaagccgcagaacccggccctgcccgccggccttgaacagatgatgggcaacgtcgatggtggcactgaactgccgccgaacctcggcggaggccttggcggactgttcggccgctgatctcacaacttggctcccctcgcagaggggagccaagttatatctcggttcaatttatatttcgaaaggaacttccatgacgacaatcttcagcgcggtggcaatcatcgcactgttatggacggccttaagcgcgctgcccgccggtctcgaggcccgtatgccgcttccgtacatgattgccctgactccgctgctgtgggttcctttgatgattctggccgcggtcgccgcatggcaacatgaatggactgcgatgtcgtcgcttattgtggtcgcgctgattgccagctcacagcgcatcaactactggggtacgtcaatcgacccagccggcaaacgcagagaatcccaccgtgaaacaacttcgccgacgctgtcaaaaagccataacagcaatacatcgagcacctcaaacactccgaaggaaggacccgaaacagtccccgatgggcaccgtgaaacaacgcgtgaaacactctcgccccagttctcggttatgacgatgaattgtcgatacggacgcgccgacgccgctgaaatcattcgcaatattcgcgaacgcaatatcagcgtattggccttgcaggaagtcaccgacgacctcatcacacgtcttaccgaagccgacatcaacgaactcctcccctaccatcagttcggagacgccaaagagaccgataatggcggattcaacgtgatctattcccgctacgagccgagcgcagcggtgcccaacgtggtctccatccctgccgccgacgttcccgccatcaccctcaaaacctccggtaatcgcacggtgacgctttgttcggctcacccgaaatcgccgatgcgcggctgcgcggattggtcggccggcattctgggtctgcgagaactcgcccgtgcaaaatccgtcagcaatcgcaacatcgtcgtcgttatgggcgatctcaactcgagcaccgaccacccgagcttccgtgcgttgctcaagtccggattcaaggacgcaagtctgattcaagccgccggcccgaatctcaccttcccgcgctggctcaagtggccgcgcatcgaactggaccatattctgttcacccaagggctcagaccgtccggcgtgacgtccttcgaagtgccggacaccgaccatctggctttggccgcaacgctcaccctgcggtagcgggcgcggcgatcgatcgggccttggccgtgtggcgcgaagcgggcgggaacgtctggaagacccccgcccgcagccgggtggttcgccgtcagaggtccatggagcggatcagattcaccatttcgatcgcgccctgcgcgcactcggaacccttgttccccgctttggtgccggcccgttcgatcgcctgttcgatggaatccgtcgtcagcacgccgaacagcaccggcacaccggtgtcgaggctggtctgcgcgattcccttcgagacctcgttgcacacgtaatcgtagtggctggtgctgccccgaatgaccgcgcccaggcagatgatcgcatcgtagcgcttgctcttggccatcttcgacgcgatcaggggtatctcaaaggcgcccggcacccaggccaccgctatgtcctgttcgcggacattctcccttttcagggtgtccagcgcccctgccagcagttttgaggtgatgaactcgttgaacctcgccacaacgatgcctatcgtgatgttttcggctaccagatcgccttcgaacgtgtgcatttattcctcctccatgttcaggatatgtcccatgcggtttttcttggttttgagatagaaactgtcgtaagcattggcttcgatttcgattggtattctgtcgcggatctccattccatagtcttccaattgatacactttgtcgggattgttggtcagcaggagcatggaccgtatccccaaatccctgagaatctgcgctccgatgtagtactccctcgcgtcaccggggaatcccaacgcgagattggcgtcgagcgtgtccatgccctcgtcctgcagacggtaggccttcagcttgttgaccagaccgatgccccgcccttcctgacgcatgtacagcagcacgcccgagccatgctccgcgatcgtccgcatcgccgcgtccaactgctgaccgcaatcgcaacgcaacgagccgaagacgtcaccggtcagacattccgaatgcacccggcacaacacatcggtcccatcgcccagattccccatgaccagcgcgacatgatgctcgccgttcaacctgttcacatagcagtgcgccgtgaattccccgtatcgcgtgggcatcgccacggtcgagacacattcgacgagcgtatcgtgcgctttcctgtattcctgcagttccttgatggtcaggagcgggatctgatgctcctgggcgaaccgggtcaggtcgggggtcctcatcatccggccatcgtcgtccatgatctcgcagcacaggccgcattcacgcaatcccgccaaccgcatgaggtcgacggtcgcctccgtgtgcccgttccgttccaggacgccgcccttcttcgccaccagggggaacatatgccccggtctgcggaaatcgaggggttccacgtcatcggagacgcacatgcgagccgtcaatccccgttcttcggcggagatgccggtcgtggtgccacggtaatcgatggacaccgtaaaagcggtttcatggttatcggtgttgtgctcgaccatgggcggaagcatcagcttgtgggccagttgctcgctcatgggcatgcagatcaatcccttggcgtgggttgccatgaaattgacgttccatgtggtggccgactgcgcggcacagatgagatccccctcgttctcccggtcctcgtcatcgatgaccagaacgagcttcccttcccgcagcgcctgcaacgccgcttgcaccgactgatggttcatgattcatgcatcctttctcagaacccgcaccgggacagcagatcctgcgtcagtcccgtccgggtcgtcatcatgttccgcacgtattttcccaatacgtcgttttcgagattgaccacgccgccgacccgtttctcgcccagcaccgtctgcgccaaggtgtgcgggatgatcgataccgagaagtccctttccgtgacctccgcgaccgtcaggctgatgccgtcgacggcgattgagcctttctcgacgatgccttcgagtatctcgttccgcgccgcgatccggtaccacacggcattgccttcgcgccgcacggaggatatgctgcccgtgccgtcgatgtgcccggtgacgatatggccaccgaaccttccgttcaccggcagggcccgttccaggttgacgccgctcccgtggcgcaatacgccaagcgaggttctgcgccacgtctcattcatcacgtcgacggtgaagcgtcgccggtcgaaatcgacgaccgtcagacagatgccgttcaccgccatgctgtcgccgatatggaggtcctccatcacgttcatggcatcgaccgacagcgtgcagttggcggcgctcctccgtatgtccgccaccgttccgacttcctccactattcccgtgaacatgaatacaccacctcgctttccaccagataatcctctcccactcgggagcaggcgcggggccggagcatgacggcgtcggaaggcagggcgactccttggccgcccaccgggcttttcgcggtgccgccgaatatcttcggcgcgatgtacacgtgcgcctcatcgacgatccgctgttcgagggcgctccaattcatcgcgctcccgccttccagcagcacgctgtccatccgcatatcccccaggcgccgcaccacgtccgccagatcgacgtggtcgcccttccttccgacggcgagtatttcgcagccgtgccgccggtagtcctccgccttgcgttcgtcatcgcaggcggtggcgatataggtcctgacgtcattcgccgtctgcacgatccgcgaggtgaggggcgtcctcaatcgcgtatcgcagacgacgcgaaccgggttccttccgtgtgccatgcggcatgtcagcaacgggtcgtcctcgatcaccgtgttcacccccaccatgaccgccgcgacggatcgacggagctgatggacccgacgcctcgactcctcgccgctgatccaccgtgattgattggtatgggtcgctatcttcccgtccatcgtcatggcgtatttcatgatgacatacggcgtatgcgtggtgatgtatttgctgaacacccgtatcagatgccggcactcgtcggccagcacccccacatcgacccgtatgccgtggtcctcgagcatgcgcacgcccttgccggacaccacgggattgcagtccaaggttccgacgacgacccttgcgatgccgctttccacgatcgcctccgtgcatggcggcgttttgccgtaatggcagcacggctcaagcgtgacgtacaacgtcgccccggcgggcgactgcgtgcaatgccgcaacgcgttcctctcggcgtgcaatccgccgaactcctcgtgatacccctgcccgatgatccgatcgtccttgacgatcaccgcgccgaccatgggattggggttcacgtatccggcccctcgcttcgccagctcgatcgcgagtcccatgtactgcgcatcgtccatgtacgcctccaagcatgttgcgcccatacgctatccaaggcatacaaaagaaggttcatgcgaacacgaaaacgccctgaaatgatatggcatcatttcagggcgtacgacgaagcatgaacgtactttcatcttctctcatccagactgtactgtcggctttggaatctcaccaaatcatgccttgcggctcgtgggctgtaccaccggtagggaatcgcaccctgccctgaagatagttattcgttttgcccgtgattgtactcgccgacgctccccctgtcaacggaagcggcctcacgcagcgcccgggccttctgcatcgtctcgtcgtactcgaagtcgaaatcggattccacggtgatgcctccgcccacgccgagcgacgtctcgcctccctcccgcacgatggtgcggatcacgacgttgaaatcgcaatcgcccgtatcggagaaatacccgatgctgcccgtgtacaatccccggggcgcgcgttcgagctcgtcgatgatctgcatggcgcgaaccttcggggcgccggtgatcgaaccggtggggaacgcggcgcgaaccgcgtccacggcgcaacgatccttgcgcagcgtcccctcgacggtcgcgacgagatggaatacggaaggatacgtctcgatggcgaagtcggggtccgtgccgacggaacccggttcgcagacgatcgacaggtcgttgcgttcgaggtccacgaccatcagcagttcgctgtggtccttctcgctgcgggcgagttcctcgcggttcgcccgatcctcgtccggcgtgccgccgcgtggccgggtccccttgatgggccgcgtcaccacatgtcccgagcgaatctccatgaaccgttccatgctcgaacagcacacgtcgagacccggtgcgcgcagataggcggaaaacggggccgggttgtgggtgcgcagataacggtagatggcataggggctctcggacgtctccaggcgcaggcgctgcgccatgttgacgacgtaggcgtcgccggcgcgcagatgatcgacgagacgggccagggcgtcgccgtacccggcccgcgtgaaatcggaggagcatgg

SEQ ID NO: 1485 - DNA, 25755 bp, Unknown
  R257_15m  MAG No. k141_33544
gcgttgtggccgctgggagacaacggcccgagtgaggcggaggccgatgaggtcgattccttcggcaggccgtatcatccgcgcgcctatacgctgggcgtcaacagttatcaccatcaggcgattcgcacgctgggccagggactggaaccgatggccactgcgccggacagcatcgtggaggcggtctggatgccggccaagcgtttcgtctgggccgtccaatggcatcctgagttctctcaccgcgccgatagcaaccaacgtcgcatcctcagcgccttcatcgacgcctgctgacgcaagctcccgccaatctcgacgaaacgtcttccaagaatggcttgcccgcatccgcagccccctaccacgacatgagcgcccttgacaacgtcaccctcggcatgcgcttcacccgtgacagcaaacaggtcaggcagcgcaaggccaaggccaaggccaaggccaaggccaaggccatgctctcccggctcggactcggccatgtcgcgggagacaagatcatgaccctctccggcggtgaacagcagcgcgtcgccctcgcacgatgcatattgaagcccggggatttgatcctcgcggtcgagcccaccggcgcgctcgaccgcgatctcgcccaacatgtcttcgacgaaatgctccgcctccagcacgaatacggcaagaccctcatcatcgtcacccacgatcttggcatcgccgcacaatgcgacaacaccatcgagctacaggcggtttgacggagatattccggcagctttggtctaccgaagtcacgtgttgcccttcaatctcctcggaaatctaggtggcccatttttcaaagaatgcgatcggacgtaacgccccgtaaggagacctgcaatatgaaacgttgaatcgtcatctaaagatgacgttttcgtagatcttccggaatcgccagtcatctgcgatccggatatggcaccggtccggctcgatcgagcccggacgaccatggagaaaacgaacgatcgaatccgaacgcgggtaaagagcctgcgcgacaccattgataaagccaaatttaagaaaacagatcagtatgcataagttttacatgccttcagcctcgtcaaccggcagcgggccccagaatccagtcacagccaggcagagcgtacaacatactgcgtagtacatggcgcgaatcccaatgaccaccatcgattgatgacggccacgaatactcgtactcagccttactgctttggctcatttctgttcacttcacgctggagtaccgagacacgttgagcggaaataccggtaattcacgtacggttaccgaccattggcctgaacggtactcagcatccgcagtcacttggggtatggtcatgacggagagccatcatgaccgatctctcattattctgggatgaatccggcgaggctggaactgaatctaaatattaaaacgcatgatgcacacgttgcggaattagtccaccagaacttcggcatgctcggcaggttcagcgggttcgatgtgacgggcacgcatggcatcgagggcggcggccaggtcggccgggtactgggaccggaccgtggtccagacgcgggtgcgaggatggcggaattcgagcttcatggcgtgcagccactgccggtcaagtcccaaagcttcagacagcaccggattggcaccatacatagggtcgccgcacagaggatgcccaatcgaggagaaatgcacgcgaatctgatgggtacgtccggtctccagattcacggataccagtgtggcctcatggccgaaacgctccaacacatcccaatgcgtaacggccggtttgccggccggagtcacgcagaagcggaaatcggacactttggcgcgcccgatcggtgcctcaatggtcgctttgttctctttaagaccgccctgcacgagcgcatgataggttttctttacctcatgctcggcgaactgccgacgcatctcggtgtacgcaaggtcggacttgcacaccaacatcaagccggaagtgcctacatcaaggcgagaaacaatgccttcacgcccggccgcgccataggaagcgatatgcacgccacgatcacgcaacgatcccaataccgtgggaccggtccagccaaccgaggcatgcgccgccacgcctacaggcttatcgactacgacgacatcatcatcttcgtagacaacagccatatcagttgcgataggctcaggcccggcctgttcctccgccaaatcaaattcgacggtctcccccgcctgcaacgtgctggaccgcgcaacttcacgccctaaaacgcgcgcctgtccggagtcaaccagatcggcggctttagatcgtgaaatacccagcattttggccacggctacgtcgaaacgcttacccaccaatgcatcgggagcagggaccattcgactcattacttggcgtccgcctccggctcagactgtagggattcgtcggattgctcgataagatccttgtgggagaacggctcccccataagaatcagaatcaccaggaccacaccggcgactaccagatagatatccgccacattgccaacggaccagccatagttaaggaaatccaccactttgccgttgaggaagccgtcagcgtacataacacggtcaatcaggttgcccagagcgcctgcaaacgcgaaagaaagcgccaccgaccatttcatggagatagtgcgcaccccagccacagcaagggccacgcaagccacaacggccaacagactgattacccaagtagcgcctgaccccatgcccaaggacgcgcccggattacgcaccaaggtgaaggacagcagtccgggaatcacgcgaatggtctgaccgttggataacgcggccatcgcccaagccttggtgagctgatcgacaatcagcgcagccgcggccacacatgcaaagacggccacgcgagtgcgcagccgtccctgttggttcgtcatacgacctgtacctgcctacgctcagttggtcttggacgaggtctggtcgacgtagttgttcgactcggaaacctgcgatgccagctggccgaggtactcggtgaggcgggcgcggtattcagtctcgaactgcttgaggctctggatgttgccctcgacgaccttggactgagcctgaaggttgtcgcgcacctgctcggcatacgtatcggctgcagagcgggtgttcttgtcgtacgcatcagctgcggaacgagtgttcttgtcgtactcggcggcacgctgctgcacttccttctcgtagttgtcagcgtcatcgtgctgagacttggagtagttgtccgcatcctgacgagtcttgacggagtatgcgtcggcctcagaacgggtgttctgggagtaggtctcggcatccgcgtgaatctggtcacggtaagcgtcggcctcggagcgggtacgatccgaataggtgtcggcgtcggaacgagtacgagtggagtagtcgtcggcctcggagcgggtacgctcggagtagttgttggccttggtgaccaaatcgttgtacttgttctggctggcctcggtgatttccttggccttgttcttgcccttctccacgtactgatcgtgcagctgcatagccagggtcagcatggcggtggcgcgctcgggctcggtgcccggcatggaagcgacgccagcgatcttctgcagagaaccggtctcagtgctcggctcgaccttggaaatctgggcacgaagctggttttcacgctgcttggcttcttcgagctgacgagacagttcagcgatctgagcggactgctgctgagcggcggaaccctcctgctgagcagcggcgagctgacgggacagctcctcgttggccgcgcggaactgatcacgttcctgctgaatggcggcgatctgctggccgacggcttcctggttaccggaggcctgagcggcctgggcggtgagctgatcgatttgagcgttcagctgatcgacctgacccttgagctgctcattctgggaggacagcgcgcggttggattcctcggcttcgctgagcttggcagaggcaagctgtgccgcctgatcattgccagcctgagcggcctgctgggcctgagccacagcgttcttcaaaccagcattctccgactggagttgctgcacctgaccggtaagatcggagatcttcgcattaaggttggtcacgtcagggcccagagactgagtggcctgaccgccggctaccgcctgacgtccaagagcctcgacggtttccgtgacctgatcaaggaagtcatcgacctcgtcgacatcataaccttccttgaatcgaacagtctggaaggtatgctccctaatatccttcggcgtcaacagagccataaatcttgcacctcgctttggggcattgcccgcacttacgttggtctcaagtcagaatgctatcacgaccccatcgtttcagaacattcaacgtgggtttttatgccagatatatgcctccggcgggtcaaaaacggcctcagaacactatcagaacaacactttctagtaccaccaacgcaaaatacagcacgatgaagctgacatcaagataaatcgagccgagcggcaatggacgaatatagcgacgtagccagcgcagagggggttcggtaatggaatacacaatgttgatcagctgggccaccacaccacgtggataccagtttcgtgcgagaacggagacccagtccagaatcatgcgcacgaacagaaccgtgatatacgcgttgatgagccatgcaagaatgcggccgatcagagagaacactaaggaaagcatgctgacagactaacaaccgcgcatgaaaagtttgctcggagcgcaataagaatcggccgactccttgctgggagtcggccgaataccgatataacgtcgaatgcgaaaactactgaaccggtcagtcagcgaacaaatcgtgtgccgaggttggttttgtcggctcttcgaccttgatgttcacctgcgccgggctcaacaggaacacgcgcggagtgacacgctcgagggaaccacgcacgccgaacaccacgccggcggagaagtccacaatgcgatatgccacggcttcggccacaccggtgagattcagtacgaccggaacaccgtcacgcaatgcgcgaccgaccagctgagcatcctcatatgacttcggatggatggtggtgattctgttcacgcgaccaccggggaacggcttggtagtcgacgatgcggcaggcgcggtggttgatgccagcggcgtgaccgtatggtcggaatcgaatgcggacttcggagccggcttctgctcctcgtcctcttcgatgtagtcgtcctcatcgtccacaacgtcgctcatgcccagataggacatcgcgtttttcatgaacccagccatggatcagtcctttcagcgcaggaaatcaggaatgtcgagatcgccggcgggatcgttcacggcgatgttcggatgcgaggtagtcggatcgtcaaagggcagggatgccgggtctgcggtcgtcggggtgaattccggacgcggagtggccacgggctgggcggccggagcggcggcgggctgctgcgtttgcgtggcagccggctgggcggccggtacggcaattgccggagcggcggcagagggatcctgcggtgtaaccggatcgaaaccggccgcgatgacggtaacacgcacttcgtcgccataggcatcgtccagagcaagaccccagatgatctgggcctcggggtgaatggccttgcgtacaagctcggtggcggcggaagcttcctgcagcttcagatcggtcgggccggcaatgttgatcaacgcgccatgggcgccctcgatgctctcctcgagcagcggggagctgatggcgatttcggcggcctgggtggcgcggtcttcgccccgcgcggaaccaatgccgaacagcgcagtaccagcgccacgaagaatggagttcacgtcggagaaatcgacgtgaatgtaggaattcatcgaaatgaggtcggtgatgccctgcacgccggcgaggagtgcggtatcggccgtcttgaaggcttcgatgatgccgatggaacggtcggaaagctcaagcaggcgatcgttcgggatgacgatcagcgcgtcgacttccttgcgcaggttgtcgatgccgtattcggcggaagcggaacgctgaggaccttcgaagctgaacggacgagtgacaaccgcgatggtgagagcaccttgctgatgagccgcacgagcgacgatcgggctggcgccggtaccggtgccaccaccctcaccgcaggtgacgaacaccatgtcggcacccttcagggattcctcgatatcagactgatgatcctgtgcggccttagcacccttctccgggtccgcgccagcgccgagtccgcggctggactgatcggacagggagattttcacgtcggcgtcggagcgcagaagatccttcgcatcggtatttaccgccacaaattcaacattctgcagtccctcggcaatcatgcgattgacggcattaccgccggcaccgccgacgccaacaaccttgatgttggtcttgtcgttgaactcattctgcgcgatctcgctcacgtttggctcctgtcacttcacggttacacccaagagtagcgcaaacaggctactcttggagggaaattcacgcgcagaatggcgcgtgttgcgtgtattttcagtattttttcagtaactggcgtccattgggtcgtcaccgaagagcgcctcacgctcttcgtgggtggtggtacgcgattccaaccacccatacggcaagtgcaccttcttggcgaaacgcacgcggccgcgcggtttgtcgaccacgcgtggcgggtattcgatggtcgggtcgagcttgccgatctcgcggtccacatcggccaggctctcgcattccataaaggccttgcgggtggacccacccaccgggaaccctttcagataccaggcgatgtgcttgcgcagatcgtggacggccatcatctcatcgccctcatagaactcggtaagcagctcggcatgacggtgaatcacccggcagacctcgcccagattcgggttgagccgttcgggattgccctcgaaggcgtttttgatgttggcgaacagccacggccggccctgacatccgcggccgatggccacgccgtcgcagccggtctcgcgcaccatttcgagcgcgtcctcggcaccccagatatcgccattgccgaataccggaatgttgaggtgttccttgagctcgccgatgcgggaccagtcggaatgaccgccatagtattcggcggtggtgcgggcatgcagggttacggccttgcagccctcctcctgcgcgatgtgtccggcttcgaggaaggtctcatggttatggtcgatgccgacgcggatcttcgaggtgacggggatgcccgccggctcgcatacggcgaccacgcgctggatgagctcggtgaagatgtcggttttccatggcagggccgagcctcccccgcgacgggtgaccttgggtaccgggcaaccgaagttcaggtccacatggtcggccatgttgccgtcgaccacgattttcgccgcctgttcggtgatggacggattcacgccatacaactgcagcgaacgaattttttcgcttttggcgaaatggcagagacgcagggctttcgggttgcgcgccacgagggcccgcgcggtgatcatctcggccacgtaaagaccatcgggaccgtattcctcgcagatcacgcggaacggccagttggtcacgcccgccatcggcgaaagcaccaccggggtcggcacggtaatgttgccgagctgcacgggggcgatgtataccggagtctcgggccgtgccggcgcgtccgtacgcgggtcgagattgttggtctcgtgagtagcggtgatggtggtttcggtttcagattctgccatgtggttcctgttctgaaatagttttggctcccctctttgagggggagctgccgccgtaggcgactgaggggagtcgcctcagcaagagccccctcagtccacttcgtagacagctcccctcatagaggggagcctctatacagacccgtctttagtacagaccgccggcttcctgaacgccggactcaggccaagcctcgccgcccatttccacgggcttcaggggcacgcgggtgcgcttctcgccgatgcgggcggccacgtaatcggccaccttgtcaagagcgacgcgctcctgggccatggtgtcacgctcacggatggtcacagcgtggtcctcgagggtgtcgaagtccacggtgatgcacagcggggtgccgatctcgtcctgacgacggtaacgacgaccgatggcaccggactcgtcgtagtcgatcatccattcgttgaagcgcaggtcgtcggccaggttctgggccacggtctgcagttcaggcttcttgctcagcggcagcacggcggccttgaccggggccagacgcgggtcgagacgcagcacggtgcgcttgtcgacgccgcccttggtgttcggggcctcgtccacatcgtaggcgtccacgaggaagcacatcagggaacgggtcagaccggcggccggttcgatgacgtacggcacgtacttctcgccggtggcctggttgaagtagctcaggtcttcgccggagtgcttggagtgcgcgctcaaatcgtaatcggtacggttggcgatgccttcgagctcgccccagtcggaaccttggaagccgaacttgtattcgatgtccacggtgcgcttggagtagtgggagagcttctccttcgggtgctcgtagtggcgcaggttctctggcttgacgccgaggtcgatgtaccagcgggtgcgggcgtcgatccagtactggtgccattcctcgtcggtgccgggctcaacgaagaactccatctccatctgctcgaactcgcgggtgcggaagatgaagttgcccggggtgatctcgttacggaaggacttacccatgttggcgatgccgaacggcggcttggaacgggaggaggtcatcacgttcttgaagtcgacgaagatgccctgtgcagtctccggacgcaggtagtgcaggctgttctcgtcctcgaccgggccgaggtgggtgcgcagcatcatgttgaagtcgcgcggttcggtccactggccacgggtgccgcagttcgggcagacgatgtccttcatgccgttttccggcatcttgtcgccgtgcttctcggcgtaggattcctcgagcttgtcggcgcggttgcgcttgtggcagttgaggcactcgacgagcggatcgttgaacacgctcacgtggccggacgccacccacacttcgggcggcagaatgatggaggtgtcgacaccgacgacatcaggacgggtgacgaccatggagcgccaccattcacgcttgatattgtccttgagagcgacgccgagggggccgtaatcccaagcggaacgggtgccgccgtaaatttcgccggcggggaacacgaagccgcgacgcttcgcaagggatacgacttcatcgagtttggactgagccacaatgcaccttctggtttgaacggtttggggtctaataacaaccgcttcaggatagccgtatatggtgacaggtcaggcggcattgtccggtatatgttccgcgtctcacgagcggccgttcgcagcgattcctatatcgcaacacctccatattgttcctgttgttttatccttcccgaatttgtaccactgacatcgcgtcagcgtcacaaatccgggagatattgctcggcggaggcgtctatatatcacgaatggacgggacgcgccagacctgacgacacgtatcaaacaaatccgtcacgataatgtccatgttggcgcatagcgtcggcactgtagtgcagggggactcgcatgtggttcgcgagttgagaaaggcctgagcctgacccttagaacctgttggttaagaccatcgtagggagcagtaaatgagcaatagtgcatcatcgtttgccgatgtgtccagcggttgtaccgccgggactccggttccagccgattcacccatccgcgacaatatcgccgatgccgttcgccgcgtacgcgagacgactccattggcccagtcattcaccaattttgtgaccatcaatttggtcgccaacgcgcaactggcggccggcggcactgcggccatgagtttcctgccggacgacgtgatcgaaaccgcgaaaatcgcgggcgcgaactacatcaacgtgggcacgctgctgccgttctataaggatgcgctgcccgaaatcgcccagcgactcaactacttggacaagccgtgggtgctcgacccggtggccgccggcatcggccacacccgcaccgccattcttcagaccttcaaggccgctcccccgaccatgattcgcgcgaacgcctccgaggtaatcgcgctggcgaacatgtgggggctcaataccgaaaccgtgggggacgcttccgagcaccgccccgccggagtggaatccgtcgacgacgtggagtccgcaaccggtgcggcggtggcgctggcacagtatctgaccgaacagcacgccaagcattcctcccatgacgcttccacccgctgtgcagtggctgtgtccggcatcgccgatctggtgaccgacggcgaaaccgtgtaccgactgccgggcggcagcgcgatgatgaccaagatcatcggtgcaggctgctcgctgggcggcgtggctgccacatatctggcggtttccgatccgttgaccgccgctctgtccgcatctctgctgtacaaccgcgcggcagagatagccgatacgacttcgcacgggccgggctcgttccaggtcgcgttccttgacgcgctgtggaatgttaccgccgaacaggtggcggaatccgagattttggtgcagtagtttcagttccctctgatgagggagctcataacagtttttcccaataagacttccacaagaaacaacaaaggtaggaataataatgagtaatgaatacccatacgcctccatgcgagacaacttcgacttgtccgcgtacttcgtggtggggccggaggactgcaaaggccgtccgctgaccgacgtggtggatcaggctctgcgcggcggcgcaaccttcatccaactgcgcgccaaggaggccgatgcctctgagctgaccgacatggcccgcgacatcgcgcagatcatcgaggacaatgagaagtccgattccgtggcctttgtgatcgacgaccgtgccgacgtggtgtggcaggcccgccgcaagggcatcaaggtggacggtgtgcatatcggccagaccgacatggagccgcgagaagcccgcgccctgctcggcgacgaggccatcgtgggtctgtcggctgagaccgaaagcctcgttcagctcatcaacgagctgcccgacggctgcatcgactacattggcgccggccctctgcacgtctccaccaccaagcccgaggcttccgtgggcggcaacgacggctccggcaagacactggacgccgcccagatcaacaccatctgcgctgccagcgaattcccggtggtcgtgggcggcggcgtgaccgcagccgatatggccatgctcgccggcaccaaggccgccggctggttcgcggtctccgccatcgcgggtgccgagaacccggaagaggccgcgcgcaccatggtcgaaggctggaaggccgtccgcggcgacaagaagcacggctacgcgccgcgcgtcgtagcccacacccccgctgctgatactcaggctgctcaggaaggggccgcaaagcctggctccgaggccactgagaagaagttcaccaacgccaaggacgccaaggatgcccagaagctcgccaagcagcagcgcgtggacatcgccgcccgtggttccaagcagcgcgacaaggcgcacatccgcaagaccaagtccgtaccgttcacctatcagtatggttcctacgacctggaagtgccgtacaccgaaatcaagctgagcgacacgcccggcgtgggcccgaacccgccgttccacgactacaacaccgaaggccccaagtgcgacccgaaggaaggtttgaagcccctgcgtctcgactggatccgcgaccgcggcgacatcgaagactacgagggccgccgccgcaaccttgaggatgatggtaagcgcgccatcaagcgcggccgcgccaccaaggaatggcgtggacgcaagcatgagccgatgcgcgccaaggaccacccgatcacccagatgtggtacgcccgccacggcatcatcaccccggagatgcagtacgtggccacccgagagaactgtgatgtggagctcgtgcgctccgagctggccgccggccgcgcggtgatgccctgcaacatcaaccaccccgaggccgagccgatgattatcggatccgccttcctgaccaagctcaacgccaacatgggcaactcggccgtcacctcctccatcgacgaggaagtggagaagctgacgtgggccaccaagtggggcgccgataccgtgatggacctgtccaccggtaacgacatccacaccacccgtgagtggattcttcgcaactcccccgtgccgatcggcaccgtgccgatgtaccaggccctcgaaaaggtcgaggatgatgcctccaagctgagctgggagctgttccgcgacaccgtgatcgaacagtgcgagcagggtgtggattacatgaccatccacgccggtgtgctgctgcgttacgtgccgctgaccgccaaccgcgtgaccggcatcgtctcccgcggtggctccatcatggccgactggtgcctgcgccaccaccaggagagcttcctgtacacgcacttcgacgagctgtgcgacatcttcgccaagtacgacgtggcgttctctctgggcgatggcctgcgccccggctccctggccgacgcgaacgacgccgcgcagctttccgagctcatgactctgggcgagctgaccgagcgcgcctgggccaaggacgtgcaggtgatgatcgagggcccgggccacgtgccgttcgacaccgtgcgtatgaacatcgagctggagaaggccgtgtgcaagggcgccccgttctacaccctcggaccgctgaccaccgataccgctccgggttacgaccacatcacctccgccatcggcgccaccgagatcggtcgttacggcaccgctatgctgtgctacgtgaccccgaaggaacacctcggcctgccgaacaaggatgatgtgaagcagggcgtgatcgcctacaagatcgcctgccacgccgcagacatcgccaagcaccacccgcacgcgatggatcgtgacaatgcgatttccaaggctcgcttcgagttccgttggctcgaccagttcaatctgtcctacgatccggacaccgccatcgccttccacgatgacaccctgcccgccgagccggccaagatggcgcacttctgctcgatgtgcggcccgaagttctgctcgatggccatctcccagaacatccgcaaggcattcggtggcgaggccgctcagcagcaaatcgtgaaggaggctgctgctggcatcgactccgaggcactggctaaggccaaggccaatgtcgataacgacgtggtgtccgccaacgtgctcagccccgaagaaatcctcgccggcatggatgcgatgagcgaaaagtacaccgcccaaggcggcaagctctactccaccgcccaggagtaaacctctctggctcccctctctgaggggagccaattattatgcccggtggtgtcttaattcgggacgacgctcgactcgctcgaaggcggtgacgaggtcggcagcacggatcgcgccgcggcggtccttggcggccaccagagcggcctcggtccagatggcgcacacttcggcgccgctccagccttcggtccgctgtgcgatatccgccaacggcagttcgccctcgattgacaacgaacgggcctgcacctgcagaatgcccaaacggtcgcgctcagacggcatcgggaaaggaatctgccagtcgaaacggcccggacgcaacaaagcgggatccacgtcctcaatacgattggtcgcagcgaccaccacaacattgcccttggactcgaaaccatccatcaacgtcagcaactgcgccaccaagcgcttgccgacgccattggtatcgttctcgcgcgaggacgcaatcgaatcgatctcatcaaagaagatgatggcgcgcttgtccgcctgcgcggcggcgaaaatcatgcgcagcgtttcctcactatcgcccacatacttgctcacgatggtcgggccggacaccagatagaactgcgcgtccgccacattggcgatgatgcgggccagatgcgttttgccggtgcccggagcaccggtgaagatcacgcccttgatgggcttggcaccgatcgcacgcatctgcgcactgttgcccagctgcgtttcgataagctccttggcgcgcgtgatcacctgctcataaccgccgaacgaatcgaaggtaagcgacggatcgctgcccggcgtgatgcggtactgcttgatgtcgtcatcgtgatcggattcgcctgggcggatggccgtgggccacagcactcgttcgatgccgaacaggtcggtgaactgcacggtgttgccgggcatgattgaagtcgggtaatcgccttcaagcagttcgaggccgtcggaagtctccaggaccacgccttcgttgagcgcacggcgcacgatgcccacacggggcttcaacggccacacatcatgcggcactttacgatagaaatccgtgccgacgagcaacacgtcgcccacatcgaacacctcctgacgcggaaatgtgagctgtgtggtgtgcccattaggcattacgccaaaatatgcggtgcgttcatcgtcaaaaccggtgatgcgtaccaagacgccgtcacggcgcagtacatcgttatcagccatgtcccctcccgaacatttcatgaatcaatcgcaatcagcaaaccctcccatctcaccacaggagcggcaaaacatcaaggaaaaccgctccgaaaaacatcatgggccccacttagaatgaacactatggcacagattgcaacatctacacttcccgctgttctcgcgatctccggctccgactcgtccggtggtgccggcatgcaggccgatctgaagaccatgctggcttgcggcgtgttcggcatgagcgccatcaccgcgctcaccgcacagaacaccaccggcgtgcgttccattcaggacaccaaaccggacattctcgccgaccagatcaacatggtgtttgaggatattccgccggtcgcggtgaaaatcggcatggtgtctgccactgacatcatcgacgtcattgctgaacgactcaccttccatcacgccacgaacatcgtgctcgacccggttatggtggccacttccggtgccaagctcatcagtgacgatgccattgcggccttgaccggcaagctgttcccgatggctacggtcgtgactccgaacattcccgaggccgaagtactgaccgatacgctgattcgcgatcaggaggatatggaggccgccgcccaccgcatcgtggagcgttacggctgtgccgcgctggtcaagggtggtcatggcaccgaggatgccaacgatgtgcttgccgagacggatggaaccgtgacctggtttgatggcgcgcgtatcaagaatccgaacacgcacggcaccggatgcacgctgagctccgccatcgcctcgtatctggcgcttggcgacacgctgtccaaagccatcaagcatgcgaagaagtatctgaccggtgcgctgaagacccagctgaatctcggccacggctccggcccgatggatcatttctggaagtatcgctgacataagtgtggctgttaagctccccttgccaggggagcttaacactactgaaaaaggagaatcatggttcttgaccgtaatgccgttactcaggaagtgccgatcgacccggaaaccggcaaaccgtacctcaacaccgtggcagccatccaggtgtcggccaatggcgtgggctccgaggtttcaccatacgtggctcaggccgtcgaagtgattcgcgaatccgccctgccgcaggaaaccaacgccctgttcaccaacgtggaaggcaatctggacgacgtgctcaaggtggccggtgaggccgccaagaagctcgccgagcagggctaccgcacttctctggtgctgcacatggatatccgtcccggcttcaccggccagctgaccgaaaagcccaagctggtggatgagatcctcgccgacaagcaggcgaaatagcaaagcatcgcttccaccagcaagggcatgctttgttattacacgtttcatggggcggtaactcacccatagggcggtaaatatctcatggggcggtaaaaccctcatggggcggtaggcgaaaacggctctattctgcggaaaggcaaaatccgctaaccgccccatgggccaaataccgccccatgagtgttttaccgccccatgggaatcacggttttgccttctttcaacggggtaagagcgtaagtggggcatatataggagcgttacaaactctgttatcgttcacaatgtgaccgcaacgcggcgtgccacaagatcgaacctatagttaagccccatgtagtgagctatctcacaacgattggctcgctacgtggaattcaagacttggactgcaaacgtcgttcatcccacacaatgggagggcgaacggaacacgcagtccaatcaagagttcgctcgccgcaacatcattgagcagttgcacgcgggcaggtttgcaagaagagggctcaaatatgactgctgctgaacagcagatttccggcaatcccgcggctatggaaagcgcacaagcacgtaccaccgtgacggatcaagccaaggttcaggatattatctcgcgcgtggatcgcgcacatgaaaccccgatgttccatcgcatcgtggcgctggtcgccgctggcatgctgatggacagcatcgacgtatatattggcagcgccgttgcctccagcgcgttggccacacactggtccaccgttgcgcaaaattccacctttatgtccgcaggcttcctgggtctgctggtcggttcgctgctggccggcttcgtcggtgacctgaagggccgccgcgtggcttaccaaatcaacctgctgctgtttggcggcttcaccttcctcggcgcattcgccccgaacatggccgtgctgtccctgtgccgtctgggtgccggcctgggcctcggcgctgaaatcgtcaccggcttcgccatggtcaacgagttcgcaccgatgaaccgccgtggccactggtgcgcgattgtctcgctcgtggccaactgcggtgtgccgatcgctatgctgctgtgtgcatggatcatcccccgctggtcctggcgtccgctgttcgtggccatcggtctgggggccgccatcatctggtggctgcgccgcgacatccccgaatccccgcgttggctcgccgtgcacggccgttacgatgaggccgacgccatcgtcaagcagcttgaggccaacggctccgaactgatcgacgcagccgccaaggccgacaccagcgacacccgcaacgccggcggccgttcgctcggcatctgcctgcttgtagctgtggttgctgtggccgccacgaacgtgtgctcctacgccttcacttcttgggttccgacgattctggtcaagcgtggtattaacctgtccagctcgctgctcacctccacggcgatgatgctcggtgccccggtcggctgcctgattggctctctgcttatcgaccgcatcggccgcaagcgcacgattgtgccggccttcctgttcactggcgtgttcggtttaatgtatgccttccagacctctaccgtgagcgcaattatcgttggcttcctgctcatgatgtgcctgtacgtgcttatggcttccgtggtggctgtgtacgctccggaactgttcgccaccaaggttcgcttccgttgcgtcggcttcgcgaacgccgtggccaagctgctcaatgtgttgatgcctatggtggtgggttggatgcttacctcgcttggtgccacgtccatctttgtggccatcagcgcaattgctattgcatcgatgctgattgtcggcttctttggcgcggagactgcgcagaagtcggttgggtgatcggtttcctcacagtggaataactgctgataatgtccattcggcgtcttgcgtggtgatatgcagggcgccgttttgttgttctagtaattgtcggtaacggttgagaccggtaccggtggataggtccgcactgccatccgcatccgaatccgatgacgtgcgggccgtgtcgatgcaggcgatgcggacggtgtccagtccgatgccaatcgtcattacatagcccgcttccgggtcggcatgtttggcgatgttgccgtacagttcctccagcagcccggcgatcaggccactccgaccggctgcgccatgagcaccggaaataatcgtctgaccttcaaagccaagctctgataatcggcggtcaccattgctcgcaacatcacgaatttgctcggctagcgggcaatcagcgtctgtgatgccacatgcaatgccagaagcggcatcaacggtcgaatcatgcggagtcactgcactgtgcgccgcttctcccctgccttcaataacatcaatgacctgatgcgtgcgatccaatgcgcccatagccacgctacgcagttcgcgtaattcttcttcagaaggggtcttgccatcggcaatatccttgtcgaatcgcaaaatcaggtatgccaaatcattggatacgtaatcgtgaatgtcctgagctgtgcgttcctgctgacggcggtgagccaactccgctcgagccaagctgcgttcgtgattccatcgcgccgccatgccaccaagcatgaagccaataaacaacacggccactggcatcacaccatagagggcaatcgcaccaagaatcacttgcctagtgcgatgctcggcagaagaaccgctcgattcataggcgcttccggtgaagtcgcttcccgactgccctgcgctgtcagacccactggatgaagagccaccatcagcagcgccaccatcagcaacactaccgtttagggcactactactcgccgcgccatccgcagaaccgctcatcgtgtctgagccgccatcaagccaaggaatggccacgccaccacgcgacaacatccacaccacaacggcaatgccggcaaccgccagcgccaatcgcttatcggcgtatccggcaatacccaccgccaataacacggcgagcattgcacccgacggcatccagatcggactcatgcacaacactatccaagccaccgctaccgccacgcatccggtgaccggacgaaacgccatccaccccacaatggcaacgaatatgaactccgcaaggcagtccgccgccgagacactgtcagcagccaagcccgccatggtttccatcgtgcatatcaaggcaacaaccagtatggcaatcaacagccatgcattgcgaacaccgctatccagctcggccaatcggtgtcgtaacgctttcatagcagttcctttcctaccatccatgccgttgcacataccgcccatgccaactcttaaatctcatgccgtttcacgcagattgatatggcatgagcgcgactgcgagcgccgagtttggcgagtgcgcggcgttcaaaagtcgccacagtggccacgctgatgcccaatcgctcggcgatttccttggtggtcgacccatccgcatacatacgcagggtgtcgcgttctttgccggaaagcgcgccacggtgcgcgtatgacgtatcttcgagcaccgcgtaggcggttgcggcatccatgaaggacagcgaattaccgctcccctcatctcccagtaccagctcattggtcgacaatccttgggctgcattgcgaatagcgagcgcaatgccgttcaaatcggttttaccaaccaaggcctgcgccccgcagcgagccgcctcgtcgtgaaatgacgcgagcgcgtatgaggtgacacccaccagcccaacctcgggtgttttggtacgaatcgcacgacagacttcggtaccgggcacgtcgcccatagacatatccgtaaccagcacgtcaggccgcttggtggggctcaggcatcggctgatggccacggcacccaaatcgcaggtccatatcacggcaaaatcgctggacatgcgctcgattagcgcgccgaacactttcagcgcatacgggtcattgtccacaatgccgatgcgtatgttgcggttgcgcgcttctcccattacattcaccccttcagtgtgcccgacgccgaactgctccgtcctgacatgtcatggtcactatgacaactatcattccacatttcctgcgcgatttacgatggaatcatcatcaatccttgacaaggcggtaaaggaggactgcaatgaaccgtgcacaagcactcagcaagctcaacaggagcgatatgcgcaatgccgccgccgagcgcgggacgcaacgaatattcgcgtggaaccgcgcgcattggattggcatggttgtactgatagcggtgttgttgctgctgcagtggagctcatcaatgtatctcatgcccgacgaggtccttgacagggctgccaaaaacctgttcgtatggttccccggtatggttctgcactggccattggtgttgggaatcaccaacctgatactcggttcgatacgatccggcagtctgtctttcccattggcgagcgcaatcatcggaccgctggcattcggctgtaccaatcttcgcttacggccggggttcccataccgttcctgggctcagtggtggaagctaatgcacgctgaaagcggccatcagctattggttcattcgttgatcggctcggccatgctgttgatctgttatacggccgttgcgttcatctgctatgcaatcggacgctacggtctgcgcgaattgtttgtggatccgaatccgcagacggcgagcggacgactgctcacatggattcgtcaggatgcgattcgcttcggctgctggctggcgacggcaatcatgtacggcttgctattggcgctgaccttacggggcggcatggctgcgatggccgccgcgttgctaatcaattttgtgattccgcccgccttgctggtcatcaacggcatctacgcgctacgcccggcctcactgacgtatccgtggaaaagcctgctgttcccgttggcgtgcacactggtacctgcgccgatgctcatggcgctcatcacggtgtatgaagacacgtgcccgataggaagtacctgcacgctgatcggcgaccgatacctctcctggggctcgatggatcaggtcttgcatttcgtcatcgtgttcgccgtggcgagcttcctcggattcggcgtggtgtgggccgtgcggtggattgtggctcgtcgcacaaaataagagagaccaaaatatactggaatcaggggcttcgtgcaatgatgcacgagccgatccaagcaaaggggctgaccatgagcgagaaactgatggaacagtaccggttgcgcaaacaacgcaaacgccgtaacgcttgtatcgccgccatcgtgacagtagtgcttgtccttgccgtcgccggcggcgtatggtggacggccggcgatggcagcgcactggttcgcaatatgttcaagccgaaggccacgcctgccacacagccggtagtcgacagcaccgcagccttcgcctaccgcaccgcaccggaattcctggcgatgggagccggcgaccgagacaccggcaatgtgaactactcccctgcttcgatgtggatggcgttggccatcgccgcgcagggcgccaatggcacgacccgctcgcaactgaatgagctgctgggctccggttcgctggccgacagcgactaccaatcgctgctgagttcgatcaacgggcaatattcgggggcgaaatccgagatgagcgccgcgaactcgctgtggatcgataacgactcctctcttgccagcgatgaccaatccaccgtcaagaagatattcgaggccgaagtcaccacgctaccgttcgacgatcaggccgccgccaagatgtccgattggattgccaaacatacgaatggttcgctcaagccgaagatcacgctgcgtgaccgtgaagtcctgtccatcatcaacaccgtctatgcggatggccgctggaaggatccgttcgaagagcagtccaccggcgacggcaccttccacggcgaagccggagatgctcaggtgccgatgatgcaccggaccttcagccaaatgacttacagccatgatgagtacaacacttggcagcgggtggagattccattcgacaacagcggcaatctggccatcgtgctgccggccaaagggcatttcgacgagctggccggcaatgccgagaaactcggatgggcgttcggcacgtgttcgtcggcatcccctggcgaggacgcaatgggttgcaccgcggacagtttgcccggatggggcgtctccgtcaactcggccacggtgaacgtctcgctgccacgattcaccgtcgacagcatgttcgactcggaagccaccatcaaggcattcgaaaaactgggggtgaccgatgcgttcagtgcaggcgacgccgacttcaccaagatggtcgacaccgattcgcacggcgagaatctgtatatcggttcgattctgcaaggcacgcgcatcgaggtgaacgaggccggcgccaaggccatgtccttcaccaaagccggcgcagacttcactagcgcgccggtggacaacatcgagttcacggtggatcgcccattcctgtattcgtacgtcaccccggacggcataccattattcatcggtgcggtgcgcaacctcggcggagtcggtggagaacactgatactttcccgacagtccgtcaattagggtgtatcgtttgacgcatggctacgatgaaggaaatcgcgaacaaggcgggggtttccgtctctacggtgtcgctggtgctcaacggacgcgacgaggggcgcgtaaagtccgaaattgcggacaatgtgcgcgccattgccaccaagctcggctaccggtcgaatccgctggccagttcgctgcgtacaggcaagacgcacatcctcggtttcatcagtgaggaggtggccaccaccccgtacgccggcggtatgattctgggcgcgcagaccgccgcaagccagttcggctatatgctcatcaccgtgagcaccgacggtgagaacagcgagagcgaggaaatcgccgcactcaagcgatacggcaccgacggtttcctgtacgccaagatgtcgaaccgcatcacccatgcgccttcttcgctggccaagacgccactggtgttggtggatgccaccgactcgcttggcaaaatcccgagcgtggaaccggacgagttccaaatcggctacgacgccaccaccagattggttaaggccggatgcgcacgtatcgcctatgtgggttgctcggaaccgatgattgcgcaggatggtcgtttggaaggctatcaggcggcgctcagggacgcctgcctcgactatgacgatcgtctggtcgtcaatgtgctcaataacgggccggcactgaccgcagtcagcgatttgttcgacgccgagcatccggacggattcttctgcttcaacgatgcccgcgcctggtatgtgtacgaatgcgccgcacgccgaggactcacggtcggcaaggacatctccgtgatcggcgtggacaaccatcgcgtgttcgccgaaacgctggaaccgatgctcaccactgtggaactgccgcatttcgagatgggctactgggccgtggccaagctggtgtcaattatcgaaggacgctcgatggacgacgtctcacggccagcgaccaccgctcccctgccgccgatcgacgcgccgattccggcgaagatccactgcacgctgatcgaaaaggcctcggtgaagtaaccgaggcccacgcgatttctcaaggcctccgttcagcacggaggcctttttgcgtctcgaacgggtacgacacgccgatgacgtcaatcgattgacgtaaatcgattgacgtcgcatagtaattactacacaacaacttctacaaaggcacagccgcccgagcaggagcgtcacataaccaataaccaaccaagtagtaatcaaaggatgattatggcaagtgcaaccaaatccgcatggaagaatccttcctatctgcagagttccttcggcatcttcatgttcttctgctcctggggcatctggtggtccttcttctcccgctggctcaccgacccgacccacggtctgggcatgacctccgcagagcagggccagatctactccattaactccttggcaaccctggtcatcatgttcgcctatggtgccatccaagatcagctgggcatcaagcgcaagctcgtgatcttcgtctccgccatcgcagcgctcgtcggcccgttcgtacagttcgtgtatgccccgatgctgactgccggcggcaccacccgtttcatcggcgtgctcatcggctccatcgtgctctcctcaggcttcatggccggctgttccctgttcgaagcgctcaccgaacgctactcccgtaagttcggtttcgaatacggccagtcccgcgcttggggttccttcggctacgccatcgtggcactgtgcgcaggtttcctgttcaacatcaacccgctgctgaacttctgggtcggctccatctgcggccttggcatgctgtgcgtctacgctttctgggttccggccaagcaaaaggaagagctcaagaaagaagccgatccgaacgcggctccaaccaacccatccttcaaagagatgatctccgttctgaagatgccgactctgtgggtgctcatcgtcttcatgctgttcaccaacaccttctacaccgtgttcgaccagcagatgttccctaactactacgcttccctcttcccgaccaccgaaatcggcaacgccacctacggcaccctgaactccttccaagtgttcctcgagtccgccatgatgggcgtcgttccgattatcatgaagaagatcggcgttcgtaactccctgctgctcggcgcaaccgtgatgttcctgcgtatcggcctgtgcggcgtgttccacgatccggtcagtgtctccatcgtcaaactgttccactccatcgaggttccgctgttctgcctaccggcattccgctacttcaccctgcacttcgacaccaaactgtcggcaaccctgtacatggtgggcttccagatcgcttcccaaatcggccaggtgatcttctccaccccgatgggcgccctgcatgacgccatgggcgaccgtccgaccttcttcaccatctccggcatcgtgctggccgccctaatctacggcttcttcgtgatcaagaaggacgaccaggaagtcggcggtgatccattctac

SEQ ID NO: 1486 - DNA, 3279 bp, Unknown
  R257_15m  MAG No. k141_34503
gcgtggaacccggacccgttcccgcctgttggctggcgcgagcagctgggctggacgccgccgggttcgtatgccgctcgccgtctgtacagtctgtacggcatcggtgggggcggcgtcaggtccggtccggtatctggtttgccgggcctgggcatctgctgctcgtccttgttccctttcttgacaatgacaggggctttggctgaacagaatgtgggagtatgcgtagtttcttgtaggggggtctttgattgaagctcctcggcgtaatcgaccaatgacggcgtgagccgggaagagttaaggagatgggccatggcagaacatatttccgctgaagccggcgcgcttgcgaagggccagcaggccgttgcggaggcgaggcagggcatccagcaggagatcaccagggttcgtggcgagatcgagcagatgggatcgtactggtccggtgacgcggcgaccgctttcacccgcatggtgaatgcttgggatgagaagacttccagcatcaacaaccagctgaaccagctggagcagtccctgcggtccacggagcaggagcaggagcgttacgagcaggagacccagcagtccacctcgaagatcgccagcatgctgagctgattggttcggggaaacaagtatcaggcagataaggaaagcaaggaaatattatggctattggttcttttgccgtgaatccggctcaggtgcaggccctgtccgagagcattcgtaatggtgctaacggcattcagcagaagctggatgatctggacgccaaggtcagccagctgaagcggaactgggatggttccgcgcagcaggcgtctgctcaggcgcagagcaagtggaacgccgatttgaacgatgtgcgcaacattcttgcgcagatcgcttcggccactgctgagatttcgagtggctacaccgccagcgaccgcaaggccgccggtttcttcggctgattgagccgattctttgatgtgctgtgtttgccgttccattgcggtgttggtgtgggacggcaaacgcgtgtatatgcggtggatgcgttgatgtgagtggacgggggagaaccatggcggaagagattcgttacgatgccgatgaggccaatcaagtgtcagctcggttaattgctgattcaatagcagcagataatcccgttaacgcggtcttcggaggactacgggtcagcggtggcgtgaatttagagttcacgcgaggcatcaattccttcctgaagggcagtattgatgttattcgttcagatagacaaaaatataaagatcgaataaatgattacagtgagcgcctaagcaaggcgacagtttatactgccgctgttgagggagacattaccgcacagttgcagagcaaacggaatgaaattgattcattcgatgtgcatgaaatctgaatagttgctggtatttcggtatcgcgcagtgctgtgaaaagaggagtgatgactacaggcagacctttgctctccgtgtgttcgggtgtgttggcggcttccttgttgttggtgttgtcgccgtccgcgtatgcggatgatatgggtggcctgtggccggtgaaggacagtgcggttgtctcggcgcatgaggctggtctggatggttcgggtgtgaaggtcggcatgtatgatatgcaggttgtttcggattatccggggttgtcggacgcgaaggtgaagtatcaggtcggttcgttcgtcgatacggatggggaaccggctaaatgcatgttggatgacggtgatttgcaggcgacagttacgtctagtgacagcggcctgtattattctcatggtacggcgatgctcatgtggctggtgggcaatggcaaaggctgggatggaagccagggggtgcctggtctggtgccgaaggccgatgtcatgtttgtgactgctggccggggtacggttctcatgtcggcggaggattgccaaaaccttgcaaggcaacaggtcggaccggaccttatgtctatggtcgattggggtgctcgcgtcatcaacatgtccaataacgggtacatggaggcgaagagctacgagggtatgcttgatgcgttgcgtcatggcgtgattattgtttcgggtcgttcgaatgacaaggagacggatgctgttgtcaatggcagtagcacggatgtgatgaccggcgatccgagaagctgggattcgttccctggtgtgattcgcaacaacgaggtcggtcctgacgggaacatcgccggtatctcggatgtggctgatgcgaacgtgaacatcctttccccgggcgatcaggtgcttatgtcgacgtatgacaagtcacgggacatgtcggtgggtacgggtggtacgtcgactggttcggttgtgttgtctgggtatttggcgttggtggcgcagaagtggccggacgcgacgggtaatcagattctgcagtcgttggtgcgtaacacgaagggcaatgattcgggtgaggcgaagctggacccagagcataagaggggttatggccaggtcgatccgggcaggctcctgacggtggatccgacgcagtatccggatgtgaatccgattttggaggcgcaggtgaccgctgcggcgagactgtcggatgatcgttcgaagtggtatgcgcaggattgctccaagaaccccgacggcgtcggcgacgtactcgatgactcgcttcccgttccttgccaggccggtgagatcggcagggagtatgagcgtcagaaagccgcgtggaagaaggtcgagcagtgcaggtcggatggtggttcggattgcatgaggtattccgccacggcgaccgcggacgagactgaaggcaagtctgatggcaagtctgacggcaggaccgtgctgccgggtaccggcgatgggaaggatggcgtgaagtcgtccggtgtgccactgtgggtgtggtttgccgctggcggcatgggcatcatcgtcgtggtcggtggcatcgtgcttgccgtggtgctgtcgaagcgcggcaagaaaggctgttcacggcatggcggccctgcgtcgggcagggggccgttgcccccggtgaacccgtatccgcctcaggtgcctggcgctaataatggcatggtccctccaccggccgcgggccagtacgtgtcgcaacaacaggcaccacactcttcagcgtttccgcgacaaacaccgtatccggcagtaccatatccggtgcctccgcagcaggcggctcaaccgcccgtgatgccgggcaatacacaaaacccgta

SEQ ID NO: 1487 - DNA, 23828 bp, Unknown
  R257_15m  MAG No. k141_34697
gcctcgacgccgatcgtctcacattgcagacgatgaatctcgaagcatggatggcacggccctgccggtgcatggcatgatgatgcgactcgtgtcagaccgcggattcacgtcgcttttttcggtcagccgccttttcccggcgtgccagctcctcgaccgtcatggcgatcacatgaaaatcgacgtcacagccgcggagggtaagctcacgcgcgacattgagcgcgaattcggcacatgcgacctcgtctctgatgtcatcggccgttatgacgatgatcgtccatcccaattgccgaagccggtctcgttttttgcgatccctgcgccattggtgcttgtcggtccgatgatgatctccgtcgtattccaccgcgaccttgaaatgcttccatgcaatgtccaggctcattggcttgcccgaatcgaacatcgccctgtcgacatggcagttgacctccgcgtcgggcaggccgtgccggaggagtaccagtctcgccttgctctccttcggcgacagcacgttggccttgaccagttgcagtgcggttcggcaagcggtcttcccgagaaagtatggcgcattgtcgatgaactcgcgcaaggacgacaagaccagtcggggatatttgcccgatgatttcgatatggcggtgatgatggcctccgccagtatgacgagttcctccaaggacacgtgtgatgacagctgcgcccaggcatggaagggatgcaacgcgaatacattgcccttgatcggtacgcaagcatcaggataagtggcgatcagcttccatacatgcggatgcgtgccgggaatgcggcgccgcctcctgtcgggagtgctggaggtgatgtgcagcatctccgcgtccagatcgcagacctccggcaacggcacctgctgcagggcgagagcggtggtcatgccgaacagcgcattgcctccgatgcgccacgccaatgcggcgcagcgcatgatggcatcctgggcgcggtcgcgcagcgattgcgtcatgggcgttctctcgcccatcggctggagcatcacatcgttcatgaatgtcacggtagcgtattcgcgctgtcggtgtgatgaaccatggaaaaaatgtggatatgtggatgaatgcatggatatccacagctatccacatctccgacgagcccgcgcgatttctcacgatgtgggtgatacggcgattctgggaggattacgacagcgtgcattggtacgatagggcgttatgagcgagaacatcatgcgaatcattgatctgcggggcaagaacctgtcccgcgccgagttacttgccgcgatgccgcgcgccgcgatgggcacttccgaagccaccgatctggtgcggcctattcttgacgacgtcaaggaacgcggcgccgcggccctgcgagacttcgaggagaagttcgatcatgtgcgtcccgagcacctgcgcgtgccggtcgaggcgatgaccgcggcacttgagacgcttgatcccgaagtacgcgccgccatcgaggagtccgtgcgtcgcgcacgcgccgtcgccgccaaccaggtgccgaaggacttttacaccgatctggccgaaggcgcccgcgtcgccgagcgttggattccgatccagcgcgtcggtctgtacgtgcccggcggcaaggctgtctacccgtcttccgtgatcatgaacgccgtgccggcgcaggccgctggcgtcgagtcgctggccatcgccactccgcccgcacgcgacaacgcggaaggactgcccaacaagaccatcctcgccacctgcgccatcctcggcgtcgacgaggtctacgcggtcggtggcgcccaggccatcgccatgttcgcatacggagccaagggctccgagccgcaggacggcgacgtgttgtgcgacccggtcgacaagatcaccggcccgggcaacatcttcgtggccaccgccaagtcgctcgtctccgcgttcgtgggcatcgacgcggtcgccggccccaccgagatcggcatcatcgccgacaagaccgccgacccgagcctgctggccgccgacctgatcggtcaggccgagcatgacgagctcgccggctccgtgctgttcaccgattccaccgagatcgccgagaaggttcaggagtccctgaactaccgcgtgccgcgcaccgaacacgccgagcgcgtccacacgtcgctgtccggaagccagtcggccatcgtcctgaccgacagcctcgaccagtccatcgacgcggccaacgcatatgcggccgagcatctcgaaatccagactgccgacgcggacgccgtcgtgccacgcatcaagaacgcgggcgccatcttccgcggcccgtactccccggtgccgctgggcgattacatgtccggctccaaccacgtgctgcccaccggcggcaccgcccgcttcgctgcgggactcggcgtgcacacgttcatgaagcccgtcgaggtcatcgaatacgacgaggagggcctgaaggccctcgccgcgcgcatcaacgccttcgccgtctccgaggacctgcccgcccacggcgagtgtgtcctgtcgcgcttcgtcaaggatccgtacgacaaggccacgctgcgcgaacaggagaaggaagccggtctgcgctaagggctgcttgggtggtttgaccacccccagtctgccgcgcagacagcccccgccagcgggggcgatgagcggatcgaatgtgccgcgtacggatgcgaatacaacccccgtcagcgggactatagacggaaagaacagagagcaatgagtgagaacaacagcaatgcgattccggcgagcctgccgctcaggaacgatctgatcggcgaggagccgtacggcgcgccacagctcgacgtgccggtgtgcctgaacgtcaacgagaacccgtatgcgccggatccggccgtgtgcgacaccatcgccaggcgcgtgcgtgagatcgcgcccacgctcaaccgctacccggatcgcgagcatatcgaacttcgccaggcgttctccgactacctcgcccgcgaatccggcacccgtctcgacgtggacgaactgtggggcgcgaacggctccaacgagattatgctccagctgttccaggccttcggcggcccgggccgcaccgccttgggcgccgacccgacctactccatgtaccccgaatacgcgcgcgacacgttcactggctggaagctcgcccaccgcaacgccgatttcacgctgaacgtcgacagggtaatcgaggccatcgccgaggtcaagccctcgatggtgctgctcaccagcccgaacaaccccaccggcacgccgctgccgatggccgacatcgaacgcatcctcgccgcctgcgagaccgccgacgtggcgggcgcgggcgaaggcgtccacccgatcctcgtcatcgacgaggcgtacgtggagttccgcaagcccggtacgccgagcgcggtctcgctcatcaagaaccacccgaacctcgccgtcagccgcacgatgagcaaggcgttcgcattcgccggcgcacgtgtcggctatctcgccgcgagcaagggcatcatcgactgcgtgcgcatcgtgcgtatgccctaccacctgtccgccgtgacccaggccgccgcgctcgcggcgttcgaacacaccgacgagcagctgagccgcgtcgagcacctgcgtgagatccgcgaatccaccgccgaatggctgtcacgtcagacctacaagggcgagccgctcgaagtggctgagtccggttcgaacttcctgctgttcggcgggcatttcgacgaccgcgaggccatcttcgacgagctgctcaggcgcggcgtgctcatccgcgtggtcggcccggacggctggctgcgcatgtgcatgggcaccgacaaggagatggaacaattccgtaacgcgctgaccgaagcattgcgtattgtagaaagcagataacaactcccgaaacgccggcggcgcgcgaccatcaacgtcatgacccgtcgtcggcgaccgccgaccggcacactggccggcaggcaagccgggacttatcgggacatatcaggatcaaggaccaaggagcacatcatggcgcgtaccgcgcacatcgtccgcgagaccagcgaatcgcacatcgaactcagcctgaaccttgacggcaccggcaagaccgacatcgacacctccgtgccgttctacaaccatatgatgaacgcgctcggcaagcattcgctcatcgacctgacgattcatgcgcacggcgacaccgacatcgacgtgcaccacaccgtcgaggatacggccatcgtgttcggcgaggcgttgaagcaggcgctcggcgacaagcgaggcatccgccgcttcgccgacgccaccgtgccgctcgacgaggcgctcgccaaggccgtcgtcgacatttcaggccgtccgtactgcgtgtgctccggtgaacccgacggcttcgaatactgcatgatcggcggccacttcacgggctccctggtgcgccacgtcatggaatccatcgccttccacgccggcatctgcctgcacatgcaggtgctcgccggccgcgacccccaccacatcgccgaagccgaattcaaggcgctcgcgcgggcgctgcgcttcgcggtcgagccggatccgcgcatccagggcctgatccccagcacgaagggcgcactgtgatgagcggcaacgacgacaggcacggcggagacgacggtttcgacgacgacatccatttcagcgacgaggaacttgaggccgcgctggacggattcgagaaggaattccgcgattcgaacgcggctgccggcgaaccggcgaacgacgccgcggccgacagccccgcagacgatgcgggagccgcggattccggtcagacacaggaggccgacaccgcgaccgcgttcgacgacgagctgcaagggcttctgggcaacaaggcgaaggccgccgtgctgattacgcgcatcgcgtccgcccgcctgctcgccgcgttctgccagctgtcggacgtgtccgccgactgcatcggatcggaggaaggggccgtggccatcctgcgcaaccttgacggcgacgggcccgaagtcgcggcacgcgacctcaccatcgtcgtgtcgggcatgtcgctggtgctcgccgtcaaccgtgcggacaagttggaggcgaccgtctatctgcaaggcaagccggggcagacgatcgccccgccgctgctgttcacatcgacggcgccgttcgtggaggatctgctgcttggcatcaccgacgaggacggcctgatcggcaccggcatgaaagtcgaacagtccgcggatctcgaccatgaccaggccatggccgtcatcgcggaacacacgaagttcgggcgcggctcgtcgcgcatcgaataatcgggcggccggcggacgccgcccgtgcccgtgcagccaaggattttcagactgaaggagacgacatgacatcggtggtggtattcgactatggattcggcaacgtgcgttccatggtgcgtgcgctcgccaatctcggccttgacacgacactgacctccgactaccggcaggcgcttgaggcggacggcatggtcgtgcccggcgtcggcgcgttcgccgcctgcatgaccggcctgcgcgaggtgtcgggcgaccgcgtcatcctcgaccgtctgcgtgccggccgccccgtgctgggcgtgtgcgtgggcgagcagatcatgttcgagcgcggcaacgagcacgcagacaccaccgaaggacttggactgatcggcggcaccgtcgatctgctggatgccgatgtcgtgccgcacatgggatgggacacggtcgaggcgccgtccggttccgcgctgctcgaaggcgtggagaacgaacggttctacttcgtgcactcctacgcggcgatgagcgccaccgcgaaggatctgagcgccgagcaggtcgatctgggcggcgacgagcatatcacgtggtgcacgtatggccgtagcaggttcgtcgccgcctatgagcgcggcccgctgtcggtcacccagttccaccccgagaagtccgccgacgccggcaaacagctgctgcgcaactgggtcggcacgttctcgaagtagccggctgaacggcatgaccagccggcgcggccgggaaccccgactcacccggcaacgcggacgacgggccccgagcctcaacgacttcaacgattccaaaggagaacaaccatgtcactcacattgcttcccgcggtcgacgtgcgcgacggcaaggccgtgcgcctgcgccagggtgaatccggctcggagaccgactacggcagcccgcttgaagcggcccgcacgtgggccgaggccggcgccgagtggattcatctcgtcgatctggatgcggcgttcggcacggggaacaaccgcgcgcagctgcgtgagatcgtccatgagctcggcgacaaggtcaacatcgagatgtccggcggcgtacgtgacgacgactcgctgtccgccgcgctggaggccggagcggcccgcgtgaacatcggcaccgccgcgttggagaaccccgaatggaccgcctcggtcatcaagcggtacggtgaccgcgtcgccatcggacttgacgtgcgcggccacacgctcgccgcccgcggatgggtcaaggagggcggcgacctgttcgagacgatgaagttccttgactcggtcggatgctcccgctacgtcgtcaccgatgtggcacgggacggcatgatgagcggcccgaacatcgacctgctgcgcgaggtcgcggaacgcaccgatgccaaggtcaccgcttccggtggcatcagcaagctggacgacctgcgcgatatcaagatcctcgccgatttcggcgtggactcggccatcctcggcaagtcgctgtacgcccgcgcgttcacgctcaaagaggcgctcgaagtcgcccgctgaccgatacggctgtcgacaggggccgcccccgccgcccgtcaccgtcggctgggcggccggcggcccctgctcacttcttcgcgccgcttttcttcgagcaggggagctcgcccttcttgatgagcttcctgaacagggagtaatcctcctcgttctgctccgcatacgcctgggcgaacgcggctatcgcctggtcgaactcgtcggtgcccccaagatagttggcgatggccacgctgtcgccggtgcgggcatgcgcgtgcgccaggcaccatgcgcacatgcggcccagatccgacaatcccagcgcgttcagatgatcgatgtcgatcgagcccttgccgttccagaattggcgcacgtaatagtcgcgcggccggccgtcctccgccacgaaactcgcccagccgagcagcacgtcggcggtggattggatcagcttctgcccctgcaccacacgctcgccatgcgtcacatacggcgagcggccgacgaaccgttcaaagaccgactcgttggcctccttcatctgcagcatcagcgggtcgtcaagcccccgtccggtgagaatcgacacccaggcgcgggttccgaccgagccgacgcccacgaccttgcgggcggtgtcatggtaccggtaacggttcagcacataacgccggtcctcgtacaggctttgccggtagctgtcatacagtgcgtccagcctctcccgcagcaccccgagatccgcatagtcctgcagctcgctgatcggcaccagctccggcggcttcgagcggaaccgcagccgcttctcgccgctgtcaagataggtgagcttcgcggccgcatggtcggaatcacgcaccgacgcgcgcagcgcggcgtcgcgcaacgtgcggttgcgcttgccgttcaccgtgctttcgtaatggtcgagcgccgcctccacgtcgagatggtcgtaccagacgtcgaggaagtccatctgcgagaactggcggatatggtcgcggtacgagtgcacgcagcgtgcgaccgcgttgcgccggtccttctccttgatgccgttcgcccgcccgcagatctccacggacaccgcgagccgcttcacgtcccattcccacggtcccgtggccgtctcgtcgaagtcgttgatgtcgaacacgagccggtcgctgggggagcggaacatgccgaaattgccgatatgcgcgtcgccgaccgcctggacggggatgccggtggtcggcgtgtgcgcgaggtcgttcgccatgatgagcgcggtgccgcggtagaacgtgaacgcggaatcgctcatgcggtagtacctcagcgggatcagatccggcacccgctgcgccgactgttcctccaaaagcccgatcacgtcgcgccggtgcgacacgatcttccagtcggcgtggctctccaacggtgtggtcttgcgcagcgcgatgccggccttggcctgccccagcggcgtgtcggccatgtgccatgacatatcgatgatgggatggttctcgctcatggctccacgataacgccgacgcgggagcgacattccggcgatgccccggcgtgtccgatggcatgttaacgagtctcgtaacacggacgtgaaaccatgagggattatggataagcagcaagagtttgccctgcgcacggtcgaggaacgcgacgtgcgctttattcggttgtggttcactgacgtgctgggcacgttgaaatccgtggccatcgcgcccgccgagttggaggcggcgttcgaggaggggcttggcttcgacggttccgccatcgagggaatgacgcgcgtgtcggaggacgacatgatcgtgcagcccgacccgtccacgttccagatactgccgtggcgtggcggcccgcagggtaccgctcgcatgttctgcgacattctcacgcccgacggcgagccgtccctgggtgacccgcgccacgtgctcaagcgtgcgctcgccaaggcgaaggagaagggtttcacgttctacgtgcacccggagattgagttctatctgttcgagaaccagaccgactggtcgaaggcgccgactccaatcgacgagggcggctatttcgaccatgtgccgcgcagcccgggcatggacttccgccgcgccaccgtcaacatgctggagcagatgggcatctccgtcgaatactcgcaccatgaggcgggtcccggccagaacgagatcgacctgcggtatgccgacgcgctgaccacggccgacaacatcatgacgttccgcacggtcgtcaaggaaatctcgctggagcgcggcatccacgccagcttcatgcccaagccgctcgccgacgcgcccggttccggcatgcacacgcacctgagcctgttcgagggtgattccaacgcgttctacgaggccggccaggagttcaacatgtccctgaccgcccgacagttcgccgcgggcatcctgcatcatgcggcggagatctgcgcggtcaccgaccagttcgtgaactcgtacaagcgactgtggggtggtgctgaggcgccgagctacatctgctggggtcacaacaaccggtccgcgttgctgcgcatcccgcagtacaagcccggcaagggcaactccgcgcgtatggagttccgtggactcgacccggtggcgaacccgtatctggcgtattcggtgctgctcgccgccggtctggacggcatcgaacagcagatgacgctgggcgagccgaccagcgacgatgtgtgggagctgaccgacgccgaacgtcaggcgatgggcatcgagccgctgccggattcgctggacgccgcactgaagatcatggagaagtccgatttcgtcgcggacgtgctcggcgagcatgcgttcgagtatttcctgcgcaacaagcatcaggaatgggacgaataccgtggccaggtcacgccgtacgagttgaagaagtacctgcccaagctctgacgtgacgtgaaaccggccgactaccggcaaacaagaaacggtgtggggatgatggctgctgatccggccatcatccccacaccgtttttgcttgccgaaccgaccgccgcaggatgccgctgcggtcactcgaccttgtgcggtgtcatcttcttggtgactatgtcgttgctcccgtaggtgctggacaggcgaaccgtgaccggctggcccgggtcttcgaccacataggagaccgtcgccttggccaggacccccggctggacggagcggctgaaactcatgttctcgtacccttgcgggagcggcggctcggtgtagtagttcatttccagctgggagccgtcctgcgtgacggtgagcttcgcggcgttggacaatggctcattggcctcggattggttcacccatgtgatggtgacgatgatggtgtgacggccctgatagtcgtcggggcccgtcgtcacgtcgtcgatggagacgagggcgtccccgctgtagctgctgatccgcttcatcttgcgcttctccgcctcggtggctttcggggcgggagcgatgtcgtcaggctggacctgctcgtattgcgtgccgctggtcggtgccttgaacgcggacacgatgccctcatggtagcgggtcgcctgattggctacgacgtacaggtcgcccgtcgcgtcgttcagctggtacgcgatggtcgcgtcgctttcctcgcccttggcgatcttgatgtcgtccgactgcgtcttgtacccttcgatggatgagccgccgcggctgtgcaggtaggttttgttcaggccgatgccgctctgatacacctgcaggtccatggcgagttccccgaaggtcgtattggcatcgccggtgttcttccaatggtaggtgatgatcgccgtcttgtgcccgtcgtgatccgtggggccggtggtcgccttggctatggtgaccgtggccttccggttgccgaacgatgtcgtctcgccggttttcacgcgggtcggcttgttgtcttgggagggcgacttgaatgagtacgatgagtcgtccgagtcgctgctgccgcctgcgctgatgatatgatccaccaggtttgatcccagcgcgaacacgattatggcgatgacggcaacccaggatcggcgctggcgcttcgtggctccgccgggtttgcggtcgctcttggactgtacgtgtccgtagccgccgcgatatggatggccgttgtaggacggattgaggggagcgtcgcccgctccggtccgtgccggcccgcctggttcgtctgcggggctcggggcggccggcttgcctgccggtcggcgacgatcggcatcggggctgattcggccgcttttgggctgctgatacgccggctcgtcgacctgcgaggtctgggaatcgatgctgatgtacgccggcgaatcgtccacatcgaacggcgatacataatcgtcgtcatgatgcctgctgaacaatcccatgcctgttcccttgtctctcggccgcgcacggtgatgcatgtcttctcccattgtaggcggcgtgccggtgcagcgcgagcgccggaaggtgaagaccgtcgaaatcgccggtgaatgatgggccgtgcgtcttcggcgcgtctcctgcgtgtctcggggccttgcgcggcaggaggtgccgctaatgtatgttccgtctggaagaagagaaaaacagcaggggtacggtcatgtccggttccgccatccgtgggcggcaggggagcgaacgcttcttcacgctgccggccgtcacgctgatcgcgtccagtttcgtgctgggcatgagcgatttcgtggtcgtgggcatcctgcccgacatcgcccacgggttgcgggtctccgaggtcacggtcggcaatctggtgtcgctgttcgcgttcgtgtatgcgcccatgaccccgctcggctcggcgctgtcgtcacgtttcccgcggttcgccacccatctgacgttgatcggcgtgttcctcgccggcaacatcctgtgcgcgctcgcgccgaattacgcggtgctggtcgtcgcccgcatcatgatcgccgcggtgtccggcacgctggtcgccatcgcgatgacgtatgcgcccgacgtgacggtggaacggtaccggaccaagttcatcgcatgggtgttctccggtttctccatcgcctcggtggtgggcgtgacggtcggcacatgggtggcgaacatgttcggctggcgctgggcgttccatctggtgatcgcgatgacggtcgtggtgatcgtgctgatcatagcggtgctgccgcattacagccacatggcgaaggtcggttttctgccactccaggcggaaagattaacgcctaccttgccgccatcattgttcacgccatcgaacgtgacccaataacgcttacaatattcggaatcgacatattccgtgaaagtcttaatcttacgcatttcgatgctccattccagccctcgctagaatgagagggcttataaatccgtttgttttaagcaaaaccccaagagtgttgcaacactcttggggtattttcatcagacgagaaacccgccgaacgatatgcaagtaaacaaaatcccgtccactcgaaagcagccgggacatgtcacgagaaaatgccgggatgcagccgtaacagctctctagccacattgtcagcatcacgcacgctcaaccgtccgtatggcttggaacgtagaaaagccaaacgggcaagctccgtaacttgggaacaacgcaccacggactcacgacgcaaaccagccgccgcccaatcgagcaacaacacgtctccgtcatcatcatgccatgttttgctcgtcaccttcgtggcaaccgccacacacatgacggcatcccaagatatgaccagcaccggccgcggtttggattgacttggatcatcgaaatacggcatatccgcataccatatttcgaaccgcttcggctggatgtcattcgtcgccatcggcaaacactccacgcgcatacaagcctacgccgtcgctacggtaagccaccggtttgattatccccggagcctctcggttgacgtgcaacatcggatagccctccgaatcacgctcgaagccgtcgctcatgtcgcccatgtcggcaacgccggccacataagcgctgagcatatcccggaggttgccgccgtgtgccttggcgactctctcggcttccgcatagcgcggcaatgattcaatagctgtcatgattacacctccttacttagcgccgattatatcggccgaacattaacatttcgtaggctaccgcgcccgtaaagagcgccgatagccccagcggattacattcaatccgccgaagtttcagaatcagaatcaagtagcttacgtggattagcaacgcgcaaagcatcacacaagcgcaaggcagtatcaagcgacgcgtcacgtatgtttctctcgccagtctcaaacttagcgatagcgttgtgatgcacgccgctgcgttcttctaactcacgttgcgttaatccgcgtttcattcttaattctttcaaactcatggcccttgtttacgctcctttcctttaagggccatcgtagaccactcagacagcgcgggacaattccatgccggtaatcgcaccacgttagcgactctacgagggttcgattcccgaggtttgctctaggtttcatgggagtggctgcctgtgggaccgatggcattgctcgaatatccctgctgggacatgtgggggataagaggctccctgccttaatcaggcggttgatgaccgaaggggaggcgcggccaaacgggtgcacatgtaatgcatgttccttgccgttgatggtaaagcccattccaccatgccgaacgtctttccgacttggacgttaagtaagtcgggtatatggcattggtgcaactggtagcatggcggtctccaaaaccgtcgatgttggttcgagcccaacatgccgtgcttacttctcttacgggttgtgggagaaggattcggagccgtcttgtgacggctctagtttcagctgacccgcctagcctgcggggacagtctcctgagtcgctgtggcggctcctggttttggatgcttggcagagtggcttattgcaccatcttgctaaggtggcgaccgggaacggttcggggggggggcgaacccgtggatttcattaaggagcagatactgaagatgtggattttggctctatgaaagatgatgagatgactccggaaatcattctctccggcatgatggacgcgatcggcagatttcgcaagagagataccgagcatagctaaaggagaggtggtgacggcgatatgaagaagatcataggattgctcaaagattggccgccgctcgccacagggttgattatcggcattcttgcgctacaagttgtgctcgtcagggaaggcgtcatcctctattggctagaaggtttatgcaagagcaatgatgctaatgatctgtatttggcgatgcttggcgcagcggcatcacaggcgagttccgctggtgtcgtggtcgtgttcggactgtcagcgcagccgcaggcattcaggagtttgcgtaacgcagccggacggttgctcgttaataactggatgtccattagctacagtggctttttaagtgcgggatgtgcgctaactgcgacactgattaacatgctgggagataaaatggttttcaccatggttttgaggcgtcagtactgttttgcacacatggggtcatacgtctgctttggttgtttaaacagcttatcagagttgtaggagatgtggattctgaggaatcgcagaaggagagcgagcggtagagcctaaaggttttctgtttggccgaccattatatcctcagtggtgtggatttcctcttcggttggtccggacatgtcgggtgcttcatcctcggtaaatatgcgtatggcgtttcttgatatgacgatggtcgaggcgatgtcgacgctcccgccgatcaggccacctgcgatgggtaccagcttgccgaggttgatcactcctttctcgccgaatttggtgagaaaacggaaaccgatcttctgattgatttttgtgagcacggctccggggattttcttgattgccgcggtaagggacttcgtgccgatttggataccggtttccttgacgatatcggtgatcgtcgtgccggtgaggcatatgtacaccagcgtttgcacctgatccgagttcacattgtatccgcccatcttggcgatggccgctatcattcgcatctgcacatacatgacgctgccgatgttcgctggcacggtgacggggagggtgacgatgccgccgagtccgctgaggaatcccgatgtgccgcacttggcgacctgccatcgagccaggctccgggcggcggctcctggcgtgtcgtggtgagataggtagtcgtccgcgattgcatctacggaacggctcaccatgggaatgccgttcagggttttttcatagacggcatcgaggatctttcccgctttggcttcgcttagcggttcttcctgctcttgaatcttaaccattatcgtctctcctccggcttcttgggcaagtctgctttcgatgtggaaacaccatgtcttctataatcggtgttgtcgacgacgatgatgccgccttaaaggaaaggatgagagtcatggatgacgaacagatgaattacatggcgcggttagatgggtgagcttccggtattatggcgagcccgagtcgggtgaggcccggaccatggacgacggcagcgtgtgggcgcggatcgtcggcccggatccgaggggcgacgacgactgatgggtgatgctgctggatccggtcggcaacgaggttctcggcgtgagcgatgtgcggttcggcgacgtgaccgtggccatgtcggccggcatcgcgccaccacttcccgacgacatgaaggcgaggttcgccaagaccgacttcatctcggatatgtacgagagcggcgtgtacgaaaggaaggagaccggggagaagctgttcgaccatctcttcggcaaaggccgtagtgcggcagattccgagggctgaactgattctggtatattgtattcgatatttactgatctcggtatccagctcgacatccttatccgattgtgcatgctccattgtgtttaagtgttgcggcgatagatgctgcaacacttaaacgtgtgggatatgccggcctgttccattggttccgtggcccgtgccggtctcggttttccgttctttcggtatttcggtgttccggtatcttgttccggcacaggatccgcctgagcctgtccacttcgtcctggagcttgccgatctggcgttccttctggtcgatgacggcgcggatcacggccgggtcgtccgatggcatgtactggtacgtgagcagctccacggtatcgcggtggtgttccttgacgacccgttggtagctgtcaaccgcgacggtaaggctggtgtgtccgagatcgtccatcgtctcgcgcatggtcccgccctcgaggacgaacatggtggcgtgcgtggcacgcagggaatgaaaggtgatgtcgggtggggctgcggacattcatccgtatgttctacagattcgacgtgggaatagcctttacgtctccacctgtttcacactggctgaatatgccatcaaattccatcggcgtgtcgaatatcgttctttagggtatagacgaaggggggattacttatttgaatattcgcaggtctcaaaatatcttcggaacctcaggggggagggtattaaatcgttgtatttccaacggttttaaccgactatcattcaaaaatcaagagttgctggatgtagttctgagaggagccagcgagaaataatgtgtagctcgagtgcagataccttggcgtgagaggtgaaataaggatgaagcccgggaaattttttggcgtctgacgcgggtcatactgacggctgccatatgcatattcatgccgcttacatcttcaggagcgcaggccgcgaatgagacgatgccatcagccgatagcggcaaaaccgtttcgatgacgatcaataagcaatggcgcggggatgcgggccatgagagcaagcgtccgacccaactcgatgtagtgatcaggaacaaccagactggccggaacgtgaggattgtgaccttgagcgccggccagaattggaccaccacagtcaacggactgccatacatcaaggactcggaggggcacctcgactattcggtttcggaaaccacggtgccggacggttacgaacaatcctcctcgatcatgacgaaccagaccaaaaaggacctcgaactatggactctcgccaatggtctggacaacaactccctcaacggtaagtccttcgtcattctgaacggcaattcgggcgacgtgcagctgttgagggccgaaggcccgaccaacggcgtgatgaccgccacccagcatgtcctcaccgatccactcaccgtgaacggcaagacctacaactcctacggctacatcgggaaaggcacggacggatacaccgtcgaacagtcgcttggctggaccgccttgagtcaaggcggaggatacgtcctgcgaagcaacatgcttgagaacgatccgacccttcatagaaccgcctaccttacggtcgacaaaaagggcgcatacaagcttgccaccgatatcaagaaagccaccgttttcaaatacgatacggccggcggatcgctgaacgcgaacaacactaccctctacccgtaccaacacaccgaccagggacagatggacgactacgtgtccaccgtgaccatcaccaacacgtacgaggggtcgaacccgtccggtccggaaataacggtgggtgatgggcccgtcaccgtgaatgcgtccaaacaatgggccgacgacaacgactcggcgcatgcacgcccgaaatcggtcaccgtgaacgtattggcggatggacggccggtcaaagacgacaaaggcatggacgtcgccatcacgctcaacgccagcaacaagtggaaaggcagcgtgaccggactgccccgatatggcgctgacggcaaggaaatcacatacacgttgaaggaacaggatctgccagacgggtacacggccgccgagaccgggaggacgtcttcgacggacacgacatactactgggtacaggccaaaacgttcggcgaatcggcgaaggacaacgaccagtatcttgtcgtcgcccaagatatcgacaacaggtcgcaatggctcggcatgcatgtcaaaggcagtaaagtcagttggaccaacaaggaaggccacagcgcccgagtggtggccatcaacaaccagaagatcaccgtcaacggcgtgacctacgactcatggataccccagaacgtcgtcgaccagcataaggacgccctgtggaactcccattacgtcggagacctcgggaatggccaatcgggcacgaatcctgatggatccctgatcatataccacaaatttcgtcctcgaaagcacgaccaatccgggcctatgcgtgaaagtcaacggacagggcgatctcacaggctgcagcgccaaagcgggagatccggacgggaaatggacggctccggaggaatcatggctccactacggcattccattgaccgcgaagaaggtgaccctcagcaatcccaaggaggaatggccatacgtcatggccaacatgaaacactactatctgctgaacaacaaccacaccggagacggcaacgcgcagcaggcgtcggtcatgcgcatctacaagaaggtgccggtcgaacgcaagaccgtgaacatagaactcaccaacacctacacgaaggaaaccaccggcagcgtgtccctgcacaaggtggacgagaacgaccgggatctttccggcgcacaattcaccctctactcgaccgtcggcaacggtgccccttaccaacatgagggaatcgaatacaagtaggtcggcgaaccccaaaccacagggaaagacggatacgtcagattcaccggcctcaaagccgatggcaacgtgagatacgtgctcgtcgaaaccaaagcgccacaaggatacatcgcgatcgacccgatcacgttcaccctgccgttgaggaaacagggaacggtggaccccggctatcagggggccagcagacccgacggcgattcgaccctctactacgacatcatctacaaggcggtcgaccatccggcggtcacgctccccgaaacggccggtcctggaatccttccggcaccggttgcgggcgtcatgctcatgggagtgtccgccgtgatgatcgccagacgccactggcgaggcatatgagattcttcacgcgtcccgaacacgtgatcaaaaaagcaaaattccaaagaaaggaagaacaatgacaccaaagaaaacaggtgccgctgccatcgcatgcggcctcgcgctgacgatgtgcctgggcatgggcttcgcgtccaccgcctcggcggccaccgtcacgttcgacaaggacctgcagggacagaccgtgtccggccgatccttcaacgcgtacaagctcgccaccatgagccagccgaccgccgacggcgatgtcacctacacgttcgtcgacgataatgtcaggaacgccgtgaagacgacgctgaaggcaatgggcaagaacgtggacaagaccggcacggacgtggctctttccggcgtcatcgccggcctgaccaactccgaaaaggtcgcgttcgccagcaagctcacggatacgctgaagcagagcacggacatccatcccacgcccatcaacggcaacaccgcgactctcgatgattacggctactacgtgatcgaagagacgaccaccgatccgagcgtcgtgaaggccgccccgttcctgctgcaggtcaagggccagaacgtcaacacgaccctgaagagcgcccagccgtccatcaacaaggacatcgtctccgacggcaagaaggacacgaagtacgacgacaccagcatcggccaggacgtcaaattcgaactgaacgacatgaaggtgccgaacacctacggctacgacacgttcacctacaccatcaacgatcagatgtccaacggtctgaccttcaccaaggcccagctggacgccatgaccgtcaccatcgacggcaagccggtggacaagtcgaactacaccgtgttggtcaacggcaaggaccccagcacgctgggcgctgattggagcgtcaagggcgccaagttccagatcaagttcaacgacacctacttcatcggcacgtacggcgacgccggcgcggacggcaaactctcctacacccagaatccggaggccggcaagcccatcaaggtgaacttctccgccaccctcaacgaggacgccaagaccgcggacccggagaacaacaccgtgaacctgacctacacgaacaagccgggcaccaccaccgactccacggaccacaaggtctacgtgtacacctacggcatcgacgtcaacaagaccttctccgacaagaaggacctgttcagccaggtcgagttcggcctgaccggtgccaacggcgacatctacgtcaccggttccaacggtaactacacggtcgtcaagaagggtaccgccggcgcggtgtccgcggccagcggcctgaagctcaccgcccagggcgaactgaagatcaagggcctcgatgcgggaacctacacgcttacggaaacgaagtgccctgacggatacgagcccgcaggcggcaagacccagaccatcacaatcactccggactacggcactaacggagccgacggcaaggccggcaagaaggtgaccgtcgcccaggacaccaacaaggacggctacgtcgatgcctcggtcgtcaacaagccgggaagcttccacctcccggagaccggtgccgcgggcatgatcctcctgccgatgatcggcataggagtcatggccggcgccgcgatcaccctgcgccgcaaggcacggtccgacaagtgaccacagtgattggctgatatccataacaatggccaagccaattcattgaagggggtcgtgactcacagtcgcggccccccctcccatatgaggggaaatggcatgacaggcaaaccagccgaaaatcagcgcaagtccatcatcggaaccatcgcgctggtattggtgttcctcctgggtctcgcagctttcctgtatccgctggtcagcaacaccctgtaccaggcggaacaaaagaaggacatgaccctttacgagaaaagcatgcgggaactcgcgtcgaaaaaaaccggtggcaagaacacgaaaggttcgcggttggaccaggagctggaagccgcccgcaaatacaacgcgaatcttctgaaccatggagcatttctcaccgacccgttcgacgaaagtaagatcgaggacccatccacggaaccctatgcgagtctgctcaacccggacggtgacggactgatgggatacatcagcataccggcattagacgtgaacctgcccatctaccatggcaccacgaccgagactttggccgatggcgtcggccatctccaacccacatccctgcctgtgggcggaaagggaacccacgccgtgctctccgcccacaccggggtcgctggaaagaaactgttcaccgatctcgaccaattggacaaaggcgacgaattctatatacgcgtattgaacaggacgctcgcctacaaggtcgacgacattcgcatcgtgctgccggaagacgtctcatcattgtccattgatcccagcaaggattacgtcactttggtgacgtgcacgccttacggcgttaatgaccatcgtctgctggtgaggggggtgcgtaccaaatacgttcccgagaaggagcagaagacggtcaggaagaacgtcgccggtggaaactggatgtccgactatgtcaaatctgtcgtgatatggacaactctgttcgctatttccggcgtcattacggcaattcgaagttcagaaacgcgacagggacttcaggggcggcatttgtcgagggttctatcgggagataagcacgactaaagacgcgcataaaggtgatgagttgatcatggtgccgaaaccagactctttggaagttgaatcaaagtgagattaataaaaatactcaggaatgtcctgacgcaggacacaacacttgcgcgagacgaagtcgtgggggggggggtagtcctagcttttctctgcgaataccttttatgtataaccgtgtggatggtcttcggcatacggcacctcacaaaagaaatgagtgtgcgatgactaaattcaatgatgctgaagtcgcgtacttgcgtggattggatgccgttgacaacgttacttcaactcgaatcatttattcgaaaagattcaaaacacactttctccacgagtattggaatggcaaaagtccgaccgagatttttcgtaatgctggcatgccagttgtaattatcggaagtaaacgcatcgaacgatgcacatacaggtggattaaggatggacgtgacaaggacatcgcctcctcagacaatgaaaaaagcgaatcgaacggcacaaatcgggagcaatgctctgaacaaatactaatcgaaacacgggagatgatggaaaacctttcggaagcgttgctaaaagcggaaaaaatcatcgaaatgcttacaagcgaacagtggagtgcatctgtgttgactggtgcgcagggtgagatggggaaaaccaaggatagctcaagggaaacggtggaaaagaaaaatggaggaagacgatcccgcatgtagacgtgtatttgctagatccatagaccacggttcagcgaatagtatatgtcgaagcgatatgagggtgtcgtctgggagccgtggctggccgccaagaaaaccgagtcgaaagcaggcaccatcgaccttatcgaccgcgtgtggcgcatccacgtcaagccgaaatggggtatgcgtgaagtccagtcgatcacccacgatgaagtgcaggtgtgggtcagcgagctggcgggactgcaggtcggagatgccgatttcgagcggcagcggatccatgtcctgcgcactgtgtccgagatcagggactacttcgtggtcggcaccccgaagaccggccagacgcgcacggtgattttcccgagtctgctcagaccatgccttgagggggtgtgcaagggccgtcagccgtccgatctgcttttccctgacaggcgccaccggctcgtattttcggcgtgcgcagggacgttaccgtggcgattggttctgtcgtgcgaagcatgcagtccttgacgaggatgccgccgcgtcgatgacggtgcatgacctgcgacacccgtatgtcaagcacacgacaaaaaataaatctctgcaaaagcagaaatcccaaactaccaacgataatttgatagtctgggacttctgcttttttgatttgtgtagagcagttgttttgaaaatactatccgccggttggcatttttacggtggattctagtggtggttgcaacacctggtgtttttggtgttgttgtcttggttttctaggttagcttgcggtgtcgaggagttcgaggattttctcgcttggtttcatgtagccgagggtcttgcgtggccgatcgttgagttcctcggcgaccgcgtcgaggtagtcctcggggtatttggataggtcggtgcccttggggaagtattggcgcaacaggccgttggtgttctcgttggtgccgcgctgccacggggagtgcgggtcgcagaaatagacccgcatgtccaggctcgcgccgatctgcttgtgcagggcga

SEQ ID NO: 1488 - DNA, 7454 bp, Unknown
  R257_15m  MAG No. k141_35034
cattcagcgtgtcgtgtggccgtcgaccgaatcaaccgatggccacacgagggagtggctcactcctcctcgcccttgccgacctcgacacgggcgaaggccagagccttgccgccgacctcgtcgaagagcttgccgacgttcttggacggatccttgacgaacggctgctcgaggaggacgacctccttgaagaaggcgttgagacggccttcgacgatcttcgggacgatcttctccggcttgccctcggcgagggacttctcggtggcgacgcgacgctcggactcgaccacgtcggccggaacgtcctcacgggtcagccacttggcacccatcgcggagatctgcagggcggcctcgtgcgcgacggcggcgccggccttgtcggtggcaatcatcgcgacgatgctcggcggcatctcggcggacgtcttgtgggcgtagatctcgacgtgctcgccggagatcttcgcgaactggccgaccttgacgtgctcgccgaacagggcggcagcctcctcgatggcctccttgacggtctcgtcaccggccttggcagccagcagctcgtcggcgttgttcgcgtcggcggccacggcatagccgaggatggcgtcggcgaactcgacgaacttcggggtcttggccacgaagtcggtctcggagttcagctcgaccgcgtagccggtctcgccttcggcgccggcgacgaccttggaggcgatggtgccttcctgggccttgcggccttcgcgcttgccggccgcggcgatgcccttggcgcggatgatctccttggcgcgggcgacgtcgccctcggcctcggtcagggccttcttgacgtcgagcatgccggcgccggtgtcctcacgaacctgcttgatcagagcggcggtaattgctgccatgaaacttgtctccttgggatgaaaatcgattgcgttcccccaggatgggaggtgcaatcatagttgcacctcccatcctagcggtaggtgaacctgcatggttcacgctcggcgaatccttaatcggggattcactcggccttggcttcgccttcggcggccggggcggcgtcctggttctccaggagctccttctcccaagcggccatcggctgctcggagacgccatcttccttggcggccttgccggagcgctccagcagaccatcggcgacggcgtcggccatgaggctggtcagcagctcgatgccgcggatggcgtcgtcgttggccggaatcgggtagtcgacggactccgggtcggtgttggtgtcgacgatggcgacgaccgggatgcccagcttgtgggcttcctcgacggccagcgcctccttgttgatgtcgacgacgaacatcgcggacggggtgcggcccatgttgcggatgccgccgagctgcttctccagcttgtccttctcgcgctcgaggagcaggagctccttcttggtcaggccggagccgtgcacgtcggagaagtccatctcctcgagctccttaaggcggctgacgcgcttggagacggtctggaagttggtcagcatgccgccgagccaacgctcggagacgtatggcatgttcacgcgggtggcctgggcggagacggcctcctgggcctgcttcttggtgccgacgaagagcacggtgccgttgtgggccacggtggtcttgatgaagtcgtacgccttgtcgatcatgtcgagcgacttgaacaggttgatgatgtggatgccgttgcgctgggtgaggatgaactgcttcatcttcgggttccaacgacgggtctggtggccgaagtgcaggccagccttcagcatatcgctcatagtgatctgagccatggtattactacctttcattgtcggttcttgcctggccatgcgcacctgcgtgcagctgctcccccggtttcacgagttgtgcagccgaccgacacaggccgtcgcgagcatgacgcgaatttgttgtgtgccggttgacaatattgggtggttccggacgccagcgactgcgtccgttgccgggtggcacacaagtttcaaggatagcacggagccggtactaagaaaaacaggctcccctctctgaggggagcctgtcgccgtaggcgactgaggggagttacgggcggtaccggcagaaccaccctcagtctcactacgttcggcggctcccgccagcgggagccgggtatggactacttcgcctgacgattgcgcatgtagcgcagggcttcgcggcgttcttccttttccaggcgatccaaatacacgtggccgtcgagatggtcgcattcgtgctgaagcatacggcccatcagcccggagccctcgagcacgacctcgttgccgtccaggtcgatgccacgcacgcgagcgtagtcggcccgacgggtcttgtaccacaagccgggcacggacagacaaccttcatcgccatactgctcgccggacttctcctcgagtacggggttcagaacgtagccgaccttgccgtcgatgttgtaggagaaggccctcaggctcacgccgatctggttggcggacaggcccgctcggcccggatcgtccacggtttccagcaggtcgtcaaccaggcggcgcacggccggggtgatttccttgatctcatcgcagggggtgcgcaggactgggtcgggcacgaccctgatctcacggatggccacttctcgttactcctcgttcttctcgtcagccggccggtccggcttgctgccggtgtcagcggcattgtcggcattgtcggcggaatcgccggtctcgccctcttcgggttcggccttcgacttcttgatcttctccgacacgctagcaatcgaatcagacacgctggttttcatctgttccgaggcctgtttgacctgttcggacgcctgcttgaccgattcggaggatttcttgacggtctccagcgtgctgtcgatgatcttggctgtggcgggcagcggtttgttggatggcttgggcgcatacagatcctcttcgatgacggtggcgtagcgctgcaataccttgggacgcaccactttcatgctcggggtgagcgtgccgtgctcctgactgaattcctcatccagcaccgcgaatttgcgcacggactcagcgcgggagacattggcgttggcctggtcgatgtactgctggataaaggcacgcaccgcgtcgttgtcgctggcctcggcgagtgtcatgtcggcattgaggccctgaccttccagccaggaatgcagcatttcggggtcgagctcgataagtgcggacacgaacggcttgccgtcgccgactactactgcatgagccacgatcgggcaggtgtcgatgacatcctccatcggggcggggctgatgttcttgccgccggcggtgatgatgatgtccttcttgcgtccggtgatgaaggtgaagccgcggtcgtcgatacgacccagatcgccggttttgatccagccgtcggcagtcatcgtctgtgcggtgagttcgggctgcttgtagtagccaaggaacacgttcgggccggtcagctcaatttcatcgtcttcgccaagacgcacgcccatgccaggcccaggcttgccgaccgaaccgacctcgttgtcgtcctcccaattgacgagcatcggagcggcggtttcggtcatgccataaccctggatgaaggtgatgtcatccatgccgttgaagaagtgggccaaatccacgttgagcggcgcaccaccgcaggccagccatttgaggttcggtccgagagcggaacgaatggatttgcccaccgtggccatgtagaacgaatggcgcatgcgctcgatgaacgaatggccgcggccggcctgctcatccttgctccacttgacgaagtgcttgaccgactgggcgaagatatgcccctggatgccggcaccagccttctgcgaggccgcgttatacaccttctcgaacacacgtggcacgcccagcaggtaggtgggcttgaagctgcggatatcggcgagcagtcgcttggcgtcgggaatgtatccgaccacgccgcagccaccgatgcacacgtactggatgtagcgggcgaagcagtgcgccagtggcaggaacagcagcagacggttgtcgtcgtacagcatgccacgcagaatctcgtagccgttaagcacgatgtgcgtgtaattgcggttggagagcatcgcgcccttgggcttgccggtggaaccggaggtgtagaccacggtaagcagatcatcggctttgatacgagcgatagccgcatccaacgtctcatcggatacgccatgcccgaagtcagcgacagcgtcaaggccatcggccttgaaattgaacacgtatttcatgcccggatgattgacacggatctgctcaagcgtctgtgcgcgctggaagtcgccggcaaaggcgatggcgggatcgacttcctcgacgatgcccgcggtctgacgggcggaatcggtctcatagacgggcacaaccacagcgccgattgccgcgcaagcgaaatcagccacaccccactcatagcaggtaggcgagtaaatcagcaccatggtgccggctttgacgccaagtcccaacaggcccttggccacctcgcgtacgcgggacagcatttcagtagctgtggcgccgcgccattggtgggtgttgtcatcctgccattccgcgatgatgtcatccggcgtgcgagctgctcgtttggccagcagcgagtagacggtgtcgtcatcggtggtgacatatctgggttcttctacatgttcacgcatggtcactactataggcgaaccagcctatgacacggcagaaccgtcttccgctgccagcgtaggaatcggtgtgagggcggggccgtctggtcagcccagatcggcatagatgcacatccatcgagaaccgatgaacttcagtttgaggttgactcgcagattttcctggccgatggtcatgaataccgccatttccagcgtgtccttgccggtgatcatgccgtcgatcaatgtggggacagtgggcagatagcagaatttcgctttgagctccggatgagtgaccatgtgggtgccgagcaggtattgcatggtttgcagccgttccagacatggttttgtcatggctctgttgagatgtgcgacgctgagtttgccacgtatcgcgtccgccgatgtgcaggcgatgcggcatgcagccatggccatggaatgacattccttcgcattcagcccgcctatgaatgtgggttggatatgataccgcaccgggcgatccgacagctccacaacgatgaatccgtcataactcggcaacggcccgtactgatatgtgccgtggaaaaatcccgaatactccatgatgaccccttcaagcccccttgcaactcaccatcatcggcgagcgtttgtactacaacatcacgaaaggcgcgccaagtcaaacgacttgagcgcgccttagggcaagctaagcctcctgcatggagggcaaacccccattttcagggggggtaatcgggattatcgtgcggaatacgggttgaccaccatgccgcaacgctggaagttcttcacgtcgacgtagccggtggaggccatcgcgcgcttgagggcgccgatgaagttggtcttgccgtccgcctggtggctcggtccgaacagcacctgttcgagcgggccgaccgtgccgaccgtggtgcggtagccgcgcggcagcgtctggtggcgggcttcggaaccccagtgggtgcccttgccgggggcctcggtggcgcgggccagcggcgcgccgagcatgaccgcgtcggcgccgagggccagggccttgacgaagctgccggagtcgcccatgccgccgtcggcgatgacctgcacgtagcggccgccggattcgtccatgtagtcgcggcgggcctcggccacgtcggcgatggcggtggccatcggggccggcacgccgatggtctggcgggtggcggagaccgcgccgccgccgaagccgacgagtacgccggccgcgccggtgcgcatcaggtgcagggcagcggtgtagttggatgcgccgccgacgatgacgggcacgtcaaggtcgtagatgaacttcttgaggttcagcggttcctgaccggaggagacgtgctcggcggagaccacagtgccgcggatcacgaacaggtccacgcccgcgtccaccacggtggagtagaactgctgggtgcgctgcggggagagcgcgccggccacggtgacaccggcggcgcgaatctcgtgcagacgttgcgtgatgagctccggcttgaccggctcggcatagatctgctggatacgctcggtggcctgatcggccggcagcccggcgatttcgtccagcagcggggtcgggtcctcgtaacgggtccacagaccttccaaatcgagcacgccgagcgcgcccatcttacccatggcgatggcggtggccgggctggtcaccgaatccatgggagcgccaattaccggcacgtcgaactcgtaggcatcgatctgccaagaagtagagacatcttcggggtcgcgggtgcggcgagaggggacgatggccacatcatcgagtgcgtagccgagacggccctttttgcccaaaccgatttcaatttcctgagacatggcttccacactattgctcgggtgggacgctcatgtctcactttcccacagaccggacgattgtttcgcgccgttacaaacatgcgctaagactaaaaccatcttcacatcatctatcaggaggaagcatggccaaaatcaaggtcgaaggcaccgttgtcgaactcgacggcgacgagatgacccgcgtgatctggaaggacatcaaggatcgtctgattctgccgtacctcgacgtgaacctcgactactatgatctgggtatcgagcaccgtgacgaaaccgatgatcaggtgaccatcgatgccgcccacgccattcagaagcatcatgtcggcgtcaagtgcgcgaccatcacccccgatgaggcacgagtcaaggaattcggcctcaaaaagatgtggaagtcccccaacggcaccatccgcaacattctgggcggcaccatcttccgcgagccgattgtgatgagcaacgtgccgcgtctggtgcccggctggaccaagccgatcgtcgtggcccgtcacgccttcggcgaccagtacaaggccaccgatttcaaggtaccgggcaccggccagcttaccgtgaccttcaccccggacgatggcagcgaaccgattcagcacgtggtgcacaactacggcgaagacggcggcgtggcccaggtacagtacaacgttaacgattccattcgcggctttgcccgcgcctgcttcaactacggtctgatgcgccactaccccgtgtacctgtccaccaaaaacacgattttgaaggcctacgac

SEQ ID NO: 1489 - DNA, 36609 bp, Unknown
  R257_15m  MAG No. k141_35160
cgcggtccatgcagagcaattcctccgaaaggtcattgtccaccgctatgcgggacatgttcgcgcaaagcgagacgaatcgaattaaacggttctatcagtcccggttcaagggaagtgcggacaacctggtcatcgcatctcgaaagctcgttgatggaatcgatcttggaatattcgataacgtatccggaagtaaaaaagcactgctcattgcgtcacatgcagaccgactcccgagtcaagcggaggctggtatattagcattatcctatgctgaatctcttgaaaatccgaaccgttaatcaatcatgattgtgatcgcattgcgtggaatgattcagccattccacgcaatgcgcctctggtaaaacgtcatagagtcattagagcggaaagtagcgttatcacaaaaacaggaaagaccataaccagcacgagaaacgatatgattcccacaaggacatgcgaggcggaaggggaatgatcacgaagttccggatacgtagatcgcatatatgaacgcacgccaaagatgacaagcgccgcaatccagcagactacccccataatcaatactaaggtaagtctacgtacatactcagttgccgtagttaaattcatgcacgaagaggaagagaacgttaagactctgcagattatagtatcatcatcgccattggcgccccattccgcccacaaaataagtgctggtgaaagcagcagtaatcccagccaccatagcgcacgcctggccttgcccaaagccacatagcatctactcgccttaaggaatttggtagctgctgctttcggtgccaaagcacatttctcgccggaaaaactttctgacatatcttctgtgccgtgtttcttcccaatgccatcggttgtagccggattcgctttgcaagcgtggcgttcgttcccggcgtcgccccccgccttgatgccgtccgtggacccggtgttcccgcgcccgtccgccggcttgcccatgtcccctccgatcatccgagtctgtcgctcggcccgcgcgtccgttctccgcgcgcccgcccggcgtgcgccgtcgccggccagtctagggccgtatgacgcgagcggggaggcccgcgccgtttatcggcacggaacctccccgctcgcttttgtcgatcggtcggccgggaatcagcccgtgttctgcaggcccgcggcgacgccggagacggtgcacaggatgaggtagatgaatcctgcctgttggctttgcgagagctcttccttgtccaccttcttgcgcagcgacttgagcgccagcacctgggtgacggacagcgcgtccacgtatggggagcggatgcggatggcctggccgagcacgtggcggtgctgcaacggccacttgtcgcccacgatggccagaacccacttgcgggtgagctccatctcgttgagcaccttctcattgaggtcctcgcggtcgccgagggcaaggtacatcctggcgatgcgctcgtccgtcttggcgatggacatctcgatgttgtcgatgaaggtggagaacagcggccattcctcgtaagcctgacgcatggtctccagatcgccgaacttctcgcatgcggtgccgagaccgtaccaggcggccaggttgatgcgggcctgagcccaggagaagatccacggaatcgtgcgcaggtcgtcgagcgacttggcgccgaggccacgcttggccgggcgggagccgatcggcagcaggccgatttcggtcagcggcgtaacgatcgagaaccacggagcgaagccgtcggtgttcaacaggtcgaggaagcggttgtgcgcggcctcgtcgagctgagcggccatgtcggcatacttctcggtcatctcggtgttgcgcttctccacactcggcgcggactgcagcaaggtcgccgcagccacggattcgacgtggcggatggccagcaccgggttgccgtaacgggcgaagatgacctcgccctgctcggtgagcttgaagcggcacttgacggaaccgaccggctgggcgagcaccgcgcggttggcggggccgccaccacgaccgacggcaccgccgcggccatggaacagggtcaggtcgatgtcgtgcgactcagcccatttggcgatgcgctcctgagcggagtgcagggccagcgtggcggaggtcgggccggcgtccttcgaggagtcggagtaaccgagcatgacctcgagcttgttgccggtggccttcagacgagcctgaacctcggggatcttgatcatttcctcgagcacgtccaccgagttctgcagatcctcaagctgctcgaacagcgggatcacgtcgatggtgggcacgtcctccgggtgggagaaggccaagcggttgagctcgtagacatccttgatgttctgggcgctcttggtgaaggagatgatgtagcggcgggcggccttgaggccgttgcgcttctggatggcaccgagggcgcggaaggtgtcgagcacctcgtgcgtcatcggctgcagttcgccgcgctcgccgtgcaggccgtgctcgcggatatccgcaagggcgcgggcgtgcaccacggagtgctgacggaactccatctccaccatgtggaagccgaaggtctcggtctgccagatcagatcctgcagcgggccgtaagcggaacgcttggcgccggcggcggccagcgaacgctggaccaccttgaggtcggcgaggaagtcgtcgcaggagtggtacatgaggtcggcgtcgcgctcgatggtgtagtgcagacggtcggccatcaccagcatgaccgcgcggtgcatctccttggtggagatcagggcggccttgtcggtcagacgctcgctcatttccttctggtggctccagaggctcttgagctcggcgctcggcggcgtggtctcggcttccatcgtgaggttgcggcccacggtgcgggtggcttcctcaagggcggcgattacgtgatcggagaacttgcgggccacggcgcggctcaccttggcggtgacgttcgggttaccgtcgcggtcggagccgatccagctgcccgggtggaagaacgcggggcaagcgggctcgacgagaccggccttatcgcccaggacccagtcgtcgaagcgacggtagaccttggggatggtgttgaacagcgtgttgtcgaagatgtcgagaatcgtgtccgcttcctcaaccggggtcggcttcttcagcgcgatcggagaggtgcggaacagggcgtcgatctcgttgtagagacggcgcaggcattccttcttatccgagccgccgaggcgcttgtactcctcaagcaattcggaaacgcggcggatcttgccttccacggccttacgacgggcctcagtggggtgcgccgtgaagacggggtggaattcgagctggttgagcagttccttggccttggccgggccagtctcattgatgagctggtggtaggcgacggtgagctcgttgatcgggtcgaccgcctggtcaacggacacgttgttctcgcgctcgtggagcacggaaacacggtagttctcctcggacaggtttgccagatggaaatacgtggcgaatgcgcgggccagcagctgggcgtcgtgcagcgtcatgttgtcgatgacgttcacggcctccttcaggccatcctggtcggggttcggatccttcagctcggcgaaatgctcggcgctggcctccaccgcgtaatgacgcacggtgtcgaacgtagacagcagttcggggttgtattcgcccagtatgttacgcaggatctcaagacacagatccatgtcgtacttcaggctttcgggaagatcatgctcctccgggccctttcggccggtcccggtagtgacgatggcggcgtcagcgggagtgatctgttcttcaggtgttgccatataacctcctttgccgaataacaggttgctcggtctaccggtcgtctgcggctcctccgcagttgttgaggccagtcgttgcgagcccacagcccatattcaacgtggttgttgtgtgggcaatagtgtatccccgcgaaatcgctatttgcgttacggagtccatatagtgcgccaagttgtccacctatagagaccgaatatcggacagcatatgagacactgtccgattcgcggaagatttgagcaccttacgattgctggcgggggaggcagggagtagtaatgagggatgtgagcgaacagaagaaaaaaagtgcgcccgaagcgaaaggcgcaacggctgtacgtaaattccacacccactccattccgctggacatggaagatattgcgcgcgattgggaaaaaccggtggtggacgccggtatcgccgccaaagccagcgtgattgtacgggtcggcatgctggacctgggagccggcaccggctccttccgcgtgcgtgaaatgatgcaccgcatcgcctacccgctgggcgtgcacgtacgcgccgacgtgaacctgacggatatcgaggccacctgcacggatggtcgtaaccgcatcaccgaagtcgtggatttgccgaccaccggcgtgaacaccgaacgtatctggctgctggaacatttcgccgactggttctccgtgaatctcggcaaggggtcgatgtatcacgtcgattcgcaactgtccgatggcgtggtcaagcatttggacgaacgtgacgcttcgcagtattcggccgatctggccaagcgcctgcgcgaacgtgccaaggccgaggctgaggcggccaacggcagcgtggacgagacgctggatcttgcgttgaaaaccaaggtactcgtgacctccgtggccaagtccttggatgatgacaatggagaagcccaccgacttttggcggacagcgcggaaatcactccggtcgaagacaaagcggccgaagagaaggcctacgacgatgccgaagtgtttaccggtgactccaatgagtcggttgaatcggcgaacgcggcgaacggcgcaaccgccgaaagccctgctgcaagcagtacgaagcgcaagaatcgcgtgcccaaggaatacgccgaacacttcaacgagcgctccgacgaagagaaggccaagggcggtatcaccgtgcggcaggcgcacgagcggctcgatctgattgagcgccgcaagccgctgtacaagccgtggttctccggtctggcctccgccctggcctgcgcggccttcgtgttcctgctcggcggcggcccatacgacatgatcggtgcgttcgtgggcgcgggccttggccagtggatgcgtcgccggctgtttgcataccatctgaaccagttcttcgtcacctttgtgtgcgtggccgcggcggcgctcgcctgcacctgcaccctgcgactcatcggcattttcgacccagtcgcgctctcgcacgatacggcctacattggcgccatgctgtttgtgatccccggtttcccgctcatcaccggcggactcgacatggcgaaaatcgacttcccctcgggcatccagcgcgtggcgtacgtgctgtgcatcatcctgatggccacgctggcaggctgggccgtggccgtgatggtgcacctgcacccggaaggctttgagccactggggcttgacccgtgggtcaatggattgctgcggttcgtggcggcgttcgtcggcgtgtggggcttctccgtgctgttcaattcgccgcagcgcatgtgcctggccgccgccctgatcggtgcgatcacggacacgctgcgtctggaattgcaggacttcggcatggctcctgagatggctaccttcatcggcgcgttcctggcgggcattctggcatcggcgtggcgttcatccgtgcgacgtggctggctaccgccgcacctcggctacccgcgcatctgcctgaccgtgccgtcgatcgtgatcatggtgcccggtctgtatatgtaccgtgccatgtggtacctcggcagcttccagaccatgaatgcgctggactgggcgttccgtgcgttcatggtgattatctgtctgccgatcggtttggcgatggcccgcgtggtgaccgacaagtcctggcgctacgacatctgaccgtcatcttggctcccctcaggtggggagctcggataaaacagcgtctcagtatggaaacggtggaaggtgcttgagtccttgtatccactaccatcaggcgaagtgcgttgcggccgtattcacggctgtgacggtctgtatgacgccgctccggcgtcaatcgcatatcagcacgcatatcagcacatagttctgccatggcggtagccgcttggcgtcatgattggggaggtgtcgcagttggccaacgatttctggattctgctggccatggtcatctattttgcggccatgctgtccatcggattcatctactccaaacgctccaactcctcttccaaggaatactttgcgggcgggcgcggcgtggggccgtggctcacggccctgagcgccgaagcctccgacatgagcggatggctgctgatgggcctgccgggcctggcctacttcaccggcgcggccgacccgatgtggaccgccatcggcctggcgctcggcacctatctcaactggaagcttgtggcccggcgactgcgccgctactcggtagtggccggcgatgccatcaccattcctgacttcttcgccaagcgtttccatgacaagaagggcgtggtctccaccatcgcggccgtgatcatcctggtgttcttcagcgtgtacgtgggcagctgcttcgtgaccgtgggcaagctgttcgccacgttgttcggtttcgactaccacgtcatgatgatcatcggcgcggtggtcgtgttcgtctacaccgtggtgggcggctacttgtccgtggtgatgaccgacttcattcaaggcatgctcatgttcttcgcgctcgcggtggtgttcatcggcactgtggccagcgcgggcggcatcgacaacaccgtggaattcctgcgtgccatccccggctacctgtccggcacgcaggtggccgcgcccaagctggacccggccaccggccagcagctcgtcgaggcgggcaaggccgtgttcggcgcgccctccgactacggcatcatcaccatcatctccatgctggcgtggggcctgggttacttcggtatgccgcaggtgctggtgcgcttcctgtccatccgcagcgtggaagaagtgcgcaagtcccgaatcatcgccacctcctggtgcgtgatttcgctgggttgcgcggtgtgcatcggcttggtggggcgcgcgatgatgcccaccgaactgctgacctccaccgatgcggagaccattttcatcgtgctggcgcagaccctgctgccgagcttcatgtgcggcgtggtggtctccggcattttcgcggcctcgatgagctccagctcctcgtatctgatcatcggcgcttcggccatgggcgagaacatcttccgcgggctgctgcaccgcaaggccaccgacaagcaggtcatgatcgtggccagggtcacgctggtggtcatgttcctgttcggtattctggtggcatacgaccagaactcgtcgatcttccaggtggtgtcttacgcgtgggccgggcttggcgcctcattcggcccgttgatgctgtgctcgctatactggcgtcgcgccaacaaggccggcgccgtggccggcatgctgtccggcacggcggccgtgctgatctggcacaacctcgtcaagcccttgggcggcgtattcgccatctatgagctgctgccggcgttcatcatttcgctgctgttcatcgtggtggtttcgttgctgaccgccaagccgaacgagcgtatgctctacgagttcgaccactacatggacgatccgctgcccggcaccctgccgtccggcaccgtgctcgtcgacgagcccatggaagccatggagtccgaggtccgcagcggcaaatgacacgtgcctgctgtgcggtcggctcgtatggtagaggagtggcttttttgtggttcggcaggaaccattgaggccagaacggacttcgaggggctgatttgacgttctggagaggtctacttccgtttcaaggggctgatgcctgagtagacgcggctccaaaacggcggaatggcgttggcgtaagggcattgatacacgtgatctagcggatgatcagccccttgaaacggaagtagacctccggcggaggccaaatcagccccttgaaatgggttttgaataccgtagcgcggtgcggacggtgcggactgactctaccgggcttattattcctgcgtcgtcggaataattggcagcagaggctcgaatttcagccgtttgtacagcggaatacggcgtagctttcggacatcgctaatttgctgggtggtttgccgcatcgtgagctggaccgttttgcccgtaacctcctgtatcctctcggcaactcttcgggcaagggcctcttctcccgcttcgtcgccaatatctaatttggtgacttgaatgtacttccagccagcgtcttcgatcatctggcggcgtctcgcgtcattcagccattgcccggcatgatgagagccttcgtattcgatgcataccttgaattcagggtatgcaagatcgagatatatgggtctggtgttgtttcctacgaatattggataattcacctgcgggcaatccagaccgtatttcaagagaaccaaacgagttcgtgtttccatggaggaatctgtgcccgcgcgcgccaaaagcagggcgcgacggcatttgttatacccgcggaacaaatacgaattggtgccattctctttgtcggctcgcacctgggcctcggcctcatcgagatacagagaaagggcgtcgatggttgttctgcagagccttcgatctcgtcgcatcatggaatcagcgagaacgatgagttcttcaagttcgagatacgcggagaacatggcccatgtgcaagctggtgaagtgcatgtgaattgtccctcgattatgaccgtgtctagtgggaaaggccatacaaccactttgacccccacaatgtgccgtttgtcattggcgtgtggaaccgcaacaatggttgtagttgcaaggcctctgtgtttgcttgatatgcggggtacttcaattgacaaaagctccaatgctgttgtcagggcatagggtgggtgccatgcgcttcgtcgttgaacatctgcgcacgtctgcattcgttgatacttctgcattgtcagctcggtcaatgccgttgagctacccatgatgatcaccccttcgtgatgttcgctttgtcctcgcagtgtagggtccggctaccggccctgtctaccgcctcaatttttcggtggataaatgtggataagtcggtggataaactatgggcgttcatcgcagttgcaggcatcccgcaattacatggaacgtaggggtttgcaggcagccagcgggaatcgccgccgacggcgcgattcagcttgaacgaatctccatggcgttcatgcaaaggtggcatgatggcgggtatgagtagcttggtgcgtattgtcaatgccggtgttccggggtctcaggaccgcgtggatgtggtgcttcgcgatggggttgttgcgtctgtcggccctgctggaacggtctcggcttcggacggcacgatgcagactaaggcgcatacgacatcgttggcatacgcgacgaatgccattgcttctggcagcgtctcaatcccaacgtcggccgccgcacctgctgacgaaaccaccatcgacgccgacggcctgtgggttattcccggcctgtgggactgccatacgcacttcacgcaatgggctaagacgctgggccgactggacctcatcaatgcccgttccgccgccgaagcgatggacatgttgcgccgtcatctggatgagcgccgcgccgccggcacgcttgacccagatgccttcgtggtgggcatgcgattccgtcactcgctgtgggccgacgacgagcagcccacactggctgcaattgacgccgtgaccggcgaacagccggtggccctctccagcgcggacatgcactgcggatgggtgaactccgccgcggcccgcaggcttggcgtacatgtggacgaatccggtctggtcggtgaactcgaatggttcaacgcctacaccgccttcgacaaggtgccgggcgctgctgaagagactgaccgtctgctgcgcgaggccgaacaggacgccgcaagcaagggcgtggtgggcatccgcgattatgaaatggccgaaaacatcgatacgtggatcaatcgtttcgcggccggcattaacggtttgcgcgtggacgctggtgtataccccgagcggttgcaagccgccattgacgcgggttggcataccggcaacccactgccgggcagcgccgggctcggccatgtgggcgccatgaagctcatctcggacggatcgctcaacacccgctccgcctactgctccacgccgtattcgggcatcgagccgccgacgtatggcacgctgagctacacgccgcagcaaatcgaagactatatgcgcctagccaccgagcatggcttcgacatcgcctgccacgctattggcgacgaagcgaacaccattgcgctcaacgcagtcgccgccacgcacgcacatggatcgatcgagcacgcacagatgctcaaacccgtcgatatcccgcgtttcgccgagctggggctcacgaccagcatccagccgcagcacgccatggatgaccgcgacgtcatcacccgtttctgggccaacccggccggtatcccttatccgttcagggccctccacgacgccggtaccacgctgcgcatgggctcggatgcgcccgtggccccgctggacccgtggctggccatttccgccgccgtgttcggctccgaaagctctgaccgcgagccgttccagcccgagcagtgcctcgatgtgcgcacttcgctggcagcctcgaccgccactggccgtgaccgccttgcatccggcgacccggccgatatggtgttgttggacgccgacccatacgccgccgatactccggaagccatgcgcgctatgccgcaacacgtcgtaatgacattgctgtgcggggagcgtacgtattgatgcaagccatcggcatgaagtgaccagaggtccgtcttgatagccgcgttgcacggaaaacatgttgtgttttttgaattgagagttactaacgcttgattctccgtttcaaggggcgtatttgagcctttccggaggtctatctccgtttcaaggggctggtcatgcgctcaatctcagataaaatcccattcacgccaacgtcattccgccgtttttgtgcctcgcctacttgagcaacagcccctcgaagcggagatagacctccggaaaacaagaaatccgcccctcgaagtgaagataggacacagcagacgccgcaatgcaaaaaacgccgtgtcagttgcccagttggggctgacacggcgtcttgctacgagcggcgggaaaatcagtacttcatgcccatggcctcgcgcacctggtcgagggtctcctcggcgatggcgttggcgcgcttgttgccgtcgtgcaggatgtcacgaatggagtccatgtccttggccagctcggcgcggcgctcgcggtgcggggccaggaactcgttgactgattcgatgacgtatgccttgagtgcgccggcgccggaatcaccgatctcctcggcgatgtccttcgggtcgcggccggtcaccagaccggcggtggtcagcagggcggagacctgcgggcgggcaaccgggtcgaaggtgatgcggcgctcggaatcggtcgggctcttcttgataagcttggcggtctcctcggcggtggcgcccagcatgatggagttgccgtacgacttgctcatcttgcggccgtcgagacccggaatctccggtgcctcagacagaatagcggccggctccgggaacaccgggttcttcttggcgtaacgctcgttgaaacggcgggcgatggtgcgcgtgatttccacgtgcggcaggttgtccttgccgatcggcacgacattggccttgcagaagaggatgtcgcacgcctggtgcaccgggtaggtgagcagcagaccggtcagcgcgtggccggacgcctccatctcggacttcacggtcgggttgcggtgcagctcagcctcggtgaccagggacaggaacggcagcagcagctggttctcggccggcacggcggagtgggtgaacatcatggtcttgttcggatcgatgccggcggccatgtagtcgagcaccaggttcagcacgttgtcttggatgtgctcggtggtgtcgcggtcggtgatcacctggtagtcggcgatgatgatgttcgtgttgacgccgcgctcctgcatggcgacacgctcacggatcgagccgaagtagtggccgaggtgcagccggccggtcgggcggtcgccggtcaacatggtgaaggacgacggcttggcctccagcttggcgagcgtttcgtccgaacgctttttggccgcgaggaagctcgcgcttatctcattgcctgccgctgtcagttgctgctcgtcggtcatgcgaaaatcctttaaatagggctcagataaacgctttttatggtaaaagtgtgagccgacaacgaacaagccactattagtggtactctctattgttgatgaatcgaacagcacagtaatcgcagggggtcagatgggccgcggacgtcaaaaagcaaaacagcagaaaattgcccgaaagctcaagtacctgaccaccgataccgattacgatgagctggcaaaagagctgagcgagcaggagccgggaacgggctctcctgacccgttcgccgatattgatgatcagtatgcggacaaggatgtggattctgctgctgacgaccacgcttccggtgccgccgaggcagctcccgccgcgcaggaggacgacctcgacgagtacgccaagtgggcagccgaagcggcagccaaggcgaccagtggagaattccccgcatcggcacccaagaaggcggtcaatgtaccgaaaccggctccccgtaagccgattccgatgcccatgccttccgcgctcaagccgaagaagagctaagcgcacgtaggcatatgccggatatcagcgggcaggatggtccaaggcccaccatgctcatcatggacaacgaccgcatggccctgatggcattacagtcgattttgtcgaaggctctgccagacttcgaattgttgccgccggtgagcgaaggcagcaaagccattcagctgtgcacggccaccaaacacccgcctgctgtgctattggccgatatcgcgatgaacgacatcaatggtccggatgtggtgcgtgcaatccgcagggaaaacgcgaccacggcgatactggccattaccgcctcgattgtgggccgacatgcccaggagatggcccgggccggcgcacagggcatcatgagcaagaacgatgatgtgcgattgcaggccgtggctatccgccaggtgcagaccggcaaaatatggggcgatggtggcgacgtgcggttcgagaccgcggccgttgcgtccgcgcgcatcaaggccgagaaggacaaccgtctgagcgcgcgtgagatggaggttgcggaactgtggtcccgcggccggaccatgccgcagatcgccgccgaactgtccatcaccgaaaccaccgtgcgcacgcatctgatgcgtgcggccgacaagctcggcgccggcaatctcaaggaacttatcggcgcatggattcgcatgaacctgcactgatgaaggcgccgatgggtgtgtggggacacggtagaagaagcgcaaggcgcataaggggagcgggccggtgaaacgtccgattatcatttcgcggcattcgtcgtattcgtatggtcacgccgacggcaagaagcatcatcagattgatatcgatatagaactcaatcatccgctggcgatgttcggcccgatcggtgtgcttgcggtggcggccatcgtctatgcggtgaccgggtcgtggctggtcacggcgtcggcggcgttgacggcaagcgtgctgctggtattactgggcattgcgttgcgctggcgcaagcgcgtggtgaatcaggagaacgaaaacgagcagatggaatcggcgctggccgatctgcgccacggcaaccagctcgcgatcgaactgcacgacacgctgtccaacgatctgacgtatatctcgaccatcgcccggaataatctggccgcgccagccggcatcgatggtggcgactggcagcgcgtgctggatcgcagccaacgtgcctttgcggaagtgcatggcatcatcgattttctgaccgagcagagcggaatggacgccggcttccgggacgagtccttgccggtcggtggcaccgggacatctgaggtggcgactgcagaatcagggcaggttgattcgccgacgaaagaatccgccctggctcgtgacccggtaggcaccgggagctgtccagcgattgcgaatgaggtggttgacaatgccatgcccgagaacgccggtggcgatgaccgtacgcaatccacagcgggcatgccgcaatccttcgtcacgcgtgtgaaggcgcagatcaccgataccgaggagtttctggaggcgcagggctatcgggggacggccgcggtcaacggcatcgccatggtcgtggaccccgaggcggcggccgaggcgctgtcactgatgacggagatcggcacgaatatccgccgccatgcaccggcgggagatgattcctacctgctgttcgtcacgctgtctcccgaatggattgagattcgcgagaccaacgatatccgtgacgatgccgacgcgcagagtggcctgtccgcgcaggagcggtcggggcgtgggctggccatgcatcgcacccgtgtgcaggagttgggcggtgaattgaccacccgttcggatgatggcacgtggatgatctatgtgcgtatcccgtgcgtgcggggctgatggggcagaagctgcgatgtccggcgtccggcgctgattgtgccctgtcctcacaaatgaggacgacgaccgcagccatgtccccataaccgaggattgcgggtgttcggctcggcggcggctccctatggtggcgtccataaggaccaatcccagggaggacaacgatggcaagtgatacggaattatggcggggaactgattacggatggtggctggctgcggacacgtccggcgcggtcggtgccagcctgatcgcgttcgcggtgccgctgatcatgctcgccacgacaggatcctctgccgccgccaccacgacggaaagcatctgcgtggtggtgcagacggtgctgggccttgccggcggcgtgattcaggaccggtatgatcgccgtacgctcatgctgatctggggtgcgtccggtgtggtgctctcggcggtggcggcggcagcggtgatgctgttcggcaatgcgccgaagacgagcggccatggggttaacggggcaaacgctccggcattcggcggaccctatgcccacgtgcttccgatcgcgctgctgtgtatcgtcgtgctgttttcggtgcgcgatgggctgttggagaatacgtcgaatgccatgctgcgtggcgtggtgccggatgagcagctgccgtacgcgatggcgttgaatgatgctcgtgattcgacggtcacgttggtgggtggtccgttgggcggtctgctgatgaccgtgggacatgcggtgccgttcctgaccagcgcggtgctgagcgtgctgggcatggtgtccgcatggcgtatccgccgctattggaaacgtgcgactgtgagcgatagcggccgtccgggcaatgttgataccggttcggaggtcggggccgtctcggacgccgatgatgccgatgactccgccccacgctggcgcgacgcactggacggcatgatctggctgctgcgcgaccggttccaacgccatctcatcatcgcagcggccatggtgaccggtgccagcaatgccttcctactgctgaccgcgctggacatctcccaaggtggcagccagctgatatccgccggatccatcaacgccgcctccgccgttggcatgttgctgggcgcactgatggcctcgcaactggtcaaccgtgtgcccggcggcgtactggtgggcgtgatgttcgtcttgctggctgtaggattcaccggtgccgcgttggtgccctccatggttggcaaggccatatttgtggcctgctcggtactggcattgcccgcgggcaacgcggtgcttggaggcctcggcaataccttggtgggcaaggacaagctcggccgcgttggagcgggcagcatggtgttgcagtacggtgcctatggcgtggccgtggcactcgccggctggggtatgcagaccatcggctacggtccgacctgcctgattctggccaccgtactggtggccgccgccgcttacgcgctgacgatgcgcagcctcatcaccctacccacgccggaccactgggccgagcacatccagcgttggagcatcgcacagttctgataaagggcatccgataccgggcatccgacgatttacagcggcagcaggtcgctcagatcgtcgcgctctccgaccgcgctgatgtggccggcgtccttttcctctgcccacgtggtgatgccgcaggccagccgtagccagacctcgggctccagttcgatgacgtccggtggagtgaggttgtgcgggtccgattccgggccgtccaggatcttgaccgcaccccacggcgcaacgcgcacctccacgccagggccgggcgcacgccgctccagcaggaacagcgagtagcgcacagccatcgcccacaccgggcgcggcagaacgggggaggtggtcaggcgatgtggtgtgttgtcggccagttccagggctgcggcacgccattgcaccagtgcgtcgtgccctcgtttcaagtctttttcgagaattactgccatatgctccatcatggcaccggcacgcgaaaccgcaaggtatgcaaacgatggcatactgtaggatgcggaaccgtgagatatgtgatacgctctcaatgagaacgtatgcaagaacgctccgccatcgtcgttacggagagttcatgcttacgtctatgcgacgatacctatcgcgcggcataataattacgggcacttatcccggaaggaaagtcagaatgaccgaaatcaccgcaccgaagtctcctgtcacggcggaacaattcgccgacgagattcgtgaacaactgaaatacactcaaaacgtcaccgccgagcaggccacccctgctgacgtgtatgtcgccgcatccaaggccgtgcgcaaccaccttgccgactcctggttcaagacccaggccgacaccgtcaacggcaacaccaaggccgtcggctacctgtccgccgagttcttgatgggcaagcagctggagaacgcactgctgaacgctggcctgaccgaccagttcgacaaggctgtggaagcccttggcttcaagccgaaggacatcgtggacgccgaatacgagccgggcctcggcaacggtggcctcggccgtctggccgcctgcttcatcgactccctcgcctcgctgggcgtgccggccttcggctacggcatccagtacaagtacggcatcttcaagcagaagttcgacgagaacggcaaacaggttgagaccccggattactggctggccaacgaagagccgtggggccacaccgactacaaccgtgatcagaaggtctccttcggtggcaaggtcgtcgagaacgccgacggcaccaagacctgggaaccggcctggtccgtgcgcgccgtgccggtggactacatggtccctggctacaagtcccagcgtgtgaacaccctgcgcctgtggaccgccaagagctacgacgagttcgatctgctcgccttcaaccgttccgagtacatggacgccgtggccccgcaggtcaaggccgagaacatctccaagattctctacccggaagactccaccaaggtcggtaaggaactgcgcctcgagcagcagtacttcttcgtctccgcatccctgcacgacgccatccgcgtcttctacccggggcaggacaagccggacctgacgaccttcccgaacaagatcgtcttccagctcaacgacacccacccggtgatcggcatccccgagctcatgcgcatcctcatcgatgagtacggctacgactgggataccgcgtggtccatcaccaccaagaccttcaactacacctgccacaccctgctgccggaggcccttgaggtctggccggccagcctgatcggcgagctgctgccgcgtcaccttgagatcatcgagaagatcaacgcgcagttcgaggccgagctcaaggccaagggcgttgccgccgacaccatcaaggacatggccatctacaccggcgacgccgtgcgcatggcctacctggccacctacggcggctcccacgtcaacggcgttgccgagctgcactcccagctgctcaaggacgtcaccctgaagaacttctccgacgtctacccggacaagttcaccaacgtgaccaacggcgtgaccccgcgtcgcttcgtcaagctcgccaacccgcgcctgtccgacctcatcaccgagggcctgggcaccgacaagtgggtcgccgatctggaactgctcaagggcctcgagccgctggccaaggacgatgagttcgtcaagaagttcgccgccgtcaagaaggccaacaagcacgcattcgtgggcttcgccaaggaccactacggcatcgatatcgacgagaacaccctgttcaacaccatggtcaagcgtctgcacgagtacaagcgccagtctctgaagattctcgccgtgatctccaactacgccgacatcaagtccggcaaggtcaaggccgaggacatcactccgcgcaccgtgttcttcggtgccaaggccgctccgggctactacctggccaagatgaccatcgagctgatcaacaacgtttcccgcgtgatcagcagcgatccggccgtcaagggcaagctcgccgtccacatgctgccgaactacaacgtcgagatggctcagaacctcatcccggccaccgagcttgacgagcagatctcccaggccggcaaggaagcttccggtaccggcaacatgaagttcgctctgaacggcgccctgaccgtgggtacgctggacggcgcgaacgtcgagatccgtgagcgcgtcggcgccgagaacttcttcctgttcggcatgaccgtcgacgaggtcgagaagaagtacgccgagggctacaatcccgcctcctactacgaggccgatccgcgcctgaagcaggccatcgatctggtggccgacggcaccttctccaacggcgaccgcaacgcctactccccgctcgtggccgactggctgaccaaggactggttcatgaccctggccgacttctccgcctacatggacatccagtccgagatcgaggccctctacgccgatgagctcgaatggaaccgcaaggccctgctcaacgtggccaactccggctacttcagctccgaccgctccatggaagactatttggaacgtatctggcacactgctcctctggcctgacggccgccggagcagcgcgccggctacgtgctggtttctacctcgcggctgtcgccgctcggcgtcgcctacgggaagcccgccgggcttcccgcttaacggctccgcatatctggcacactgctcctctggctgactgagtcggtggggcggctcccctcggagaggggaaccagaacataagaagccccgcaaccgacatccatcggttgcggggcttcttgcgttgaaagaccgccctatcaggcttcggccggggcggcttccgcctcgccatcggcctcatcctcggccttgttcagacccaggtcgaccggcgaggagctgttctcccacggctcctcccacggatcgtaatctgggttctgctgcttgtagatgtacaagccaacaagcgcggcgagcaatccgccgaacagcagcgcgaagaacttccaaccgttagaagacttgttctccatgacggctcctttccctagggatcgtctggtcggtatgcccattcagaccgactctgctccctattctaggccgctgtttgtgacgattgggtggaatgacattcgtgggcgattcatccacgcccgcatgccctcggtcggctcagcatcttcgcggcgcgtgaaacgcatccgagaccttcgatacagtggattgcatgcatattcctacacaacgggagattcgataccagtgggagcgcggtggtccggtgatgacctgggcgctgattggtgcgtgcgtggcagtgtggctactggaggtattgctgggatttattgccccgggcctgagggcttggttgatgtacctcggcatggcggctccggtcagactggtggctgagccgtggacgctcatcacctcgatgttcctgcatgcgccgaactcgctattgcatatcctgttcaacatgatcgccctgtattccgtgggcccagtgctggaacgaatgatcggccactggcggttcttgggactgtatgtgatttccggccttggcggctctctgggacttatggtgtgggctgcggtggctccgggaggcatcggctggcagatggcagcctatggggcttctggagccttatttggcctgtttgcatcattgctggtggtatatcgccgtatcggcgccgatatccgctccatgttgatctggatggcggtgaacttcgccttgccgttcgtggtcgggggcgtggcgtggcaggcgcatgtcggcggctttgtagtgggtggaatactcacatggctgctggtgggtggtgtgccggcgtggcgaggtaaaagcctgaaatggcgtatgcaggtttacggctgggccatggtggtgctggtcgttgtgttgattctgttgtgcaatatggccaatccttacgggtggatgagtttcggctccctgcactgatatggcttgatatggctgtaaaaaacgattgatgccgggtattgcggaacatgcagtgcccggcatcagtgtatgtacggaaagcggcgatgtggatattagcgatgtggatatcgtcattcggtgagtgggcatgcgctgtatgaaggtatccacagtaatgaaggtatccacagtaatgagatgcgcgcaatgacgagttatccacgataacgagttatccacaatggtgacttgtgcacaagtgtgtagaaaagtgcataagactgtggataacttatgtggataagttaggaatgccgcggtattactgggtttgttgcagtggataactcgggtgtataactgttccctcgctgtggcgatatatgccaagccaaagttatgcacgagatatacaccgagaaacgccgcttatccaccacttatccacatggttttccacattcggtggaaaactacatgggtgtgattcatccacaggctgtggataacgtagtggataagtcgtggataagtcgtggataagtggtggatagctgtggatgaacaggtgaaggcacgaaaaaggccggcctccgcatacgggaggtcggcctttcgcataagaactaagaacaacctaacgatagaaaaacgatctaccgatagataagcgcaacgagtcggaactcagcgccatcccatcgtcatcaggaatccgatcatgatcagggcgaagccgatgcccaggttccacgcgccgatgttcggaatcggccaggagccggacggggagaggtagtacaccacacaccaaatcaggccgatgatcataaacgcgcagaacagcggcacgaaccaacgcgggttcgacttggtgcccttaatggtttcttcaacacgcttggtgttctccgcctgacggttcatcatgcgctgcatctgcggggtcagcgtggccttatcggcagtggcgttgagcacggcctgcacctgctccatattcacgccgtaagccgcgtcttcctcggcagaagcgttctctgcgttctgcttggtgtctttgttggcggtctcgtcagcagcggtgctggatgaggtctcgctctgccagtccttctggttgttcgagtcggtctcgtgcagctcttcgtcagccatcagcatagtctccattcaataggctaaaagtcataatagtggctacactcgaaagcggcgaccagagtcggcaagaagacaggaaattcatggccagacatgtaggtaagcacggcgcacggcactccctatggggtggtgtcgcggtattcgtcgtcattgccttgaccggttttctgctgagcaccaacgtgagggtcaatcgtacggttgccgccaccaacgatacggccgatctggtggagcaaggcgtgggcgaggccaaccagctgcagcaggacgtcagcgatctgaccgaacaggtcgccaatcttacggacgcgctcaaggccgatggcaccgacggtactgacagcacgcagaaccaaggcaaggactccagcaatgtggattccagcctgatgctgcccgcgctcagcggcagcggcgtaacggtaacgctggatgattctccgttatgggagaacgccgtcaacaacaatggtacgaccgccaatatcaacgattacgtgattcatcagcaggacgtcgaatcggtggtgaatgccttgtgggccggcggtgccgatgcgctgatgattatggatcagcgggtgctgttcaattcggcggtcatctgttccggcaacgtgctgtcgttgcacggtaagaaatactcgccgccattcaccatttccgcgattggtgacccgcaaagacttcgcgcagcgttgaacgactccgaagccattaccattcttaagcaatatgtgaccgcgtttggcattggctacaaggtggagaatgccgagggccttcagttccccgctaccgccgccttgctgcagcagttgaaatatgccacggtcgatacgtcaaagaccacagatgaggagcagactcagcaatgagacacggcaggcacaacagcggcgcaccggcgcccattgatctcgcgtccgtgtcggacgtacagcccttccccgaggacgacgccgcacgaatggcggcagacccggccaatgccagcagggcaaggtcccgtcgtgccgcagtacgcggcgcgtcttcgccccagcggagcctgatctggcaggcactcggcatctgcgccgaactgctgattaccgctgccgtgatttgcgccctgtacatcgtctggcagatgtggtggaccggtgtcgaggcggagcgagcccagaacgaaaccacccagtccgtcgactggagcgaccccagcaacaacgggggaacggtcaccatcgccaaagcccaggagggcgatgctccagtacagccgaaagacgcgaaatatggcgacttgattgcgcagatctacattccgcgcttcggctcccaatggcatcgcaacatcgtggaaggcaccacgctcgagcagctcaatcgccacggtctgggccattacgacaccacccagatgccggggcaggtcggcaacttcgccgtcgccggccaccgcaacggctacgggcagccgttgggcgatgtggacaagttgcaggaaggcgatcccatcatcgttcgtaccaaggattactggtacgtctaccactacacccggcacgagattgtgctgcccacggacgtgtatgtgatcgcgcccaatccggaagactccactgccaatcccaccaaacgcatgatcacactgaccacctgtgagccgaaatactccacccccacccatcgatggatcagctatggtgagttggcgtactgggccaaagtgtctgatggcgtgcccaaagagctggctactactgattcgtccggtgcagtgaagttctccaccaccgaaaccccctcgatcgcttcccgcattggctcgctggacaaggtggtattcggcgcgctggtagtgtggctggttctgttcatcgccgctgcggtggcatggcgctggccggtgctgcgcgagattcgcgcgggtgagcgtcgccgcccggatgccagcatctatggcggactgttgcgtctgcagcccggcgtggcaccgattcgatggctgctgctggctctgctgctgttcgcagccgccgcggcgctgttccagtggggattcccttgggccgccgccaatatcccattcctacagcagatgtcgaacttcgtggcagtgagctgacggcagcctagtactatggcttgcagtacacgtccctcaaggagagccctatgaccgattccgcgcatattttggtggtggataactacgattccttcgtctacacgatcgtaggctatctgcaaacccttggcgccactgttgatgtggtgcgtaacgacgctatcgacccagccgcgccgggtgtactggacggttacgatggcgtgctgatttctcccggccctggcgctccggccgaatccggtgccagtgaggatatgattcgcctgtgcgcggccagcggcgtgccgatgtttggtgtgtgcctgggcttgcaggcgctcgccgaggtgtatggctgcactgtgggccatgcgcccaccatcatgcatggcaagaccagcttggtggaacatatcgatgacgagattttcgagggcgtggccaaccccatgaccgccacccgctaccattcgttggccgtcgagcccgattcggtgccggatacgctggtggttaccgcgtggacgcagggcgaccacattattcagggcatcaaggtcaagggcaagccgatgtacgccgtgcaattccatcccgaatccgtgatgacccaggacggctaccgtctgctggccaactggcttaaggtctgcggccaagacaacgccgtggccaagtccgccggccttcagcccaaggttacgaagtagcttttccgcgcgcggcgacgctttcccgggaatgttgcgctgggatagctctttatacagcaaaggggaggggtgcagaagcccctcccctttgcgttgtgtgattgcgttgcgtgtttacgttgcgcatgtgttgcgcatgtgttgcgctatgtgcgttgcgtatgcgcaacacacacgcccggcgctcactcactcacgggttccgccccccgttgccgttgttggcaccgttgccgttgccaccgtctccggtaccggtgtcgcctccggtgctgccggccttcgtggtaatggtgacggtcgatcccgcatctacttggctgccagcgccaggattgatgctgactaccacagcggtgctgtcggttgggccactggcctgagccttgaggcccacggccttgagcatgagttcggcggtggcgtagtcagtgccagcggtgatattcggtacagcgaccttttccttgcccgtggacacccagatggtgatggacccgccctgcgcgatggaagagcccgaatcggggcttacgcgggtaatcagaccggcctccaccgtatcggagctttcctgctccacggtgaagctgaacttgccctcatactgctgtagcacgctgtccttcgactgaccgaccaaattgctcggtacggtggtcatgccggaagaaacatatatggtgatggtggtgcccttgggaaccgactgaccggcggcaggatcggttctcgtcaccatatccttggcgatgtcggcgctgtcttcggttttgacggtggcgttcaccttgaacccggcgctttccagaatgctgcgcgcctcttcctggctgcgctccttgacatccggaacctgagtggactgcgggcctgcggagaaccacaccttcacggcagatcccctggccaccttggagccggcgtccgggctcatcttggtgcaggtgccttccggctcggtggagtcggtgtcttgcttttcggtcatcttcaagcccaatctctcaagcttgagcttgatgttgtccttggacgtggaagcgttgcacacttcagggatggtgacggtgtcttcagaggacttgttgtcggagccgttcatggcgaacatgatgcccacaatgacgagcaccgcgacaatcgccgcgatcgccgaaccgatgatgatcttcttgcgcttcttggccttggccgccgccgcacgctgctgcgcacgggactgcaacgccgctgagttggcaccattggccggtggaatctgctcgaactgaccggtcaccgggttgaatgcctgggtgggctgctgctgcggttccaccggcgtggtgggcaaatcacgttcggcttccttgcgggccttcatattcgacaggtccgtcaatgggttgaacgcggccgccaccggcacgccgccgttcatgtaggtcaggatgtcggtcttgaattcggaggccgtggcgtagcggttctgtcggtccttggccatggccttggcgcagattgaatcccacatcttcggcagccccggcaccacggcggatggcggcgtggcgacttcggagacatgctggtaggcgatggccacagcggaatcgccggtaaacggcgggcgcccggtaagcatctcgtagagcacgcagccggcggaatacaggtcggaacgcatgtcgacggtctcgccgcgcgcctgctcgggagaaaggtactgtgcggtgcccaccacgccctgcgactgggtcatggtggttgcggaatcgtccagagcgcgggcgatgccgaagtccatgaccttgaccgcgccctgctcggaaatcatgatgttgccgggcttgatatcgcggtggataatgcccatgcgatgcgaatagtcgagcgcgttaagcacgcccaacatcacctgttcgcagtcgcgctggctgagtgcgccgttgaccttgatgatgtcgcgcagggtctggcccttgacgtattccatgacgatgtacggcaaacgctcggtatcgccgctttcggaagaaaccagttcttcgcccgaatcgtagatgttcacgatgttcgggttgttcatctgggccacggcgtgtgcttcgcggcggaaacgggccaggaagatgtcgtcgttggccagatcggcgcgcatgattttcacggccacggtacggcccagacgggtgtcaagagccacgtggacctcggccatgccgccacgaccgatgagctggccaagctggtagcgtccgccggccaatgcggtgggcatactggtgctcattgcttattccctcccaatcttgaggccggggcctccaaaacaatgcgtggcgtgctggtcactcggcgcggcagtcgattgccggacgtggccatggtggtgtcggccatttcggtctgctgatccagcagacggcgttcgatgcgtgccagcgtacgggacaccaccagcgcgtctttcgggcgatccaacgggtccttggccagcatcgacatgacaaattcgcgtaactggacgtccaccgagttcggcagcggaggcacgggattgttcacgtgcgctgcggcgatatcgaccggagtggtgccggtgaacggacgatgcccggcaaggccctcgtacgccactacgcccagtgaatagatgtccgattgcggcgtggcctgctggccctgcgcctgctcgggggagatgtattgtgcggtgcccaccaccatgccgtcctgggtgatctggccttggccggtggagtagctcacgccgaaatcggtgatcttcacttcgccggtgtcggaaaccatgatgttggccggcttgacgtcacgatgaatcacgccgtgcgagtgggccacgaataggcctcgcgcggtctgaatcagaatgggcagcagttcgatgggatccatcgcgcccttgctgtggaacagatccgccaacgatttcgaggggacgtattccataatcagaaagccgatgccgtcatgctcgtagtattcgaacaacgcagcgatgttcgggtgcgccagattggcggaattatgggcttcggcacgcaggcggcgcagcttggcctcggcgttggtcacgtccgagcgcagcgccttgatggccacttcacggccgagctgaatatcgtagcctttccagacctcgcccataccgccttgcgcaagacgcgaatcaagacgatatcggcggtgaataagctgtccttcgataagtttcactgctgcaaagcctcctgcatcatcgcgcgcatgatcgggccagcggcgagcgaaccgtgtacatctgtgttatgcaccaacaccgcgacggcgatttgcggatcgtccgccggcgcgaaaccgatcccccagccgtcgatggcagagttgtcgataccgatttgtgcggtaccggttttggccgccaccttgatgccgtcgatggccagctgcggattggcctcggtcaccacgctctccatcatcgtggtgagcttgtctgcggaatccttgctgaacgcgttggccatggtttgcggtttggtctgcgaaagtacggtgagatcggcggcgcgcacacgatcgaccagcgtgggctgcatcagtttgccattgttggcgattgcctgcgcgaccatcgccatctgcaacggcgtggccgtggtgtcgccttggccgatggatgccagcgcaagcttgtcgtcggtcggatcagaggggaatgtggacgcggtggccgtcatcggggtgcccgtggattcggtgccgtcaatggtgatggtgctgccgaacccgagcttggtggccatgtccgaaaccttgctcgcgccgagtttcacgccaagctgggcgaaagcggtgttggacgaccatgcgacggcctcttgcagggagatctgtccgttgacgccatcgccctgtgcctcgtcgttcggcagctgtgtggcggttcccggcaaggtatagctggagcctgcaggaatcttcgtgtccgtctgatattcgccggtttccagcgcagccgaggcgacgatggtcttgaacgtggaccctggtgggtacagctgcgaggtggcgcggttgattagtgggctatttagtgggctattttggcccgcagaaagttcgttgtaggcctgagacgcggctttggtgtcatgggtcgccagtttgttcggatcataactgggcgtgctcaccatggcgaggatacgaccggtgctgacttcgatggccaccgccgcaccatcgcgcgtaccgagctgatcgtaggcaacctgctgcagcttggggtcgatggaggtttcgatggacgcgccctgattcgtagtgccggtgagcatggccttggcccgctgccagatcaatgaatcggcctcaccgttgagcagcatgctgcgggaggcttccagaccgcgatcggcggtctggttgatggagaagaagccggtgaccggagcatacagcggaccgttggaataggtacgcaggtatttgaatgcgtcgttgaccggctcggatttggccatgaccgtgccgtccgaggccaggatggcaccgcggtaggcaccgagctggtggtacagcgaacgggcgttgcgcggatcgttgttcagcgcgttggcccgtaccgccatgatgatggtggacgacaggccgagaatcacgaacagcgcgaccacggcggtgaaaagctgacgaagatatttgttcatacgcgagtgcctccgttaacgggaggaagcgggggaatcgtaccggtaggcgtgtacggttcatcggcgccggcatacgccggagtggtggcatccacaatgggctcggcgatgggggccgcagcagagcccgcagaggtcacaattgcgggcacttcgggtgcctcaagtgtgtctggcgcgtgcttggtgatgtccacaatggggtcgtcaaacgattccgcctcggactgcgacgccgtagccgacgcgctgcgaggctgaacgatcggctcagtggcgcgggctcgggcctcaagttccttgttgcgcagcacggccaaagcctcgtactggaacgtatccgaggtcagctccggctcgggcgcattggccgagttcgagatgatgatgagcagggtcgcgagaatatagttggcgatcagactggagccgccggccgccatatagggcagggtcagaccggtcagaggaatcaccagcgtgatgccgccgaccacggtgaacacttggaaggccatggtgaacaccagtccggaagcgagcagcttgccgaagccatccttgattttcatggcggtgatgaagccggaggcaatgatgagcaggtagagcatcaaaatggccaggacgcccatcagaccgagttcctcgcccagagaggcgtagatgaaatcggagttcgcgaacgtaacgagcgaaggatggccttggccgagaccggtgccgagcatgccgcctgatgccaggccgaaaatgccggtgaccagctgccaggagccgccgggggtcttgttgtattgctcgttgctgaacgggtgcagccaggcgtcgatgcgctgacccacgtggctgaacatgcctgcggccagcacggcacccgcggcgaacgcgatcagaccgatgatgatccagcttttacggccggtggccgtgtacagcatggccacgaacatggcgaagaacataagcgaggtgcccagatcatgctgcatgacgagcacgcccatcgaggcgatccacaccacgatgatcgggccgagatccttgatacgcggcagctgcagaccgagcatcttcttaccgcccacggccagctggtcgcgatgatcgaacaggtaggcagcgaagaagaacgcgaggaacagtttggcgaactcgcccggctggaactggcccaatcccggaatcctgatccagatgcgcgcgccgttcacctccttgccgatgaacggcagcatcggggcgagcagcagcaccaggcccaccaccatcgacacataggagaagcgtcgtagcacgcggtagtccttcaggaagatgatgagcagcgcggaaagcacgatggcgatgcacagccacaccagctggcgttgggccaccgcccaaccttcgctctggtcgatgcgggcgatcatggtcacgccggtggcggtcagcagtagcacgcaaggcagaatcgactggctggcgtacggctggaagcgcacaatcagcccccacagcaccagaaacagcactacgaccaatgccagcatgccggcgtattgcatagggaattcgccggcggtgcgttggaacatctggatgaacgccaacgcgctgatcgccatggcaatcagcaacaaagaaatctgacgtagacgggtaacgatcattgagaatctcccgtggccgcgttgtcggccgctccgataccggatttatccgaggaatcggatgagcttgacgaaccggacttgtctgacgaggagccggactggctggacgaatcctcggtgctgtccttggaatcgctctgggagctgtctttggaactgtccggggaattggacgcctcggccttcttggcggcgtcggcttcctgctgcttggccagtttgcgcatttcggtgcggataatacccacatgcgactgcgcttcgtccaacgaaccgactgtgatgccttggctcagctggtcacgccatgtctgaggcaggtccgcggtggcgatattggtggtctgcacttcgtgcgaaagctcaagtccaaagagattggtcggcacgccacgataaatggccacggtgccgttgctatctcccacgtagtagtgcgtctggctccacgtgtacgcgccccagccagcgccggccaatgccagcacggcaagaatgcaggtaataatcaccgcaagcttattgcggcgcttcttggtacgcgtggccttcttctgctcgacctgctcatcgcggatggctttggccacatccgggtcgttggggtcggcggacaggcgcccatccggcttttgcaccaccggaatctcaccggtatcgggattggctcgttcaccggtctcctcgcggacggtggacggctgcaccacgcgtgtggacgacggtttggccgtggtttgcgcggtctccgcctcgtgcgcgctggcgggctgaatcaatgctgcggcgcgctgggcgggggaatcatcctcccgcagtgcgggcgcggtagccaccggctcgttgacgatgtcggcgatcggctcaagattacggctggcggcaccgccgaccaacggcgtttggtgcggcagatcgaacgcatcggcatccaacgccaacgtggcatccgcaataacggccgtgacattatcggtgctgcctgcccgcagtgccatctgcaccagacgctgcgcgcattcgccctgatcggacagcgtggtcatcgtctcttcgatggtggaatcttccagcacaccgcacaggccgtccgagcacagcagccaacggtcggcggggtgggctcggcgaatcgaaatatccgggcgcgggtcaatgtcaaagtcgccaagcacgcgcatcacgacgttgcgctgcgggtggttcttggcttcggatggggtgatacgaccggtgttgatgaggtgttgcacgtagctgtggtcgcacgtgatgcggctcaggtgtccgtcgcgcagcaggtaggcgcgcgaatcgccgatatgggcgatgacccagtagccggccaccaatgccactgcggtaacggtggtgcccatgccggcaagcttgcgttcgcgcttggccttgccgacgatggcgtcatgcgcggccataacggaggtttccatcatgcgggagatcgtctcgacgttgccgccggtgtcgtcctgctcgatgtgggccagtgaccggatggcgatggaggatgccgtatcgccgccggcgtgaccgcccatgccgtcgcacatggcgatgagatgctcgccggcgaaggaggaatcctgattgttcgcgcgcacagtgcccacatcggacaccgtggtggaatacaggaacagcggttgtgaagcggcggattttggcatgcggctacctcagttcgaaggtggtggcgccgatgcgcacaggaatacgagcgggcaggatggtggggcggttgatgcgctgctggttgaccacggtgccattggtggagttcaggtcttcaatggcccactgcccggagcgcgtgtcacggtagacgcgggcatggtgggaagacacgaattcgtcatcgagcaccacggtgttcgaggcggcgcggccaagcgcgatgtcggcttcggccagcggcacggagctgccggcaagcggaccatcgatgatgaccaacagggtaggctgcgccgaggcgacggacgacgcggaagcgctgggccggcgatgcgggcgcggcgcagctgcctgtggcgtttcggccttggccttatgcacttcacgctcacgacggcgacgcgcgcgcgaaggtcgcggactgaacgtctcgatgtccttgcgcagcgaacgcacggtcagccagatgaatatccacagcaggatcaggaatccatacttgagcagggcgaatgtcagttcggtcatgggtgggcggctttcgggcgtgtgctcgactactcctgggcttgggcggaggcccagtacaggatgcgggtacggccgatggtgatggtgttgccatcgagcagcgtggcggcgggcacttggtggccctccacgtacgtgccgttggtcgaacccaggtcgcgggcgatcacgccgttatccgtgatgtcgatttccaggtgcttgcgggagatgcccggatcgtcgatgacgatatcgcagccggaaccgcggccgattaccgtcttgtctttggtgagcaggtactggttgccgttcacctcgagcaccgggctgtcctcggtctgcgcatcggtggtgaccggcacggcattgccctgcacggattcggaggtgaggttgaagttgcccttggacaggtcaaggtcttcctcgaagatcacgatcaccgggcccacgaaggcgtaatgctggctcttcgcgtactcggtgaggttatcggccagttcgttggccagggtctcgctaccccatgcctcgatacggtcgaagtcaggagtactgagcttgaaacggtattcattcggggccaccgtgcggtcacggcccacgggcatggcctcggcgtcaatctcgcgctccaaggcgctggaaagatcgacaggctgcaggtctttggagccaaacttggcgaatactccgttgactgcaccctccacgcttttttcaaaacggtcgagaacgctcatagtcctccctttctaatcctcacccatcctacgcggtgatgggaatatgaggcaaaaaaccggtctttcacatgacgatgggtgcaaaatatccaaaaatatccaaaaattcagggcggaaatgggtgcggcgcaccacctgcgccgtttttccgcatgccgtgtgggcgcgggccccgggcgtgccgcggacgtcacggcccacggcacgcccggggccggtcaggccagggcgtcgcgcaggaagtcgcgctggagggtgagcaggttttcggctacggtctcgtcgttggtcatatgggtgatgcccgtcaacggcaggaaggtgtgcgggcgacccgccgccatcagggcttgcgagaggcgcaggctatgggcgatggtgacgttgtcgtcggcgaaaccgtggatcagcataagcgggcgctcgagtttcggtgcgtcctgcacgatgccgttgcggtagtagacatccgggtcgaggcccagatagcgctcggtgtaatgcgtgtcgtacagcgtccagtcggtgggcggggcgccggcgcacgcggccttgaacacgttcggcgcgtccagcacggccagtgcggacaggaagccgccgtacgaccagccgatcatacacaccttgtcgaggtccggtgcgggaacgccgggcctgcgcccatcggcgttgagcctggagacggcctcgggaagggcgttgacggcttcgatctgatcggccagcgtcacgcccttcatgttctcgaagattgcgcgatcccaggccgggccgcggcctgtggtgccacggccgtccgccgtgaccaccaggaagccctggtcggcccaccactggccctcccagtagaaggactgggaggcgacgacctgctggaagccgggcccgccgtacggcttcatcagcaccggcagtttgtcggcatgggcgtacgggctggacgggctcggcgcgatgatcgccgtgtacaaccggtgctcgcccagccgcgtgaacgtgacgttcggcgtgaacccgggttccgcggcggtgctggtgatgtcggcggcggtgatgtcggtggtgttggcggcatcgctggtgttggcggcgatgacggcatcggtgacgccgccgacggcgcgtcgcgtgacgatgtgccgcatccgggcgcgggcggaacgcatatcgcgcccagacaccaccatgccgcgtgcgccgcgtgaggccgtccactgaccgggctcggtcgtgatcggcgcgaccgagccgtcatatcccatgctcaccacatcgaagctgcgggcgtcatggccgccgaacagagactcggcatccgaagcggcacccgagccggcccaggcgcgcggcacctcggtcgcgatttcgggcgcacgctgcaccacggccagcacatcctcgtcggtcacggcgagcaccgtgcgcacgttccagccagccggcgtgaacggtcggccgtccaccgtcagacggttggtatccgtggccatatcgttgagcgagcacaccagacgatcatccggcgtgtaggcgggcgtgccgtgaaccaagtcgatccactgctcgttcgcgtgctcctcaagcacacgcgtggcgcccagcgcggccccatccgccgcgaccgccacctcgagcacctggtcgcgggtctggcggcggttctgcaccagcaccagcggatcgtggccgcgacgccagctcacggcggccacatactcgtacgcctcgcgatcccaatccacatcggcgttgccggtgatgcccgcgtaccggtcgttctcatcgaacgccagggcgatcacggtcagatacacgtcggcgttgcgggtcagcgcgcgcgggtaacggcggccggcggccggcttctcggggtcggccggatcgctgatgtaccaggtcggctcgtcggcggtgtcgaaagactcgaacagcacatgctgcgaatccggggcccaccagaaaccgtcgtaacggtccatctcctcgccggccacgaactcggccagaccgatgttccacgtgttttcggccggattgccgtcctcatcctccacgctcacgccgtagacggcggtgatgcggtcacccagctcgccgccgatatcgaccagcatcaggtagctgcccgtggtgtacagcacatgctcgccatcc

SEQ ID NO: 1490 - DNA, 7624 bp, Unknown
  R257_15m  MAG No. k141_35855
cctgctcagaggatcaaatcacaaaggatggaaaggaatccatggcaaacttaagctttagagaatttctcatggaagcgctcatcggataaagtcgacacgccgaacgccgttgccaccatgactgccaaatccagtaaaaaaccagtaacaatgaccgtcacggtgagccaatctcagtcgcctcaacaaagacaaccaaaaatcagaaaccgccattttccaaggatattggtaccatcaaagcccagtaggataaacaaagaaaggtcgggcggaaacaggatgtcgcaggttcaaatcctgtcagcccgacgtttgaggcttgaatcgtcagagcaagtgcaacaccgttgaatggtggacttcccggggtgtccggtatccatggcgtttgcgtggtctgtgatcgatggcgtcgtacacggcccggacctcctgctcgccgacagtggtgaagtcggcgcccttggggagatactcacgaatcagcccgtcggtgttcccgttgccgccgcgccgccatggatgacggggcagggcgaagcagaacaccgcgccggtggcctgtacgaccttctcgaagtcagcgaaccccataccccggtccagggtcacggtccggctctccggatgccttcggagcgcgccgatccccacatcggcaacgtcgcgtctggcatgcgcggcacagcgtcctccggagagcagaccgcttctgcggtccacgagcgtgacgaggcacgccccggcgcctttgccgacgacggcgtcgccttcccggccgccgagcccggaacgttcccccacgatctcgggacgctgcccgccgcgacgggcgcccgggatctcgccacgccgttcctccggcccgccctccccgtgccggcgtttgcctttatgacgcagacgcgccctgattccacggcgggtacgcgtcaggccgggtggatcaagccgccgctcgttgatcgccctgtagatagcggacgcaaagaccatcagtcccggccgttcgaccgcgatcctgcccgcgatccgcccgggcggccaatgctcccgcacgacaagacgccgcacaagccccgcccctcgctcgccgtcgaggaccccgggccgcacgcaggaaccccttcgggactcgcagccacgctgggcggccgatgcacgatggcaccgccccgagccaacggcgaacgagtctccggccatctccccgctgacggccgctttgtccccgcccgtcgctccggccatcccgccgcagctccccccgcgcctcagcaacacgatctcctcgcgctcggccaaggcaagacgggcgtaccggcccacgggacctcccgatacccggtcgtcgcaggcaaacaccatcgtatcgggaacccatgggcccacatcatccacaagcgttgcactagcaacgaaaattcaagacccaaaaacggcggaattccagcgaaatcgctgcattcgcaaaatcacgcttgctgcttgctcgtttccttcgaccactgaccgatgcattgagtaggcacttggcgccctctgccatagcacgccccgaaatctgccgtcagacgcacccatgccatagcggctttcccaatccccaagcttcattcacgccgctgcacggccaacgccgagtcaccacgcggcatatgaaacggcgccctcgcatcaggccggaaacctaacacgcgggcgccatccaaggaaacagacaacacagcccctgcaactcagtgcttgagcagatagtcgagctgctcgaccaccagcctgttgggccgccagggttgggacagcccagaggccatctcgtcgactaagggcttgaggttctcctgcacaaagctgaccgactgatcgaacggcacaccgcccgggaagtaggtctggtccatgatgccggcgatgccccgcttggtggggctgagcagcaccacgggcttgatggtgagcatcgggaactcctcctcgtagatgccagccgcccaagccatgttgttcgagggctcgtaggtcttgaccaaggtgctgttggtcgcaagcttggccccggaacggtcggcgaatgaaagggattcgtcgatcttgaacaggtcgatcgcatgggttttcgcgttgcggtccgcagcttgctccccggccatttggctttggaagtagtagtccgcgtccgcacgatactgcttggcatcaagcagccacagggtgtcgcgcagcagcagcgcgcagtccacgtccgggccgggatgaccgggaatggacagcgaccaccacgagtaggcatatcggagcacgccggtacggcacagcagctgggccagggcgagctcgccctgctgtccctgctggatacgcgccgcgccgaagcccgactcaccaagacccacgcctggctggccgtggatgtggtcgccggcggtggagaggtccgtgttgaacaggccgtcgcagccgaagtccgcatagtcgtccacgaagttgttcacgatgacgggcttgcgccagaccacgcgctgaccgtcggtgtgcggcttccatgacttgtcggccacggtggcgctgccggagcgcaccgactgggcggcgtccgcccaacgcggggcgttggggtcgggagttacgagattgccatgctcgtcgagccgcttgggcggttcgggggcgggttgctcgtaggtggtttgctgccagttgaagtcaccgtcggcaccttggccgccatgcgggcgggcgacggacggctgaccggcaacggcagcggcaccgttcgcggtctgccccggagcggcagcggcggtcgggttcggcgcgacacccgccgccggagcattctgccgcgcagcggggtcctgccccttaccttccttgccctccttgcttttcttccgcgtccgagcgacaaacacacccacgaccaccgcgatgatcagagccagagaattgttcagattcagggcgttcaggatgaagtaggtgacgatgaaggcaatgatgccagcgatcatgatggatgttccttcttcctttttccttctcttgtctcgactcgtccctgactcacaccatcttgccgcaggacgggcactccaccagcccctcgggcggggtgaagagcatagcctggcagttggggcacctgcggtcgcgatacatcagcttctcgcgcatgagctgcatggtctccttggtggcctcatccgcctgggactccaccaggttgcgcatgtactgcgccgaggtgatataggtgaactcacggttgcgccgcgcacaggctaggaagttgatggcggcgaagatcatcgggatcaacaccatcagcaggaacccggcaatgcccatgagtttgacgacagcctgtacctgccgcagcatccgtccgccgtcggcattgacatccacgggtatcgattgcagcatggaaaccagccattggtcgaatacgccgccccacagcagcttttgcagagaaacagctgccaccacaatcagcgggatatacagcaacgtaacgatgccgtagacccacatcgtccgacggccgcgttgacgaaggcgttcctgcatctggtctggggagagggcggcttgcgccttgcgtgttgcggttgccatcaccggcctccttccatgccgggcaccacatgcgatgccacgtcgtttgcgtcgatgctgttgccgcaggccgggcagacgtacggccggttgagccgcgcagcccctgtggccatgcataccgggcaacggacggccactttggccccttcggcggcggaggctgcggcctgcgcggaatcgacgcgatcgctggcctcaccttgggagtcggccacgatgtctgctgcggtcaacgtgccgccacaaccaaggcagcgacgcgaacggtcggcgtagccgatgctcggcttaccgcagcgcgggcagcggaattgcacgatcgaggtgtcgccccagatcgcacggccgtcaaccgagtggacctgacgaaggctggtattgactccggaggcggctggggcttgctgcgtgggagactgaacggaagacgacgcaccgaattgcgatgcagctgacgcggcagactgcatgatggcctgagcaccagctggcgtagccgccggagcttgaccgacaccgccgattgacggggcaccggcgaccaccgggccgcccgtcactgaggattcgggcttctcacctcgggccagccgcgcggcatcgagatgctcaagcgccgtgcgcgatatgtcggtgccacaggccgcacacttgatggcatgccccatgggcaggaagttccggctttggcagaccgggcatcgcagcgcgacgccggccgtggaatggttgacgcccacggaacggtgcatatccaccgaatactgggcctcctcggccgcgcgctcctgcacgcgcaccgcggctccctcgcgcatctggaccatgcgcgccgagccccgccactcatcgatcacaacatacgccagcagggccacgccggcgaggaacagcagcaggttccttgcggagaactcggagaacaccgcgctgccggagcttgccagacagatgccgaagaacgggatcacgaagtagaggcccttgccgcgcacaccggagacgcgcgccatgcccttgatgatgccggcgatcagccagatgctcagcacgggtacgccgatcagcaggaccaggatcagcaggatcagcaggacgttctccatcagcggccgccctttccaggcgcggcagccacgggcgcggacgcctgattcggggccggcatggcaacggtctgtcccgcctcggcggcggtatggtcgagcgtctgcttggtgcgccgcatcgtggcgtcatagttcatagtagcgttgatgccggcactggcttgctgccacgaggtgaagttgtagtcgtcggcgatgccctgcgccatggtcatggtgacgaacacccctagaccggtgccggcggtcagcacaatgaccggaacccagagattatccagcaatgtcaacgtgttggcgaacatggtcgcgcttttcgggtcgctaaacacctcggtgtagtcaccgttgaagaagatgtccacggccttgaacatcgccatgccgaagatcatgagcgcgttgtcgaacagcagcaggatccacacgaccgacgcgatgcgcaagaacagccgtttgatgaacaggatcggcatcagaagccgccctgctgcgacgtgtaccggttcgcgctttcggcgacgagcttgtcgttggcggcgtcgttgtgctcctcgaagaacgaggtgtacagcgcgatggcggccaccgctagcagcacgatcaactcaaggatcatcgtgacacgccaccagccggtgttggaaaggaacagcaccacgatctgcaccacgtagttgaccgccagcgcgatgagcaccggcacgcgggtcacgtagtcacgggcctggaacagcatgggcaacaggaacagcaggccgctgagcgtcaggcaaacgaacgccacccaatacgccacgttgttggcatgcgggatgagcagcatgatgatgtccaccaccacggtgacgagaaccgcgaggatcgcgtgttttttgcccttcatgattgtcttctttcttttctgttgattgagattggctgatttggttgcgattggttgacaccggcatcgcgcggtcgcgacggggcagcgaagggccgcgatgcgaaaagccgggttcgatgccggaatgcggatacggcgcaaccgtcatcggacccggccgaagggtcagagctgggagaggatctcctgctgtttggccgtgaactgctcgtcggtgatcaggcccagatcatgcagttgcttgagtttgctcagcacctggaccaggtcgccggccggctggggctgggcgggctgaacgggttgagcggcggcagccggctgggtggagactgcggactcggattgcgtctgcgactgagcgggctggggctgcgctgccgcagcggtcggattcaccggggtctcagcggccggagccacaggactaccggcgggctggacaggctggaccgattgaaccggattcacgcccccggcaaaggactgctgctgcgctgcgggttgagcaggctgagcaggattcggctgagtctgcccagcagcctgccctggctgttgggccggcccggccatggtcggcgtcaccagtgaggagaagtccggcgcgcccatcgcactgatcgccccaccaagccccttggcgatgacgccacccgcgccaagccccacaccgaggccgatgccgccgttcatcaggtcggagccggaaccggtgttggccgctgcggtcttgagcacatcaagcgtatgctcctgctggaaggtgtagccgcgctgccgctggtcgtaggccttggcgtccgtcatcgccatccggcctgcggcctgcttctgcgtgacatacagattggattcggcatcagcgccgcgattctccatcatgttggcgcgtttctcgtattgtgcccattccttgctggacttgtcaatcaccagctcgttaagacggaagtcggagatcttgaggccgtacttatcctcgattcgttgcaggacgccgtccacctgcaactgctgctcgatggcggcgcgaatctcgctcgtgtggctgtcgatctgttcgatgggaagcttcatcagctgcagtaccttgccgatgatggtacgcgcggattcattgatctgctggcgcaccattttcttgacgtcgtcgcggctcacctcgtcatggcctgagacgaactggttgaggaacgcctccagatgcttggggttgtttgcctgaacctggggatcgtcgctgttctcataatccaaggcgatggtgtactggccgttggcaccggcgggaatcgtcagcgcggaggaccgtggaccgaacgccagccccggcacaggaacgccgatcggccccacaccccaaagcatgttcatctgatcgggcttattgatgaagtacagcatcgaggaatacgggtccacgccgccggtcaccatcttcgtcagtccggtgaggaagggcgcgctattgccctcgaccttgtgccggccttcgctgtagacggcggccacgcgaccggacttcacgaacaccgcaagctggtgtggcatgacctccagaatcgtgcccggcttgagcgcggtgtttgggtgcttccatgccagaacgttcgcagtgtccgcgccgttgtaccgcactacgtcgatgagatgaaaagccataatcgggcccctccccagtatcttccaatcctcgcttcgtcacggcaaactgtacccccccccccaggggacaaaaccactgggcgggttcctagtgaacgttgcgacacctgaggtttgagcggccgtccatggccacgttgtcggttgttgaggttatcacgcggcgtcgagcagttcgatgaccttctcgcttggtttcatgaagccgagggttttgcgtggccggtcgccgaggaactcaacgacagactgaggaaaaccctcgggttcatgaggcccagcgagaagatcatcgatctactcgacaccagcaactaacctaaaa

SEQ ID NO: 1491 - DNA, 9843 bp, Unknown
  R257_15m  MAG No. k141_36195
ccaagcgacgcaggtatagttcctacgagggcgagacgacgccggctcccgccaatctcgtcgaccgggacttcacggccgagcgtccgaacgagaagtggctgacggacatcagcgagatcaaggccagggacgggaagggcgtgcctttcgccgccggtcgactgcttcgatggcaagatcgtcgcatacaccgccggcttcagccccaacgcggagctggccaaccggatgccggagaaagcggcctcgacgctgccggggaacgcgcgtcccctggtgcattccgaccgtggatgccactgccggtggcccggatggctcgcgctcatggaacgcttcgggctgacgcgctccatgagcgcgaagggctgttcgccggacaacgcggccgcggagggattcttcggcaggatgaagaccgaggcggtctaccccgagaagtgggaggaacacacccgcaacgaggtgctcgccttggtcgatgagtacatacgctggtacaaccacgagcgcatcaaacagtcgcttggttggatgagcccggtacaataccgtcaaagccagggaatggctgcgtgattatctccaagaaaacgtccacagccccttatcccctaccccttgtggcatgattggtggcggtgagatcaatgacgagtccggcgaaacgtcaccagtcccgacacgcggatttatttggcgaaagacatctttaatgagccgcaagcgctaggccaacacttgcggctcacattatagataaaactagtccggctttaccagacagatttggttatctaattattgttattactctttatgggaggatagccataatatacggaaccgtaatgcggtgaagaagtattgtactttaacaacgtgtatgattctgcctcgccaactttactgctgccactagcaattgaattccaaatttttgaagcgaaagtagaacagttgttaagatagccccatctatcgttatttttaatattagaattcactgtatctaaatcaatttgccttaagggtaattgaatggaaacattctgaagattaataccattggaattaagcttcgaataaagattgagccacagacccttatattctctactgacatctacggattcatcccaagtgcttgctgttatagatttaccatcagcaacgttaatcccagcaatgtctgccgtagaaccagacaggtttgtgatcataagccaagaatgaccgagattcgtgaaactagatgacgagccggatcctgtagtagaataaatccgcagtaaagctacagcctctgcagcgcacgttttgtaattagcaccccgagaaggagatgagataattctcagatcttcgttatctgaggctttctcaagatcttccagagaagcattagacggaaagctggatagggtaggactcctatagggagtttcgatagattctgctgccgacgcatttactgtcacagttccagccaatattacagatactagagcagtgacaatttgtttgagtttctttatttatttctcctttttgtcaggaataaaatagtttcgatagcaccagcagcgacaaggaagggaaccgctcgtaaaaaataaagatatgaaggaaagctagacacgtattctggatgcaggtagtcaaaaataaagccgcttactgtgcgtaggagtccggcacacactaggagacctgcaagaatgtggcaaattcggcacatattgactcgattctcgaactgcggaggagtgagtcctattgtagtagggcttgccggagaggccaggcccagttcaaggagcggaaggcttgcgtcgctcctgcggaatcgacgagaaagtgttccagcctcctggtgaagagccacgagcaccctgcttggggacccgacatcatcgatgtacgacatacggcatctacgacttcgcccggttcgtgcagacgcttgaaagagcgagggtcatacaggcctcgtggaggcgcgcgtcttctcctttgtgggcgtttgggtttttctggtggtggtcttgatggactggcgtgtgcctctggaatgatgatatggaggtttcattatatcgtccgccgtctggctgggttgcattcgcgggggattggcgctattctgtaacagcgaaataagctggacttcgttcggttcgctgaggccattccgtggacgcggggtggcctcagtgctttcatcgctggattgggggaggccggatccatgtcgttgcgcaagccctacaggagtgtgaacgaacagctgcgcattctgcgctcccgtggcatggccgtcgatgccggtgcgggtcatgtgctcaggcgcgagggctattatccgatcgtcaatggctataaggatttgttcctcgaccgaaaggcatgcctgaccgctggtgatgaccggtacggaacgggcgcgcgtttcgatgatctgtacgccctgttcctgttcgaccgtgagttgcgtgaactgttgttttcctccatcacacgggcggaggccgcgctcaaggcagtgtgcgcgcatgagttcaccgggctgcaccccgacgaggtcaacccgtatctcaatcccgactattatgattccaggtgccgtccgagcgccatggcattgatcgacaaggtcttcaagcggatacttgagttggacggcaacccgcgcaacaggggcgactatggcggcaaggcgtatatccgccattgcgtggaagaccacaacggccaggtcccgttgtgggtgctggccaacgatctttccttcggccagacggtatggttcttccaagtccagtccccggccgtccgattggcggtcgccgaaagtttcaccggtttgtatgcggacacgcacgacaggccacggcgcatcaccatcaagcggctggacagcatcttcaacagactggtgttctaccgcaacctgtgcgcgcatgacgagcgctgctattgtgcccggtacgatgggcgcgctaacgagaacgtgtatcaggccatcggtgatcttggttatttgcttgacaaggacgattacttggaattgttcggtcgcttctccgcattggtcgcacgggtgacctccaccatgccatcgcggagccaagcgatcctgtctgccatgggtgtgcgcgaacgggaactggccgacagggcggaaatcatactgcgcagctgaccgttcctgctattgggacggtggcgtcgcaggcggctttggaccatgagccagctgatctgggctgtctgcaatgggcctgtgggattcgggatggatttggatgccattggcggctgggacggttgcacgggctgcgtatcgttctgtctattgtccgccatggagacatgctgccgggtgaatgcttctgggcaccacccatgcggaacatcatgaaaccacaggggtattgcgcttttccgtgccggtcggcgaagacgctgagcgccggcagggtggtggaacgttcccggattattcttgggtgcctgtaggtgcctcgtggaaaacgagcgtaaccggcaggtttcccaaaaattgaaaaccttggaacaaagccaaaaacgaccacatgcgattatcatcagaggtgcgcatgatgatggtagtcatggtcttaagtgtctcatgggcttgagaccgggtggtgatgcctgattgcaggaatgcgggttgtgattaggggcatgggatagccgaccaccaagattgagaccaatgcattgggtaacgatgcggcgagcggttccggcattctgccgttggaccgtgactgagatgccgtgttcttcgataatttgtgtcacgttggccctgtagatccagttctcgccacagtaagcgcccgatgtctatttagaggtgcaacacccctgttggtcctgcaattatagcagttcgtcggcgaatgcctcggcgggtgtccggtagtccagcacgcgcatgggacggttgtcggcctcgtcgacaatctcccgcagttccccggccatgcccatccggatctcgctgcgtttgggcagataccggcggatcatgccgttccggttctcgttgcttccccgccgccggctggagtacgggtcggcgaagtacgtgtccatgcccagcccgtcgcgcaggcgcgtgtggcgggcgaactcggtgccgttgtcgtgcgtgacgccgccgcgcgcgccggccggccgcggcgagaacatcgccagctgcgccccgacgctttccccggcggtcttgtcgggcacgatcccggccatgaggaacctggtcttcctctcgacctcggcggtgtgcaggtcgcatccggcgccgatcacgttgtcggcctcccaatggccgaaaccgctgcggtcgccggcctccggcggacgctcggagatgggagcccgtccgggaatcgggaaacacgccgttgccaatccacaaccgccatcggcaaatcggcgagcgccgtgagcagggggctccgccggaacacggacgacatcgtcggagcatacggcccgcaccgcgcgcaggtcacgcggcgacgggcggtcgcgccgcccgcgctttcgtgaacccatggtcatgattggcgaaccgccgtcggagaccgccgaccgagccgtccccggccactgggagggtgacctcattcgcggggccggcaacggcagtgccatcggcaccctcgtggagcgtgccatcaggttcgccatcctcccgtacctgtcggacggccacgacgccgtgcgcgtgcgggatgccatcatccgcaagatggccggacttcccgggaatccccgggacggccccacgtgggaccaacgagaacaccaacgggccgctgcgccggtacttccccgagggcgccgatccagacgtcttctccgaggaccacctcgacgcgcccaccgagaagctcaacgacaggccccgcaaaacgcttggataccgtaagtcgaacgaggcgatgatggaactcggcaaatacccgatgaagtcgaagccagacgcgctcgacgtgcacgacgccgtcgccgacgcgatagcgaagggcgatccggaacgcgcgtgcaaagccatgttcggcatcgtcgacgaagttgcccgcgtgctcaacttcttaaaaaatcgcaattcaatgggtgactggtgttaaccgatttcaggctctgatcaccgttctctggttttcaaacatcggtagcgtgcgggcagatcgctttcattcgttgctagctgttctcttctagctctgcccattccgcccctgacggcagcccgtcattatccggtgggattgatatcgggccccacgcgtagatgtgcggcgcattacagtattttcgattgaatttggcgcctccgaagtcgatgtctttaggtttgctgagattaaggctgtagaaatccgcggcctcatagaacgtggtgtaggagaagtcggccatgtctgtgaacgtggcgccgtgaaattcggccacgtctgtgaacgtggtgtaggagaagtcggccacgtctgtgaacgtggcgctggagaagctggccatgtctgtgaacgtggcgctggagaggtcggccacgtctgtgaacatggcgctgaagaagctgacctcgcatgcgaattaagcgccgtgaaagtcggccttgtccttgaatgtggcattggagaagtcggccgtgccctcgaatatgacgtcggagaagccagtttcattctcaaacatgaaatctgcaaatgagacaactccgtggaaggccgtttcatgaaaatcgaaacggcagtcgcaccagagctggtcatcctcgacctgctgccgcaccgtcacttcatcctccctggaccgccgttccttccgcaaatgaacggcgaacatgtcgaggatggtggattccacggcctcgtccgagcttccggatttgacaagacggccgaattcgtccttgacggtattgccgaattcatccagcgcgtatgatgtccggtcggaacgcagatagccgcacaggatgtccaccacgcgctgtcgatacctgcccctgtaggtgtccgcgatgtccgtcagcgcgtagacgccggctatgcgggtggataccttgtcggagcccagctggttaacggcatcctgcatcttcgtgttgatgaggcgatcttcctcgcgagtttcctctcgtctcgcgcgttcctcgttccgtttgtcctgctgtcgttcctggtatttgattaccagataggccaccgctccaacgccgccgacaagggtcagggccgtcttgacgatgctttcctgatttgtcaattgaagattccagaacggcgtgtgtcccaacaaagacgcgacaagaagaaatgcgaagatggcgaggacgacccagatggttatcgtgatgaacaacgggatttttcccatctggtccttcaaccgctgatgtcatccctgttttcgttttccccgggatgatggcgtcgtgtttgacggcgctcctgcttctcctgacatagggtttcctcctgggttccctcccatatgacttccatgatagtatcctcatttcaggcaagttcaatgtacgaaccgtcgccgtctgaccgattctcactcgtgccaaaccgcaaacaaccggaaatacttaggtaatctcaggggtttattttgcttctgacagttattgtcatcagttgtctaaggagagaggtctatagatgaatcgttcaccgatatcattactacggggattgtcggctgtcgccattgccgccgcaatggcgcttgctccgaccgccgcagccgctgataacacaatcgccgggcatgccgatgatcccgttacggtgaaacctgaagtgacacgtcccacaagccgcagttgcaccgttacactggctgaccacttcaagtcgaataccgagtccggtgccgctcagttttactccggcacgattacgcctccatccgaatgccccggaccatgggcaaaggtcgttcttgactccagcaccgtggtttccggccgccagtatgaccgtacgggatcgttgaccattggcggtgtcactatatggaccggcaccacgcaggaacctgatgggcaaacgccgaccactttctctttcgcgaaggacatcacccgttactcggctttgttccagaagccgcaggcattctccggtggttatacgaattacaccagtgacgtatacaccggtgtgtatgaccagacggtgaagatcacgttctatgaggccgatgagaagaatccggcaccggctgtcccgaatcaggtcgtgggtgttgcgatccctgatcttaatccgaaatccgcatccgctgatttgacgttgccgatgttgccgcgcaatctgacccaggcgcagttggaagtgaccctcaaaggcaatgggtgcgacgaacagtggtttgatgcgactcccgatgatctgaattcccatttctctgatgccgtgagcacgcagatgctttgcggtgctggtccataccgtgaagctgccgtgtcggtggacggcacggcagcgggtgccgtgaacaccttcccgcacatctattcgggaggcatcgtgcctacgctatggcggccggtgctggcgttggacaccttcgatctgagatccgaaagtcttgatctgacgccattcgtcggtacgctagtggacggcggcaagcaccgtctgggcttgtcgatcaacccgatcaatgatacatggaacgtgactgccacattgttccttaccacggacgacaagcttgatcagacttccggcaatctgctgcaggctaatgcgcctgcggccagcatcacttccacgaaccaagctacaggaaacggtaacgagcggtcatacatcgtgaatggatcacgcaacgatacgattagcgggtatgtggacacttcggctggccgcattaccacaaccacgacatacacgcgtgcgttccagcagaacggtacgatatcggtgtctgacggcaacgatttcaagcagtcgatgaagcagaccgacacggtgaaataccagtcgaaatcagttaacgacaagggcgatgtcgtgcgttctgtcaatctgggcgaagaatatccgattgccgtggatctgacggcgtatgacttcatgagtgacagcggttacgatttcgatggccatgtgaacatgtcacagaatgtgaagcgtgagattgccggtggaacgaccgcatccctgtatccggctgccgattaccgttggaatttggatacgtatggcgttatggcacgagctaatggcgcgctcaccaaatccgatgggcattccatcgccacttatgatggcaccgatgatgctggcgccacgtggagcaatcgtgtggagacgcaaagcgggaaggtgattaagcatacttcagctcagacgtcgcctgccccttcgcctcatccgcagccttccacgccgcagcccacccctcagcctcaacccggtaatgggaataatgctggctccggtacgcagactggcggcaattcggctgacacctccggcccgcatggagacggtcattcatctggcgtttccaacgctgccggttccggtaagaccgagcgtctcagcgccactggtgtggacgtcatgatgatcggcggagccgtagtggtcttcttgacggttgctgtggcgattctaatcatcaccagacggcgtcggaccatctaacgcctttcaccgacggtagatgagtgccccgtcaacgaatcgtccatggattgactgttcgttgacggggctacgttaatgggctgcggatgttttcttggagacggtcacgcagccattctctggctttgtctgtgttgtgccggactcattatccgtatcggctcttggaggcggcgaacgcctcggcccacccggatgcgcagacgatcgaccggcagcgtcttctcccgaatgttcaggcatctcggatcggtgcctaggccttttccgcgagccttcgccatctcccgcatcaatgtattccccagttccaattcggcgactccgcggcgcaatgcctccacgtcatcgccatcggaatcgccgctccggacgaacggtgcgaaggcgggtctgccattctgcgcggcgttcccgtttcgcggccgcaacgtggccatgccgccctcacggcacgccttgacccggtcgttcaccgcgtcgacactcgcgccaggctgtctggcggcttgcctctgctgcatgccgccaagcacaagctcgatggctttgcgccgtgttctcagcgggatggcgggcttcctcatacgctcagcataacgggagtcggccaccggccagtgttccagacgctgtctggtcggatagccgaggcgctcggccacttcagcggtcatcatcgaggtcgtaaaatatggttccaccgcccgttttcgttcctcgggactgaacacaattagatccttccattcagtctccaaaaaacgtccgcagccccatccaagaaaacgtcaccagcccgatcggactgacttctattgaagagacacatacctgtcgccggtcgtcgactgctacgacggcatgccggtcgcgtgggcgatcggcacgagccccaacgcggccttggccaacggcatgctggacgattacatggtccggtaccgggtcaagaggatccagacggattcccgggctcgggcatcagggaccggcggcgcgagctcggttacggcgtaatcagaaaacaggaacaaagaagtccacttgaattttcattgctggtgcaccgcttgtggatgaagggggcccctgggttcccggtacgatggtgtttgcc

SEQ ID NO: 1492 - DNA, 23390 bp, Unknown
  R257_15m  MAG No. k141_37121
agatttgcggcggccatggcccaggagagacgcccggtcccattccgaacccggaagctaaggcctggcacggcgatggtactgcacccgacagggtgtgggagagtagcacgccgccgcaccacacgtacaggaagccccgatacccctcaaaggtaccggggcttcccgcatatcaggacacttgcgcggggggggggggtatctcgcgtccttgggccccggcaggagtatcccgtcggggcccagtgcgttttgggcggcaacccgctgaatacccggtaagatgtctgaggtatcaacaaacaggtcaggaggtgacgcgcatggtggcgccaagccgtgatgaccgtagcgtagatgcattggtgaaatccaaggcagtacttgatgtattggcggaactgggaccaagcaccgcaaaaaccataagcgaacgtactggtgaacccgtaagctcaacgtatcgtttgctggataatctcgtcgcagtcggttgggtggaacggggcatcaatcgtggcgagtatcggcttggcatcgattgcgtacgtatcggcggccaaatcgaaagcagactggacattcagcagatcgctcgccgtaccttccgcgcccatcacggccagttcggcatctggggtctgttcgttcggaggcgattgcgcacggtgtgcatcgagacacgcacccgtgagacattgcaaagctatgcacagctggtgggcaatagcttgcctctgagcatgagcgctccctctcatgtactgacggcctggcttcccccggctcgctacgagcagctgttggaacactatgcctataccaacgagctcggcggcacattctccacgatgcgtgccacagcaatgggacaggctcgtcatatacgcgaatgcggcttcacctatgacgtcggccagaccatggccggctccgtgactatcagcgtaccggtattcaatcacgccggagagattcaagcggcaatcgccctgagtggcctttcccgctccttggaacctgagctggcctgtctggtagatgggcaaccggcaacggcatcggttcaagacatggtgcgattggtgcggactgccggccgtgaggtgtcgcgaggccttggatacagtggtgatcatcttggcctgaacagttgaatatgatgagtcagggataagtcaggggaaggaacgtcgacgatggcggaagacaaacgtgaaccgacccgcgctttagacaaggcgagtcgtgtgatggacgcattggcggcggagaatggcctgtcgccggcagatatcgccgacgcctgtgatatcccgcgatcctccgtataccgcgtgctggatggactggtcgatgtggggtgggccgtaacggatacggatggtaactactcattatcactggactggctgcgattggctgatgccgctcgcacgtctcgtaccgaatggcagcctgcgattgcggtcatgcatgccatcaccgcgcaaaccggcatgacctcattcctcagtgtggtctccggcactgaattggtatgcgtggaatgtgcgcaaggtcatgccatcgattcgctgatcctgcgcccgggccgcgtgctgcctctgcatgctggcgcggccggccgcgtggccttggcgtatttcgaggatgccgatgtcgaacgctatcttgcaggagtgccgtttccggcatataacgagaacacgctggtcagtgtggaacagttgcgcgaggatattcgcttgactcgcgaacgtggatatgcactgtcggatgaggatgtgacgttgggtgtcggtgccgtcggtgtaccgattgtggacaacgagtccggtcgcgtgatcgccagcctgtccgccggtggattcgtggacgaagtgttagccactcaagaatccttggccgcgttactgcgcgatggcgtacgcgaaattcaggcagcctgattcggcccgctaggctgtcgggctggacggttatgtccggtcagctatggcctttgccggctacggttctgctggttatgcttctgcccgactacgctgcggtccgttacgcttcggccacacgacccaacgcgatggcggtgatcagcacgtacgcctcgcgcgggtcggtggcatcccagccggtggattcggcggcgcgcttcaaacggtagcggatcgtattgggatgtacgttgagctccttggccgtggtctcgagcgaaccgccgaacttcaggaatgtggagacggtgagcagcgtcggatcatccgggcctgctgctgtcaggcttccgtagaccacgcggaccagttcgtcacgggcgtccgcgtcgccgatcaacgcacgttcgggcagggcgtcgtcggtgcgtaacgggcgcggcaatggctgcacggtggcggccagggccggcgcggcctgaagacagtagagcgtggcctgaatcgaacgcatcgcgccatcggcaccggtgcgctgtggacccaaggcgattggccgatcggcggcgaacgacggggcgatggtattgcagatgatttccggcgtggccgcaccgaccggacgaatcaacgccactacggcggtgctgttgccgatcgggcgcttggcggtcagacacacaccgccgaaatcggccacgattttctcgatttccttggccgtacgtgcggcggaccgggcagggtatccggcgatggtgtaacaatcgaagtcatgctcgaaaccgaggatggtgaacagggactccactcgttcgtcggccagatgattgaacaggcactcgaacagcacggtgcgtacgcggttggtcgcggtgatgccgggtgcggccgaatcggatgaatcgggcgcacccggcataccggatgcaccggacgaatcgacaacgtcggcagcaagaagttcgagaaaatctgacatagtcactagtgtagcgtcgctgattggcgttgcctttcagccaaagactctcgccaatacgtcagcaccacgaatccgaatacaaacgcaaccggcaacatgtgccgctcgaaattattggccggcgcggtaatcatcacgcccatcagcagtagcagcggaatatgggtcatgagggtgagccaacgtcggcgaatcacctcggccgcgccgatcagcaatgtcatcaccacgtagaaattgccgtgcgtaggccagccgagcacgggaatactgccccatacgcgagtgaagccggcgatgtgctcacgccagtcatggttgtaatccttgatccatgtggagtttttctgcacgtaatcgctggccacgtaataatccatcgatacgtacggctgatcgttcacattgaagtatccgaagcatttggccagcaacgcatccagcgcgatgatcggattgtccttgacgatttcgaaccatgccttgttgaaattggtcatatcctcgggcgtcaccgtgcgccacttgtagctgaccttcttggcctgaataccggaggatttcaccgggtcggcatcctgctgggagtaagcgtcggccatctgatcgagattgaagacgggcgcgaggttctttttggcttcgtctgaaataccgtccggattgcgctgagccacgcgggcgatcatttgcagctgtacgccgcggctttcgattggatcgccgccgatgatcgcaccagaggagatggcgaaggagatgccgccgtgaatcagtacggtggggatgagcagcgccacgacgtaagtcgcccagcgtttgcggtcggcgatcagagccagcacgatttgcagagcgatgatgtaccacgcatatttcgcggaaatcagcatcaccgacgtggccaggatgaaggcgatgaagctgtggcacggcaagtggacgggcgtggcgatggcaggggtctgaggatgtttgcgggtgccggcggggtgccaggtctggacgagttcataccagacgctgaaccaccagacgaacgagaacgcgaacagcggcgatttggtgatggagatagtggaaaacacggccagcgggcagaccatgaagaacagcagaatcaggaatctggccaatcctccggcctgtgggggaacggcggaatccgttgccgtttttcctatccaaggtcggttcaggaatcgattggcggcggcagcgcagcagaacacggcgaacagcgtctgcagggcagccaacgtcacgatgccggcatcgtttgagccggtcagatgcctcgcaaacgtgactatcgcgccatagaacacagtgagtaccacattgtgctggtcggtcagatacgtgggatcggacggccacatgtagtgcgcggtggggtagatgtccatcggcacgaaggagaagaagccgatatagggctgtttcaggccggtccactggttccaggcccagctgaattcgcggatctgtgagcggaggtccgcgccgaatgcggccagcagagtggtcggcacccagagccagccgacaaaaaacaccagcataagcttccagaaccggttcgtgccgcgtgtgatccagcggtccagaacagtgacggtggacgtgacgatagcgcgaacggtacgacgggtcttggctggttggctggcctgctgatcggcggcgggccgtgatgtttcgctattctgctgatggtggcgtaggcgctcgccgatggtcttcggcagtatgcgctggcctgctgcgaatcgcgccatcagcgtgatgattccgagatatatcaggaacgacacgacgaatattgcgatattggcccagttccaatgggcgagggtgccgttctcctcgtcccggtacagcgggccgaccgccgagcacagtgcaagccacaggcaggccagcacggccagtgtccagcgcgcggcagcgcccacgcgcgcaagatgcgggtgggactggcggctggatacggcggcaagcttcgcggtggctggtgacgtcatgacaatatatggtagccgcacaggtcaacggttgatattcgatgtctgccgggcatcgccattgttcgcaagccaatacgacggccgggtgcatgcgtgggctcggcgaatgcggaatttccgaagttgtgaacgctaacacgggctgtccggcccaaaatggttgattttgtgcgcttttccgtggaatatcgcgggcaaaaaacggcgcaaccgaggtaacgtagtgtccatgatgattgcattgaaagctgcaacgccgcagctacccagaactacagccgtcgcggatcatgtggtcgccgtggacgaaaccgattcgaccaacgcgctggccgcgcagatgatcggcgacgggtcgttgacgctgcccgaccaccaggatggcgaactggcggtggccgtggtggccgccgaccggcagaccgccggccgtggccgcaatggtcacaagtggatcagtcagcccggccgttgctcgacgatgtcctatgccgtgcgcattccgcgcgcgatcgccaccgacgaatccgtcaatggctggctgcagatgatcgccggactggtcacgctggacgccctgaacggcatgatcgaggaatacggtgccgcgccgaaccagccggactgcttgctggaactcaaatggccgaacgacgtgttctgccacgggctcaagctgggcgggctgctctcggaactggtgattccgccgtcgtccggtactgatgctgatgccgatgacgacgtcgtcatcgtgttcggcgtaggcctgaatctggcgctgggtgcctgttggctgcccacgccgcagtcgacttcgctgcagctgcatgtcacgggcttgccgtcgtttggcgagatgcgcgatgcggtggccgaacgtcaggtcgagggcttccgtgaacgactggcgaagttcatcgccgacccgaagggccaggccgagtcgttgcgcgaggaaatgaaggcggtgtgctgggcgcgcggccgtcaggtcgaggcgcatttcacggacggcaccacgctgaccggcgaagccatcggcctcaacgaagacgcctcactgatcctgagaacacaagacggcacggaccatacggtccgcaccgccgatgtgggagtgctgtaatagccggccagtagctagctagtagctcaggtcagcgaccgagcttggacaggccggcggcggccagagaggccaccacggccttgatggcgtcgccgacgacgaagcccatggaggccagggccacggcggcgagcggcgcaccggtcaacgcggactggatgatgaagccgaaggcgtacaccaccacgacgccgccgaccagcgcggccagcaggtagcggcccgcggtgcgcgcggcggccgcgaaggacgaagtgtcggacttgccgcgcagcagggcgatgaccaccacacccggcaggaagccgaagaggaagccggcgctcgggccgaccagggccagcgtggaggtgccgccggcgaacaccggcaggccgaccgcaccggccgccagataggtggcgacggcggcaccggcctgacgccacggcagcatgagaccggcgagcatcaccacgaacgtctgcagcgtgatcggcaccggcgtgcccggaatcggaatctcgccggcggccgcggacagccacatcagcacggcgaacagcaccggcttccaggatgcggcgacgatacgacgggcgagcggcgtggtggccgctgcggatgcggtggtgtgtgaagtctgcatatcaataacccctatgttgtgtgatatcgccgtgaacggcgggcggtatgcgatggatgaggggaggttccggcgggccgtgcggtatccccgacagcccgaaccgtccatatggtggacggtcccaaatgaatccggccctgtgcgggcgaatcgtgcggcgatggaccgatgccggtccggtcgccttccgttcgcccgcagatgagccttcccccgaacttacggttgccatcgtagaggtgttcgatttcgtgcggtttcgtaccaacttacaaaattgtcgatttcgatttgtcataagttgacgaacgcaaccgtaacgtcaacttcttgaaccggcgcgcaaggatgtgcaatcggcggatttgcaacgtttttgatagccggcgccaacggttacgttgccggaacctacgcgcgcgtttgttcgtagcctacaaaagggcgtgaaagcttttgtgcgaacgcggcttgccctctcctctatatggagagcacaatttgacactatggctcatactgtcaaaaaactgctgattgcgaaccgaggtgagatcgctctgcgcgtggtgcgcacggccaaggagatgggtatctccaccgtggccgtctactccgaacaggaccgcaatagccgctatgtggacatggccgacgaggcatacctgctctccggcgacacctacaaggacacgtacctcaacgaggatctgctgatcgacatcctgcacaaaaccggtgcggacgccgtgcaccccggctacggattcctttccgaagtgccgagcttcgcgcagaaggtcgaggatgccggtgccatctgggtgggtccgcaccacaccgcgctggtggatttgggcgacaagatcaccgcccgccgagtggccttgcgcgccaaagtgccgccggtgcctggcctgtccgaaccggtgaccgacgtgcgaacgctgctcgacttcgcacacacccacggctacccgatcatgatgaagcgcactgatggcggtggcggccacggcatcaccgtggtgcatgacgacgaggagctgcgccgcttctacatgaaccacgacgcgctgcaaggcggcgatctgaaggaatacttcatcgagaagttcgtggacaaggcacgccacgtcgagacccagtccgggcgcgactcgcacggcaacttcaccgtgtactccacccgtgactgctcgctgcagcgccgcaaccagaaactcgtggaagaggcgcccgcgcccttcctgtccgaggaaatcgtcagcacgctggaggaatactcccgccgcctgttcaccacggtcggctacgtgggcctgggcacctgcgaattcatggtgaccccgaacggcaaagtgtacttcctggaagtcaacccgcgtctgcaggtggagcacaccgtctccgaagaggtcagcggcctcgacctggtgcgcgaacagctcaatatcgccgccggtggcgagctcacccgcgcccccgaaccgcgcggccacagcttcgaactgcgcatcaccagcgaagacccggccaccaacctgacccccggctccggcaccttggagaagatccagtggccggccggccccggcgtgcgcatcgataccggtgtggaacagggcgacaccatctccccgaagttcgattcgatgatgggcaaggtcatcgtcactgcccagaaccgtctcgatgccgtggcccgtgtgcgccgcgtgctcgacgagctcgtgatcgaaggcgtgcccacgccgattccgctgttcaaggagatcttccgcaacgacgacttcaccgccgagcatggccatccgttcgccgtgtccaccaagtggctggagcgcacgtacctgaaccgcacaccggcttccgccgcctccggccagccggcctccttggccaccgccccgggtgccgctgccccggccgcgcccgacaagtccaagtcggagacgttcgtcatcgagatgaacaaccgccgcgtcaagctcaccgtgccactcgacatcgtggagaacatcaccggctcggcccgcgcccgcggtgccaagcgccccacccagccgttgcgcggcgcaggcttgcacaacgtggcctccggtgccgccacggccaacgacggtgccaaatccggcgtcatcgcctccccgatgcaggccgtggtcacgcgcatcaacgtgtccgaaggccagcaagtggccaagggcgaccttctggtggtgctcgaatccatgaagatggagaactacgtgtacgcgccggccgccggcgaagtgaagaagattttcgttggcccggccgatggcgtggaggccggcgacacgctggtcacgctggacgtgaacgccggcaaggccaaggccgccgacgccaagaaggagggcggcaatgactgacatcatggattcgccggccgtgaaggccgcggctgcggcctcggccgccaacgccgcccagccctcggcccaccagccgctgcgcaccgccgtggtcaaggccgccgaactggcccgcgccgccgaagagcgcgcccgcgacaagcagcacgctaaaggcaagaaaaccgcgcgcgaacgcctcgacctgctcttcgacaccggcacgttcgaggagatcggccgcttccagggcggcaacatcgccggcggcaacgccggtgcagctgtcatcaccggcttcggccaggtctacggccgcaaagtggccgtctacgcccaggacgtctccgtcaagggcggcaccctcggcaccgccgaaggcgagaagatctgccgactgatggacatggctatcgacctcaaagtgccgatcgtggccatcgtggactccggcggcgcccgcatacaggagggcgtggccgctctgacccagtacggccgcatcttccgcaagacttgcgaggccagcggcttcgtgccccagctgagcctgattctcggcccctgcgccggcggtgccgtctactgcccggctctgacggacctcatcatcatgacccgtgagaactcgaacatgttcgtcaccgggccggacgtggtcaaggcctcgaccggcgagaccatctccatggccgaccttggtggcggcgaagtgcataaccgggtgtccggcgtggcccactacctcggcgaggatgaatccgacgccatcgactatgcgcgcaccgtgctcgcctacctgccgtccaacagcgaaagcaagccgccggtctacgcctacgccgtcacccgcgccgaacgcgagaccgccaagcgactcgccaccatcgtgcccgccaacgaacgtcagccctacgacatgctcgaagtgattcgttgcatcgtcgattacggcgaattcgtgcaggtgcaggaactgttcggcgcctccgcgctcgtcggcttcgcctgcatcgacggcaagccggtcggcatcgtggcgaaccagccgaacgtgctcgccggcatcctggacgtcgactcgtccgagaaggtcgcccgattcgtacgcctgtgcgacgcgttcaacctgcccgtggtcaccctcgtggatgtgcccgggtacaagcccggctccgaccaggagcacgccggcatcatccgccgcggcgccaaggtgatctacgcctacgccaacgcgcaagtgccgatggtgaccgtggtgttgcgcaaggcgttcggcggcgcgtacatcgtgatgggctccaaagccatcggcgcggacctgaacttcgcgtggccctcctcccagatcgcggtgctcggcgcggccggcgcggtgaacatcatccaccgccacgacctggccaaggccaaagcctccgggcaggacgtcgatgcgctgcgggccaagtacatcaaggagtacgagaccagcaccgtcaacgcgaacctgtcgctggaaatcgggcagatcgacggcatgatcgaccccgaacagacccgtgaggtgatcgtcgaatcgctggccacgctcgccaccaagcggcgcgtcaagcgcaccaccaaacaccacggcaaccagcccctctgatttctgaagacatcaaccaaacacaagtaaggaaagcaatgaccaccttcttcctcaatcgcctggccaccgagccccatgcgctcgccttcgccggccagtccaccccgtggccggtagccctgacagaccagaccaccgatcccagccttgacgaggccctgcgcggccatatcgccgcagccaaccgactgctcaccccggtcgccgccgacctgctgaccaccaccggccgtccggtcgacctgttcggcttcactccgaacccggcccgcctcggcgccgcagccgacgccaccgcgtccgtggaaggcgtggcactgacccagctcggcgccctgctcgacctcgaacacctcggctacagcgtggcccaggccaagccgctcgccgtgctcggccactcccagggcgtgctcgccgtgcacatggcccgcgccatcgaggccgccggctccatcgaggccgccggcaagaccctcgacgagattctggccgtcgccgccctgatcggtgcagccggcactcgccgcgtgcgcgaactgggcctgaaccccaagtacggcgaagccagcccgatgctctccgtcaagggcgccacccgcgaacaggttgaggctctggtcaagcgcgtgaacaacgcccgaggcccgatctccatcgccgtcaccaactccgacaaccaccacgtgctttccggctacccggaagacctggcagcactcgccctcgaagccgagcgcgagcacaagcaccaggccaagctgcgtgaacagaagctccacggcggcaccgtgttcaacccgaccctcgaatacctcgaagtcaccctgcccttccactcgccgctcatggccgaagccgtcgagcagaccgtggcctgggccggcgcctgcggcttcgaccagaagcgcacccgtgcgcttgccgaggaagtgcttctgaaccatgtggactggaacgcccgcgtcaaggcgctgttcgacgccgccgacccgtccaagctgtggatcgtggacctcggccccggcaacacgctcggcaagctgatcggcaatgtggtgcaaggcaccggcatcggcgtggtcgaagccaccacgctggccgagcgctccacgctctccacgctggaaagcgagcctgagcgcacccagaactggaaggcattcgccccgcgcgtcatcaacaccccggccggcgccaagctggtcaccaagttctccaagctcaccggcaagccgccggtactgctgcccggcatgacccccaccaccgtggaaccggaaatcgtggccgccgcggccaacgccggctactgggccgagctcgccggcggcggccaggtgaccgccgaagtgttcgaccgccacatcgccgccctcgaagacgagctggaggaaggccgcacggtcgaattcaacgcgatgttcatggaccgttacctgtggaacctgcagttcggctcctcccgcatcgtgcccaagaagcgtgcttccggcgcgccgatcgacggcgtggtcgtctccgccggcatccccgagctggacgaagccgtggccctgatcgagtcgctgcaggcggacggtctgccgtacgtgagtttcaagcccggcaccgtggaccagattcgccaggtcgtgcgcatcgccaaggccgtgtcccccaccaccatcatggttcaggtcgagggcggtgaagccggcggccaccacagctgggaagcgctggacgacctgcttgccgccacctacgccgaagtgcgcgcctgcgacaacctcgtgctggtcgccggcggcggcatcggcacccccgaacgcgcggccgactacatttccggccagtgggcccacgcctacggcctgcccgacatgccggtcgacggcgtgcttatcggtaccgccgcgatgaccgccaaggaggctcacaccagccccgaagtcaagcagctgctcgtcaagacgcccggtattccggccgacgccaagtccgacgacgtgttcgccccgcaggccgcccactgggtgccgtccggcaagtccgtcggtggcatgtcctccggcctgagccacctgcacgccgacatttacgagctcgagaacgactccgccgaatgcggccgtctgctcgtgcgcgtcatgaagcaccccgaagagctcgactcccgccgcaaggaaatcatcgaagccctgaacaagaccgccaagccttacttcggcgacctggcctccatgacctaccttgagtgggcgcagcgcttcgccgaactcgccttcccgtgggtcgacccgacttacgccgaccgcttccagcacctgctgcagcgcatcgaagcccgtgtgaacgacacggactccggcgaattcacctccaagttgttcgccgctgatggcgtttctgctgaagaggcagctgccgctggcctgctgacccacgacgacattctcgccgacccggcccccgcgctcgaaaagctcgcactggcctacccgcagaccgccgaactcaaggtggtcccgaccgacgtggcttggtccccggtgctcgtgcgcgaataccccaagcccatgccgttcgtacccgtcatcgacaacgacctgctgcgttggtggggtcaggaccagctctggcagtccgaagaccagcgctactccgccgattccgtgcgtgccatccccggcccgatctccgttgccggcatcaccaccatcgacgagccgatcgccgacatcctcggccgcttcgaaaccgccgccatcaagcgcgtgcaggacgaacagcaagccgccgatgccgctgagaacgacgatttcgccgcacttggcgaggccaccagcgccgaagacttcatccgcaagtccccgaacatctcctgggtcggccacatcaccgacaacccggcctacggcaccgccctgggcgaccagtactacgaaatccgcgcgtttgacgccgcggccggcaagtacgatctggacatccacctcgacacctactgggacaacgacccggacggcggcacctccaagcacgccgtgcgcgatatcgtcatcccgctcatcgtggaaggcaccgagcccggccgtgtgccggtcgtggaccgcgaacgcctgattccggacgtctacgcgatgctcgccgccaccgcaggcatcggcaacaccgccatcaccggcgacaagctcaccgagatgccgaagcttgacgacaagacctctgacgagcgtccgttcggtaccgcaaccgcaacctacaccctatccgccaacctcggcttcgaccacgaagcggccactggcgccgctctgccgaccaccctgcagcccagccgcatcgcccccgatgcgctggtcggccctgcctggccggcaatctacacggcgctcggctccgtgtacgtcaagggctacccggtgattgaaggcctgctcaacgccgtccacctcgaccacctcatcgaacttgaggtgaacgaggaggacctgctcaagcacaccggcgaaaccatcaccctgaagtcttgggccgaggattacttcgagtccgcctccggccgcgtggtcaccatccacgtgacccacaccgccgccgacggcacgccgcttgcccgcgaaaccgagcgtttcgcgatccgcggccgcgtctactccgatgctttgcctgcagacgcccccgagtatggtggtgccctcctgaataaggaagcggatggctccgtcgccggacagtccactggactgtccgcctcctcgcgcggcctgcaagtagtgcaggccactccgcgccgtctgctgcgccgcgtgaaggtcgtcgccccacacgacatgaccgccttcgcccgcacttccggcgacttcaacccgatccacacctccactcgtggcgctcgcatctccggcctggccgccccgctcgtgcacggcatgtggctgtccgccaccgcccagcacgccgtgcaggcgaccgacgagaagggtgcccactacgagattgccggctggacctacaacatgtacggcatggtccagcttgacgacaccgtcgaaatctccgtcgagcgcgtcggcaaagtgcgccacggcggcatgaccctcgaagtcacctgccgtatcgacggccagctcgtctcccgcggcaccgcactggtccgtgcgccgcgcgccgccttcgtctaccccggccagggcatccagaagcagggcatggttctggacgagcgcgccaagtccgccgccgcccgcgacgtgtgggagcgcgccgacaagctcacccgctccaagctcggcttctcgatcctgggcctcgtgcgcgataacccgaaggagctcaccgccaacggcgtgacctaccgtcaccccgaaggcctgctcaacctgacgcagttcacgcaggtggcgctcgcgacggttgcttttgcccagaccgcccgtctgcgcgaagccggcgccgacatctggcccgcctacttcgccggccactcgctcggcgaatacaacgcgttgtccgcgttcgccgacgtgattccgctggaaaccgtgctggagctcgtgttccaccgtggttccaccatgcaccacctcatcgagcgtgacgcacagggtcgctccaactaccgcatgggtgcccttcgtccgaaccagttcggtgtggacgacgcgcacgtcaaggaatatgtggaatccgtggccaaggcgtccggcgaattcctggagatcgtgaactacaacctcgccggccagcagtacgccatcgccggtacgatcgccggactcaaggccctgaaggccgattccgcccgccgagtggccgcattcggtggcaagcccgcgttcatgctggtgcccggcatcgatgtgccgttccactccacgctgctgcgcaagggcgtgccggaattccgcgacaagctcgacgcgctgcttcccgcttacatcgactaccgtggccgtctggtggaccgctacatcccgaacctggtggccaccccgttcgagatgaccaaggaattcgccgccaagatcctcgaagccgtgccgtccgagcgcatcaaggccgcgctcgacgacccggccgtgtgggattcctacgccgccgacgaccagaagctcggccgtctgctcttgaccgaactgctctcctggcagttcgcctccccggtgcgttggattgaaacccaggcgctgctcttcggtcagcgcgaacagggcggcctcggcgtggaagaatacgtcgaagtcggcctcggcaacgccccgaccctggccaacctcggtaccaagaccctacgtctgcccgagttcgacggcaacgatacggtcgtctacaacgtcggccgcgatgaaggccgcgtctacatgaccgacaccgattcgctggttcccgacgacgagccggaagaggctgcggcctcggccccggtcgaaaccgctcctgccggtggttccgccgtcgccaagctcggatcgggtgctgctccggcaaatgccgcgactgaggctgctcagacagcggatggctctgtcgccggacagtccactggactgtccgcctcctcgcgcggcctgcaatcagggcaggccgctgctggcgcaccgtctggttccgccgtcgccgacctgcccttcaaggcttccgatgccatcggcgtactcatggcctactccgccaaggtgcgcctcgaccagatcggcagcaacgacaccaccgacaccctgaccaacggtgtctcttctcgccgcaaccagctgctcatggacatcagctccgagctgggagtcgccagcgtggacggtgctgctgaagcgacgctcgacaagctcgcccaaatcgtcaacaaggccgccccgaactacaagccgttcggtgccgtgctctccgaggcgctgcgcgaccgcctgcgctcgctgttcggtgccgccggcgtcaaacagcagcagatccgcgaccgcgtgaccaacgtatggcagctcggcgaaggctgggtggccagcgtgctcgccgcactgctgctcgacacccgcgagggtgccagctctcgtggcggcgacctggccaagctgcccaccgccgccgtgcagaacaagccggaagccgacaagctgatcgatgcggccgttgaggtcgtcgcccagctcaagggtgttgccgtggccctgccgtccgccggtggtgccgctggtggcgctgtggtcgattccgccgcgctcgacgccttcgccgagaaggtcaccggttccaacggcgtgctcgccgccaccgcccgcttcgtgctgaacgagctcggcgtggccgctccggctccggaagaatccgaggacgagaacgccgccgtcgtggccgcggtcgaagccgaacttggctccgactggcccatgcaggtcgctccgcgcttcgacgccaacaaggccatcctcttcgatgaccggtgggcctccgcccgcgaagacctcgcccgcgcctactacggcaacgatcccgccgccctgaacggcagcttcatcggcctcggcaagaccatcgccgccgaagcccaatggttcgccaacaagtcggagggcgaaaaactcaaggccgccttccagaaggccggctccgaggccctcgaacaggttgcgtccaacaagaacgcctcccgttacgcgaacgacattgccatcgtcaccggcgtgagcccgaactcgattgccgctcaggtggtcgaaggcctgctcgcgggcggcgccaccgtggtggccacttcgcacagcttcaagccgtccatcaaggcttgggccaagcaggcctaccgcgagcacgccaccggcaacgccaagctgtggctggttccggccaacctctccagctaccgcgacgtcgacgctctggtcgactgggtgggccacgagcagaagaagacctccggtgccaccaccacgattctgaagcccgcgtgggagccgtccctgttcttcccgttcgccgctccgccggttcacggtacgctcgccgactccggcgacctgttcgaatcgcaggcccgactgatgctgtggggcgtggaacgcgccatcgccggcttcagccacatcggtgccgacaccaacgtgcagcacaagctccacgtggtgctgcccggctccccgaaccgcggcgtattcggcggcgacggtgcctacggcgaagtcaagagcgcctttgacgccatcgtcaaccgcgcccgcgctgaaaaggtgtggtcgagccgcgtcaccttcgctcacccgaagatcggctgggtgcgtggcaccggcctgatgggcggcaacgacccgctggtcgccgtcgttgagcgtcacggcatccacacctactccaccgcgcagatcgcggccaagctgctcgacctgtgcactgccgaatcgcgcgagcaggccctcaaggccccgctcgatgtggacctgaccggtggcctcggctccgagcccatcgacatcaaggccctgcgtgccgaagccatggccgacgtcgagaaggaagctgctgcggcctcgtctcaggaaacggatggctccgtcgccggacagtccactggactgtccgactcctcgcgtgggcagcaaatcaaggcgctgcccaccccgatcgtcaccaagcaggcttcggtcgaccttgccgactggaccaacgtcaccgccaagccggaagacgaaatcgtcatcgtttccgtcggtgagctgggcccgtggggctccggtcgtacgcgcacccaggccgagctcggcatccactcggacggcaccgtcgacctgagcgccggcgcagtgctcgaacttgcgtggaacatgggtctgctgacttgggccgacagcccgaagcccggctggtacgacaccgacggcaacctcgtgcccgaagaggacatcgccgagcgctaccacgacgaggtcgtggcccgctccggcatccgcccgttcgaggaaggcatgggcaacgactacaaggacggtgctgacgaagaagaagccgaggtcttcctcgaccacgacgtcaccttctctgtgcccacccgcgaagtcgccgccgaatacgtcaagttggacgaggctcacaccaccatcgccccggatgaggaatccggcgaatggaacgtgacccgccacgccggctcgatgatccgcgtgccgcgccgcgccaccatgacccgcacagtcggcggccagttcccgaagggcttcgacccgacccgatggggcattcccgcctcgatggtcggcgacgtcgacaagatcgccctgtggaacatcgtcaccactgtggacgcctacctgggcgccggcttcaccccggccgaaatcctcgagtccatccacccctcgctggtggcttcgacccagggcaccggctttggcggcatgatgtcgatgcgcaagctgtacctcgaccgcttcctcaaccacgagatcccgaccgacatcctgcaggaggccctgccgaatgtggtcgcggctcacgtgatgcagtcctacatcggcggttacggcaacatgatccagcccgtctccgcctgcgccaccgcggccgtctcccttgaagagggcgtcgacaagatcgccctcggcaaggccgacttcgtggtcaccggtgcgatcgacgacatcggcgtggaatccgtgatcggcttcggcaacatgaacgccaccgccaactcggaggaaatgtacggcaagggcatcgacgcgcgcttcttcagccgcgcgaacgatcgtcgccgtggcggcttcctggaatcccagggcggcggcacgatcctcgtgacccgtggtgacatcgccgaaaagctcggcctgccggtcgcggccgtggtcggcttcatccactcctacgcggatggtgcccacacctcgatcccggctccgggcctcggtgccctggctgccggcctcggtggcaaggactccaagctcgtgcacgacctggctaagctcggcgtctcagccgacgacatcgccgtggtctccaagcacgacacgtccaccaacgccaacgacccgaacgaatccgagctgcacaacacgctggcccacgccatcggccgcaccgacggcaacccgctgttcgtgatctcgcagaagacgcttaccggccacgccaagggtggtgcctgcatcttccaggtcaacggtctgacgcagctgttcaagtccggcgtgattccggcgaacgcggcgctcgattgcgtggatccgaagctccagcgcgacgaccacatggtctgggttaggaagcccctgcgcatcggcggtggcgaggacgagttcggtcgcgagaccgctggtcgcccggtcaaggccggtctggccacctcgctcggcttcggacatgtttccggcttcgtggccctggttcatccgggtgccttcgaagcggccgtggccaaggccgatggcgaggccgcgctggaagcctggcgtgagcgtgccaacgcgcgcttggctgcaggccagcgtcacctcgaggaaggcatgatgggtcgcgccgcgctctacgagccgatcgacaaccgtcgcttccgcgaggatcaccgtggctacgaccaccacgaggtcgaaaaggcgatgctcctcaacccggacgcccgcctcggtgccgacggctactacgaggcctgattcctctggctcccctcggttgaggggagccagtagcgcaccggatctcggctcccctctttgaggggagctcccgcgaagcgggtgaggggagtttcccctggagctttctcgctggcacaaactcagtgagagaaatatgcagaacatacgaaagcccctccctcggagtgagctttctgcgtttcaaggggctgatttggcattcgccggaggtctacttccgtttcaaggggctgttgcccaagtagacaaggcgtaaaaacggcggaatggcgttggcgttatgctgcggatactcgtggtatggaggatgaccagccccttgaaacggaagtagacctccggaacggtcaaaatccgcccctcgaaacggagatagacctccggggcggggcgcggatgttttttggacggctaggcagccagcccaagatgtttgcggtattgcgcgaggtcatccagcatagtgaatcttttccccctgaaatggaaatcaggccccaattctgatgaggtgtagagattacgcgcgaagcggtacacaataggaagcatgaatacttgtggtttggggcatgacgtggtggatgtggccgcattcgccgaacagttggcggagccggggtctcgcatgcgtgcgctgttctccgtgcgtgagatgcggcagacatccgaccgcgcgcgccagaagaatgacggggaggccgtccatctggccgccaaatgggcgggcaaggaggcgttcctcaaagcctggtgcgattatcttggcgatgccccctatccgttcacgcttgataatttcccgtggcctgaaatcgagatcttggacgattcccgtggtgtgccgcatgtgtctctgggtaagggggcggcgtcagtcttccaaactgattacgcgaattcggctgccggcgctcgctattcctctgcttattcccctgcttccgataacgggccttatgcagtgatgcaggagcggcggaatgcgcgttcggcgcagcgctcgactctcggtgcggggtcgatgccgcatatccatatttccctgagccacgatggtccgattgcctccgcggtggtgacgatttctgtggaatagcgcccgaggcccccgagtgctacatgctgtacaacgtctccatcatggttaacctgtggagcgcgctcaccggccgcgacgtgcgcctgctcaagaaccagatcgacaagctcgactcgctgcccgaaaactgctggttcgtgattctgaatgcgatgggcgccgacctccaaccatacgagtcccagctcatccatttgtgatttcgacggtttccagctcccctctttgaggggagctgtcgccgtaggcgactgaggggagtcctcggcaaagccacaatccatcaactagattggctggtcctgctgcagccacacgcgtttgccatccccgaagaaatatgtataataactcaagtcgccaaaagcgacgtttaacgcggatgtagctcaatggtagagcctcagtcttccaaactgattacgcgggttcgattcccgtcatccgctccactatttatatgttggtgtatctaattgggaataccggaagggtgagctaccccgagtagtattagtactcatggtgttgagaatcgacgaagctgaactgcgtgccaagctctttgagcacaaagagcagattggtttcgggccgattgccaatggggtcgtcatcatcatcgaaggattgttttacattcctgctgctctcacatctggactcgaccaaatgtttcaaggattgctccttgcattgagcattatcttcatattctatggagtatggagtttgattactgcttgcagaaataagtatgatgccataacactgtatgaggatatcgccaacatggatagaaccgaacgaagaagctcgatcattgcggtgaaagatgctaaccgatatcttctgtatcgtgatttaggttggggatgcgactttttccctaatcatgcaaccgcaagcagtactgatgaggatgttcgtcagctgacgacgtattttgccgatgaattcgaaattcctgctaaagactttactctgtctcacatttgtgtgaaggattctgagaagccatccacggagcatgatggagagattcgttattacgaatacacgctataccgcgctagcgtaacggtaatgcctgacgcctggcgttccactgagttccatgttggtgccaaggactgccgctggatgactcttgatgagatgcttgccgaccccggcatcaacaaaatcaatcatgatgtcgttgcgatggtgcgggataacttgtaattgttgccacttcgggcatatgacgattgagccaaagcatgttctatgtttcgataatcatcaaaagcagagcatagtatgctctacggggatttttctataccctgaaaataccgaaaatcaggatatagggcagtagcacgaattagccaacagcggcttgtctgcgggcaataatgacgttgctcccgcggattcggataaggagaatcgtagcgaggatcatggtgagggccatggcgagtaatcgatcgtaccggagacttgcccaacacgcacgctaagatgggcatcgcaataatcggcaatgagcaggtaatcggcgaggcggtgcatggagcaggaatccaacgagcaagaacctaacgaggcgacggaaatcgtaggcggcaaagtagagaccgtcgaggtttccaagcaccccgaggcttccatacccgagaccgatttgtctctggcggatatcgagcgccgtcgttcgcatccgttgcgttgggcgctgattattcttgccgtactgtgcgccatcatcgcgccgtactggttcggccgttcgttggcggtaaataatactgactccattgtggccgtgctcgggggagtgtctccgcaaggcatcgcgctggtcggttgggtgaccgtggtgattgcgtacgtcggattggcgatggcggtggtcgtctcgccgtcctggccgtgg

SEQ ID NO: 1493 - DNA, 9166 bp, Unknown
  R257_15m  MAG No. k141_37559
gtgctgaccctgaacggctccaaagtgccgtcgcccacgctcatgacgccaagtctggcgtcgcggctgttgtagaggtcggcggcgcaggaggtcacgcaatccgtcatgacctcctgccccaatgtttggcctcccaacgcgccgttgacgtagctgatggccgcttgaatggcgcggcgcacgcgctcgtcgtcgccggatggcacgttgatttcgtccctcaccggctgctcgtaggccgtccagtcgtcggccatgtcacacgctttccgacgttgcggcgaacttgacggggatgagtccgagcgggtgcgtggccgccacggccatgtagccgtagaccgaatagttttcggtgagtttggtcgggtcgccgtctgagagttgtgtcgggccgcccgactcccacacggtcacggcctccgggtcgatgaagcaagcggtgccggccggggccttgggcagcatctgcaccggcacacgcaggaactttcccgcgatgcccgttaggtcgaagtcgcccagcgtgtccgagccgtcgccggagaggtcgaagaaacggctgccggtgtccttgagcttgatcagtgcggccatgacgtccttggatacgcccaggcgggtcaggctcacgttgcggtcgtcggccagttcggcggcgtccatgatcagcccggcccactggtcgatgttcatggccgtgagcgcggcgggcgcgtcgattttgttcgcatccttcgccgcgtcgcgctgcgcggcgatggtgtcgtaaagatacttgcgcacggcgttttcggtggccttggcgtatgcgtttcgcaaagccgcaagcgcggtgttgagcatgggcgtggtgctgcgctcgatggtctggcggctcagggtcgtgtagccgccataggtgctgatggccgcgctcttcgttccgaacttgaccttgccgaactggagatcgccgccctccgtcgcctgctgggccaccgctgtagtgtcgtccgcaaccacgttgtattccatcgtcatgcccttgtcgggtagggtgtcgtgggtcaggatgttcgtgaccttgcggcgctgctcgatcagccgcagatcatccctaatccatgcgaccttgttcccggtgtcgccggtggagatcaggtcgcggcactcgtgcatcagctgcacggcctcctggtcgccacggtagagcgcctggagatagtcgcccgccgtccggtactcgcttcccatgatcttggccggctcatggttgcccgtcttggcgattgcggccttgagactgcgctgctcgtccatgatgccgttcagcttctcggtgatttcgtcattgtccatgctggttcctttctggtttccggtttcggacacttttccgtgggttccgtcggcggcgcgctgcgaggtgatcttcgcggcctcgtaggcgggccacgacaccacggacacctccaaaaggcgcacgcgcctgcggtgggtgacgccctgcttgtcggtctcgtcctcgatgggcacgaagccgacgctgagcgagtccaaagcgccgtcgcgcaacagggccaccacgtcccggccgcgctgcgtgtcgctgatatgcgccgtgatgtgcaggccgtctgtctgcggttccgcgtttgtgatgcggccgataagctccccgtgctggtagcagagcttggccgattccgattcctcgaagacgcaatcggggtcgaacgtctcggcaccgtcccatgtgctgataatgctgtcgtagggcacggccacgccctccaacgtgcggccatcgccctcctcggcggctctcaggcacacgcccctcaatccgatttcatgcttcattctgagcctcctgtgtctgtggttccggttgcggtgccgggataagcggcggcagcgcctcccttgcgcgcacctcgttgacgtccatccacccggcctctatcgccgtcttgtaggcgttgaaccgatcggccatgtccgcgcgccggctgctgtcccagtcgaacgcggccgtgcggcccctcggcaacaaacggttgaacaactcctcgatctcgcccgcataagccgccaacgtgtaatcggcaaactcaatccacgactgttctatgttgctgtaggtgagattgctaccgtcaacggccgcaagcatgatgctggccgggatgccgagcaaccgggcgatctgcgtggtatcgaatttctgcgtttcgagaaactgcaagtcggccggtttcatgtccagcggcacgtatttgagtttcgagccgagcaccttaacgtcgccggcctcaccggtggccttccacgcctccttggcgtccttggcaatctggggggtcaccttgtcctcggtctgcaaatagcccttgaggttgctgccgtcgctgtagaacttggccttgtaggttcgggccatctgcgcggcctccacctcctcacgcgccgccgagattgggccaagcccacgcaaccggccaggcacgttcaaaaacttgcaatgcacgatctggtcagacgtgtaatcatgcccaagataggaatagcggagtttcggagaggcggggtcggttccatcgtcgctcacggtcacaagcgacggtggcagcacctcgcacgacaccacctcgccgccgaaccacacaagacgcacgaaagcgttgccgtccagcaccatgcttgccaccatgtccgcgaggaagtcacggcggctacggttcacgtccggctgaagcacgatggacgaaaccgtatcgagcttcacgccacccctgatttcatggataggcaaacccgtgatagcggtttgcagcacctgcacgccacggaacacggttgagaggctcaacgggtcgcagtcagccaagcgtgccggtggtttgatgccgtccggcacgccagcgtcagcgccgcgcgtcagcacgcggcccgccattctcacacgctcccaaatgctcatgcggccaagtatcaccgccaagcgccaaacccgccgcaagcgtgccgcccaacgccgcatagtgccgccatgcaacgccgaacgccaccggctagtagatttgcagcggccccgtttcctccggcctgtgggctgttccccaggcggccaacatgcagctttccaacggtgatgtaaggccggtgctgccacggcggctcacccgccatgcgtcgccggcccatttgcgcgccgagttcgcggcgctggcgtccaactcagcgtcggcggcgtgagtaaccgccttattcgccagacctgcaacgaaactctggccgatcgtcagatagtcggccgcgtccatgtccacgaaccgcaacaacgggtcgcccgcgtcgtctgccatatggtgcaacctgtcggacaaatcggcggcggtgccgcgcgcgtcgatcaccaccggcgcgtcatatttctcacacaaccggttgagttcggtgggcgcgtacccggtgccgtccaatattctcaacagttgcaccgtaattgtgccgtcattgttggcgatgccagccgaaacgctggtatgggtgccgtccacgtccaccgcgactccgaacaccaccggcctgccgtccaaaccggtaggggccaccggtgccgttaccgtcgccgcccacaacgcctcgtctatcgcccggtccgttatgccctcgtccctgcggttgccgaacgcgcgcgcccaacctgccgggttgccctggaactgttctcggaagtcggtcaactgcgccttgtcccacaagagtccggcagctgggtgatagcgcatgatgctgtccagattctctggatcttcgtcggccggcaaaccgaagtcgaaccaacacgttcggcgcgattgttcgccagccctgcaagcgtcaaggcggcggttgaaaaacgtcgattccgccgtgccctctgtactggtaatccatagttgcggttgcacgccggtggccttgaaccttgtcgccatggtcggcatgaagccgtccaaaatggtgttgccggtttcctcggacaacgaaaacgcctcgtccaacgtgattttgtcgccttggacgccgtgccccgcaaccttggtcacgctcttcggcattatcacgctgccattggcgaacggctggcgcaagtcgcccgcgccgagatacggccgtgtggttattgcggcaagcggcgagctgccgagcgttttcaggtatttcttgaagtggtcgcccgcgtccttgcccgtctgcgccagataatagatgaaacgatctggtccccactgcgagttgcgcgtgtccaccgcgtccacaagcgtactttttccacactgtcgcggtgtgctcaatatgaccgtgtcatagtagtaagtgcctgtgtccgggtctatttcacccgccacgtcggctaccaaccgttgccatggcagaagaggcgtgccaagcaaccgggcgaacttggcgactataggcccgtcggtgcggcggtccgggtttcgctgggtgccgccgcgcaatggcgtcatgcccgtgcctcttccagcagaccggcaagagcggggtcgatttcctgcgttgcctggaactcggttttcaattcctggtaccacgccaagagctgggccatgacacggctcgtgtcgcgtcctttgacgttcagcgcgtcgaaattgcgggcaatgttgatcatggtcttgcacacgtacttggcgttagggtcaagctgcctatcgcccacgaaactctcgataagctccttggtggcgcgttcctgcaagccctcgttggggccgtaataatcattgaaaccgtccaaggtcatttgcattttccaacctccttaatagctggttttcattggtattccgccgttttccgatttttttatccggttcgagagagtgaaaaagtgggcgcggggtcttggtcaaggccgatggcttaaaaaacaggctcaccactccggccttgacgcgactgtgacgcgatcactgcgaagccccaagcgtacgagcatggcgcggcgttcccgctgtcgtgcgtccaccaacgcctgtgagatgtgcaagccgtaccattgacgcaccaaccgcttggcctgctccgtcccggcccgctcccactccacgctgaagccggggtctatcacccgcacgtcataatccagggctatccactcgtccaacatgcgcggatgcctcttgctgcttggcgtggttcgtgcaagccacacgtcgataggctcctgagttatggcgaactggcgataggcagcagaccacgccatagccaccgcccgccgctgcgccatgctgggcgacgccggtaggcgcatggcctgagccaacgccgaccacgacacaacagggtcgccgtgctgcctgtgtgagtcaatccactccactgcctcacggtcgcatgcaccgggtggcgtgatgatgatatgcaagcgcgcgccatagccatacagcacgcggtcttggcgactggcgttgcaatgcttgcacgcacgcctgatgttcgccacggtatccatgccgccatgcgagtagggcactatatggtcgtcttcctcacccacgccggtgcaaccgggcaacctgagccaacaagcattgccccacgtctcgatcacctttgccctcacaagagggtcgatggtctgcctacgcgccatggccctgcctccgcttcctcgcaagcacccacatatcaagatcagccagctcgtacaagcaaggcgagttgaaagcgtcgccggccttgaaccatgacggcccacggttctccttcctcatgcgctccatcgtgcgcgccgagacgcccaagtagatggccgcttgcctggtggtcagtttcgcgcgcgggttcacagcacgcccacccaagacttgagcgatgtcaacagatcggcgcggtcgaacacctgcactccagatcgggatacgggctttcgcaagacgcccctgctgataagctcctgcaacacatggtcgccggtcgggtcggcttccggcgcgatcttgttcaggcgaagcaagttgataacaaagcaacgcctaaccatatcggttccgacggtgtcatgctccaaccgttcgatgttccacctgatagcgttcttgatgtccttagtacgctgcgctttgttcttcggcaccgcacgcttggcacgcttcctagtcggcctgtaatccaccgaatatcccataatctgcctcacttcctaaagcttgagtcggtctgtagaagattgattccgaagccgcaaggctccgtttccatgtctctcaaattggtgaacagttagagcggggaacctcaaagcgaaacaatggaaaccggcgaagccgcaaggctccgccgtccaaagttccgtaaggttcgcactgcaaagcaagctctcaaatcggagccacagccgtcgcaatggtcagcggcacaaggccgcgcgcaaggtcacggcctgagacccgccacgcatggcggcaaagcaccctgttgcgccctcccaatgcgccccaagccgttcagtgaacccgcatggcagaccccgccgccgtcgtaaccaccggcccacagccggtgtgtttgtaacgcgctgggcaaggcgcggccggatgcttcatcacgactccccagcaaccgacggtcggctggatcaaagccatattcagttaacgacggcgttgaccgtcacagatcaccgccgcgtcttcgccgcaccgcatcgtcacgcgccaacgagtcagtcacgcacgaacgcaactgctccacctgcggacgggtcaacacaaccgccgcgcgaatatccccggaatcgaacgacacacggaagatgcccggatatgcctcgtagttatccacgcagaccctagtagccgtacccatcacgcacctcgccttcgtcggttatcgccatttgcacttcgtcgggtatggacttgatgcagcacaccagcgcgtagccgtcgtactccggtatcttgccggtgttcagtgcgatggccggttggtcttcgtcgtcggtgaagcacctcacggtgccgcaacaccaccagacgcaacaccaccagatcacccggcgcaactgtgccgggttccgtcgtgatctcgaaacgaacgctcatttcactgctccttgattcatggatggacggtcaggctccttcccccgccgcgataggctggaaactgcaacacaaacaagccgtcggaaacaacgaaggaaggaagaataaatggacgcggacctgacatggttcgagctactgaggaacgccatcgacgcactgaaagccaacgcaccagcggcgagcgtggttatcgccgtgctggcgttccttgtatcgttggccacataccgtcgcgcatggcggtggcgttccgaggccgaacccgccttcgtgcaggtgcaaggcgacatgctcctgtttcccgagttcaaacgcgccggcgttgacccggttttcatcggatggctggccaactgcggggatggacgggcattcaacgtcaaagccattggcataaactgcgatgccgaggtgtgggactgccggcagataggcgaaacggtgctgggcgaacaaaccaaatggatcatgaccaacaccggtcgaatagtcgagttgaccaacgaaacaatgcgattctgggtcaccatcacaccgccccgcgatccgagtcgcgacattgaacccgacctgacgaaactagagcttggagtgcattgggtatcctctccaactcgtcttcgccggtgtcgatataggcagttcccgatcttgggagtagaaccatggaagtgcggacccttggaacgactgcggagatggcatagggacaggaagggtcatcgcaggttccatgaactcgacagaaaacgggcttcagaacagagaaagaatctgtcctaggaacaatccgatacgtgccgtccgagaacacctgtacggcgtcgtcggactgcacgataccgtccgaatccttgcatcgcctgcctttataggaaccgacacccatgctggcaaaaatgccctcattggcctcgtactgttcaaccacatcatggtcatagggaataccaagccgcttgcggttaacctcgaccgaatagacgcacaccctcaacgagtgacgggccttgcccttcgcttcctctgcgatcgtccaagcgtgccgcgacaccaagagcgaagcaacagaaatggcaaatgtcaacgacgacaaaacaagatgccaatccatcacgccacctccaaaggcttcgcataatcagaacgaccaagcaggaaatcgacgctcacatcgaaatagtcggcaatcagagacaggtcgcgaacagtgaaagcgacagtgccgtgaatcttctgagacattgtcggaccagaaattccgagaatcgatgccagctcacgttgtcgcattgcatgggactcgagtaagtcctcgatgcgatctaatcgagtttgtttaacaaatgcaacttgtgtcacgcaaagattattaacagtctcgcaaagtttcgtcaaatcaacacgccggtcttggcaaactaaaattagtaaggctatattgtttggtgaaaccaatttaggaggtggatagatgagtaacgtactcacagaaaacgaagccgctgcggtggctgctttttccaaaatgacagaagacgcggcaaagatagccgatcaatacaaagctatggctaaaacctatgaggccactttaaaacttgctgagcaatataaagcaatgttgaagccgattgagccgatgctgaagtggtatgagaatcaagcaaagatataccgcggtgtttcagatatccaagaatcggtcacaagcagcatgaaggcgattatgggtgctcgtggcttgaagcagtcggatttggcctctgcgctgggcctgagcgcctcaactatttcgcagaagatgacaaagagagttgcgtggacgctggatgatatagaaaaagcctcggaactcttcaaagtgaatcccgaggcgttggtagcggggcatggatttgaaccatggacctctgggttatgagcccagcgagctaccgagctgctccaccccgcgccggctgttttcaaacagctctatctaagataggggagaatgcgagattgtcaaaccggcgtgtcggatttttgcgctgagtgaaatgccggga

SEQ ID NO: 1494 - DNA, 17568 bp, Unknown
  R257_15m  MAG No. k141_37834
cggtccggggcaatggaccagccgagcagggccagggagttgagcaggccctcgcggatgaagccgttgtcgcggtggttgaacaggttggactccgggtcgcgcttggagagcttcttgttgccctggcccatcacgtacggcatgtggccgaacagcggcatctccttggcgatgccgagttccataaggtaacggtagagcacgatctggcgcggggtggagctcaggaggtcctcgccacgcagcacgacgttgacttccatcatcgcgtcgtcgaccgggttggtcagcgtgtacagcgggtcgccgttcgggcgcacgatcacatagtccggcacggagccggccttgaactcgatggtgccacgaatcagatcgtcgaaggcgatgtcttcatcaggcatcttgatacgtagcgcaggcttgcggccctcggcgcggaaggcggccttctgttcatcggtcaggttgcggtcgtagccatcgtagccgaactcggccggacggccggcggcaaggttgcgctccttgatttcctcgggagtggagaaggactcgtaggcgtagccggcttcgagcagcttggcggcaacatccttgtagatggcggtacgctcggactggcggtacgggccgtgagggccacccacatcgatgccctcgtcccagtcgatacccagccaacgcagggattcgaggatctggttgtagctttcttcggagtcgcgcacggcgtcggtgtcttcgatacggaagatcagcgtgccgccggtggcgcgagcttccgcccagttgaacagagcggtacgaatcatgccgacatgcggggttccggtcggcgacgggcagaagcgaacacgaacgttcttgggcagttcgggtttggtgttttcagcatcagtcataatcccctattgtgccgcgcgcgccggacgcggagagcagcgctcctcgctcttttgcttcgttattgacatttcgggccaacaccatcccaaaacggccattttccaacgaaatctcttttgcctgtctttggtagtgcccgatatcttgatgcctgtcttcacacctgttttgacgcctactttggcgccatccacacgcccgcacgcaaggcttcgacaccatttggcgcaattgttgagttttttacccaaacgatggaagaataggagtcgacgcaatcgtcttatgaaaggggaatcaatgaccgatcccaacaacgtgccgttgccgcagatgcccgcgcccaacggtaccccggcccagcagaatcccagcacgccgcaatacggcgcacctgctccggcccccgcacagccagattatgggcaattcaacgctccagcccccgcacagccggcctacggccagcccgcatacgggcagcccgctcccgattcttccgcacccggcgcagcgcccggtgcaactcccgcctatggtcagcccgccgccgacccgtacgcggcgaatgcggctccgcaattccccgctcccggcgcggctcctacctacggccagcccggaccggacgccaacgcttacggtcaggtgccacccgcatacaaccagtacgccgctcccactgccacagcagccgtgccgttgaacaagccgtattacgactgccccttccctgaggcattcctccgtttctggaagaagtatgtggtcttcaagggacgtgcctcccgcagcgagttctggtggtggacgttggcctctgtcggcatcagcgtcctgctgagcctcctcagcagtgccacggacgacaagctcgggttcctttccagcatttggagtctggccatcctgattcccagtctggcgctcgccgttcgccgtctgcatgacacggacaagcccggctggtgggtcgccatcttctatggcgcgatggccctcggcatgatcatcatggttgccggcggtggcgcagcactgtatggcgccttcggcagccttagcaactccagctatggagccatggcaaccggcggcctcggtgccatggccattggcggactgattacgctcgctggttcaatcgtctacatcgtgttcatggctatgcccagcaagccggaaggcgcacgtttcgacgatgacgcagtagctgccccgatgcctcagggtgcttacggcgcaccgtacggcgctcccgcaaccccggacttcaaccaggccgctccgggcaccgctccgaacgcacccgctcctgacttcaaccagccagccccggcctatggtcagccgaccgcaccggctcctgactacggccagcccgctgtgcctacgcccgattacggtcaggtaccggttccgcagtacggccagccggagaccccggccccgcagtacggccagccggagaccccggccccgcagtacggccagcccgacgctcaggccccacagtacggccaggttccgccgattcccgaaaacgttgatgatgggtccaccgtgctgtctccgcacacggctcccaccgatgacaacgcacagaaaccctggcaaggccagtgactgacgccggcgaagttcgcttaagaagttcgcctcatcactcatgaagcccaacaatgaggccccactcatcaagcggcggtagtattccccgccgttcagtaagccaatgccctgtgtactggatcattccagcacacagggcattgtgcgttattgcggcccctctcttcgcgcaacattccccggaatgcgttacggtggaggatggacgctgcgccgagctactcctacaagctgcctacggagagcgtttgggagatcacatgggattctcccgggcccagcgtcacgatgcggtcgcggcataccgccgcttcaaccgccacgaaaccgcgccattcgcccggcttggtgtagctcatattgtcgccgtccgctcccggattccacaccacggtttgcggcgacccggtacggctgatatgaatcgcacgccccaacatgtcatcgcgcagttccagacgcgcatccgagtaatacacacgattcaccggctgctcgccaaacgtcaccacttgcgcgtcctgtgttttcggcggaaacccttcttcggtggcatccagatacgtcgctccctgcaatccgaccagctgagcaccggacacatcgccgacatgcagataggaatgcaacgcggcctcgtacgacataggcgccgtgccggtgttggtcacggtcaggctcatggtcagcgcattgcccgtttgcacgtcatacacggcatgaaactgagcacccggctcgtcatcgaaccaaggcacttcattgtcgttcagctgctgcgaatccaacacataccgtatgtggctgtcgtcgaatgaaccctcgtccaacgcccaccgacgcagacgtgcaaaaccgtgggatggattgagtgccagctgcttgccatgcgcaaaacccggaccgaaccacgggaagcagatcggcactcccccgccgagcgacttaccggcctcgatatgccacgtactcggcgtccacaccacatccgcctgcccggccggggcccagcgcaacagatgcgctccgtaatcgctgattaccacgctgccgccattgttggcgagcatacgcaaatcgacaccattgcccataagtttcccattcccattgtgcgaacgatacttttcactaaataggatacttccttaacaaaaaagaatcgcaaagtatggccgcaggatgcacaaaggccgtacacacaccatatacgatgtgcgacgcggccttgtgctctgtggtccaatgaactcgttgcttttgagcgatgccctaagggctacagatgcgtttctcgctgccagagagcgatctgccgctgctgggttcccgctacgtcgattcagtgcgcaccaaccatccctatggcgtgcgtaaggcggcggtgcgcttcctgcaacacggtcccacccgtgtgggcgcggcgttcaccgatacaccgacttcggagctgattcaggatggctggaagcaaatcgtgacggaaagcgacgccatcgaatgcccgttcaccatcaccggcattcagccgtacaacaccagggacgtcaaccaaatcgtggacaccattctggattcgggcgtgacggccatgctggtgcactccgattatctggcgatcgccatcgcgcagaccctggagcgccgcggcaagcgcgtaccggacgatatctcgatgatctccgtcaacggctttgccacgcccagctcccgcccgctgaccgtactgcgctcgtccgataaggatctggccgaggcggccatcaacctgctgatcaaccgcatccaaaacccggattctacaacccgccacatctacgtggacccgacgctgaccgatcgcggctcggtaatcgataagcagtaaccccacctccctctgacgagggaggtggcatcgcaaagcgatgacggagggagaggcaccaggcctctaaccgttacgagcgaagcatcggccagagcaacgcccttactctttacaactccacggtctctttgccgggatcatccttgacatgcgcgaacttggcggccagagcctccttattgcgcttttcgtcttcttccttggcctgacgcttagcctcgtccgggttccagagcacatcctcacggtgcttgttccattcggcaacggccagaggagcgatgtattcggcggtggcggtcagggtgtctgcgtcggcggctttggcacgggcattaagcaacccgaggatctgctcgtcggtcaggcagatgcgcggcaccgagcactgctcgcgcagttcgttgacgtagagcagaatcggcagaatcttggcggcagcattggcgacgctgtccgctgaaccatcggccacagcatcaccggacacctcacccaataacgcatcgcacacggcgagcgcggtggcgaaccgaacagccacatcggcgggcttggcagacgtggccagacgaccatcggcttcagcgtcggcctcgacctgggcttccatggccgcgaccgcctccctcaccgattccgccgtcgcggaatcccagtcgattcccaacacgtcggccgcctcaacgatcagcctggcatcaccggactcggcgtagtcggccatcgtgtcgtaggcgtcattggcggcgagcagggcgtccacgatgttctgcggacggccgggaatctcatcggcgccctcatacacgaattcggcgtcgggcacggtgacgtcctcgccggtcagtacgcgggcgaacgcgcgggtgaggcgcacctgcaggttctccgcgtactttgcgtcattgtccatctgcatggcttcggtcagcggccacaggctgatcagcgccgagccggcttcggcggcctcagttaccgccggcaatgccgcgacctgtgcgattgcctcacgattgagttcaatggtcatctatgctcctttgcgtccaccactcgattgcagtgcgtcttggctcccctctctgaggggagccaatgtcctaacaccagtgtgccgttacttgacgttggctgctgggtcgacatacgtgattgacatcacacggccggtttcgttgtcgtacgtcaccgaggtcacggaggcgagcgccgtgtgccgcaggaacatccagtgctcggggtggccggtctccagataatggcgataactgaaaatcggcgattcgtggctgaccaccacaatctgctcgccggggtgctgggccaccttctcgcgggcgaagtcgtccatacgcgccgcgatgtgctgataggactcaccccagctcggcttgtacaggttggtgacgagcttccagttgccgttcttccacagcgcgccctcgccatggccgatgcgcttgccacggaactcgttgccggcctcaatcacccgttcatcagtggtgagcgtgagcgaagcctcgccacgagcctcgcgcacggggttcagcgcatcgagaatcgcgccggcggtctcgcgcgtacggtcgagcggcgaggagtagacggctgcaatcgtattggtttggggattcttggccaagtacgtggcggtggcttgagccatgcgacggccaaggtcggaaagatggaagtcgggcagtcgctcatagagcagatggtcggggttatataccttgccatgccggacgaaatggatggtggtagcgctcatgagccgcctttctgcttcccgccctgaagggcatgagaacgttgtcttaatatctccaatctaccgcgtgtcgcggagtggacacccgtagagtatccgtgacgcaaatatgcggatgggaaaatccgacgcaaactttgcgcgaccatggacaacacatcattcgatgagggcttcgccggcaacgccacgccagcgggggacatccaatcgggagcggaaaggagcgtagtgctgttatgtccaataactcgtccaactcgaactcgagcaccattctggccggcatcaaggaagtaggccacaaagtctttggtgggtatgcggaactactgcgcattccgcataccgcccgttattccatcggctcggtcatcgcctgcatgccattcccgatggtcggcatgaccatcaccatttccgtacagcattattacggcaactattcgctggccggcatgctcaccgccattcaggcgattgcgctggccgtggccacgccgctgctgggcaagctgaccgacaagttcggccagaggcaggtctcgattccgacgattatcgtttggattgtggccgccatcgcgctggtgacggcgattaccaaccgcgcgccggaatgggtgctgtactgtctgacgccgttcctggccgccattccgccgtggggcgcgatgagccgcgcgcgctggaccaagattcttaagggtgaccgggagcgcacgaaccgcgcgctgtcgctgtgcggcgtgctcgacgaatgcatgtgggtgatcggtaatccgctggcctccacgctggccgtgatctccggtttgctggcgttctcgttcaccggcatgtgcgtggtggtcggtgcgctgatgttcctgaccgagctgaccactgagccaccgtcgcagaccgcgctggcgcgtgccgagggcatctcccgcaaggaataccgtgagcgcgaggccgccaaggctgaggcgctgaaggtggaaaccgccgccgaggagacccgccgccgtcttgagcgtgaaggcgtgaccgatgaggccacgattaacgcagccattaagcaggcggtcgccgatgcgcgttcgggcaagaaggcgtccatttggggtccgggtctgattgcggtgtgcgtcacctggttcggtttgggcgcgttccagtcggctacgggcatctccatcatcgcgtttgccaccgaagcgaatatgaagcagtacacgggctttgtgtttgcctgcttctccttcagctcgctgatgggcgcattggtgtatggcgcgaagaactggtcgattgccctgtggaagcgcttctacttctgcctggccgtggtgaacatcggcatcagtacgttcctgttcgccaagcatctgtgggtgatcatgatcatctacttgattattggcgtatgccaggccccgacgtggatcaacggcaaccagctcatgttgcatctggtgccgccctctcgcttgaccgagggcatggcgtggatgggtgcgatgaattctatcggctcctccgccggttcggcgattgccggccagttcatcgaccgcatgggctcgcacggaggcttcatggtggtgaccaccttggcgctggcctcgctggtgattgcactgatcggcttcaagcagatcaagggctccaccgagcagccgaccctgactgaagtgagtgtgtgagacgtatgctaagccccctctgacgagggggcttagcatacgtcaaaacgctacttcggccagcctttgggcgtgtgctccaaggaccagatgccgagcttgtgggagaagctgttctgccacttggcttcaagctcctcggcattcagtcgattttcagcggacttcagacggttcatcgcattggtgtgcgtatcgtcgagcagccacttgcgaatcaagaagttccagatcataaccacggcagtggccaccaacttgccgatattggtacgcaacagatattcggcatgctgcgatacataggcatcatggttcataccataggtggaaatccagataatcgcgtcattcatgaacagaccgactacagcgcccgccacgaagataaggatctccatccagcgtgccatgtcatcacgatgcttgaatacgaatttcatgctcgccagatagttgaaaatcagcgagatgatgaaagagatggtggcagccagcacgttgtgcatgtggaatatgccaaccaataggttgaggataccccagtcgataacaaaggcgataacgcccacaatgccgaacttcatcagctgttcaatcagttttctcacaagagtattcaacactattgggctgactgcggaacgtgtattggctggcaaggccaataatatccccaattggccttgccccggtccgttctgcaagcagcttcctacgtccgcatgccatgttcaacagcagccgctgaggctagactggaagtgaaccgaatcaaggaggaattatgcccgttattcacactcatgtgtccgtgtccaccacccccgagcagcgtgaggcactgaaggccgcctacggcaaggcgattaccgctgtgccgggcaagtccgaaggctggctgatgtgcccgttcgaggacaatatgccaatctacttcggtggtagcgatgaccagcccgccgcctatgtggaggtcaacgtattcggccgctctgtgccgggctctgcttgggaaaagctgaccgaaagcattatagccgcgctgaactccacactcggcattcccgaggaccgcacctacatccgctacaccgccaccaccgattggggctggaatggcggcaacttctagttgccaccattcccctcgcagcatagctgttcgcatcgcctacggaaagcccagtgggctttccgtttaatggctcagggtggcaactagtttgcgtattctggctcccctcagtcagcttagctgacagctccccctcaaagagggaagctcagatgtagagagcccgccggtggcgggctttctacgtttcaaggggctgatttccaacattcagaagctctactagcgtttcaaggggcttttaaaacaagaaacccggagtataaacattgcaatttcaatggtcatactccgggtttcgcgatcgaagagcccctcgaaacgcagatagacctccggaaaaccggaaatccacccctcgaaagcgagttacctcacctcatgcctgtcatcacacaatcttgggcatgggggtggtgaggctggtggtcaggttgacgtggaccagaccggcaccggcatgcacctcgaccttcttcagggtcacggtgcgctcttcttcgggggcgcggtcgttgtcggtcatggtcgccggggacttgaccgccacgaacgccagatcatccagcgagatgcctgcgctctggcacagttccatggcctcggacacggactcggtgaagcccggcttgtagatcacgcgctcggccggtacgccgtaggcgttctcggccacccacttggcgttctcggtcagggccatgcccttgtgcgaatgcggttcggccggcatggagccgttctgcagcgcgtcgacgaaaccgtcaagctgcggggccagtgcctcgccgccggcgcggaacaggttgccgatgatcggcgtacggaagcccagctcgtcggcggtggccttcagggacggaacctgatcgtcctcgccttcccacaggttgatgagcgggaaggtcggaatgtccaggttctccaggcgctgcacgtggaacgggtagcgccaggccagctcgggatcgtcgcgccaggtggaggcgcgggtcaccacgatggcggcggacggccactgcgcgccatactcgcgacaggcgatgtccagccacttctgggcaccggcgtcggtgccgtaaccggcttcgacgacaaccacgtcatgcagagcgcaggccatttccacggaaaccagcgtcggaatgccgatggacacgttggcgaacgggccaccgtgcacgtagaccggggagccgttcacggtctcggtcttggccggcttgaccgcgtcggccagaatgccggtgatgcgccacagatccacgaactcgccgaaggtcacggccttgccgtccttggtgccggcgatcatcttggatacgcgctcggaaatctcgtccatcgagcgggagagcaccatgatctgcatgagctcgcaggtcggcgtgagcacgaccttctccggcacgttgcccttgccgtagtccacggcggtggagcgcagggagcggctcggcacctcggagacacgcggcacgagaatcgtgtcaagcttgccttcatcgatggccttctcggcgaaggagacgagcaggttctgggccgcctcgatggcacccatttcgccgcacagaccccagtcgatgagctcggggtgggtcagggatgccttgccgccgccggaggcaccgcccttggaaccggctgcggtgatgcccatgctcggctgacgcagcacggcggccgcatcaatgccacgcttgttcagggcgtcgatcaaggcgatggtcgtggtggtcttgccttcgccgcgcgatgccttgagcggcgtatcggcggtgacgagcaccaccttgccgtgcttgcacggggcgtccgggttctcggccaggtacttcatgtaaccgaatgcgtcgatcttctggaccaggccgtactggctggtgaagtcttcgatggtggtcatttaatgcctttctgtgctgatgatggcggagcggggtggtggggcggccgccgccgcctcttcgcctagaaacagcccactgggctgtttcttaacagcttagcctctcagtccgcttcgcggtcagttcccctcagggaggggagctcaatacggactaaaagtcggacatgtggaagccgttcttcatttccatgctgcgagtgtacagcacggagtcaagcaacttgtcggtttcctccttgagctggtcggccatggtctggttggcggcggcgagaatctcgcgcacttcggggttacgcagcgcggcgatggtctcgtccggggtcatcggctgcacatcaccgtctacgttatccgcctcgaattcctcttcggcagcagactgcgaggcttcctcggcggccgtcaagcccagacgggcgatctgctcgtcggtggcggcgaccaagcggtgacccatcgcaccggtcttctcctggtagcgctcgacggcgttggacgtggagcggaaggcgccatcgcacagggcggcgatgatgcggttggcccagtagaagttctcggacgtcacgcgggtggtggtgtcctcaaggtaagcgggcgtggtgtccacgttcgggaagaacggcaccagcgtgttgaacgggttggagccgtatgccatccactggatggcgcgggaggcctgcgggcggtacgggcggatctgcatcaccgcaagctggctctggcggttgatgccgatcgtgcggtacatgtggcgggtgcgctcatcgcccagctggccgtatggatcgaacggggtgccctggtagtgggagctcaacacgtacttgatgtcctcgatggtcaccttgcgctcgggctggcgggcccacggaatgtcgtcggaggtgggcttgtggtcggcgtccgggccgtcccacacctcgtcgtacgggttgaggaagcgctgcatgtaccaggcgcgcggggtgttgtacacgtggtcggagtcggagtgggagccgaaggcgtcgcgcgggttgaacggggtggtgttctccaccgcgaggtccaggtggttggtttcgatgaattcggcgagatcttcggagcacatgtgcgcttcctggtcgcccagagcgtcctcaaggtcgaattcgtcgataccgagctggttcggcatggtcacgtaggcctcgtccggcacgcgcttggcaatccagtgatggccgcccacagtttccagccaccagatttcgttggagtcggagaaggcgacgccgttcatctcgtaggtgccgaattcctcaagcagcgcgccgaggcgctggacgccctggcgtgcggtcttgacatacggcagcacgatggtcaggaagtcctcttcgccgatgccgccgggcacctcgggctcatcgcccctggccggcgtgtattccacgaacgggtcggcgccgagcacgcgctcgttggtggtcagggtctcggtggcgctcatcgccacgttcgcctcgttgacgccggcctcgccccagatgccttccttgaggtccgcgttcggcacggcggtgtactgcagcgggtcgtccggcagagtgatggtcaggtgggagatcactgatttgtattcgcgcggctgttcctccggtttcacgacgatgaagcgcttcgggttgaactcgccgttcgcggaatcctcgttgcgggcaatgatggtcgaaccgtcatagctcgcgtctttgcctaccagaatcgtggtgcaggccatagtgtgatggtgtcctttctcttattcaagctccccttgtcaggctgagccgttcagcaaacagcccggtgggctgtttgtaggcgagggtgggagataagtcccaccacagatgttgcgggcggtagcccgtccgtaattgcaggacgagctgtctcgcaaagcgagactgaggggtagtcactctagctgtctctcccccagtccgcctacggcggccagctccctcatcagagggagctcacatacgccaactaaaaatcacgccttaccggtcaggaagatgccgtcggtgtcgggcgcttcgccgctgttgcgcagcgcgtgcaacagctcgttgagccagaagccctgattcaagccgggcaacggcttcttggtggcccacacctgcaggtagtactcgtggtccttgtccggcggctgcggaccgttgtaccgcatgatcaccgctgggtcagtgctgcggcccaagaacttggaggccgaagaattgcggccttgcacggtctcgggaatcatggccggcagctgacgggagaagtccggcgggatggccaacgcatgcgaatcattgaagtcgtacatcagcgcgtcaatcggcagattggccacggaccagtgaatccactcgaagccgcagaccggaatcgaatccgggtccacgaactcccagtgcaggtaacgggcctcggggttcacatcaccgatgtagaacgggaaggagacgaccggcacgccgccgttgaagtactcaggcgcggcggccttggcaaaatcgtccggaatgacggtgaaatcggcggaaatcttcatatgtcccagtatcgctcatatgtgtgacgtactgggggctgtgcgttacggggggtctctcccccagtctcgccgcgctcgacagccccctcgtcagagggggctggttgcgtcgggttatggaattagggcgcagaagagggattcgaataccagtagcgggttgccgttgccggctagacgcttgcgggcgtgggccacttcgtccagacgggtcacggcaccggcccggttcaaccgcaccgacaattcggtgatcggcgagcggttctccaggttgatgaggcccaccgaatcctccgcattgttctgcagcaccgccacatcccggtagatggaggcgatggagttcagcgcacgatccaatacgtcgcgcgtacggcgggtgaccaaacgcttcacatcgtctttcttggcgatctggttgaacgcgccacgcagtttcggcgggatgcggtcgttcggtgccagtccgttgatgcggcggaattccgcttcctggccggcggtgatgcggcttgcgtccgcctcggcctgggccttggcattgtcgataaggctgccggccagcagcaccgcgtccgaggcgcgagcgaggttcagtacgcccaccaccaattcgtcgcgatccgtcatcacctgctcgtcagtggcgtacaacttggcgatgccgatgtgtccctcggccagacgggccgcacgctgcgccacttttggctcgacattggtggtggaggtcaggaatccggccaccgcctgggtggagggcacggcgaggttcacgatgcgcgtgcgcgagcggatggtgggcagtacatcctgggcactcggcgcacacagcagccagatgcagtgttcagccggctcctcgatctccttcagcagcacgttggtggtgcgctccagcatgcggtccacatcctcgatgatgatgatgcgccatggtgccgtggcaggcatttgctcggaggcggtgatgatctcgcgcacctggtcgatgccgatggtcactttgttggtggccagcactgtgacatccgggtgggtgccagcgagcacctgttgggtgacgcgcgtgggctcatcgttcatgccgtggtcggggctttccagcgccgccgcgaatgctcgggccatattggaacggccggagccgggaggcccgcaaatcagccacgactgggtgatctgacccgggtcgccctgcgcgatgcgactgagcatgtcgattaccggctgctggccgactagtgaatcccatacgctcatcggacaccgcccatcgtcacggctcctgtagacgccccggatcgcgccatcaccgtatccacatctgcaacattgtcccgcagcagtgtctgaatgtccgcttcgatggcggaccacacctgtttgatggactggctggcatcgatcacgtggaaacgattcggctcggccacggccaagtcgaggaacgcctgacgggtgcgggactggaagtcgctgccggccgactccatgcgatcttcggcatgctcaagacgattgtgggaaagcgccggatccatatccagcagatatgtgcggtcgggcagcaggttgttggtggcccacatgcttaaggctcgaatctcttctggcgtaagttcgcggccaccggcctgataagccaaggaagagtctaaatagcggtcggtgatcaccacttcaccgcgctccaatgccgggcggatggtttcggcaacgtgctgggctcggtctgcagcgaatagcagcgcctcggcgcgcggtgcgatgtcgacggcgcccccatccacaccgtgcaacagcagttggcgaatggccttgcctagcgcagtgcctcccggctcacgggtaacgaccacggtacgcccctgagcctcaagatacgcacgcagccgctcgacttgcgtggtcttgcccacgccatcgacaccttcaaacgaaacaaacagaccgctcatgctattgaccttagcgttaggcgcagagttgtgcccaacaggcagttaaaccagctctacctccgtttcaaggggctgatttggtcttttctgaaggtctacttccgtttcgaggggctgttacccaagtagacaacgtcccaaaacggcggaatgacgttggcgcggagccgttcatactcgtggttcagcagatgaccagccccttgaagcggaagtagatattctcaaaacgagaaatcagccccttgaaacgcaagtagagcaataattccgctcagccacgcttgggaattacggcggggcgctcgtagccctcgttggcagtcagccagtcgacatccttcttgacggtggcggcggtggagctgagcttttcggcgatgcgctggttggaccagcccttgtttgccagcttcttcacctcggcacggcgtccggcgcgcttggcctcggcggcattggtcgcagccgaagcagcgcccttcttggctcccttggctcccgacttcgcggcaccggcacgcccagcaccgcgacggccacgggtggagggaccagccgcacgcttttcggcgagcagtcggaaggcgtcatcaggggtgatggattcaggcgtgtactgacgcggcaccgtgcggttggtctcgccatcggtgatgtacgcgccgaaacggccgtccttgatggtcacgttcttgccggtgttcgggtccttgcccaaatcacgcagcggcggcttggcggcaccacggccacgcccgcggccgtacttaggctgcgagaacagttctttggccttgtcgatatcgaccgtgaagatctcgtcttccgaggccagcgagcgggtctccgacttgccgtcggcacccgtcttggtcagataggggccgtagcgaccgttgttggcggccaccgtgcattcggatacctcgccggtttcggcgttggtttcctcgtatgtgcccacttcgcgcggcaggctcagcagctttagcgcgtcttccagcgacagcgattcagggctcatcgtcttgaacaacgaggccatcttcgggcgcgacgcggcggcggccgcggccttcttcgaacccttcttggccgcagaagcaccagcagtatcgccagcagcgccagccgaagcctcagccggcggcaccagcgccacatacgggccgaaacgcccattgcgcacctcgacggtaccgccggataccgggtcaacgcccagctcgcgcggtccaccggagtggttgtcgatcaaatcgcgggccacggccaccgtcagctcatccggcgcgatggtgtccggcagagacgcgcgcttcgggttgccttcgacgtccagatgctccatgtcttccagatacgggccgtaacggccgacgcgcacgtgcaggccgtcgccgatgtcgatggtgttgatggcgcgcgcgtcgatctcgccgagctgcgcgacctgctgttgcaggccttcgtgcgcctcgtcggcgttgcgggcggcgccctcgccggaaccgaagtagaagtgggtgagccagtcgcggccggattcctcgccgtgggcgatgcggtcaaggccgttttccatctcagcggtgaactggtagtcgaccagcttggggaagttcgtctcgagcaacttggtcacggagaaggcgagccagctggggatcagcgcacggccacgctcgtatacgtaaccgcgatccatgattgtggagatgatgctcgcgtaggtggacgggcgaccgatctccttggcttccagcgtcttgaccagcgtggcctcggtataacgggccggcggctgggtttcatggccgtccggttcgatgtcgcttgcctcgacctgctggccgacgctcataggcggcagggaggtgttggattcggaggcgtcacccctgacggccttggcgtccgtcttgccggcggcagcagcctggtccgagccagccccagcgccgggagcggcggctttgggcttgcgccccgcccccgtggccttcataaagccggggaattcgatgacagtgccggacgcttggaacacggcctcgccctcggtggggccggccggcgcagaca

SEQ ID NO: 1495 - DNA, 13562 bp, Unknown
  R257_15m  MAG No. k141_39724
caaacgccgtactggtcgcatgtcattgtctgcaagccgatgcaatgaccgttctacgccatggtatccatgggcttggcggtgctgtcccgaatcaccagtttcggggtgaggattcgccggttgccgctcacctgctctccggcaagcactttgagcagcagtttggccactttggcaccgtattcgctggcatcacgatgcgcggcggtaattgacggatacgccgcctcacaaatgaaactgtcttcaaaactgacaatggcgggcagcccattcggatagacttccgcatggccctcccccgcctccatctgccgagcggaataatcttcggccatggcgtgaagactggccgcggcgaggatctccgtttcatagatgaacgcggtaggcggcttcggtgaatgcagcatctccaacgtgagcatcgcggcctgttccgcaacaaaatcggtgaattcgatgttgatggattccagctttcgccgtttggcaaatgcgcggaacgccgtgacacgcccctgtgaataatccaggttcggatcgccggaaagataggcgattcggcggtgtcccaatgacgacaaatgttcgagcacggttcccatcgtgcgtgaatcatcgatggacagtgacggcacataattgttcgggtcgggtcctccggcaagcactgcgcgcacacccagattcttcaacaattccgggcgtggatcatcggctcgcaaatcgacgaggataacgccatccacgcgcttgcgcgacgcccaatccttgtatacgctcatctcctcgttcaggaatcggcatgggcggtacagcaaaccatagcctttggggctgagcgaggcgtgcacacccgccatgaagtgcagcatgaagctttcatccgtgagcccctgcgtggatcgtgcgggggcaaagcctatggtcatggtcttcgaggatcccagtgcttgtgcggcgtagaccggcgtccagccgagcctggctgcagcctctttgacccgacgtttggtttccgcggaaacgccgggccgatcattgatggcgaaggataccgcggtctgcgagatgcctaattcatctgcgatgtctttcaggctcacacgctgcgtgccgtcagacgatgacgatgcctcgcgagcagatctcatgaacactcctttttacgaccgcattgcgactattgcgatacggttgacggcacccccgcattgggccatatgcatcaaccgtgcgctaactcttatgatatcaataattttagtcaaataactaaagcattttagtcactggtctcggcatatgtcttgcgacaaaacaaacgggatttaggggggcacccattgggcaacccctaaatcccgcttatggcacgagtatcaacacccgtattgcgacgaactactccgtcttgctacgagcgcgaagtaccaccgcacccgcgccaagcagcaccaccatggccgccacaatcgcaatgaccgacgaacccgtggcactcaacgaagcgccattcttgtcattgttcttgttgtcgttctggctgggcttgttcggcttggtatcgccaggcttgttctggtcgccgggcttgttcggcgtcaccgcgaccttggtgaattcgacggtgacgcccttgccgatggcattgccgttcagcacggccttcaccgtgtacttgccgaccttcgtggacacgacgttcagcgaagccacgccggcggcatcggtcttgacggtggtgtttccgccaatggccgagacgccttcgggcagttcaaacgccacctcggcattggccagcggattgccgaacgaatccttgaccgttgcctgcaccgtgcggatggccttgccgtcggccacggccgaaccgtcgaccgcggtcagcgtggacttcttggcatccggctgggtggggtcggcgaccgtgcacttggccagttcgtcggcggtcggaatcttcaccggatcggtcttgttgccgctgtaatcctcgacctgcacccgcagttcatgactggcgggggatggacctggtgtatgaggcaggtgtggtacgaccacggataataccagtgattggcggagtgttctgcgagtaggtgtagctagcacccagctggttctcctgctgctgcttgccattctcgccgatccacttctcggtcatgtacaggtagcgccagtcttgagtctcaggacgggccagcgtcacattatcgccattccagatcaccgagcaagccggatacggctcaatggcggcatcggcaaatgcacctgttgccgtagcggtagtgccacctgcattatcgacgttcaccacatagcgggagctgtcaaccggcgcattggcaatcgtcactttgctcttgtcggcggcgaccttgacggtctgggaatacggcttcgcggcgtaacgccacgaaccggtgtcggatttgacggtcacggttttctcgccggatacctgcggattggtccaagagaccttgacgttgccgtccttgcctggttcgactttcacgtcggagacggccgccgcttcgttcagcggcgcttcggtggcgagcgaacgcgagccgtccgcgcccccggcgtagagcttgagcgtgccggtcttggcgggcaggtgcttgacatacagggtgtcgtcgtagcggccgccgaggaaggtattgtccaggtagagcaagtagttcttgatggtggagtagtcggctccggccttgacgatcagacccagcgtggcgatcttcttacccgcgtactgggacaggtccacgctcgcggtcttccagccgttgcctgccgaaccgtccgtcacgtccaccggcaccacggtctcggggtcgtcggcaaggatgaggccaagctgcaacttggaatcatcgctgttgagcttgttgtaggtcaggtcaatcttggagccggcagcgacatccaggtcggtcttgtacaggcgaatggtgttgtcgttggagagcttgccgctcagcaccagcgaatcgccgccttcgtaaccaccgaccttggtgtacttgaagcgtggtaccgcctcgtagtccttaccgtagtcgaagtcggcctgcagcgggtcggagtcggcatcgatccaccactgccatgtcggcagaatatcctgcaggttgatgttgccccactgctggtcgctggtccgttcgccgccatcacgccattcgagaccgtgaccggtgttgaacgacgtagagaacatggaaccgccaaccacggagcattcggcgatctgggaagcgaagcccttccaaccgtcattgctcgtgccgtcgtcgatgtaattgtcggcgatgtcggtggtgcccttctcgccggtggacgagccggtccacagtcggcgttcgcggtcgaacacctggttctggtatttcggatagaccttcttgtcgtcgcccagttcgcgggagacgaagtcggtgccgagcgcggcgaggctcacatacggcttacctgtatcgtcgagattgacgttcatatagcccgcattgctgccgatactgtcgaacttcttctgtccggactcgatgccagcaaacaccgcatatttcggatcgatgccgaaactctcggcgtgagcggccgaatccttaagcatgttgccgctgaaccagtagttcaggaagatggaatcagagatcttgcccttgtccgtatcctgcacatacggcgaattgctgccgttgaacatgtcttggtagcctacgccgccacccgggtatgtggctgagtcgtaccactggatgtaaatgccctgatcgacgatctgcttcatgaagtcctggtaggctggaacatcgtcggcgacatcgccaacttcaaaagcgcggcccacctggccgcctacgccggcatcgctccggccaccggccagtccggcaccagcatcaagggcgagagaccctccagacggggcaacaaacgcctcaggaacgcgctgtggcagtccttgttcgtcgcgtccgccaaacacccgccgtccatcgcctactacaagcgcaaacgcgaacagggcaagcaccacaacgccgctgtcatctgcctcgcgcgccgacgctgcgacgtaatctacagcatgctcaaaaacggcgtcctctaccaggaaccagccctcgtagcctgaatcgggccacacgggaaaggacgccggacgccaccggcagggcgaagcgcgcccacgacagccaaccggaatcccgacacgtcaactccccaaggagttgacaaaaacataggaacacccccatggcattgtgccggtggcgctggccggtgcggccaacgccgccagcgtggtcatcgacaataccgcggccagaccgctgcacagccatttcctgtgttgagcccgggcagaagtacacccagcgggatcgcctagtgacaatctcatctataatctcctttgacttcttccggcttacgccggagatcaaccgtctgcgtactacttcgtccctaccgatgtgggccatgggatacggcgcttcgcatatcgcgccgtatcccaaatactgtttttcggttcattcgaaccggtgttatccgcggcggcggactgcgaatacgctgataccggcgagcgtcataatcacggcgaccgatagcacgacggtgccatcggaaccggtgcttgccagacgtccggttgcagactgtggcttgttgtgtgatgcgtcaccggaactaggtttgtccgtttcgcctgtgcctggctgttgcggcttgggcttgccgcccgttgcatctgcgattgcggtgttgagcgatgccgtccaggagacaacgtcagctccggtatacagcttgctggtcaggccagtgaccgccgcgtttctggccgtggtcagcgttgtccgcacatcggtatcggttgcgccgtcagctagcaatgcatccgccttggctatggcaccggtaagtgccgtggtgtcgatggaggtcagggaaagttcgagcgtcggatcatatgtgttgctgtatccgtcgttccaatccgcgccgagcaccgccttgttcacctcatacaggttggtggccgctgccacggtttggcgcgtttcggctggaacatccttggtataggacatacggtcaaggaagtggttggcagcctgcttggcgttttccagactcatgccttggctttgtgcgatggctgtcttcgtccaaatcagattcgacggtttgatgtgtgccaaatcatcgtcggaataggtgcgtccgtcgcggtcgagcgcgtagacgaacatgcctccgagattgtggtcgtacgagtatgaggccacatcatagaaatgactgtccaggtatggttcggtcgcgtcgttccaccggttattcatgtcaccctcttcggggaaggtcaggccgggaacgaacttggtcgagtcgataaactgttcgtaggtggcagcggccttggccgtccggttcgaatcggaaccgtactgctggtaggcaacatagtcgaagcaatcagaaacgttcttaaacggagcagtgtagctgccattggtgtcgtaaaggaacatcgtgccttccgggttatccgacttcggcccgatgcgcttggcgagggctgtgatgacctgatcggaaatcgccacctgcgcggcatccgggaaagtttccatatcgatgtcaagaccgtcgaggccaaccgaggtcatgtacgtttcgatgacatgatcggcgtacgcgtcataatccgattcggtcgcgctatcgacgtttttgccctgctgagcaatccacgtcttgaaaccgtcgaccataacaccgctgtaatccaaacctcgtacgagtttgacgcctcgggcatgcagatacggcgcgtaatcgctcttgagcttgtcatagaacggctgggccgccgcttcctggccactgggaacgtagctgaacacattgacgacatcgatgccgtatggaatgtcgtacatggagatccaattgtcatccggtaaatcggtgttcacgcctttcatggtcacgtcacgccatgcgcggtaatacaccatgaaatgcttgttgccgttaccctcctgcgacgccgcaacgggggaatccccctcctgggcgttcgcaaccgttcccatggccagcgaacatccgagcatcagtgccgtggcgactacgcccgccgcgacggcggcgagtctgcgtccgatggacgagcgcccttcactacctcgtgagcgacacatatataatctcctttgttgtttcctctatcgggtgacaacccgcagacttgcaggttgcgaggatggatgccttgcggtttcaggctccatccgggggtgtgatgcggttccagtgcttcgcaccccacattcatacatgccccctaatattcccccggcagcgtcgccgtgaccgtatgcgtcgaatctccatccagcgtgcaggtcacctgaacttgcccgtcaccgacatcccgcagacgatcacacggcacgtggaacgcgatatcgcgacgctctcccgcgttcaagtccatgtataccgaatcgacaagcattgccaaacgtgggatgcggcggccgccgctgacatgcgcgaacagattcacggcacccgcggccccgtgatcgtcagcatgtgccgtcacctgcaccagcacttcacctggatgcgattgcgtatcggcgtgcatctcgctgaacgtcaccgccgccagcgaaccggctccatagccgaagccgcgcaatatcggttccgccgcatccttgtagacatgcgcggcactttggcggtcattgtatcgaacgggaatggctgcgggatatgcgggtaaggtcacaggaaggcggccagacatgtcgactccgtcaaccaatacgtcggctacggcctgcggcccatattggccggcatatccggcccagatcgtcacggcggagcgttccagcacatcggtcagtacatgcgcgcgaccgcacaccgccaccgaaacaattggagcggtggtcaatgccgcgacttcacctagcatgtcatcctgacgccagggcaggcggatgtcagacaagtccacgccttcgccgcaggtggcaccgtattcggttacggccttcgccgcgccattgtcgtcgaattcactgtcatagctgcgttcgctggtgctgccgcatacgaataccacggtcgacgcacgcgcccattgatcggccggcgcatcgctcggcttggcggccaagagaacccggtcctccccgagacgtgccaccaattgccggtagacgcttgactgttcatcggcgggcagaggggcggtgtaatcgcccaggaagcagccgaaatcgtcggcgaacgggccggcgacaatcacagggccggcttgagcatcagctatgacgctgcggatatcgtcgagcgtggcggcagactggccatcattgatcagcgttatcgcctcgcgggccatgcgcttggcctgctcacgcccatccgcagtggcctgcgcgatggcgtcggcgctcggcatggcaattgcggcggtatcggcaccgtcttcgggcaagagaccgaacatggctttgagttccagcacccggcgcaaggccgtgtcgacagcggccactacctgttcgtcatccgcatattcttcgaggcgggtgaatccttcatcccacagggagacgtccacgccggcgagcagtgcggcacgccctgccgcgggaatggagccggccatgtcttcgagccgatccacggccaggccatcggccatcacgatgccgtcgaaaccgagctggtcgcgcagataatccttgagcagccacgggttggcgcagcaaggtacagaatcgatatcgttgtaggctgccataaagcccaaggcaccggcgcgcacaccggcggccaccggcggcagatgaatttcatgaagatcgtgcgggcccagtacggcggactgtccgttgcggccgcccacggcctcgccttgcgccgccagatgcttgagcaccacggccactcccccgtggccgaccttgctgcgatgctcaccctgcatgccggtaacgatggcctcgcacatgcgggcagccatcagcggatcctcgccgaagcattcctcgcaacggccccagcgtgggtcacgggcgatgtccaaaccggataccaatgcgatatgaatgccgctggcggccagttctgcggcaaccgcggcttccgcttcctgcaccccctgcgggtcaaacgtagcgcccaaacccagattggtgggcagcaccgtgccgcccagcgcctgatgcccgtgaggcgcctcttcgctaagtaatacgccgatgccgtgcgcgccacgttccagcacagtttgctgcaccacggcaatcgcctcagtccgctcctcagggcgtatgccgttaccccaatgttgaccagaccatgggtcggctcgcaatagaccgtacagggtgccgagtccaccccatcggtcaatctcctgcttgagctcgtccgaggccaccagccgtcccgcagcattgcgttccacggacttccaaccgagcagacgctggttcaactggccaactttctgcgtgaagctcatcgaatcaatgagtcggtccactgcggcgcagttgatgctcattgagcgctcccccttctcgtatattgtcttctcgttcttctcgctcttcggcgagtaccgggtcttatgttttgccctgcgcactgcaattgtgcgcactgcaattgaaaatatccggttgtggaacaaggagtagatgattccacaaccggatatcggtttaatcagccgtttcgaacgatgggtccgaaaccgcagtgtagtaacgggcggcataggggtgttcgtcagcgtgcaattccagaatgccacgctgcgcgagcgcctcttgattggccgccacctgcgaggtgatgatggtcgggcgctggcccgccacctgcagcttcatccacaggtcgcacaccgagcctcccgggccgagcgcactgcggttcaccgggtttccggcctcatccacatcaatcaccacggcgacggtcttcggctgagccggcaatgcggaacggtactgtgcggcgagttccccgaacgtacggccgatcggcttcagctggccttgctcgtcgaacaagcccagagagtgctcgaagaacgggaagtcttccatgctggcgggcacatcgtgcgagcaccaccacgtcacaccccacaggttccggcaatccatggcacgttcaacggtcttgcggcagaattccggcgtgtagtcggtttccagcacattctccggcgcaccgacttcctggagccacaccgggcgctcggaatccttgccgaacgccttggccagctcggccaggtacagtgcgtacgacgagcactcctcactggtggcgccgtatccttgcgcgatgccgttgaacacccaggagtgaatcactgtcatatcacccttggtggcggactgcaccggagtgaacgggtgcccatcgatgaaccaggtgccatcgttgacgctgtacagcgcgttgtgcccttcaccggcggcggtcggaagcagcgcgtccagccatgcgtcgatctgccggtccgtggcgctcatcttcgtgggatgcggcctgtcagacagctgattgacctcgttgcccaaggtcagacccttgaacgcgggttccttggacagctcatcggtcatggtcttgaccagttcacgctcggccgcaacggcgtccgcatcggtgaacatgttgcccgcatgccaggtgaccagccatgaaggcaggaagtcgaagctggacagatgcccttggaacacgtccacataggcatccaaaccgtgctcgccggcgatgtgcaccatgcggcgcacatccgccacgcccttcttgttgatccaggtgcgattaggttgcagatacggccagatcgggaagatgcgcacatggtccatacccagttcgctgatctgcttgagatcgttgtcgatgccgtcccagtccgggtcgagccatgcgtggaaccagccatgcgacggcgtgtagttgactccgaatttcattggagtacctccttttcccagtccgctcagcccttgagtccaccctgttccaggccacggaagaagtagcgctggaagcagcagaagaagacgatgatcgggataagcgagacgagcgcaccggcggcgatcagtcgcggatcttggatgaacatgcccttgagtcggttcatgccgagggtcaaggtgtacttgctttcatcggagatcgcgatcaacggccacaggaagtcgttccaggcaccgacgaatgcgaagatgccgacaacggtcatcgtgcctttgacctgcggtacacagatgtggaagaaccgctgccataggttggcaccgtccaccatggccgcctcttcgagttccattggaatggatttgaaggcgttggtcatgagcaggatgttgatggcgccgcacaggccaggcagtgcgactgccagcagtgtgttctgcaggtggatggagcgaatgatcaggaactgggagatcatcacgccttcgatcgggatgaccatggtgcccatgaacatggtgaacaccagtccgcggccacgccacttcaggcgtcccagtgcgtagccggccatcgtggagaagaccacgttgccgaagatggagatcaggcagaccaccagcgtgttgagcatgtagtggaataccgggacctgcttgaacacggaaatgtagttgtccagcgtcggggtcttcggcatcaggtagggaggcacggcgtagacgttgtcgcccttgcccttgaacgacagggacagttcccagacgaacgggccgacgagcagcaggaacatcagaatcagaatcagatactggacgactttgccgacggtgaccttatgcgtgttggtattcatcagtcctcacctcgtttttgtacgatctgctgcacgatgagcatgacgccgacgatgacgagcacgacgatggagatggcgctcgcgtaaccagtgcgggcctggataccggtgccttcgcgcttgataagcatcgacatcgtcatatccatgccgccggggcctgcggagccgttggtcaacacgtagatttcgttgaagactcggaatgcggcgatggtggacagcatcatgatgagcatcatcgtggagcgcacgccgggcattgtcacgtagatgaactggcggacagggccagcgccgtcgagggaggcggcttcgtaaagggattcatcgatgttggcgagggcggtcaggtagatgaccatgtagtagccgaggcccagccagattgtcacgaacatcgagctgaagagcacgccccatcgatcggtgaggaatggaaccggcttggagatgatcttcaatgccttgagcacggagttgaccagaccggcggaatccagcaggttggtccagatcatacccaccacaacggcggacataaccaccggcatgtagaaggcggtgcggaagaagcccatgatgcgggagttgcccttgaccagataggccaggatcaacgggaggatcaccatgaacggcactacgcagatcacgtagagtgtggagttcagcagtgccgtgaggaagtactcgtcatggaacagtttgatgaagttttcgagtccgacgaaggttcccggacggagcagtgtggagttggtgaaagcaagcctgaaagtgttgagtgccgcaaggacgatgaatacaaacacaatcgcgaacgctggcagaacaaacagatagggggcaatgatggtgccgaagctacgattctgcttcttgccgtggttgaggttcatcggttcaggccggtcggaggccgtgcgggcctccgacctgtcagcggcgagtgccgcgttgctcactgtgcgagcttctcgtttgcgaactcgacggacttgtcaagggcttccttggcggtctgcttgccctgcatggcgagggcgatctgctgctggaagttcttggagccgttgttgtcggtgaactcggacggacgagagccgtagccgtccttgacctggtcgagcgtgatcttcagagccttgccctcaagggtgctttcgtcgatgctcttgtagtagtcgtcatccagaccccccttggcggacgggaacacggaggccttcttgtcgaactcgatctggttcttctcgttggtcacgaatcgggcgaagtcaatggcaacgtcggggtgcttcgagttggcgctgatgccgagcatctcgtaggccacggaagcggacttgccgtcgttgctgatacgcgggccgactgcgaggttcttgtaaaggtccggagcgttctgcttgaagccgtcagcggagtaggcggagccggccatggagactaggttgccacgctggaagagatcggcggcctggctccaggaggagtcgagggcctccggcgggatgccgcccttcttgtacagctcaacgaagcggctgatctgcttgacaccggcctcatcattgaaggtgtacttgctgtggtcatcgttcatgaaggacttgacgcctgcggtcatcagatcttcggtgttgtaacccatcgtggtgcccaggtagacatccttgcagttctgcacgatggtgtcgccggcggcgaagtactcatcccatgtggtcggaatcttgttcggatcaaggccgcacttctgcatcagctcggtgttccagtaggtcgggccatcgttgacataccacggcaggccgtaggcacccttctcgatgccattgccctgcatggtcacggacttccatgcgccttcgtagtagtccttttccgcatccggagcctgcttggagacatcgagcagcgcgccggccttggcaagaccgtacaggatggagttgccgccgtcgacgatgtccggcagttcgccggccgcagcctggctggacagcttgtcttcgtaaccatcggacggggcgtcaagccacttgacggtgacatccgggtggtccttctcataggccttgatcagcgcctcgaaatacggggtgtacttgtcgttcttgaggttccaggtctggaaggagatctccttcttgccgccgtcatcccccgcagttccgctaccacaggcagccactgatacgagcatcgcaccggcaccggcgatggcgaggatcttcttcatagaaaacatgatgttttcctttccttttgattcctttttcatcccgccctgctgtggacggagaaacctaatcgttgtgctccagcacagtcacccgtcgcggtgattgacgtggtatcacaacctttattcagttctcatcgctgagactaaaccgttttagcttccggccagtcgcgaacctgttaactaaatcggtttagtaaaaacataacacaatcgaaacatgcacgcaacgaattcatcgtcgcgtgtcgcattgatatttgcccaacgggatcgctctccctcttctcatacaataatgggccgcgcccaaccgtatggcagagccggtctgttccggttccg

SEQ ID NO: 1496 - DNA, 3163 bp, Unknown
  R257_15m  MAG No. k141_39741
catcacgcatgtggtgcgcgagttcatccgcctcaacgtctccagccttcccgtggtgaacggcgatggcaggctcgtcggcttcgtcagcgacggcgatgtcctgaaatcgattgccacctatgaatcccgtacagtttccaccggcaccggttcgacgatggtggtgttcgacgacgagaccgtggcctccaaggtgcaggcgctctccggcaagaaggtgatggacatcgccacgcgtaaggtcgttgccgccacgcccgaccagcctgttggagaggtggcccgaatcctcgccaagaaacagttcaagaaactgccggtggtggatggtgatggcagactcgtcggtgtgatccgccgtaagtccgtgatggaacatgccttcgacgcgctgttcccaaaggatgatcggtgattaggcgacatcatcgctgaatagaatgaatggaacatgaggcttcccttctcgcgggggaagcctcattgctttgtcactagtgtcgatgcggcgcgtaacgcggcctgatggcgattaagccgaactaccaaatttgtgcgtacgactcgtaggacgtgtagtccggcaactcgtacaccagtatcgagaaaggcatggattggccattgtccggccaatccacaaatgccatttctccatagatgatggcaccttgcttatcccgcaacactagggaaaccttgatttgctgtccatctgaaggctcgaaaccatcggtcacggcgcggacttcgccattgaaggtcgtgccgccgtcgttgttgcgcactttggagattccgctgatggggaaagtggcagtgccttgtgcttccgtgacgttgtactcattcggactgagcacaacgaagtccacggtggccggtgcggtaccttgacccgcttgcccggcgtcatatatagtctgattcgggaacgccatattcagcgtttgcgtctgcgagaacacgatggagccgtctttggctcgcccggtgatggcgacttctggatactgtacctgcagggttgtgctggtgttgcgcagggcgaatgcgtagctaacgtacccctgttggcttacagaccaaccggattccaccagctccagcggattgtcggcaaccgcgtcggcgccgcttgtgccggtactgttattgccgctggccccatcggccccatcggcgttgtcagcgtttcccgcgcctgaaccgtccgatgatgagccatcggatcgcattgaggaatcgggcgacttcgccggcccggtaatgccgagatgcccggcgaagatgatgccgcccacaatggccgcaatcaccagtactgcgccggcggcgggccataagacgatggcgcgtttgctcaagttcaggcgatcgaatattcgcggtacgcgcgttgcgcgttgtacatcgcttggcaattgcatgctggtggcagccgagtctgttgcggagaacagcgtttgacggaattcgggaacgctttgcggtcgttggcttggctcgaacgcgcacgcatgactgattacagcgcgcaggtgcggggtcacgatggcattgtcgtccagcagctgatcgtagttgttgtcatctggataggcaccggtcagcatgaatccgagcagtcggcccaaagagaacacgtcggaacgcgcgtcggttttggcaaagccatattgctcgggtgaggcaaagccgtaagtgccaagtgccgtggtatcccgtgagcggttgttcgatgccgattgaatgcgcgcgataccgaaatcgataagatgagcgccatcctgagccacgatgatattggccggtgtgatgtcgcggtggatgacgccgtgctgatgcagctcctgcaccgcctcgccaacttggccgataagctgtatggccgcattcggcgcaagccgcccgttctcctctacgatgtgcacaagcgtatcgcccggcacgtaatcatagacaataacgaaccggtcgggcagctcatacgttgcctccacgcgcggcagacggttgctctggcatgcgctgagcgccgcccatacgttgcgctgcaccaggggagagggaattttcttgcgtacgaacgggccggtgccggcgatgctcaccagttcggtgacaccggacggcccacgggcgagtgtgcgctcgacatggtaggcatcgtcgatgctcatcgcatgcatcgcttgcttgtcgtccatgtctctccttttgtcctcttacgccggcttatgcccgagtcgtggtccctcaatcggcctggagcagcgtgggctctcccaaacggtagagttcgtcgtccgtggcgatgcggtcgaatccgttgcgtatacaccagatgataatcgcgtcacgccgttgtttgcaccacagttcagaaacgcctgcaagacgaagcagccgttgggtttcacgcagcgtgcactgtagaccgaacgccagcatgatggcatggtctcggccggggcggcttttgccggagaaaacatcgtagaccacggtggcgttgatgcccgtggcgcgcaccacgtcggctcgtttcaggccgtgggcttccatacgctcaaacaaatagtcggtgagcgtgcgggtggtgacgggctcctcgtcgagatactgctcaatgctggtgctggagagcaaccggtccaacagttcctcggtcaaatgttcttcggggatgtctgccattgctaggctccttgtcactgtgttgcgaatactgtgctgcgcccatcgtgcgcggttgctcgattcctcagcgtacaggacgtccgcttcgcgaaaacacgccgaaaaattcagttgtcagctgatgtatggcccgcgcgtatcgccgacaatggtcgatgccatacgtgtgggtgcggtggcggaaaggatgtttatgcgcggtatcaagcatcgataataaagctaacatgcatacaaaaagctaatttgcgtatataataacaacgtcatacactggtttcgatgtatcgcagggtaaagcgagcaataagaagggaggtagtgcccgaaaagttgcgcactttggatcgtggccgtccatggcgcgatagtcagttcgcttccacgaggttgtcaccgagccgggacatgtcgagatagcggcgggtcgaccattcgttcgcggtgacgtgacgga

SEQ ID NO: 1497 - DNA, 7499 bp, Unknown
  R257_15m  MAG No. k141_40640
cgtgaacgagccggcaagcaaggagaggaacggatgcactttgcataccgcgataagtagaacgatgatggcgatgccgatgatcgccgctgcaatgaggttcatgaatcctcctcgattcatgggtttggcgtgctagatctgtccgattctggagattcggacatatggaagcccattttgggtgtgtacgtgtccgtttctgcagaatcggacgttcgcaggctggttttgggtgtgtggctgtccgtttcggcagaatcggacgttcgcaggctggttttgggtgtgtggctgtccgtttcggcagaatcggacacatttggaccgggtatggtgggttaggcggcctgggttgcggtttgggctgtcacggtcgcggctacggttgccgcataggcgttcagcgctttgatggcacggtcgaccatttcgtcgacgctgccttcgatggagatttccacgccgttctcttcgggagcaagcggctcaagaatggcgaactggcttggcagtagcgcgggcggcatgaaatggcccttgcgctcgctgagcctctgctgaatgagctcgtggctgccgttgaggtgaatgaagaatgtgggcacgtccttggcgagcacctcgcggtagctgcgcttcaacgcggagctggacaccacagtgttttcgccgagcgcctcgcgtgccaccatccaggagttgatgacgttcagccacggccagcggtcctcgtcggtgagtggaatgccggctgacattttgtcgatattcgcctgtgggtggaagtcgtcgccttccgcgtacgcgtatccgagtcgttcatggatggcttctgcgacggtggatttgccacatcctgcaacgcccatcaccactacgtgaatgctcatgttgctctccttgctattgacgatcctgtgccgcttcgcactaggaataagactactataaaccgtaaaagtagtatcagtcaaataaaaagtactacgaattaggaaaatcgtgtgacttgctatgctggagatagtgcaaaatggcggtaaatcacgcaatcgcagatatgcaatcatctgcgatttgtgattgccgtgcgtgtcgcagaatatgtgaaacataccgtgaaacaaagcaggcatgttgtggagtgggcaagggaggagcgatcgatggctgaaggcgcggtaatcgcagaaaataccggcggtgagctgatgcaggattcggtgagtcgaacgcttgccatcgaaatgcttgacggcgtgtggaaggctggcgaaagccttacgttggaagccttgcaaagtcgtttcggtatttccagaaccgtggcgcgagaagtcgcgaaaacactggaatccatgaatgcggtactcgtcaaacgtcgcatcggacttgtcgcacgcccattcggcgaatggcaggcgctcaaccatcaggtgatcgaatggcgtctccactccacgcaacgcgagcagcagctgtcgtccctcaccgaactgcgactagcggtcgaaccggctgcagcagcttccgccgcacgtcttgcccccatcgacgtcaaggcgaaattccccgtgtacgcggcgcaaatgcggcagatcgccgaagccaacgaggaaggtgaagccgggctcgcacaattccatgatctcgacgtgcaagtccatacgctgatcctgcatgaaagcggcaacgagctgttcgctgcgctttccgacaccattgccaccgtgctgcgcggccgcgtggaactcggcaaatacccgatgaagccgaagcccgacgcgcttgacgcgcatgatgccgtagccgacgcgatcgccaagggagagcctgaacgtgcgcgcagcgccatgctcgacatcgtcgacgaagtggcacgtgccctcaatttcttctgattttcgaatcaacattgcgtttcttcgcagactctgaagaagaatgcaattgcgattactacgcggtcgactcttgccatgcatgacttttcagacgtaagttgacatcggaaatacggcatcacctaggaatgcgcacgcagaatcaatcggttgtggcgattgaatctacatgcgcattgagtagacaagtactacttacgggtggggtctttttgcgggaggaggaagatgagggcgacgatcagcaggattgcgattgaaagcacgcccaccgaagcgttgccggtcagcgacgtggtcgtggccaccaggaaggtgccgatgatcgaagcggtcttaggaaagaaacaatagtgagaccggggaacccttgaaatcattgggaaatcatggtggcgatgcatgcggttaacacatgttgttaacacggatgtggaatgaggaagcgcgtgaggcccgtggtctgcgacgtatgagtgtgaccgtgagctccccagctgatgagcgcaaagtcagagattggtttcacgtgggattgtcccgatgtcaagatcatgatgcaaaagcgttaagcatcctatggattatattgagaaaagaagtcattggtaatacaattggctttggaaaggattcattatgagcactaccactgttcgcatggatgatgatctcaaagccgaggtgaacgccattcttgattccatgggattgaatttcaatacgttcgtgaatatggccagcgtgcagttagtgtcgcagcgtcgtattccgttcgaggtgaaggcgcctgaacccgtgctgcctcgcgcgggacatgttgccgccaatggggttacataccgtggggtcgacgaacaggggtatccggtggttgaagtgccgaacgccatggtgttgaatccaagccggggcgccgatggtgttgccgtactgcccaaggcgtggcgcgatggtgaataatcatgatattccggaattgatgccggttccggagcaagtgcatgtcttcgacgtgtatcgcatgcgggtgcggttcctccggtcggatctacagggattcaccggtagattgagtcggaatgatgccatacgtgtggccaatgcggtcggcgaggtagagcctgaagaacaggtgtggctgtaattctgttctgccgtctaactggttcggtgtattcactgtgaaccagtgcacaattgcgatggtcggatgtctttctacagtccgctttctcaaaggactcggcttcaagctggagcagattcgctcgattctgtcggacgagcggccggaacgggtgctggttgatttgctggatcagcagacggcatccttgcagtcgggtatcgccgagcagaagcaacgtcttgatgactgcttgcagctgcgcaaagcactccgccctggtctacgactacgtggcgcagatccacggcgaatggcccatcaaccgcgtcaacagcaagacccgtaagggctggacccatcactcgctcagacactacgcggcctcgagcagaatccaagcaggggtgccgttgcccatcgtcgcgcgggaactcggccacaaggacgccaccttcacgctccaacgctacggccacatgatggccgacgccatccccaaaacgggcttcgactactagcaagacgagagtcggggtgctaagtccgcgggggggggggtagcgtttttgaggagcaggggatccgcttcgtctcttgcgatgaagaatctctaggagaagggaatgccatgagacgtttcggtaaggccatggccgcgttggccgtggccgcgtgcacactgttcggcggagtcgccaccgcgaacgcggatgagaactactatgaaggcgatcttgggagcaccaaggtcggcacgccggccgtatccgacgtcggagcgcatacggcgaacgtgtcgttcgactaccagattgatccgagcattctgccgaaggtgcagagcgtgtgcttcgcggtcgaggtcatgcgggtcacgagcatcaaacccattaatcttccgcaattcggtggaaatccatcgtacagcttgacgagctgctcgggaggcacctccgatggcgatctgacctccggttcgtatcagagcatattcggcacgaaaacgtggccggttaaactgggtgaagacgtcatgtcctacgcgactggacagaagttccaggtatacgacactgacatgtggaaccatgccgcctcaggcaccgtgcagatgcctgtgattggcctgcagtcaaacacgacgtacggtaatactggcgacatgaccgatcgcgattacaccgccacggattggaaactcttgggtaggagtgcaggtgtgtgcaagcctgtcgatcccacgttggtggcaagctttgcttgctcgaacgcgtacgaccagcccgtggatgtccgctccctgtatgcgggcatgaggatcgtcctgaaggacggctccgccatcaactttggacagacggcgaagccgatttccgatttcacgacgaaggctgagccggtggcgaagcctgcggaggcactgccctccaagaccgacgcgaagctggatgtcgcaaacggccacgcggagcccggacagacggcccgcgtgtatgtcaacaacctgaaggccgaggcgaagggcaaggcggacgcgaacagcctgttctggaatgcgtacatctactccgagccgcaggcgctgaccggtccggacggctccccgttcgtgcaggtgcagaaggaagcgtccaccggcaagtactacttcgacgcggtgattccggccgatctgcctgccggcgagcacaagatcagcgtgcaggacgagaacggtacggtgcaggcgtggaccccggtgaccgttggcgatgccccggccccggttgacaagtccaagctgaccgccgcggtcgatgccgcgggcaagctggccgagaaggactacaccgccgactcgtggactccgttcgccaaggcgctggccgacgcgaaggccgtcgcagccaagcagggcgcctcgcaggccgatgtggacgccgccgtgaaggcgctggcggacgcccaggccgggttgaagaaggccgagaccgttccctcgaagccggtcgagccgagcaagccggataatggcggcaacaacaagccgtccaacaacaacaagcctgccagtgacaagccggctgcggatgacaagaagtccgagtccaagaacgacgagcagtccgatctgtccaagaccggcgcgtccgtgattggtgtcgccggcatactggctctgctggtcgtgctggccgccggtctcctcgtggtgggcaaggcccgccgctaaggtggggtggctcggtttccgagaactgacaggggtgggcatgccttgcggcgtgcccacccctgtcgtatgcggtcgagttttgcctatggtcccgatgcctcgaaaccgcgtgcaggttcacgggaacctgcgatatcttagccggtcgatgccagtagaagccgatcttgatacgccccatcatctcaagcgcagatcgggctaaaaatcggctacaggctcctcgccgtctggctcttcgtcccaatccggctgggcggaaatcgtttccaagaaggccagatcctcgttcacctcggcttcggcccgtgccacgatggcggcaaactcctcgtccgacttgaactcctcgttggtcgtgattcgccgatcaagggcggccctgacctgtggctccacgtcttggtactgccgttcgagcggcttgttgctgatgatccacacggtggtccatccggcccaagtgtcatggaatcggcacggcaacttgcaagggtaccggtcaagcacgttcaacagtagctggaacggcagctgcccggcgaactcgtccaaaaccagcgtggactggcctgagtaatcatcgaatggatgctcataattcgtcacacgaaaaatctgcgaccggtcgccatcaagaacacttctcgtcttgcccagccccggtctgccccacaaataatgcacagtcacttcccggtcctcctgcgagaaacgagccgcctgctgtgcccccaccatcttctcaagccacggcatgaagcgtgcggccttcagactcaattccgggtcgttcagtatctcgttcaccgaagcgcccttcaccacggcgtcacgcaattcctccagatcggttcgcttgccctgatcctcgtgcatatcgaaatcgccgtggatgaacggccctgcctgacgtgtctccttcttcgagacgtaggccacgcaggaggccaccgaatagcgtctcggctcgatgtaattcacatggatgccgtgctttttcacaagacgcgcccgaaccgtcgagagcctgatccggctcgtcgcctgcatgaacagctggtagtgccggtagccggtatggccgccttcctcccgttgtcccatccagctccagtcttcgaacgcatctaccagatcggcctccgtgatctccctgccgttctgctccgccgagaccgtgagcatccagtccgtcgcggacgggttgttgttcccgttccagcttctcaccgtcttggcctgatcgccttcgtccagccgcttccgatcggcggccgccatcagccacaatgctccagcccagacgattagcgctggtcacgtaaggcgtggccgtcacctgacccgccagcttcagatcgaaagtgcgcccgatcttggcctgcggcttgctcttgattttcaggctcacggcgtccatctcacggcccgattcacggtcgagggccgtcaccctcaccctaaagaccggtttgccgtccacgagcttcagctcggcggaatcacgggagaccttcaccggctccatcgatgtcgggtcgagatcctgcagcatagcgaactcgaacagacctgcagcctgctcggcactcatcctgatcttcatcttttcttacctgccttcgccgcgtggcggccgccttcggtggcctgcaatccacgcaactcacgggttagatatcggcgcagggcacagcaaaaccggcgaaaatcggcaaaaaacaagaaaatgtgacgaaagtcatacttttatggttccggaatggcggaagatgcgggaaacattgagatcccgccgtttgtgaggcttctacaacaccgcatatggcaaggttacacagacttacacaaaaacgccgtccgttacacaaaaccttacacaagccgtcattacacacttgttttgtgtaagattcaagccttcatcgggtccttctggagaacaaggaagaccaatgccaaaaccagtagaacgccaatcgagagaacgcccaacgagggtttgccggtgatgctcgtcacggtcgcgaccatgaacgaaccgaggatagatgcacttttgccgaaaatatcgtagaaaccgtaatattcgttggcacggttctttggaatgatcttgccgtaatacgagcgcgacaacgcctgaataccaccttggaacaagccgacaagaatcgcaagaatccagaattccgtagcggaacgcaagaagaacgcggcgaacagcacaatgcagatataa

SEQ ID NO: 1498 - DNA, 15521 bp, Unknown
  R257_15m  MAG No. k141_42430
catgttgtctcgatgtcgacgccgcgctcgtgccacgtgacgaccatctccgccttgcgtttcgtgacggccatgatcagtcctccaccttgtccgcgccgtcagcgtgcgcccagtcgcaggacatggcccggttcgacgtgtagaagacgcaggtgacgcgcctcgtgtccggcatcgtgaccgtgcacgtctggaatttgctggagtctgagctgcactgcgaccgggtggcggattccgtggtcgaatccgtcggctcgtgaggcgtgctcccgcatcccgcgagcgcgaggaggaataccggtgtgagcaggaacatggcgatggcggtcaggccgatgccggcgagcgcgagtggtttgcgttttctcatttcgagtgtttccttccttgtctggtggcttccttgttccatgcgcgtgtggcttccttgaggtcggtgtggctggtgatgatgaggatgccgtggtggtgttggcaggcgcatgcccagtactgtcgtatggcggatgttttccggttgacggcccgggcaaacgggtcgaatctgatgtttcggctgccgcaggtcgggcatggcgctggtttgcgccatttgcgcggtcgtgtctccttggatacggtcttcgtggtttttcccttcgttgtcatcgccatgctcccttcaggagtttgcggtatcggatgtagtcgttgatgtcgcgtcggatgcagtcgcgcaccctgtgcgtgccggcatgcgtcttgtatgggtcttcggggcagttcaggaacgtgaggtagcggcggagcgtggtcaggtcgaacttgcggtaggacagccacctgtccgggttcaggtcgagacgtttcaggaagtcgatgtcgaagtccacgttcgttccggccggaaccaaggtgaagcgttgcgacagggattcgagatactcctccacggcgttcgcgaccgctcccacgcagtcgttcccggcggaaccgttcaacagttcgaacaggatgccgttgtccgtgtgcatggagaacactatcgggctcatgtccaacaggtcgagatagtccggtctgatgatgcgatgcagggatccatacgaatgttcgcccagcacgtcggtgcattccatgccgacctccaacggcagactgccatccctgtccgtgccggtcgtttcgaaatcgagccagagcagcgcctccggcttcacgttcaggtctttgtcttgtttcctcatgattgttccttccaatcgttttgccattcgatgatttcgatttgcgtgagccgttgtgccgtgccgtcagacagcagccaccaccagtcgccgttccagtcgcgtatcggcacgctgagcggatcccgccagctcgggatgatgtagccgaaccgttccgcctcggccggatgcgcgtgcgcccaaccatgacagccggtcgtgccggaaccgcacagttcgacgatgttgcacggcaggtcacgcacggcgggatcggcacgacggcgcaactgccggtgatggccactgcgtccaggccatagtgacgggtcgtggatgttcgtcccgcagcgcaggcaatgccagccctgacgttgcaaggcgatgcgttttgattcctggaattgccggtcgctcatcgtcgctcccttccgagctggtcgagcaggttgatgcaggtcgagcagtcgcgtttgatatcgcggatgcggtcaaggtccatatcggcgagcgccgggcttttgagcgcgtcgagttccaatcggtcggcggcttggatggccgaggtgaggatggcggccatgtgtgcgatggtcatggcgttcatgccgccgcctcctgttcaaacaattgttcggccaatacgttgccgggcacgtttgcgagctgacggcgcagcatgtccgggtccaagccctggttgagcaggtccgcgaccttgcatgcgagctctatgtacgtgtccgtgtcttcgcaggagatcgggccgagcacccgtttgacctcttcgctgccccacgtgaaccgtcggcgagcgttggaatcctttggcgtggcgaatccgcgttccttgcctttgacgagccagttgcggtatttcgcgttccagtcggccgagcgtgcccccgagtcgagtgccctgtcgcggaatttgtcggcttcgatgtcgcagtcgatgccgagtcggtcggcgagcgcctggtgttcttcagagggtttccagtcggctggtattgggattggttttctcgcgcgcgcgttactctctctaggttctatatatggttcttcggttcttgtgcaatcatgttgcacccctgtttgcacacctgtccgtgttttttgcacccctgtttgcactgctggtgtgcagtctgtttgcactgctggtgtgcagtcgtgttgcactggtgtttcggcgtttttgagagatgcagtttttgcacctctgcccatgttgaggttccagacggtcggcttgtatccgccgaggccggacacgatgcgctggtctcccctgctgatcagcccggaggattcgagactcttcaacgcgtaggagaccgtacgcacgctgtatccggtcaaccggctgatcgtgctcctgctcggatacgctcccatgccttgagggtcggcatggtcggccagcacaagcagcgtgcggaaatccgcgtgcttgatgtccgacgctacatcgtagataacccatgtcaacgcttggatactcatgattcgtcatctcctccatcgaggtacgcgcccttgagcgccttcctctcgtcctcgctgacccgatatccgatacgttccagcacgtcgtaccagcaacacatatcgtccacgccatgccgcgagcgccagtagttccagccgatgttcgactcccatctggcggccaggacatcgagaatccgaagcggcctgtccttcagcaccatgcggatcgagtcgaggttctccttgcattccagcgaccagtgttcgtcgtcatgctcggtgatcggcaggctccagccgaacgcgatcagctccctgatgacgtcctcgcccttgtatgactggtacgggaacacgctccgccagccgacagtgtccgcgagcgcgagcctgcagagtcccgtttccgcgtgttcgtgggtgagggtgcggaggtttgctttcagccatgcggtgcggttggctttggcgatggcttcgaattctcgtgcctgtcggttgagttccctgcctcgcgccttgatggcattgtccttgtcggtcttggccttgtctttctggagttcgtcggctggtatgggcgtgtatgcgcagaaccagtattcatacgagtacactcgggcttccggccaatcggattccccggtgaacgaggtccagaagtccgagttgatgtcggagaacgagcgggcggccttgtagccgtgcggatgccagttccagaagtttttcccgtcggggaagctttcgactttgattccggctttggcgagcgccttcagcgccttgtcgtgccatatggtcttcctgcgttcctgggagagccgctggtaggtccagtcgaagtcgtcggcgcgggcgagttcctgctgcatgtccgggtcggattcgaattccgcgagcctgtcgagctggtcgaggctcatctggctgaaatcggcggacatgtcgcgcgtctcctgcggaattctggctatcttcaaccgtctgcgtacgaacctgtcgctgcgtcccgtcttctcggccatctccttgacgtgcatgcccaggtcgagaagcccttggtagccgtcggcctcctccacgggagtcaggtcggagcgttgcgtgttctccacgagcatgatctcgcgttcgcggcgcgcgtccatctcctcgacgatcgcgggcacggtcgagagtcccgactgtctggccgcggcgagcctgcggtggccgatgacgacgcggtactgtttgtgtccgtcgatgtccgtctcgcctgtcggcgtgaccagcaaaggctgtttgatgccctggcttcggatgctcgacgccagttcgtcgatgtcgccgacctgcttgcgtggattgtttggattggcgtgcaggtcgtcgacctgcagattctctatcgtgatgcccatgattcatcctttggttttctaaaattccggttcggcaggctgtccgaacgagccgaacgacgaggaagacgtggcctggtcagtgccccacgggtcggacggcggcaacgaatccgcagcggccgccccgcccgtatagccggccggagcggagtacggattgccatacgctccagccgtaccccgctgcgccttggccacctgcgccgtcgcataccgcagggaagggccgatctcatccacctgcaattccacggaagaacgcttctgatgctgctcgtcctcccacgaacgctgcgtcagcctgccctgggcgaccacacgcatgcccttcgcgagactattggcgcaatgctccgccaagtcaccccacaccgtgcagcggaggaccaacgcgtccccgtcgacccactgctgcgactgccggtcgaacgtgcgaggagtggacgcgatcgtgaaaccagccacgctcctgccgttcttcgtcgacctcaattccgggtccgcggtcagattgcccaccaccgcgatgatcgtctcaccagccatcagaacctacctttcacggcgagagtcttgatgatgcggatggtctcgccaccatccctggtcttcaccatgtgcgtcaactgcgcggccgctccctgatggaaaacgtcgccaggcatcacctccaacacgggagacgcgacctcggacacgaaccggcccaccagttcggtgaagcgcacgcccaacgattccaagatcaccagctccttccacgtctcgctctccatcgcccgacggcacgcctccgccaccgccctgtcgccacgcgtcatccgcttctcgtcgacgtccttgaccggagagttcggaccaaaacgccaatgcggcagaatctccttcatcggctcctcccttgaccttgattgatacgagattgattgatatgagccggaccgctgggcgccatgacagcaagtaatcgcgcccatcgttcccacaccccaggaaagctgaacgaaacggggatgcgggcggcgttgacggtccggccaagcgccggcggcgggattcgaacccgcagcgtgacggcggaagacgtgagagtgaaatgcaatgtgagatgaaaggactcacgcctccgccatccgtccgcgtccttgtacgccggcggatacggtcagacgtcgccatccacgtcatcgcgtggagcgaacctgaccgtcagccacagggccgtggccagatacacgccctccaccacaagcgcgcccatcaggccgccatgccaggtgagcatgagcgtcacgctcacgaccaggccgaccacggcggccgtgaacttcacacgacgcagcgtgtagttcggccgccccttttcggacctgtcctcgatgcgatagtcgttgtcggtcatcttgcgcctcctatgctttgaatgaatgtccttgcctggtcttttccgatgctcgccagctcgtggcttccgtcgacgtcgagctccatgaggctggcgcccttgcccgtgacgcgaatcgcgtagccggtcaagccgaacatgatcaccgtgtccctcggcggtgctggtggtgtcagcagcgtttccgcgtcgattctcctgagtgtcatcacagctccttgcgaatgtcgttcatgcttactcctccaacgatttgacgtatcggtccatctcctcgcgtctgatgtgacggcgggaaggcgttcctcgtttgcttggcggacgaaacgtgtctatgtcgccctggttgacagcctgtcgcagaccgtcgtagtcgatcccgtacaggctcgcggcctgcgggatggtccatgcgagcctgtccttcaacgggatacggctcgcgtccttgagctcgttctgcaagaccatcacgcgcctcctttgcgtgtgtgatgccgggcggcgttaggagaaccgcccggccctctcctaaaatcggtgtcatcccgcatttgcgacgtgcgggccgaacagttaggagaagaattatgagtgatgcgacaagctggttttattccgcgcaaacgcatttcaacaacgcctccaattcggcgacggattactcgcagcgtgagcttgcgaagggattgaacgatctcgcgtatgcgatgacgcttctggataaatccgttgatgagacgaagttgttgattcgccaagtccgtaggtaagcctcgccgccttgatgacgctgacgtagtcgccgccggtataggatccgttcctcagctggcggcggcgtatttcatagacacccatcacgcgcctcctttgcgtgtgtgatgccgggcggcgttaggagaaccgcccggccctctcctaagatcggtgtcatcccgcatttgcgacgtgcgggccgaacagttaggagaagaatcatgagtgacagactcacgctcggcaccggaaccggcgaaccggtccatgtgaagcttgccgagggacaggatcgagcgagccttgcggaggatctgatggaagcggccaggaacgggacggtcgtgaccgtcaaaggatccgtcaagggcaccagctcggacaccatccacatcaacccgtccaacgcgctgtggtgggcgatcgacgacgccaccaaacagagcgtcggacgcatttactgacatcgccatctcgtggtcaagctgcgcctcgatacgcggcgtgaccgctttcttgtcgtgttccgggaacaacagaagatacgccgcgacaccgtcgccatcctcgtagcggaataacttgacgcattcctcgtcaggaatctcaatgttgaggtgtcccatcacgcgcctcctttgcgtgtgtgatgccgggcggcgttaggagaaccgcccggccctctcctaaaaccggtgtcatcccgcatttgcgacgtgcgggccgaacagttaggagaagaactatggattggatcagttatggtttggaaggcttgaccgcgttgtttaccggaggagctatggcttggaacttcgcatatcgaagtaggccgaagtggcagccctatgtggtcgaatgcggatacggaaatcctccgtgccttctggtcaagatcgtcaatgtgggcaacggagccgccaccgacgtgcatgcaacggccacccacagtcccgaaaccccttatggatcacggcggaaaggcttcaactctcttgtcgccactggcggctgcgtgtacgcgcgaatcaaggtgaaggaatcggagatcgaggaaaatggccataagtacctgcattacacacctcccgaaggcgcttcggtgacgatcacctggcggcagcaaccgttcatcggccacgggaaaacaaagacctggcccttgtccaaaattccccacgatttctcgcaaggggactaagttcgatctgcgtctgggctgaacgaatcgcacagagaatgtcatgaagcaccttgaccacggtcagaagtttcaagagaatcgcgcaaagcaacacgaccacgcacagcagctgacccgataggcacgcgaattgactgacgctcatcacgcacccgcttccaacgacggctgagcgcggccccagtaccggtcgatgaaatagcgctgccccttgcccgtgaccttcggagtgcggctgaccgtggtgtgcccgtccgcatgggtgacggtggtctccttgatgcggaacaggccgaggtccatcgcacgttgtgtcggcacgttgctggtggagccggacttgccgagatacccgtcagcctgcagaagacggaacagtctgttctggccgatgtccatcccgttctgccggagcatcttcgcgagctcgccgaccaggcacgtgccgtcggacgcggccacggcgtccgcgaaccgcgctttcggctccaacatcttgatctgtgcgtccttggcttgaagctgctggttcttgcgatcgatggtcttcagcgcgacgagcacggccctggccatgatgtcctcatccgaatccgactcggacgtcgggatgtagccgccagtcttgcggatctgcggcagcacctcatgcgtcacccaacgctggaactccttggcctccggcttccgcgagcgcatgatgagcttgtacaggcctggctcagagatgatgagaggcgcacgacctggctgattccaaacctccgaattgcggaggtttgtgatttcgtcatcatcaagagcttcacggagatgatttgtgtcaatgccgaggatgtcgcacacatccttggcgacgaaccaaggctcccctgccccgtcggtcagggtgcgcagcgaggctcccctgaaatcgaacttctgtatttcattgttcactggattctcctttcgattcatgcgtcggcgagcgccgattgctcagccttctgaagaacttcgcttggatttctccccaagctcagcgcgattgcaacgaactcggttaggtcgagaggaccgccgttaagctttgtgttcatcgcctgtctgctgatacccatctcagatgcaagttgctcctgtgagcgatccgcataacgagcgagtctgcgaagctcatctgctgcgctcgtggctatgtccaccggcttactgtctttaaatgaggtcatatctgttattgtcctcatttgaggtcacttgtcaagctgaagtttacggcgtgtcgccaaatgaggacaaatagcatatagttatggcaaagacaccaagagcatggacggaaatggatcgcgcttccatgcaaatcatcagagaacttcgtgacgaagatccacgccacatgtcacttcgaaccatggaaaaagagacgggcatcagccgttcgaggcttgatgatcttttccacgaacgaatgggctctccgtcgcttcaagaatttgtcacgctatgcatgctgtttcatcaacgagcatcagcatgcttggaagaagccatgaaaaacaccggacagagccacggcgagatcatcgatgccgcccgcgcttacgaggcccgcgagcgcgagttccaggtcacggatgatctggtcggtccgaggttcgaggatctgtcaccgcttgacttggcggccagcagggacatgaaccgtgacatggagtccgagaccccggacgagtgacggtttccactgctttatgaaaaactatcattatacaccttttttgaattattaaaaatgaccgaattcgaccacttttactgtggataagtcaaaatcgttgaaaggacaacgaaatgccggcagataatccatccttaacaccggaacagcagcatgactgcgaacgtctgctcgccaaatcgcaggaggcattcattctggcgatcgaattgttcaatcgtccgacgatcagatacagggtcgaaggatgcgcgttcttcctgtgcaacgcgtgggagctcatgctcaaggcgtatctgatcaaacaagacgggtacgagtcaatcttctatccaggcaagacacagcgcacgctctccctgaccgactgcgtgaaaaaagtgatgaccaacgacaaggatcctgtccgtctcaacctcgaatcaatcgacgagctgcgcaacacaggcacgcacttcgtggtcgaagaatacgagatcacctatggtccgatattccaagccaacatccgcaactacgatgacaagctccgcgactggcacggcatcgagatatgcaacagaatccccgacaactacctcgtgctctccgtcaaccgcaccgatcttgacggcgagacgctacgagccaaatacactccggaggtcgctgaacgcctgctgcgcatgcagacatccatagaccagaccaccgagaaggaaagcaataccaagtattcggcgtatttccgcaccgaattcgtactgtccaagaaaaatgatggcattgcaatccatgtggacaacaatgccgatgtgaacgcacgtatcatcaagcaggttgtggatccgacgagcagatatccataccgcaccaagaaactcatcgagctggtcaacagaaacctcaaacgtcgcagcgtcagcttcgtatatagggatgatcggaacgctaaattcaacaaataccatttcagcctcttcgtcggctgctatgacatgaagcaggatgaaagatactgccatgacctctcattgtccgaagagcaaagaaagggaagccactcatacatctactcggaaaaggctgtcacattcatcgtggacgaaatagccaaggatccgcagcatatcatccaaaagctgagagacaagatgaaaaggatggggaaatgatacaaggccaaccccaggggcaaaggaattctcgacccaaagtcttactcccattcgggaacccagccgttatccactcaagttgaccttgtggttataaacctacaccatccatatgtcaattgtcgcaaatcgttgggaaagtatggcgtgtccaactctgtcggaacgcctgcgagggaggtcatcgcaaacggtcagcatgaacatcgacagcatccggcacacgaacgtcttcggcgcgaacgacgtcgattcgttccgaaattgcgccgaaaacgatcgcatccatattgtcgagcaaccgttgccggatggattgtgcggcgcatggcacgagacgagccgaaccatattcctccacgaccggctcaaccagcgccaacgccgctgcacattgtgccacgagctcatacacgccagacaccacgaccccggatgcggcagccaatacggaatcaaatgcgagcgccggtgtcgcagggagacggcgttggcgttgatcagtccggtggattacggcatggccgagacggtgtacgagggcaatacgtggatgatggcagtggaattgggagtcaccatccaggtgttgaacgactaccggcagctattgtacgattccggcgtatgcgtgcaatgaaaaaggccccggcgtccgcatggccgcgagcgccggtggctagattctaaacgtctagcaagtctgcttgcattaagctttatccctatagtttcaacgtcttttcgttattgtttcagattctaaacgtttttatagtttagattctaaacaatgtgttatagtcataagtatgaacgattccgactataatcctcgtaaacggcacgtggtcttccagaagctgaacatcaccccatcctcaatgccgatcatctcgctcatcgcgtccatcaagaacgtcagggcaaacggtctcgacctgtcacccgactaccagcgaggatacatctggtcgaacgaatacaaggatcagctcatcctcagcatcatactgaactacccaatcggcaacatcgtcatcaacaacctcgaccagccgaaccaacgcaacgccagacaggaattagttgacggcaagcagcgcctcaccaccatattccgcttcatggaggtaggcaacgtcgggcaatggctcgacagctacgatgactggttccagctcagcaaaaagacctcggaccaggccaaggaaatcatcaaccgcatcgtcggagactccgaccctgacgggctcgcccgcatgcacagggcgaagcgtctatccttctccgacctgccgagcagcatccagatgaacttcaacacgtacaacatccccgtgtacacgatgcaggccgcggaccctgcgcagatccgcaactatttcaaggtcctgcagaaccaggagaagctacgggccggggagatcatcaacgcgcttcccgacaacccgatgagcatgtacttcgaccggataccggcagaggcttttctcacaaggacgggatgctcgaacttcaaacgcgcggaactggagaaagtctactattccgttctcggaacatggttcgataaaatccagatcaacgccagcgacaaaaccgtaatttccttcgtggagaacatgccggacctcaccgaaacgcagattaaacatatcaacaatctgaactccggcatcatcgccatctcccagctacccggcgcggtacagaagattcggtcatccaagcgaatgctcaaactcgtattcggattggcactgcacgcacctggctatttctctacaacggacgcgttctccagactgcaggccgtctgcgaattgtcgtcgaagcttgccgcgttcaacaccagcgactccgaccaagtggctttctcgaaatatttcggagacgaatacaccctggataaagagaacttcgagacacggaaggcatgcgtgtatcgagcgctattctggagcacgtcgcgcgtctcctcacgcaccgcatacgtagacgcgatggaaatcctacgacgcatgttcaccgaatcattcgactccgcattcgaatattacacggcgcacaacatagccaaatgaacccaagaccccggcgcccgcataccgcgagcgccggggtcttctgtctcattcatgaagtgaacgtcgcgcgttttgtcggtcttctttccccggttcgcgttcggtgcgtttttccttgtctcggctgcttcttgacgcgatcggctcgaacaggttggcgattatggtcgccactggaaccgccaggaaaccaaacgaccatggactcgacgtggccaagaacgatatgaagctcatcagcaatgcgactgcgaacaaacctgcgctgacccacatgcctttgcggctctgatctatctccgccttgacgagctggttctgccggtttgattcgtcgaccgtgaaggcgtcgttccatctgcacatacgttcctggacgtcagccggatacttgttgaaatcgctgggccgcgggagcatgcctgagtaggattccgagattccggattgcaccagcatggatatggcgcggaccagctcctcgtcgttcggctgcgttatctcgccttgtctttctccattctcatccggctgatcgccgacgtcacgagacggcttctcgtctgccgggacaggttcgcctgcgcgttcctcatcgactccacgcgacggttctccagctgatgcgtcccgctcagtcctggaatcgtcatcattctcatcatcgtcttcatgctcatcgtccacggcacctccttgctttcgtcttcaatttaccggcgagcgcgtggattcgtcaacgtttcttcacaatccggataatcctgacacattttggtgtttttggtgagcgcggttcgtcgtgcccaacttgcattactttacatactttgttataatagttatgtcaacggaaaggaggtgagcatgaaatggacggacatcgtgaccgccatcagctcggtggtgagcaacatcatcgcactggcggcgctcgtcatctcgatacggcgcagaccgcgccataagagatgacgaaagggttccgagcactccaattgcccggaaccccggttccatcctatttcatggccatcatgaaaacaagcaccatattcgccgtctgcggcatcacatgcggcctgctgtcggccacgctcggcttcgcgggaaaaccatggcaggccggactgttcggactcgcggccggcatctggagccttgccacactcgccatggacagacggggcggcaaggatgactgaacgctatctgagcatgaccgaggtggccgaacgcctcggcatcaccaaaggcgcactggcacgctacaggctgcccgaccccgacgtggtcgtcggcaaggccagaggctggcgcgaggagaccatcgaccggtggaacgccagccgccccggccgaggcgtcggcggcggacgtccacgcaaaaacaagaacgaataacaacataccccggccgcccgcatgtccgcgagcgccgggggttttcaccgcttcgcgccgtcgcggaggtctggtatggccgattcgagcgtctcggcgagccgctgttccctccaatgcgtgtacacgctggtggtgtggatgtcggtgtggcccatgatggcggtgcgctgctcgtcgctcgcgcctgccgccgcgagttacgtggcgagcaagtggcgcgcgctgtagatgtcgacgtatgggagtcccgcggcctgcagggcgcgacgccagcgtttctcctcgttgtcccgtctgatgggatggccgtaaagattggtgaacaccagtccatgcgatggcacgccccatttgacgatatgcgtccagagccggtcccaaagcccctgcgggatggggaccgtccgcacgcctttggcggtcttcggtttggtcagccagatcgccccatccagatgctcggcttccatccaatccgggatcgtggcgccggctggtatcggcttggcctgctggcacacgttgatgacgggaatcccatgatgcagttccagctggtagggcatcaggccatacctctcccccggccgcatgcccgtggtgaaggcgagttcgaacatgagtgcccacttctcacgctcgtccgggctgtcgaacgcggcgaccgccggatcgggctcggcgagcgcggcctcgatgaccttcgctgggtcggcgacgtcgaggatggggcgttcgtaccggtcctcgggcatccgtctgacgtcttccatggggtcgcatgcgatgagtccgtcccgtttcgcggttcggagcatggccccgaggatcgcgagataggtgttgacggtcttgcttttgcgtgtgcggcgcagtctcctgcacatgacgttgatgtcgttggcggtgagccggttgaggcgtatgtcgccgatgatggcgttcatggtgcgcatccagctggattcattgcgccatgtggtgggattgatggccgcgcggtgctcctccatccaccgttcgaagtagtcagcggtcttggggccgtccttgctgggcagtcttccgtcccgttcccattccgctatcttcgcctggaaacgggcgcgcgcctcgcttttcaccatgccggtggcttcgatcggcgggcgtctgcgtccggtcgccgggtcggttcccatgtccttgcggaagtgccatcgtcctttggagtcctggaacacgcttccggatcctccggtcctcctgtttctcgtcttgcccgccatgactgtcctcccgtgtcagggagtccactctaaatcacactctaagtgggcgtaaaacgacgtttccagccggaaaactagtatcagcgttacgcctgtacgacaccatgaaaaaccattccgccgtctacgtttccgcagtattccaacggttcagcgccactcctgcgcaaggtggcgcgtatcaacggtggttatagcacaagccggccgtcaccgttcgcgagagagaccggccggcaaaaggcgtcatccctagtcgaaatccttgggactgagcacggcgagcagctcggcgtcgtgtacctgccagcggctgaacggctgatcggagccgaacaccaccacggaggcggtggacatgcccaggttgagcagatcc

SEQ ID NO: 1499 - DNA, 12056 bp, Unknown
  R257_15m  MAG No. k141_42599
cccgcttccagcatgtgatcctctcctcttccggctacgacctcatctcagatttcatctcatgacccgcagttgcaaacatcaatgctattcgcacgagccatgactcaagataaccccagattctacgacgaacgtatggtactggttattgcgcaatcattatgactggatttagtcaccaccggaaccgcgaacagccaaactaatattgccaacgattccaccatccccaacacgattccagatgaacgcgccattgctccaggcgatctatcttcgttggcgcactgcccgtttttgctgggcaatccgcaggacatcgatggccgcatcggcgagattctgttccgtcgtgccggattcgagccgaaagtcgccgcccgttcggacaacatattgacgctgctggaactatgccattacggcatgggtgcctgcttatgcccggagcggttcctgccagcgctgcttgacggcgaacggctgcgcaccttgcatgtgctggattgcgggccggagaccgaatacgccatccgattcgacgtttcggccacaccataccgctggagcgtcattgatgatttcattcgttgcgcccgcgaagtcaccaccggcgaaggcgtgaacgaccgcggcctgtcccgcaagcatatcttcgagagcattgatcagacactgaagaacatgcagaccgactatctggacatgtacttctgccaccgattcgacgagaccaccgatctgaccgagacgctgcgcgttgtggccaacgagctcggcacgaacctgccggtgctttccatggcgtggatcctgcagcacccggagatcagctgtgtgatcgccggcgcctccaagcccagccagctggagaacaacatgaaggccgcgggctttgtgattccggctgacgcgatggccgaaatcgacaagatcactggcttccaccactttgagcgtcacgtgggctgacggatctgcggcttcctccaacgggagcgattgttaagcgccgaaatcggtatcgccttgggcctcggcctgggcgatggcggtttcggcgttttttgctgtttgctcaatgacctggttgtatccggtcaaggccgcgaacggcatgaactgggcggcccgctggcgacgagacatatgcggatgcttgcgtgattggtggtgtggcaggttgatgatgtcgtcgtatgcatgggtttcttgcagggtcatgcgcgatggcctccgatctgacggttgcgagcctgaccggtggcaccgtcttccatatccatggctttgatgacggcgttgcggccgaatttacgtttcacatccagcaacgcacgctggatatcacgctctccatctttttcgccggtggaatcggatccatacgattgggcctcgtcatcaccgaacaaatcaagctgctcatagcgtttgccggcggccagctcctccagagtggtcacatcatcggcgatgaccgtcaaccgtctcacgagcagacgtgaatccacaatgcgctcgtacagcatcgtcatggcctcacggatgcgcgccgaagatgacgtgaaatcgcccaggccaatcgatccgaccgcgcttttgggcactttgcgcccaaaccggtcgaccgtcaccggcccttgatagcttttcgctgcccgctcagcggcacgtttcatcgcataatcagcgcacgaatcgagctttgacgaatcaagactgccgatgtcatagccgacggcgagcgtcagtcggttcgtcagcacgcttttatcgaccagatcgagggccagcgcatcggccatctccttggcgatcagccgagccgtatgccaatcggcgggcccggtgagcacctgcccgctgctgatgctgtgcgcacctggctcataggatcggatatccgcgatctcgcacggctcccagccccacgcatggtcgatgagcagttcggcattgacaccgaacatgcgatacagcaggtcttcgttgtagtaatccgaagcacgacccaccgagcatcgggcgatatcgcccatggtcatcagaccggcgtgctcaagtttcctggcatagccgcgcccaacccgccaaaaatcggtgagcggacgatggctccagagcagccgacgatatgacatttcattcagttcggccacgcgcacgccgtccttgtcggcgggcatgtgcttggcgacgatatccatggcgactttggccagatacaggttggagccgatgccggcagtggcggtgatgccggtttcatcgagaatttcgcgcacgatggttcgcgccatcgcatgcggccccatacccagcgagcgcagatatggcgtggcgtcgatgaacacctcatcaatcgaatacacatgaatgtgttcgggagcggcatacctgagatagatgccgtagatccgcccgctgatttccagatagtgcgccatgcgcggcttggcgatgaccatcgaggctttgagtctcggcgagcgttccaggtcgcgcgcatcgcaggactccccgattaatcggccgccgggagcatggaccgcgcgctcgatgttgactccattcaggcgctgttttacctcgaatagccgcgcacgaccgggaatgccatagttcttcagcgagggtgagaccgccaaacatattgtcttatcggtgcgggtttcatcggccaccaccagatgcgtggtcaacgggtcgagtccgcgcgccgcgcactccaccgaggcatagaaggacttgagatcaatggcaatataggtatgctcgcgttgcgtcgataccgttccgctgcccatcgccatcacctccttaccaccgccggcccgaccagcatatcaatacggtcgaacatttgttcgatacaacatgtctgttcgaagctgccgaagtcgacgcacgcaacgcgcccaagcatgctcttcacccacaccacacgcacagcggcagagcagcggcatgcatgcgtaccatgggaatatgaagaaaagcattacggcagacagcgattttgcggcgtgggcggcagcccgatcccagaaaacgaatcgatcactggcaggagcccgcctcgcgattccggagccgcagaagcatgccgaaatcaagtttcaggcccagcaatggggcatgaccgtcgaagatgccacgatgaccgacgggcacagcgaggaattcctctgtgacggcacacaaagcattgattccattgccgacatgcgcacggcaagtgggctggaggcaatggagtacgcggaacagcacatgccggtattacgcgacaccatggatgacctcaccacccgcgtcgatttctcaggcattcgtattgccgtctgcctgatactggagccaaaaaccgcgattctgctgcgcaagcttaaggccgccggcgcaatcgtcggcgtatattgcggcccggattccacggatccccgagtggcggaacagctgcgccgagaaggaatcacggtcgaatccagccgagcctggaccgcggaacaggcgcacgaggcagccctgcgcctgctggacaagatacagccgaacatcatcatcgacgatggtgccagcttcgcccgtctcgcctcgctcgaacgccccgagctcacggcgaatctcattggagtggccgaggaaacgaccagtggcgtacgcgcgttccagcagatgcaggaagcgggagccctcacctacccggtcgtagccgttaacgacagtgtgctgaaaaccggattcgacaacgcccacggcactggggagacatgcgtgaccaccatgcagcgcattctcggcgagcatgcattcgacggcaagaacgtcaccgtcatcggctacggcccggtcggccaaggcttcgcacggcgtattcgcgcgcttggagccgaagtcaccatctgcgatatcgatccagtggcttcactcaaagcggtgttcgacggcttcgccgcacaagacattgacgaggcactcccttgcgcggatatggtggtgtccgccactggcgtgagacatacagtcacacttgagcacatgcgcgcaatgcacgagggcgcggcgctcgcagtgatcggcggcatcgccaacgaaatcgccttggacgaggtaagcgacttcatcccacaggtcaacagggacaccgcgcaactcattgttcccgacggaccaacgctcacgctaatcgccgacggcgatggcgtgaactacacggtgggaggcggcaatccaatcgagatcatggatctgagcttcgccgtacaggccagcgccgtcgcatatcttctggaacatcgaggcacactggatcacacgcttatcagacttgacgcagcgaccgaccagcgcatcgccgccagcgcgctcaaggcgcgcggataccgagccagccatgccgtggaggacaacggctacgattggcgactgaccagattcgcggaaaacgaccgagagaacgccgaccgatagccatagacacggcaccgaacacaacgcagcgaggagaatatgaccgacaacacctggccgaccgtcgataccgagcttatcgatgatgtgacactgtattccgccaaactcatcatccccgtgacgggccccgtcatcatcgatggcgcggtcgccatacatggcgaccgcgtggttcatgtaggtaaacgccgctgggtgctggaggcgctgaagcaggaaatgacggctcacggcaccatccgtgaacggcattgggatggggtgctcacccccggattggtcaacgcgcacactcatctgcagtacagcggcatggtgcaggtcgggcaaggcacctacgatcggttccgcgcctgggaactggcattcaacgaggtgtacgccgaggcgcagaagacccagccatggaagcagtgggccgaggacggcgctcgccagatggtcgagtcgggaacgacggccgccgcagacatcgtcaccgatttggacgccgccggcgcgctggcttcgcagggcatgcacggcatcgcttattgggaggtaatgggctggcacaacgacgaatggatggaaaagggccgcaccgagctcatccggcagttgcgccggatgaatgaggagcagctgccgaacctcggcatcagcccgcatgctccgtatacgctggagtccgaaccgttcgttgatcttccagacattgctcgtcagctgaacatgcgactgcatatccatctggcggagaccccgctcgaggccggcacttatccgccggtgctcaccacttattcggcggccgactggcgtgaccacgattgggaaagctaccggcagctcaaggaagtgggcaaaggtgcctccgccatccagttcgtcgatcagcttggctcgcttggcccggatgtgcacattgcacacggcgtgtgggccaatggcgaggatcggcgtattctacgtcagcgcggcgtgggcgtggcattgtgcccccgatcgaatcgcattaccaacaccggcaaagatgcaccggtgcgcgaatacctcgaggaaggcaatctggtaagcgtgggcaccgattcgctctccagcacgccgaccctcgatctgcttgatgacgtgtcgatgctttacggcctggcccgcgaacaaggctatgccagcgacgatctgacacatcgcctgattcgtatgatgacgctgggcggtgccgcctccatgggtatgcacgtgggccgaaaccgcattggacagatcaacgcgggcgcattggctgatttcgcgttcttcgacatccccgtcgacacatcatctccggccggcatcgaagaaacgctggaaacactggtgaagcacggcgcaggcacgaaccgagccacggtgatatccgggcgcgaagcctacaacaacgcctggtgacaccgctgacctgacccgacctgatatcaagaagccaaaaaccagcaaacccgccaagaacaggagatctcattatgagcgtcgctttgcaagacatgagtccatacgcccggtccatagtggaacgccttggactggaagcccaccccgaaggcggctggtacacgcgtgactggcaatccccgcacacggatgaggcctcaggccgaccgctatcgtcactgatttacttcctgctgtccgagggagatgccagcgcctggcataaggtcgatgcggatgaggtctggctgtggcatggcccggcatcggtcaagctggaactcggcggcagcggcgagactccggaatccgacgaatccaagcgaaccgtaatcaccctgggttccggcatcaccaccgatcaggccgacgtaaccgtatcgggacatgcggtcgtaccggctggcgtctggcagcgcacagtgcctggccagggcgatgcgctggtctcctgtgtggtcagtccgggattcgtattcgacggcttcacactcgaacagtgaacgccatttcgctctgcgccaatatgagatatcgttcgcttacgcgccagattgcgcggctctagccggccataagcaatggagataaccagcatccgagaatatcgctgttttgtagtaacccaatagccatacaattggcgcgcatgcatcaagcacggctttgaaccgtgtgcatgacgaacacttgaggagaggaagcccatgttcaataagcaacacatcgtccgtaccattgcggccaccgccagcatcctagctctgtcgttcaccgcagcctgcggttccggccagtccaccgcatccaattccgccgattcgaacgacatcacccagcagacgtacaagccgggcaagctgaccatcgccaccggacagccggcctacgagccgtgggttatgaacgacaagccggaaagcggtgagggctacgaggcggccgtcgcctacgcagtggccgacaagctcggtttcaagaagagcgacgtggtgtggacccgcaccgcattcgacaccgccatcgctcccggtgccaaggactgggatctcaacatccagcagttcggcatcaccgacgagcgcaagaaggccgttgacttctcgtccagctactacaacgacagccagtccgtcgtggtcaagaaagacagcaagttcgccaacgccaccaaggtatccgatctgaagaatgcgaccgtgggcgtcatggtcggcacccttgcctacgactacgccaaggcgaacatcaaggacgacatccagacgttcaatgatgatgccgcactggctcaggcacttgacgccggtcagatcgacgcactggtcaccagcaccgtggaatgcgtgtacatggtgcagtccgagcaggtcaaggacgccaaggtgctcggccgtctgcctgactccgaagacaagagcggcatgggcatcgtgctgccgaaggattccaagctgactgcagccgtgaccaaggcagtggatgacctgaacgccgacggcaccatcaagaagcttcaggacaagtggctggccgagtacaccaccgacctgaccgaactgaaaaagtaagtggagtaggctcacatcataaggtcacaacaccttggccgggcgctgcggaaattttcctgcgacacccggccattccggcattcaggaagcgagcgacattcatcacatgaccgcagcaccaaccgaaaccaggcagcacaatgcccctgacggacacgaggtaagtcaggtcgagctcaaacgacgccaatatcgtgttcatcagcaaattcaatcgacgattaccagtctgatcagcaccattgtgttcgttgtggtcatcgtcatcggcctgaagctctcccccggctggccacgagtcaaggagaccttcttctccggcgaatacttcgtcaaatcgtttccccatgtgcttgacggcctatggctcaacatccgcgttctgctcgtcgcagtggtcggcgtggcgattctaagcacgctgatcgcattggtgcgcaccagccgctcccctattctgttcccgctgcgtatcctggcattgatctacacgactgtgatgcgcggcgtgcctattatcgtcgtgctgtatctaatcggtttcggcattcccggcctaggcttgttcggccgtatcgatccctcggtactcggcaccattgcagtggtaatgggatacagcgcctacgtctccgaggtgctgcgtgccggttttaacgacgtacatccttctcagcgagcctcggcccgctcgttgggcctgacctccggccagacgacccgactgatcgtcattcctcaggcattgcgcaaagtcgcgcccgcactgatgaatgacttcatctccatgcaaaaggacgtcggcctgatttccgtgctgggtgcggtggatgccgtgcgcgccgcacagatcgacgtggccagcacctacaacttcacgccgtatgtggtcgccagcctgctgttcatcctgatgagcgtgccgttcatcctgctgaacgactggtacacggaacgtctgcgtaaacgcgaactcagcggaggaacggtatgagcgaaataaccaatatcaacaccgaggcgagtgactcccccgtgagcaacaagacggtgctgcgtcttgatgacgtgcgcaaatcctttggaaacacgcaggtgctgcgtggcatttcctttgacattcaccaacatgaggtggtggctttgctggggccttccggttcgggcaaatccacattgatgaaatgcgtcaacctgcttgaacaggtcgatgacggccagatttggctgggcaataccgatatcaccgacccgcgtgccgaccaggacaagattcgcgcacgtatcggcgtggtgttccagcagttcaacctcttcccccacatgtcggtgctcaagaacgtgacccttgccgcaatcaaggttcaccactggagcaaggatcgcgccgaaacccgcgctatggaactgcttgaacgcatcggcatgcgcgataaagccagcgcctaccctgatcagctctctggcggccagcagcagcgcgtggcgattgcgcgcgcactgatgaccgacccggaactgctgctgcttgacgagatcacatctgctcttgatccgatgctggtcggcgaagtgctcaacatggttgccgagttaaaggcccaaggcaccacaatcctcatggccacgcacgaaatgagcttcgcccacgacgcggccgaccgcatcgtactgctccgtcacggcgtcatcgccgagaacggcacacccgccgaggtgatggacgagtcgcaggatcccgagaccatcgagttcttcagccatttcaggcactgagacgaagccgaaaaacaaacaccggattcatacgacgaaaggccaaaatcctaagccactattcatactcaactgatctggtgcttaaaccgcgtccgcgaaccccaacaagttccaccaccccacaacacgcgatgtagccgccgattggtagggttggcagatagttaatcccctgtttgaaaaaggagctttggcttgtcggctgaactcgaagacattcatgaggaatgtggcatcttcggcgtatggggccaccccgacgcctcacgactcacctattttggcctgcacgcgctgcagcatcgcggtcaggaaggtgccggcatcgtctccaacgataacggtcatctcatcggtcatcgcggactcggcctgctcacccaggtgttcggcgatgagcgcgaaatcgaacgactgaagggcaattgcgccatcggccacgtgcgttacgcaacggccggctcgggcaccacggacaacatccagccgttcatcttccgcttccatgacggcgacgtggctctgtgccataacggcaacctgacgaactgcccgtcactgcgccgcaagcttgaagacgaaggcgccatcttccattcgaactccgacaccgaagtgctgatgcacttgattcgccgttcgatgcagcgcacctttatggacaagctcaaggaagcgctcaacacggtgcatggcggtttcgcctacctgctgatgaccgaagacgccatgatcggcgcactcgacccgaacggcttccgcccgctctccctcggcaagatgaagaacggcgcctacgtgctcgcctccgaaacctgcgcactggatgtcgtcggcgccgagctggtgcgcaacattcgcccgggcgaaatcgtggtggtcaacgatcacggctacaagatcgtgcagtacaccaacaacacgcagctggccatctgctcgatggaatacatctacttcgcacgcccggattccgatatctatggcgtcaacgtgcactccgcccgcaagcgcatgggcgcacgtctcgccgccgaatccccggtggaggccgatatggttatcggcgtgccgaactcctcattgtccgccgcatccggctatgcggaagcagcaggcctgcccaacgaaatgggcctaatcaaaaaccagtatgtggcccgcaccttcattcagcccacgcaggaactgcgcgagcagggtgtgcgtatgaagctctctgctgtgcgcagcgtggttaaaggcaagcgcgttatcgttatcgatgattccatcgtgcgcggcaccacgtccaagcgcatcgtgcagctgctcaaggaagccggcgccgctgaagtgcatatgcgcatcagctccccgccgctgaagtacccttgcttctatggcattgatatctccaccaccaaggaactcatcgcagccaagatgagcgtggaggaaatccgcgaatacatcggcgcggattccttggcctacctttcgctcgacggtctggtcgaatccatcggactgaacgccgacgccccatacggtggcctgtgcgtcgcctacttcaacggcgactaccccactgcgctcgacgactacgaggccgacttcctgaagtccctcacgcccgaggaccgtgtgcgtctgcctgaattcgcgctgtacaagagcaagtacatcggcaacgagtacaacaccgtgcagccggacgtgcagtaggttcggccggtccttcgactacacctcagtcattggtctttacgactacccctcagtcagcttcgctgacagctcccctgacaaggggagcttagtacaaacgaaaatccgctttttgcaggtggctccccggcaagggagcttgaaaatagaacagaaaggccccaccaaatgccaaaagcatatgagaacgccggcgtgagcgtcgaagccgggtacgaagtcgtcaagcgcatcaagtcgcacgtggcccgcacgaaccgtcccggcgtggtcggcggcatcggtggcttcggcggcctgttcgacctagcctccctgggctacaaggagccggtcctcatctccggcaccgacggcgtaggcaccaagctcatggtcgccaagctggccaacaagcacgacaccatcggcatcgactgcgtggccatgtgcgtcaacgacatcgccgcccagggtgccgagccgctgttcttccttgactacatcgcttgcggcaagaacgacccggccctgcttgagcaggtcgtggccggtgtggccgacggctgcgtgcaggccggttccgcactggtcggcggtgagaccgctgaaatgccgggcatgtacgacgaggacgagtacgatctggccggtttctcggtcggcgttgccgaaaagtccgccattgtggacggttccaccatcactgagggcgacgtgcttatcggtctgccttccaccggcgtgcactccaacggcttctccctggtgcgcaaggccctgttcgagcaggctggctataccgtggacactgagctcgccgagctgggcggcgcaaagctcggcgacgtgctgctcacccccaccaagatctacgtcaaggccctctccccgctgttcaaggcgggcgtggtcaagggcgtggcccacatcaccggtggtggcttcatcgagaacatcccgcgcatgattccggacggtctggccgccgagatcaagcttggcacctggcctgtgctcccgatcttcgacgtgcttgagaaggccggcaacatcgatcacaaggagatgtacaacatc

SEQ ID NO: 1500 - DNA, 7606 bp, Unknown
  R257_15m  MAG No. k141_42829
gccgccaagaagggactgcttgaagaagctgagataaagcgcgtagaacatcgggatgatcatgccgaataggaagaccaccacgtatggaagacaatataacatgcctatgtactcgcgcttcggcttgcgcatcccggaagtatccggtttcgccgttgcatttgtcatagtttttctctttcttcttaacccgtctgaatgagcccgccaacaacatcgttgccattgccgtttcattcatcggtacgttcaatatacaaggttttacaaaaaagagcaaataaaacttcgttgcgcgtggcgaaattttctttatcttgttttttcgccttaaaagggctttattgcaacgatatgcacaaatcgtactcatcgaagaaacagcagccaatccatgtctacaacacccatttccgctatatagacagcaatacgccgataaaaaagctgttttagagtagcgaaaatttcgctactctatatataacgctttttttgcagcgtcgcatacgaaaagagaagagtcatggccacaatcaaaacaacaaacagaccgaaggtctccgacatcgcccaagcggcgggagtatcccccgctaccgtgtccaaggtcatcaacggccgtgatggagtctccgacgagacccgcgatagggtggaactgctcctcgaagaagccggattccgcaaaaaacttcccacaacaaaaaccatacggtcaatcgaactggtcgtcagcgaaatgaccaacaacggcaccgtggaaatggtcaaggagacagcttcatacgccagagattttggcctcggcatcaccgtaagctgcgccggaccggattccggagaatacgcaacaagaaacgaggccagcagctgcctccgtaacgccatcgaacgcaacccactaggcgtcatacttctcttatcgaatatctcatcggccgaggaatcgctgctgcagacgaggaacatcccatatgtgattgtcgatccggtcggccaggtctccgctgacgcattgggagtgggcattgataactggaccgggggaatgctcgccacgcagtatttcatatcattggggcatcgacgtatcgccgtcatcactggccctactaattcacaatcctcgcaggcgcgactgagcggatacatggcggcgctgcagaaaaacggcatcagcgcggatccgcatctcatcaaggttggcgactacgtgtctgacaaggcatacaaggcggcatgcgatctcctggaaatgagggagcaggaccgaccgaccgccatcttcgcgttcaacgatctcggcgcgatcaacgtctatcgcgccgcccgacagcacggcatcagtctgcccgaacaattatcgatcatcggtttcgacgatgtctatcctgcggcaagcatgtgtccatccctgacgaccatcaggcagccattcgacctcatcgccagacaatgcatcaacctgattctcgaagcgcgggaaggaaaggtggaacagaattacttcatttttcccacgcagcttgtcgaacgcgaaagctgcgtatcgccagcacgtccgtaactcagcaacggaacacagaatcagcttccacgaagcacccatgcatatgcaatccgtctctggcacaagcatttacttctgtttaccagatgaaaatacaatatcgtgcgattacgggggcgcagccctagcctcagctggaggtcaggaaggtttcgttgcctcgggtgaagtcgaggacggcaccggcgagttggacctcgtctgccagttcggggtcggcagccagaagctgctcggcacgggtgcgggcgtcggcgatcatgtcggcgtccttgaccacgcgcaggagcttcaggctggacttgccgccggattgggcgtcgccgagcacatcgccggcaccgcggaattccaagtcggcttgggcgatttcggcaccgtcgagcgagtggtgaatcacttcgagccgttgctcggccggggagccgggttccgcacgggaaataaggaacgcccacgagttggtgccgccacgccccacgcggccgcgcagctgatgcaactgagagaggccgtatcggtcggcatcaaagatcacgatgcagctggcctgtttcacatccacaccgacttcgatcaccgtggtggacaccagaatcggagtctcgccgccggcaaaatcggccatgacctgggttttgacgtcatccttgtcgcggccggtcagagtcgcaaaccgaatgccttggaattgcgggagtttctgcaaccggtcggcgatttcggccaccgcatgcaatggcgggcgagccacggtttcgccgttctcgtcgaaggtttcgtaggggtcgtcgatgccgatggcgtcggccgccgcgcgcgttgcacggccgcccgcagctgtgcgggcactggaaccagatgctgcggcgcgtccgcgggcagaaccggctgctgccgaaacgccggaaccgccttcgttcccctcatcatccgcatcaatgcgcgggcacacgatataggcccgctcccccgcgtcgactcgcgcgcgaatgtgcgcgaacatacggcccatggtggcggcgtcggcctcattgaccaccacggtgcgaatcggtttgcggccgccaggcaattcggtgagccaggaaatatcgagatcgccaaaccaagtcatggcggcggtgcgcgggatgggcgtggcggtcatcaccaatagatgcggcgtggtgccgtcatcggttttggcgttgagactttcgcgctgttccacaccgaaccggtgctgctcgtcgattaccaccaaggccaagtgcggggcttggaaggtcttggaaaacgccgcgtgcgtggccacgataatgcccggctcgccactggacgccgcagcaagtgctttacgtcgcgcagcaagcttcatgccgcccgtcaacaacgtgactggaatcgctggcttgagttgctccaccatccggccaatggtttcggcatgctgctcggccagcacctgagtcggggcaacaagcacggcctgatagccggcgtctacggcttggagcatggcagcgagcgccactacggttttgccggagcccacctcgccttgcagcagacgctgcattggccagtcatgagccaaatcggcggcaatatcatgaataacctgctgctgccctgcagtgagggagaacggcagggatgcgatgaactgatcgcgcagactgtcggttaccaacgggcaagagtgagccgcggatttatgggcgtgcgacctggctttaagcagcgaggtctgcgaaacgaaagcctcctcatagcgcagggtttcgatggcctccttgaaccgggtcgtggaggccggatcatgaatggccaggaacgcctcagcccgatgcatgaggttcttggccttgcgcaccgattcgggcagcacatctgggatggattgggagagcgcctcagcaccggattcggcggtcgtgccggaattctcttccccgttttggacggcgatggtgtcggtcgcgggagccacaatgccggctgacccagcgccagcgagttgcccgtcaggcgtggatgacgtgcgggcccccatcatccacagcaatcccagaatcgtctcatgaatatgttcggacgagatacgcgaactggcgtgatataccgggcggggccggcagacgcgggtaagcgcctcttgcacggtatcggcgtcgtatttcagcgcggccccggaagaggcagtcgcggccggcggatacgcggactgcacactggcatacggatcggtacttcccgcaaacgcaccattgccggatgccgcaccccgagcgtaaccctcaagccccgctcctgctccggccgacccgggcgcgacagtgaggatttcggggtgcgtgaattgcagctgccccatgtattcgctgggcataccggagaccaccacagacgtgccggcgcgcagccgcatgctgacccaatccacatacgatttacgatacgaaaagaacgtgagccgggccgtgctgccgggtacgcgacgagaccgggcgaagtcggcgtcatcgaccgtcgcctcgagtcggtagccgcggcgagcgttcatcggcaccacgcgcatgtctcgtatcacggcggcaaatgccatctgctggccgggtgcggcctcgcggatggcgcgaagcggcaccggttcggtgacgcggaagggatagtaggtcagggcgtcgccgacagtgacgattcccagcgatttgagcgcggacacgcgacgcttgttggtgaccagcgaagcgagagtggtgtccatagtgatgctcatattggcctattctattcgcacggcctctttaggccgcagaaacaacaaaacccgctgagccgaagctcaaacgggttttgctccacgttagtacgcgattcacgcggccacgcgctgaaccttgccggccttgaggcacttgacgcacacgcgcagacgagtgttctcgccatcaatcgtggtgcgtacagactgcaggttcgggcggaagctacgcttggtacgacggtgcgaatgggaaacggtgaaaccggtctgcggtcccttgccgcacactgcgcaacgagctgccatgatggactcccttaaccttgatgtgtcaagtctttcacgcattcgaccgccggtttcacccgacatgccgaacacacaacttcacaaatatatagcccaataccgacaaccgcaactcttgcgtgtatcatgggcgaacttcggcggttcacgcgcggttcgagcgtaacttgcgagtgggccatcagcggttcgcgagcggttcggcattggttcgccagcggtccgcaagtagttcgccagcagttcgccagcggttcgccagcggcgaattacgctgcaaatcgtagcgtttacccgataaaacacgccggactgcctattccgcatccaacaaactctcatataatctcggtataagagacagcaagggacgaaggggtcctcgtgcaacttacgacgaaggaggctgtcatgttgaatctcaggcgaggtatcggcactcacgagcccagcgtgatttcactgggtcaagtctgggtggacattatgctcaatgtggacgaggtgccggcacagggcggattcgccgtggccgatcatccgaagccctccattggcggcagctatcgcgtgctgcaggcggccagccgcatgggcgtgccgaccgagcacgccggcattctgggcaacggcctgtgggcgcatttcatccgccagtcattccaggacaacggcatcacgcatatcggccaggatcgtcttgatgaggattccggtttccgcgtggtgctgagctccggcgcgccgaagaagacgttcatcgcttcctatggcgccgaggctcatggcgacgcggacacgttcaacacgctggagccgcagcccaaagacgtggtgcacatcagcggcaacacactgatggaccacacggccaccggcgtggacggattcctactcaaggccggtaccgacccggctgcacgcgactacacgctggtgatcaatcccaccaatacgttgcgtctggtcaacgaccatatgcttgaggacctggtgctcgcacgcccggtctggtcctgcaaccgtcaggaggccatgacgctggccgagcgactcggcgcgccgatcgacgacagcaaggtcaccatcggcggtggactcgacgacttcatgcaccagttgtgtgacggcttgggcactacactgcgcgcgccgctggtggtgcgtgtcggcgcccgcggcgcttggattcgtgagccaggtggcgagacgattcatatcgagggatacccgaccaaggccgtacacacccgttcggcgggcggttgccacaccggcgtgatgtgcgcgatgctggcaaagggccatagtctggccgaatcggtaaagatcgccaacgcggcggcatccatcgccatccagcgcagcctcaacggcgtgccgcaatgccccgattacgacgaggccatcgcgctgatcggcgaatagtttccggacgattgagtggatttcctcatctgggggaatccacgatcggctcccttcagtccacttcgcggccagctcccctcagcgaggggagctatttttctgccctggctccccttagaaaggggccccggcattattcacccgccgttcaaccggaatggtccccctaccctagtccgcgcttctacgatagattgagttgaatactgtcgaggagtacatatgactgatcccgcaaatgtccacgaaccggtgccgcaaagcgccaaactgaccgcccgcgagaagaagtggatcatctacgacgtcggcaactcggcattcgtgctgctgtccaccgccgtcatccccatttacgccaaatcgctgatgccggcggatggcaacatcgtgtccgcctggggctacgcgcaaaccattgcctccttggtcatagcgctgctcatgccgttgctcggctccatcgccgacgtgcaaggcatgaaaatcaagttcttccttggcttcttcggcaccggcgtggtcacctgctgcgcaatggccctgcccctgacctggctgccgttcctggtcgtctacattctggcgaccatcggcctcaacggctcgctgacgttctatgattcgatgctcatcgacaccacctcgaacgagcgcatggacaaggtctcctcgcacggctacggctggggctacatcggctccaccgtgccgttcatcttctgcatcgcgctgatcttcggcggcccgtcgctcttcgactggtccacggtggcttgcacgcgcgcctcgttcatcatcaccgccatctggtgggtggcgttcaccatcccgctgcttaccagctaccgccaggtgcactaccgtgccacccgcgaccagctgggctcggccgtgcgcggcacgttcagcgaactggcgggcacgttcggcaaaatcgtgaagaacaagccgttgtggatgttcatgatcgcgttcttcttctacatcgacgccgtgaacacggtgatttcgatgagtacctcctacggtgccgagcttggcatcgactccacccagctggtggtggcactgctcgtcacgcagttcgtggccttcccctgcgcgattctctacggccgtctggcggcgcgattcggctgcaaagtgatgatcacggcggcggtcgtagcatacatgtgcatcgtgctcttcgccgcgttcttcatgaaatcggccgtggagttctggattctggcgattctggtcggcatgttccaaggcggtatccaggcgctttcccgctcgtactacggcaagatcatccccaaggaccacgccaacgagtactacggcttctacgatatcttcggcaagaccgcctcgatcatcggcaccttcctggtggccaccaccacgtcccggaccggcaacgcctcgttcggcgtgctgtccatcgccgtcctgctcgttgtggcgctcgtcttcttgctgctccagaaggatccgacgcaagcgtaatatcacccatcaatcagcaacaggaacgccgaagcagc

SEQ ID NO: 1501 - DNA, 16238 bp, Unknown
  R257_15m  MAG No. k141_43030
cgatcagcagcgccggaataatcaaggcgatcaggaaccgtaaaaccgaacgctccgtggcgtggaacagtccgagccatgctgcggtcgccagcacgaacagcagtgccgcaccgatgatgagatacggcagcgaacgcggcgtggtcagcgtggtgtatgatccgcccaccgctgcataggcgatggccgcgcccagcgccgcgaaacacagcgcctccacgcggtcggggagtgtgactttgcgtttcatggctacgctcccatcaccagatgggcggcaatcgcggcgaggaagcaggccgccgccacggtcgcgatgaaccggatgatgaaccgtggccggcattccgtggccagcatcagcgtgttcttgaggtcgagcatcgggccgaagaccaggaaggcaagcatggcggagaccggcagcgcgccaatcatgctggcggcgatcaccgcatcggacgtagagcacagcgaacacaggaacgccagtcccatcgccgccagaatcagtacgatggcaccggcgtcatcgagcgtgcttgaaccgttggtcaacgacgacaatgcggtgcgcatgatggaggcaatgatcgtgccgaacagcagaatcggcatcatccgcataaagtcgtcatgcgtatgccgaatgaaatgcgtgaaccgctccaatccgcgccccgtgcccccgccggcgggggctgtcggcaaagccgactgggggtggctctcaggcgaatcacccgttgcccctgcacaatcctcgcaaatcaacgaccgcccaatcgtcagcggcctctcacgcaccgcaggggagcggagcggccacaccgcgaacgacacccccgcgactatcgccactaccatgcccaaccccatgcgggccgccaccatccatggtttgtcggtgaatgcgaaccatgtggaccatatcgccatcgggttcatcaccggcaccgcgcacagaaacgtcaccgcacacggcagcggcaggcgtttgcgcatcagattcgcgaacgtgggcaccaccatgcaatcgcacaccggtaggcacaggccggccgccaatgccgcggccagtccgccggccaacgatttcggtatgtggcgggccagagaatcggtgctgacgaacgtgctgaccacggccgacatcatcgcgcccagcagcatgaacggaatcgcctgcaggataagccccgcggcaccggtgccgatacgcaccagcggaaccggaaacccacgcgactcgagcatcgcggaagccgcaatcaggaacgccaccagcggcgtgccgataatcagaaacagatagttcgccgaatggtcctgttgcgcggtgttcacctgttccgtgcgctgcgtgcgaggttctttcatgcgaatatcacctgccatatcgccgtcatattagcaccgtacgcatgatagtggtcgagataatatgcgagttccccgcataccgatggtacacatcgatatgcggggaactttgcacatggttgcctgggccgatggcgaatcggtgggccagcatctcggtggccacttcctccttgctcatggatgccgggtaatacgtgggccagttgtccatttccttgagggtttcttcctgtcgttgaagtgacgttgcacggtggcggcggtggcagaaccggccccggccttgtccgcgtagacggcgttgatggcttcggcggccttcagcacggcttccgggctgaaccacaggtgcgggttcgtagcaccatggtggtgatggcggccttcttcgccctcggcgtggtcgtgggaatgctcgtgctcgtcggtggcggtgacgcccatgaggccgcccacgttcacgatggtctggcgtttcttgtcaagctgcgccttttccgcccagccgtcgtagccggcgccgttgaacaccacgatgtctgccttggcgagcttggccagatcggatgcggtggcctcataaaacggcggttcgccccggcaggtgacggcatacggaaggaaatgggggaaagaacgtacgccgccggcctgtggagcggaccgtcgagttgttgttacgagacttgatggattgcggaatccacgatgttggttatggcttcatatacccctttcgtacagctgcggccagattctgcggaacctgaaccacttcgccttcaggcgttctgaccgtggccagctgaggcaccttggccttccagttggctcggcgcgaatgcgtgtttgctcgggacgccttgtacttgggcagtgccatcagccttgcctcgccttccagtgggggttcttcttgttgattacatacagatggccgcgccggcggacgacataggagccatccttgcgggccaatgagcggaccgatgccttgaccttcatgtccgttcctttcttcttgtcttacggtctttgcggaatgtgcggcgaatcacttgcgcccgtaacgagcgttgaacttctgcacctgaccggcggcgtcgatcaccacattcttgccggtgtagaacgggtggctgtagctggacacctccacattgacgagcgggtaggtgttgccgtcctcccagtcgatggtcggcaggtttacggccttggccaccagtgtggacttggtgaggaagtacttgtcggcggagcggtcatagaagaccacggggccgtattcggggtggatgccctcttgcatggttatggacctttggttgtgtggtgttgtgtggtgatatggatgagaatggcgtcggacgcgcgggtggaatccggtgaattgagatggcctgagacggcctgacggccggttgtgccggcccgatcaccagctggatttcaccacgccgggcagtttgcccttgtgtgccttctcacgcagattgatacgtgacaggccgaacttgcggttgtaggcgcgcgggcggccgtcgatggaatcgcggttgcgcagacgggtggggctggcgtcgcgggggagggcctgcagcttgcgcatcgcctcggcgcgttcttcggtggtcagatgagggttgacgctgtcgcgcttgtgttcggcgcggcgttcggcatacttggcgaccatgcgttcgcgctgcaattgtcggttgatcttactggttttggccatgtccggctccttgataaggctccggggcgcgggaatcgcgccggccggagctgggacgagtgcattcgttcattgggcgcatgccgcaaggttcggaagatgagttcatgaaatggtgatagaggaaaccgccggaatgccaacaaggaaacgatttcggcgggtgcttaagcctcttcctcgcctcgcgactggtgtccaatgaacgaacagatggattagcgggtctctcggaagagcacccgtttgcggactaccggatcgaacttggtgagctcaagacggtccggcgtattacgacgattcttggtggtggtgtaggtgaatccggtgccggccgtggacttcagggtgatgaccgggcggattgcggaggatttgcttgccatgagtggtgctttctatgtgtgggtgtcacgctgttatgtcgcgtacgtcgcggtgccatgtgggtgatgcagctcgttagcgcggtttgttgcgcggttacgcgccggcacagtggcgggcctactgactgcccgagcatgggggtgatgccgtggccggttcagttgacgttctgatcgcggcggatgcgggcgatcgccgcctcgatgccgatgcggtcgatggtcttgatgcccttggcgctcacggtaagcgtgacgtgccgctgcaaggacggcacccagtaccgcttggactgcaggttcggggcgaaggttcggcgtgttttcctgtgcgagtgggagacgcggttgccgaccccggcgcgtgttcccagaatttgacatgttttggacatgcctgcaactatatcataatgataaccattatcaaataagaaaggctgtcatgattcatccggcattgcaatcacagggaaacgcggaggggcgcacgcccgtggtgctgctcaccggcgccgaccgcctgagcctggactccgtggcgttctcgttggtcgattccttcccgtccgtatgctcgattgcttatgacgtgcgcccgaacgaagccgtggaatccggtctcgatatcgtgcgcaacgtcgcgaagccccaggcaagcggggtggtgttcggcgagtccgattcgttcgggctcgaggggtgctgcatgagctgcacggtcaaacatgaccttgaacggacgctcggatcgctgcaagggcgggccggcgcgtttctggtctcgctgcctgtgggccttgaggccacgccggtcgcgcagtatctggccgattccttccgtctcaacgagtggggtgagtcgatgttcgtgggtgcggtggccaatgccgtaggccttgacgaattcgaagagcgattctttgacgacgaccgtttgtgcctgtacggcatgggcgaggagaacggcgtctatgacgagcgttcgaccggcgtagtggtctcccgcctgatccgtgaggcctcgtgcgtgctcgaattgccggtcattggtgccggttgcctggcacgccatttggatacagacggggagtgcgcctgccgcgacatcatccgtgcaatcgccttgcgtgatgcgctggtctgtgaggatgcccacaccgtggggctcgtcgacctggtgcaggcgtcggtctgtgccgcgatgccgttgtgacatgtgcggcaaacggcagaacccccgcgtccgaacgaaggtggcgcgggatttctgtcgtttccgaggccttaaatggcagaacccccgcgcgggtatcgttcggacgcggggagactgccgtttcgtctgccgaaaacggcgggatcccgcgttgtcatcgtcggggcgcgggatttccgccggcagcgcgggtgtgcgcgtgcaacacgccgacgtaaatgcaaatgataataattctcaatacatgttattctgtcgtgttgggggccgggcgatgatgcagcaacagcagcatcgcccggccaaacagccgaattagagaggaaaatccaatcatgtccatcatgtccaacgccaagcgcgagctcgccatcgcggccgccgcggcgaccctgttctcgatggccgcctgcggttccagcaatgccgccggcaacaagtccgattccagcagcgccgcgtcttccggcaagatcgaggtcgtcgcctccatcaaccagtggggttccgtggccgaagacctcggcggcagcaacgtcgaagtcaccaacatcatgaccaagaccaacgttgaggcgcacgattacgagcccaccagccaggatgttgccaagttcggcactgccaaggtggccgtggtcaacggcgccgattacgacccgtgggccaccaaggccgcccagtcgaccaaggcctcgctggtcaccgccgccgcaaccgccggcatccaggaaggcgacaacccgcacgtctggttctccgccaaggtgcgttccaacgctgccgacgccatcaccgccgcctaccagaaggccgacccgagtcacaaggacgactacgccaagctcaacaaagaatggcacgccaaggaagaccagcttgagtccaagatcaaggagacttccgccaagaccgagaacctgccgtacgccgccaccgaatccgtggcctggcacttggccgacgacctcaagatgaccgacgccaccccgaagggctacgcccaggcttccgccaacgagagcgagccgaccccggccgacatcaaggacttccaggacaccctgaagggcggctccatcaggatgctcgtcttcaacagccaggaagccaactccaccaccgaccagatcaccggtgccgccaaggacgtcaacgtgccgatcgtggagctcaccgagcagatgccgaagcagtacaccaacctgctcgactggatgagcgcactggtcgaccagttcgccgccgccgtgaagtaatgcggcggtagccggcaatccgcaacagcaataaggggaataatcaagtcagatagcgaggcgttgcctaggggagaacagaacgcttcgctatcagggaaggctccttatatatcagggtgcttcggggatgtcccgaggcaccctttgcgttagggtgaatagttaggaaacggtaagaaaaatagtggaactatggattttccaaggttcagcggcaacaatatgcccttgaaaagtcccatacggaaacaggcgaatgagcgagaacactagtagtatcaccacagtgaaaccccatttcaagctttgggtcaaaaaggccgaagccaatgaagtcacgccccagcacccccacaagcccttccccggctgggcgtacggcgtgctcttcgttatcttcgacattattgttgtgacggcgctcgaagtgggcgtttcgtccagctccacccgtgtgcaactgtccagtccgaccgtcggattcggcttcgtgagcaagatgtggaccgacggcaatttcgtattcgtactcaacgtgatacttgtcgcgttgctgtacctcatgttgctgatgctgttcaacagattctggacggcaagcatcgtgattcttgcggtcggaatcatcgtggccgccatcgaacatttcaaggtcgagatccgttacgaggccattctgcccgccgacctcggcttccttggctcgaacaccggcaatatgctcaccttcattccggccggcgcgcacgtgaccatcctcgtggcacttggcgcgttcgccgcgctgctcgccctgattctggtgctgcgccacttcgacgggcgcaaaggtcgcatgatccgtacggacaacctgagcctgaacctcacctcccgtctgattctgctgctgctgccgattctggtgttcgcgttgtactgcattcatgtgagcaccaccgattcgctggccaacaagttctcccgcgccttgggggacacgccatccatgtgggattccgtgtatgacgcgcagcgcaacggtccgctcgtggcctttacccgtcagctcaacccgaagatcatggacaagccgagcaactactccgaggagaccatgaagaaggtcgccgctcgctaccagaaggaagcggagacaatcaacgcctcccgcaccaacaacctcactgattcgacagtggtgtacgtgctgtccgaatccttctccgacccgagccgcgtgccgggactgaagaccaataaggattcgatgcccaacatccgcaagatcaaggcgggcaccacctccggcctgatgctctcctccggctacggcggcggtacggccaacctcgaatacatgggactttccggtctgagcatggccaatttcgattcctccctgtccagcccgtaccagcagctggtcccgagccagcattggacccccaccatcaaccagatgtggggtgcgcccgccaactcgctcggctaccatccgtacgagtccagcatgtactcgcgcgctacgaactacaagaagttcgggttctcgcacttctacacgctgaccggtccggacgtgatcaagtatcaggacaagattgacgagtcgccgtacgtctctgataagtcttcctatgattctgcgctggaaggcatcaggtccggcaagacgaacaagttcattcagatcatcaccatgcagaaccacatgccctaccacgagtggtatgagaacaacgactacaccgctgaatccaccacgggtacgccgctgggtgatgatgaacagcagtcgattgagacctatcaaaagggtgtggagattaccgatcaggccactcaggagttcctgaacgaactggatgtgctggataagcccgtcaccgtagtgttctacggcgatcacttgccgggcatctactcgtccgccagcgaggatggcaacaactccttggccctgcacctgaccgattacttcatctggtcgaataaggctttcagctcccaaggcaataaggcaagcgatgcagcctactcttcgccgaacttcttcgtggcacaggccgccgatcacatgaacgccaaggtcagcccgtatctggcgttcctgaccgaaatgcattccaagattgccgctatggaaccgcctgtggtcaacaaggtccaaggctgggatcgtattcccgaaggccagaacatctatctcgaccaaaacggcaacccgatgtccaccgatgacttcgacaaggaaaccaagcagttgcttgccgactacaagctcatccaatacgacatcaccgccggcaaaaactacctcaaagacacagattttatgacgttgccgtaaagcagacagcccggccgaaccgtaaagcggatagctcagtggactgtgtttgcggggtttccgatttggttcgggagccccgtttttgttgcgttttacgggttttgcttggtttgtgatggtttggtgtttgtgtctcggtggctctgtttgtgtcggtttgcgcgccttggggtatcatctggggtatcgccggccgatgcgggaaggctggccccatgcgcaggagaagaggtttgagcagacggttcggttcggtggtgaagaggaagaaccacaatggcgtgcccacgtgtctgttggcgcggtatcccaatccgaaggagccgggcaagagggtggtcaggaggttccctcttggcgcggaggcgttggcgtatgcctggctggatggcgaggaggggttcgtcagggattacgagcgcgggctatccgactgggtgccgccggaggagcgcgagcgtgtcgtgaagctcgcacgcgaggatttcgccgtgtacgcggaggatttccttgactcgtatcgcacggttgacggcgggcgtctccgggattccacgatgcggctcaagcgttcggatatggccttgctggtcaaggcgttcggcggcatgccggtgagtgagatcggccggtcggacgtgggcgcgtggcttgacgatggtgtgtccagtccttatacgcggcgtcgttgctatcagttgcttcgcgccatgatgtcgcgtttggtggaggatggcgtgatcgcgtcgagtccttgcgtctttcccgttccccgtcttccggagagtcgccaggccatgattcccgccgccactcgcggggaattggctttgatctatgacgcgatgcccgacgatacggcggtggcggtgtatctgggcgcggtgtgcggcctgaggatcggcgaggtgtgcggtctgagggtcggtgatgtggatctggcccgtcgtgtgctgcatgtgcgtcacgcggtcatgcgcagtctgtcgggcgagtgggtgctcaaggaacccaagaccgcggccagcgccggggacatgccgatccccgagggtctggccgccatgttggaggcgcatatcaaggcccattgcgacgggggcggggacgcgatgctgttgtccggcgcgcgcacgggcggcatccttcccccgtccacgttgcgcggccagttcgaccgggcccgcagggcggcgggacgtcccgacctgcatttccatacgttgagggccaccgcgatcaccgccgccgcgcagtcgggcgcgagcccgaaggaggcccagcggtacggcaggcacgccgacgcccgcatcagcctggagttgtaccagcgtgccaccgaggacggtggcaggagggtcgccgaggcggtgttcgactccctcgtgcagaccggtcgcgaccgcgcgcgtgtggaggccgagctcgcccgggccggggaacgtctcgaagccgcccgccgtgacgtggagcgcctcgagaaggagctttcatcgctgggctaggccgccttcgcgcccggatcgccggaaggggtgtggcctttctgttgttcatactgcgggagtggatcgtcgggactgcccgcccagtctctcagggtggtctcgctgattcctaggaaattgtggagcgacttgacgcttcgtccgtcggtgttgatcagatgccatatggctgatcgcagttctttttgcagcgcttcgcgtatatcgggaatgacgtggggctcgtcttgcgggtcgcgggacgggatggaggaactgcatgtcagggtctttgcgacgtggatcagttgcagctcctggtattcgccgatcgtgagggtgcggaccaggtcggcgagctccccctcgtcgttgtacagatccacgtatgcctcgcggtccttcagtttctttttgtggggccgcatccattccacgaacgcgaaatccagtccgagccgtgccatctcctcggtgatgcttggatcggggtcggccgcgtccgaacgcagcaccctgagcatctcctggaggcgcccgatctgggtttcggtcagcatcgccatttcccggatcacgtccgcgcggatcccgttcgcgcggatcctttcccgctcggctatcctttcccgctcggctatcctttcccgctcggttattccgtcgatctgtctgaggaaccgtgcccgttcctcccaggatgccggcccggcgtcctcgatgccgtccatctcgtccgtgtcctcgttgtggtcgtccatgcgctcctccttgtgatgtccttctcccattatccgcttgcccgcgtctcctcttccgatgacgcgcatgggtgtcgaacccgctcgggttccgctctggttacgaccgcgctttcaggcgattatcgaagtgtcaaggaaaacgaaaggagcgatcacgatgggcgcacacgatctcgacaagcggtggctctcggtggccgaggccgtccaatataccggcctgtcgcgctcgacgctcaaccgcgcgttcgtctccgggcgtcttccgcgatacaaggctggtcgccgcgttctgcttcggcgttcggagctcgacgcctttatcggccagccggtcaactctgccctcctcgcccaacgcgagtaccggcggctcaacaataaatccgcaaaggactatcatggataaaatttttaagttcaatacgctcagtcagccgacaaaatatccggtcgatctcggtcggatcggtgtcaacgtatacgacgtggcacccaagtgggtctaccaggacggccggcgcaccgatgtgcaggccacgtcgaaggacggcgtgccgcgctggacgatcaaggcgatcctgaccccccagggccgcgcctccggcgctcccgccgagatcacgtactactcggaggaacggcccgaggtcatgggcgcggcgaccttcgacagcctcgacgtttccgtctggcatatgccagagcgggatatggcgggcatcgcgttgcgcggctcaggcctgcgatctctgggctcctcacgggtcgccgctgatgatggcgcggtggaattgtgatggaatgggccgatcttggtgaggagctggctccgacgcgggccggttcctccgatgagggtttgtcaagcgtcttcgcgcatcagatcgcggttttcgcggcgttcctagtgttcggtttcgtcatttgcctgttgtccttggacatggcaagcggaaatgcgtggaacgcggcgttgatcgacgcgctgttcgtcgccaccggggcgacggctgtggtctgggtgaccgcgtcgtgtcggcccgtgcgcgaatgggccggctatgtcggtgaaatgcagtccggcgaacaacgtgcgttgcaacgccaggtggacaatgtgtttgagaaatggcgggatggcacggtgcccgcacgggccggtcttatggtcgagcgggcgttgacgcccatcgagtcggcctggatccacgaacggttcgagttgcagcggggtcgcgccaggcaacagatccaggacggcgtgctgcttcgccagcggctcgccatgatcgacgccgccgagcagtccgatcgatgcgagtttcccggtctgcggctgttccatgatcccaagacctgtgttgtgacggccgtcgtgactccgccgccgtcgatggacgtggatcaggtggtggaggccgttccggcgttggcccagttgtggaacatgtccgccgacgagcctgtcgtgcgggatcgtgcggtgctgatacggcttcattcccaggcgaaggaggagtgggcgagatgacgttgaatgatggtttgtcttcgatggcccgcgtgcgcgttggcctgaccgggcatagggagccgatcgactacgacgtggccacgccctcgcacatcgccctggccggtgccacgcggtcgggcaagtccgcgctggcgtactggctgctgggccagttggcggccatgccgtgggtgcggatcgtcgggtcggatgtctccagcctgttgttgcatccgtttgccggcgatcctctggtggccctgggccaggacgatctcgacgcgcatgcgagggcgttggagggcgttgagaagctcatgcgggatcgtctcgaccgtctgctcgccgagcggtgtgacaagatcgacgagttcaccgtcgcttgtcctctggtgcttgtggtgatcgaggagttccccagcctgctggagctggcgaagaccctggacgcctcgacctcgcccaagggcaggctcgaggcccggttgaggtcagtgttcctgcggctggtcacccagtcggccaagtgcggcgtgcgggtgatggtcgtcgcgcaacgcatggacgcctcgatcctgcagggtgtggcccggtcgaacatcgagacccggttcctcctgcgctccgatgaagccgggatcgagatgatgatccccggcctggatgaccaacagcgctcgttcctcgcccgggcccggcccggcgtcggtttcatgacggctccctgcgtgccgcccaccctgttccgtggggtcgccgtgtcctaccagcagtatctggatcagttggaggcgtgcgtggccttgtcgtccgcgtcgcttcccgtggcggatccgtgacatgggccgcgcatgcggcgggcggggccggcgtgccgcgaaggcggcggagccggatcccgcccccggccccgccaggggccggggtgcctggcctagtgttacccaggcacttttgtgtctgtgtctttccatcccgttcgtccccgattgcaggcccttttgacccggaggggcttgtgtctggcagtgtgtcaaaggttgtgtccaatgagcaacagcaacaatccaaccaagcggagggccaagtcccggtccgcgtccgcggagggcaggaggagccgtggatggctgatcaccatacccgtcctggccaccgagcccgacgaccccgacgacccggccaggggccggcatcccaccggcgggatccggtacgagagggacatcgccgccgcgttcgccgactggccctggtgcggccagatcgaggagggggcgcagcgctccgagggcgcgtcccacggctacctgcactggcagatctggatggagaccgggaaccccaagaaattcagcaccgtgaagaaccggctcgccaaggcgggcatgccggacgcccacatcgaacccagggaaggcaccaaggcccaggcctacgcctacgtcaccaaggaggaaacccgtgtcaaccgcaccatcgaaatcaacatcggcgaaaccaacggtcccgacgataacggcaagtgacgccggcccgttcttccacggcctgtccgccaacgacataatcgacgggcagggcaaacgcaacgacctcgaagagctgcgcggcatggtcgaacagggcatgacccttgacgagatactgctcgcggacaccgacaaccacgcctcccgatgcgtcggatggctctcgcggctcatcgaggcgagggacaggtcgatctacaactccagcagcggccgcgacatcgaggtctactacctgtacgggcagacgggcgtgggcaagacctcctacgtgatgaacagatacgcgcccgaggacgtgtaccgcgtcagcgactacctgcatcccttcgacggctacgggaaccagaaggtgctgctgatggacgagttctccggcgcgctgccgttcgaccagctcctgaacgtcaccgaccggtggcgcaccaccctggccgcccgctaccacaaccggatcgccatgtacgacaccgtgtggatcgtgagcaacctgcccctcaacgaactgtacagcgagatcgaacggccccgacgcaaggcgatgttcagaaggttccgccaggtcatctacatgaccagacaaggcgacatgcaccgctacgaccccgacgagatctccgactacctcggcgaccccgagcaagccccggccggacgcttccatctcctcggactcgacgacagcctgagggccgaggacatcatatgagcgcacaccgccctccgacggatcctgccaccggtccgctggttttactgtcgaacacccacgtgccccacgtgttcgcgggagccttctggtcgagggtgaccgtatgctggccggggccggtgaacgtctccgtcttggtgcccagctgcacacctccggccgacctgatctggttgagataattgttgatgccggcgtcggtcggatcgccctcatagggcaggttcctgaggatcgcgtccttcgaaccggtgaagtaataccccttcgccgtcacgctcgtgccgtcgatccaatggtcacccgacttcacgccgaccgtcaccctgtcggtgatgggctgaccctcctgaatgacgtgaggggcctcggtggagatggtgggggtgaaggccatcgggggctgggactcgttcaccgcgacgcagatggccaggttattcaccgtgccggctgcggccatctcagccatgcccttgtcgaactcaccacgggcgaacttggttacgtcgccatcagtccaaccattcaaaaagaaccttacaccaccgttcggctgtgcctgagcctgagaccatctctgctcgaacagggacttccagtgcgcggcgttgtcgccccacatgaatccaccgcgcagcgaggtggcgaagccaatcacgcgcgccctttgatgggtggcgtcgagggcgcggttcaccgcctggttacaggccttctgaatcagaggcttgttgacaccagaatcactgacatccacgcctgctttggccagatcgctgagcagatcgctggtgttagcgttgtcccttgtgccccagccggtgggcggtttgcccgcagcagtttgagccagattatctttgagccacaggacgaagtcattcgggccgatgccggtgctgccgccaccgccgataatgacgccgttgccggagttgtcgatggcgttggcagaggaaacggccaccaaaccacccgtggcgagggtcgcgaacgccgcaagcgacgcaatacccctcctcagccaacccggcttttccttgggcggagtgggcttgctatgctctttgtatttcagcatatctctcctaaatcgaactatattgaccaagcaacgccgcgcacccaccgaacccaaccggcggcgcacgacctgcttgccccgaagcgggcaatcacaccacgagcatcacccgcgccagcaagagcatgcgtgaagacatggaaaagccccacctcaatgagatggggcttccaaggagaaaaatgactaaggtcagttgccaaggatggagcaagcaaccttggagcaatcaaccagcgggccggtgccgccgccgaggactccattgttgggaagttggctggagccactggaggagctgccgccgttgctggatggcgtgtaggactgctgcggggcggaatacccacggttggcggaatacccgctgccggagccgccgtaacgattgtaggactgggagtaggagcgttgcggctgcgcggcggcttgggctgcctgcgcttgggctgcctgcgcctgctcctgggcttgggcttgggctgcggcctcggcgtcagcctgctccttcgcggccttcgaatcggtcacccgcctgacggctgcgtccagcttcgccttggcgtcggtgtacgtcttcgggtcggtgacgcccttcttggaaagggtgtcgttcgcctcgtcgatcgccttcgcgaggccgtcgcgggtggcgttgtccgccaccttcccgtccgtgtccttgagggtctggctcgcgccgtcaatacccggcttgagctggctcttggcggtatccagctccttcgccagcttgctgtccttgacggccttgagcgcggcatcgagcgccttc

SEQ ID NO: 1502 - DNA, 2765 bp, Unknown
  R257_15m  MAG No. k141_43518
gcattgatggttccggtgtgaaggtggcggtgctggattcgcaggcggtggaggattatcccgcgttgaagcatgcctcgatcacatacaagctgggacgattccataacgtggatgacaagacggtcgagtgcaaggtggacggcaagccgttgaccgcgacgatcaagtccggtgaaggcggctactactcctcgcacggcaccgacatgctggcatggatcgtgggtgatggaagcaactacacctcgaagtggcccggaatcatggggtcggcgcccaaagcggacgtgttgcatattacggatggggcggttaatgcggggcctgctgtgacaccttgcgatcagaaactcgcgggtgatgcgacaagcgacagtggtgcagatgtcaagacggcggtggactggggcgctcgcatcctcaaccgttctcagggaggtgctctcgtcagcacggattatgctgggtatgtggatgccctgcgtcatggggtcgtcatggtcgaaggacgtgcgaatgacatgaatcccggcttggatgatctgaccggcgacccgcgcagcatggagaccttccccggtgtggtgatggtgaacagcgtggacgagtctgggaacctagctcccacctcggatgttatggacggcaatgtggcggtgctgtcctatggcatgaacgtattagactcggtcaatcctctttcgaatgtctacgatatcgcgggcaatggcggcacgtcaaccgcggcagcggtgttgtcatcgtacttggcgctggccatgcagaagtggcccgacgcgacgggcaaccagatcatccagtctttgatacgcaacacgaagagcggcaagggcaagccggtcattgaccctgaacgcaagcgagggttcggtgaggtggacctgaatgcgttgctgacggttgacccggcccagtacaaggatgtgaatccgattctggagtaccagatgaaagcggccgcccaatacccggatctgaaggactggtacacgcaggattgcaagacgaacccggacggcgttggcaccgcggcggataatgtcccatgtgaggccgggctcatcgggcgggagtatgagcgtcagcaggcggcgtggaagaaggtggagcagtgccattccgatggcggctccgactgcatgcaatactccgcgacgaacaccgccaatggtgcgaccacgtcaaccaagacgctgggaagaaagggtacgttccttgtctcgacgtggctggcttacatgattgctggtggtgtgaccgccctaatcgccggagtggtgattgcattgatcttcgttcatcgtcggcgtcgcgctgactaatgttggcaggatggtattgtgagcggtaatgatttggtagcgtaggtgccacgcgtaaacggccttcggggcacagaccccttcggaagccaaggccacggttccgggttcccccggccgtggccttttccatcgctcgcttggaaggcggattatgaaacgtgacatctccggatggctcggcgtcgtcctcctgctgctcggcgggctgacgctcagcgcaccattcgtcctgcaagccatcgactccgccgggcagaccgcgagcgccgaggccgcagccctgcccacaccggacggcaggggatgatcgaggaagacaaggcatacaacgagggcctttcggcaaggccgcagtcggtgcttggcgaggccggggacaacttctcaaggacctcatacagcgggggggacaaggagtaccgtgggctgctcgacgtggacggcaagggcacaatgggggcggtccgctatccgaggctgcacatagcctgccggtgcgccacggcacggactccgccacgctggagaagtcagcagggcacctctacgggacgtcgctgccggtgggagacgaatccacgcacgcggtcatcgcggcccaccggggtctggcggacaggctgatgttcacgaaccttgggctcgccaagaaaggcgacctgttcgagatcgacgtgcagggggagcggctgcattacaaggtgacgaacagcatgggggagtccacgcctttttgcttgcgtatggcgagccattcgtccagcgccccgcacatcacatcgtccaagaccacgattctctcgccgctgtccgtcttgggcgggcacagccagaagccgttgcccagatcggtcacgtcctcgcccagaggccagtccgccctcctagagtccgggacccgctgcaactggtggtcgatcaccaaggcgcgtctgccgttcagcgtcgtcagttcgtccatcgtcagtccgagccgttcgccctgcctcagtccggtggcgaaggcgagcagccagttgagacgccacatcgggtcgggttcgttccttatcagctccgccgcctgcgcgggggacaggaccttcatcggcctgcgcctgcccgacaccggacggaccatcttggccgggttcctccgtatgaggttttcgtcacgcgcggcctcaagcgcgttcttcaggacggaccaagtgatcgtggccgtcttcgggctgtagcacttcaggccgtcctgaatggcggccatatcctcgtggcccagcgagttgatgcgcctcgcgccggctatcctgttcagccgcacgatggcgttctcgtagcttcgcctgctgttcggacgcaggttggcctcggcccgctcgtggtaccaagtctccagccagtccatgaggcgcggcgacggcgagttcggcgtga

SEQ ID NO: 1503 - DNA, 22892 bp, Unknown
  R257_15m  MAG No. k141_43622
ggatcgccacgaggccgattacctgctggcccccacccacgaggagatgttcacccttctggtcaaggacatgtactcctcttacaaagacctgcccgtcaccctgtaccagatccagaccaagtaccgcgacgagttccgtccgcgtgccggcctgatccgtggtcgtgaattcatcatgaaggacgcctactccttcaccatcgatgaagaaggcatgcgcaaggcctactatgacgagcgcggcgcctacgagcgcatcttccagcgtctcgacctgaagtacgtacctgtgttcgccatgtccggcccgatgggcggctccgcatccgaggaattcctggctccgatgccgatcggcgaagataccttcgcgctggcgccttccggcaaggcatggaatgtggaggccctgagcactccggagctgccggaaatcgatgcttccgccactcccgccgcttccaaggaagccaccccggatgccaagaccatcgataacatgattgagcgtgccaacgccgaccacccgcgtactgatggccgtgaatggcaggcttccgacatcctcaagaacgtggtgattaccgtcaagcaccctgaggatgaagagcatgacgagccgtggcgtgaagtgattgtcgtcggcgtgcccggcgaccgtacggtggatatgaagcgactggaagcccagttcgctcccgccgagcttgaggaggccactgaagaagacctgaagcagcaccccgaactggtgccaggctacatcggaccgatggtgcttggcccgcaggccgaggctgctggcgtgaagaacccggttcgctacctggtcgacgcgcacgtggtcaagggttccgcttggttcactggtgccgatgagaacgaggtcgactactacaacctggtgtacggccgtgacttcaaggccgacggcgtggtggaagccgttgaggttcgccacggcgacatgagcccggacggttccggtccgttgagcttcgagcgtggtgtggaaatcggccaggtgttccagctgggtctcaagtactccaaggcactggacctgaaggtgctcgaccagaacggcaaggccgtgccggtgtggatgggctgctatggcatcggtgtttcccgcgtgctggcctgcatcgccgaaacacaccacgacgaagccggcttggcttggccgtccgtgattgccccggctgccgtgcacgtggtggccaccggcaaggacgccgtggcgtttgaaggtgccgagaagctggtcgccgagcttgaggccaagggccttgaggttatttacgatgaccgcaagaaggtgtctccgggcgtcaagttcaaggatgccgagctgatcggcgtgccgctggtcgccgtggtcggccgcgattacgtcaacgacggcaccatcgaactgcgcgaccgcaacggcgaaaacaaggtcgccgtgcccgccgccgaagccgccgacgcgctcgccgagcgcttcgccgccctcagctgagtcccacttactcagcctcggcgttaatcgcatcaagcgccattctgcccagtcgcagaatggcgctttgttgtggataaccgaaacttatccacattcttaaaatttcaactgcgtcacagtatccacatttgccagttgcccttgtgcacttcaaacgtcatgcctcacagtggaggtaccgctggggcgtgcaagccggcaatgaagccggagacaggctccggcggtccacatccaaacaacaggccagcaggccgaggaaaggaccgatcatggcaaatcaacaagcagcagtgaccgtcaccggctttgtggccggtgatccgacactaggcggaactgagagtttccgcgtgctgacattccgtatgggcagcacccgcagtcgactcaacccgactaccagacaatgggaggattacggaaccgcatgggtgggcgtcaaagcgttccgtgctttggccgtgaacgccgccagttcggttcgccgcggtgaccgcatcattgtggtcggctcactcatcaccgagcagtggaccaatgagcaaggcgaaccgcgcagcagaaccgttctcgaagccaccaacattgggcatgacctgaccttcggcaccacgtcgctgatcaagccacagcgtgccggtaatgggaacggaggcaatggtggcaacggtaacggcaatgccaatggtgccgccgaaggcatggatggcggaaacgggcaacgagcatcgtcaccgcacatgaggccaacgcaatatagtgtggacggtgccgcatccggtgtgggcattgacccgtatgcgacctcgtcggaatctggccccgtcgaatttggggtcacctccgattccggccaatcgccgtcgccatcaaccgagtcagcggctgcgtccatggccgatgccgtcatgtcgcaaccggacgctggcgctaatcagccacagtccgcagcccaacaaacctacgtcgacggtttcgccgaatcttccgatcccagcgaatccgaattctgagtgccaaccatacatcatgaaaaaccgctgtgttcgcctgtaatcgaggcaagcacagcggttttctcttacataacggggattaccaaatgctcacacggtccttgggcgcgagccacatggcgtcgccttcggtcacgccaaaggcatcgtagaagaggtccacgttgctggcgatgccgttggtgcggaattcggccggagaatgcgggtcgatctgcaggtactgttcggccagctcgtcgcggttcttggtgcgccagatggaggcgtagctcaggaagaagcgctgcaggccggtgaatccgtccatttcgggggcggtatcgaacagtgccttgatggcggcgggggagccgtcttcttcggcgtcgggcttacctgccgccttgccgagcgcgaatgcatacgccttgagcgcgatgttcacgccgcccaaatcgccgatgttctcgccgatggtcagcgcgccgttcacgtgcggcgccttatcaggttcgtcagcgtacttctcggccagctgcagcggcacaaagctgttgtactgggcgatcaatgcgccggtgcgggcctcgaagttcttgcgatcctcgtcggtccaccagttgttgagcttgccgtcgccgtcatactgcgaaccctgatcgtcgaagccatggccgatctcgtgtccgatcactgcgccgatgccaccataattcgccgcatcctcggccttcgggtcgaagaacgggggctgcagaatcgcggccgggaacacgatgacgttcatgcttggctcgtagtaggcgttcaccgtctgcggattcatcagccattcgtccttgtcgaccgccttgccgaccttggccagctggtagccggtctcgtacaggttcgcggccttggcgttctcggcgggcagcgcatccgcggagacactcagtgccgagtaatcgcgccagtggttggtgtagccgatctttggcgtgaacttggagatcttctccagagccttggccttggtgtcttcgcccagccaatcggaattggcgatggacacgcggtaggcgtcaatcagattggcgaccagctcttccatgcggcgtttcgagctttcggggaagtgcaggcgcacatactcgcggcccacatcttcaccgcagacgccgttgaccaggctcaccgcgcgcttccaacgatcgcgctgcttcttggcaccggagagcaccttgccgtagaagtcaaagttggtggtgtcgaagtcgcgagacagggaggaggcgaagcccagaatcatgtgaacacgggcccacagcttaaggtcggccagatcggccttggcccagaacgcatcaagaccagtgaggaagctcggctcgtgcacaatgacgcgcgcgaacacagacttgaaatcgatcgactgagccttggcggcctcggtggcgtcataggcggtctgccaggcgtcgatccaggaaccgagatcgaagttcttcagcgtggcggccaaatcggcgtaatcggtggggttgtaggtcttcaccgaatcgcgcgtggccacattgtcccaatgattggcggcgatcttggtttccacggcaaggaagtgtcgggccatatcaagtgcggcttcgctgggaaccgtggtgggagcattgctctcgtcatcgccggtgttggccggcagttcatcgccaccgttggattcggcggcgggcgcgtacccggcgttcaccagctgggtggcgaccatcgccacgtatgcttcgcgcacgggggcgtagtggtcctcacgatagtaggcttcgtccggcaggcaaaggccggcctgctcaaggtgggcgatattgcgatccgggtcgccggggtcgccgtaaacggccaagccgaacaggtcggggccgccggctgggttgatggtgccgagcacgcgcgtgagagcggccttgtcgatggcggaatcgatgaggtcaagctcatcgcggatcgggtcaaggccggcggcctcgatggcgtcggtgttcaggaacgaatgatacagagcctgcgatttggtggccgggcagtcgtcggcgtcgaggatgtcgcgcacttggttttcggcgtcttcggcgagcttgtcgaaggagccgtagcgcgaacgatcgtcgggtaggcggtaggtgtcgatccatggaccattcacgtagcggaacaggtcattggtcggcttgatgacggaggagaacgatgccgggtcgatgcccgacgtcagcgtttcggtttcgttggtcatggccctaagcctaatcgcggcgggggagaagcgctgatggtgcgggcattacgttatgggcattgcgctgtcagtgaactagacagattacctagttgtggtgatggttcgaattagacaacttgcctaacatagtatgtggaacctgaatatggaccttgagttaaggagttacgatgagcaatccaaacgagggccagtggaatggccagaagggtcagcccaaccagagccagccgaatccggcgggccaaccgggccaaccgcagtatggcgcgtatgacagcaatcatggcggccaatatcctccgcaaggtgcgccgggagcgcaagacactcagaatcagcaggcgcagaacggccagccacaaggcggaccgaaccagaacccgtactacggcccgtacgcctacaatccgaactacggcccgaacggccagccggcatggggtccggacggtcggcggtatcaggcggacggccaatcgaatagccaagcggacgggcagccgaatggttcatggggcgatcaaagtcaacccggctggcagcagaccaactggtatgtcggcaatttcagtccattccacctgatcgaggaatggctgccggaaaaggccaagaccaagattcgcatcatttacggcgtggtgggcgtggctgccatcgccttgggcgctgcgctgttgttggtgccgaacaagacgctggctttggccgcattgttgctcggcgtgtatttcgtgatttccggcgtggtgcgcatcgtcagcgctctcgtggagccgggtctgccgggcggctggcgtgtgctggacgtgttcgtcggcattctgctgaccttcggaggcgtcgtagtcgtacgaaactacggtatgaccggtcagaccttggcattactcatcaccctgatggtcggtttcggttggattatggaaggcgtgatggctctagtcgaatcatggcgcatcccgcgctccggctgggccatcgcctatgccatcatctcgattatcgccggcttcgtggtgctgatgagcccgctgagctccgccgtattcatgattatcttcggcggatgtgccatggtggtgatggggattacttcagtgattcgcgcgttcacttttggcaagcgcaggaagtgatctcgcgctccagacaatcaatctccggacaatcaatccaaagcgcccgtgcagattatgtatctgccgggcgctttttctcggccttggccgttgataggctactagcggaccctaggcagaccacgggtgatgctctggcggttgaccccgggctgggctagagttgagaacaagtctcaacaaggtagaaagaacctcatgatcgaattgaagacccctcgtgaaatcgaggaaatgaagccggccggccgtttcgtcggcggcattctgaaggaactgcaggagaccaccaaggtgggcaccaatctgctcgaaatcgacgagttcgtccacaagaagatcgtggaccgcaagggcgccgaatcctgctatgttgactacgctcctgacttcggcaccggcccgttcgcccactacatctgcacctccgtcaacgacgccgtgctgcacggtgtgccgtacgattacagcctgaaggacggcgacctcgtctccctcgatctcgccatctccgtggatggctgggtggccgattccgccgtcagcttcgtggtcggcaaagacccggaccccgaagacctgcgcatcatcaagtgcactgaggaagcgctcgccgccgccatcgacgtggccaagcccggcaaccgtctcggcgacatctccaacaccatcggcgacgtcgcgcgcgaatacggctacccgatcaacctcgagttcggcggtcacggcgtgggccacatcatgcacggcgacccgcacgtaccgaacgacggccgcgcccaccacggctacaagctgcgcgaaggcctggtcatcgccatcgaaccatggttcctcaagaccaccgacgagatcttccaggatccgaaggacggctggaccctgcgtgcctccgacggctcgcgcggtgcccactccgagcacaccatcgccatcaccgagaacggcccgatcatcttcaccgatcgcaccaacctctgattggcgtttggcgtatggcgggtgcctgattggcctgtgatgggcgatcggcatctcatcaaccgtctatatgtttgcggttttcccgcgaattcgagacgtaacaagccgaagtgcgtttgctttgatagcatgagcgcacttcggctttcgtgtatcgaccggtgtctgccggcggtaacacagaagacataaagtaccgaacactagcgttcgcgaacgcgtgaacgttaatgtttggggtaagtggttcatgaagaggaaggtgcgcgaatggcaacggcacaacttgatgtcgattcgaacaagttcaacctgcccgtggtgaaggctagtgcagggccggatggcatcgtcgtttccaagctgcgcaatgacggctgggtaacgctcgaccccggattcctcaccaccgcacagtgcgaatcgaaaatcacctacatcgacggcaagcattcgatcctgcgctaccgtggctaccccatcgagcagttgtgcgagaactccgattttctggaagtggcgtggctgctgcgccacggcgagctgccgagcagggctgagtatgagcagttctgcgcggacatcaaccacaagacgatggttggcgaagacttccgtaccttcatgggttcgttcccgcgctccgctcatccgatgagcgtgcttgcctccgccatcaatgcgctggccacgttctatccggacaccaccgatatctccgacaccgaccagctcgatgaggccgccaagatcatcatggccaaggcccgcacgattgtgtcgtacatcttccgccgtcgtcgcgatgagccgatgctgtaccccgattacgcgcgtggctatgtggacgacttcctgcgcatgtgcttcgctgtgccgtacgagccgttcgaatctgacccgttgtatgtgcatgctttgggtcgtttgctgattattcatgccgatcacgagcagaactgctcgacctcggtggtgcgtatcgccggttccgcccacgctaacctgtattcggcggtggccgctggcgtcaatgccttgtccggaccgttgcacggtggcgcgaatgaggccgtactacgccaattgaaggcgattcgtgattccggtaagtctgtggccgagttcgtgcgtgatgccaaggaggatggccagaagatttccggccttggccaccgtgtatacaagtcgtatgatccgcgtgcggcgattgccaagaagtatcttgagaagatcatggagcgcgaggatacgcagaaactgccgtccgacgagcgtgcgttgttcgatgtggccaccgagcttgaggatattgcgttgaacgacgagtatttcgtatcgcgcaacctgtatccgaacgtcgatttctacacgggcttgatttatcgggcgatcggcttcgatccggccatgttcaccacgctgttcgcactgggccgcattcccggttggattgcgcagtaccgtgagatgctggccgacccgaacaccaagatcggccgcccacgccaggtctacaccggtccggtcgagcgcgatttcatgccgatggacgagcggtgattattggtttgagaaagcgcttcgctggagattccagtgaagcgctttctatatgtacagcgcaaaccagctatgctgcgacggctgcataagaacgagcagggctagttctgaaattgaaataatgtgtgcggtatcgaagcgtaccgagggaaggcgtacggaagtacgtcgaccgaggagcaacgaagataacgctccattatttcaatttcagttcttgtgcagcttggcgttgagctcaattcccaccttgcggtagcgggcttcgatacgtccattcaccgagttgcggatgaacaggatgttgtctttgccggagagctcagcacccttgacgacttcgagcggctcgccggctgcggccttggccttgtcccagatgctgatcttggtgccggcggtgatgtacagaccggcttcgacggtgcagttatcgccgagggagatgccgataccggcgttggcgccgagcagcgagtgctcgccgatggagttgcgcagcttgccgccgccggagagggtgcccatgatggaggcaccgccgccgatatcggaaccgtcgcccacgaccacaccttgcgaaacgcggccttcgaccatggagacgccgagcgtgccggcattgaagttcacgaatccggcgtgcatcacggtggtgccggaagataggtaagcaccgaggcgcacacggtcggcgtcgccgatacgcacgccggtgggcactacgtaatcgatcatgcgcgggaatttatccacaccgaacacgttgacggtggtggcaggagctgcggcaggcagtccggcctgagcagcgaaagcgagagcggcttcggtggaggcgcgttcgacatcggccttgcgtagtgtgaagtcctcaacggcgaaaggaccgtagttggtccacaccacattggcgagttgggcgaagatgccgtcaaggttcagcgtgttcggcttggccatgcgcatgctcatcagatggagtttcaggtaagcgtccgcggcgttgctgatcggctcgtccaactggctgacgacgaataccggcacgcggcggatgccacgggcgtcggcttcatcgtgagccagagtgccgaaattgtggtttggacgatcggcctcggccggtgcctcaccgagattcagttcggggtaccagacgtccagggtggtgccggcggcgtctacgctggccagaccccatccccatgcggtacgctcttcgctcatagttgctccttacatatcgttgcgtttgcgttgcatgtgcatcgcggcatgtgatggttccaccttagcgtcaagtacggctaggcgggggccatagttcgtggaatggcttgaaatcgagttgttcggtaaaaaattaccgaacgtgattggcgatgggatgataggttctccggtgaaattcgctggtgaacaactcggcaaggaggtgtgcgatgtgatgctgcatcattcgggagcataggctgtggccatgcgacgcccggcatcatagagtttgcgcttgagcgaatcgggctcaagaatcactacgcggccatcccaggaatactgcaatgcccaccagaacacggcgcgttcgggagcatcgacgatgacttcgaactgtgtgccgtccggcgaatgtttgatctgagggtcgtcgaaccattcgaacacattgttgagcatggattcgtctcgtacggccatgcggatgcgaatcggggcatcggctacgggatacgggcggtgacgcatgaagttcactgcgtcaaaatcagcaggcgctggtttttccagtggaactgtgccgttcctgcctttggcgctgacgttggcgattcggttgaccacgaaaatgcggagattatcctcgccatgtagatggcagatgaggtaataccgtccgttcttgtacaccatctggtaagggtcggcggtgtaggtaattcgacctgcgcccgtacggcttttatgcggtatcagggtgccgtccgggccgtaatcacggtattggaaggttacgccgtggccttcttcaatggcctgattcagttggtcgatggtggataggaactcgccgttgatatgcgtgtaggtggccacgtgctcaaggtaacctactgcttgcccagcggcacctgcgagttcgcggattttaccgatgagatcgtccatggtgtcgaggctgatgcgagacaaggtgaggctgtcgagtagcagtcgcatttcggcggtggataggaatgcgtcaagataccagccgggttgtggattcttgcattcgatgccggcaaggtcgctttcggtgagatgcccgatatgtctgccgagaaattccgtggcggtaagctttttgagctgatttcgtatggttttctcggtcggcagctcgcttggatcttccagctggtgtttacgggcaagttcatcgagtatttgccgcacggtcaggccatgtccaaagtagctgtgacgccacagcacctcgaagatttcgagggtggtgttccctgcataggatttgcgttgcgccggcttgtctgcatccatacattaaggctaccgcgcgcctcgtctaggatagaagtgttggactgaaatgcattcgctggaaaggaggctcgcccatgagcaaagggtatggtgtatttggccatgttcccgataatgcggatgacgatgacctcctgccttatgaggatgatgattccggcgtttcctggggccatgcgttgcgccgtcgcaatccttggaaaaggggaggcgacgaaggtgccgattacgacgatgatcggtatggcgcagatgacacagatgacactaatgaggacaggggtctctttgccggcaagagcagcggtataggcggtatctctggcgaggcagatggaatgcttggtggcgcaggcgctgccggcagtagggccgtaacgtttggtggaacggacagtttgtccgccgccgatgcggttatgccctatcgtttcaggcaaggacgttccgtatggttcgaagatgaggacgaaggccatttcgccggggctgcgaagcgtgccgaagcccatgccgtccctatccttgcgttacgcaacgatgtggaatcgtcatcgtcgaatgccgtgctcgctcgtgcccgtagcattgcgcgcaaagcggccaccatggttatcaatccggtatacagcgaaaatcatcgaaccgggtatgccgagcttgacggtattctacgtggcaccaccagcccatcgagtaggtatcgtaccagcgtgcaattcgacctcgatacgggagaagccgtcggtggcaagtgctcatgcccggcttacggccgtggctatggcatgtgcaagcacatgattgcgctcgccttcatattctgcgatgatccgcagcgttttgaagggtaccgtgccggggctgtgaggccgtctcggacgctgatcgactatatggagcacgtcgataggcaagatgctcaagccaaagcgcgtcgccgcaatgcgctcatgcgccgattcgatactgcaaaaagacgaaatggcgcaggtggacgacgtacgaatagcggatacggctctcgtgccggcacccgaggcggcgggtatcagggcgatagtgagactgtgggcttggggcaggtgcagcttgttccgatattgagtttcatcgatggcgtgtggagcgtggagttcaagatcggatcgacttccaatgggtccagctatgtactgaaatcgattccgcaatttgtgcttaccatggcgaacggcgactatacggattatgggcagaagcttgcctttacccatacgccggatatgttcgacgatgattcgcgcccactgctgggcttccttgacgacgcgatggccgtgcgtcgtgcggccgagcagcaggaccggtattacgggcatatcgccatcgatcgtcacctgacactttcagcaccggaagtggcccggttgctgtccgtacgtgagggcagaggcgtacagctcgtgttgaacacatggttctccgggcagcctgcatcggtgccggttgatggtggcgagccagattttcttatgcgcattgcgcggcgtgatttcaatacgtatggtccggatgccggatacctgcttgccggagtgccggcggtggaaaccgtgattgatggtggcaaggatgtatggctgttgctcgcctccactaatccggccggtgcggtatccgccatgatggcgggctctcagcgtaaaagcgcagcgggatgccgattcgtccgttgcccgaaacgattgattccgttgcgaggactattgggagacctgtttgaacccgatggcgaggggcagatcattgccggtgatgacatcgccctgttcgcacgcacgctattgcctcagctggttggtgccggactgttggaggccagtgagattcctcgcgagctggctgaattaagtcctacggaatgcagcctccagttttatctggatcgtgatgagcatggtgtgcaatgcgaggtcaaggcacactacggcgatgccattgtcccgttgctacccgatggcccgacggtgcatgctagggatgagcgttccatccccttgtctcggggcgtgattgggcgtgatttcgacgctgagcatcttgcgattgatgtagtgcgtgaattctttaccatgcctgaccagcgcaagcgcgttgcggccgccactcatcagacggtgaatgggttccgaacgccggccgcgcgaaagaccgccaaacaattcgtgtctgatgcggccactatcgatcgcgatgacaccacgcagatcgttcgtctttttgacgagggattgcccgcactgaaggaagtaggggaggtcttcaccacaccggcttttgaccggctgatcgcgcccaagccgccaagcgtcaaagtcggattgtccatcaaaggcaatttggtggagatatcacccctcgctgatgaagtaccgccggacgaagtgggtgccttgctgtcttcgtatcgtcggcgtcaacgattccatcatttgaaggacggcacgctggtcaaactcagcggcgcgaatctcagcacgttggaccgattggccagcgaccttgatctgagcgagcagcagctcaactccgggctgatcgagttgccgggcggtcgagcattcctactggatggtgagctgccggatgacggctccgatgtagtcaaggacgcttcgttcaccgaatacatcgacgatctcaagatcatcgaccctaagtcgtatgaagtgccggatagtctcaagcatattctgcgcccttatcaggtcgaaggcttccaatggctgaacacgttgtgcgacaagggttttggcggcattttggccgacgagatgggtttgggcaaatccgtgcagcttatcgccctgttgctgtcgcgataccacaacgaatctagtggcatgccgaccgctcaaggcatggatgccggtaatgctgttaatagtgaatcagccgtaaccggtcatattactttcgattccgaagatggcgggccgcatccatcattgatcgtgtgcccggcgtccttggtgtacaactggggtgccgaattcgccaagttcgccccgagcttcaacgccgtggtggtggccggtaccaaagccgagcgccgcaccgccatcggccgcgcgttccgggcggatgaacccaccgtgctcatcacctcatacgacctgctgcgccgggatgtcgatgattacaccgccaatgagcaacgtttcaatgtcatggcgctggatgaagcccagtacatcaagaatcacaccacgaagatagccaaagcggtcaaggccgtggccgccgaccatcgtttcgccttgaccggcacgccgatcgagaaccgactctccgaactgtggagcatcttcgacttcctgatgccgggactattgggctcatacaagcgattccatgagcgctacgagttgcccatctccaacgcccgggctgcagatggcagcacggccgaaggtcgggccgccgcacaggtcaatcctgaggccgcccgggtgtctcgccaattgcagtcgttggtgggcgtgttcatcaagcgcaggttgaagtcccaagtgctgaccgatttgccggacaagttggagaccacgctgaccgtgcagcttgccggcgaacagcgcaaactgtatgcggcccacgagcagcggctcagaatgcagctcgaacacagcgaagaagccgatttcaacacgtcgaagattcgcatcctcgccgagctgaccaagttgcgccagatctgctgtgatccaaggctgctgtatgccgatgccaaggatcagtcggccaagcttgccgccatcaccgaactggtggaaacctgcgtgaatgaaggcaagaaggcgctgatcttctcccagttcaccagcttccttgatctgatcgccgaacgtttcgacgcgcaaggactacgctactacaccatcaccggatccacgcctaaaaagaagcgtctcgaactcgtcgaccagttcaatgcggacgatacgcccgccttcctgatttcattgaaggccggcaacaccggactgaacctgaccggtgccagcgtggtcatccacgccgatccatggtggaacgctgccgcgcaggatcaggccaccgaccgagcacatcgtatcggccagaccgaagacgtcaacgtgtatcaggtggtggccaaggacaccatcgaagaacgcatcttggagcttcagcataccaagagcgagctcgcccgccagttcaccgatgcttccttgcttgccgacgaagctggcaccggtgccagcgccctcaccgaagcccccgcctccatcgccaccctcaccaaggacgatctcctcaatctgctgggatgagaagatcctgctcggtgctcttgagcttggtgatggaaacagtctgggctttgtggacccgttcgctaagccgagaccggagtcgatagcggtgtggcatggtgcgtgcgtggggagcgtgattcagttgttggctgaggcgattcggacgctgtcgttttgtgctttgttttgccgttgaccaattgaaatgctcgttggtaggagacccccaataaagctccgatttgtcgatacgtgagtccctcgttgcgtagggaccgtgcggcgagtcgggattcggcagccgcttgtgcgttggctttttttgctatttcgcgctgccggaacatttctgttacgtgttgtttggcttgtttcggcaacacaaacgtcaccttgagctccggattgtcgtcgtcgttcatgacagtgatgagatctttagccattggctcgatatcgtcaagtcctttggcctgggtcgaccgttcgatagctggtacctgaacgtaccaatatcggccatcgggttgcacaagcacgtcatagttgctcattgccaccacccctttccgagtttctgctcgctctcgttgatgatatccagcgtggttcgttctgagacttcattatggcgggggatgggtatcctcaacccgtccaggcagtaaacctcatgtctgctgccttgccgtaacaaatagaaatcgagccctcgctgctttgccgcttgccgaagtttcttgatgatgagttttcttcgtgtcatcataactctcaatctcgcactagacaaaatgcgtatgccgaattgccgggtgggagttgtgggtaaacgtagagatgttcattggtccttctttctgttgtctgacgcgtcgttgcgtgcgggtgcatctgacggtatgggatgaggtttctgattggcaagctgaacggggggtatgtggttctagcttccgagttatccacattgataaagtgcttttttaaagtgactttcccgtgttggtcgtggatgctgcgagcaaggcaagaacggtcgatcacgtcgcgatgtgtgtgggtgaatggtgaaagtgattttcgatatttttatattgatattcgatatattatgatggtgacatacggggcagggcaggttcatccattgatattggattaaggagcatagccatgaacgctggtatcgcattcatctctcgcaaatctcgcaaagcagacgtcgcttggcgctatgccattgcacttggtcggtggcgggggagtcggcgttatgttcgacgtcagtgccgtcattggcagatagcgcaaccgccacgaacacaggggtctgatcgttggccagaatcgccttcaattcctcgtccgtgtatttcttgacaccgcctttgaacagatccggtcggccggcatgatgcacttcgagcacctgccgcagcagttcgtcgatttggggaatatcggccgccgtggccctatgaatcatcatgtcatccatttgattcggtctaatcgtgcagtctcgaccggcagatgatcattgcccgcgataagagacacggacgggcaagatgggtgattgttcgttcaggctttcatcctcgccgcaacgtcacggtagtctggagtgcgtgaatcgcaagaaacagctagtggagaagtatgagcggggcacccgttcgtacacgatgtcgcatattcgtggcaaagacaccaaaatcgaggtgctggtacgcagctatctgtttcgcaagggtttgcgattccgcaagaacgacaagcgttaccccggccacccggatgtagtactgccgaaataccacaccatcgtgttcatcaacggctgtttctggcatatgcatgaaggctgttccaaacattcgatgccgaaatcgaatgtggaattctggcagacgaagctactgcgcaatcacaatcgagacatcgcgcagcgggctgaactggaggccgccggctggcgtgtaattaccgtatgggagtgcgaattaacgaaagccgtgcgtgacgaacgcctcgcacggctgtatgagcagattgttgaaggagatgcagattcagcggaataatttcagctcccctctggaggggagctgaaatcagacctcaaacgggaacttcaggccccaacggtcgcgaatcgcatccatcagctccatgatgcggatggtgtcggcgtgcggcatcgcctcgcattcgatcttgccatccagcagcgcgttggctgcatcggccacctcatactcataaccggtcaactgcgacggcaccgcaacactgcgcacgggcttgtgatcgttgttgtagatatcgatggactcgggattgttgatattggtgaccaccaaatacccttcggtgccccacacgtagccgccgcgatcggaggaaaccagcatcgaactggtggacacggccatcgtgccatcatcgtaatacaacgtggtggaattctgtgcatccacaccggtttcggcggccatcatcgacgtatcgaaatgatccagcgtgcggccatggtcggcaccgatcgccatatccaggaagttcagcggatacacgcccacatcgagcagcgcgccaccggcacaggccggatcggtcatacgtgccttgccggacaccggatagcacaggttggcgctcgccgctttcacctcgccgatctcgccggactcgataacttcgttgatgagcttgcggctgggcatgtagcgcgtccagatggcctccgtgcacagcatgccggtttcctcggccacggccagcgcctcacgtgcctgcccggcgttcgcggtgaacgacttctccaccagcacgttcttgccggctttcatacacaggatcgcctgttcggcgtgcagactgtgcggggtggcgatatacaccagatccacatccgggtccgccgtcaactcctcatacgatccataagccttgtcaaaatgccattggtcggcaaaagcctgcgcgcgcgtaatatcacgggccgctaccgcatacgggtgaatccatgaggaatacagtgaaccttcagccatctgggtcagggtgtcggccatggtgtgagctatgcggcccgcacccagaatcgcgacgttgatcttttcgccgctggcctcgaactcggcgcgtttgccattgaatcgactcattattcctccttgaatacgggttggtacactcaatcggcctacagtgattatagaagaagaaaccttgtcccgtgaggcggatagaaccgaaatatggaaaacgaagcagcgcagcagccccaatctccggccgtgtctccagtcatgtcccgccgagcgcgtgaggccaatcccttccgtgccatggtattcggcgaacaagcagacaagatgatcgcccaaggtatcagcgtcatcaaattaagccttggcgagcccgatttcggcgcgccgcccgccgtacgcgacgccatgcgcgaacagtacgacggccgggccctgccgtacaccgccgccatgggcctacctgaactgcgtcaagccatcgccgacttctaccgcgagcgtcatgaccttgacatcgaccccaagcgtatctgcgtgaccgccggcggttcggccgccctgctgttggccaccgcgctgaccgtggaccccggtgacgatgtgattgtggccgacccctcctacccgtgcaaccgcgaacttgtgcgctcctttgaggggcgggtcatcgacgttccgacctcggccgccacccgcttccacctgaccgccgacctgtgcagccagtactggacaagcaagaccaaggccgtaatgatcacgtcgccgtccaaccccaccggcaccaccatcgacttcaacgtattggacaaggtgtgcaagctggccgccagccgcggcgcatggcgcatcgtggacgaaacctaccttgatttggccgaccgtgagccggacggcaccgaagtcaagtccgtactggcctgcgatcccggtgccatcgtgtgcaacagcttctccaagttcttcggcatgaccggctggcgtctcggctgggctattctgcccgacgaccccaccgtgctggaagcggtcgacgacctggccaccaactactacctgtgcgcccacacgcccacccagcatgcggcgctcgcctgttttacgccggagagtttggccgaatgtgaagctcgtcgtcaggaattgcttgcccgtcgccgcattgtgattgacgggctcaagcgcatcggtttgccggttgaggtggagccgaatggcgcgttctacgcctacttcaacatctcccgtactggtctggatgcctggacgttctgcgaacgcgcgctggatgaagcccatgtggctctgactcctggccgcgacttcggtgcggccacagcggatacgcatgtgcgcctgagctatgccgcctcacgtgaggccctgaccgaggggctggaacgtctcggaacgttcgtcgaatcgttgtgaacggcgcggcagccggtgtgattgttgtacagtagtcgagtttgtgtgatgttcggctggcctcgcggtgttggttgccggccgaacgactcgccatggtggcgcacggctggctgattgcgatggtcggcccgttgttcggccatcacgggttaggtaaggtcgggaatagggatcatggtcaatctgcgttcgcgcaccacgcgacttggtgtgcttgatatcggttcgaacactatccacatgcttatcgtcgacgccgctcccggcgctcgccctgaccccgaggccagcaccaaatccacagtgcgcctgatgaagtatttaaaggatgacggctcaatcaagaagtccggcatcgaggcgattctggaagccgtgtcccagtgtatgcggctggccgaggaatacgaaatcacccaaccgccacggtagccaacaacgccgcatgatcggagccctcgactttgaccaccttgcattgcccggccttcatgccctgatcaagcaccacgtggtcaataccggcgaacatcggcatatacacgcggttcgtaggccacgaaaacgtaaacccatgtccggattcacgtgcggcatccacgaaccggtcgccaagaaaatcacggaatggcgtgtgatcgtaagtggcattgaaatcgcccatgaaaatataccgtgtatccgtatgcccgcgcatcagacccaactcatccagcgatcgcttccactgccgccaatagccgggtacgggagcggtggtgtgcacggatacgaatcgaatctgctgaccacccatatccaccgtgccgccgggcatgaatgaggcgctggaattcacgtcatcgtcggccggatcggcaagtggcgtggccgaccagaggccgttaccgaatacgccgtcagacgatgagacctgcgcatacggcagatagtgctcaatgccagcctcgttgagttttttgacgaaatcctcggtggtctcctgcaaagcgagcacttcgacgcgctgatcgcggactagttcgacgatggcttgtgggtcggcctgccccttgtatacattgaaggtcatgacgcgcgcgtaggcatcgctggtgttgggggaggccgcagccacggcgttctgcgcggcttgggggagtgggtcggtcgagtagaagaacggatattgccaatagccattgcatgcgattgcggcgatggcgattagtgcggcaaggatacgccgcgacacgatggccaacagtagggcaatcaggccaagcaacgtgaaccagggcgttgccgataccacaatcggcacaaatggcagttcctgtaaatcggcaggcagcgcgcgggcggcagtgccggcaagggcaagaagtgcgaacatcgtggcgagaaaaccaagcagacgatgccgtttgtgtggcttcacggcagacttggatactgggcgtgccgtggctttggcagagcgtggtttggcagcggcgcgagctcgtacgcttgcacctgtggtagtactccgtgcctttgccatgctgccctttcctccggcttgtttactgttaccttgcttttcgtgcgatttgccactgtaccgtgtgcggcttgtctttcagtgtcttttcgccgtgcgcaagagcagttcgcaccaaaccagcacgaaaaccggccatgccttggtggcgggttctgccaggtagcttacacagactgccatgcgtcttatgtaggctgccacgcgaacatgatgcgactgggcgtgcggccgtgtacaatgaaacgtcgttgcccgagtagctcagtggatagagcaccgctctcctaaagcgggtgtcgtcggttcgaatccgatctcgggcacttggcttcggaaacatgacggtatctcagcctctattcatcggtgatgagccataggcattaggcatgtgtaaacgtataggttccaccatccatcatcccgtcatgtgaaactatgcaaagacatgtggggcttcacggttatcgtgagggtccatggctatcgaatacacggaagagaagcggtttactgtcgaacaggttgaggcgctgttcaagtcggttggttgggaatcggcgcagtggcccgaacggttgttcaaggcattgcagcattcggatacggtaatcagcgcatgggatggcggctatttggtcggcttggttcgcgtgctcgacgatacgggagggggcgaaagtggcggagtgtgctgatcgggggcaacgtacgtagtcattgacggttatcccgtagtaatgttcacgatacgaccccttgtccatacagtgaaaataacggctggcgtccgacgcggctgcgctatgactagagaccatgagtgaagacaaacagtatgacttctatgtggccggtccgttcttcgatcctgagcaaacggcaagtatggaacgtttggaaaagatactggaagatcatggcaaggtattgttcaagccgcggtttgtcagccagatcgaagaagtcggccctgaaggatgttttgcggatgatatccatggcattaatgctgctaaagccgtggtcgccaatcttatggacgaggacccgggcacgatgttcgaaatcggatatgcgcatgcgctgggaattccggtgtacggctatttcgagaaccttacaccaatggatcgtgtcaatctgatgattgcgcaagcggtcgaactggtgttcgccggtcctgatgatgtggcgaaatacttggaaaccggcgaacatacggaagtcgattacattcagttctaagcagctctaacaggttctcagcaaacaggggtggcggcgttctcgtacatagtcacgtacgggacgccgcagtggtatagggatattccaacaagcggcataatggagtcgtgggaaaactagacggattgccggggccatttggtctggacaatccgttgtttcgcgcgtgttttgtagcatccgtggagttacatggggagtatgactgaaaacatcgctgataaggccataaacgatactcgtatcgtcaagcagttcacc

SEQ ID NO: 1504 - DNA, 17369 bp, Unknown
  R257_15m  MAG No. k141_45662
ccaagcgcctcgatctcatgcgcttcctgatcgccaagcaccgcgatctctacgccgcgcacatcgccgacgccatcctcggcgttgaagccatctccatgagccgcttaaccatgtgggaatcgttgatgtgcggtgacatcaccgccagccaagccttcatgctccaccccacctacggcgacggcggaatggccgccgccgtacgcttgcggaattgagaggcatcagctgaccaaatgccgatagagctccggatcgattggccgggccaaccgcaggatcgacagcgtgaccttcacgctgccttgtccgcttgcgtcaggtttggtggtgagctgagggttgtcaaacgcagcaacgtggccaacgtagtagtacttaccctcggcctcttccgccttgcgcataacgaataacgggacgaaatgcgtctggccccaattcgggccaatgccgttaagcgcccattggaattcgggagactgcggagttcgtccattcttgctgaagtatttcatttcctgtgtgctcaggaattcatcttcgtattgacttgccgcgtatttcacgaagatgggcatggtattggtttccttgtcgaggaggtaaccacccacgttttgcggagtattctccttcttccatccgcacagtcgcatgacgtctgccatggaatatttgcgttcgtacaagaacatgtgatcaaagacctgttgcctggcggcggcctcacggaatatatctcggcaattggccataccggtgcgcagagtgtccgcaaagaagatacggaatgttctgttcgtggcaagcatatcggcgaatctgctgttcaaccgatatgcggtaccgttttctgtgccggtgctgttcacggcttcgactaatggctgattgccgaaacgattgcagtttgggccggtgaaatatgagtaatcgagcacgctgatcgcagagtcgaattgcgtgtctgaaccatcggactgcgggaattcagtacgaatcgcatcgagcaattcgctgcggccgattggcgagcccgcactccaatgctgcggtacgtcgtcgtcgaaccgttcgctgacgaaatggcatagctgagcaagaatgaccaattcgtgcggtcgcaatccgggcagcagcagctccgctgccatcttgagtatcgcgtcttcaacgtcggtcaccggctccaactgatcctcaaatgtcgcttcatgatgtttgcctttgcccaggcttttttcacgggaacgcacgaaatcaagatagttgctgcgcttcgatgcgatggtatacggcagtgaggggtcgtagttatagatgtccgtaagcatggggatgcggcccagctcgtaacggacttggcgatactgttcggacagctttttcatgtcggaccagtcggcggtgtccaaagacttaaggatgcgctccttggcgatcgggtcgaaactgatggacgacaggccgattgactttctctgcaggttcttgcgagctctgtcgcggtcgccggtgttgccgtataatgccaccggaatcagatagttgttgttgtaattgccaatgaaatcgataaccacaacgctttctttgtgcgggaatttgcgcagtccgcgcccgagctgctgcgtgaagataatgctggattcggtgctgcgcaacatgacgatttggttgacggcgggaatatcaactccctcattgaacatatcgacagtgaagagatagtcgagttcgccttcaatgagcttgcggacgtattcgtctcgctgcgtttgggacacgggcctgccgtcatcgtccgtgctggtaacggcagcggtgcgataggggcgttcggcttgttgattccactgttggttaaacagctgggatagcttatgggcttcctcctgtcgactgcagaacacgagtccggtgaccggaatgttgaactgcccatattcctgcaacttgtcaatgatgtagcggactcgcttttcggtggcaagctgctcgatctcgtacttgagctgtttcgagtccttcgcatcaaggcccttggagacatcgagacgatgggcgattccattcggatcgtcgttggagccaaggtattccgcaacaccgtagtagtggaatggacagagcatgttctcgtccaacgccttttgcaagcgaatttcgtacgcgatgttatgcccgaatagctcgaagatgttgatgccgtcggtgcgctctggcgtggcggtcatgccgagcatgaagtcggcatctttgaaatgattgatgacgcgctgatatccttcggctccagcgtgatgaacttcgtcaaccagaacgtagtcgaattcatcggatttgaattgcgccaaaacctccggctgccgcatcgtctgtaccgtggcgaatacgtagcggcggccctgttgcttgctggtgcctgaatacaatcccaattcggattcatcgcagccgagcaccttttggtaagacttcattgcagtttgaagaatcatctgctgctgggcgatgtacagcatgcgcttcggctggcattcgcgtacgtcgaatgcggaaaggtacgtctttccggtgccggtggccgacacgataattgcgcggtgctcgccttgttcacgaatcttcttgagattcgccaacgcctcctgttgcatggcgtttggctgaatgtcatgcccctcaagcgactgcagaatctcatgacgcggtggggcgtatttcttgaaatcttcctcatactgtttgatccactcttcggtcagcggaacggaatcagccacctgtgagtcgatttcatcctggaactgcccgaccagctctccatccgccagcgatgagactttgagattccattcgcgttgcgtggtcaatgcggctccagtgagattggaactgccaacgtacaggtcgtaatagggtgtgccgtctttcatgcggcgagaaaagatatatcccttgggatggaatggttgtccttgagccattgcggaaactgaggtattacgggaaccttcccacacgcgaacgtcaacaccagtggtgttctgaagatgcagcagctcccagaatgccctgggatcgttgaaatgatttttcgttgaggtaatcagtgtgcccgctcgggtcgctgtttcatggtgacttctgaagtcttcaaataagctgagcacggcctcagccgagacgaatgcgacagaaatgtcgaaggaatcgctagtagccaaggaattgccgatttcctcgcgcatggtcaatccaccggggcgatttgcgatgagggtcggcttatattcgccgggagcatctgagcgcggctcgatcagacctgagatgacatcttcgaggatcgagggggttggatcagaatcgtgatgttgcgtgttggctggagagcctgaggtgctgaccagatttatagacatgttgccctgttcccttgcgattcggatcgtttgatgactgcctgactgcgctgtggcgcgttcatcggagcgtcagttgtttgttcgcgataatcgcgactgcttcgcgatctaccggagcccagttcaatgtcggcatatcagcaggattcagccatcggatatcggtgtgctcggtgagatgcggcgtaccggcgatgaggtgacagatgaatgtggtgagccgcacggttccaaagtcgtaggcgtattcgctggtacatatctcttccgcgacctcaacttcgcataacagctcttcttcgatttcgcggtgcaaggcttgccgcgctgtttcatgaggctcaattttgccgccggggaactcccagtatccggccaacgactttcccgggccacgctgggcgcatagtacggtgccgtcggtgacgattgcagctcccacgacgttaatgattttgcgttcccgctccatgaacaaccaggatacaacgcttcaagatccacaagcgatccacgatcctcggtggttttgcatatcgatcctgatgcttttgattatgcgatcggacgggtcgaaaatgtcggtgtggacgctctcgactattgtggtagccaagagaagcgatccgtttccgaggtgagattcgggaacggtccgactctcggcagtgatttatctacgcagacaagccaaaggagcctcgccatgatcctcgtcaccaccaccccgtccgtcgacggatacaccatcaccaattaccagggcatcgtcttcggcgaagtggtatccggtgtgaacatgttcaaggatcttggcgcgggcctgcgtaacatgttcggcggccgcagccagggctatgaggaagagctgatgcgtgcccgcaacgaggccatcgccgagatgcagcagcgtgcggaggcgatgggggcgcacgccgtggtcggcgtggacatcgactacgaggtgctcggcgccgacaacggcatgctgatggttaccgcgtccggcaccgccgtgcagatcgcgcgtacggcctgagtccatcgagcacagcctgggcccggactcgtccatcgagccgggctttgtcggttatcgtgacgcattgcactgacgctcatgaccatacgaatcgaagcatacgaccggctgcccgacgcggcccgcgccatccgcgagcaggtgttcatccgcgaacgcgactggcggccggagttcgatgaatgggatgccgcgtccgtacatctgctggtgttcgattcggataatgatgcgcccaatcgccccggctcgtccgcgcaattggcctcacgcagccagcccattcagcccagccagaatcaccccgtagcgacctgtcggttctacgcggaccccgatcatcccgaccagcccgggcgatacatcatcgcgcgcctggcggtactgcccgaggcacaaggccggcatatcggctcgcggctgctggccgacgccgaacgccgcatcgcgcaagccggcggaaccatggccgccgtgcactcggaaaacgaccactacaagttctatgagcagtgcggctaccggctcaccgatgaagtctatgaaggcggccgtcacggctggctggtcaaggacctatctcgtaacgtatgaaggcccgcctcggtgctgggcgagcgaacctacagcgcacagacaatcagataaatcgccacgacgtggcaggcatacccgatgaccgtgcccaagtgaaacacctcgtgaaactcgaaccagccggggacggggttcggcttgcgcagcgcgaagcatacagcgccggcgatgtacgcggcgcctccgcacgcgatgagcacggtcggcgccgggcctactgcgggagccgtccagagctgcggaataagcgttaccggggccagccccaacacgacgtatacggtggtgaacacccagttcggcgtccgcagccagacgatatgcagtatcgtgccaatcgccgtggtcgtccagattaccgtgagatatggccggcgaatcgccgggctgagcgcgaacagcacgggtgtgttggtgccggcgatgatgaggaagatgttcgaataatcgatgccgcacagcacgcgagtcaccttcgcgctgcgccatggcacgacgtgcagcagcgcgctgttgccgaacagcagcatggccgaggcgccgtacaccgcgcaggccgctttgaccgagccggccggcgcgatgcagatgagtacgatggacgccgcgatgcacagcggcagggtggcgaggtgaagccatccgcgcagtcgcggcttgcgattgccgaatgcatccacggggacgatctggcgcttgatcgccttcagtgcggccttggcttggcggtagcgcgattgcgcggccctgtatcgggccgatgcacggtccagtgcggtggggttggcgtttgcgctggatttttgactcgcggttgcggaaggcgcaactgttgcggcggaagccatggttcgtccagatggcgtgctgatggaaacgctcatactgatcacctcgctatggccggcgacgctctcccgaccactaacctacgctaccgtaacctagtataggcccgcgcaataatcaaggttgatttcgtaatgcttacagttcttccgtggtgcggtattcggtggtgcggttgcggaatacatcgccgagtctgtgaactcgtattatgcgtgtctgctgggtccgacttgtgtcggttcctgatttcggattgctgcgaatgatgctcccaacgccgccccgccagttgccggattcgtacggctcggccgttcggccgagctggtcgtcggtgactccagatacttcgttggtttcgtctcggttcatgatgttatgtaatgctagtttatggcggatggaaagttgaggaaagttaaatctgcttcatgggcttctctctgatctgtatttgtcccggttcatatgtcaatcgtttgacctgtcgaccggggcagaatccgctgtcccggtcggcgatttcggcttgttttcgtgaaccgggacactccggtttcctcaactcatatcgtctggcagacggaatcggcggaataaggccgattctggaattggcacgttgtcccggttttcgcataaatcgattgacatttataccggggcaacaaaaattgtcccggtttgcaaagatcgcccgaaatcgcgaaccgggacagcggattctggcctggcttgaacgtcaaacgattgatgcaggtaccgggacattttccgccacgaaagttgggccataagtctcaagtcctaaagcccccctgaaaaacggcgcttgcccggacaaagcaaaagggctggaaccttccgattccagccctttagttgctggtgcgagtggggggagttgaacccccacgagcatacactcactgccacctgaagacagcgcgtctaccattccgccacactcgcagacaatcgactaacttacacccggctgggtaatcatgcaatcttcggcgtgtcgcatgggaggcagggatatatcgcttgtgggtctcctgcgggcgccgtgatctttgagggtggcggcactcccctcagtcacttcgtgacagctcgtccgcaattaaggacgggccttgcctgcaacctgctggttcgactatcgtctcaccttcgactacaaacagcccactgggctgtttgcttaacgtctcagcctcagcgaggggagcagagagaagttcggcacaagccgcaacgaaggagaaaaactcacaaccctggccggcgctcgccgttgccgtagaagtgggccagcgcttcgtcgcggaactcatcaaagtatccgccgtcgatcgaggcgcggatgtcgtctagcagcttcacgaagaaatgctcgttatggatcgtggccaacgtaaacccgttgaactcgcgggcgcgcagcaggtggtcgacgtacgcgcgcgaataatgctggcatgtgtagcagtcgcatccctcctccagcggcccgaaatcgaacttatgctgggcgcgcttgatgttgtaccggccggcgcgcgtgtagatcgcgccgttgcgggcgcagcgcgcgggggccacgcagtcgaaggtgtcgccgccgttctccacgcacgcgaagatatcgtccacggaggcgatgcccagcacatggcgcgggcggttctccggcatcgcgtcgcagatccacgcgcaggtgtctccaatgatgcgcttctcgattgcgccgccgattcccacgccgtcgaagtccagcgaggcgatctgcgaggccgcgcgccggcgtagatcctcgtaattcgcgccctgcaccacgccatacagcgcctgatagggcttgcccagccgctcagccgtcagccgctggtgctcatccacgcatcggcgggcccagcggaaggtgcgctccaccgagtcctcctggtaggagcgggtgttcatcagcgtggtgagttcgtcgaacgcgaacatgatgtctgcgccgattttgtgctggatgcccatcgaaatctcagcggagaaacgatgtgcgtcaccattcaaaggcgacttgaacgtcacgccgtcctcatccacccaggccatgcgctccttgcccttggcgatgatgtcgtccgacttcatgccggtcacgtccattgccagcgtcttcttgaagccgacgcccagcgacatcacttggaaaccgccggaatcggtgaacgtgggcccatcccagttcatgaaacgcgccaagccgccggccgcgtccagcacgtcctcgcccgggcgctcgaacaggtggaaggcgttggccagcaggcattgtgcgcctagatccttcatctgctcgggcagcacggccttcatcgcggcttgcgtgcccaccggcacgaaggcaggcgtgcgaatatcgccgtggggcgtgtgaatgatgccggtgcggccgtatcgggcaccgtctcgcccaagcccgctggccgtggatggcaggcgggtgatcgtttcgaaatggaaggcgctgcggtcgccgggctgtccgggctgtgcgcccaacggatgttcaagaaggctgatcgtcatatgttcactttaggcagaagggccagaaaagggccggaaattgtgaagaactcggtttcgaggggcggatttcgccgctcccgaacgtctacttccgcttcaaggggctcccggtcaagtaggccggctgcaaaaatggcggaatggcgttaaatgagggcccttgatactcggaattgaccgcgcgaacagccccttgaagtgcaagtagatgttcccgaaacaggaaatcagcccctcgaagccgagatgcccataagactctgcgatgattacgcatagactttcaatcaacgttcagaaaacctccagattgactgcctttactactgaggtagcacacgagaagtggcaatgggcaagtgcccgaatagccgccgaacagacgtgataggaatttaggaaaaggagcagcaatggctgacgaatttaacccgcagggcgtcgaccagaccccgcggaataacgaaaaccccaatagtactgccgataccggcaacgccgagccgaagaacccgtttgtgggtggcgactcggttgatgccggcaacgccagcgattccagcgagcagcaagccccggtttcctcggccgccctcgctgccgatcagcagcctacgcaagccgctaccgacactgccgccaccgagcccatcccggactacgcctccgccaagggcgagagcacggtggtctcctcctcgccggcttctccggcagcaccggccgcaggccagacctcggccacaactccgctgtatcgtccggccccggaatatggcgcttatggtccgaccccgactcaggcacagggccagcagggcggccaggccggcagcaatgcccagcccacgcagcaattcccgttcggtcagcctgcacagcaaaccccacagggccagcagggcaaccgcaatccctactacaccaataacccgcagccgcagggcaacggcaatccgttcaatccgcccacgcagccgcagcagaacaacggcaacccgtttgccagccagtccggtcagaatggccggaatggccagcagccccagcagggcggtctgttcggtttcggcactcccggtaccggtacgccgaacggtcaaggcccggcccagccgggacagcccggtcagcccggccccgccaagcagggcatgtccaagacggcgagcaacatcctcatcgccgtggtcgccgccgttctggctgcggccctctgcctgggcctcggttacggcgccctcaccagcggcctgatcaccttgccgaccagcaattcgctgtccaacgtcagctcgaataagtccggctccgggtccgccaccgccaagagcggcgaagcccccgactggcagactgtcgccagcgatgtctccggctccgtggtctccatccagaccgcgttgagcaacggcaccgccaagggctccggcgccatcatcgacaccgaaggccacatcatcaccaacaaccacgtgatctccggtgcccagcagattcaggtgacgcttgccaacggcaacatgtattccgccacgctcgtcggcaccgacaccaccaccgatcttgcggtcatcaagctcgacaacccgccgagcgacctcaaggccgtgaaattcgccgattccgacaagctcgccgtcggcgagaacgtgatggccatcggcaacccgctcggctacgacgacaccgccaccaccggcatcgtctccgccctgaaccgcccggtgaccgtgaccgacgataacaacaacgagatcgtcaccaacgccgtccagatcgacgcggccatcaaccccggcaactccggcggcccgaccttcaacgcggccggccaggtgatcggcatcaactcgtccatcgcctcgaccgccacctcatccgactccgcgggttcgatcggcatcggcttcgccatcccgtccaacctcgtcaagcgtgtggccgacgaaatcatcaaggacggcaaggtcaagcacgttgccctcggcgtggtcatcaagtccgacacggttgaagccgacggcgtgacccgcggcggcgcgaccatcaccaagtccagcgccaccggcagcgcggtcgtctccggcggcccggccgacaaggccggcctcaaggagggcgacaccatcgtggccttcaacggcaacgcggtgaacaacaactactcgctgcttggttacgttcgtgccgcggctttgggagacaaggtgacgctgaccatcgtgcgcgacggcaagaccatggatgtggacgtgacgctcgatcaggaggagtcgtcggtgaacggttcgtccagctccgattccaacggtaacagccagaataagcagaacaaccagaacggcaacggccggaatggttacggcaacggtaacggtaacggcaatggcaacagcgatggcggcaccggtgacggcggcggcttctccgacccattcggcctgtggtaaagccgactcgacaacgtcacacggtgttgagcggtaaccgctgaacaccgtgtcagacaagcaaaggcccgtggcagtgagcaaactcctgccacgggcctttcgtatacgctattgtgccctgcgcccatgccgccaacgtagtttcgatatccggcatgtcgcgcaacgctcgttgatagggtaggtcaagcactgagttcgggcggtgctccgaacaaagcgcataattcaatacaaaactgaacatttctttacgccgtgtatcggaaggtcgcgcgggagccgagcaaagcgaagccccaggcaaagccgccggtgggttaacaaggcgtgaccgcagcgccgattgcgcgggccacgcttgccgtaccgcaatcgactccgtatacgagcgtaaggagcaatgatgggcgcactcatcagattcttcaccaaaattctcgacatctgcaagcttgtgccgatgcttccggtcgtcgtcatcgccgcaattccgctggctttactgggcgattggcgtccgtggggcaatgcgatggcgattccggtacttggcaatccgggcttcggccagtggctggttatcgcattggtgctgattatcgtgattgacactgtgcgcggcatgattgacgatttgcgccacgggcaggtcggggttgatgtgctggccgtggtcgcgatcctctccaccgtggccgtcgccgaatactgggcaagttgggcggtgacgctgatgattacgtccggcgaggccattgaggaatacgcccaagccaaggccgagcgcagtctgaccgcgcttatggaagccgcgccgcagaccgcacacgtcgtcaacctgcctggtgtggggtgtgggtttgctaccgataagggcgattcgtccgatggcttccggcgtgtgggcttggcgtcggctgcggccgccgcgcaccgcttcgacacggtgccggtcgagcaggtgcagctgggcgatgtactcatggtgctgccgggcgaaactgtgccggttgacggtgagctgctgtccggcacggccacgctcgacctgagcaatatcaacggtgagccggtgccgcgtgaagtgttcgccggcgcccgcgtgatgtccggcgcggtgaacggctcgactgcattgaccatgcgtgccacccaggtggccgccgattcgcagtaccagcgcatcctcgagctcgtggcctccgcgcaggagtcgcgcccggccgtggtaaaaaccgccgaccgcttggctgtgccctttaccgtgctctcgctgatgattgccggcatcgcatgggcgatgtccggggtgccgacgcgattcgcccaggtgctggtgctggccacgccctgcccgctgctcatcgccgcaccggtggcgtacatcgccggaaccggacgcctcgccgcagccggcgtgcttatcaaagcgcaggacgtgctggaaaaccttggccgcgtcacgcaggtgttcttcgacaagaccggtacgctcaccgtcaagcagccgcaggtcgtgcgcgtcgagatgctgcccggtgccgcaacccgtctcaacgaagaccatgtgctgatgatggccggcgtggtggaaagctactcggtgcacatcctgtccaaaggcatcgccaaggccggaacggaggcgatggcccgattgcgccagcggttcgaggacggccagcgtctctgccccgaaccagaggccagctggcccggccacggccgcgaatatccggtcatcaagaatatcaatgaagatgccggcaaaggcgtttccggcgaggtgaacggacatgcggtgcgcgttggccggctgtctttcgcggccgccggggaggaaggattcttggcggtcgatcggaccgcccccagtcggtctgaggatgacctgcgcacacgatttgggctgcttcagccggacgaaatggcgtcgtatgtgtctgttgatggtcagctgatcgcgcgcatcgtgctgcgcgatgtgccgcgcgccaacgccaaggcagcgctcgccaaactgcatgagttgggcgtcaccaagctcgccatgcttaccggtgacaagcgggcttccgccaatatcattgccagcgaagtcggcattgacgaggttcacgccgaactgttcccggaggataaggtagccgcagtcaaggccgctacaggagccggcaaaaccgtcacgatgatggttggtgacggtgtgaatgatgccccggtgctcgctgttgccgatatcggcgtggccatgaccgatggcacgtccaccgccgcttccgaaagcgctcaggtggtcattatgaatgacaatatcgccgccgtgccgcgcgccatcgccattgcacgtcgcaccaagcgcgtgatgcttcaagccgtaatcgcgggccttgtgcttgccaccatcggcatgattgccgccgcgttcaaccttatcccggtcgtcgtcggtgccttcctccaggaggccatcgacgtggtgagcatcctctgggccctcactgccctaattgatcgggactgattaagaatatgaggcttctgctgtttttgtaggtcagttgactgaccgggatggtcgtatgtcgagtccaccgcatcgaaacataatcggggcgatacggttggtgacgtggcggaaacggaaatcccacccacgaaagcagcaatagcatcggagttattcattaggtcgatttgacgtttattaggtcggtccttggtcggagcggcccttgaaaccccgccgttccaagggatggcttcagcactctccgacctaatgaacgaagaaatgacctaatgaatgcaatcgaggtcgtaaagagccgttggaggtgacgtctttaatgcctcaagggattcactgattgcacagaattcctactgctctgcggcggctctttaccgtcggccttctagccaatcgaggggcggaggtgacgcggattccttgtgagacataactatgctcaacccgactggttacgtactgttgctcacacggtataccgagaacattgccaattaaagtgagatggcgggcgaaccggtcatgataggtttgtccggatttgatttctatgagcatacggttgttaggatcggtgaaatccaacaaatccacctcgaccttgctggcatcgcggtagaagaataattgtggctcctgattggcgttcaaatgctgtttcatggtttccgcaatgatgaggttttcaaatatatcgccgaacttgggatgcgcaaccagtgcttcgaccgtccgaatgcccaagagatgacacagcaagccagtgtcataaaaatagagtttcggcgttttgaccacctgtttgcgtgcgttcgtgtagaacggcatgagatggaatgcgatgtaacttgattccagaatcgacatccatgcctttacggttcgcggacttacatcaagttcattggcgatgttggtgtagtttatgagtgctccggaactgagtgcgcaaagagtcaagaatcggcggaattcagccaaattgcgtacatcaagatattcggaaacatcacgttcgatataagtgtcgatgtagttcgagaagaacagattgagcggcattctcgtgtcataaatgcgtggataaccgccttgcagcataaacgtatccgaagtaagggcctgatccgcctcgcatgcttcttggaatgagaacggcaataacttgaccaatagggaaacccataatctgacattagcagtgctcgtaggtttcccaaacgcacaaactatggcctaatacacaggattcccaccactcgccctctgttgcaacggaaggctttgcgttaggctagagcgcgtgactgaatctgtgaacactgaacttcgtattgctgtaatcggcgctggcccggccggcgtctattcctccgacatcttcctgcgccagctcaagaaactgggcgaagaactcggcctcggcaccaaggcccgcatcgacctgttcgagaagctgccagtaccgttcggtctggtgcgttacggcgtggcccccgaccacccgtccatcaagttcatcgcatccgcactcgagaagacgctcgacaatccggacatccacctctactgcgacgtggaattcggcaaggacgtgactcttgacgacctgctggcccgttacgacgccgtgctgttcgccaccggcgcggtcaaggacaagccgctgaacctgcccggtgccgaccttgaaggtgtgtacggtgccgccaagttcgtcgaatggtacgacgggtatcccaccggtgcccgcgaatggccgctgacggccgagaacgtcgccgtgatcggcggcggcaacgtggccatggatgtggcccgcgagctcatgcgcgacgccgacgacctcaaggccagaaccgacattcccgacaacgtgtacgagggcatcggccgcaacaaggccaaggtgctgcacctgttcatccgccgtggcgtggcccaggccaagttcagcgtgcaggaactgcgcgagatggagaagctgcccggcgtgcagctcatcatcaacgaggacgacttcgacctggacgacgagaccatcgaggtggccggcaaggacaagctcacccgccagatggtcgaggaactgttcgccatccgcgagatggccgaggacatggaagatgacggcgacgtcgacttcgaaggcaacccggccgaccgcaagtactacgtgcacttcaactccgcccctaccgagatcctcggcgaggacggcaaggtcaaggccatccgcgtggagcgcaccgaaaccggtgccgacggcaagatgcgccgcaccggtgagttcgccgactacccggtcgaggccgtctaccacgccatcggctacaagcccgccgaagcccccggcatcacctacgacgagcacggcgctcacctggccaacgccaatggcgatggccgcatcaccaccgaagcggacggcggcgaagtgcgcgaccgtctgtacgccactggctgggccaagcgcggcccggtgggcctgatcggctccaccaagtccgacgcacttgccatcgtgaccaacatgcttgaggatctggccaaggccgccgaaggtggtcgcgtggccgaggatcgcgaccccgaatccatcgaccgactgctggaaagccgcggcgtcaagccgattgacttcgctggctggaagaaggtcgacgccttcgagcgcgccgaaggcgccaaggagggccgcgagcacaagaaggtcatcgagcccgaccagatgcgtgagctcgctctggcctgattgactatcagctcatcgcaccggcaactgcaccagcagcaatcggcgcgattgatacatcgataaataagaacgccggttatacgccagcgttcttatttatataaaagccagtgtcatgccagtcgagcaggccgatgggccaaacgatccaagcagccaaagcaggccaaacaagcaaagcgtcccgatcagaccaatcggtaaagcggtaaagcggtaaaacaggccaagcaaccgcactgtcaagcatcgtcaatctcatgtaaacaggctattccgatccccgccaaccgcaccgtaagcaccgccaacccccatccgattcacccctcggcgcacatccagccaatattcaggcagtgattttagtgtgagcctcatggatgccaaagtacgggtgcacggccatttcaacggcctgaagactacgctgctgttcgccttgatgtgggccatcatcatgctgatatggtgggccacgggcggcaggcagcagacgctgggcatctacgtcattatcgggttggccaccacgttcggctcatactggttctccgacaaactcgccatcgcatccatgggagccagggaggtcagcgagcaggaagcccccgaaatctaccagatcgtgcgcgagctgagtgccaaggccggcaagccgatgcctcgcatctacatcgcgcccaccatgagtccgaacgccttcgccaccggtcgcaacgaacggcacgcggctgtctgctgcacgcagggcatcctgcagattctgaacgcccgcgagttgcgcggcgtgctgggtcatgaactgatgcacgtgtacaaccgcgacattctgacctccgccatcgcctctgccatggccaccgtcatcacgtacctcggttattctctgatgtatttcggcggcggcaactcgcgcgacgaccgcgataattcaggcggtctcggcttgatcggcgtgctcctcagcgtgattctcgcgccgattgccgcatcactgattcagatggccatctcccgtactcgcgaatacgacgccgacgaagacggcagtctgctgaccggcgaccccgaggccctggcctccgcgctcaac

SEQ ID NO: 1505 - DNA, 7112 bp, Unknown
  R257_15m  MAG No. k141_45731
attgtggataacttcataagctagaaccacataccccgtttcagctggacaaacgcccatgaatccatcagcgtggatgcatgggcgtttctcataaccatcgcgcaggccatgccgccaaccgtttgcgcgcattcagcaggcagagcgaagccatgccccaaccgcgagcggaacggcccacgacgcctccgccgcctcccggccatgcacggattcgtccggccggccacccgccccaaacggagcagagcggcctgcggcaggcgacccgtgacaaacgtgcgttatcggatctgatcggcgtacgttccgccgatgccgtcggcgaatcagccagactcacccgggatcagccgcgattgtcgttcaccattgggcatgccttggccgtgatattgctgctgatcgtcgcccttggcatcagcttggcattgctggtccaacagtcgatgaatatggccatgctgtctcaaccgaccgccatgcagaccacgggcggctccgctggagatcagacgatgccatcgcagaacaccacggatgagaaacgcacggatccgcagcagtcggagcattccgatgccacagcgaaccccgaatcggataccacgcaatctccgcacatgcagacggacggcagcgatgccggcgctgccacgcatggtctcatcaacctcaacacggccaccgctgaagaattgcaatccatcaaaggtattgggccggttaccgctcagcggatcatcgatcatcgcacggcgattggcgggtatgcatcagtcgatcagctgctggatgtcaaaggcatcggctccaagacgctggagaccatgcgagggcaggtgacggtcggatgagcagggatcggatactgcgcgagcaggggagccgcgattggaggatgctgccgatcgccatagtgatgtgggcggcgagtctgggagcgcacgcattattcgcatggaggatgtctgatggactcggcaccggtcaggcaaaggccgatgccggagctggcattgacgtcaccataatcggcatggaatggcctgtcacacgaatattacctataacagtggcgtcatgtgccgctgtggcggcgacgatcgtggtgtctttccgcctgcggatcaggtggacgggaacattgaccgtatgcgtcgcggtggcgtgcatcggcagtatgacggcaatcgcgtcggacaccattgcctggcatgatcctgcctccgcacaagctcgccaatccagttcataccacgaagtcatggccacggtgacgacgcccgtgatcgcttcggaccaacgcacatacgattgtcagacggacatacggctgagcggcatcactgtggatggcgcggacgtacgttccacggtcgccgtgcgcgtatacgccgatgaatcgtattgtgggcagttgcgtcgaggcgcggtctatctgttgacgggcgtattgcagcaagcgcgatatggacgcataccgctatggctgctcttggaaggaaaacagccggtagcgcaggtgcgggctccgccgtggcatctcgccgcgatcgcacatatgcaggaggcgtttttcaccgtgaccggacaattgtccgatcaggggcgtgtgttggtgccgggattgacgatgggtgtgcttggccaggattatatcggcggcgatgccggtccgatgccggtcaacagcacgtatgcgcaaacgttggaaaatcagttccgccggtccggcatcatgcacctcatggccgtatccggcggccacttcgtactggtggcaggactggtgcgtcggttatgcatgtggatgctgcttgatcggcggctgacggcgttgctggtctctggagtatatgcgctgctggcattggcgatgttccccagtgattcggtcacccgcgcgttcatcatgggattgataggtgcgttggcgtatgcgatgggacggcgtacgcaagcgttgagcgccctgtgctggacgataatcggtgtattggcggtgaacccggatatgtcggccagctacggattcgccttgtcttcggccgccgtactgggtatcgtgctgtttgcggggcggctggccggtgtctttgagcgagcgatgccgcacagcatcgccgaaatgatggcgatgaccgtggccgcgcaattgttcaccctgccgattcaggtgttgatggaaccggaattgccgttgctgtccgtgccggcgaacctgctggtgtcaccgttcgtgggattggccacgatggcgggattgatggcactggcgtgcgcatggtgcacgccatggctggccggcgtattcgcgtggatatcgtcatggggcacgctggtgatggaacgggtggcgttgtggctgggcggcagcacgatggccgtcatcccatggaaagacggcgttacgggtgccgtgctgattgtggcggcggaaatcggtatcggcatgctactggtgttcgtcagccgttgcctccagcatgtccgtcgttatgaggccggaatgtctggcgtgcgcttcggttccgcttggcgcgtccgcctcagtctctggtgtgaggagacgagacgcctctttacgcggcggcaagccgaatagccaatgcggtattcggtgcagcaaccatcgcaatcccagccgaataccactatcttgacggcagcggcaaaatcgtgatgccggcaggtcattgtccaacctgtgtggcgagatggtggcatggcgaaaacagcagcgaatgcaccggtaaccgtggtgcccggaggcgactcgtatttgaacgacgcgcgcaccaaggcactgtgcgcgcaggcgttgaaggcgcggcccgacgccgacctcatcgaactcgacgccacatcggccgaccagtatgccttcgatgaagccgtcagcccatcgttgctttccgacgttgccgtggtcaaactcgtcaacctgcagaatgccgacgacaagctcgccgaagctctggtggcgtacaccaagcaggccgccaaggatccgaacggctccagcgtggtgatctgccagcacgagggcggcgtcaaagggcgcaaaatcatcgaccaactggtgaaagccggcgctcgcaaagaggacgtgccggatttgaagaaaccggatgcacagctcaatttcgtgctcggagaattcgagaaacgtggtcgtagagtcgaaccgatggccgcacagcagctggtatccgtactcggcggcaaaaccggcgaactcgccgccatgtgcgagcaactgtgtttcgactttgacgataatccgatgggcctcgaccgtgtcaaccagtatttgaccgccaatccgcaggtcaccggttttgccgtggcagacaaggccgtggaaggcaaaaccgcagaagccatcgtcatgatgcgtgcagctgtggaacaagggaccgatcccatcgcgctgatcggcgcgttggccatgaagctccgtaccattgccaaagcctcggcggtacgggccggcacgatttcccaggccgaagcgaaaaccaatccttgggtgctgaagaatgcgatgcgccaacttggcggctggacttcggcaggactcgcgcattgcatccgtatgctcgcctgggcggatgagcaaagcaaaacaaacggtggcgacccggtatatgcactggaacgctgcattgaagacatcagtcataaaggtcggtaaaagtcgataaaggggtatttatgagcgaacacactattgcggctcccaccagcgaggccatgcaggagctcggccgtcgtgtggccggaatggtacacggcggcgatgtattgctgctctcaggccctcttggtgccggtaaaaccacattcgcccagggcttcggggcggggctgggcattaccgaacccatcgtgtctcctacattcaccattgcccgcgaactcgacgggcatttcgccgacggcactccgtctcatctggtgcatgtggatgcctaccgtctgggcggctcagcctatgcgccggggcaggacgccatcgggcgtttgttggacgagctggaatcgctgggattggacgaagaacttgaagaccccggcgagaacacggtggtgcttatggagtggggcgaacaaatggccaccgccttggcgccagaacgacttgaaatccatatcgatcgacctctcgattcctccgatgccgcatccgctggatcagacggcgaactcaccagcaacggcactcgtaccgtcgcattcgtcccagtcggcaagcgatgggccgcgttcgatctgcagtaagccatgcgcctatagactcctcgatgtacactctctagaggctttacgactaggaggattcatgggttgcacgttggtgattgacacctcattcggctcgacggtcggcattgtggggcgcgatcccattgtagagaccgattcgcgcacccatgtggagaaactgcaggtcaatatcgcgcgcgcggtcgaggaggccgggttcccagcatctgacattgcaacagtcattgtgggtaccggtccagccccctttactggtctgcgtgccggtatcgttacggccaaggcactggctttcgcaacgggagcgacgcttatcggccataatgttcttgagtctcaggtgcaatggaatctcattcgccgtggcaaagccggcactctcggcgatactcataaatgccatgtgctcactcttgccgtaaacgacgcacgccgcaagcaactctattttgcgttgtactcggacccgctcgttggcgatcccgatggcgaaaccgtggcgacggctctgattgacatggatatcgattaccctgcatccatcgcgcagcgcgtgaatgatgccgttcatacgtaccgcgacggacttatgccagaagacagcaatgtggatgtggtcgtggatgttgtgggtcatggggcccgcaaatatgcggatgtgctgggtgcaatcgagcagcttggcgacatcaccgatgaatccgtattggaccaaggggagcaaggtctcgctatctttgccactgatgcggaactggttgccaaccgtaatcacgatacgccggtcgaaccgttgtacctgcgccggccggacgccgaagtgccgaacccgctgaagcacgtgctcggccatgccggcgccgataaggcgtgagacgggttgattcgatgattgttgacatcactgccgtaagtcgtgatcttgcggttcactccatcgcacagttggaaggcgaactgttcggccgcggcgcatggaatgcgaacatggtgcgagaggaactggacgcaccggcccgcacgtatctgctggatgtgctgggagaggtggaacaggcggttgtccgcggctacgccggcttctggtatgacggcgaggacgccgagctcatgaccatcggcgtgggcaaggcataccagcggcaaggcatcgccgctgcgttgcttcaggcactggtcgacgaggcgaagcgtcagggcgcctcacgcatgctgctcgaagtgcgtgtggataacgaccctgcgttggccctgtatcagcggttcggattcgaacgcatgggattgcgcaaacgctactaccagcccgaaggcatcgacgcatacaccatgagcttggacctgaaacctagggtcgtgggctttgccgccccgcagacggcatcggcggacactgaagacatcaccagcaagcaaacggagaagaacggagaagcacgatgagcgaaccggttgtactgggcattgaatccacctgcgacgaaaccgcagccgccatcgtacgcggccgcgaactgctctccaacgtcgtggcctcatccatggaggaacacgcgcgatacggcggcgtgatccccgaaatcgcctcccgtgcgcacgctgaggccttcgtgccatgcgtgtccaaggcgctcgccgacgcgaacatgacgttggcggacgtggacgccatcgccgtgtccgccggtcctggactggccggttgcctggccgtgggcgtgtccggcgccaaggcgctggcctgggctgcgaacaagccgatttacggcatcaaccatgtgatcgggcacatcgccgtcactcagctgcagttcggcccgttccccaaggacacgctggctctgattgtctccggcggccacacctcgctgctgcatgtggaggacatgccgcgcaagatcgatgtggtgggcaccacgctggatgacgcggcgggggagtgcttcgacaaagtcgcccgtctgctcggcttcccgtatccgggcggcccgcacatcgaccgccacggacagaacggcgacccgcacgccatcaaggtgccgatgggtctgacccaaggcaaggccggtgccgcgcacccgtatgatttcagtttctccggtgtcaagaccgccgtggcccgttgggtggaaagcgagcaggccgccggccatgagattccggtggacgacgtgtgcgcatccctggccgactccgtggccaccgtgctagcccgtaaggccatgcgcggctgccgtcagtacgattccaacacgctgatcgttggcggcggcttctccgccaactcgcagctgcgtgccaaactgctcgaattcggcgagaactacggcgtcgacgtccgtatcccgcaaatcaagctctgcaccgacaacggtgccatggtcgccatgctcggcgtgaacctggtcgaagccggcgtggcccccagcgcccccgacttcccgatcgactccgccatgcccctgaccaaggtctcgatgtaagatttgcacggtattcccagactgatactgggaataccgtgcctctcatcggtgaattgacagtgacctgtctgcctgatgtgagtagtggtgaggtcttcgccatggatttcccggttgatgatggggtgtcgtgtctggtcaccaatgcgatgaaaataaaaaagcctcggagaaccgaggctttcgatggctcctgcgactgggcttgaaccagtgaccgtccgattaacagtcggatgctctgccaactgagctacgcaggaatattcaattttcatcccgtccggagttacccgttcaggtgagctcctgcgactgggcttgaaccag

SEQ ID NO: 1506 - DNA, 8836 bp, Unknown
  R257_15m  MAG No. k141_46388
cacggaatcgttcggcggctgcccgcgctgcggcaagcccgtcgtcaaaacgggcaaggtgttccaatgctccaccaaccggcgcgagaaacaatccgacggtacatggaggaccacggagggatgcggctggcgcgcctggacgaccgtggccggcaagaccatcaccgacacgaccatgcgcaggctgctcgacggccggaaggtcagcttcaagggcttcacctcgaggaagggcggcacgtttgacgccgcgctcgtcatcgacaaggacaagggcgtcaccttcgacttcggcaataacaacaaggaaaggaaaaagaaatgacggagacacaacagaccatgaccgaattcacctacgcgacgggggagaccgacgtcatcggcgaccggttcagcccgtccgtggtgctcttctggctcaagaccagcgtcgccgcgagcaacatgcgcgtgatgtacaagagtccgaacaccctgctgggcgtgatcccgctcggctcgtccacgcagacgatcccgctgcgcaacatcgcgtccgtggacacgaacacgaagttcaacctcggtagcttcgtctggggcgccgtcttcctcgtcgccggactctcgttcctttcgagcagcgcgcttgtggggatcctgttcctcctgctcgcggccgcgaacctggcgaacacgatgagcgcgcagctcgacttcgtcaaccaggccggcggcaggaacagcgtcaaggtgtccatcctcgaaaaggacaagctcatgcagctcgcgcagaacatccagcggctcgtcttcgccgacgtcgagggacaacgccaccaggaaagcatggacatggcccagaagcagtacacggcccagaccaacagcgtcctgatccagcagcagatgctcgaccagcagcgcaaggccacggccgacgataatccatcgatgccgaccgagtgacgaaaccggggcgcggccacggccgcgccccgggaaacgccgggtccgccctgtagaaaacctcgattatactaaaagtataatcacggttcgcgcaggcggatccggctttcttatatccaggaggggccatggtaaaagaggattggagcgaggccaaggcgtggatgcgcgcgacgcgcgaacgcatcggcatgacccagcacgacgcggccgtgcttgcgaacctcaccgtggacatggtcaagaaatacgagtcggagaaataccggatccaaccatcggggataatgcgggagatgctcgaacactatctcgccgagcacaggcgcgccgtcgtggccatcgtggaacggcacaggggagatgagcgggccgtgctctcgttctcccgcgtctccgacctgcccgaggagctgcccgactgggtccgggccgaggaatccgtgaagcgccgcgccgccgccgtgcgcgaggcagccgtgctgcttgaggcggagggcgtcgccgtcgactacacctatctgcccgaagaaacggaataggagagggaaggaaggccgatcatgttcggactttacatgctcgcgatatacctgggcgtcgccgtcatcgccgccggcttcgtcgcactgctcgtcgtcgtcgcgctggcggtgggactggtcacgcatcccatccgcacgctcgccctcgtgttccacaagctcgccgccctgtccgccggcctggcgttgatcctcgcgttgatcgcctggttctggaccgaccatacaaagccggacttcgtcccgtgcttctggggatccatcggcgtgatcgtcgcgtccatccttatccgcgcgttcgccgagtggattctcgaacggcccaccagggccgaacgccgagccatgaaacgtgccgccgcgcaggaaaccggccgggtgacgatgcgcatgccggtatcggaagaagtggccgcggcgttcgaatcgacccgggacggccggcgcgcctccctatgacatgcaggccgcaggacggaacgaaccgcggctggaataatgaactttgcaaccggaacacgaaaagagggacatgatggccaatcccgagctatcgcagcgcatacaggaactgcccgaggaactgctcggccttgaacacgagccgggaatcgccgaacgtctacgacggatcgacgcgctgaaggaccgtgcccgcgcactggaccccctggacggcgtcgaggacatggcgctggcggattacgaccgcgactggctggtgcgctacacctacaattcaaacgccatagagggatccacgctgaccctggaggacacgtccctggttttggagggcgagttcgtcccgtcagattcgccggcacggtacgtgttcgccgcgcgcggcgtcgcggacggcatggcctacgtacgcgaatacgcccgggaggggaggagactggatgaggaactggtccggcgcgtccatgaggtgacggcgctggacctccagccgttcgcccgcggcacgttccgcccctacggttatctggcgaggatcaccgcgacccgcgtcaagaccgccgacccgctggagatccgcgacgacctgcgggccctgatcgacgggctggacgcgagcggcgctcatccgctgctcagggccgccggcttccatgcgatgttcgagaacatccacccgttcatggacggcaacgggcggaccggccgccagctgctcaatttcatgctgctgaagcacggctatcgtcccgtggcgatcaagtatgacgccaagcgcgactatgcccgcagtctggagacctggcaggtggacggcgatcccgtggcgttctgttctgtgttcctcgactgcgtggaacaggaggaacacgcgttcatcgatctggtcgagggattgcgtcggaagccggacgccattcgcagcaaaacggatctgctggacagattcggcgacacgctgcggaagaatcttgctcggcaagacggggatggcaagagtgccgggattgatcacaaaggtcctgggcgccatatgggtcattaggccgaaggccctgggccacgaaatgagaatcagggagaaagggagtggcgtgatgttcggaactgaaactatatctgaattcgaatgcgacgccgcgcggagaacttttctgctccgcccgcgcagccatgctgagggacagcctcccgcccatggaggggatgctggggcctggtgtttggtcggctgagaacagcgtttcacgggtcgtgccgatactcgttgtcggtttctaataggtgatactgaggggtatctgatttcaggaggattatggcatctgcgcaccacggtgttgtctatacgaaaaaatgggttgtcaacctgattctcgacgtggccggctatgtgccgggcaccggcatttcggataaggtgatcgtcgaaccatcttgcgggtgcggagctttcctgaccgtgattgccgcacgtctggccgatgatgcaattgccgttggcaaaggttggacgtcgctggggaatgcgatccgcgcctatgacatagactccgcgtcggtcgagacggcaaggaaggccgccgccgagtcattgatgaaaagaggatgccccgcgatccaggctcgggagctttgcgagcagtggatcgtacacggcgatttcattcttgatgacgtccctgccgctgattttattgtcgggaatccgccatacgtccgggccaccgaaatagaccgggggaagcgggcactttacgttaagcgtctctcttcggtaacgacgggatgcgacctgtacgtgagcttcttcgacagaggcctcgatgcgttgagggatggcggaacgctatgcttcatctgcgccgaccgatggctgcagaacaaatacggcacgttgttgagatctcgcatgggcacggattgtgaccttgtatccctcgtgcgcatgcacggcgtcgacgcgttcgacgacgaggtcgatgcctatcccgcggtcacgacggttcgcaagggcccggcgtccgatcatctgaaattcgtgaattgcgctccggaattcaacgaggccgacgccaccacggtcctcgattggctgatggacgacgagccggagctggttggtgagcgattcgaagcattcgagattgataagccggccggtgataggatgtatccgctcggtaatcatgacctagtgagattcgtctcgcaggcgtgtgaaaggttgccgaaactcgaagaggccggcgtgaaactcggtatcggtatcgccactggttgtgatgatgtgttccttactgaagacaatgatttggcggagcctgatcgtatggtgccgattttctacatgcgtgaccatcgtcgtgggaacgacgataggcatcgctggcttgtaaacccgtggaacgacgacggaactttggtcaacctcgacgaatatccacgactcaaaacctatttggaaacaaacaaggaacggctgtcgagacggtatgtcgcgaaaaagaataaagctgcctggtaccgcactatcgacaagctcacacctggactgcttgaccgggaccttctacttataccggatatggcggctcagcccgatccgattctgtcgcatggaaagtatccgcatcacaactgctattggatcacttccgatgagtgggatttggaggttctcggcggcctgcttatggccgatacgacgcgtcgtttcgtcgatgcgcttggtgtcaagatgcgtggagggacgttgcgctttcaggcacagtacctgcgcttggtgcatataccggaatatagccaaataagtgacacgaacaaattggggctttcgcgcgcttttaacgagaaggacagggctttggcaacgaaattcgccgaagcggcttataaggaggccatggaatgagatctgacatcgaggccgcgattctcggcatgtacgattcaatcgaacgcgcccgcgaggcacaggctgcagcagggcattccgatcagggagcacgtcaggggatcacgtctggaaagcacctggatccgattgcagctatcattcgtgacgatctcattaatgcgggtttccatcctgatgaggtctatgaccaaggacgcatgtgcacattaccgggctggttccgtcccaccaagaactgggacttgctggcgcttgacaacggcgaactcgtaagcgctatcgaattgaagagcattaacagttccttcgggaacaacgccaacaaccgcgcggaggaatcaatcggctcggcatttgacgcgcatacggcgttcgatgagaatctgcttggttccagcagtattccaccggtcatgggctatgtgatgatagttcacgattgtccggacagtcggattgtcggacgtggggtgcggtcagcgcattttccgattgaccctgatttcgagggggcgtcgtacctcgatcgttttttgttgctctgtgaccgactccgtcgaaagagcttgtatcaggccgtctggctcgtgtttgcgaatcccgaggacggtgtggcctatgagccttcgtcggcactgacgtatgacaagttcatcgcaaacattgttatggcgcttggcgtgcatagggcgtaaaagaatgaaagcagaatcgatttcgttctttcgacttttaccggttccggtagccggtccgtagtctctatccgatcgtgcatgttccatggtgtctaagtgttgcaacattcatggtcggggatacacggtcggccatacgcaggggtgagggtctccgtatacgatgtgagatgctcacccttggcccctacgggtgtcggcggcggtccttatcctatttcgccgctgatctgataccgctggtcggaccaggagaagatggttccttccactgggcatatagtttgatttccccgcatttgtcttttgggaccatcgcgtcaaaatcatccgcgtttcttatgcttacgccatgaccgtcttcttgcgtattccatccttcaaagatgagtcccttcttccgacttgaaggctgatggtacgcgcttttcgccgaaagaccatagcttattattctgtgctcgtttattattttgagcttgcttttctgtccatcatggaagatcacatgatggccgtgcagtgcaaactcatcctcgcggataaaagaaataatacaaatgagagaaactacgattgagaagaaaaccacaaggcttaggataatgacaagcactaatacgcagatattatctatagccgattcgaaataaaccacttcaaataagatggaaatacatagccagaatacaaaattagagccagccaacatgcggcaaagtgtgggagaacagaacgaatcatgataatgatcttccgagtctggacgattggcgaatctccatctatcgattatgtaatcgatggcatatcccacggcaaggctcaaaggaacaaacagggcagcgattgccaccagcattagctccctggctaagagtttggcagtatatttcgtggctgtctcaattgacactgcaatcgttgccgagaacaacatggatatcgacatccaggaaaaaccccatatcgatattgggttatttgcttctttgacggcccggtatgaacggtaagcaacgatatatacaggaatccagattatcggcaggataagaaaagcgaggaggaaacccacgcctagtaagtcttcctttttaatattgcttaaaatgctgcttttctcaggggaaagcaatcccgagaatttgagcaagaagggtattgcccataggataagaaggagcagaagagaaaaaagagtaaaaaagaagctggctcttcttcgagacgttttattctcgattagttcattccgatgtttttgtgttttctcttgtcgccaacggcaccatgcatcgtatctgttcacttttgctgtctctgcgtcgatttcagcttcaagaagcacatcaggatgattctcctttgcctggcgaagagatgacagtcttgaaagacgcttctgctgtcttgaatatgcgttgcctccaatcaaagtcgatatcttgatggcacaatgagcaacaacagtcagaaggagaagagctgccaccaaagtgtagggccagtcgttgctgctttccgtcatagtgctgatggcttcagaaattaaacctaaggtttcttttattccattcattatcttgtccgtaatgtgtctgatcctaaaactacttcatgcacaacactaatactgtcgaccatctcttcggcaaggggcgtactgtgatggattccgagggctgaaactgattccgttatctcgtttggcctttcgctgtttggtgtgggtgagtgggtcgggggggtggtggtgctggtcgggtagtttgggggtatggataccacgtcgttgttcaccgccgccctgcaactgcctgacccgtggagggtgtcgggcgtggagttccgtgacgaggaggacggcagacgggaactgcatatcgcgatcgggttcgcggcgggttcgcggttcccctgcccggaaccggggtgcggcgaggccgcgtgtccggtgcatgacgcgagggagcgcgtgtggcggcatctgaacttcttccagtacaaggcgttcattcacgcgggcgtgccgcgcgtgacgtgccccgcccacggcgtgcacgcggtcccggtgccgtgggcgaggccgggaagcgggttcacgctcctgttcgaggcgatggtcgtggagctggccaaaagccagccggtcgcggacatcgccgagcaggtcggcgaacatgacacccgcctgtggcggttcatccgccattacgtggacgaggcgaggctttacgaggactacacgggcgtggaggccataggcatcgacgagaccagccggaagggccaccggtacatcaccgtggtcgccgacctggtggagcgcaacgtaatctgcgtggtcccgggcaaggactcgaccacgatcaaacggttcgcgcgggatttcatggatcacaacggcgatcccgaccgggtgcgtctggttacctgcgacatgagcctggggttcgccaagggcatccgcgagcggctgcccaacgcggcgagaatcatcgacaagttccacgtgatcaaacacgccaacgaggccgtcgacaaggtccgcaaacaggaggcccgcggcaacgcgctgctcaagcggaccaagtacctgtggttgaggaacgaatcgaacctgaccggcctgcaattggaaaccaagcgcagcctgcaacggcgacgattgaaaaccggacgcgcctgtcagatgcgcgagaccctccaggacatctacgacaccagcgccgatcgagccgaggccgagacggccctcaagcgtctgtgctcgtggatgacgcgctcccgactcgaacccatgaaagagttcgcccgccagatacgccgccactggcgggacatcctcgcctacttcgaccacccctacaccaacgcgatcctcgaaggactcaacagcgtcatccagaacgtcaagacccgagcccgcggattcaagaacatgggctacttcagcaccatgatctacctgacctgcggcaaactcgacctcagcaccgtcaccacctgacagacccacccacaccaaacagcgaaaggccaatttcttttaggtacttgctttcctaaaactgatgtgatacaatgatttaatccagaaaaggagtaaaaaaatatgcggcaacgtattcttaaataaaactataatcaaatagtgggaacaaaggattatgatagctccttttgtaggggcttagttttttgtacccaatttaagaatacttttgccttatcaattttgacatatc

SEQ ID NO: 1507 - DNA, 22536 bp, Unknown
  R257_15m  MAG No. k141_46573
aagcggaggagtgggagcttgacggcatggccgcgatcacccgcaacacgtacggcgaaggggaggcgtatttcctcggctgcgatctgggcgtgagcgatctgacgcgattcgtgggaggctggcttgccgcgcagccgcaggatggccggcagccggaagccaacctgcggtcgcccgccagcggcgtgacctctgacgttctgcacaccgtgcgtcaatccgacgacgccatattcgacttctatctgacacgtggcagatcggatgtcgaactgcgcgacatcgcaggggagccgatcgtcctgtgccgggcggaacggggcagtgccggcggcgcgtatacggtgcatcgtaatggcgttttcgtgacgaagcgcccgaacccgtcggtgtagtcagttgcgacgaaacaggagggcggagccgcggacggttttgtgagacggtccgcggcctcaccgttggaagccgcggactcggatcatcagcaacggacgcgccgttgatttccacttccggagcaacgatggtgagctttgccgcgacgagatgctgcaggacggtgccgacgtacatggtgcccggattctcccttcgccgctgcgctgtctgccgcagcagatgttccacggccgcatcaacggaaagcgagttgtcggactccagcttgaatggtttgctggtgaagaacgcctgaattcgtttgacccagtattgctcgatctcggtgaattgctctgctgtcggacgtaattcattgatgagctcggcatagtcatgcatcagcgccatggtgccgcggctggttcgtcccttaaaggttgaaccgatggaaccgtcattcattactttttcaacgataccgacacgctcattcgattgtgtccaatactgctttctttctgcatgaacaacggtactcggcaaggcggtaacgatagtcgcaaaggctaagaagcccgtacataatcgttttttttttgtagtgtttcagattttcagtagaatggcgacagccaaatcccgctggcttgctagtaaagcgttgtcctcggggggagttttgtttgttgttgaaagataacgcggcatcgaatagataggggaggcccggcatgggacgtcatcagcgtgcagaaacctccggactcatctccttcttgatttgcgccatcgttggcgcggtatcgatgaacctgtacatggaatacgcgccggccatctggcagctgacgcaacgccgattcatggtatgttcgggcatcgtggcggcatgcggcgtcatttccttcattattggctatgcgcgcaaatcacgttcattgaacctcaaacatggttggtttgcaccgattcgtcgcattttcgaaatcgtcgccctttcggtggtgtatgcctcgaccattttcctgtcgtcttttgcactcatcggtgcggccaacgacatgatgggcaatgccatcttctccggctatatctccagcgtctgcgccgccttcgccggcgtggtggggtacatgacctttgtacaggcggagatgatgaacgccaaaactattgccagtctgttgccgttcttcgtcatctccggcgtggtcaccgccggcatgaccaccgacgacccatactggtatcacaacaacttttcgcagctcggcgacagaaccacgtttgcggcccgtatgttcaactccacgctgattcttgccggcacatgcatcatcatcgtcagctacttcgccatctccgaactggtgaccaccgaacggctacagcgcctctggcacgaccgcaccaacagagatccgaatcgcggctacgaaatcccacatttcatgctgcgcatctccattctgtccttcctgctgatggtggccggcctggcattcatcggcatcggcgtgtttcggtacacgccacacaatctcttgcacaatatatgcgccaaaggcctgccgttcgtcatgctgctgctgttcgtgctcctgccgtggcttgcgccacgcctgtccaaagcagtgatggtggcctccgacctgaccgcgctcgtatgcgctgcattctgggtcaatatgatgatgggtcacaacaccctcaccaatgtggaggcgttggctggtctggcgttcctcggctggttcatcgtgttctcgcgccagatcgccgccatcgaggccgatcgcgcggccgctcagttgttgcacgcgcaggccatcgaaggcggttttgagcagccgtcttccgcacctgatcagcagatcgaatcccgcatcgctgccgaccggtgaataatttgtttgatagatttggccttatgactgaacgactcacgaatctctggcctgccccgctcgccgcacagccgttgaacactacggtaacggtgccgggtagcaagtccctatccaaccgctacctgattctcgccgccctcggcagcaagcccgttactctgattggcctgctgcgttcgcgcgacacggaccttatgatgggcgcactcgaagccctcggtgtccgctgcgacgtggattccgcaaccgataccaccgtaacggttactcctcctgtatccggccgattccatggcaacgtcaatgtgttctgcggactggccggcacggtgatgcgtttcgtgcccggccttgccctgtttgcagatggcccagtgaattttgatggcgacgaacaggcttatgcacgtccgatgaagccggtgcttgacggtttggaacagctgggtgcaacggttgattaccacggcgaggttggccgtctgccgttcactattacgccgcctgcaaccttgccggctgcccaggcgcaggtcagcatcgattcgtccggttcttcccagttcatctccggcctgttgctgattagttccaaactgcctggcggtctgcacctcgcgcacacgggggagaagaccccgagcctgccgcacattcgcatgaccgtggccgatgtgaccggtgccggcggtgcggttgagaccgacgaatccgcccgcacatggacggttgaaccgcgcgcaatgcaactgccgagcaaggtgaccgttgagcccgatctgtcgaacgcggcgccattcctcggcgcggcattgatcgccggcggcacggtccgggtgcctcattggcctgaaaccaccacccagccgggcggcctgttgcccggatatctggagcagatgggtgccgaagtatcgttcccgaccatcggcggcgtgcgctattgcgaggtgaccggtgacggcaccgtgcgtgggctgggtacgttcgatttgacggcggccggggagattgcgccctcgttggcggcgattctggtgtttgctgataagtcgacagacatggttggtattggtcacctgcgcggccacgaaacgaatcgtctggaggcattggtcaacgagattcgtcgtgttgggggagcggctgaggaattgcctgatggattgcgtatcgaaccggtgccggcggagacgttgcacggtgccgtgatggaaacctatgctgatcaccgtatggccacgttcgccgcgatgctggggctgcgtattcccgatatcgaggtcatcaacgtggccaccacgcgcaagaccttgcctgatttcgtcggtatgtggagtggcatgctgaggcagtaaggggtcctgtgttctggtggaactcccctcagtccgctacgcggacagctcccctcagagaagggagccaagttatagggcctggatcccctctctgagtggatctgtccgccggaggcgactgaggggagtatgacgcaggggtagtggtctcatgaccatatacgaatggggactgattccaatcggaatcagcccccatagtgttgcaactagagattagtgagatgcctaacggcggttacttacttggcgaaggtgttgccgtaggtatcggtgccagcctcggcgattgcggcggacttgcgggcgatggccagttcttcgttcgtcgggatcacggcgatgatcacggaggagtccggagtggagatgatgcgcggttccttggagcgggtggcgttcttctcctcgtccagcttgacaccgaacggagcgagcttgtcgcacaccatcttgcggaccacgtcgtcgttctcgcccacaccagcggtgaaggtgatcacgtcgcagccacccatctggtaggtgtagttgccgatgtagctgacgatgcggtgcacgtagacatccagagccagcttggcgtcctcgttgccttcggacaccagacggtgaacctcacgcagatcgccgtagccggtcatgcccatcatgccggaacgcttgttgaacagggcatcgagctcgtccacgttcatgtgggcgttgcggatcaggtggaagaccacagccgggtcgatgtcaccggtacggccacccatcatcaggccctcaagcggggtcagacccatggaggtctcaaccggcttgccggagacctcagcggaagcggaagcgccgttgccgatgtgcagaacgatctgcttcaggccttcagccggcttgccgatgacgtccggcaccacggaggagatgtactcgtgggaggtgccgtgggcgccgtagcggcggatgtggtactgatcggcgatttccttgttcagcgcgtaggtgctggcggccttcggcagctggaagaagaaggaggaatcgaagacgaagatctgcggaacgtccggcagcagggagcgcatgacttcggcgcccttggcctccgggccgttgtgcagcggggcgagcacagccagatccttgacctggttgatggtcttgttggtcacgagggccggcttcgggaagatggagccgccctgcaccacacggtggccgacggcgacaatgccagcctcagacaggttcgggccgtactcctcgaagaagccgagcacgcgcttcagaccctgctcgtggtcgtgaatcggctcttcaagctcgtgcttttcgccgttgtactcgtgcttgtagtggccgtcgaccggctcaccgatcttctcgacgaggccggaagcgaggccttcgccggattcgagatcaaccagctggtacttgatcgagctggagccggaattgatgacaaggacggttttcgccattgtgggcatcctccattgtgattgaatgttcccgtgagacacgggttaccgttgattagattactcgttgcttgctacaaaataagcattacagtggctcccgctggcgggagctaagccgggctcactgcgcttcgatggcggtgagggcgatggtgttgatgatgtcctgcaccatcgcaccacgggacaggtcgtttaccggcctgttgagaccctgcagcaccgggccgatggccaaggcgccggaggagcgctgcacggctttgtagccgatgttgccggcgcacaggtccgggaagacgaacacggtgacgtgtccggccacatcgttgcccttggccttggtggcggccacggtgggggaccaggcggcgtcgaactggatggaaccgaccaccggcagatccggagccttctccttgagcagcttggtggcttcctcgaccacgtccacgtccgggcccttgccggagccgagggtggagtaggagagcataccgaccttcgggtcgatgccgaaggcgcgggcggtctcggcggactgcagcgcgatctcggaaagctgctcggcgtccgggttgaggttgatggcgcagtcggcgaacacggccacatggtccttgaagcacatgaggaacgcgcccgagaccagtttctggcccggcttggtcttgatgacctgcagggcggggcgcacggtgttggcggtggaatgcacggaacccgaaaccaggccgtcggcatagccgagcaccaccagcatggtgccgaagtagctggcgtcggtcagttgcttgcgggcctgctcctcggtcatgcccttcttggcacgcaactcgcacagcttggcgaccatgggcttgagcacgttctcgtcgtccatggcctggaatcgggcgcgccccagactgttcagccccagttccctgccgcgggccaggatggcgtccttgtcgcccacgatgatgaggttcacgatctcgcgctcaagcaggtaatcggccgccttgatgatgcggtcctcctcgccttcgggcagcacgatggtcttcttgttgctcttggccttgccgagcaggtcgaattggaaggcgtacggcgtgaccggcgcggtgacgtccacgtcgagcgcggcgagcacctcgtcgatgggagcgtgcttgcggaaggtctcaagggccagatccttggtggattcgtcggtgaagggcacctgcggcagggtccagaccggcaggccgtatttggcgagggtctccttgacggagaaggcgtggcgcggctcgcagccggtcacgaagatgccgagcaccgtattgcccgcggctcgcatgccctcgatggacagcttgacggtctcgtcgagctcgtgcggccatcggtccatggtgcacacggccaggaacaccccggccttcagatcggcggcgacgtccgcgttgaactcgtaggtggtcgggtcgttgacgtgggatttgtcggtgccgacgatcagggcggcgttcgcgcgggagacctccatggcgtagttgaactcgccgacgatgtctccgcgggcggtgtccttgtcggcgcgcaccttatgcacgtcgaggccggtggacagggacacgccgagtcccgcattggaggcggcgagcaggatgggggtgaattcgtcatggttcgacacggccggccggaacaccatggtcttgtacttggaagtcaatgcgttgagcacgccgtaagcgacgacgttgcggccattggcgccttcagggctggcgatatatacacgggtgacggtcacgatgtttttgtctcctttgatgatcaacacgatagggaccacacctcattgtagtggcgattactgttatcgctcacgccggtgtcgcgccaatcggaagagcgtccccttggcgatactttccggggaaagtatcgcactgcatgcattccagtccctgttttgcgacgcattcccgggaatgttgtgcaaaagtcgcccgataggatagaaaacgaaaaaggccggtgtgtgaagcaccggccttgattgtggagctagggggattcgaacccccgaccctctccatgccatggagatgcgctaccagctgcgctatagccccgttttcaattgttggcccgttgttcggacctcgtatacattacgacgagatgtcgattctggcaaaagccggcgtgtcgccaaatgacaaaagtgtgatttggcgacactttttggcttgtttccgccattattcaggcattgagtcattcagttattgcttgaacggttccgaatgcaccggacctattggattagcaggggagtcgggaacatgatcagcgttcgcgttcccattcgtcggtgtcggcgatggccggaccgtgattgtagtccagcagacgccagcgcacagtgccatcgggattgtccatcggcaccaagcgcacccagtgcgcattgcgcaatgagaccaccgtggagaaggtcggatcgatcgcggaaatgcccaacagggtctgcaatgtctgcgcgatccatgcgccgtgcgagaacacgaacaggtccgtgtcgtctccggcacgcgtggaccagtcctcaagagcctccacaccgcgtttgcctacggcttccttgggttcggcaccatacttcagttcaccaccccgagactccatccaggaacggaagtcctcagggtagcgttcggccagttcagccacggcatggccatcccagtcgccgaagctgcgttcacggacgcgatgatcatcgacgggctcgattccacccaatacgtcggcgaaagcctgcgcggtggcgtgcgcacgcttcaaatcggagcagacaatgaaccggtggttgatttccggccgacgatcgacgtacaggcttttcaaggccgcggcggtctgcttgacctgccattcacccacggcgtccagcggaatgtcgacctggccttggagcttgtgagcggcgttataggaagtgcgtccatgacggataaggaaaatggaacgaacatgattggccatagtgacgatcctttcgattccagtgaggaaacagggaaaagggagggctgcctggtgccgtcaatgacgttcggcaacaggcagcccgacacacgaatatcagcgagtatcagcgaatatcagcgttatgtgattcgcacgttacgcggtggtgacggcagcagcgtccgcatgctccgccgtttccgggtgtgcgagttcaagatcgatggccgggcagtcgcgccagagtcgttcgagcccgtagaattcgcgcgattcctcgtgcatgacatgaatcacgaaatcaccgtagtcaagcagcacccactggccctcggtcaggccctcgcgagagcgcggctgacggccggagcacttaaggaacaggtccttttcgatttcctcggccacggccagtacctgacgctcgttggaggcgccggcgatcatcatgatgtcggtgatgccgagcaggtcggctacgtcgaaggccacgatgtcggtggccttgatacggtctgcggcctcggcggccacgcggacggcgttgatggaatcctgaagtgcgggcatggttcagcgctcccaggcgggcttccagccctcgacgttgtgctgcgtgttctcggagtagaccatcgtgtcgctcggcacggcgtggcgcaccacggagccggcaccggtggtcacgttgtcgccgacctcgaccggggccacgaacaggttgccggcgcccacatggcagccggagccgatggtggtgcgattcttgtgcacaccgtcatagttggcggtgatggtgccgccgccgatgttggtgtggtcgccgagctgggcgtcgcccacgtagctcaggtgcggcaccttggtgccgttgccgatgtgcgccttcttcatttcgacgaacgcgccggccttggcatcctcgccgaactcgttgcccgggcgcaggtaggtccacgggccgatgttcgtgcgtgcgccgatgtgcgattcctgcacgcgggaacgctcgaccacggcaccttcgtccacggttgcgtcaatgagggtggtgtacgggccgacgatggcgtcctcgccgaccaccgtgtggccttgcaggaaggaaccgggcaggatggtggcgtcgcggccgatctggacatcgtcctcgatccaagtggtttccgggtcaagaatggtcacgccgtcgcgcatccagcgctcgcagacgcggcggttgtaggtcttggacagcgcgcccagctgcacgcggtcgttcacgccttcgacggtgagcggatccggagcggcgaacgcgccgaccttgccagcggccttggcggtttccagcgcgtcggtcagatagaactcaccctgcgcgttgttcgacttcagtccggcgattgcctcggtaagcacggaagcctcgaacacgtagaccgaggtgttcacttcctgcacggcgagttcgctgcggttggcgtccttctgctcgacgatgcgcagcacgttgccttcgcgatcgcggatgatgcggccgtagccggtcgggtcatcgaggatggtggtgagcacggtggcgccgttgccggaggcggtgtggaattcgaccaggcggtgcagcgtctcgctgtcgagcagcggcatgtcggaggcggcgatcagcaccgggccatcgaccttgccagcctcggtgagctgtgccattgcgcactgcacggcgcgaccggtaccgggaatgtcgtcctggttcacgatggtgacctgctcgtcataggagcgggcggcttcggcgacgcgctcggcctggaagtgcacgaccacggccagcgtgtcggggttcagggcggtcaccgaatccatgaccctgttcaggaaggtcttgcctgcaaaagtatgcagcaccttcggcttgttggaacgcatgcgggtaccctcgccggcggcgaggacgatggctgcggataatgccataactgacgtattcccttcgatcggaatgtctattgagggtggaaacacctcaaaacaatagacggccgcccggatgtcgagcggccgtcagccgttcccccacctggactcgaaccaagacaaagggttccaaagacccgtgtgctgccattacaccatgggggagtcgtgggctttcggcccacaagtgttcatttataccatactgtcggtatttaccgaaagactacgccatgtcgcgtctcgcatcatgtgctttccttgaacaaacacgcacgtgatcaggcgaacaggaagccttgaccgtggtgctcggggtaggtgtcgaacagttcggcgaccgagccgtcctcgaatacggcgcggatggcgctggccagcagcggggcgatcgacaggacggtcaagccatcccagcgcttttcctcgggaatcggcacggtgtcggtcagcacgacctcgcgcgcaccgcagttcttgagccgctcgatggccgggccggagagcacgccatgcgtggcgaccacggtcaccgacttggctcccgcgtcctgcagcacgtggcatgcgcccgcgatggtaccggcggtgtcgatcaggtcatcgacaagcacgcagtccttgccggcgacgtcgccgaccacacggttggcgaccgcctggttcgggcgggtgatgtcgcgagtcttgtgcacgaaagcgagcggaccgccgccgagacgctgcgcccactgctcggccacgcgaatgcggccggcgtcgggggagacgacggcgacgttgtcgagatggccttggaaacgatcacggatgtagtcgaccagcaccggcatggccaccagatgatcgaccgggccgtcgaagaagccttgggactgcgcggcatgcagatcgaccgacatgatgcggtcggcaccggcggtcttcagcaggtcgaacaccagacggcaggagatgggctcgcggccgcggtgcttcttgtcctgacgggagtagccgagcaacgggcagaccgcagtaatggaacgggccgaggcgcgcttcaatgcgtcgatcatgatgagctgctccatgatcgccttgttgatgggtttgtagtggctttgcagcacgaacacatcggcgccacgcaccgattcggtgtagcgcacgtacatctcgccgttggcgaaatcgtatgcggtggtttcaaggacgtcgatgccgagctgctcggcgacatcctcagccaatttcggatgaatccttcccgtaacgagaataagattcttatcgggcttcccttcaaggattgcgctcaccatgtctcccaacgtgtggtctcgttgatgcagtcttcagcatagccgttcttcacgaccggttggacaactcagcgttgcctgccgttcacctgccgcttgcgatccattgttcgatggcctgtttgaccgcctttgcatagatatcgctatccatgctcgggtggatgccgtcggagccgagcacctgcgcgttcgcgttggctgtggcattccaatccaccagcaccacattgtccggatgtgcggccgcatagtcggcaagcacctggttggtaggtggaatccacgtacggtctccgtgggcattgaccagtaccagcacgcggtcggggccgatcatattacgaatctggtccagctgatcaggggtgattgccgaattggtgccaaggccgatcagcacccattgccgcagactgccggcggacagatcattgccgatgagttcgggggcgaccatgatggagcgggaaacgctcgcgtcggtctgaatgccggggaagacttccgaaaggccctgtgatgaggccagcatcaccgaatcgcctatggcggtaatctgatcgccggtgggcatctcatgcttgggcttgggcggtgccggcacggcatggcgcagcagcacgtgttcggttttctgtatgcgttccagttgtgcggcctgttgctccagctggatctgcatggcggttttcgcaggtgcatgagtaatgccctgcgcgcagccgaccaacgacagcgccaggataacgtcaacggcaataacccgggccgcatgattcttcttgttcgtgcgaaggggcaccacgacggatatcaccgagtgcattgccgccggtttctccaccatcagccaggaaatcatcaccgcaatggcggtgagcaacgcggtcatgatgagaggccaaggccctgctgccttgaagatcttcggggcaagggcgctggaaagaatccacaacggccagtgccacaggtaaatgccgtacgaatacttgccgagggcggccaatggcttgaacaccatgaggctttgcatccaggaatcgtcggagatggtaccggcaatcagcagcacggacaacaggctggacaatatgatgccgccgcggaaggcgaatgcatcctgtttgccgataaccgtcatggtgaccaaggcaatcaggctgaggaatgccaataccggtgccgtcgcattccagatgcgatgctttacaggaatctgaggtaacggagcccggtacgtggcggccgaagcgctcgatctaatggtgcggggcatcggcacagctccctgacgagcgtgacccaactgaggagcggtgacccaccaggcgagagccacacccagcatcaggcccatgctgtgggtatcggtgccgaagtagacgcgggtggggtcgcccttgggcacgtacatcgcccacatggcgatactgctgaacaccgcgagtcccagtgggatgagtgagggcagtttcgtctggcggagcttccacatcagccagacgatgaacggcacgatgacgtagaactgcatgagcacgccaatgaaccacagatggcgaaacacctgcgggttcatttggtcgaaatagctttggcctccggcaatggcgtaccagttgtagcagcccagcagcacggtgatgacttggtcgcggatggaaactagaatgtcgtgatcgagcagccagccgacggagacggtgaccggaatcagcagaaacagcgccggatagagacgtactgcacgcttggggatatatcgcacgagattcagcgatccggttttcgccagagaacgaatcaaactgacggcaatcaggaatccagagacggtgaagaacacgtcgactccgtagaatccgcctggcagcagttgctgcatgcagtggtacagcacaatggctatcagcgccagtcctttgatgccgtccaaacccacgaaacgtttcacgggacttccctctctgactgcggctccgacggcgttccgccgcgtgtggcaaacgtaacgcaaatccaggattgaatcatatcattcctgtcgtacgcggcatattccccgtattccgcgccctggcggcgcgccccatgccgacgtgccgcagccgggccgccgcggcacaccactcacgatgcgggtcagggccgtaccgacccgctcccgcgtgatgccgtcaggcagagaccacgctcctacatatgacgctatatatagcgaccggtaatgctttcatctgtgtgtctgatctcgtccggcgtcccgcaggcgacgaccctgccaccttcctttccgccgcccggtcccatatcgatgatgtaatcggcgttgtccaccacatcaaggtcgtgttcgatgaccaccacggtggcgccgtgattgatcagcgtctggaaaacaagcagcagcgtcctcacatcctgcggatgcaagccgatggtcggttcatcgaaaacgaacaccgagtcgctctggtcctttcccatctcgctggcaagcttcagccgctgtgcttcgccgccggaaagtccgggcgtttcctcgccgagggtcagatagccgagtcccaggtcgtgcagcacctgcagtcgttgccgggggagcttcagtccgtcgagggcgttcagcgcctgatccacgctcatattcatgagctccggcagactgtatgcattgccgtccttcgctttcctgcggatgtcgaaagcatccgcgccgtaccgggaaccccggcagtccgggcagggaatcttcacatcgggcaggaactggacgtccagcgagatctccccggttccgtcacaggccgggcagcggagtcttcccgtattgtatgagaaatctccggctttgagggaacggtccttcgcgtcctgtgtctttgcgtatgcctttctgagctcgtcgtggacattcgcgtacgtcgccacggtcgagcgcacgttgatgccgatcggcgtcgcgtcgatcagcttgacctgtgcgatgccctccgcctcgatgttcctcacatgtcccgcaagcttctgcccgccgatcttcgccctgagcgacgggatcaggctttcgagcaccatcgtggttttcccggaaccggagacgcccgtcaccacggtcagcctccccatcggtatccgcacgtccagaggatgcaccgtgtggatcatccccgtttccagatgtatggcgcccttgtcgaacatgcgatccgcctgcgtgaccggacggattcttgcttcataccggtcggaaagatacggcccgatgacggaccgtggattcttcgcgatgtttgcgatccttgccctcggcaatcaccgtcccgccgtccgctccggctccttgccccatctcgatcatccagtcggcatgcttcaaaacccgtgtgtcatgatcgacgatgatgacggaattcccatccgcccgcagatcgtccatcacgccggtcagccccttgagattatgggggtgcaagccgatcgacggctcatcgagaacatacagcacgccggtcgtccggttgcgaaccgcccttgcgagctgcgcccgctgacgttcacctgtggaaagcgttgaagccgcccgatcaagcgacaggtatccaaggccgagatccatcagccgctcggaaacgtccatgaacgattcgcggatgctctgcgccatggggcgcatctctttcggaagcgatgccggcacgccctgcacccaggggatcagttccgaaagcgtcattgccgttgcccggtccagaccgattcccccgcagtctcggcgtgcgggcggcctccgagagccttgtcccatggcagtccgggcaaacgccctccttgagatatttctcgagcctcttcattcccttctcgtccttgaccttggcaagggagttcttgacggaattgaccgcgctgtaatagttgaaatccatttccgacggttccagcgtgcgcggattgacgtaatggacgtgatgttttttcaactcgccgtggtagacgatctccttttccctcggcgagaggtcgcggaacgacacatcggttcgcacgcccatcgtccgtacgatgtccttcatgagcgaccacatgagcgtcccccagacgacgaccgcgccctcgtcgatcgtcttggaatcgtccggcaccagcgtcgcctcgttcacggtctggacgattcccgtgccgccgcaggtcctgcaggcgccggtactgttgaaggcgagctcctcggctccgggaccgtggaattgcccgccgcaggccgggcaggtgatttcctgcatggctgcgaccgaaagagatggcgggcagtagtgcccattggggcagcggtgactcgcaagccgggagaacatgagccgcagaccattgagcagttcggaaagcgttccgaatgtactgcggatgccgggaacccccgggcgctgccgaagcgcaagcgccgccggcacatatcggacatcctccacatccgcgcgttccgcctgcgtcatcctccggcgagtgtaggtggagagggattccaagtatctgcgggatccctccgcatacagcacgccgagcgcgagagaggatttccccgagccggagaccccggcgatcaccacgatctcgtgcagtgggatatcgatatcaatgttcttcaggttatggaccttcgcgccccgcacctcgacgtgtcttggcggcatcttcccttgtctgacttcactggacatgacgatggcctcttcgcctttccgggtctcttccgtgcctgatggttgtttctgttctgcgtggccacatcatagtgtgtttcgaccctatatcaagtgcgcattctcccagcgtagcaatatgcatgatagcgtttcggaatccgccggcaaggtcatgggctttctgccgcgatccgcgatcgtcgaccagaatgtgcgcgtctggaacatggccttcgactccacgccgagcgttccgtccataaccacccgctgcttttgaacgatatacgcagctgcactgttcgcccaagatgttttgcggtgaagttctacggatcgagagaggatccccgccacaaggcggaaaacatgggcaggaaaacgccgatgcaatgccgttccggacgaatgaggaattcaaggtgcttatcgaggccatggaaagcggacctgttggatacgccgtcttcatggcagactgcgtctccccttatggcaagggctgggccggcagacggatgaagtgcggctgtgatcacttcggaatgaggaagttcgggatgcacgatgcgcatcatgcccatgaggtcgtcgatcgggtcgtttgcttcggatgccgaggagacagcagaccccgtatctccgcctcggcattcttgaggctttcgacatcattatccgatattcctcggtgagtcgggaacgcgtcgcgtggcatctggagaatgtcggctttcgtgggatggcctacctcctctcgtcgggcatctagtgctcttggtcgtaacaaggcccaagaagccgcgtccgctggacgggacaggcagggaaatacctgatggaggctacgggcgcactaagctacggctaagccacgtcaggtcatggatcatcacgaaactgattcgatttttttttatcgctcagtgcttctgtgtttaggtaaaagaagcagacgttataatgggaagcattgttctgcgggctatcctactcgccgcatctcagttttttggaggttctgatggctagccagatttcaagcataatcggtgttcaagtgcgacgtggagccttctcggaaggacctacctcagaagggaccaacgttcgactgtttcacgatagcgatagcaataatacgagacggcatcgcgcatcgattgtctttggccgtaatggatcaggaaaatcgactattgcacgtgagatcaacgatatcacggaaggcaatggtactggttatttctacgattgtaatcagagattagatttagacgatgctgaccgagcacgaataagggtcttcaacgaagattacatcgagtcgaaaacgcgtattggtgacgatggcctccaggcgtttgccatgcttggcgagcaagtcgaagtagcagacgagatcaagaagattgacgagaagattgaaagcattgaagccgagaaccaagggctaacgaagaaaatcgaagagcttagaaatggtgagaagtctcttgagacgctaaaaagaaagattcaagacgcggcagttaacagtggatggaagtcgcgagcagagaaagtcgacggcaagaagcctaatttcactgataatcggttgaatgagatatgcaatgcagtgcctggtaaatcgcgcgtatgtctagacaataagttcaatcaaaaattgatggactacgaaaaagccagtgcggccggtggaaatcatctgcgtgagcttctgccgcttgagccaagcctatacgatgaagctcggattctagagcttctggctaaacgcgtagaagaccccacgttaagcgatcgtgagaagcgaatcctcgagcttgtacgaagtggtcatcagcatctaattgaggagtcagccgaggtcttttcttcatcggaggcggacgtttgcccaatgtgccaacgaccaatctcctctgagttaaaggcttccattgttgatagcgtacacaaagtgcttagcaaggaagtggataaattcaaagaggaactcagggcgtcgcacttggaagaaataatcccacgggatgtcccggaacaagtatccgctaagctaaagaccgaactgctaaaagcagagcaaaaggcaaatagcctaatagaaaaatacaatggcttgatggtggagagagagtcaagcgtttattctccaaagactattgaggctctcggtttgtcagaagtgattcaagcgttgaatgaagaaattaaatccattaataaagaagttggatcgataaataaagacatagatgagaagtcaaaaattcatgacgagcttcgtgatttgaacaataagattgctgcagcagatgcatcctcagagattgaaaagcacaaggaggcaataaaggaatataatgaagctcgggacaagaaaaagaaaaacgaagatagtcttcagcgcttagctcgtagcagggccgaacaggaagccaagatgaagaacatggacatcgcagttgatgtaattaacgattacctcgcgaatgtctatttcgataccaggagattccagctttccctggatgatggtaaatacaagattatatctaaagggcaagcggtaaagccgaatgatgtatccacgggcgagagaaacattctcgcgctttgctacttcttctctgagagtggaaaaaatagggagcggcatcacgaggatgacgaccctcagtatctcattctcgatgacccaatttccagttttgacatggagaacaggataggagtctgctcgctaatcagagagcgtgctggacatctattaggctcgaacccggaaagtcgtatcacggtcatgactcacgatgggggtgcggcaaacgaactgaaggtcatcttcgatgacataaatgacacattcagcaacggaaaattccaaattgatttactcgagctcaaggacatgttttgcgaaacgcgtagtaaaaaagccaacgaatatgttgcgctgttgaagcgtacctacgattttgcttgcgccgagaatatagatccgcaggagtcatacgtaattggaaacatcctacgaagggtgcttgaggggtacagtaccttcaactacggcattggaatgtccggactgtctcgcgatccggacttacaagaacgcctcggtgaccagttacccttcctcgcagatgcaatgtatcgtcttgctctgaacgatggcagccatttgcaagatcgggaaagggagtttaaccccacgaatgactttgggcgatatagcgatgaagagaagcggagatgtgcacagtgcgtcatggttattctctataagctggatagtgttcatctgaagaagcatcttgtttcgacacaggttagatgggaagatatcagaaggcacctggacgaatggtctcaaagttttacccccatgatttcgtgattccgcgatgacgaacgtcatatagccattcgttgtgctcacatcagcatttccgcagttcagagtcgtcgctcctcacttggaatttgtcactcttgggtcgggtgaacatactctccccgggtggctacagggaaacaggttatgtaacgattgagcgggaacggggtgtcggccatctcctctgccagggaagtgctagcagctgccgggcggttttgaactaggattgttgtcgcattgagatcattccctgactctagtcggctcatgtcatcgtctaaatatagtctgctaccagacgttaaactctcgacctagcggttgatacatagttgacaggaggtcaacgcaatgacagtcagaaaaaccagaagcgattgtacagttaagacatttgagaagtcgcgcggattgcccgaggggacattgcgccacgaggatggtcgcaaggtccgcagcgacaagaagattggtaccatccgcaaggagaaccctgggtttaagttttaacgcctgggctgtctgctatttatcaatggtgcccttccctgatttagtgtgtgtttacactatctaggttttgcgtggtaattgtcgtatgcgtacgccgaggtgcgacatcacgcttgaccggttcatgggggtcgcgcatccgttgccgcgccggcgcggcaacgtgacggtcggcaatcacacgttcgtcaacgccctgccgtggatacgccgcgcgggagccccgtggagggacccgccggagcgccacggcaagtggatcaccgtctgccggcggttcgaccgccggtccgggaacggtgcgatggggcgcctgttcacggcgttgcgggaggcgcggatcatcgggggtggaaatccgcacgcccgctcatggcccgcgcgtacgggggttccacccggccgccggccgagtcgttcggcctgacgccggtcgtgccgcccaaagggaaaccgtgcggccccatgggatcgcgacagggaggcgtacacggggcggaacatggtcgaacgcgtcttcaaccgcatgaagcactaccgcaaggccgccacccgccacgacaggctcgacgagaccctcctcgccaacccccggcccatcctcatcgccgtctacccgaagaacacagccagaaacccaactagtgtaaacacaccttagctcaaacatcatcgcgacacattcaatggagtatttgaggtaataggcgtaggagtgagcggcttcggaagaatccgctcggcaagaatcgcgaagggtggagatgcttggcgctggaatccacagatggtcggaatatgcatcaggcattctgcgaatcattgtctgatgatagtagaagtagcctgtccaccagtttggatgcgagaaaaacgggctagccaacatgaagtacttgactccggtccaactttctgcaggcttgcgaacagaagtgaactcgggaaagtcggcgtggcaatagcaatatccgctgtattcctcatccctcactaaaacgggaaggggatgaaccatttggaaggctcggagagcagctgaaggagcctctcgagcggtgtcttgcccaaaccaaaatgcctacgccagagtcgctcggtctcgagcgggttagccgtcttctttttttggggtattgctgtcagcgttcctcgtatagacggcaccggcacgaacgatactgcgcccctctccataatcacggtcaaataataaggcagggattcgctatcgtggtcaattaggacaatgtcaacgcaagcgttgcccagctcaatcgatgcgacacgaactttgggaacccccatcgacacgtcgctttgtacgcagcatatcaacgatgccttgcgtattcctccgttcgcccaagagctcggcgccgcccgtgagctaaaagtccccttcttcgtcaataccgataatcaaaagccccgttgtgtcttcgggattattcgccatgcagattatgccgtgaagcaagtccaccttgtttccatgccactcacgcttgaaatcccagtaggacccttcgcgcttgaggtcggcaagatctgctactaattcgggcaatgattcatcatccgtatgccttggttccattcagcacctgcttctctgtcctattgtataagggactcagaggttcttgcgagtggactctggaacgataggtgaatgctttttgcctcctgtctactcgtttcttttaaagttctctgcctgctccatgaccttctcgaagacctcttcatcccactcgggcggatagccgttcttatagagcagtacggtcagatccatgttgagttggcttttgatgtcatcacgcgtcgaccagtcagcatattgcgccttgtcgtttacgagctttgaaatctcttttgcaagcgcaatacacttctcgtcgctgaagacaaaaccatggtcgtcgcgcaccttcaccaagatgtcatagaatgccttctccgcgtaagtaacacccatcctctcaaacgagctcttgtcttccttgagatcgcgaaggatgtcaatgagctggtcgctcaggttgtcgacaaaatcagatacgaccttgctcgtgaaggtgaggtcgtcgcgtgagttgtaggcgtccaccaccttgcgaaggcgctcatcgaactgccgcgctttcaccttgttctatgggcggggttcgcgggattggcggtattgctgggttttggcgtggtttcgccgggttcgcgccgtcgtgcggcgggttgttggggacgttcgccggtaggggcggacatcgttgttgcacggtggttgcacttgccttatggtctgctgtcatgcgggcaggccggttcggtgggttgccgttccgggggtcgcccgcgtgaggcaggtgtgtcatggctggttcgaggcggcgcggttggggtgccatcaggagcaggaaggtcaagggcggcgtgagttattacgcgtcgtaccgggatccggtggatgggtcggagcgtgtca

SEQ ID NO: 1508 - DNA, 17717 bp, Unknown
  R257_15m  MAG No. k141_46769
cgtctgggttagcgaatcccacacgtcgctcatcggcttcaacacgttgaacaacgcgacgggtgtgccgatggcgatgccgtccaacgggatgcggtacaacggcatgtcgtaggtggtgccgccatccaacgggctggtcgtgttcaacgcggggtccgtgggcgtgcccgtggtgggagtgcccttgaccacgagcagtcgcgccgactcgattgactgactgcctttcgtgtaccggcagacgaccagatcgttacgtttcatgccctgtgagccgttcgtgatgatgaggtcttcgggagtgccctgactgacgtgtcggccctgcatgaccagctcgcccgtgccgatggtcaccttgttcgcggacacgacggtgatcttgaacttgtcgtgcacgttcaacacgtagtcgtcgaggccgaggatgccggcgttcaagcccgccgcctgctccgctgtcgcgtgcgccttgcccgcgtgtcctgttacgagttcagccattctgcttgcctccgttctgcatccaactgtcgaaactgttgtcgtagtccttgagcttgttcacatagtccgcgtaatcctgttcgcagaacaggtagtcgtggcccgcgccggtggagtccaaccggttgacgctgtaccacgtcttgatatccgggtcggtcaagtccttgtaccacttgtttctgccgcaacggtcgcattgcatgaccgtcgcgttgtcgatacgcgccatgatggctcccttccttattcggcctcgtaatcgacgctcagcacgccgtcggagaccttgacgattttcttcgtgatgctcgcgttgacggtgatgccggtgagatggccgcgcgccgtcacggtgtcgccaacgtcgaacaccacgttcgcgtcatcacggaccgtgaccttcacatcaccctcggattgcagttcctgcagcttctcacgtgtcttctggttcagttcgttcgcctcggccgagctgtagtcgtagacctgcgttatctcatccacgccactgagcgattgcgattggctgacattgcctttggcgtccgcataccagtggacgacggttctcgcggccaaatcgcccttgcccaggccgatcatgtggttcggcttgcgccacgtgcgcgtcgcgtcgaaatcaatcaagtccgaatcaatcgagtcgccgtaatgcgcgatgggttccgcccagatgttgacctgaccggacgcataggcgagcttgagtttcagtccgttggctgcgcacatcttccgcaaaccggtatacgcatccacgtaacggtcgaactggtagcttttgatggtctgcgcgccggcagtaggcgaatccaccgcctcgaacacggcatccaatcccacgcggctgatgagcgagccgatgaccgaggacgctgaaccggaaaccgtcagataatccttgcctgagtcgggggcgagaatcttattagccagcatgccgtgccatgtgcggccggaataggtgagggtggattcaccacgtttcagagagtccttcagcgcgtccaccacgccgccgcactcgccgccgtcaaggtagacgtagctgccggattcgatgagtctgccgctaacggtgagctcgaaatcgttctcgtccgcgccccatgcggagtccagcttgtagtcaccgacgctttcacggtcaacgccttgcgcgtcggtgataatcagttcggccatggcggttcgctttcctccgcgtagacggtcagatcaacaccgaagccattccactccacggtgctgtcgccgggcggaattggctggaatatgtattcgccgccgttgagcccggttccgcgccggcctttgtcgaacacgttggttttgtctccgttctcagcggtcatgacgatggtgcgacggcctgcaatcgaagtgacggtcacgtaggagccggacggaatctccatgttgagcgcgtaccggttgcctcccaacgtgagctgcgggttcgacacgggcccgtatatcaccatcttgaacggcatggccgtaggcatgggattgttcgcggtagcgtttcgagtggtcatcagataatcatgcgggtaatcgtgcggatagtcgaggtcgaggccgggttgcagcgcgtccgaccagaagtgctgcacggctccggccttgcgccagatgccgtccaacaggacgacggtgagcttctgttggattatcgccggcgtgatggtctgcggttccgccttgaccacgtaggcgcgagtcgtccacccgtccgcgtcgaacgtgccgggcgttccggcgcccaggtccgcgtcgaacaggcggcgagtcgaatccaccttctcggggcagcggacataggttaggtcaagctcggcctcgcgcgccgtgcgacttactccggttagactccggtatccgagggtgtacgaccattcgcggccgcgcagcccctccgccgtctgagcccagatatcgggcccttccagtgggatcgtctcaccggtcgaggcgcacacataactaagcgatcgcatttcgtatcacccttccgagttcacgaccatcgacttcgatgccgagtttctccataatcagtggcatatccgcgtgcagcgcgcgcagttccgacaggagttcgccgagcagttcgccagataacggttcgccgccagtcgagacggaggctctggtcgggctcagaccgtagccggtggctacatcgggagtcgtgaaccgtgtggaggcgatgtccgaggccatgccgttcatgctggacatgacggcggcttggctgttgctgatgccctgggcgagaccgagaccgatgttccgacctatctggtcgcggaacaagcgtgacggcgagtggatgccgagaaagttcttcacgccggagatggcatctttcacgccgccgagaatggcgctgccaactttgccgatgctgcccgtgatgccgctgataatgccatgcacgatctgcgagccgatggacaccatgcgtcccggtatggatgcaagcgtgttgaccagattgctcaggaactgctggcccgcgcgaagcgcgccggatgccatgctgctggcgaacgagccgaccgcgcttatcgcgccggaaagcccggcaccgatgcgtccgggcacctgcgagatgtaggagccgatggacgagaggaaccgggagccggcgttgaccgcgttcgacgccatccggccgacgaagctggctgcggcgcttacggccccgctcagccacgagccgacgttcgccggaagctgggagatgaacgtgcccacgttgctgaggaaccaggagcctgcggaaagcgcgttggcacccatctgcgcggcccagctcgccaccgacgcaaccgtggaggtcagccagttccagatattgcccggcagttgcacaaagaacgtgccgaggttcgtgaggaattgctggcccgcagaaatcgcctgagagccgagctgcgcggcccacagcaccacgaacgtgatgccataggcgagccagtaggctatcgtcgccggaagattcgtgaggaagttcgctatgttcgagacgaactgctgtcccgcctgcaacgccgactggccgaagctcaccgcccacgtgccaatcgacgtaatcaggttcgacaacgccgtcccgatcgcggaaggcagttgctggaaccattgaatgacagactggatcgcgttcgggattgtctgcgtgaagaagttggcgatgttctggccgagactcgtgacgaacgaaaccaccgactgccatgcggatgagaggaacgaggtgaacgaggcccacgccttgcggcccgtctcggtctgcgtgaagaaccagacgagcgcggccacgagcgcgcctatcgcggtgacaacgagaacaattgggtttgcgttcattgccgcgttgagaacccattgtccggctgcggcgattttcgccgccacgtcgaacgatttcaatgcggtgacggctgcggatatgaggctcgccgtcttgaacgctgcgaaaccacctgcgatgccagcgatgacggttcgtatcgcatcgccgtgttcgctcgcccaatcaccgagcgactgcaatgtggacgcgagtttttcgacaaatggggcggcggcgttgaaggcgtcgcccacaagctggccgatgaaggctgcggcgccaccgttctgaccgaccgcaaggaaaccggttactgcgtctgccaatccctgaccgagctgcgtgagccccttccagagttcgctgagcgacgcgaggaacgcctgcactccgccgctgtcggaaagcgtgccgatgaagatgctcacgttgcgggtaagcgcgatccaccagttgacgagaggggagatgatgttgttcaatgccgtgaggaagttctgcaagcccccgccattcgtgacgacatcgagcagactcccgccgaacgcctgcgcgttcgacgccagacctttcagatacactccgagctggccgaaatcggactgccagatcgacacaagcggctgcgcggcctgcgccgccttgccgaaccagcctttcacgccggtgaccatgcccgccgccgcgtcgccgattttgccgaactgggagctgaaaccgttgatcgccccggcgatgttctccacgccgaccgcttcgatgaccttctgcacggccttggcgacacggttctgcacgttctccatggccgtgccgatgccctgagtcgcgtccttggcctgctgggcgaacgaggcgtatttgccgaaaccgttctggttcagttccatgaccttcttgttgaaatcatcgaaactgattgacccgtttttcatggcctcatacaggtcgtttgagttcttccctgcgcccagcatggcctcggcgacctgattgagctggccgggcatcgcggcctgaatcgaacgccatgcctgcatatcgaccttgccggcgctcagcatctgcgtgtactgggtgagcgcgttctcctgctccatggtcgaagcgccgcccgcaagcatcgcgttgttgaacgcgagggcgatgttcgtggcctgatccagattgctggtcaatggggcgagctgctgcaccatgcccgtcatcgccgaactggtggtgggcaggccgtcgagcgcgctcgagatcttcttgatggaggcggccgcgtcctcggaactgtagccgaggttcttcatgaccttcgggaagttgttcatctggtcggcgcgcgagatcgcggagttcaggcttcccgtgaccaccgaggctaccttggagaacacggtggaggcgatgccggcgaccgcgcccaccttcgccgcgaaaccgccggagaggcccgagccgatgctctggccggccttctgcccggtggatttcgacggcccgtcgaacgcgttctcgatggccttgcctacgcccttcatgctgggcacgatctgcacgtacgcctgagccagctggtatgccatgaccattcctctctattcagttgttcattcgttgtgggtgaagggtttcgtctccacgtccgtgaagtcgcggctcatgaacgcgtcgagctgttcgatggtcagggccatgggcttgatggtgcgcgtcctgcgcgtggcttccccggagtcctccggcttggaggggttcgcgacggcatggccgcttccgttgccgggtcgtggcagcggttcgggttgtgggccgcgtttcttcgggtcggcgttgccccacatccacatgttcatctggtcgatccgcgcggccatcagatactggtcaagcgtccacgcggccggggcgtccagcttctgccagataagggagccggcgggcaggttcgcggcaaacgcggccgtctccaacgggtccagctcgtagatgacgagcccatatacgcgcatcatgtccgccgccagctggtcggggcagcggacgagcaggtatacgagcgtcaggagtttgggaaagccttgcccatctcctcgaacagttcgttcaggaaggctcccatggtttcgccgtcgatacgaccgtcagcgcctcgtaattcgttcttggccttgccgtatgagtcgccgagaagtcggcgcaggaacgggatgatctgcaaggcgttgcccttcgggtcggcctgaaggtcatagagagattccacgaactcccaatcgtccagcaccttcgggtcgatggtcagggagatgcccttgacggtgacggtgcgcggcttgccctgcgcgggcctgtgatcctgcggacggttgccggggacgttgttgctggcggtattaccgtaacgatgatgacggtttcgtgacataatgacttctccaaaaaaaaccatggacgacttcgagggttgaaaaaatgagggttcccgcgtcacggggaagtcgtcgaacgcatgacgcgggaagaaccgttattcggcggccggggtcccttcaccggtttcggcggtctcgtcgccgttgaccggatcaatgaccttgccgaccagggcctcggtgacggccacgctacgggacgcggcgatgccgacgtattcgatggcggtgacgccggagcccatgtcgttggcggagacggtgatgtcgtacacctgcgggtcgccggcatgcacctgacggtcgccgaactcggcgcgggtcgcgttgccgatcacgagacgatccttcacatcgccgctcatcgcgatctcgaacaccaaaacgaagtcctcgtcggagggcatctggtgtttgatggtcatgctcttgtcggtgccggtgaccgcgtccgagttatagcggagcttcgcggactcggctcgcagcacttcgagcagggcgaactggtaggactcggcgtagctggtgatgatcttcatcacggtggtaccgttcgcgtccttgatctcggtggtgtcggtgtcggtcgtgttggtcaggccgtcctcggacaggtagccgagcagcttgtacgcggagggcaatgcggtggcggagtcggtgggcagtgtggtgccggcgggtgcccagtaggcgtagccgccgaccttgaacttgcccaacgacaccatggtggaatcgttggttgtggaatcaaccatgatttacagcctttctaatcgtctgatttgataatcaactggagaatgatttggtaacggggccgcccgtcgggcatggggaaatgcgtgcgcccggtgatgtcgatatcggcgacctcgggcagttcgacgatacgtttgagccgggggagtatgagtttcgccgcagcctcggagaccagccagcgcgactcgccccacacctgcaccgcgataagcggcaggctgcgaaacggttcgtccgagcctcccacctgttcgacggtgacgaacggcatcggatgcgtggccgacgatccggcgggcacgtcgaacatcgccggatattcggccttgatcgtcgggtccgcgttgagccagtccatgacgagtttctccgcgttcacggccatcagccgccacctcccactgctttggcaagcgtgttgtgcaatgcgttgtcgacgtgggccgcgtggttggccggatagacgttcgccgtggcacctttggggccggtgcgcacgcttgcctcgtaacgcggaacgtgatcctctccggcggacacatgcacgtcacgcatggcggtggagttggcgcgtcccgcgattttgtcggcttcggccttgacaatgcgtgcgccctcgttttggcggtaagcgaggaacgccgaataatcgagtctcacggtattggacatcagccctccgaacccgtgacttcgaccttgaggttccaggcggtcggcttcatgccgccgtctaatggcctcgggtctccgatcaccttgtagtcatgctcgtcgatgcgtatgctcgccccgcgcaggctccggtatgcgtagctgcgcgggaacaggcacgtgaacgccacggtcactccgtcagggcgcagcgaatcggttgcattcgacatggcacccggcgagacgagcacgttgcccaccgattcgatatcgtccttcgtgacgggcgagccgcccgggtcggtctcgccagtgggcgtgcagcgcaccactttcacggtctcgcccctcatgacgcctccccgttcgacaggtcgatgctgtagaagcgttggccggtgagcccaagcgccttcttctgtcccttggacagatagaattcgccgcgaggattcgagaaggtcatcgactgggtgaaactgcccgccgtgagactgagattgctggcaccggtcgtatcgaaaccggcgccctcggtctgcatgtcggacgagatcacatccttggcgagctcgcaagcgatgcgttccaacgtggcggatgcgatatcgcgccatcctggacactgctcgcggatgaactgcgatgcatcagccagccgctggtcaacataatccgggtcgtccggcatctgcttccagcgtttggccaattccaaatgcgtggcaaatgggttttcttccgtgtcatcggacatgacggcctccttaatgtcaggatgcgatgatgccgaagccgcgtgctacggccagcagcttcagtcccatggccatcactatgcggccactgcggagggcggcgcgatgacatacgccgggaagcgcttcgacttgtcgggctgcacgtcgttgacggggtttgcgatctggaagccgacgcggaacacgacgcgcatggcgacgcagtcctgctgggcgaggttcagaatcaccttgccgttatcgtccgagataaccgactggtcaagcagcttgtaggtgatgtcctgacggatgccgaccacgaagttcgaccagtccgcgccgagcagcacggccttggtggcatcccacgcgccgttgtctacctcgttgagaccgaagccgtacagggtggacggggcccccgaggcgagggacggcacgtagatcgggctgccgttggcgttgcgcaggccgataagctcccagttcaggcccggcttgctggcgaagccgttcatggcgaagccctgttcggcgagcttctgacccatcgaggccacgtccttggcgagatccttgccctgggtgagcgtgttgtgcgccgcgatggcctgcgggacgatgccttcagggaagctggacggcttgtccacaccgaacagggtcgcctggtccagcttgtagccgagcgcggacgccagacgcggcgtgacctcctcccacagcggaatgccggaatccgcgatgacggcctcggggatgggcacgatggccgcaagctcctcggccgtgatgctcaggccagaccatttcatcttcgtggtctgcttgaggccggtatcgccgccaacccagtaggcgatcggcttggagtcaagcaccggctgcgtgcgcgtgcgggtgctcatgcgaatctgacgcatgcgggtgagggacacactcgacttgggggcgtcctggataatctgggtggcgtattcggtggagatgagtccgccgccgaggtcgccgctggtgatgatgctgttcacgttggaagtcatcgttatgccttctttctatggggttggttatttgcgtttctgcttgaggaactgatcgcgcagccagtcgcctgacgagccggatggcgtgggcggctggttggattcggatgaggcgtacaccttcggtttggttttgtcggcgatgtagtcggcgagcgccttgccgttggcttgcatctcttcgagggtggagccgtgcagcagtccggtgggcacgccggtttccttggagacctgcgtcttccattcgttctgctgtttttccgcctcgtaggcggcgttcttggcttcaagctctttgatgtgcttggctgtcttttcggcttcggacagttgggcctccttgagctgttgcagttcgtcggcggctgccttgttgtccttggcgcgtttctcccattcgcgggaatgggcgacggcctccctgtatttggcctcgtaatcgatttcgggcggcttcgctccgttctcggtcgatgccgcctgctggttgccgttggcctcttcggtcatggttcctcctagtgggttgggcccgtttcgggcataaaaaaccacccgtgcgggtggttggggaaaatctcagttcgagtgcgacggtcgtggcaccccgtagccgtccttgtaacggtcggggtagagtcggcgcatcacataggtgatcgtgttcgggtcgttgggattgtcaggattgccttttgtggtggcctttatcatccgataggtgtcgtcgtccaggccgccgttctcgatgaggctacgggcgtgcatgtattccgagtacatgcggtcggggtcatagccctcgatgtgagcttggtccctgtcccattcggggactatctggcagtcgcagtcgtcgtgaaacaggctgaacgagcctttggcgtattttgcggtcttctcgctgcggtacacccagccgcgcgagcagagcatcgtgcagaacgcgcacgtcttcgcgcctctcggcacgcgcgcgtaccggggttcggacgggtcgtgctcgcacaggcgggcgatggtttcgcgccccgaatacatgacccagcgttgcatcgcaccgacaagatacgcctgcatggtctgcgggtcggtccacaggtggccggcctgccagcgtatcgtcttgtcgatgccgtcgccgggaaacgagtcggacaggtcgtactcccatgattcgggcaccgattcgccacggacgcgcatataccattcgtaggcggcctgtgccgcgaggtcgccgtatttggcgaccagttgcggcacgtagtcgagcagcatgtcacgttgccattcaggactgagctgttgcagcgtcccccacagtttcgccagatcgcggcgcgccagttccaccgctctggcttggctggcttgcagctggtccagttgccggttgtccgtcatccttgttgcctccgttcacgagggagtcaagcacgctgcgggtctcggccttgcgcttgtcgaccaacaggcgtgtgatgtcggaatccgtgtagccgagcttctccagaataacgtcggagttggcgagccacggcatggccgtcacctgcttcacgatggcatcggagagcgcggcctgcgatgggcgttcggggtcacgccagttgacctgcaagcggtcgagctcgtcgctgtcctcgctggtgccgttgagtatggcgatgtccctcgcggccttgcgtagttgcactccgatggcgcggcaggcgttcttcgcctcgatgacaagttcgctttccgccgccatgatcgcgtcggacgaggaagggccggaatccgtcatgacgccgaactggctgagcggcacgccggtcgcgccgctcatgcgtgccgcgagtgcgcgaagcatgtcggtgtgcggctgcatggtcatctgcgtgaactggccgatggcgggtgcctggccgtcctcgttgaggctgatgttgagcatcttcgagatggtggcttcccagccggtcagcttcttgccgttcttgtcctcgggcggctcgtccgcgccgatgaggtagcgttgcgggctcgaatagaattcggcgcttacctccatgcgcagcatggtgcgcaccgcagtgtcggtgatactcatgacctcgcggctgatgcgcgagcggccaaaggggcggttcaggtcctgatggtaggggatcaggtaaacgggcacatgatccatgtacgtgttccggggagcgtccgcatgatagcggcctgattgcgtgcggcgtatacgaatcgtgtagccgggcatgtagagcatgagttcggaaggcacgatggtgttcgcctgcgcgtactgggagcggtcgatatcggttatcgacaacgccgccgacaggccgcgacgggcgtaatcccacaggccggtctcatagagcgcgctgcggaacgacacggacaccttggaacgcagaccgtcttccggttccgcgctgcgcacattcaggaacgagcatgagtgagtgagcgcgctgcggatggcctgcggcaattccacgtcgaagtcgttgtctgaaagaatcgaatccaaacccaacggatcgcggctgtcgtcgccgactccgacgaaaccatcgaacacgatgcggtcggccaaagcgtccaccgatttctgcggccagcccacgacctcgcttatccccgccatgctgtccggcacagcgatggacagattcttaagctcgtttcgcccgtcgtagtatttggtgcgcaacaggttacgttcgagcttctgggaccattgacgtatcatcaaatcccacggttctcggcactcgtcgggcagattatcgacctgcacgttttcaagactgggaatctgcatcagaatgccaccgccttcgctcttcttcccggatgacgcttggaagtcttgacgttccaatacgcgagagccaccgcttccacgggactcacatcgacgttctccatggacggctcgtagccgaacccgtcgccgattttcctatgcttcgcatgacccaccgcctcgtcaagcagaggctggccgaaatgggtaagcccatggtcgttcacggcctgttcgagcatcgaacaggcgtccgccacgtcggaagggcgcggcaccacgatcactcttttggacacgcccttgtcgatgaggctgttgaccagggtgggcgctcccacgcgcccgtcgatgatgatgccgatggcgttgcgccaccgttccgcaccgtccttctcggcggtcagccagtcggccagccagccggtgccgccgcgcatgctgcgcgaggctatgacctccacgtgcggcaattcacccgacttgcgtggcgggcgcacgcacgccacgagggtgacgttcgcgccgtccgcgctgaacttgaccgcatacgagttgtagccgtccatgcaagggttgtcggtcttgcacttggcccactcgtcaacatcgatatcggacagcgcgccggcctgatcgttccaccagccgagacgttcgcgggcgaaaccgtcaggggtcatcttctccgattcggaaacgaccacgctcttcagcagtcgggtgccgagcgatggattgtattggtaccagcgttgctggtcgtgcacgtcgccgatctcggtcgccgcccattcgaaccagcacaggttcttcggcggcttgtcacgatgcgcgttgcggcgcatgcgcgcgaacaccgttcccggcgaggtcggcggtgtcggcgttcccgtgtagttggtcaacgggttgcccgagggtgccgacgagatggcgggctgtatggcctccatctgctcgtcggtcagctcctgcgcctcgtcgcacaccagcacgtccaccgtgaaaccacggcccgaacttttcgaacgggcgatgaactcaatgctgccaccgttcttcaacacgatggcctcctggccgttcgtggcccgaatgtaggtgaccagttccgacagttcggggaacttgcgcgcgttctcgaagtagtatttcatgcgcaggaaatgcttgcggcaggtcttcacctcatgcgccgtatgcaggatcttcatgccgatgatcgcggagagataaagctccgtgaactcgagaatcgcgttcttgccgttctggcgcggcaccgcgcacccgcaatccgacgccgcccattgcagcttcgaatccgtggcgagccacccctcgagcacgatgcgctgccacttatccggcttcatgtcgtagccggctgcgagcgcgcacgcctcgcctccctcggactgcgcgtgcttgggaaccagagcgaagctaggttcctgtacgcctcttcgccttgccaccctgaatcaccctcagcttccgtcgttcggctatctcatcgagcggcgtatgccgctcctgcttctgggctttcgccggcatgatctggctgcgtgcggctggtgtgatgccgtaatcctgcagcagcttgttcagtatgggcacgctggcgaaattgccggaaccccagatgtccgcgtggatcagtgcggcgttcatgaggttgtcccagtcggcctccgtccacgagtccgctccgggggtggaagccaaatgctcccaccatcgcacggtcgcctccggccactcgatgccgtcaggcaactgtggctgcgttatcgtggtcttggccaactggatcacctcgaatcaatgtctaggagccgctggagcgactcgcgcgagcggaaccggcggcacgagagaaatcaaactcgccctgcacgtatctcggacgcatgacaaccacctccatcgggaaaatcaggagcctgaggaacgcgagccgccgcgagaaaaagcgctgcgggtacgaccggccacattacgcaccgcattgccggcgcgctggaacaggttacgcacgatccacctcctttccagtaacgatgtggacaagaaaaatcgggatctaccgtttccagcctgcactgcggtatctgttccattcgtcgttgaaccgcttgtcgaacgcccggtttcggcgtgcctgggcgttcttccatgactgagaaacgccggcttcaagatcgttgactccctgttccttgcgtttcttcatcaacgcgcgcatcttgagggtatcctgccatagcttcgatatacgttcgtcggataagccctgtttgcggtattgggatattcgctctttcgagaagccgacgccggaaagcgttgagcccttcgagcgtgagcgggatgagttgccgccgctcccgctgctggacgagcgggaagccgaagaagagccgcgtcgcatgagaacctcccaatgaaaaagccgccacatagggacggcttgaacgaaaaaaatattgtttaccggttcacgatccgctcgatcgcgacgcggaacgggacgcactcacacgcagggcggacacaccgccaccggatgaaccggaagagcgacgcccataccccgtatagcggatatcgttggtgctcgcataacggactcgcctcataactcacctcccagcttccgagctacggccataccatcgaggtatttatctccgagtttgcgaagaccatactcggcaaggaaagaatccttgtcgtctcgcaacgggaacgcgatggcgaaccagtattcggaatcggtcggctccacgagcttcctgggactgcaagccgaaaccagcgccctgtgcagggcggcgaactcggcgagacaatccttctccagatcatcggaatacttgacatcggcgagcgggtcaggcgtcttctccgcgaacccgagaccaccaccgaagccgacgccggcaccgaacgccacggcggacgacttggccggcttgtacggggcgagtagcttctcgatatcacggtacgcatagatccggtggttttcgccgaagccaaaccgttcacgccaccgcgccatctcggcgggggaggggaaacacaggcacagccagaactcggtgtcggtcgcatccacgaaacgcttgcgctccgcacgggcgcgctcccggtactccttcgcgttctcgtccagattttccggcaccggcttcacagccttcttgcccttggacttcttggaaaagtcgaatcggaaatcacctgacatgatccacctccaacaagggaaaccattcaagcagcgtcgcgtaatcgtccggtgccttgtccttgagcaccttggtgaaacgcttgtcgatgccatcgaaagaacgcccgaaccacgcataatcacacggcagctcgatatgatgcccgctgatgcagtccagcacctcgcccttgagccaatccccgataggagagaccttcttgagattgcgccgccagtacccgtactggacgaacgcgccacgacgctgaatcgaatcggccgcacgcacgccatccgcgcaccacgtgctcttatccaagcccacgtcggcgcggatgaaatcccacatctgctcatacgacggctcaggcaaacgcgccgcctcgatgtagcgcagacgttcgggagcctggaacaccgcattgttcagccaacggtacagcgacgggtgcggataccttttgattcgggtctggaacttctgctcgaaataatcaagctcctcgtccacgaacctcaaaccgggcacatagtagagatacgcgggaacgacctcgatgcccatatcccgcatcgccagccacgcggctatggaatccttgccgcacgaaaacgccaacaacacgggcctgccatcagcggccagcttctcacgcaccgcgagactcgtgccctgattacgaataaccgtggtcacttcggccacctccttcccgtcatgcgaataaaccgcgaatgcgaataaaactcgacaccggcacgccggaagctcgcctccgacgaccacacgaacacatgcagcccgtgaccgctggtcgaaacctccgcatagatcgcttcgggcagcagctccatcgccttcgcgggcggactggtcaaatcaacatggtcgaaatcccagcacgcaagcccatcgccgagcattatgccataaccgtcaccggccttcgagcgcatgacctccgggtatgacgcccaggtatcggggtcggtcgaactggccggcgaaccatcgcaccggatcgggcgcttgccatcggcgcgcacccaacggagcagcgacttgagcgcttggggtatctgatgtttgcggctccacgccttgcggcatctgtccgagcaaaacagtctcggacgcctagggttaggtgtggattggaagaagtggccgcaattcctacattggttgaccatagctattactatagcatatattccaacgattcgcaacactaatttcgtgacatatcaaaactgcgtaaaatcaaacgtaacagcctcggaaaacaacggggcaaaaacatcaaaaccatgccggaacggcttccacgggcgctcgcagacaccccagcggccaaacgtacgatactccacgcgggttgcggggggatgcgggcgctatgttctgcggggagccttgcatgggagggggagggtatggcccccggttaccattggcggctgattgggatggtgttttgtggttgtttttttgtgttttggtggcctgtggtgttggcgattattttgttgctttttctttggttgcagattctgtgtgtgagttgtgtgttgtcatagctggttggtgatccgcctcggctgtatgggatgatctcatcgagttcgcagctgagtgggtgtggtgttttgagtgtgaggtctatgggtttgccgcacagcgggcagatcggtattggtccttcggttgcgatgtgtctggccttgcatttgcggcgggctgctccattttggtatcggcctgagcctgccttgttgctcatgttcccatcctgtgtgtttggtggcttgggcgagattctaattcgcggaccggttgtcgtgtttgcgggtcgccgtgctgtctcggcatggccggctggtcttctgcggtacgcaagccgtggcatgcgcggttggcttcgatccaacgacctgcggttttggagaccgccgctctaccggctgagctacgcgcataggtgggtatgagtaaagcccctgagatgtatgtcccagaggctttcgcacttatcctgatacggagtataccacggggtggcaacagcctactgccggctggaatatgccattgccatgctgac

SEQ ID NO: 1509 - DNA, 19643 bp, Unknown
  R257_15m  MAG No. k141_47098
caagaaagcccgcactgcatgacgtcagtgcgagctttctactccttgggtcaagcgatcaggcggaaggcaccccatgcggctcgatgattcgcgatgcaccccattagcatcgcgccccttctcatcgggccgtcaaccctcctgtcgacctcacttggccaagccggaagcgcgaagggcttcgaagccgcccttcaggtcatcgaggatatcctcgatgttctcggtgccgatggacaggcggatggtgccctggtgaatgccctggtcctcgagctcttccaaggtctcctgggagtgcgtggtggaagccgggtggatgacgagggactttgcgtcggccacattggcaagcagagagaacaggtgcagattgtcgatgaagacgcgagccgcatcctttccgcccttgatatcgaaggtgaagatggagcctgctccgttcgggaagtacttctcgtacaggtcgtgatccggacggcccgggatggacgggtgggagacggactcgacttccggcacggtctgcaggtactcgacgaccttcagagcgttctggacgtggcgctcgacgcgcagggacagggtttcggtgccctgcagcagcaggaaggcggcgaatggagacagggtggcgccggtgtcgcgcagcaggatggcgcggacgcgggtcacgaaggcggcaccgccgagagcctcgtagaagttcagaccgtggtaggaggggtccggctcggtcagggtcgggaacttgcccggcacctcggcccagttgaacttgccgccttcgacgatcacaccgccgagggtggtgccgtggccgccgatgaacttggtggcggactcgaccaccacgtcggcgccgtgctccagcgggcggaacaggtacggagtggcgaaggtgttgtccacgatcaccggcaggtgatgcttgtgggcgatttcggagatggcctcgaagtccggcaggtcggcgttcgggttgccgaaggtctcgaagtagacgagcttggtgttctcctggatggcgtcctcgaactcctgcgggttctcggcggaaacgaaggtggtggtgatgccgtcacgcggcagggtgtggcgcagcaggttgaaggttccaccgtagatgttcttggcggcgacgatgtggtcaccggactgggtgatgttgcgcaccgcgtattccacggcggctgcaccggaggctacggcaaggcctgcggtaccaccttcaagggcggcgatgcggtcctcgaagacaccctgggtggtgttggtcaaacggccgtagatgttgcccgggtcagcgagaccgaagcgagcctcggcgtggtcgaagttgtggaagacgtagctggtggtggcgtagatcgggactgcacgggagtcggtggccgggtcggcctgctcctggcccacatgcagctgcagggtctcaaaacggtacttcttgttgttctcggccatgggtctttctccttggttgtgctaggtcgcgaggatttttccttgccacccgcctgccgtgttcgggcggttggcgaggtgttggttatgaagttacgacgcttgggccgcgcggcgcaagccgaacgttatcgggcttgcctataagggcttataaagccttgggatcattgacgtgggagactgtcagaagtcacgaaaaagtcgttgaaattatcgcgacacgccgggccgcacgcatgcgctttcacggtcgactgcggtcacggtgatatcgctaccatgcctttcgcgcatggctcaagtgtccgtgatgattgcttgttccacccgtcaccaagacggtttgcccgctcggtgatgacgtctgttccttttttccgccgcccggttacatggtttacatgacgaacgactacagtcaaacatcgccaatgaattattccgccaacatggtgaaggggttcgaacagacatgaccgatgtaacactgtatgaccgtgatccgagctatattccgcgcgtggccgccgtgcacgacatgtgcggctacggcaagtgctcgctgaccgccgcgattccgattctctcggccgccggctgcgatgtgtgcccggtgccgaccgccctgttctcggcgcacacgcgctatgcagtgttcacgttccacgacaccacggatattctctccggttacttggatgcctggcagaaggaagacgtggaactggatggcgtgtattcaggcttcctcggctcccccgatcaggtggcgatcattcagcgtctctaccgtgaatatccgaacgcgctgcgtctggtcgacccggtgatgggagacgccggcgaaatgtaccccacgtacacaccggagctgtgcgaggcaatgggcgctctggccgatggtgccgacgtgttgatgccgaacctcaccgaagcgagtattctcaccaagcgtgactatcccggccagaatattgatgaggccacggttaacgagcttcttggtgctctgctgaagttgggtgccaagaacgtggtgctgaagggcatcgaccatggcgatggcaaaatcgtcaactatgtggccagcgcttccaccggtgttgccggcaagatcgagctggctcatgaaaagctgccatacatgattcatggcacaggtgacgccttcgcatctgccctgtgcggcgcggtgatggccggccacggcttggccaagtcggccgaaatcgccggcgagttcgtgcgacacgccatggtcagcacccgtgaccagccgcatttcgaggatcgtggcgtcagcttcgaactgaacctcggcgaactcaccgatttggtgaagtgaccgcaccttggctcccctctccgctcactgggtctgacgtattcagcgaacaactcggcgggttgtttgtcatcacaggtaagtcggctggggagccttggtaaaccttctgaactaatggtggataaccgggttttcatccacacgttatccacaacacgccaaaccgcgtcatagtatccacatttgccggttgcgcttgtgctcttacataagtaacccgcacagtggaatcatgaacgctttaccacctacccagccgacgacgaagtccggcatcgacgccggtcttgcctttcaccagcccatgctggcttcacctgatccgcaggcaacgctgccttcggaacggattgcggccacgatgggcgaccgcaatctgacgcccaaacagttcggtgcgctcggcgagcagtatgccgccgtgtggctggaggaacacggttggacgaccttgagccgcaattggcatacccgttacggcgaattggacatcgtgatgctcaatcccgagtacacggtggtgttcgtcgaagtgaaatcacgccggtccatgcattacggatatccgcaagaggccatcacgccggcgaaacagcacaatctcaggaaagccgcctgcgattggctgcttgaccggcgtaatcgtgtgccgcatacggcagtccgtttcgatgtcgtcaccatcgtgcttcgggtgggcagaccgctcgtgcatcacatcgaaaacgccttctgaattcgtcccccaaaaaacagccacgttgcgaaacacattgcgaaaggagtagacatggctatcggcagcactctctcagtcggactgatcggccttaaggccttcatcgtccaagtgcaggctttcatcagccctggcttgccatacttcagcatcatcggattgccggatgcatcgttgtccgaagcccgcgagcgcgtgaaatcggcgtgtcaagccactggattcggttggccgcaaacccgcgtgaccgtgaacatgagccctgcggccatgcccaaacgtggttcgtcgcatgatctggccatcgcggccagcgtcctatgcgcggcgggtgccatagggcatgattgcttggaagataccattgtgctcggcgaagtgaatcttgacggctcggtgctgccgattcatgggctgctcccgatcatgctgcatgccgaggaacgtggcgtgcgcaaaatgattgttccccatcgcaatcttgacgaggcttcgatggtggatggactggatgtagtgggtgtgaggcatgtgggtgagctcatcgaactgatgggcggcgatgccacctatacgattcccgatacaccggttgccgacgagaccaccatggatcaatcgcccacaagccatcccaacgattgtggcgatatgaacgaggttctgggtcaggaacatgccaaatgggcgctgcaagtggcggcggcaggcggacataatctcatcatgaccggcccgccaggcagcggcaaaaccatgctggcctcacgtatgcccggcatcatgtgcccgttgaacgaggcggaacaactggaggtggcgtcgatacggtcgctgtgcggcatactgcctcagtacggcatcaccgacatgccgccgttcgaggcaccgcaccacaccgccagcacggcggccttggtgggtggtggcagcggcatcgccgttcccggcgcgatcacgcgcgcgcatcgaggcattctgtttctggacgaggcaccggaattcagcgcacgcgccctgcagacgttgcgcgaaccattggaatccgggtatgtggcgctttcccgttcaaaaggcagcacctattacccggcctcattccaactcatcatggcggccaacccctgcccgtgcggatactattacggtaccggcgaacgttgcgcttgccgggaaaaagaccgtattcgttatttctcgcgattgtccggaccgatattggatcgtgtggatattcagatggcggtgccaccggtctcgcgcattgccgcgcagagcgagacgatcggcgagtccagtgccgggatacaagctcgtgtgattcgcgcccgtcaagtggccaaggaccggttcagacagtatggatgggtgtgcaacgcgcaagcttcgggcaaatggctgcatgccaatacgtcgctgaaagcgatggaattggtcaatcgggccctgtccaatcatcaactcacattgcgcggggccgatcgcgccatgcgtctgtcttggacgctcgccgatctggccggccgcgtatcccccaccgagcaggacgtccatcagggcatcgaaatgagaacgaggatgacatgagtaacgctactgatatccgacaatctggcggcaccgcaggcagtgtggatcacaccgatacgggcctcgctgtttcgcgcaccattcccatgcctcccacggatacgttataccgcgccgcgctcacgttctgtcttgatggggcggatgtgatgatgtacgccacgctcaaaggcgcggaaagcgccgaatccctctggcacgcgttggcgcaatcccatccaagccagccatctggaatctgcggcccggcgctgtcacgtattgaccgcatgttcgtggatggcctcacccgatggggccgcaaggcgtcggcgaacgcgatgcgctccttccgcaatgcactggccggctggcataaccgcatgatggacctgccctcgcaagacatcatccaactggccgactggttcactatggatggcacgcaatggattatcggccccggccatccatgttggccctcgcagttggccgacctgtccattcgctccgattgggcgccaccgctgtgtttgtggatcaaaggcgatccacgcgcattgaccagttgcgccaaaccggtcggcatcgtcggttcacgggacgtgaccgaatacggccggtatgtggcacacaccgtatccgaacaggcagtcgttgccgggcatctggtcgtgtccggaggcgcaatgggcacggatgcggcggcacattggggagcgttgaatgcgctgcacggcagaatgcccgccaatgtgggcagaaccgttgccgtattcgccggcgggctcaaccatatcggaccgatgcgtaaccgcacgctgttcgaacgtatcgaggcgcagggtggtgcactgatcagtgaactgtgcccagggacgattcccgaagcccgtcgttttctactccgcaaccgcattatcgcggccatgtcttccacattgattgtgacgcaagcccggttgcgttccggagcgctcaacaccgcgggatgggcatgcgaattgctgcgcgaagtgtatgcggttcccggtgacatcaatcagccttgcaacgccgggtgcaataagatgatcggcgaccaccgggcgatgattctgtgtgccgccacatccactgaggatatatgccatgaacggcataagcccgttatggcggcatgcccaggcataccgaaatccacaggtcaggactcgtccgaaaacgaggaggccatggaagtgccggcaacgactccgttatcgccagcatcctcggaatcatcggcgtcacaggagtcgtcacaagattcaggtcattcgaaacgtcttaggaccaagcatactcagcctacactcgttcaatccaaggatgggccggcgagcgcaactgccgaggccggtgccaacaagagcaagggtgaagagccgccctcgtcgcatcagatgccggatcttcgtgtcaagccgaagctcgatcccgagaaggaagcccaacaacgtatcattatcgccaagctgccggaaatggaacgcacattagtggcattgattcgtgaatgccgtaaacgacatctcatcgtcaccccggacgcactattgcgtgtggcgcgagagacggtacctgacgagattcccaatatcggcaccatacttgagctactcggcgcattggagctgaagggagtgatcgagcgggatgccggcatactcaagctgagcagccgtgtcggctaatcggctttcatgacacggctcgaagactgttcggcgggtgtgcgagaatcgaacccatgagtccgaaacgtttggaagatatgtatgatgcggtgatcgtcggcgccggagcggccggcctgtcggcggcgttgggactgctgcgctcccctaaaatcaccgagctcaaggaacaaggcgtggacccgaagatcctcgtggtctccaaactgcagccgctgcgttcgcacaccggttcggccgagggcggcatcgccgcgagcctgggcaatgtggagtccgatgactggcactggcattactacgacaccatcaagggcggcgactggctcgtcgaccaggacgcggccaaactgctcgccgaatacgcgccgcagaccgtgatcaatctggagcgtcagggcgtggccttctcccgtaccgatgacgggcatatcgcccagcgccggttcggcggccacacgcgcgagttcggcggtgccccggtcaagcgcgccgcctatgcggccgaccgcatcggccaccagattctgcacaccttgtggcagcagtgcgtggccgccggcgtcgagttcgccgaggaatggtatgtgaccgacctggtgctcgccgacgacggcaagcaggcggccggcatcgtggcatttgacacgcattcgggcaagattcaggccatccacgcgcgcaacgtgcttcttgccaccggtggcgcgggccgactgttccataccacatcgaattcctgggacctgaccggcgacggcatggcattggccttggccgccggcctgcagctggaggacatcgaatttgtgcagttccaccccaccgggctcgcgcacaccggcatcctgctgtccgaggcggcccgcgccgagggcggcatcctgaggaacgccgacggtgagccgtttatggaacgctacgccccggagcatagggatctggccgcgcgagacgtggtctcccgctccatcatggcggagatcgacgccggccgcggcgtcgccgacccgaaggacccggatggtccgaaggactgcgtctggctggacatgaccggcatcgaccccgaacgtatgaaggaagtgctaccgcaggtggtcgaaaccatcgagcagtacgcgaacctcgatccggccaaggacctggtgcctatcaagcccactgcgcattacacgatgggcggcatccccatcaccaccaatggcgaggtgtaccgttgggccgacggtgccgtgcaggtagtcgatggactgttctccgctggcgaatgctcttgtgtctccgtacatggtgcgaatcgtctgggcggcaattctctgctcgacgcctgcctgttcggtacacgtgctggtcagacgatggccgcacgcatcgtcgagaacccggttgactcccccatggccgatgattcgaccgatgacatgctgaccgatgccgccgatcaggctgccgattcccgcaaggcagagcttgacgaactgctcgccgggccgatggacgattcagacgatggcgggcccaccgccaatccttatcagctcatggcccaactcggatcagtgatggagcaggctctggccgtacgttgcaccgctcagaccatcgatacggcgttgactcagatcaacaacgacatcacaccggttgccgataccttgcgggcccatgacaagaccgccgctttcaatcaggaggtcaccgccatctgggaagtccgtcatctaatcgaactggccgaggccatgctgcacgcttccgaatcccgtcaggaatcccgcggatccatgcaacgacttgatttccccgaacgcaacgatgagcatttccttgctcactcgatggtcgccgatgatggtccggcaagtttcaagccggtgcacatcaccgactatccgcccaagaagcgcgagtactgatccgctgggggtaataccaagccgcctagggcttgtggcacaataggttggctgatattggacttgacatcccactgtttcatggaggcagaacatggctgaggcgagcaacacgacggttaccctgcaagtgcatcgtttcacgccgcgacccgagcgcgccgaacgtgcacgcggcggcagcccgttcgccaagaaaagctccccattcggcggcggctcggattcggcggcacgccgtcgtccgcgcggcaagcagtgggtgcaggaatacacgattcccgcgcgcccctcggacaccgtgctcgactgcctgctgaccatcaaacgcaccgtcgacccgacgctggccttccgctattcgtgcggtcacggcatgtgcggttcggacgccgtggccatcaacggcacccccaccctgctgtgcacggccaccatccgcgattgggccaagcagcccggcgccatccccgaagtcgatgacgaagggttccggcacaccggcaccgagtccgaagaatccgacgattccgcggaaaacggcgcaaacgcggcagccgaccaggactcggccgcaaacggctcgctgggagtcatcgaactggcatccctgcccggcttcccgccgcagcgcgacctcatcgccgacatcgacccgatgctcaaccaaataaggaagctcaccccatatcttcaggcggacggcgtgctcgccaccaccgccgaaggcaaggtggacgtgttcgaatacctgcagaaccccgaacaactcgccaaatacgagctgctgagcaactgcatcgcctgcggcgtgtgcgaaggcgcctgcccggtgtacgccggcggcgacgctttcatcggcccggcctcgctgatttgggcctcccgtttcgtcaacgattcgcgcgacaccaaggccatggagcgtatggacgccatcgacaccgccgacggcgtggccgcctgccagtccgtgcgcgcctgctcccgccactgcccgcgcggcatcgatgtgggcgaggagatgtggcagatcgtggccaaggtccgcgagcgctgagccgcgccacgaccagctacggcaatcgctgcaacacgtagtcgatacatccaccgggtgcccgcacgagagaagacataaaggaacgaattatggacagaacgcagtacaccaacctcgccaaggcatgggaattcaccgaggaacacgcgcgcgaacgtgaatccaatgcgttgaccgacgcccgtacggccgccgacaagtccggccagttgcagggttcggccgcgcaggcccgtctgctgggcatgctggtgcgcatcaccggcgccgcttcggtcatcgccgtaggcaccggctcgctggtggagaccttgcagctcgcccatgcgctggataacaagggcctgctgactgcggtcgattccaccgctcagggcatcgcgctgattcgcaaggcgttcgccgaactgcaggatgagaccgacaccacgttgcgtgcggtgaacgccccggccagcgtgtttctgccgcgcctcaacgccaatgattacgatctgatcgtggtggcgggcgacgccgagaactatgccgccacgttcgcccaggcctcccgtctgctgcgcgcgcacggcgtgatcgtgttcaccgatgtgctggcgttggaggacggtcagggcggcatgattaatccggccgaccgcagcgacaaggccatcgccatgcgtgagctgctcaccaccgtcgaagatgacgaaggtttcgagtccacgcttacccctgacggcacaggcctgctcatcgcctacaaaaagtaactctgcccttggctcccctcggagaggggagccactctatctcgcttacctcacaattgcgctgacggccacctccacggcttcgtcggcgtcatcggtcacggtgaccagtttcgggtcgattgccgaaatcatgccgtgctcggctaccggaccgttgagccagtcaaagagcccctgccagtattccttgccgtagagcaccaccggaatattcgccaccttgtgggtctggaccaaggtcagcagctcgaacatctcatccagtgtgccgaagccgcccgggcacacgatcacgccggaggaatacttgacgaacatggttttccgcacaaagaagtaccggaagctcatgccgaggttcacccactggttcaacccctgctcgtgcggcaattcgatgccgagtcccacggatttgccgccggccagtgccgctcccctattcgcggcttccatgatgccgggaccaccgccggtgatgacggcgatgttgcgcttggctatccggctacccatgcgccgggccgccttgtagatcgattcggtgcgctgggtgcgtgcggagccgaaaatagagaccgcaggtccgagctcggcgagcgccccgaaaccgtccacgaattccgattggatgcgcagcacacgccatgggtccatgtgcagccagtcggtgtcctggtcgggtttcagcagattggcggtggtattgtccgagggaatcatctggccgcgtagaatcaccgggccgcgatgataggtgtcgcccagcggcgagacgtcctccaagtcgaccgggttcaccggcgttgcggcagcctcggttgccgtctcggcctccaacgttgccgcatcattcgcggctgtggcttccaatggttccatatcgtccacgactgtggacttggatgcggcctcggctagattctttgcttcagcggcctttttgccgtcgttcttcttggatttcttctgcttctttgccatccaatatcctcctgtacggtgctatcgactcttcgcattctagcgcctgaagctctgcatacgttttccgcgaaatcatccttgacttcgtgaagaacgtacggtgagtgacactcagcgtacggttttcacgaaataaggcctcatctcgtgaagaacgtacggtgagcgcgcttcagcgtacggttttcacgaaacaaggccaacaatggagtagggatcgtctaagccatcagtggcggaagtcaatctccacactggcggtgccgtcggcgagggtgccggggtgttccgtgggcgtggtggactttgtggtgcgaccggtctgaccagcgccatcgccatcaatcgattcgtcatcctccgcatcggccgctgctgcggctgcggccttctcgaatctcttggactgacggctcagcagcacaccggaaatcgcggcggcgatcagggaggccaccagcacgccgaagcgcgcctcagcggaaagttccgcattcttgtacgccagcgaggcgatgaggaaggacacagtgaagccaatgccgcaggcgacggcagcgggaatcatgtcgcgcacgcgcagccccttggccatcttgagcccgcccacatgcgtggccagccatgcggtggtgatgatgcccaaaggtttgccgaccaccaaagccacaatcagtgcgataaccaacggcgaagccagcaacagcgggctcatcgactcgaagtgcacgccggtggcgaacagggcgaagatgggcagggccagcagtgcggagaatggctgaagcttgttggcatagcgttcggcacgcggtgaaagttcgccgtgcatttcacgggagggagtcagcaggccaaccagcacgccggccagtgtgggatgcacgcctgcctcgaacatcatgatccaagcgaggacgccgacgatgccgaccgcaatccacggcacttttttcagtcgtacgaggtatgcccagatgacggcgcacacgacgatgccgatgaaccaataccaggcgttgatcgaggagaagaatacggcgatcagaataatggccagcaggtcatcgacggtggcaagcgtcatcaggaacgcgcggatcgaaccgggcagggccttggcaaacagggcgagcacggccagtgagaacgcgatatccgtggcggtgggcactgcccagccgtgcgacatctccgagaacggaatgctgctgccggtggtggtcagaatcagcgtgccgggttcaccaggcccgatctgagagaacaatgccgtgacggccaggaacaggatgggcggggcgatcatgccgcccaccgcgcacagcatcggcacggcggccgctttcggattggcgagcgagccggtggtgagttcctgcttcagttcgaggcccacggtcaggaagaagatggtaagcagaccatcctgggcccaatggccaatcggcaggtcgagattggtgtaggggatgaacagatgcgtttccgctacggtctcgaacgcatgcgcggtggcgggcaggttcgcgagcaccaggccggtgagcgcgaagccgagcatgatgagtccggaaatacggtctgaggcggcgattcgcctgatggtggaccaaagtcctttcttcgcgccggcggtcgtggccatcgcgtctccttgctgtactctcttggatgaaccgtatgtaatagtacggaatatctcaggacgttccgctccgggctgagtcgcgaagggcaaccttaccccacccctgtgtggccgactcaaacgggccaatacaattggaaaagcctcggaagcatttcgctttcgaggcttactgtgcgccagacaggattcgaacctgcgacctgctgatccgtagtcagctgctctaatccgctgggctactggcgcatgttgtcttttcagacaactcgatatataatacacgccgttcagatgaatgcaactcggcgtgttgcggcgagtcgcaccatcctaatcgccaccgcaacggcgtatttactggcctcacgccgcatgtgtacggactcggtcaagcaaaaccgactacgcaactttgaggcgtccctgcggcacatccacggcttcgcgcaagagtttgggcgtactggaaccctctacggacgccttgtccacaatcacctgcttcacatcatccaaactcggcaactggaacatcgtgtcctgcaacgtacgttcgataatcgaacgcaacccgcgtgcgccggtcccctgcttgatggcgatatcagcaatcgcccgaatggcctgttcggtgaactgcaggtcgacgccgtcgacggcgaacagcttacggtactgcttgatcagcgcgttggctggctgggtgagaatcgccgtcagatcgtctacggtaagttccttcagcacactggtgaccggcaaacgtccgatgaactcaggcaacagcccgaactcggccagatcatcggcattgatctgttcgagcaattcctcgtctttcatgtcggcgtcgtgccaattcgcgccgaagccggtctctcgacggcccaatcgcttgcgaacaatatccgtcagtcccacgaacgcaccgccgcagatgaataggatgccgcgtgtgtccatctgcgcagtgtcctgctccttatgcttgcgcgtgccctccaacggcacggaggcgatggtgccttccaaaatcttcagcaacgcctgctgaacgccctcaccggacacgtcacgggtgatggaggtgttctcacctgatttgcgcgcgatcttatcgatttcgtcaatgtagatgatgccgtgctgggctcggcttacgtcgccatccgcggcttgaagaagacgttggagcacggtttccacatcgtcgcctacatagccggcctcggtcagggtggtggcgtcggtgatgacgaatggcacgttcattacgcgggccaacgcctgtgcaagataggttttgcccacaccggtggggccgagcaacagaatgtttgatttggcgacctcaacgtcagccaaagggtcactgttgcggcgggtagcacgcgtctgggcgggagcggattgcttggcttgtttgccggtctggccaccgtgcccgttattcccgtcaagctgctcagcggactcctgaagctccatattgacgcgtttgtaatgattgtatacagccacggacaatgcgcgcttggcgttctcctgaccgatgacgtagcggttgagataatcgaagatctgagcgggcttgggcaggctcagcgaattgacctcggcatctttgacacgctcctcggagatgatgtccacgcacagggcgatgcattcatcgcagatggaggcgttgggaccggccaccagttttctgacctgacgttcggttttgccgcagaacgtgcaacggggtacgtcctcgttgtagctcaccacacgtcccatgattctcctttgccgaccgcgccgcaccgtcgaaccgccacgctgcgcattatcattgtcatccttgaaatacaatacccccggtcgttgccgaccgagggtattgcaatgttcggaagttttactggcggtgttccagcacctcgtccacgatgccgtattccttggcttcaggagcggtcaggaaagtgtccacttcgatgtcgcggcgaatcttctcgacatcctggccggtgtgcttggcgagggtctcctccagccattcgcgcatacgcagcatttccttggcctgaatctcgatctccgtggccttgccgaatccttggtcgatggccggctggtggatgagcacacgggcgttcggcagcatcaggcgcttgcccttggtgccggaggccagcagaatggcggcggcggaggcggcctggccgagacacacggtctgcacgtcgggcttgatgtactgcatggtgtcgtagatggcggtcatggccgtcatcgaaccgccgggtgagttgatgtacatcatcacgtcacggttcggatcctgggattcaaggaccagcagctgggccatcacgtcgtcggcggaggcgtcgtccacctgcacgccgaggaagatgatgcgatcctcgaacaggcgggagtaggcgtcctgggtcttcatgccatacggggtcttctccacgaactgcggcatgatgtaacggttggtcggcgcgggctgggctgcgcgggcggcggccggcatgaaaccggctacgccatgacggccggccaagcggtcggcacgggcggcgaactttgcttcttcacttgccatgagtctcactccccctgctggttgttgccgatggtgtccggcgtggtcacgagcttgtccacgaagccatagtcgagggcttcctgagcggtgaaccagtggtcgtattcgttgtcgcggtagatctcctcgagggtgtggccggtctgctcagcggtcagctcgctcatggttttcttcatgtccatgatgagctcggcgttgatgcgcacgtcagtggcggtgccgccgatgccgccggaaggctggtgcatgagcacacgggcgtgcgaggtcaggtaacgcttgcccttggtgccggagctcagcaggaactggcccatggaagcgcacatgcccaggcccacggtcgccacgtcaggctcgatgagctgcatggtgtcgtagatggccatgcctgcggtgatggagccgcccggcgagttgatgtacagccagatgtccttcttcgggtcctcggcggccagcatcagcagctgagcgcagatgcggttggccatatcgtccttgacctcttcacccatccagatgatgcggtctttgagcagacggttgaaaatcgggtcgacggggccggccgggacgtcatcgcccgccatgaccggcaaggtcgcaaaggtattgctcaccttgattctccttctaattactcgaacattgttcagactaccgccttgaagcgactgaaggcggcttttcgcgtgctttttggcgggtagcgtagggatttcgggttattccaaggtgtcgaggacgtcgtcaatgaggaggcgggtctgggaggcggcatcgtcgcccagacgcgggaagcgacgggcggcattggcggggctggcaccggcggctcgcgccacgttggacttgctggcaccatgggccacggctttttccgcgagccgatcgaccagtgaatcggcgacttggcgcatctgttcggccacccataattgggccatatccgcaggcaagtcgtagtcttcggccacatcgctggcggcctcctgaatggcggcccacaacaccatgaatggctttcgatagtagtcaatctgctcagtgagcggctcagcggcaagcgattcaagtgccgcacggacttcggtgttttctgacatagctttctttacctcggctcccctcagtctcactgtgttcgacagctcccctcagagaggggagccagaatatatgcatctacttacttacgactcagcaaccactttgatatcaacgacgacgtggccacggccatgccgactggcacgaagaaggtaatcggcgcttcggtcagctccatcaccaagcacatggccataagcggtgcctgctgtgaggccgaaagcaacgaagccgcaccgatcaaggcacacgcggttaccgaatcagtcggaaacatcagtatccatacgaggccgagcatcgcacccagcgtggaacctaatgcgatgccgggctgcagcacaccgcccgatgcaccggagcgaatggtcatcagcgtcaccagcgccttggcgacaaaggtgagtgccaacacacccagcaacatccagatattggactgggacagcgggaaaccggcgttcatcacggatccagaagagccgctcccaccctgaagcatggcccaaaacgaggccattccagagcccgctcccccgccagaggccgaatcggatacattaccgccgcccgtcagcaagttccatggagaggcggccgctgaagatgccgactgcatggcaccagcagtgccggcggtttcaggaatgaacgtgctgaatccaagttgcgctgcggcacggccgttgcccatcacctgcggcacaacaatcgccaccaaaccggtgatgagaccagccagcggcatctgccacagaatggccttgccggtcggcttgtgcgcttccgcccattgcgaaccttttcggaacaatgcgccgcccactccacatgccgcaccgcagatcagagcgaacagcattaacgttggcgtggattccggttgcatggcggtgatgtcgtagaacaggcaatgccctttgatcgcaaccgccacgaatgcggcaatggcagacacgcccagtccaaacgcaaccttttcgatcgtcacatccaccaacaggatttcgacggcgaagaacatgccggccagcggcgcgtcatagacgcctcctagaccggcaccggcagccactgccaccaccatgcgccggtcgataccatcaacgccctcgatatggaacaggtcgcaaaaacgttgcgcgatcatggcgccgagttcgcgtggggcgacttctcggccgatcgaggcaccggagccgacgatgaaaatctgcaacaccacatgcacaatggtttgccagaaaggcattcgctttcccgccacggccttcttgactgagggcaccacagtcgttttgtgtcgtagcagataccagataatgcccgcgatgccgagtcccacggtcaccgatatcacacggcgtgcagcgggcacgccgaatggaccagacaattctgggccttcgacgtagccgagcagcacatgttcaacgccgtagagcaacagggtcagcagacctgctcccacaccgatgagcacgccgagcacaatggtcgccgcagcgagccaaccaaggcgtttgatagtaaccgttggctgcatgtcaacctccgcacgctatgcaacgagtatgccttgggaactcccctcagtctcgctacgcccgacagctccccccaaaggggagccaaagaaatagtccttttaccagaataggaagagcccggaaccgtgaaacacgattccgggctcaaacaatcacgctaacgcgatgaggctatgctcactcagcgtccttggcgtcatccttggcggacagttcgtcggccacggcggcagcagcggaagcggcctcgacggactcggactcttcgtcctcagcggcctcgcccaggaagccggagaggtccacaacctcgccatcagcggtgaacttgacggcgcgcatgccggcgagcagacccttggaacggccgacttcctgcacagcggagccaagctggccattcttgatgatggcctggatgaagttgttcgggtccatgccgtactgctgggcgatggaagcgaggaagttgaacacgtcggactgggacacctgaacgtccagcttctcggccagagcgtcgagcaccatctgatcgcgcagatccttctccacggtctcctcggcctgagccttctgctccttggtggccttctccgggtccggggtcatgcccttgagctgctcttcgaccatgttggccttgacacccttcggcaccgggatctcgaggccttcctgcagcttggcgatgaaggcatcgcgagcctcggtggcctgacggccttcggcgtcctgagcggcggccttgcggatgtcggccttgagctcgtccagggtgtcgaactcggaagcttcggaagcgaactcgtcgtccagctccggcagctcctcagccttaacggagttgaccttgaccttcacagtggccttctgaccttcgtggtcgccagcttccaacgtgccttcgaaggtggtctcctcgccggcggacaggccatcaagagcctcatccagaccgtcgagcatggtgttggagccgagctcgtagctcacgccttcctgggagtcgacggtctcgccgtcaatctcagcagtcaggtcgatgttggcgaagtcgcccttggcggccgggcggtccacgccgaccaaggtgccgaagcgctgacgcagggtctcgaggcgcttgtcgacgtcctca

SEQ ID NO: 1510 - DNA, 7063 bp, Unknown
  R257_15m  MAG No. k141_47155
ccaccgtgcgcatcgacaagccggaggccgaggcgctgtggaagcgcttctccgccgcccgcaccaccttcaaccaggctcgccgcaagtgggctcaggctcgcgacaacgagcgtacagccgccaaggaagccaaggaagcgattatcgccgaggccaatgagctcaaggattccaccgcttggggtgagacttcccgcaagttcaacgatctgatggaccgttggaagaaggccggccgcgctggccgtaacgaggacgacgagctgtgggccaagttccgcgaagccgccgacaccttcttcaacgctcgtcaggctgatcgcgatcagatcaactcctccgagaaggagaatctggctgccaaggaggctctgctggtcaaggccgaggctctggtgccggtgaagaccgacgccgaggccaagaaggcccgccaggagctggccaagattcaggaagagtgggatcagatcggttacgtgccgcgtgacgatatgcgccgcatcgagaaccgtctcgacgccgttgacaagcagatcaaggccatcgaggatgccgcttggaagcagaccgacccggaggccgacgcccgcaagtccagcttcgaggagcagctcaacgcccagctcgccgagctcgacgccaagatcgcggccgaatccgacccgaagaagaaggccaagctcgaagccgagaaggccaccaaggagcagtggctgaacgccatcaagtaagggtctcgtgccagggtccccgctgagggaagccggcagcaaggcgtactgaggggagtgtacggttataccgcaagctcccctcagtcgcctaaggcgacagctcccctcagcgaggggagcttcgtcatatttatgccgttttcttctgccctatactcataactccaccccatagttcctcagtcacccagcaattggtgtcttacgcctgagtccctaccggtgctgcaacaattgccgtgagcccttgatgtgcggccagatattcatgcaacggctggctgtatggcatattcagctcgccgtaattggttccggcacggaaggcgggataactgtcgccgccctgaagcagatatgaattggatgcgataatcaccaggtcatcgtccgcaatcggtcgaccgtcaacggcgaggttcacgatacgaaccgccgcatgttcgtcggcagcacactcgtcagcgtcagcgttggtatcagcggcggcatcagtatcagcggcggcatcggcattgccgctcccaccggtcgtaccgcattcggcataccgatacgtcacgttcgaggagatgccgagccagcgccgctccagtcgcccatcgtcacggtggaattgctcggcgagcactctcttcacatcgcgcccggtgagcgtctcatgcgcggccttgaactgcaaggccatgagactatccacctcgcgcacggtgactttgccgtcgccattcatatcaagccgtggagtccgcagactgccattattcgaaaatccgattaccggcaaacgatttccggcatacacatgcttcatgattgactcgcggttcgcgtccgccaccagcacaccgaccgtattcccgtgcttatccgaaccttgtttgtcgaaattcacgccggaggccaaggtgccaatcaccgcgttgccggcatgattcgaatatgttgccgccgcctggtaaatatgctgagcgcgcgatacctcatcgttcgcctcagcaccagcagacatccaagcggcttgcgccggatgcgcattaagcccttccacgcccagcacgccgtcaaccgccgtatggctggtgccattgccgaggtccacatcggccactcgcaccgtggcgcgacgcccggcaccggtgatgatcaaatcctgcacggccatattccgcccgaagctgcccgcctcgtaaataggcgcgccaccagcggtcgtaccacgcttgatcgcgtgattgtggccggtgtataccacatcaacatctcgcccaatatcggcggcggctgaagcatcggcgtgcagcaaggccaccaccgcatccacctttccggagcgtttgagttcacgggccacgcgattgatcgcgtccaccgcccgttcgtcaagatcggcatcacgcgtaatctgcggagtggctaccgagccgagcgcatcagtaagggcgcccacgaaaccgatccgcttgccgttcaccgttcgaatcgtagagtcacgtacatggctcagcagtccgtcaggcgacttactggcggcagacgtgttggcgcacagccagtcgatgccattgctgggatcagcgatgcgattgttgaaatcggcgacaccgcggtcgaactcatggttgcctaccgccgaaatcgtcaatccccacgctttggccatgtccagcgtgggttggtccttctccaccgccgactcatacggggaacctcccaccaaatcgccggtcgataccgggatcatattgccgggattatggctgtcggccacggtgaaggcggtggcgttgtccgcaccacgttcgatatgcccgtgaaaatcagtgatgtcggcgatggtcaccgtacgggtgccggaagatggattatcgccggaaaaaggaacggctcccgtggttcccgcacaagcataaggaaccaccagagccgtaaggataagcgctactgcaccaaaagcgatccccgatcgcttgccggcccaccgccggttcttcatattcctgctcacaccagtcacgctaggatcgtcgattgaacggccatgcctaggaaggcgactctcaggtgaattcttagcggcgtcttgggatgggaaaggcctgaccccgtactatcagggtcaggcctttgcaacccgtgtcactacgaatgcgtcggcaaggggagattactcggcaaattcctcgacgcagatctcagctaccgcatccacgcacgcctcggcaatcaggcggccgcgttcggcgcttgagccggccggattggcgagtccgccgtgagcgggaacgtcaccttggcgcaccgggtagcgtacataggatttcgccgtggcaccggcttcctcgaccatacggtccatgtgcaccagttccggcgcgtagtggagcatcaacgaagtttcggtgacggccgcatgctccaatgcccagccggggaacaccaatccatcgaacaccttgtcgataaccgactgcggaaccgggtcccaccaattggtttccacgatggtggccactcccccggtttcgcgggtgaccaggtcgatggcctcgacgatgaacgcctcgttttcaaaatgcgcgttcatgacgacgatcttggtgaagccatcggcgatgagttcgctcagcacgtcgtgcatttgggtgatcactgtcacgccgttcatgtcgatagtacccgggaacagcggcccgccaccggagagcggcttggacttgtatccgtagctcagggtgggcagcacggtgccgtcgatgcgttccgccagatcttcggcgacccgcgtggcgagtaccgcgtcggtaccgatgggcagatgctggccgtgctgttcggtcgaaccgatcggcacgatgacgggatgagtcttcacctccttgaattccggccaggtcatgtggtccatacggcggttgctacccattgcagtactcctttgggttggtggtggattggatggtcaatgaatgcgcccggctccctcgggaaaggagccggagctgaggagatcagatgtgattcagatccttgtcggtgttttcatgggaaagaatcatcgcgaccaaggcgatggccgcaacacccaccatgtaccaagccggggcgatggatgaaccggttagggcaatcaggccagtggcgatgaacgaggccgtaccaccgaagatggcattggccagattgaagctgaacgcgaatccggtgaagcgcacggaggtggggaacgtctcggtcaggtagctggacagggtaccgtcgttggcggtcagggtggcgcacattgccagctcaaccagcagcacgggccagaactgggaggtgttgaggatgaggaaggcaggaacggtgaggacgatgaacgccacgcaagcaccgatgagcaccttcttgcggccgaatttgtcggagatgtggcccatgccgaacaccatgaacacgtaggcgaccaagcagatggtggtgatggtgccggactgggtggcgtccatgccgacggtgtcagacagataggtcggcaggtaggtgagcacggtgtagaagccgaccgcattcagcacgcaggctccgaagctgatgatcagggccttgagatggttgtggaagagttcggcgagcggggcgaacatgccgctcttggaaacgacttggccgtcagcggaggcggcgctcttggactcaagagcatcgttcattgactggtacacgggggaatcggagagcttggtacggatgtacagcacaatcaggccaagcgggccggccagcaggaacggcacacgccatccccaaccgaccatcgcgctggagttcatgttggcggtcatcagcgtggccagcgtggagccagcgagcagaccgatggcggtggacgccggaatcagcgagcagtagatgccacgctttgaggtgggtgcatattcgccgaggaatgtggccgcaccggcatattcaccggaagcggagaagccttgcaccatgcgcagcagcagaagcagaatcggcgcgccaacgccgatcaccgagtaagacggcaggcagccaatcaggaagctcgcaccggacatgaacataatcgagtgggccaatgcggctttacggcctttcttatctccgtagctaccccagaacagtgcgccgattggacgcaggatgaaggatagcgcgaacacgccgaaggtctgcagcatggcgacggtgtgattgtcggttgggaagaacaccagggcgatggtggtggcgaagtacgaataggaggcgtagtcgaaccactcgatgaagttgccaaggaaggaagataccgcgactttcctgaccatggcctgttcttcagtttgaggggtgaaattcatcagtcgtgcagatgtagtaatcgttgcggaactcatgatgtcaccgtcctttcaaggatgtgctgttcgtgtgactgaatgggattcaagtgggaattcgtttcgcagcaggtcgaccagcgccgcgatagcctcgactatgcccttgagtatttgctgaaacgtgaatcgtcgattaacccgttcggcgtagaagtggacaggttgcccagtggtgctggcgcattattcaccatgccgttcttgccatgatttcgtgagtttggcggcgaatagcagcatcgaccagttcggtttgtcgttatagtcgacgccgaccatttgtgtcactttgtccagtcggttgtacagggtttgccgtctgatacccaattgctcgcacgcgccggttttgctatcgaggttgtcgaagcagacgcacagtgtgtccagcaacaacggagaggcggcgacctcgaatccgatggtctgcaccacgagcatgcgcatcgccttgtccatatcagaggatgcgacgaaacggtcgacgagtgcggacatggtacttacgattcgcccgtatgccggttcctgattggcgatgtcacgcaataccgcgaacccgtcgaccagcgtcaccgtgtccaatgccactcggccatgcaccacgtacacaccgtcgccttccagtacggcaagcgcatccatgcaatggcgtccgaatgcggccgcaccgtctgaggaatcggtggtggagcaccatccgaccatcaagtcaccttccagcatgcaggagacggcgcatcccgaccgttcttcgaaccgttcgaccatcgtcgatacatggttgatgccttccaccaccgatctgaaccgaaaagcgaatggcatatagatgcatgatccggcaaaacccagcgcgtcgagcatcgcatgcgcttcctgcgcctcaaatgtattgacgtgcacgccgtcggccgggcccatactcagatgatgcatcatgcccatgcgcgcgccgccgtcaatatagagggcggccaccggagacacgatggtggcgatggcccgacgcatcgtggcgtcgaaagtcatggcgcgttgcgtgatctccaatgctcccaccggccgggagcgactttcaagggcgatgacggcgctcgattcgttgccggcatcgaacgcacgacccgctcgagcggccaacagaccgtcaccatcgaaaatggcgacgctttcgccgaacagcgacgcaatggtttcggcaacagcctcgatattgccggtacgggacaatccctcacgtaatgaagtggacattgtgtccacctccaattgcaagtgcatctgttcgtgaacgatagcggtattgacactctgacagatgtcgacaaaaggtacgcgagatttcagaccaatcaacgtcaacccatgcagcctggccgcagacaccatttcgtccggcatccgcaccacaccctccaccagttcgaccaccagagcggcgacaccagcctgtgccaggcttgctacatattgtcctaacgtgccgtgccaatcggcggcgagcagagcgttaccctcgataatcagcatctcaccgcccgaaaggaaactggagacatcctctcgctcgttggtaaacacccatcgcactggcgtatcgaggtctttgccttcgacctccaccacaggatcggctcgtttgaactgcgtgttatgaagcgcactgcgaatcgatacagtcatacaatctgtccattcccccgcggaacaccggtcgttccggttaacctcaccgcaaagcgtgctgttgacaataacctcagttggttacgcgggcagtcggttcacgtaaccgttcggcaacacaccagttgaaggagcgacgatgactaccacactgttcaccaacgcacatatcgccaccggagaacccggcagcacggctgcaagcaccctgccattgcaggacattctcgtcacggatgg

SEQ ID NO: 1511 - DNA, 28792 bp, Unknown
  R257_15m  MAG No. k141_47425
cgacacccgtctgatctccatgctgatgaacgacctcaacaagtggggcacgtacgagatcccggaagaactgctggccaagattcgtcagatcttcggcaccggttgggccgatgaggatcaggtacgcgagtccatcaagcactgctgggacgagaaccactacgtgatcgacccgcacaccgcctgcggctactacctgcttgagcagatgccgcgagacccgctgaccccgcgcgtgctgctctccaccgccagcccctacaagttcccgcgcgtggtgaacgaggcattgggcttcgacgccaccggcaccgacttcgagtgcatggatgtgctggcccacgagaccggcaccaccgccccggccgccctgcgtggtcttgagaccgccgacgtgcggttcaaggacgtcgtggccatcgacggcatggaggactacgtggagaaggccgcccaggcgctgtaaaacataccagcacattggctcccctcagagcggggagccattttttacatcagaattgcgtttacatcagtatcgcggcgactggcagtcctatggcgattgccaacagcacgatagtgccgatgatcacgctggggcgtgcgaggttgacggtccagccgacgccgaaacgtttggggatcatgatggcaggatcgtcacggttgatgtagatgatgccgccaatccagtgcaggtcatcgtcatacggcatggcattatcgtccgaaatgtcaccgccgtcactgtgccgaacaccggcatagacgcgcgccccgttctgcccgtaatacacgccgatcatcagcgcgccgaccagagccgccacggcgatgaacatgccgatgatgccgattagattgatatccagcacgccaatggtgacaagctgaacgcctaggcccaatccaccggctgccagcagtccgatgaccagcacgtagatgctccagacccgcgagaacacaccataggcatacccggtggcggcggggtggtcgggatcaatcgggtgcttggcgtagatgatcgcggcatggctggccaccatcaccgctgccagcaccacctgcgcgagcacggcgtaccaaatcaccatcggactcttctcggcccaaccgttcacattgccggcgatatccgcatgaatcggcacccgctccggcatccggtcatagcccagcaacccgacagcaatggtgacagcgagacaaacgacttgcagcaattcccacttcaagctcatcgggtcgggattgtcccgctcacctatcaatgctgcacggcgggcactggacgcctcccatccctgatcgactttgatggatagtactttgcggcgaaacatctgctgcagcacgaaaccacatatcgcaatcgccaccgctgcgatggacacagtccagaacgccgcgtcgactccgcagagttgccaaacggccagcgagaccagtatggcgcatacgccaagcgccaccgtaattcccgaaaacgcgactttaaatccgcgaatgcgcgtattgacatgggcggcggccggcactgtgacaccgaacacctcatgccggtcggtaacccatggaacccctgccaggccggcggtcactatcaccggcaacagtaaaaacgcacacaacgcgatgttcatcgacacgactgtattattcatcgttatctcccctgatttccttttgttgcaccgtcagtaacgctctgcgaggagcgcacgccgtatgcccgttcgcattgccgtttggtggcatcgaggaatgcggccgaatcaccgccgcgcgccctgtaggccaaggcaaggcgatagagttcctcgcccatccgctcatcctgtgcttcggcagttcggttcggtgcttctcccccgccgtcatgctcggcgacggttgcaccggcaccacgacgcataacgatgtatccctcgtcacgcaacagcgcataggccttgttcaccgtgtgcaggttgatgccaaggtccacggccagcgagcgcacggacggtaacgagtcacctggcgacagctcatcgcccgcgatggctgcgatgagctgcctgtgcagctgctcgtaaatcggcacgtcactgcgctgatcgatttccacaatcacggtcaattccacccctctcaagaactgttctatttgttctacatcaaatataacagttttgccgtatgagtcaagatatgcgaatctcggttgaacatccggcaatgggccaacggcgtgttgcttgaattttctaggaaggcgggaatcgccatgctgccggcgaatgggaaaatccatgtggcttgtcagattctgttcctgcaactgaatagtcccatgagggagtagacagcattgcggcgaagggctcggcccaaaccgcaataaagcgtgccgagcgccaaagccgccaacaccggtatgacgccgctgcaggagaagctcgcgaagctggacgaacttcatgggcggcaccgccgaacagcagtcgaccattctgttcacgctgttcgtggtattccagctgttcagcagtcgaccattctgttcacgctgttcgtagtattccagctgttcaacgccttcaacagccgcgagctgggcaacgccagcctgttcgccaatctgctacgcaataaggtgatgatcggcgtgttcgcgctgatgttcgcacttcaggtgctggtggtgcagttcggcggagcgatgttccgcaccgtgccgctgccgatcgacatgtggctgaagatcatcgcggtcggacagatgcgcggttagagttctttggctcggtagatgcggatggctataagcatggagccaaaatatgcgagcagacacaacacggcgagaacaagcgccgtatgccaccagatcgtcaggaaatcggcaatattcagcaatagccattgccagtcaacaggcaatcgggccagcagcgcaatgactgcatacaagccgacaatgaccgcgccagaggccatcatcatcttgcgggaggtgaaccggtatgcacaggccagcagcaccgacccaagaatgatagccaaagcgaagatgaaagcacctgctgccaaggtaccgatccaccccatatctgctatatcgccaaagacaatgaagacgccgccgcatatcaccacgtccaaagcccagagcaggccaaccaccaacagaaaaaggtaccgacctacaacttgtgcagtgcgtgaaacaggaatcagccctcgcatggcactgtgccctgcagattcctcggatgacgcaggccccaatgcactcatacatgccatcgtcgatgccaaacctccgagtccgcccatcagaccactggcaacgtgttcatcgacgtgggtcgatatcatcaccagcgatatcacgatagacagcaccgggaaaaccagcagaaataccatattcgccacgctaaacagacccgtcccgacacaatcgaatcgacattgctttactacggatttccagctcatcgtcaccattcccttgaagcaaatatgcgagaggcaattacatacgagattccatatgccacaaccgtcgttgccaataccgcaataaccagccacaatcgttgcgcgatgatggcattcgcggcatgggccaatcctttggtcaccgaagcaggcaaaatagatagcagtatgaatccagccaatacaacgacataaatcaccatcatcgtgacttgaagaccgcctagtttggtccacagataacccgtgggcacgataagcgcgaccatcagcgcggtgcagaaacctcccaacggagccgcccacagattgcccgcgaatgaccaatccggattgaccagcacttgcaacccgtcaatcagcacgatcatcgctatcgacaatacggaaatcgccaatccaaccacatatcgcgcggccacctgactcttcctcgaagccggaataatgccacgaagtcgatatccgttctgtaagtcagcaatcgccatggttagcacccacatggcgcaggtgaataccgtcatgatgacacccatgcgatagccgaagccatcaccataaacttcaccttgaaagatgacggagaacaacggtgccaacaacaacgagaacacagtccgttcgccgacgcacaggtaggccatatcgacgcgcaatgcagtggtcaatgcatgttgccgagaccgcgacaccctcagtattgcccccatggccgctcacctcccactcaagtcacgattggaatcatgggcattggtcagtcgaatgatgtcatcaatggaagccgattcaacgacaagccccgaaaccaccgacgcaacagcatcaagcctgtctgaccggaccagcgcatcgaatccggtggcatacgtatgtgagcccagcactacgcccgcaggcagttgtgccagttcgtctggaccgcccttaatcaggcggaacgattcctcaaactcgtctttcggaccggtgtagtagagacggccatcggtgatgtaggtaatgaagtcagcggcacgttcgaggtcggcagtgatatgggtgctgaacagtaccgaatgttcgccatcctcaatgtaggcatgcaggatatccatgagttcgtcgcgggcaagcacatcgagtccgctggtcggctcgtcgagaatcagcagtttggcgtcatggctcaatgcgatggcgagcatcagcttcatctgcatgccgcgggaaagatccttgatatgtttcttgccgttctgtgcgtcaccaaggccaaaagtatccagatacttgcgatagcatccaccgtcccatgatggatacagtggcgcgacaatacgttcaatgttcttgacttgccactgttcatgcatgtagctgaagtcgaacaccacgccgagttgttctttgacgggctcctcgttggcgatgttgtcgaggccgagcacgtgaatcgaaccggcgtcgcggtggatcatgttgaggatgagtttgatgagggtggatttgccggcgccgttcgggccgatcagtcccatgatgtagcccttgggcaggtcgaaggtcacgtcgtccagcgtgaagccggaatcatagtgtttggtgacgtcggtgacctgcaacgccatcgcgtcggattcggatatggcggtcatggccatggtcctttcttgaggttatttcttgcggtattcctcttcgagcatgcggtccaatgcgtccagcggaatgccggcggctttggcgccccggcttgcctcggccaggctttcgcgaatctgggttttgagctgacgttgcatcagttcgttgcccttgtccatcacgaaagtgcctttgccttggatgttctgcaccacgccctcatcggccagttcgttgtacgccctggtgacggtgagcacggagatgcgcagctccttggcgagtttcctcaaggaaggcagggcctcgcccgccttcaactcgccgccgagcaccgccgaacggatttgggttttgatttgctcgtagatgggttcaccggacacggatgagatgatcagtttcatctatgcccctttcgaatgtggttgactagcaccccagctgtttagctgttatacaacacagtataactgttctgcttaactgtcaaggtgtgttacataacagtcgaacagtaagcaacaagcaatgagcaggcaaatccgttgacaacggccgctttccattgaacagacacgccacgaacgctatttgtgcgttgtccaattccgatgagagcagacgggcggcctcacattccttcaacctgaaccgttagaacagacgatggaattcggctggttcgtcccccgctccatttcgtggagcgttgatcacggacagccgaatgtccacttggttttttctctcggggttctcagcgactttccatcaggtgaaaaatcgagaggagcaaagcatcgaagagcaaccgcaggagaaaaacgtcaagcgtaaagaacaaatcaaaatatgaccagcggctatctgtgtctatccaacgaataggtcgttgcaacctattcataaaaagagacataccataactatatattatcgacaagatgaataatgagccgagagaagaggactcttccgtggaatgctaccatagcacggcggttgcatcagccgccacccatattgcactgctggataatgacgcaattgtgttaaaaggattacaacagattatcgaatacaatcacttaggaagcattacgtggaccactcggagcgggagagaggctgtacaaagatgctcaagtgccgtagatacaccgcatttgctgctgtttgatatgtctcttgacggaatgtctggtatagacgtatgccgtcagattcgcaaaagaagcgcatccgtgctgctacttggcatcacggctttccccctagaacggtacatttctcggctgattcaggctggggcgcaaggactagttgcaaaagacgaagaaagacaaatcgctgaagttacgcgttgggtattaaataaggggggctgcggaaatgggttcgaaacggcccgtaatgcgcatatgcgactgaaacacgagacaaatgacatccgcatgccgttatccgacagagaagaagaaatcatgattcttctcagcaaaggactatccatatcagaagccgcgaatcgcatgcaaattggacaggctagtgcagcaacatatcttaatagagctcgtcgtaagctcaaagcggaaacagtgcgccaagcagtagctatctggacaggtgattatgaacagtaacatcaaaaaacatccattcagattaattatagtgttactctccttattttttttcgataattgattggacagagagacccaccacatctgcgtatgaaatattatttggcttcatccacatcggattgctgttaatcgccctatggttcccacgcattagtttcgtaggattaatttttatggaatcagttgcgtgtagcttacctgtcctaaatgggccaagccgtttctggggcatctattgcactatcggactcactgcatatgaaacgggtatctctatcacgacagttttaggtatatttgtattcttaggaattcaatatgaagtactgagagaactatgctccaacattattaaacacgcgccaaagtatagcaaattccagtccagcatagccctgcagaaatcacaaacagaaatagtcatgtccaatagcatgtccacaataccggacgaagaaaggtcgggccgcgggttagagtcacgcaggcgcaagcttaacctaatcggtggtgaaattgatcacgaagtggatggcgacacatggattgtttatgcgcgtatacctttaactatggtttcaccggacaaagcagccacggaatccatggaggacaacgaacacgagaaatattcaccgaggaaaaggggaaagacgcgctctgttgaatgccaaggggaacagatggcacggaaggagcacaaagcgcaaaagtagtgattacagatataacgaagctcattaatactcctagaacaataacaactggtttaattgaaacctattatataggtacaatgaccgagtcgtatggaaccgtgtaatcgtcagaattacatcataattacctgagaggatgtcatatgtattgaaggtatttagcgacttacctctatatgcgcacgttctacaatcatataaaagtcatgtattttgcgaagacattaatggagagaaccctagcccaactccgcgcttcataaccgatttttagcatagcagcagagggtatccaagacactaatatttatcatattctaccatcaccagaaaaaagggcttcctgttttccgaatgttcgactaaacaagcagattcacagcaccgaatggatacccaaccacaacaaacatatcaacacatccagccggataacaccttgaatcgttcactgtcagggagtactaaataccccataaactccatctccgttcatcgaaaaacgatgtttgtcacgggaaacccctatgcgaagcaatacgaaacggcatgttctagccgcctccaagaacgtttattggtcaaaagacgacggcacacctatgtgagcgatgacattaatgcccgaacatggcaactgttgagacgtaacgcgcaaagcgcatctggtaaggtcagttatcagctagttcacgatatctttgtttccccaaacgacgtagtatactgcttcaccgtccttggcgtttcgcgtaaacggaccttttcaggatgttcgaccttgcaccgtgtgggccgcaatcggctatatcgttgtgaacatcgagctaatggcgattaaacatcgctactattaataatccctgaggaattcgaacggtgatctataaggtaacaaaatgggaaaacaatgatgaccaggacaatcattattgaggaggatacagtaagtacgacggcagcatgaatagtgccagtgaagccgtataaaccgtaggcgagaggaattagaccgaagctaattgcataatcaattgaggaaactcgtcccatgtgccgcttatcgacgcatgtctgcatagtagatccccagaacacgccagacaattccagtccaagcccagcaacaaatgacgccacataccacagtacttggatgtccaaagtacctacaacaaaaatcggcataatagctaaagcgccaaataacactgatttagaaaacatgtgcctaggcctttccaactttaacgcgatgagactgccgcaaatgtatccagatgaggtgatagatgccatcagggaccatgcgccccggccactctcttgcacgacccacaagggcattgtgacgtctgttgccccggattgtacggcaaggaacaacgcccagaacggcactcccactgctaaccaaatataagtatggaacaaactgggaatagaacgtaatgcagaaatcatggaagcatcatcatcgttgttattagcctcgtcatcgcagctgggcatgagtttcaacgatagaacaagcggcatggagacagccagacacacagcaccatccagaaatagaaaagaaggtgatatcagttgagcaagccatgcaccaagaagtggaccgaccaccgagccggcattgcgaaacgtacgtatcaagccgttggcacgtacaatatcttcagggggagcaatcgaaggcaataaggcgaacaaggctggcgagccgaccgcaccaatgatacctgcggccaaactgattgcttgcacgggccatccaagaccactcaactgcacgacccatgttccgactccataggaaatagctagaccacccagcattcctgaggcaagagttttccgcggcaatcgatccgctaaaacaccacccagaaaagccatgaccaaggtgggcagcgtcttgaacatgagtaccaaggctaggcccaagctgtcagatgaagccgctccagtgaatacaacaccgcatgtgaagaacgccgaggacattgcttgcatgccctggaccaatgccagtttggctacctgccagcgtacgacactcccgacattcttcaccatgctcgaacagcctccttttgttttatcatgtatttaaaacgtaactatattgccttttattcaggccactaccgaaatatgctttggggattctaaaatattcacttcttcgcgagattcggcgaaaatatcgtgctcatataagacgggatctttaattccaagaatctcaaaagaagttcgtcgatcacgacacgggtcacatactccacaatgaactgtcccgcccaaggcacagctccacgtatcgccgaacggcacgccaagacccatacctttttgaatgacggcacacttattgatactaagataaggagtatggaacgttaccccgtattcatctccttcacattctacggtaaccgtatgaagagcttcaaaatatgatgcatgattatcgtggaacacagcatcgttactatgaactgcgtaataaacatcaacgatatcatgcttaagcgcccatgaagccattagcataagcgcaattgccgatccaaaaggctgaacatgctcttccttattaggggcaacgacaaatggcccaaatgctttgcggaggaactgaggctgaggcaattcatagaaacgcttaaattgctcggaaaaatcatattgataatgatggagtcgttcagagtggagatttgtaacgattctttgcgcatgttgactctcattacatccctcagtttcaccaaaattgaaagtaacggcatatatttctttcccctgatttaataggtcatacaagagagtagtagagtccgggcctcctgatagaagcaacgcgacacgattatgattctgaatcattgtttaatcctgtgactttgtgaaattcagcgaatctgttgaacttctgtatagaagttattctgttaatcgacgtttgagaagtagtcatgtaaacgtcacaatgacaaatgcgcgacgattcctgggtctgatgaaagatcttggtgcttggctttcagagtctctcctcattttttcaattgttgtatgtcgtttccgtgcaacaatacagcaccgaaacacagccagcgcctacaatggcctcggaaagggggacttatgccgaacaacgccgttacgctacaccacaccgaaccgaccgattatccggaacaagggcgaggaactggagcggcagcggtttgaggcgcaacggcggtcggataggatcgcgcggcggtaggggcttcatatatggctcccctcagggaggggagccagttttttacaacacccgtggggcgttgtggaaatcgaagaggacgccgtcggcgagccggcagatttcgggccagtcggccgcggaggaatcgtcgtgcatggcccagaccgtcataccgaccgatttggccgatttcatggcgaccagcaggtcctcgaacaccgtgcaatcggtaggtttgacgcccagacgtttagcggcaagcagatagacgtcgggctggtccttgccgacgtcgttcgcgtcatcgacggagacgatatcgttgaacagatcgaacatgccgacgtggcgtagcgccggctcacgcagatgcgggggcagcgaggtggcgacgccaagcttgacgccggcggccttcaggtcgtgcagatagccgagcgcgcccggcttggcctccaccgtggtggaataggcgacgctggccatgtcgtcccattcctgcatgagctcttcgggcgtgtctgtaaggccgaagcgtgcgatggtgtattcggcgatctggcggaattgcatggcggagactttggtcatgtagtcgggcggcacttcgattccgcgcttgttcaggaagtcgatgtcgacttggtcccagactcccatggagtctaggagggtgccatcgaggtcgaatatggcggctttggtcataggacactttccttcaacagttctcgggcgtggtctagggaggcttcggattcgctgccggaaagcatgcgggcgatttcgtggacgcgggtttcgccgttgacttcagcgatggtggtgaccacacccaaatcgtcgtcatcggcatccggcggctccttggtgaccacgaactgcgcgtccgcccacgaggcgacctgcgccaagtgggtgacgacgatgacctgcgcgctgcgggccagccgtgccagacgtttgcccagttcgaccgcggccttgccacccacgccggcgtcaacctcgtcgaagatgaaggtctggtcggcaccgccgcgcgtgtcggcggccaccagctccaaggccaacatcagtcgactcagttcaccgcccgaagcgcttttgcccatcggcaactgcggcgacccctcgaacggcgtaaacaggaacgcgatatcgtcgcgaccatacggaccgagcggatcatcggccttgtctcgcggcgtgacacgcacttccaaggaggcgcccagcatggcgagcgagccgagttcttcagtgacgcgcgcgcccaagtcggcagcggcagccacgcgcgcggcgctcagcacgtcggcggcggcgagggccgcatcgtacagcgtctgccgttcggattcgagttcggcgaccttttccggcgaggcgtccagatcctccaaatcgaacgccgccttgtcccgccaagcgagcacgtcggccaaggtggggccccaccgacgggtgaggtcgccaagctcgtggatacggccgttgatctggtccagatcctccacgctgccttcgtcgcccagctcctggctcagggcgaacaccacgtcgcccaaatcggcattgatggattcaagccgatcggcctgctcggcgaacgtgccgccgacgcgaatcgcgcgcaacgaggtcaccgcatgattgatgagttccacggccgaagcgccgtcggcggcgtccacatccacctgcgaggcatccagcgcgctcagcgccgaacccacgccttgggcgatgtcagccgcgttttcgatgcgttcgcggcgcgccttcagctcctcgtcctcccccggctgcgggtcggttcggttgatgcggtcgatggattcgcgcaggtagtcggcctgttggcgggcagaggattcctgcgagcgcaggcgttccagccgctcatccatggcggccagcgcatcccacgccttgcggtaggcggccagttcggcttcgtctccggccacccggtccagaaactcgcgttgccgtgcggcggccgcgattttcagctgatcggtctggccatgaatggtaaccagttcgccggcgatggcccccagcaccgaacgcggtacggacttgccgccgagcacggcccgcgaacgtccggaagcgcgtacggtgcgggaaaggaacagttcgccgtcttcggggtcgacgcccgcgtcatgggccttggccacggccgcggcagcaccggtgagcccgctgtcagaatcgtcagaaccggcatcgtcaccggcatcgttggtgtcgccggaatgttcagatgcgacggcatcatccgagagcgcgaaaatcgcctgggcccaagcctcgtccgccccggccgagacgcgcgaggattcggcggccccaccggagaccagtcggatcgcggagagcagcatggatttgccggcgccggtctcaccggtgatggcggtcatgcctgcggccggcgcaatggcggcttctcgaatcggtcccagattgcggatatcgagttcttcgagcatcaggctcctgccttgccgtcgcgttcgcccggcttgtcgggctcggtaccagcgacgccagcgtcaccggcaacgccagccgcatacgcggccgccgggaacgtgtgcccgtgatgcagcggctggctcgaggcctcgttgcgcgcgtgctcgcgccaaccgaccacgggcagatcgaacttggagaccagacggttggtgaacggcacgccggagagtcgggcgaggcgcaaggtatcgcgcgattcgcgcaccatgacgcgcgtaccctgcggcagggcgcgctggcggcgtccatcgcagcaaatccagccttcggacatggattcgtccagaatatcgatggtgaaggtcgagccggagccgatgatcagcggcctggcgaacagggcgtgcgcggccaacggaatcaactgcagggccttgacgttcggccacatgaccggaccgcccgcggagaaggcgtaggcggtggaaccggtgggcgtggatacgatgacgccgtccgcgccgaacgagttcatctccacatcgtccacgcggatggacagttcgaccatcttgccccggtcggcgcgttccagcgtgatgtcgttcagcgcccaatcctcaatgggcttggtggtgccaggcagccagacgtccacatgggcgatcatgcgttcgtcgatcgaatagtcgtgggtggcgacccggcggatcgcctcgtcgatctggaagctttcgaattcggccaggaagccgacatgccccatgttcacgccgagaatcggcacctgggtgcagtggacgagttcggcggcgcgcagtatcgtgccgtcgccgcccaggaccacgacgatttcggtgtcgtccgacacgcacggcggctgcacgccgaaatcgggggcctcggtgttgtcgatgatggtgacttcgaaaccggccactcgcagctggctcaccgcctcggccactacggttccggtctgcctgagcctggtatgcgtcaccaccaccgcgttgcgcttggccatggcatcctcctgtcgattcggtcgcactgctcattattctagccgcagacaccgtcatcactcgtacaggtgttcgaaaaatgccgcttcgtggcgcgtcgccgacaacgttccgcagagtcgattaacgtaaggcttcggcatacaatggcatacagccgcgcgatcaccgtacgcgtgccgtgcgcagcgcgatggcatgccgtatgaccatacagcagtatcagttgaggagcttgaggacccatggccaatgacttcgacgaatcctccgccaatgaggaggcctcgaagggcctgtcatggtggtattcggccgatgtactgagccgagacaaaagcgataaaaccgccaagcgcattcgccgcatcagcatcaccgaccgtctgctcaggcacccgggccgtctgtccatggtgtatttcggcgcactgatcatcatcgtcaccggcttgctgctgctgccgatctccacatcggacatcatcttcaccaacttcccggtcgcgttcttcaccgccgtctcggccctgtccacctgcggcattccggtggtgaacaccggcgaatactggtcgacgttcggccaagttgtcatcctattctccatccagttcggcggcctgggcgtcatgaccttcgcctcgatggtggctcttggcgcttcccgcagactcaaggtctcccagcgcatgcttaccgcgaacgaactgggcaccacgaagctttccgaggtcaaaggcgtactcaccgtggtattgggcacctccatcatcgccgaggtgcttaccttcgtgctgctgctgcccgacctgttccgcgtgaaccacggcaatatgggacgtacattgtggcaggcgctgttctacgcggtatcggcctacaacaacaccggtttcacgcctgacgccaccggcctgcatgtgaaccgttggggcgtgggactgccgattctcatcagtgcattcataggaacgctcggcttccccgtggtgctgaatctggtgcagtgcgcacgccgacatctcagcccgaaacgttggacgttgcacaccaaactcactttggtgaccaccgctgtgctggtggccacctcactggcttggttcctgctggtcgagtggggcaataccggcctgttccccgcagacggtcccggcatgaagatgcgccgtgcgatgagcgccgccgtcatgccccgctccgccggtttcgatatttcctgggtgcccgaagtcacgaatgagaccaaggtgttcatgagcatactcatgttcatcggcgcaggctcctcatccaccgccggcggcatccgtgtcaccacgttcgcggtgattctcttgatttgccgcgccgcattcaccggccatcgcgatgtcaccgtgttccgccgccgtatcccccgccgcgtccagatgaccgccgtgtccgtgaccacggcctgctttgcgctggttatggtcggtgcgatgatgctgatgttcaccaccggctgcgcgttcgtggacgccgtgttcgaggcctgctcggccttctcgttgggcggttattcggtgggcgtggcaagcgccggcaatccggccagcctgtttattctgtccgccgagatgattgtcggacgacttggcccgttgaccatcgcctactccatcagcagaccgatggctcccgaacctattcgttatccgcaggaaaacattatcgttggctgatcggccattcaatcggcacacagaaatccggcatagagaggaccatcatcatggcagcaaaaccgagcggcaacaaaagcgtgctggtcatcggcctgggccgtttcggcgggtccgtggccgccaccctcgaccagatgggtcaggatgtgctcgccgtggataagaacccggagcttgtggcccgttggtccgcgcatctgcccaccattcaggccgacatgaccgatgtgctggccatcgagcagatcgacgcctcccagttcgacacggccgtcgtggccatcggcgacagcatcgaggcttcggtgatcatcaccggcaacctgctggatgccggcgtttccgatctgtgggccaagtccgtgtcccaggagcatgcgcgcattctgcagcgcatcggcgcccgtcacatcatcaatgcggagaccgatgccggcaagcgcgtgggtcatctggtggccggcaattatctggattacatcgaaatcgacggcccgtacaccgtcgtcaagatccacacgcccctatacgcggtgggtcgcagcatcgaggacgtgcaggtgcacgacaaatacggcgtgaccgtggtgggcctcaaggccccaggcaaggagttccagtacggctccaaggaactggtcatgcatcgcaacgacgaactcatcctcatgggcaagcaggatcagatcgaccacttcatccaaggctaaccccccccctaactgcgctcgctataccccctatctgctcacatcgtgaccgatataacccccctcaacatggatgcgctcattattggggcaataagccataaagctgtacgtccatattgagggggctttatcatcatgggcaagcatacgcagaattgcacgttgataggcaaaggagtctacggcaccataggagtggaccaacgttcccgtcttgccgatggcgcgcattttcacaccatgattgtgaccagcaccctcgaggcctcagttatagaaggggacaaactggtcatcaagagtggcattgtgcggtgtgatggtgatattcgcgtatccagcatcagcggcagcggcgacatcgaagtcggcggcgacattatttgcgatgaaataacctttaccggcaaactgcgatgcaacagcgatatcgtttgttccggaaatctgtccgtcaatggctccctaggcacccgtcatattagcggtcagacagtccgcttgaacggcgtgttgaagggtcatgacgtcaacagcagggctctggaagttcatccactgcgcagtacgatgttttctcgttttgatatggatgggtatgaggatggcagcatggttcgccatatcacagccgtcacggttgaagccaaccatctgcaatgccggactttgacggcggactccgccatgctacgcaacggcagtgcggtggaaagcgccacgtgtgccaccgcaataggcatcgaccgtacctccagcgtgctgctggtgaacggagactgccgacgcattcatctcaagacagcgtaaagcaggtattcctcattaccgtgggtgccgatgatgggactatcggcagtggccaccacgtcaagtccgtgctgttcagcacaggcgaccacgtcgtgcaatgcccgctcccgcaatgccggatcttccacgatgccgtttttgccgagtcctgcccgcccgacctcgaactgcggtttgaccagtaacacaatctgcgcaccgggagccgcgatgcgcgcgattaccggaatcacataggtcagggaaataaaggagacgtcggagacgatcatcgccggccggtaaggcaggtcgtcggcctctacttcgcgaatgttgacgccgctcatttcgatgacgtgctcgtcattggcgatgcgcgggtcgagctggccgtggccgacgtcgagcgccacgactttggccgctcccccgcgcaacagtacatcggtgaagccaccggtggaggcaccgatatccagacattccaagctttccggcccggtaaggccattgccggcaaaggtctcgaacgcgcccaagagtttgtaagcgcctcgggagacgtagtcgtcgcccttatccacggcgagttcgctgtgcccggctttgaccatgaacgatggcttggtgatggtctcgccgtccacgcgcacatgcccggctttgatgagtcgctgcgctttggcccgcgattcgaccagtcccgaagccacgagcatcatgtcgagtcggtcaagtggggtcgcgggatcgatatgttgcttggtcatataccttcctttcgacccaccatccaccaacggggtggctcggcatggagccaccatccagcacttcacgtcatcttccgctggcgggagaatgaatctcctctgctagctgcggctgttatcaagctcgtgttgtaacgattccagcacgttgcgataggtctcaagcttgcggtcgttgtcttgttcatcaatatccgcaagttcggggtatcgctcggtgaccggcgcgtgttcgctatccgtaggcataggactatgcctcgatggcgaacaccggtaccgtggcctcgctgagctgtgcgccttggtcggcggcttcccatgcggcgcatacggcggcacgcaggccgtccatactggtggggtcgctgacgtgtacctggccgttttcaaaccaagcgctagccttgcggcattcccaagtaccgctctcgtcgcggaccggctccggttgggcttcgccgagttcacgcagatcaagggcgatgaatgtgggcctcaggtgtgccggagccagcatcagttcggtcgggttggtgacaccggtcagcaccgccagcgaatcatagtcaccgcggttacctgcctcgatatcagtgtcgagtcggtcgccaatggcgatggacgcctccttgggcaccagatcgtggccttcggcggcgttcagttcgcgggcctcatcgtacatgtacgcttccggcttgccagcggaggcgaccggttcgacgccagtggccgtgatcacggcgcgaatcatcgatccgcaaccgggggcgatgcccagttcacgaggaatcgtcaggtcgcggttggtcacgaaatacgtggctccggcctcgaccgcgaacgcggcatcggccatcatctgccaagtcatatccggataccagccctgaataacggcctgcgggcggtcctgaggaccgtccacgatggtcaggccgttgcgggtgacctcatcgcgcaaatgctcggcgcccaatacctgtacgcgcgcgccggcgggcaacgccttggccaccacacgggcggccaccaccgaagaggtgatgacctgccacggctccacgtccaagccgaagcccttgagctggtcggccaccacgtgctggaagcgcgaggagttgttcgtggtgtattcgatggtcatgccggcggcttcggccgcacgaatggaatcggctgcgtattcgaccggattcttgccgcgatacaccacgccgtcgaggtccagcagcgcaagctgataggcctcggcgagcgggcgatcggtgcctttgaggaaacgggtcattacgccgctcactcctcggtttcggtctcggtctcgtcggactcagccggttcaacggcatcgtcagcggactcggaagactcctcggcttcagattcctcagattcttccgatgcatcctcggactcagcattttcgacatcggcctcatcagactcggcatcgccgtcttcagcctcgtcgtcctcatcgccgtattcctgctccggatccggggcgtactgcgcttcgtccggatcgatgccgagcttctcgagcacgtcggagtcgtcggtgatgtcttcgagatcgtggtcaatcaccacgtcgtcgctgttttcgtcaatctcctcgtcggcatactgatcctcaagacggtccagcaggtcattaagctgctcggcttccttgctgcggccggcctcttcaaggaagtactgctcggcctgcacggcacgcatacggtactcacccggaagaccctgagagcggccgacggtatgaaccacttcaatggccttgtcccacatctccaaatcgccaagggcaccggcatacaccaggaacatctcgaccttgggagcgccatgcagctgcttgccctcatcggacagcgccagttccacggccttcttcggttcaccgacaccacgctcgcagtcagcgatgaacggcaggtagtcgaggaagccgttcatacggtaggcggtacggaactcacgcagggacagcttgtagtcgccctgacggtaggccacgaacgcgagcgtctcgcgggcaaagtcgatgcgggaggcctgacgggccacccacttggcgtgctccaaggcaagttcgggatcgctctcctccagcgcgaaagcggcgaggatgtgcagaccaatgttctccgcatgctccttggacaggccgcgcagacgttcgcgctcatccttggacagcatcgaccattccatgcccttgggcatcttgggctcgtcgggacgacggtcggtgtacgggttctgcgaggggaagctcatcgtgccgtcggagttacggcgcggacgcctcatgtattcagagcgcttctcctcacggtactggcgcttctcttcctgcgaaaactcgcggaattcgccgtcacgacggttgttgtcgcggcggtcgtccctgcggaagttgcggcgatcgccatcacggcgatcgtcgtcgcggcggaagttgcgacgctcaccatcacgatggaaatcacggcgatcgttatcccttcggtcatcgcggcggaagtcacgacgatcattgtcacgacggaagtcacgacgctcaccatcgcggtggaagtcacggcgatcatcgcgacggaaatcacgacgatcgttgtcacggtgctggtagcgcgggttctcgccgttctcgccttcgtgggaacggtagccgccttcgcggcgcggcttgaaaccttcaccgtcacggcgcggaccactgccgcggtaaccacccttgtggaagccaccggacttgccgtacgacttacggtagccgccgtggccctcgccatcaccatcacggcgcggagcgtaaccctcaccatcctcacggcggcgcggcttgaagcccacgccatcgcggtcgcggcgcggacggaagccgtcgccatcgcggcgcggaccgttgccgcgatagccgcccttgccaccgaaaccagagcgtccgcccttgtggaagtcgccacccttgccgtacgacttgcggtagccgccgtggccctcgccatcaccatcacggcgcggcgcgtagccttcgccatcctcacgacggcgcggcttgaaaccttcaccgtcatgacgcggcttgaaaccgcccttgccgcgcggcttgaaacccttgccaccgcggttgcccggtcggcgatcgccataccccttatggccgccgccgtaggacttgccggaacgctcgttaccttctgccattacttgttttccttaattcgttgttgattaacggttttccacggcgccgagcgccttcttgccacgacggatgagcgcgaagcggccggccaggaagtcagcttcggccagcacctgctcctcatcctcgatacggttgttgttgagatacacgccaccggacttgatggcgcggcgtgcctcggaagcggacttgaacagtccggcagcctgggcggcgtcgattacgcgagcgcccggcttggagacggggaagacgtgctcgccgttctcgtcgaccaccttgaaaccgtcgagcacggattccagcgtttcctcatcgatgtcttcgaggttgccaccgcgtccgaacagcgcaccggaagcgtcaatggcggcctgggtagcggcctcgccatgcacgaagctggtgacctcccaggcgagggtcttctgggcctcgcgcttgccggggttggtcttggattcctcgaccagtcgttcgatttcggccttgggcaggaaggtgaacgccttcagcaggctttccatctccacatccgggcggttgatccagaactggtagaacttgtacgggctgagcatcgtggcgtcgagccagacggcgttgccctcggacttgccgaacttcttgccggaagcatcagtgatgatcgggctggtgaacacgttgacgtccacaccgcgcaccttgtggatcaggtccaggccggaggtgaggttgccccactggtcggagccgccgagttccagcgtgcagtggtattcgtcaaacaggtggaggaagtcgttgccctgcagcacctggtagctgaactcggtgaaggagatgccttcctcagagttcaggcggcgggcgaccgtgtccttggcgagcatggtgcccagacggaagttcttgccgacgtcacgcaggaagtcgatgacggtcatcgaggcggtccaatcgtaattggacacgaaacgtacggcgttcgcgccttcggtgtccagaatgccgccgatctggttcttcagacgatcggcccagccggccaccacgtccttcgggttgagcgtgcgttcgccggactggcgcgggtcgccgatgagtccggtggcgccgccgaccagggcgattggatgatggcccgcaagctgcaggtgacgcatgttgatgagctgcacgaggttgccgatatgcaacgatgcagcagtggggtcgaagccgcaataataggtgatgggctcgccgttcagtgcttctgcgagtcgatcccggtccgtggactgggaaatcaacccgcgccattccagttcctcaagcagggtgttgaaacccgcttccttgaagtcggtgacgtgagccatagcttgtcgcttctccctatcgaattgtgaatgagactgcccaattgggcacagtcaagtttcgcagaacatggcgacagtgccgaacaccagccgagccgcgcgattcagtaaaacaccttattctagcggcgcgggcccataagttcgcgcaaagagtcgatgatgtcctgacgatccggcacctggaacttcgggaaggacttgagcatacgcttctgctgtgcgttgatgacgccattgacggcccagcgcagacgctcaaccgtatcctgcgaaaactcacgcatcctgtcggataccgcactggagccccgctgccacgtgccaccggcgcgtgccgccacatcctgcaccacctgagcgacggaatcgagcacctgctcgaatccgagcatgcccgtaaccgtgaccgccaagtcgatgatggtgatcagagccagtaccgtgaccagcgtatgcagcatcggcagcggaatcatatccgtgacccgctcgacatatggctgcgaaccaagtaccacacccacgccgccgagaccgaaaatcaacgcgcccagcaggcagacgcggccttggaggttgaagcggaaattcgagtaatcccaccagcgggcgtggaacagctgctccatgacccacgaggttgtgtattcgagtatcgtggcgcccaccatcgaaatcaggaagatgatgatcgggttatgtacgttgccgagaatggcgacgccgagtatcgcgccggtgccgtagatcgggcacagcgggccgttgaggaaccctcggttgaccaagcggtgctgttggcaggagacgagaatggactcgtacgtccagccgacgaaactgtagaacagaaaccagaggaaataatgttcgagtgtggtgatcatcgacgggcttcgatctcggcgtagggcttcgcggcgggcaacgcgcgcttgttgaaccggtcgaacgagaaggtctcggcggtggcggagcatttgtccgccaaggtgaccagatagccttcgatatagcgcggcggcaccagggtcatcgggaacatgtggttctcgatgctgttgcgttcgatatcgttgagcttgaagtccttcagggcattgaccagggcggcgtggccatgggtgaagccatgccactggtgttcgccgttatcccagtcgtgccagtcgtacaggaagtaatcgtgcaggagggccgcgcgaatcagggatttgaggtcgacgcggtaccacaggtgcgcgcggtcggccatccacacagccaggcaggcgacacgcacggaatgttcgaacgtggtgacgttgccgtgctggtagcagcagcgttcgatctgcatgtggcgatgctcgatgacctcacggccgtgcttggcgaccaggcgttgaatctgcgttcgggtgagcagatgtcccacggtttcgaccctccgttcgggttggttcagtgcaatcccttgttgtgaattacgattacccgacgatattcaagaatccatcgaataataccgtgaccgattgtagggcacacgtatgtccgtgcacactcatccaaaagaacgacaacgggaaccgttaatcgtggtgggtttcaagatagtcgagataaccctgaaaaccgccatcgaggcttgctacatcgtaaccgcgatcggcaaggatttcagctacttcctcgctccaccatccttgagcacaatagactacgacagttcgatctgtgggcacggttttgagcacatgggccagagggtcgagtggtgcattgatggcaccttcgaccgggtgggcggcgaagtcggctggttccctcaagtcgagcagcgtgaccgtattcgggtcgagcttggcaaattccgccggcgtgatgcggcggtacgatgcttcactgctctcatcgtcatcgaccgcattacgcaaagcaataggcatgttcttcccctctcgttccgatcttggctcccctcaaggaggagtgccacatagctctaaatcgcgcaggccggctgaatatagttggccggatcaatagcagtaatggtcggctgctcaccgcacaccgggcagtcgggcacatggttcggcaacggcacacggcggatgttcatggtcagggcatccacagtgagcatacgagccacgagcggctcccccacgccggcaatcagcttgacggcctcagtcgcctccagactgccgatcacaccgaccaccgcgcccagcacgccggcctccttgcaggtcggaatttcacctgcggcgggcatatcgcggaagatgcagcggtagcaggggccttcgcctgggatgacggtcatcacctggccggagaacccgaccacgcccgcatggatatacggcttgccggccagtacacatgcgtcattgatgaggaattttgcggcgaagttgtcggtggcatcgatcaccagatcgtacggttcgatgaggccggcgatgttgctggcatcgacgagctcgtagtaggtgtcgaccgtcacatctgggttgagcgcgcggatggccgtggccgcggattccactttgggcgctccgacacgtgcagtggtatggatgatctgacgttgcagattgctcatatccaccacatcgccgtccaccagtccgatatggccgacgccggccgccgccagatacagggcggccggagagccaagcccgcccgctccaatgatgagcacgctggaggccaacaaccgcttctgccctttgacgcccagccccttcaaaatcagatggcgcgcgtaccgctccacctgttcatcagtcaatgccatgttttctccatgtttccagctcccctcagtccgctacgtggccagctcccctcagagaggggagctaataaaagtgtcagtgcagatatcccgtagtcggactggacggcacggcctgtccctcggtcaccttgcccagaccggacagatacgccgcacgaccagcatcgatggcgtgcttgaacgcctcagccatcagcgggatattgccagcagaggcaacggccgtgtacgccatcaccgcatccgcacccatctccatcgcatcgcaggcctggctcggacggccgatgccggcatcgatgatgaccggcacatgcgcattggcgatgatgatctcgatgaagtcacgcatgcgcaggcccatgttggagccgatcagcgaaccgagcggcataacggcggcggcaccggcctcctccagctggcgtgcggcaatcgggtccgggaacatgtagggcatgaccacgaagccttccttggccagcatttcggtggctcggatggtttcggcgttgtccggcaggaggtacttggtctcgtgttcgatttcgaccttgacgaagtcggtgtggcacacttcgcgtgccagtcgggcgatacgcacggcttcctcggcgttgcgcgcaccggaggtgttgggcagcaacgtgatgccttcgggaatgtagtcgagcacgctgttctcggtggtctgcgcgcggcgcagtgccatggtgacgatttgcgtgcctgcatgttcgaccgtggccttgatgaggttcaggtcgtagcggccggagcccagaatgaatcgcgactggaactcgtgaccgcccagggtcagcggcttgtcttccactggcagaatcggcgcggcggtgccgaccggattggtgacggcgggctgcggcggcagcggagtcgcctcaacagatgcttcagtaaccggattaatattgctcatagcttttcctttcatccaccctgtacaaactgcacaatttccatgacgcactggtcgtcgagcatggcgtcggcacgcttatcgcgcgggataatctcaccattgagttcgatggccacacgctcggcgcggaatccgtgcgcttcgagataatcggcgacgctgaccggcgtctcgagcgtgacctgctctccgttgacctgcataatatcctttcagatagtaaaaaagggtgcacgaaacgaaccgtaccttaagtggtgcgcccattcatgaacccaatcatgcgaccgttcgaccgctgtgatgtattggctccatcacgaccgtctcacggctgaattatgcaaacggaatgaaagctgtatcggagaacccggcaaatctgcaacaacgattccttacggcggcatgacccgcgtcaagttccccggtcgaagtctggcgacttcctctcagcctcacggctcccgttcgttacgatttctcagtgtatgccgttgcagtgacaacagcaaaatagagctccctctgacgagggagctctattgggactagaacgtgccgggggctttgtaggcggagccatccgacgtggatgcggggaagagcttgagttcttcgacctcggccttggcgtcggcgatctgctcgcgcacgcgaccgtaagcggtgccgcccttgccgttgcgggagtcgaccgaaccgtggctggagagcacttcgcgtactcccggagccttgtcggccggcaggaacgcggcgaaggtctcgatgaagtcattgtcggtcagatcccacagttcctggccgcggccttcggcgagcttgacgcaggcaccagagagctcgtgcgcatggcggaacggcacaccgttcttgacaagccattcggcgatgtcggtggccagcgcgaagccggtcggggcttcctcttcaagccgctcgctgtcgaagtgcatggtcttgaccatgccggtgaaggcgggcagcagcacttcgagcgtatcgacctggtcgaacacggcctccttgtcctcctgcaggtcgcgagcgtaggcggtgggcaggcccttcagggtggccagcagaccggtcagatcgccgatgagtcggccggacttgccgcgggcgagctcggcgatatccgggttcttcttctgcggcatgatggaggagccggtggaatagccgtcgtcgagcttgacgaaggcgaactcctgggtgttccagatgatgatctcctcggacaggcgggagatgtccacgccggtcatggcggccacgaacgcgaattcggccacgagatcacgtgcggcggtgccgtcgatggagttgtcggtcacgcgggagaagccgagctcacgcgccacggcctccgggtcgaggccgagcgtgttgccggccagtgcgccggagccgtacggagaggcgttgatgcgcttgtcccagtcgatcagtcgctgcacgtcgcgaatcagcggccaagcgtgggccatgagctggtgcgcgagcagcacgggctgggcgtgctgcatgtgggtgcggcccggcatcacggtgcggccggccttttcgctctgctcgaccagggcgttgacgaggtcaagcaggagtccggcaatcgcacgggagtggcggcgcagccacatacgaatcaggcaggcgatctggtcgttgcgggagcgtccggcacgcagtttgccgccgagttcgtcgccggcaatgtcgatcagtccgcgttcgagggcggtggcctcgtcctcatcgtcttcgatgggggcgaaggagccgtcatccacatgacgctggagcgtgtcgagcgcatcctccatgcgctgcagctcgtcggcggtcaaaagtcccgcacggccgagagcacgggcgtgggcgcgggaaccggcgatatcgtcgtcggccaagcgccagtcgaactgcgtggacttggacagtcgggccagttccggcgacggaccggacgtaaagcgaccaccccacagggccagatgttcgttgttctcagtcatgaaggctccttgaaaagtgaaaatagctgtgtttaagcgtagcaatgtgttcaaacatacagttgcccccgctggcgagggctgtcacatggagtgtgactgaggacagtcctttcaaagaccactcccagtcagctatgccgacagcc

SEQ ID NO: 1512 - DNA, 4355 bp, Unknown
  R257_15m  MAG No. k141_47520
gcgctgcgtcggcctgttcggtagcttgatttcggttcggaaggtgccgggtgagggcctgctgacggcgagcgtggcctgcatggcgtcggtgcatgccttggcgatggacaggccgagtccgtgcccgggcctgttggccatgcaggtgtcgtcgccgcggtggaacggctggatcaggtcctatgcgtccgcggcgttttctggaggtctggtggtgttatcgagggtgatgatggtgtggttttcgccggcttggacggtgcaggttatggcacggggctgcggagcaccttctccgagacgcgggttcggggcatggccttgaccctgcggtacccgtacccgccctcggaagcggcgaacgcctcggccgcccggtgcgatgccgggcaagcatgtcatcgagccgagcgaacacgccggcctcaaccggtcgatcaacagggtcttctccctgtccgacaggcgccgcaggccggcgcccgcgccgaacagttcggcggcccgcttccgccgcatgccgcccggcaacggacatatgatatcctttcgcccagtctccaagaaaacgtccgcaccctgttatccgggtgggctagtatggcggaaacgaaagggcgagaatgcggttgacggaagtgtggcgggcggatccggagcggacgtttgagctgttctctgagtttccggcggacgagaacgggttcgagaaccaggcggccggcatggaccgcgagcggttcgccgtgtatgtgcatgagcttgaagaacaatcgcgtggcatcggtctgcagcctggctgggtgccgagcagcaagtacgttctcatcaatgatgagggtgcgtatgtgggaatcttcaatttgcggcatcgcctgaacgacaatctgcgtgtcggagccgggcatataggctatggcatcgcccctcaatatcgcggccgtggatatgccacagtcggcttgcggctcacgctcgacaaggcgcgtgagctcggcattgacgaggcgtacctgagcgttcataaggacaaccgggcgagtcttgcggtgcagcagcattgcggggctcgcatcgatcacgaggatgggctggaatactatacgcgcatcagcacggcacccgaaccagggaacctgcccaaggcggaattcatgttccccggacctgaacgtgaccgtctggtagggctcattcttgccggaacgaagaccgcgacctccgcattgatgattgaatacgaagaggatgacgaaccgctgccgcaggtcggcgaacgctcggcactggtggattccagtgaacggccggtggccatactcgtcaccaccgcggttgatgttattccgcttgggaagatcaccgaccggcacgccatcgatgagggcgagggcgacaccacggctgccgcgtggaggcatacccacgagtccttctggaacgcgccggaataccgcaacgagttcgctgacccggattttccgctgaacgatgactctcttgtggtgttcgagcatttcaaggtcgtgcgactgttggactcaatggcaaacaagacggcagacggctatgaacggcaagtatgaggtgatcaggcaatttgtcgccgcgcatggcggtcgcgccgagctcatcgagcatgagacggcgatcgaagattcatatcatacgctcgccatcgatccgcgactcgtcgtcgaatgcaacgccatcgccggctgtttcaacggcgaggatttcgtcaagccgctgtgattcaagaaccgaagctgatgtccagctgctcaatcaccttacagtcagtccgggcctgctgttttcgacgataatggtatgggtgggtgaaacgaaaggaacggtagctgatgactccgattgaattgtcgacccgacgccgggtcacgggactgacctcggatgagttcgccaggctgttcgtctcattgcagcgtgaagtggaaggcgaggctgcgcgttggagcgcgacggacgtcgaagcctgggagttggtcggcccgccggtgaccgccgaacagcatctcatcgatacgttcgcgatggccaatgaattcgtggcgacgttggcggatcgtttgtatcacacgatcatgcccgtcacggagggatcggtcatcaccgcatacgtcgatgacctcacgttctggggagcgcacccggacctaggcggagtgccgtgcgcattatggaacatcgccgcgttgcaagcagccgaatgggtgcgcaaggagaccggcaccatctgcgagctgcgtgcacgcgaaccgttggtgtgatggccgggttcgtgcctcggcgcctgtgcggcagcgtggcctcggtgacgcacaagcgcaggagactgtcatggtcacggtggtctagaatgtcgccgaacttgctgatgcgtggtgtgtgctctctcctttgcctcatggcgtatgaggaagttctcgaccaacgcgatcatcgtgtccttctcggcgggcgcggatagcgcgatcatcagcgccattgccgtcaagacgttgccttccacgagcagggcgtcgtcgcccttgggaggcattgcccgtgtcatagtcactgagcagcttgagactcggcagatagcgctccagaatctcggcagtaccggcaatctatcaatatgctcaaacatttgttcgatggcgtgtcggctgtatgttccggcagcatcgctcgcatcgataggcgacgcgttgcgacagttcgactcgcgacaaatacaggtgacgggcgcacggttgacatgatgggtggcaaggcgtgatcagaacggagttctcgaatctcatccaagccgtcacggctatcgcacttttcgaaggctcagcacgaagccggccgcgcacagggccatgacgatggatatggcaaatgccgccgtaaaggtgccggtcacggtcttgaccgccgaggtgatggagggccccaccgcctggccgagcgtggtggacaggttgaggatgccgagatccttgccggtctcctccttatgcagaaccaggtgaccattaccatgtgcaaccgggtcggcgaggagggcgacgtgacgttcaccggccgatcagtagtagtggattcgtacggcaacgtcatcagcgaggccgacggcaaagagcgactgatcattgccgacattgatctttctcagaccgcggtggcccgcaaacggcgtccgtttctgggactgagacggcccgagtggtatactctgatgcggactgagccgggaatcggcatgctgacggtcgattacgccgtaatggctgagcttagacggatatgagaccttacgatgggaggacggacggaccatgatcgccgcagaccgcacgttgctggagcaggccagagagctgcaggcactggcccagaccggattggcgtactgcaaggatcccttcgatcgggagcgttacgagcgcatccgcgcgatagcggtcgacatgctcgccatgcaggccgacgtgccggccgaagagatgcgccggctgctcagcgccggatacccgacgccgaaactcgatactcgcgcagccatcttcgacgagagcggcagaatccttatggcgcatgagaacagcggggagtggtcgctgcccggaggatgggtcgatgaggaccagtccgtccggtccaatgccgtcaaggaagtcaaggaggagaccgggctcgatgtgcgggccgagcggctcatcgcggtgcaggactgcgccaaccacaatgcgctgacctacccgtacggggtgctcaagttcttcgtgctgtgccgccgcgtcgatggtcgtttcactcccaacattgagacgacggagatccgctacttcgaggagggacggttgccgcggctgtcggagacgagaaacaccgcggagcagatcgccatgtgcttcgcggcccatcgcgaccccgactgggtgacgctgttcgagtgaatcccatcactgtgcgcgagtattgtcacgctgagacctgaatgaggagagcatggccataccagcgcgaaaatgacccagatcggcattgtgtggcaacggttctgccacacaacgcgatgttttccttaacattcgctggtgtggccagcgttgatttattggaaccgccattttgcaacgttttgtcattcgccgtctttcgccgttattccgccgcgtgccacaccacgtcatattcgggtgaaaatggcctggtgtggtacggtccgcatgatcttattgtcggtcatgccgggaggggaatgatatttgttcggtgttctcgtcccggatcgggggagaacggcgaaatcttccgactcgtcgcgtgtcgcgtcttgcggttgacgc

SEQ ID NO: 1513 - DNA, 23326 bp, Unknown
  R257_15m  MAG No. k141_49042
acccgttcgacctgcggctgacgggcgatggttgtgggcgcgtaatccggcagcggaaccttctgctgggcggcgtccacgccgggggcgaccaccaacagattcgcgccaagcgcgtcgagttgggcgaggagcgctgcctggttcgatgcggcgatgccggacaacgccacatatgcggccacgccaagcgcgatgcccagcgatgccagcaccgtgcgggacgcccgcccggcggccccaacccaagccgcatgcatcaaatccgcaattcgcgtgcgtattggtttactcataggagtacgttcactcatatctctcccccagtcagcctttggctgacagctcctcgtcagagggggcttgattcggcttgtcgagttcggtgactaggccgtcttggatgtgcagacgcctggggaaacgtgcggcgatggtctggtcgtgggtgaccatgaccaggcttgcgccggaatcggccgccgtgagcagcaggtcgacgatggtgtggccggtttcgcagtccagcgcgccggtcggctcgtcggcgaagatgatgtccggccgtttggccagggcgcgggcgatggccacacgctgctgttcgccgcccgacaactgggccggccggtgatgcaggcggttccccaatccgacctgttccaacgcctcggcggcccgttgccgacgttcgccgcgcggcagggttgtgtattgcaggcctgtcatcacgttctccaaggcggatacggtggcgatcagatggaactgctggaacacgaagccgatgcgcgcggcccgcaggacgctgcgctgccgctcacccatcgcattcacatccccgccgtcgtatcgcaatattcccgaagtcggcatgtccagcgtgcccagtaacgacagcagcgtgcttttgcccgagccggacggcccgacgatggacacgagctcgctgcgatcgatggccagtgacgtatcatgcaatatctccagcacgctcccgtccttgcctggaaacgccttcgtcacatgctccaacgtcagcaatgccccatgctctgggccagcgggggcaaactcgatgtcgttcatgagaccaccaccttgtctcccgccttgaggccgtcggacttggtgatttgcacttgcgcgtcggacaccagcccgattgacaccggcacacgcaccaacttgccgccgcgtaccgcttcgaccgcatacgcgctgccggcgctggcgatcagtgcggtcaccggcacgatcagcgcctccccggtcgcggcatcggcgttcgggatgatgacttgcacggccgtcggcccgaaagccgccacctgcgactggtccgggaagtcgatgcgcgccgatggctgtgtggcttgcccgttgtcgccggtcttctgcccgccctgatcgaccgaggcgagcgtcgtttcgacggtggtgttgtccggcagcacgacctgcgccttgtctccggctttgaacatcgccgcctgcgtggcggtcaacgtggcctgcgcatgcagggtgacgcccgtatagcttgccgggctgacctgtgattggccgagtttcgcgttcaccgccgtgatgcggattggtgcggccgcggccagggccaccgtattcgggtcgaatgtgccggtgaccgcgtcgccggtcaggccgagcgagcgctgccattgccggatcgcctcgcgggtcagccagttgaaatgcggtccgacctcgccgccgtagaatccgagttcctgcaggttctgctccagttgcgtgacgtccgggccgtcggagacgccatcgccgatcgtccgccagaacgggcggtcgccatggaacagcggcacgggcgcgccgtccatctcgtacacctgttcgccggtgttgatctgtttgccggccaccggcagttgggtgattgtgccggaagcggccgcgaaatcggaggcgtcatcgtattgcagactcgcgccgagccgggtctcggcgttgagtacgcccttggtcacctcctgcgtgcgcagcgtggacacatccacctgctgcgatcggccagtctgcccggtcgcggtgacgtgcccggccaacgtccacggcctcaccgccacgcacaccgcggccagtccgatcacggcgatcgccgcgataatcatcgtcacgattctgcggtgtttcccgaatctgcgcgcttccgtccgtgtcatgattgctcctttgtccgttatcggatggccgtctcattgctggggcgcggcttcggtggacgcgctgccggaggtgaattcggagaggactttgttgtagtcatagccgaattcctcggtggtgccagcgaaggcataggagatgttcgcgccatcggtcgggcattccttgaggaatcggcgcagttcggattcgcttacggtgccgggaatcgtgattgaggtgggcgtatcggcgtccgggtccttgacccagtcgaagcccttcttacgcgcggcctgggcgtaggcgagcgccgcctgcttgtcttccccggaatactggtgttgcggccccatgtccggaatgggctgggtgaagtcggggttcttggcctcgcagtcggcgtattcccgctgtttggattcgtagggtgagccggcgagcgccttggcgtccttgaacaccacccaggtgctgtcgtcttccatcgacgtgtaggcagcgttcgggtagagttgcgggccgtcgtcggatgcgctgaggctgttgccttgggaggcgaccggcttgccgtcggtgccgatcatgcgcagtgcgaccgcgtttttggtcggggcttgtttgcccgagccggagccggacgacacgccagcagccgtacgcgcgtcgaatcctttgccggtcaggcaggcggcgaatcgcttcgccgtggcgtcggtggtggtcgtcgcatcggaccgatcgtcggcacctgagcctgttccgactgccgccagcggtgacgagcaggcgcccagcatcgaagccagcgagagtgcggacgtaagcattgcgattcgccgtaccaggcgcgtatgagtagtggacattaccgtctccattccgtgagtcgattgtgacgacttccatccaatcgccctcaccgtggagcgtcggtaagcggacggattactttcgccttaccgtagaatcgggaaaatgttgggtgatgccattggttcgggaaggctcggaaggggacatgatgcggattctgatcgtcgaggacgaccgcgaactggccgccgcgttggacgacgcgctgcgctacgaggggtacgcgaccagtctggcaaccaccggcgtcgaagcgttgaagatccttgccggcacgaacgtggacatcatgctgctcgaccgtgatctgccggtattgtccggtgacgcggtgatggccaccgtcgccgcgaaccgcattcccgtggccgtaatcatgctgacggccgccgccgaggtcagcgaccgcgtgagcgggctggacctaggggccgacgattacctgaccaaaccgttcgcctatcccgaactgctggcccgtatccgcgccctgcaacggcgcagcgggaccagcaacgcgaccgcagccgtgctcacgcgcggcgacatcaccctcgattccacacgccggctcgtgttccgcgaccacgggcgcacgctcgtcaaactcacacccaaggagtacggcatattgctggagctcatgcgtgcggaaggcggatacgtgaccgcgcacgaactctacgatgcggtttgggatgagccgaccgccgccgacccgaccgacgtgatcaaaaccaccatctattcgctacggcgcaaactcgccgatcgcgaggccatcgtctcgacacgcggggaaggataccggctgcaatgaaggcgacgaacacggcgaaagcatcaggtcgtatacaggcgcttgccggcaaactgcggcccaaatcattccgcgccaaactgacgttggccatcagtctcgtgttcctcatcgccatgggatcggcgaccctcgtgcagaccattgtggtcaacagcatgttcacgtacgccacgacggtcaccgccaaaaaccctgagatgcaggtcgaaagccagcacagcggttccggcaccggcaaacgcccggattccgacccgcgaatgttttcccggggaagcggcacaggtctgaacgatatcactggaacatccagcgtcggcggcgatatgggcgacggtgactatcaggtggaatggggcaaggacgggtcgtataccatcaacaccccgtatggcgtctccgtgtggaaccaggacaacatcgccaccggattgcgcatcagcgcggccatcatcttcgtgttcttcgggatcaccagcattctgatcatctggctggtcacctcgcgcatgtcccggcaactgacctccatcagcgcgcaggcggcggcattggacccggccaaacttgatacgcgcatcgacgtgaatgggccgccatctcgccgtaggccccagttccggcgtgcgggcagacgcgggaccgaggattgggatcatagcacggacagccgcacggacggtcgagctgccggccaatcctccgaagtcacgcagctcggtgacgccatcaacggcatgctcgaccggattcaggccgcatccgaagcggagcggcggttcgtgtccaatgcctcgcacgagctacgcacgccgattgccgcggtggagaccaatctggacgcgccgttggcccaggggcggttccccgaggatgtgcgaccgtcggtacagcgcgcactggatgccaatcggcgcggcgcgcaactggtgcaggcgctgctgaccttgtcccgtattcaaagcgggaccatcggcggcaagcaggcgggcgatgtgacacagatgagtcccgcatcaacggcacgcacatccacagatttgtacggatgcgtcggcaactcccttgcggatatcgacgatgccgccaccaagcgtcgcatcaccataaccgtgaacaaggccggcggcgacgcggacatgtttctcatcgccgccgacccggcgttgctggaactggcggtcggcaacctgctgcgcaatgccgtcgtgcacaacacggatgatgggtcgatcgacgtgaccgtcgtatcggatgaggatggaagcggaccccgtctgaccgtcacgaacaccacggatgagatgctgccggacgatctgaacgagctgacccaaccgttccatcgcggcgagaactcgcgtatcagcgccgtgcccggcgtggggctcggcctgtccatcgccagtgcggcatgcgaggcgatgggagccaggctggaactcggccaactggccgaaggcgagttccgggcgagcattcggttttgatggaacactcaggctccccttcaaagaggggagctctattgtttcgcacgcaaaaatcacagacagactattgccttgcgggaaatcatcgttagattggcgagaggaatattgtcaatgcatacgaaacggaaaacatcgtgaccgcaccgaacacgcccgccgaaacctctgaccagctcaacaagcccgccaaatccggcaaactggaggtctccgacctcatcaccatcggcgtgtttgcggccctgtacttcgtgatggtgtgcatcgccacactggtgagcaccctgttcaccagcggcttcggctccatcttcctgcccgccggacgctcgatccgcgcgcgagactcttccttctgctggtggcgaacctcatgctgttcttccatgtagggctcgccacgcaaatcgtcatggtcgtgctgttcctgttgcccctgctggcggccgcccgatggcgaaccgcgttgaacttcggcgtgacctatgccgtactcaccgcgctgggaatgctcgaccccgatgccctgggactgccgtggctgcatgtggtctccgcgctggccgtgggcgtcacgatgatgctgccctgtttcatcaccgactcgcatggctcaacggcgtggccgaccggtacgtggtattcgacggcggacatatcgtgcaggattacgaggccgatgaattcctgtccctctcccccggctgcgtggccgccatgggattgcgggcgtttgacttggaaccgtatcggcaccggattgcggccctggcttcaagcccggccgccgaatccggctccacggacaatgcctcgctcgccatcgaatggttcgccgaggacgacaccagcctcgacacttacgaatacgccatcgaccatgtcatcgagcacgggctcgaaagctcccccatcttcgtgctccgcatcgctgatccggccgccgaagacagcccgttccgctggctgctggccatcaaccctctgccttcacgcaaggcgttcgccgagggcgggctgcccagccacctgcatttccagtacgccaacgatctgcacacgctcgtcgccacggatgaggccaccggcgccgagaccttgcgcaatccgcgttggtacgcacaccatgtgctccaacgagggaaccaccgaggaccgttgcgccatcatccgtgcgttgcaccacttgcagtagatctggcaacatacggcggtatgacggctccccgctagtgaaacagcagcgcttcagtagccgtgcgagtgcagatactcgtcatcgaagccgaaataatggccgatctcgtgcaacacggttttgcgaatctgttggcgcagctcggcctgtgttgagcatacgcgttcatgcgaccccttgaacagggtgatgacgtccggcatcacgccgctgtagcccgtggttcgcttcgtgatgggtatgccctcatacagtccgagcagctcaccgcacggattgctcattgtggccagttcgcgctcattgggttcgtccgcaacgacgatgccgacattctccagcacccgcgcaaaccgttcaggcaaatcatccaacacctgttcaatggcccgttcaaactcatcgtcaccgatgtgcatactcaatccttcacctgttgcctggcccccacgataacagacatattccgggttccggcttcttgcgggtgccataacgttgcgcggaacgcttccaatcattcattaggtcgattcttcattcattaggtcatgaggctgcgattgtcggtgttggaatggcaccattccagtggtgactgtcagagctcaccgacctaatgaatgaagaatcgacctaatgaatgcgtccggtcatatctcattgtgaaaatgacccggtattgcggtattccgcaattgcacttccaacgattctgaagtattcatccagattctgcgtggtagcgaacgttcttcttgtggcgggaaaagtcttatagcccgcgaaggagaggttgttccttttctcgatatctccttcccatcggtttcggtcatagtggtaccgtccgtcgtattccagaatcacatgatcattcggatacaccatgtccacaaccacctctttgttctgcaacgggaggtatatcggagcattcacctccaattcgggtaatccacgttttaccgattcaaggcgaaggatactttcctgcggcgaatcggtgttctctctgcacaacgagagcgctttgcgaaataatctgatacctgggaacctacctatatcggcgaggaacaacgatatcttgtctttcgttgtctgtttcaaatgctcattacggcaggtggcccaatccaaggcaatgaccatactttccacatcgacgaactgtgcgatctgacacagcgcctgttccactgaaaccacggcgataagatcatcaatcatcgtctggtcaatgccatgaccccaataatggcattgcgtttcggtgagattcgacaatctttcagccccggacaccgtaacgtgcagtttgttgaggtcatagttgggcttgtaattcagcgtagccgtcatgccagcaagctgtagcctggtgccatggctgaagcaaagctcctgtgaagtgcgcatcgatctggcacggcattgttccagtgttttctgggcgaggtctcgcgcctcatcaagtgtgaagaacgtgttgtatgcataggactccatgccatccccctgatggttgtatccgtgaaccgcgttattcacggatacaactcacgatggcataaccaacttctgcgcgcaaccagctcggccgaatcggtggatatgtgtataacctgccagctcagctgttgcggttgatctcgatgtcggtgacggtgaggttggcctcgttgatcaggttgaagaggatgacctcggccagcggaccgggctgcatgaaggtgtgctgcttggcttcggagacgtagtcatggctatcacggtagaaggcggtgtcgatgccgcccggatagacggcgaccaccttgacgctggtgcccttgtatgcggcctgcagactcttggtatagcccttctcgccccacttggtggcgcagtacacgctttcgttcgcgttgccgcgcgtggcggcggtgctcatgatctgggcgattttcacgtcacgctcgccacaggccttgagggtttccaccgtccacagaatcatgcctttgagccccttgaggcatttgtcaatgtcagcggcttcataggcggtgggcaccttgaacgaaggctggccggcgttgttgatgagcaggtcgatgtggccgagcgcggcgatgctcgccacggattccttgacaaatgcttcgtcggtgatgtcgcctacgaagacgcggtaggattcggctggccactgcgcgctcagctcggcctgacgttcggcgttgaagtcgatgccggccaccagccagcccttggcgatgagttggctggcgagctcgtagcccaaacccagcgcgctgccggtgacgatggcgatcttctggcctgttgtggttggcatggttgattcctttgcatgcttgcgagactcccctcagcgaggggagcctagggttaacccgttctttgctgacagctcccggtaggggggccacggtaggactattcttcggctacgagttcgaggtacgaatcattccagaggtcttcgtcgccgtcgggcatgaggagcacgcgctcggggttgagcgcctcgacggcgccctcatcgtgggtgacgagcacgatggcgccctcatacttggcaatggccttcagaatctcctcacgggaagcggggtcgaggttgttggtgggctcgtcgagcagcagcacattggcccgcgaggtgaccagcgtggccagagccagacgggtcttctcaccgccggaaagcacgtgagccggtttcatcgcgtcgtcaccggagaacaggaacgagccgagaatcgaacgggcctgcgtgttatcgagctcgggcgccacatgctgcaggttctccaacacggtggcgttcagatccaaggtgtcgtgctcctgcgcgaagtagccgatcttgcagccgtgaccgtattccacggaaccggtgtccggctcctcgatgtgggccagcaggcgcagcgtggtggtcttgccggcaccgttgtaaccgaggatcaccacacgcgagcccttgtcgatggccaggttcacgccggcgaacacgatgttggaaccgtaggccttggagatgtccttggccatgatcggcgtgcggccgcagggcgcgggctcggggaaacggatgtccgccaccttctcggccttctgcgcctcggaggtgttttccagcagcttttcggcgcggcgcatcatgttctgcgctgccacggccttggtggccttggcgtgcagtcggatgccttgcttcatgagacggtcggccttcttctcggccacttcgcgttcgcggcggcggcgctcctcgtccaccacgcgctggtgcaggtaggccttccagccgagcgaatacatgtcgatctggccgagctgcgcatccagatgccagaccttgttcaccacttcgtccagcagttcggtggagtgggagatgaccaggaagccaccctcgtacttcttcaagtagccgcgcagccattcgatggaatcggcatccaagtggttggtcggctcgtcgagaataagggtgtcggcgttggagaacaggatgcgcgccagctcgatgcggcggcgctggccaccggagagcgtgccgagctgctgctccatgacctcctgcggcaggccgagcgaggcggccatggaaatcgcctcggattgggccgcgtagccgccagccttgtcgaagtcctgcatggccttgtcgtaccgggtcatggccttgctcatcacgtccggatccgggtcggtcatatccttttcggccttgcggatgcggttgatgatggtggcgatgtcgcgcgcgctcatcatgcggtcgagagcggtctgcgtgggatcagaggcgtgcgtgtcttgcggcaggtagccgagcttgccggagacgcgcaccttgccggcggtgggcagcatgtcgccggtgatcacgcgggtcagcgttgtcttgccggcgccgttgcggcccaccagaccgatcttgtctcccttggccacatggaagttggtggggtgaagcagcgtgcgcgcgccgatctgaatttcaagtccctgcacctcaatagccatgaataacctacttgcctgttacgaatactgtctcttaccaaagtccgactgtccatcatagcgaacaccatgccgaccgggctcagccgacgctcatgcgtccatacgcttatacgcccgtagactcatgtaataacctgcaatgtgcgcgataagacagttgaatcgtgatttccgtcgtacactatccatatccgggcacgcttgcggcgcaatgcgtgtgcagtataggaaggatttcccgcatggaaccaaattatctcgtgttattgggaatcgtgatcgtgattgtgggtttcgccctcaaacttgatgcgattctgatcattatcgtggcggctgtggtgactgcgctggtcggcggcattggcgtcgacggcttcctgaccacgttgggtacgtcgttcgtctcgaaccgcagcatggcggttttcatcatcgtgttgctggtcaccggcacattggagcgcaacggtctgaaaaccgcagccgcgcagctgatcggcaaggtgaagaatgcgacgcccggtatggtgatcgccctgtatggtgtgatgcgtctcgtgttcgccgcgttcaacgtgagttttggtggcgtggccgggttcgtgcgtccggtcatcatgccgatggcggtgggtgcgattgaagcgtccggtcacgagccgaacgacgagtatgtggaagagctcaagggcatggcttccggtatggagaacgtcgcatggttctttggccaggtgctgttcgtaggtacggccggtgcgctgctcgtgcagtccacgttgaagccgctgggttatgacgtcgaactgttgcgcatggccattatcgagatcccggtcgcggtgattgccgtggcggtcaccgccgtctattacatcatcaaggacacacgactgcgtaagaagtactacggtgccgaagccgccgctcaggccgctaccgctaccaccaccggcaaggaggcctgatatgtcgttcttcatggaccccagcgtgaccgttggcaccaagatcctcgagctcttctatattttcatgggtttcatgtccgtgtatgcgggcgtacgcaacctactcgataaaaccaacaaggcccgctacggcactttcgtgttctggacggcgctcggtatcgtcatcgcgttcggccgttggattccggccattgcggacggtgtgctcattatcatcatggtcattcccgccatcttccgccaagtgcgtaagggctcggcatccgattcgagcgctcccagcaccgccgaagtggccgcgaacttccagcgcatcggcatgcgcatctttattcccgccctgtgtctgggcgtgttcgccattatcggcgccctgattcccagcgtcagcgccctgaccggctgctgcatcggtgtgatgattgccgccgtgattctgttcgcgttctcgcatgacaacaagccggtcgtattcctcaacgattcggaacgcctgttgtctgccatgggtgcgctctgcatgctgccgatgctgctggccagtctcggcgcgattttcacagccgcaggtgtcggcgacgtgatcgccacgctggtcggcggcattattccgaagggcaacgtcacgctgggcatcatcgtattcagtgcgggcatgatgctgttcacgatgatcatgggcaatgccttcgccgcgattaccgtaatgaccgtgggcattggcgcgccattcgtgctcgcctacggtgcggacccgacggtgattggcattctggcgctgacctgtggctactgcggcacgctgtgcacgccgatggccgccaacttcaacatcgtgcccgtcgcgatgctcgatatgaaggaccgcatgggcgtgattaagaagcaggtgctgcccgcattggtgatgattgtggtgcagatcgtctatatgctgatcgcgcaataacctcgttgtccaaataccacaacaatccgtgaaataaggagctaatgatgagcaagattctggtgaccggattcgatccgttcggcggcgagccggttaaccccgcattcgaggcagtcaagctgttgccggatgaaatcgccggtgcgacagtggtgaaactggagattccgacggtgttcacgcgcagtgcgaccgtggttgaggaagccatggtgcgcgagcagcctgactatgtgctgtgcattggtcaggctggtggccgttcggctctgaccgtggagaaagtggccattaatttggccgaggcgcgtattcccgataatgatggcgagcagccgttcgatacgccgttgcgtgaggacggcgacaccgcgtatttcgccacgttgccggtcaaggccatggtcaggaacatcaatgaccacgggattcccgcattcatgtcgtatacggcaggcacgtatgtgtgcaacagcatcatgtataacgtgttgtatctgattgaccgcaaattccccggcgtcaagggcggcttcattcatgtgccgtatgcgaccgcgcagggcgtgggcaagccgaacggcacgccgaccatggaaatcgcgaccatggcgcgtggcatcgaagccgccatcgaggccgctgtgagcaccggaaccgacgccaccgacatcatgggcgaaacccactgatacgcatattgttatgcccctgctgacagcagttgtcagcaggggcatcgctatgcgttgaacgttacagttcgcgcagctgggcggcgatctggatggattcgacgctggcctcggccttgttgcgcgtctcctgccattcggtagcgggcacggagtcgagcacaatgccggcaccggcctgcacgctcgcctcatggtcgcgcaggaacgcggtgcggatggcgatggccatgtccatgttgccagagagatcgaagtagccgacggtgccgccgtagatgccgcggtcggccggttccaactcgtcgatgatttcgactgcgcgcggctttggcgcgccggaaagcgtgccggccgggaacgcggacttgaacacatcgaatgcggtcagcgaggggtcgaccttgccggtgaccgtcgagcagatgtgcatgatgtggctgaaacgcttgatgtccatgagctgcacgacttccacggactgcggcacgcacaccttgctcaggtcgttgcgggacaggtcgacgagcatgatgtgctcgctgcgttccttcggatcggcaagcaattccttggcgaatttttcgtcttcctcaggggtggcgccgcgagggcgggatccggcaatcgggaaggtcatcgcgtggccgttgtccaccttgatgagggtttccgggctggagccgatcacgttgaagtcgcggccccgagcatcggtcaacgccatgaaatacatgtacgggctcgggttcagcgtgcgcaacacacggtacacgtcgaacgggtcggcaggcgaatcgatgtcgagacgctgggagatgaccacctggaacacgtcgccgtcgacgatgtgctgcttggcgcgttcgacggcctgctcgtagtggcttttctcggtgcggaagcgcagctcaggctgggcgaccgtttcgtccaagatgttgacgcgggactcgcccggagccggggtggcggcatcgtgctgcatctggtcgagtcgagcgacggcctcgttgtaggcgacgtcggcgcgggtggatttatcatccacgttcaccgcgttggcgatgagccacaccgaaccggatacgtggtcgaccacggcgatatcggtggccagggcgagcacggtctcaggctggccggtctcgtccggagcttcggcgcgcagggtcggttcccagtggcggatggcatcccagccgaccgtgccgaccagaccgctggtcaggttcggcaggccttccacatgcggggccttcagagtcttcaacgtggcgtgagcgacttcgaccacgtcaccggtgactggcacaccaaccgggaccttgcccagccagtcggcctgaccgttgttggagcgcagctgggccatcgagttgacgccgatgaagctgtaacggctccacgtgccgccgtattccgccgattcgaggatgaaggtgccggatcggccgccggcgagacgctcgtagaagccgaccggggtgagcgagtcggcgagcagacggcgcacgatcggaatcacacggtagccggcgtcggccagttcgcggaactggccgcgactgggccaggtggcgccccacttcaggtgtttgacgctgcattcgctcatattcgctcctttacttacaactcgatgtcttgtttcgtagtacgcggtcgttcggcttcccccagtcagggaagcccgttctactgctcggccgggcggtggccttcgaccacggacagggggccgccttcgaggaagcagctgcgcttgccggtgtggcaggcggcaccgacttggtctacttcgacgagcagtgcgtctccgtcgcaatccagggacacgcccttgacgtattgcacatggccggaggtatcacccttgcgccagtattcctgacgggaccgggaccagaaggtcacgcggccggtggtcagcgtgcggcgtaatgcctcgtcgttcatgtagccgaccatcagcacctcgtgtgtgtcgtactgctggatgacggcagcgaccaggcccttggcgtcacgcttcaggcgtgcggcaatacggggatcgagttcagtggaattgtcgtatgtagtgtctgtcatacctatcttccttatgtggaccaccctcagtcagcttcgctgacagctcccggattatgtgcgacatgtgcatagcgcactgctacgaacaatccactggattgttcgtccagcgggagcaaggtgtattcgtttagcgaacggtgtagccgtgcttcttgagttccgccttgacatcggcgatggtcaggatgccgtaatggaatacggatgcggccagcaccgcgtcggcacctgcttcgatggcgggcgggaagtcctcgaccttgccggcaccgccggaggcgatgatcggaatcttgacttccttgcgcacggcgcgaatcatctcgagatcaaagccttccttggtaccgtcggcgtccatcgagttaagcagaatctcgccggcgccaagctgctcggcgcgcttgacccaccagatggcatcaatgccggtggatttgcggccgcccatcgtggtgacctcgaagccggattgcgtgtgttgctcgcccttttcgcggcgggcgtccacggagagcaccagcacctggttgccgaaacggtcggccacgcggctgataagcgacgggtcattgatggccgccgtgttgacaccgaccttgtctgcaccgcagcgcagcagcgagtcgacgtcctcgggcgtgcgtacgccgccgcccacggtcatcggaatgaacacctgttcggcggtgcgggagaccacgtcaatcatcgtgttgcggtgggagctggatgcggtcacatccaggaaggtgatctcgtcggcgccctgacgatagtattcggccgccagctccaccgggtcgcccgcatccttgaggttttcgaaatgcacacccttcaccacgcgaccggcgtcaacgtccaggcacgggatgactcgtaccgccaacgacatgcttcactcccctgttcggctttgcattacagtccttcagactacctaccgcccgttacatgcgccgcacccgtttctggaatatgagaatccgagctgacgcgcccgctgcgcgatctcaaggccgccggtgccaaggtgacgcttgccgccactaccttggacccgtgtgagacggtgcagcacgaccgctacgaaggcgagacgctgacgccggatgcgctgctgagcgacgtgcagaccgctgattatgacctactggtggtgcccggtggtacctgcaatgtggatcgtatccgcgtcaatgaggatgcgatcgcgctggcgcaggagttcgcgcacgaaggcaagccgatcgccgcgatctgtcatggcgcgtggctgctggtcaacgcgggtctggtggctggcaagaccgccgcgccctgccgttatatcgccgccgatatcgagaacgcgggcggccattacgtcgacgagcagctgcacgtggacgacgccaacggcttcaagctcatcacgtcccgcaagcccgctgatttggactacttcgtggacgcaatcaaggatgcgctgaagtaactaccgctccttagcggccaactgcccgcaggcaccgtcaatgtcctggccgcgggtgtcacgcagtgtggcggtgatgcccgcgcggtgcaggatctccaggaaccgctgttcgtctcccggcttggaggcggtccacttcgagccctcgatggggttgagcggaatcgggttgacgtgggcccagttgtcgccgtaatggttaagcctcttggccagcaactgcgcatgctcggcctggtcgttgatgccgcgcatcagcgcgtattcgatactgacgcggcgcttggaggccagccaataatcgtgcgcggcatccaacacctgcgtggtgttgaaacgcttgttcatcggcaccagctcgtcacgcagttcgtcgctgggggcatgcagggaaacggccagacgcacgggaatgccttcggcagtgagcttcttgatgccgggcaccacgcccaccgtggatacggtgatgttgcgcgcggaaatgccgaagccttcgggaggcatggcggaaatctgtcgtacggcggacagcacggagttgtagttgcccatcggctcgcccatgcccatgaacacgatgttgctcaggcggccctctcccccggccacttcgccgtcacgcatcattttggcggccacacgcacctgttcgattatttcaccggtggacatgttacgggtcaggccaagcttgccggtggcgcagaacgggcagcccatgccgcagccgacctgcgaggaaatgcacagcgtggtgcgggtcgggtatcgcataagcaccgattcgatgagggagccgtcgaacagcttccacaaggtcttgatggtggtgccttcgtccgccacttggcgggtcacctcggtgatgagctgcgggaagaacgcggcggcggcctcgctgcgcttggctgccggaaaatcagtgaattcggcggcattcacatcgaaatggccaaagtaatggttggcgagctgcttgactcggaacttcggcaatccgagttcggccgctttctcgatgcgctgctcgggcgtcatatccacaaagtgcagcggcggcttgccacggcgggcatggtccttggatagcacgtcacggaaggcacctgatgtgccgccgggagtaatgccggtttccggagtgtcaggatgctgtgtggtcatgatgggttcgcttcgctctcaatatcagaaaatagtcaaacatgcaatagaaatatcagaatccaccatacggcgtgccgcatacgaatcagatggcccatgtcttagcccatggcgaacgcatattgaacgatgattcccccatatatggcatgtggcaccgtgcgatatacacacgatgccacattgttcatgcacgaggcatgcgaatcacagtccggtgacccacagcaaggcgcaggtgaacggtgcactcatcaaaatggaatccacacgatccatcacaccgccgtgtcccttgagcaggtggcccatgtctttgatgccgatatcgcgcttgagcatggaagcacacaaatcaccgaacgtgcccacggcgccgatgagaatacccgccacgatcggcacccaccaacgagtggcccatttcgaggcatcatacgtgcacgcgaatacggcgaatgcgccagccatggcgaagagcatcgagccgataaggccctcaacggacttcttcggcgagatgcgcgggctgagcttgtgtttgccgagccaggcaccggcaaacaaaccacccgtatcggagagggcgggcaggaacaccagcatgatggcgtgtgcaatcggatgcccattgaaagtcagcgagatgatgatgcagctggccagcaacggaatgtacaacacggtaagcacggacacagccacatggctgagccgggaatgatgctgttccccgccctcatgattgaacgaggattcgaggcgcgcgctggcatccgtgttggacagtttgccggcaaccgccagagataggcggttgccgacgctgatttttgcgctggccgcgatggcgaccagaataatcgacacgatgatactcagcgacatcgtgatgagatggtacggggaataataggtggcgatgagggtgaaggacgcgcacagccacagcatgaacaccgggatgtgcaggcctacggtggcgaagtccaccctgagctcccacagcgccagaatcatgaacacgactaccagcagcacgaagaggtcgacgctgagcagcaggcacgcgacaataaggatgaccagtgccgcgcctgtggcgatggcctgcggcatgttgcggccggtcttcttgttgatccggtcgagcgtctcctcggcctcttcatggagttgttcgttgcgttccataattctccggacctggtctgaatcagacctccatgatctccttctgcttggtctccagcagagtatcgatctcgtcggtaacggacttggtgaccttgtcaagatccttcagcaggcgatcgccttcgtcctcacccatctcgccgtccttgacggccttgtcgatggtttccttggtcttacggcgaatgttgcgcacggcgaccttgccgtcctcggccttgcccttggcgagcttgacgtactccttacgacggtcctcggtgagttccggcatggtcaggcggatgacgttgccatcacggttcgggctgatgccgaggtcggagttgcgcagggccttttcgacggcaccggcctgggaagcgtcaaacggggtgacggacagggtgcgcggttcgggaacgccgatggaggcgacggccttaatcggggtgggggcaccatagtagtccacggtgatgccgttgagcagggccgggtttgcgcgaccggtgcggatgccggagaagttttccttggtgttttccacggtcctggccatctgttccttggcctggtcgataagagacatattcactccttgtgtgttggtgttcgtctgtgttgttcgtctatgaacgcttgattcgattgtaggcgtttgcggcttactcggccacgcgcgattcggcggtggagaccagcgtaccgatttcatcgccgacgagggcgcgggtcacgttgcccggctcttcgaggccgaagacgcggatgcgtttcttgttgtcgcgggccatggacagtgcggaggcgtccatgacggccagattgtccacgagagcgcgattgtagctcagggtttcaaaacgcttggcgttctcgtccctgcgcgggtcggcggtatagacgccgtcgacgccgttcttacccataagcacttcgtcgcaatggatttcgagagaacgctggatggaaaccgtgtcggtggagaagtacggcatgccggcaccggcgccgaaaatcaccacgcgacccttttcaaggtgacggatggccttgagcggaatatacggctcggcgacctgtcccatggtgatggcggtctgcacgcgggtggcctgaccctcctgctccaggaagtcctgcagggcgaggcagttcatcaccgtgccgagcatacccatgtagtcgccgcgggaacgatcgataccggcctgctgcagttcggcaccgcggaagaagttgccgccgccgaccacgatggccacctgcacaccctgttgtacggccggaacgatttcctcggcaatgcgacgaatcacatgggtatcgatgccgaccttgccaccaccgaatgcttcgccggacaacttgagcagaactctgcgcggcttgtcgctatcagtcatatcatgcctttctcaaaaccgaaagtgcgaaattatccgtagacaagcgtatcggtttacgacgacaccccctagcaacgacacccttggaatagcgaaacgccatccgattattgaataaccggatggcgtttcgttgaaattacgctaagcgcgtggagtaagccttaggctcactcctcttcgcccttgccgacctcgacacgagcgaatgcggtggcgttgccaccgacttccttgaacaggtcgccgacggtcttggacgggtccttgacgaacggctgctcgagcagcacgacttccttgaagaaagcgttgagacggccttcgacgatcttcggaacgatcttctccggcttgccctcggccagggacttctcggtggccacgcgacgctcggactcgaccacatcggccggaacgtcctcgcgggtcagccacttggcgcccatggcggagatctgcagagcagcttcgtgagccacggcggcgccggccttgtcggtggcgatcatggcgacgatgctcggcggcatctcggcggacttcttgtgagcgtagacttcgacgtgctcgccggagatcttggcgaactggccgaccttgacgtgctcaccgaacagggcggcggcctcctcgacagccagcttgacggtggtgtcgccagccttggcctcgagcagctcgtcagcggagttggcgtcggcgtccacggcgtagccgagaacttcctcggtgaactcgacgaacttcggggtcttggccacgaagtcggtctcggagttcagctcgacggcgtagccggtctcgccattggcggtctcgacgaccttggaggcgatggtgccttcctgagccttgcggccttcacgcttgccggctgcggcgatacccttggctcggatgatttccttggcgcgggcgacgtcgccttcggcttcggtcagagccttcttgacgtcgagcatgccggcgccggtgtcttcacgaacctgcttgatcagtgcggcggtaattgctgccattgattattctccttgagaaattttgcttacccatgaacgatgggaagcgcttattcaggcacttcccatcgtagagcatcactcggccttgggggcctcggcggtttcgccctcggcggcagccggagcggcggcttcagcggaagcctcggcaggagcctcgttggtcaggagttccttctcccaagcggccatcggctgctcggcggcttcgccctcggccttgttggcgccggagcgctccagcagaccttcggcgacggcgtcagccatcaggctggtcagcagttcgatgccgcggatggcgtcatcgttggccgggatcgggtactcaacggtgtccgggtcggcgttggtgtcgacgatggcgacaaccgggatacccagcttgtgagcttcctcaacagccagggcctccttggtgatgtcgacgacgaacatcgcggacggggtgcggttcatgttgcggataccgcccagctgcctgttgagcttgtccttctcgcgctcgagcaggaggagctccttcttggtcaggccggagccgtgcacgtcggtgaagtccatttcctcaagttccttgaggcggttgacgcgcttggagacggtctggaagttggtcagcatgccgccgagccagcgctcggagacgtagggcatgttcacgcgggtggcctggttggcaatagcttcctgagcctgcttcttggtgccgacgaagagcacggtgccgttgtgggccacggtggtcttgatgaagtcgtacgccttgtcgatcatggcgagcgacttgaacagggtgatgatgtggatgccgttgcgctgggtgaggatgaactgcttcatcttcgggttccaacgacgggtctggtggccgaaatgcaggcctgccttcagcatgtcgctcatagtgatctgagccatggtattgctacctctttctttgtcggttcttgcctggtcatgcgttcctgcgtgcagccaatgccttgcaggcatcagccgaccgacacaggtcgtcgcgagcatgacgcgaattggttgcgcaccggttgacaataattgggcggtttgaagcactcgcggcagcgcttctcaccaaattggcgcacaaatactaaaaataccatggggccacgtctttctgacgtggccccatggttgaatcgtcgttcgctgtttcgatcacttgcgatgggtgcgcatgtaacgcatcgcctcgcggcgttcttccttttccagacgatcaagatagacgtgaccgtccaaatgatcagtctcgtgctgcagcatgcggcccatgatgccatggccttccagcactaccggcttgccgtccagatcaatgccccgcacgcgagcataatcggcgcgacgagtcttgtaccacaatcctggaacggaaaggcagccttcatcgccatattgctctccgctggtctcctccaacaccgggttaagcacatagccgattttgccgtcgatattgtaggaaaacgcacgcagactcacaccgatttggttggcggacaacccggcgcgtcccgggtcatcaacggtatccaacaaatcctgcaccagatggcgcaccgcgggcgtgatctccttgatgggatcgcatggggtgcgcagcactggatcaggtacgactcgaatctcacggattgccaaaattaacgctcctcgttgttcgtggttgcggaaggctc

SEQ ID NO: 1514 - DNA, 6283 bp, Unknown
  R257_15m  MAG No. k141_49940
aaagaagtagtacaaacacgctcttgagttctcaaaccaccaccacaccagcaagacaggaaaccaaccagaagaaggaacccgccgcgctgagcggcaacaggtgaataacttacacgcaaccacgccacaacgcaaatcaaagcgcacaagaacccaaggaatcggcataacagcgcggttccttcggcgtgtcgcacagagcccaatttgctctgatagggctagcgtaacccctcgaatgtttccggaaaacatcgaatccattattcggctggcgtgtcgcacgagttttcggactgtcagctccatgttcatcgttcggcaaccacaccaccggcgcacaatcaatgcatggcaacaacgctccatcatcggatttcgttcatgaatcacgggtatacctgtagttatgaccaagaagattgctgtattaaccggggcgggcatttccacgtccgctggcatccctgatttccgcggtccagacggtgtgtggaccaagcatcctgaccaaatgagcgtttacgacatcgatctgtttctgcgtaacaaagaagaccgtgagtactcctggcgctggcagaaggaatcaccagtatggaacgcacagcccggcaccgcgcataaggcgctggtcaagctggaacaagccggcatgctgacgctgctggccacgcagaacttcgatgcgctgcatgagaaggccggcaacagcgacagcgtcatcgtgaacctgcacggcaccatcggcacctcgcattgcatgaagtgccatcaggaatatgccacggcggacatcatgacccgtttggatgaagaacccgatccacattgccatcgcaaactgaagtatcgcggcgatatgccatgcaatggcattatcaaaactgatgtggtgtatttcggtgaggcactgccggacggagcgatggagaagtcgtacagcttggccaccaaagccgacgaactatgggtaatcggatcgacccttgaggtgtacccggcagcgagcattgtgccggtggccgcgcaggcgggcgtgcccatcaccatcatgaatatgggtcacacgcaatatgaccatcttgcgagccgcttgattcatgaggatatcgccgtcgcgctgccgaagttggtggacgagacgattgcggagaacaagtagtcctcagcataacgaaagcgccggtgggtggttaagcaactgatgattgttggttaaccacccaccggcgctttcgcgccacctcccgctagcgggaggtattggagcacacttctgcgcggcctcccgccagcggtattggaatcagtagatgcgcttgggctggaatccagcttccctgagtgccacgaggatgcggtcgatgtgctcggggccgttggtctcgaccgtgacgccgagagacaccgcgttggtgtagtggccggatgccttgaactggtcgtggtcaagctgaatgacgttggcacgctgctcggcaagcagggtggccaccttgacgagctggcccggagtatccggcagctcgacctcgaagttcatgatgcgaccgcgggcgatcatacctttctgaatcaccgcgcccatggtcaccgtgtcgatgttgccgccggacatgatcggcaccaccacgtgcgggccggtggcggcggcgaacttgcgcgaacgcagattcagatgctccaacgcggccagcgagtcggcaccggccgcctcgaccaccagcttgtgcttctcgagcatgagcagaatcattgcgttgatgtcgcgctcggtgacggtgtccagatcatccaggaactcgttgatcagcgcaaacggcagatcgccgggatgcttgaccgcgacgccctcggcggaggtgaccacatggtcagccggagacacacgacccgcggccagcgagtccttccatgccggggagccctccggaatcgcaccgattacgcgcacttcaggcttgaacgtcttgatggcgagcgccacgccggcacccaagccaccaccaccgagcggcacgaccacgtcagtgacgttcggcacgtcttcgaggatctccagaccgatggtgccttggccgcagatgacttcgtaatcgtcgaacggcggcacgtaaatcatgccttccttgtcggcgagctcagcagcgtgggcggcggattcgtcgaacacatcgccgtacagcaccacatcggcgccgtaggccttggtggcatcgaccttcagcggcggggtgatctgcggcatgcagatggtggccttcgcaccacgctcacgggccgcataggccacgccctgggcatggttgcctgcggatgcggtgacgatgccacgggcgatctgctcttcggtgagcgatgcgatcttgttgtacgcgccgcgaatcttgaaggaaccggtgacctgcaggttttccggcttcaggagaatctcatgaccggtcatctcgctcaataccggcgaagggataatttccgtatgacgggcagtccctttgagtcgtccggcggccaacttcagttcggctgcatgatcacgctgcagcgccttcaaaacatccttttgttccatagcttttaattgtatggcgcggggacaccgaaaacagtggcttatctcgctaacgagtgctcatttacggtaattcccgttcgtaatcagctttcgaggggctgatttggcttcgcggggaggtctatctcctcttcgaggggctgcccgatcgtgcaatgcgtgagtatgacacatcatttgcagcggtattatgcggttttcggagcccggctattcaggcaccaaccccctgaaacggagatagacctccccgcgaagccaaatcagccccttgaaatggagataccgcctagcaacacttataggctgacgacgacgccctcccatggtgcaagctcacggccggcaagagcggccacagcgtgcgcggcgtcatacgtgctgatcaccacgttcgactcggcaaggccatcggccactgccaacagttcggcggattcgcgaggcaaatcaacggttcggccggacatgttgaccacgaccagcagcttctcatcgccgagggtgcgggtgaaggcgtagacatgcgcgtcatccgcatcgagcagatgccagtcgccggccgccacgacaggcatgtcgtggcgcagcgcgatgagctgcttgtagaaggcatacaccgaatccggatcgtcgaattcgccggccgcgttgatcgccgcatggttgggattgacggagatccatggctccttagcggcatccggcgcagtgaaaccggcatagacagagccgtcccattgcatcggggtacgcgaattatcacgaccgcgcgcggcgatacccgccaacatcgattcgggcgactgcactttggcttcctcaaccctttgacggtaagcgttcagggactcgaggtcacggtactggtctaggcgcgtgaagtgggcgtcggtcatgcctagctcttcgccctgatatatgtacggggtgccgcgatgcatgtgcagcatcaggccaagtgccttggccgaacgcacacgagattcctccgaggagtcatcaccccaacgagaaacgacgcgaggctggtcgtggttaccagtaaacaggcttgcccagcctgcattcttcacggccgcttgataaccggccataatgctcttgagcttcggcaggtcaagtggcagtggcttccatttgacgccttcgcagtcaaaatcaacgtgctcgaataggaagagcatgtccagctcgccgttggcggggtcggtgatgtattcgttgcgctgtgcggtaacgccgggagcctcgcccacggtgaggaagccctcacggccttcgaacacttcacggcgcatttcggccaggaattcgtcttggcgagggccgtccgcgcagaacggattcgggttggaatagccttcctcacccacgggcagatcgtccagctcggaaccgtactcgccgggcagcttgccagacaggtccgtgcgcttggaaatcagcgtaatcacatccatgcggaagccgtcaacgccgcggtcaagccaccagttcatcatgtcgtataccgcgcggcgcacagccggattttcccagttgaggtccggctgcttcttcgagaactgatgcaggtagtattcgccacgctcagggcaatactcccatgcagaaccgccaaagtaggagccccactggttgggctcggcaccgggctcgccggcagtggtgccgggacgggcgggacgccaccaataccagtcggcgtgctcatcatccttgtttttggacgcttcaaaccaggcgtgttcatcggaagtgtgattgacaacgagatccatcacgatcttgagcccgcgcttgtgggcctcggccagcagctcatccatgtcgtcgagtgtgccgaacagaggatcaatgtcctgatagtcggaaatatcgtagccattgtcgtcttgcggagacttgtataccggggatagccacagcacatccacgccgaggtcggccagatagtcgagccgtgacgtaatgcccttgagatcgccgaggccgtcgccgttggtgtcttggaaggaacgcgggtaaatctggtaaacgaccgcattggaccaccacggatttggggtggcaccgttggtgcggatggaatctggaattactgtgcgttgtgaagtggtcatcgttggctcctccattatttatggtctacattgcctgttgctcatagtctaaaaagcgctgaattacatttccattggggaactgcgttggtgtgccggaaacaaaaactgcaaagagccggaaggcactgctacggctcaattctcataagctgcacatgctatttagcaacatatgggccctttcgctgtttgtggtgggtgactgtgccgtggggtgatgttggtcgggtaggttggaggcatggatgcctctcacctgttcaccgccgcgcttcggctgcggtcgccttggagggtcgggtctgcggacttccgtgacgccgacggcgacgggcgggagccgcacatcacgatcggcttcgagcccggcagagggttcatgctcctgttcgaggcgtgggtgtggctatatcgcctgtgctcgtggatgatgcactcgaggctcgaacctatgaaggagctcgcccgcttgttccgccgccataatctacctgacctgcggcagctcacatattaacggttcttctgattgcgacgcgcaagagcaacttcgggcgcgcttggattgcctgcttgaacccactggtgcggggatagatgatttagttgacacgcctgcgggaatctggtggggatttcgctggcacaccggatttcaagcaaaccccgcctcgggaaccgctccggacttcggcgttggcccggttcgtatgtcaatcgattgccgtctgaaccgggacagaatccgctgtcccggttcgcgatttttgtccttttttacaaacagggacaagccaatctccgcagttcatatgctccgtaatacaaaatcggcggaatagagccgatcccggaatcaacatgttgtcccggttttcacataaaacgattgacattcataccgggacaatgaaaattgtcccggttcgtgaaaatcgcccgaaaccgcgaaccgggacagcggattctgtcccggttcgcgcgtcaaacggttgatatgtggaccgggacaagccagtggcacggcgacacagcagatgcgctcaattgcaccgtaagccgtacggtttcgtcactttttcattcgcacaacgagcaaagccacatgacctttgtgcgccaccgccacatcaaccgaccgtcgcctttattgtggcggtttccagtatggcaacaggacagaagagcctcctccggtgagagccggaggaggcttgggtggaagcggacctttacttcacagagtcctgcaattcaggactggcctacggccagacccaacatgacctcgcgagtacgcgacctatccggccgcccgggccgggaaacagcccacggggctgtttccttaatcggctcgtctcgctcgacgcggtgaagtaaagcagcgcctgcgctgttttacttgaccgctcccctcatcacaccaccgacgacccacttttgggcgaagatgtagacgatgaggatcggggccatggccatcaggtagctggagaaggccatcgggtagttggtggcgaactgcgagctgaagacgtactgggcgagcgggatggtctggttcgactgg

SEQ ID NO: 1515 - DNA, 12998 bp, Unknown
  R257_15m  MAG No. k141_50528
ggtcgtgagtccaattctcactcggggctctctggcggggtagctcagctggctagagcgtacgactcataatcgtaaggtcaagagttcgagcctcttcctcgctacaaatcgcgcccgctaaccggtgggcgcgcactatacctaagaacacagaggtgaatgacaatggctaagagcgccgacatccgtccgggcatcacgctggcctgcaccgagtgcaaggagcgtaactacattacgactaagaaccgtcgtaatacgcccgaccgtcttgagctcaagaagttctgcccgcgctgcggcaagcagaccgtgcaccgcgagactcgttgatcgcaagcatcacagctttacaaaacccggcccattcggccgggtttttgcgtattgactccagagccgagtggtagggtgcggaatcagtatccgcatcgcgtgagaaacggcagaaatcccgcgtctgaacgaacccctcgcgggcgttctgccgtttcagccgatgattgccccgatatcgcacctgcgccactaagataggaagtcatgacaagctttgcagacatcaccaccatgggcgtgggcggccccatcgcccatttcatcgagccgaccacgcgcgtggggctcatcgaagccgtggaggatgccgattccaaaggcctgtccttggtcgttatcggtggcggctccaacctgcttgtttccgataagccttttgacggcgtggtggttcgagacgcccgacgcctcatcactgtgccggacgaggctgcaccggtagagggcgaggatcgcaccgtgcatgtcaatgccgaggccggtgccaattgggatgatttcgtggccttcaccgtagagctcgggctcgagggcgtcgagggactgtccggcattcccggcacagtcggcgcttccgtggtgcagaacatcggtgcctacggacaggaagtcgccacttcggtcgaatcggtggaagtctgggatcgagacaccaaaacaacgcgcgacctcacacccgccgatcttcgattcggctatcgatactccgcactgaaggccagcatgtacgccggtcccggccagccggccgaccgattcttcccgacgccacgttacgtggtgctctccgtcacctttgccctgacccactcggccgaaggcacggtaggttacggacagcttgccaaagcgcttggcgtcgaagtgggcgaccgtatggccaccgccgacatccgcaaagccgtgctcgcagtacgtgccgccaagggcatgcttgaggatcccactcgctacgccttgcccgacatggccaccgccaagcgcggggccaatatcctgaccgatctggagcgtctggcctccctcaatgaggccgccggcattcccgttggcgatgacggcctgcctgctcccgactacaatcgccacagctgcggctcgttctttatgaatccgattctgaccgccggccaagcggcggccctgcccgaagatgcgccgaagttcgacgcgactctgcctgacggcactcccggcaccaagacgtccgccgcctggctcatcgaccatgccggctgccataagggatataaggtcgatgcgtacgcgccggccagtctatccacgcagcacacgctggccttgaccaatcgtgggggagcgagcgcggccgatatcgcagctttggcgcgtgcggttcagcaggcggtcaagagcgcgttcggagtggacttggtgcccgaaccggtctgcgtcggcgtgctgtaatcgcgctattgattgatggagttggatattaatcccatatattgcggactctaagtcttattaatagacaagacacgcgggctcttctatactcgattgtcggtattgtgcgcattcggtgcgcaaacaacagagaaaaagaagagcactatgcaactgttccgtacgaaatccgtcgaacagaccattgccgaaacgggtgaagagggccgcaagctcaagcgcaacctgacttggtgggatctgtcaatcatgggcgtggccgtagccgtgggcgccggcatcttctcggtgggcgcgcaggccgccgccttccacgccggcccggccgtgatcatcagcttcctgatcgccggcatcgtgtgcggcgcagccgtgatgtgctacgccgaattcgcttcgatgattccggtggccggctccgcctacaccttcacctacaccacggtcggcgagatcatggcctggatcatcggctgggatctgattctggaaatgctgatggccggctccgtgatttccaaatattggggcgtatacctcaacgatttcatgcgcctgatgggctggaacgccaacaccaacctggcgttcggctccttccatatcgatatcgccccgatcatcatcgtggcgttctttaccacgctgctcgtattcggcaccaagatcggcgcccgcgtggacggtgctatgaccgtgctcaagatcgccatcgtgttctttgtggtgatcgtcggcttcttctacgtcaaggcctccaacttcaccccgttcattccgccgagccagccggcctccaccgtggaaggttcctccgccgtcaccggcgtgatgacccagccgctgtggcagttcgccaccggcatgaccccatccgtgtacggcgttcccggcatcctttcgggcgcggcgctcgtgttcttcgcgttcatcggcttcgacgtggtggccaccgcctccgaggagaccaagaacccgcacaagaacgtgccgctcggcatcggcgtgggcatgctgctcatcatcgtcatgtacatgctcgtggccgtggtgaccaccggcatggtctcctatgccgatctcgccaagcaagacagcccctcgctggccaccgccttcgaactggtgggtgccgactgggccgccaagatcatcagcttcggcatcgtgctgggcctggccaccgtggtcatggtgctgttgctcggcctgactcgtatcgtcttcgccatgagccgcgatggtctgctgccgcgcggcctgtccaagaccggcaagcatggcaccccggccgctctgcagatcgtcgtcggcgcggtggtggcgctcgtggccgccttcttcgacatcggcgtgctctccgacatggtcaacatcggcaccctgtccgccttcacgctggtggccatctccatcccgattatgcgcaagaagcgccccgacctgccgcgcgccttcaagatgcccggcgacccgtggattccgatcctcatcgccgtggccaacttctggttgatgctcaacctgtccgtgctcacctggattcgtttcgtggtgtggctcgtggtcggcgtcgccatctacttcggctacggctactggcatgcgcgcctcggcaagggcgacctgaccgaaacgctgtccgccgaaaccgataaggccgttaacggctgagagcgaggagcgtcccaacgggcgcgtacccttgtatcagtatctgttaaggaggattccatgccatatgtgatcgctcagccttgcgtggatgtcaaggacaaggcttgcgtggacgagtgccccgtcgactgcatttacgagggttcccgctcgctgtacatcaaccccaacgagtgcgtcgattgcggtgcatgcgaaccggtgtgccccaccgaggccatcttctatgaggatgatctgccggacgagtgggcttggtacaaggatgccgctgtcaacttcttcgctgaagtcggcgatttgggcggcgcttccgccaatggcccaatcggcaaagacccggaacaggtcgccgcgctgccgccgcagaaccagtaagctgatttgcggataagcgctgcacacagcgcatagttcggattgaaccctcggtctatcacggccgagggttcgtcgtatcttaggaacataccgtccaagaaaggggttctcatgggcttccacgcatattcgtcgccatacgactggtctcgtatcgccggcttcaaagccaccgccaaaaccgtgccgggtggcatgatcgacctgtccgtaggctcgcccgtggacccggtgccgagcagtgtccagcaggcgctggttgccggcgcagacgcccccaacgcccatggatacccggtcaccgccggcagcgccgaccttaaggccgctatcgatacatggttccgcgaactgcgcggtgtggatctgaagtccatcaacgctgccgccgtacccaccgtgggttccaaggaggccgtggcgctgatggccagcctgctgcaccttggcgaaggcgatgtggtcgtccaaccggctgtctcctacccgacttacgaaatcggtacccaacttgccggcgccaccgtggtcaaagtcgatgatgtgaccgacgtcgattcctgggtgaatattccgaacgtcaaggccatctggatcaactcgccgtgtaatccctccggcgaggtcatctccgctgactggctgaccgacatcgtggctgctgcccgtcgcatcggtgccgtggtgctctccgacgaatgctatgcgttgatggactggcgttcggtgcgccgcaatacagccgcgtcctctgcgcctgccgcgtctgcatctgctgcgtctgtgcctgccgcaccggtggccgaatccaacgagcccgcctccgataccgcattcagtctctccgccacgccatgtgccctgaattcacatgtgtgtgaaggttcggcagctggcatcctggtgctctactcgctgtccaagcagtccaacatggccggctaccgtacggctctgattgccggcgattaccggctggtcaaggaaatggccgaataccgcaagcagatcggccagattatccccggcccggtgcaggccgccatggccgcaggcctgaaggacacagccgctgtgcacgagcaatgggggcgttaccgtcgccgcctatccgcgctggttgacgcactgaaggcatatggttattcggcacaaatgccctccggcgcgctgtacgtatgggtcaaggccaagtccggcgactgctgggccgatatggccgagctcgccaaaatcggcatcatccccagccccggcgaattctacggcgctcccgcctacctgcgtttctccgccaccgccaccgacgaggccatccgttccgcctgcgaacgtctgcaatcggcccgcgcctgacgacaccgactaccgccggggcgccgccgtggtattgcggatggccaggaacgtgcgcgcggtctcgaacggctcgcccaggtcaatgccgaacgtcgcggaatcaatcagcgacagcgccttttccgctgccttgcgccccagggcctgcggatcctgatgaatggtggtcagcccgaactcggccgcatagtcgctgtcgtcgaatccgatcagggacatgtcgttcggcacgccgatcccggctttgggcagcttgtacagcaggggcagcgccgtcccgtcgctcaggcagcatagggccgtgggcggctggtccatgacggtgatgcgcgcgatcgcctcgtccacggtgaagtcgttgcggggcagggctatggtcaactgttcgatatcctcatacgccgcacaggccgattcgaatctctgcaggcgcgagtccgcactgtattccatcggcgcctccgagacgtcggtgcagatgtaggcgatacgccggtgccccagggcatgcaggtgattgatggccatgcgcatgctcttggcgttgtctatggacacggtggcgttgaacccctcgttgtgcggcacgttgacgccgatcagcggcacgcccatgccctgcaggttggagatctcctccatggttacgttgaacgaggccacgatcaccgcgtcgacattgcggcgcaggggcagctcgtcgaagaacgacatgcgctgttcggtgtccgcaatgccgtagagggacacgtcgtagccatgggtctgcagcacctcggtcagccccttgtacagattggagtcgaaccaggtggcgatcgcctcgctggtgagcatagcgatacggaacgtgtgtttcgatttcagcgcggtggcggaccgggagatggcgaagtcgagttcgttggccgcttcgatcactttcttgcgcgtggcctcggtgacgatatccggtttggcgaatgttcgtgacaccgtggccacggacaccccggccctgacggctacgtcgtagatcgtggaatgtatcacgcgcgaaccttcctcatgggtgctcgataatggccacaatcataccatgacggaatgtaaccgtttacagaaatcctgtaattatgccgtttgatatcaataaatatgggtgttaacgtatacatcacgacagtcgcggagtagcgaagtcgtgaagtgtaaatgaaaggagaagcagcagatgaagtccgcatcgtcttggaccgagcgctggtcgtcctccgggcatgatcgacgcccgaaccgtatggcggcaaagacccgcagcatatcccgcgccatcgccgccgtctgtgccggcgccgcatgcgtggccgcactcgccggttgtggcacatccaccgccggaaacgtcactctcgaattcttccagtacaaggtagaggcagtcagccagttcaagaagctggtcaagggattcgaggcggaacaccccaacatcaccatcgacatcatcaacaccgccgatgccgccaccgatctgcgcacgcgcttcgtcaagaacaaggtgccggatgtcctcaccgtggacggcggccgttacttcggcgaattcgccgcctcgggaatcttccaggacttcaccgacgacgagatcctcgacaacatcaacccgcagatggtcaagctgctcaaggatctggccaaactgtacgacaccagcgccgaccgcgcgtacggcatcccgttcgccggcaacgccaacggctacgtcgtcaacgtggacctgtggcgtcaggctgggctggacccggacaacctgcccgaaacttggtccgagttcatcgccgcgatgaagcagatccagcaggccggcatcacgccgatcgaaggcagcctcgccgaaccgtggaccactcaggcgccgttcgcctccctggccggcacacttgtgccgatcagcgaatactcgaagctcagcggcggcaccgccacattcgccgacctgtggggtcccgtggcggaaaaggaagtcgagttctaccagtacacgcaggacaatccgggcgttacttaccagcaggccacccaggacttcgccaacggcaaggcggccatcttgcccctgggcacctacgtcgtgccgcaggtgcgcatggtcaacccggacatcaacgtgaagttcgcccagctgcccgccaccgacgatccggacgagcaggtgctcaccgccggcgacgacaccgtgctcaccatttcggccaccaccaagcatcccaaggaatcgcgcatgttcgtggaattcttgatggacgaggaccggctcaaggaatacgccgaatcgcagttctgcttcaccccgttcaaggacacctacgccggcgacgaggctctgcagaacatcctccacttctacaaggagggacgcatcgctgatttcgccgaccactacatcccctcgtccatgaccatggccggcagcctgcaaagcctgctgaccaccggcaacgttgaggcgttcaccaattcaatgcagacgcagtgggatcagatccaagccaggaccgtacagtaaggaggttcaccatgtccgccattgccgaaaaaccacgcaagaagcgtgtgtccgctttctcccatcgcaaggtcgatcccgcatactactggatgaccgttccggccatgatcctgttcatggtgttcctgtactggccgttcctgcgcggcgtgatgtactccttcaccaattccaagggctacggcaaatacaaatggatcggcctgaccaactacaaggccatgttccaggatgagcgcattgggcgcgcctacctgttcacgttcttcatcgccatcgtggtgacgattctggtgaacctgctgtccatgttcatcgccgtgctgctcaactccaagatcgcgttccgcaacgggttccgcgccatctacttcatcccctacaccctggccgtgcttgtggtcggctacgtgttcaagtacatcttcatgatgccgatccccgaactcggcaaggcgttgggcatagggtggctgtccgaatcgatgatcacctccgaatcgctggcatgggcgccgatcgtggtgctctccgtatggcagggcgtggcctacaccacactgatctacctcgccggcctgcagaccatcgacaccgacatctacgaggccgccgcccttgacggcgtcaacgcctggcagaagttctggcagatcaccttcccgctgatcggaccgttcttcaccatcaacctcgtcctgacgatgaagggcgccttaggcaccttcgaccaggtggtcgccctgaccggtggcggtccgaactccgctacggaaacggtcacctacctcatctaccagggcggcctgaccggtggcgaatacgcctaccagaccgccaatgcggtgatgttcttcatcgtcctcgcgatcatcgcgttcattcagctcaagttcttcggtagcaaggagaaggtgtgatcatgaccagcgctgttgctgcacaacccaagaaaaacaagttccgcaaggaccataagatcaactggtggctgaccgcggtggtcgcggtgctgagcctgaccattctggtgccgctctacttcaccatcgtcaccgcactgaaaaccccggccgaagccggcacgttcgccctgcccaccagctggcagtggggcaacttcgccgaggcctcgaacatggtgaactatccgcgcgcggccctgaactcggcgatcatcactgtgggcgccatcgtgctcaccctgctgaccaacacgttcgtggcctatgcggtggcccgtaacatggacaagcggttcttccgcttcctgtactacttcttcatcgcagccatgttcgtgccgttctccgtgatcatgctgccgctggccaagcagatgggcgggtggaacctcgacaacaagttcggcctgatcatcctgtatatgatcttcggcctgggcaccaacctgttcatcgccatcggcttcatccgttcgattccggtgtcgctggaagaggcggcccgcattgacggcgcgtccacctggcgcatcttctggaccatcatcttcccgctgatgggcccgatcaacgccaccatcgcgatcctgaccgcgctgtgggcgtggaacgacttcctcctgccgttgatcctgctgtccaattccgcggatcagacgatcccgctggcgcagttcgtgttcagctcgcagttcaccgccaactatccggtggcgtttgccagctacctgatggccatggccccgatcctcatcgtctacatcttcgcccagaagtgggtgatcagcggcgtgatgcgaggcgcgaacaagtaagccgtctcatcccgtcatcagtctgtggaatcctggagggttcttgccgccctccgggattcccgtcacattcgttagaaaggttgcaatcatgactactgcgcagcgtgtcgtgcttcccgattccgttcgaaccaatggcaccacgccgaatccgtggtggtcgaatgctgtggtctatcaggtctatccgcgttcgttccaggattcgaacggggacggtatcggcgatctgaagggtatcacctcgcgtttggattatctggccgatcttggcgtggacgtgctatggctgtcgccggtgtacaggtcgccgcaggacgacaatggctacgatatttccgactatcaggacattgaccccctgttcggcacgctcgaggatatggacgagctgctggccgaggcacacaaacgggggctcaagatcgtgatggatctggtggtcaaccatacttcggacgagcatgcgtggttcgaggcgtccaaagacaagtccgatcctcatgcggattggtactggtggcgtccggcccgcccgggaaccaccccgggtgagccgggggccgagccgaaccggtggggttcctatttcggcggttcggcgtgggagtattgcccggaacgcggcaagtactatctgcatcaggtctcgaagaagcagccggatttgaattgggagaatcctgcggtgcgtcgtgcggtgtacgacatgatgaactggtggctcgaccggggcgtggacggcttccgcatggacgtcatcaccctcatttccaagcgtatcgattcggccggccgtctgcccggcgaatacggttccgaacttgaggacctgcccgtgggggaggagggctactccaacccgaacccgttctgtgcggacggccctcgtcaggatgaattcctggccgaaatgcgtcgcgaggtgttcgccgggcgcgagggcttcctgaccgtgggcgaggcccccggcatcaccgcccagcgcaacgagcacatcaccaatcccgccaacggcgaactggacatgctcttcctgttcgaacacgtggacttcgactgcgaagacaacgtcaaatggaagccgctgccgctcgacctgccccagctcaagcgtattttcgccaagcagcagtcggccgtcaagaatgccggctgggcgagcctgttcaccggcaaccatgatcagccgcgcgtggtctcccgttggggagacgactccaccgagggcagccgcgtacgttccgccaaggcgttgggtctgatgctgcacatgcatcgcggcaccccctacgtctatcagggcgaggagctgggcatgaccgacgtccacttcacccggctggaccagtaccgcgatctggaatccctcaatgcctaccatcagcgggtcgaggaagccaaagtgcagtccgcggaatcgatgatggccggcatcgccgcccgcggccgtgacaacgcgcgtacgccaatgcagtgggatggttccgcctatgcggggttcaccgcgccggacgccgccgtggagccgtggatttcggtgaaccggaatcatacccagatcaatgcggcgggcgaattcgacgatccagactccgtgtacacgttctacaagcggctgatcgccattcgccacgagaatgcgttggtggccgccggcgactggcaactgatcgatgcggacgaccagtacgtctacgcattcactcgcacgctcggcggcgagaagctgctggtggcggtcaacctgtccggacgaacggtcgatctgccgcgcgacgccgccgaactggtgcagcacggggtgaccgaaccggatatcgtgatttccacctacgacgcctcgcacgccgtggtctccctcgccaaccgtgagcttggcccctgggagggcgcggccgtccgcgtgtgagctagcgtatgttgttccagacttttttcgtccttgtctggggaaacgtacgcttacttcagctcggtgtatgttgttccggactgttttcgttcttgtctgaggtgccgtacgtttgcttcgtctcggcgtacgttgttccagatgatggggaaattggtctggggaaacgtacgccaagaggctggtgcctgcttggtgcctgcccggtgtttgttaatgtccaacgtggaaagcccgcgcggctggcgggaagccacgccgcagggccgtcacgccccaaactgggcggccttgctgccaaatttgcggcgcacagcgtccagtgcggcctcggcatcatgcaaacgcgcctgtgaggtctggccgcgggcattgtcggcctcttcgagcatgtcatccagtgaaggctgcacggccgtagccgccgccttactgagcgaagacgtgctcatgccggccaagcgaatagttttgggcaggggagtggcagactccgccgaggccggtagccccagcatgactttcagctgccgcacgcattccgggtacagcacgccggccgtatcggtcggccgctccatcgtaaaagaccgggtctgatagctcaggtcggcgaaccgcaacttcaccgtcagcgtgcgcgccaccagccccttgcgccgcagcgtgctggctacttcgtcgcaggccgaacgcagtagcccacacaccacgcgcatatcgcgtgtatcctcggccagggtttcctcggacccaatggatttctcctcgcgcaccgtggtaatttcgcgggaatccaacccgtgcgaggccgcccataatccacgtgccgcagccggggagccagtggcacgagtcaatgcagcctcatccagctgagccaattcagccaccgaatgcacgccccaagcattaagccgcttctccaaagacggcccgatgcccggaatgccacgcaatggcatcatctgcacgaactcagccgagcaggccgccggaatcagcagcatgccgtccggcttggcattggtcgaggccattttggccaccagtttgttacaggcgatacccactgaacacgtcacgtggaagcgctcggccacctgagcgcgaatccacgcgccgatcgcgctcggccgcccccactccagcagtgcggcggacacatccatatagccctcgtccaccgaaacctgctcgaaccggtcggtgacggtcaaaaacacctcatgcatgattcggtgcgacatcatgcggtaatacgccatatccactggcagaaaaatgccgttcggacacaactgatgggcgcgcgcggccggcatcgccgaattgatgccgtatctccgggcttcgtagctcgcggcggacaccaccgcgcgcggcccggtgccgatgatcaccggcttgcctttgaacccggggttgcgcgccacctccaatgaggcatagaaggcatccatgtcgatatgcagcacggtgcatccggtctcgtcgtgaccccaatcgcgtttggcggcctcaagtctcggtgcggtgctcatgccaccattgtagga

SEQ ID NO: 1516 - DNA, 10384 bp, Unknown
  R257_15m  MAG No. k141_50628
ccaggcggcgtccgcgtccacgtagttgttgtagctcatcggcttgccgccgagctgctcggcgtgggcgaaaccggtctggttgagcgggtcaatgtagagggcggcctgctggtgggaggtctcaccgtagcgcagggtgtgcgcacgatcccaggtgcgggtgaactgggccgggaacttggcggaatcgacttcagtgccctgatcgtccttgtccacctcgacggcgtccagagaggccggcttgggccagtgcttggcggtccactcgttgatggtggcgtcataggcggcggtgtgcgcgaaggccttggctgcaagccacttgcgctcgtccagagagaagccggtgccatcggccacgcgggaggcgacccgtgcataatcggccgggtcggtgacgatggccacggtggcgtggttcttggccgcgccacgcaccatggaggggccgccgatgtcgatcttctcgatggtgtcggcctcgttggcgccggagcgaacggtgtcggcgaacgggtacaggttgacgaccaccagatcgaacggcttgatgccgaagccgtcaagctgcttggcatgttcggggttggtcatatcagccagaatgccggcgtgaatgtacggatgcagcgtcttgacgcggccgtcgaggcattcggggaatccggtgacatcggacacctcggttaccttgacgcccagctcggcgagcttcctggcggtcgaaccggtggaaacgacttcggtgccggccttcacgaacgcttccgcgagtacttcgatgccttccttatgaaagaccgagaccagtgcccgacggatcggtcggttcgtgtttgtcatcctgttcctccttggattcttgtggttgtgacgccagggaccgcgcctgacggacgatgacggtcttcggggtcgcggcggtggtgcgggaatcattgatcctcccaaccaaccagcctatcgaaaaaacgagcgctgtgccaatcagcgcgagcagccatgccgcggtaaatcccaatgcggtcgaatgaccgacgactctggtggaggccatgacgtcgacgccaatgtgagcgagacgatgatcgccaagcgatccattggacagagcgaacagcaatgtggatgccagtgagatcagcatcgcgctcaggcagaatgacccggcggagtagatcagcgaaaccagtactgggccgcgggtggacgcattccgtatattcaacggtctgcaggcgaatccttgcggcaggaatacagccagcaggcccacgagcgcagcgatggcgagaggcgcgttcaaggcaacggtacgccatagttcgctgctgaccggttcgggcagaataccgaataccggtattgcaggaagctctttggattggccgagccataacgtgaaactggccaaatcaccgatggcgaatccgccgccgaagagccaggaaacagcccagagcatgacgttgggtagccagatcagcatggcgacggtggtgagaattcgtgaaccggtttccatcccggacaattcgaacaacgatacgacagcggcatggttgcgtaccgaccatacgatgacggtaatcaatccaattgccaggtatatgcccagtatcgcgacggccaagacgacgccgattttcaggcagtggcgtatgtccgccggcacctgcttgcgagtccagtccctgaatgctcgcatcttggctgattccggtacggctgcgcataggaaaccgatcgagaatacgatggctgctttcagcaacaccagccactggtcatcgacaagacctaggtgtacggattgccggaatgcctcgttcaacccgagccaaacattcaatccggcaacatacgcatgcggcccgtatgctttgattcgcatggtgagtgcattgatcagccatatcagcagtatggtcaacatcaatggcgtgatggtgagggtgaacgaatcggttctagagcccgatccctcactcagaagcacaacggcctgtgtcagcgaggttgtgccgacggtgagattgtcgccgccctcttccatggagacaaccaataacatcagcgctgtatagcaacctaatgcaacggcatagatggccatggatgcgagggcgactatggctccccgcacccattggcgaatcacggctttcatcacgattggttggaaccgatcagtcgatgttggccttggcgagtatgtcgcgcatgatttcagcggcctggcccggggtcttgcccacggggatacccgccgcttcgagcgcgttcttcttgtcctgggcggtgcccttgcctccggagacgatggcgccggcgtggcccatctgcttgccttcgggggcggtgaaaccggcgatgtaggcgacaaccggcttggtcatgtgctccttggcccatgcggcggcgtcctgttcggcgaagccgccgatctcgccgatcatcatgacagccttggtgtcggggtcggcttcgaatgcctgcagggcttccagcagcgtcgtgccgacgatcggatcgccgccggcgccgagacatgcggtgaagccgatatcggacagttcgcccatgagctggtaggtgagggtgccggatttggagaccagtccgagcgggccgcggccgacgatgccgtcggggatgatgcccaagttgacgccagggttgccgagcgtgatgaaaccggggcagttcggtccgatgatgcgcacgcccttcttgagcgccagttcgacgaagtatgcggaatcggccaccggaatgccttcagtgatgaccacgatgagttcgatgccggcttcgacggcttcgaccacggcggacttggcgaacttcggcggcacgaacaccacgctggccttggctccggtggcttcacgtgcttcgccgcaggtggcgaacacggggatgtccacgtcggcaccgttcttggcaccggggaaggtgacggatgtgccggccttgcgcgggttcacgccgccgacgatattggtgccggccttgagcatgcgagccgtgtgggtcatgccctgatggccggtcatgccctggacgataacgggagcgccgtcttcgatgaacagcatcagcgaacctccttggactgggtcgcctcaccggcgagctgcgcggccttggctgccgcgccttccatggtttcggacacatggatattcggattgttggcggaagcgaggatatgcagaccctcggcggcggcgttgccatcgaaacgcacgacgatcggcttggaaccgccgagcttggcgaccgcttcgaggatgccgttggcgacttccacgcaggaggtgatgccgccatagacattgatgaacacggattcgacctgagggtcggacagtacgatctccaggctttcggccatgacggctgcggaggcgccgccgccgatgtccaggaagttggcgggcttgatgttggtgccctgttcctcgccagcgccggagacggcatccagggaactcatgacgagtcctgcgccgttgccgatcacaccgacctcgccgtgcaggtgcacgtagtgcaggccgtgttcgcgggcgcgctgttcgaaggggtcgggaacgatgagatccacgaaacgcgcccagccatcatggcggaaggaggcgttgtcatccaaggagatcttggcgtccaaggcgctcagctgcttggtggattcgtcatccgggtcgccgatcttggcgagcggattgatttccacgagcgtggcatcgttgtctttgaagcagcgccacatcttgagcagaatctgtgcggcctgatcgacgtccgcgtggtagaagccgatgctctgtgccatttcggtggcagcggccaggtcgaagtcgccgagcgcatcgatgtgcaggcgcttgacggcctccggatgttccttggcgatttcctcgacttcggtgccgccgttggcggtggccagcacgtcgaagtcgcgcgaggtgcggtccacggagatggacacgtaatattcgtgcaggatgttcttggcttcggccacaagcacgccggaaaccttgtgcccgtggatggtcatcggcaggatggactcggattcaagaatcgcctcgtcgcggttatgggcgatcttgacgccgccggcctgaccacgatgaccgatcttgacctgcgccttgattacgcagggatagccgattttgtccgccgcttcggcgacttcatgggagttctgggcaaagatggcgtccggggtgggaatgtcctgttcctcgagcaactgacgcgcctggtattcgtaaagatccatcgatccttccctgactatgtaattggtccggcatataactgtacacagtacatgccggaccttgaaaactaactgtacgttgggtgagacggaatctcaggccggcatcgcgatcagcgagctgctgggcttgccgccgagcttatccagaccgtcgagaccatcgagccgcatcacaaaactgaagcccaccacagtgccgcccgccttttcgataaggtcggcgccggctttggcggtgccgcctgtggcgatgagatcatcgacaatgagcactcgctcccccgcctgtacggcgtcggtttcgatttcgacgctggccgtgccgtattcgaggtcataggattcaccgatggtttcgggcggcaatttaccggccttgcgcacggcgatgaaacccttgcccagatgggcggccatggccgggccgaacaggaacccgcgcgattcgagaccggcaatggagtcgaattcgctcggggacaccggcagagccgtttcaagcgccttgagcagaatcttcaagcccttggggtcggcgagcactggcatgaaatcacggaagataatgccttccttgggaaaccccggtatggaacgcaccaaggacaccagatattcggcgtcctgttgccctaccttgctcaatgcgtcgatggtgatgtccgactgtgccatagtgctcgccccttttatgcctttgcgatgcgatactcggatggtgctaccgaatcgaacagcttacttcgtcttggtttcgttgtcgtcaccggtctcgtcagcggtgtcttcctcggacactacggacgcctcgatcggaacctgaccagcctcatcgttagccggagcctcggtgtcttcgtcgggcagcgggttgccgttctcgtcgacctcatcatcggacacataggccgggcgggtgtactcacgggcgatggcgttgaagccgaaacgcagcttggagccttcggagtcgatgacgatctcctcatactgctcgtcgacttcgacgaccttgccgatcacctggccgatggtgatgacctcggtgccgggctgcaggttgcgacggaagtcctgcttctcctgctgttgctgcttggccttcttggactgccaccacatcatgccgccgaacacgacgacgatcacgatgagcataatgtactgttgttccacgaaacaactccttcaaacgagcgacattgacgaaacgccgccaagtgtgcaaacaggagaaagtctagaagagcttgctgacatcatctttgggcgtaattcccaaatgctgccatgccttctcggtagccacgcggcctttgggcgtgcgaatcataaaaccttcgcgcacaagatacggctcgcacacggtttccacggtttccgattcctcgcccaccatggccgccagattgttcaggcccacgggtccaccgttgaagttgcgcacgatggcattgagcacggcgatgtccagccggtcgaggccttcggagtcgatctggtacagggccagcgcctccttgacgtcgtccggccgcaccacgatcaggtcgtggacgatggcccagtcgcgtacacggcgtagcaatcggttggcgatacgcggcgtgccgcgcgaacgcaacgcaagctcatgagcggaacccgcatcaaggtttacgcccagtacgttggccgaacgttcgatgagcttttccaactcctcatgcggatagaagtcgagatgtgcggtgaagccaaagcgtgcgcgcaacgggcttggcagcataccttcgcgcgtggtggcaccgatgacggtgaatcgcggcagggtcagcgggatggagcttgcgcccgggcctttgccgaccatcacatcgacgcggaagtcctccatcgcgatatacagcagctcttcggcggcgcgcggcagacgatggatctcgtcgatgaacagcacttcgccgacgtcgagggagctcagaatcgaagcaagatcaccggcatgttgaaccgcagggccggaagtcacgcgaatcggcacttcaagctcattggcaacgatcatggccaacgtggttttgcccaagccaggagggccggcaagcagaatatggtccggtggcacatcgcgtttgcgggccgcgtccaggaacagttgcagctgggccttgagccgtggctgtccgataaagccttcgagaacatgggggcgcagctcctcgtcgctgaccggctcgttgccgatcggctgggaggagaccatgcgcaacgactcttcgttggcaccggtgtttgaggtaccgtaatccgttgtctcgctcatcagcggcccctatccatcagcgccaaagccagacgtagcacacgcggcacatcgtcggtggcaagcggcgtgggaatatcgttttcggcgcaagcctcggcaacggcctgctgggcgtcctgctgacgccagccaagtgaaatcagtccttcgacaacctgttccgtaccggtatccaccggagacttggatattgccgcctgagcggaagcaccctcgatctgactcaaatcaatagagcccttaagctcgaggatgattttctgtgcgcccttcttgcccagccccggagccttggccagcgcggtggcgtcgttgtcggcgatggcgtgggccagctgactcggcgtcagtgtggagagtaacgattgggccactttaggtccaatgccggagaccttgatgagttgcagaaaggttttcttggcgtcccgatccaggaatccatgcagggtaatggcatcctgagagaggttcatataggtgaagacgcgggtgtcttgcccggcgtgcagacggctcaggtcggtggcggacatgcgcacttcgtagcccactcccccaacatcaatcaatgcggtatcggtttcgaccgattcaacccgcccggtcagcatgccgatcatacaggtactccttcagggctccaggattcaagactcgaacaactgttcgaaagtatactacatgcctcggtcgtggttgatgcggcggcgcgtggatttctgcgcggcctcagcccactggcgttgcgcggcggtcagatgttgttcgcgttcgccgccctgcaatgcgcctgccgggcgcagcgcatggcaaatggccaaagccaaggcatcggcggcatcggcgggagtcggcattttggtgaggttcaaaatacgtgtcaccatacgctccacctgaatcttctgcgcctgcccgttaccggtgatagccagcttggcttcggtaggcgtatgcaacgccacgggaatattgcgttgcgcggcggcgagcatggcgaggccggcggcctgtgcggtaccgagtacggtgttgcggttggattgtgcgaacactcgttcgatggatacggcatcgggtgcgaagcgatccattttctcggacaggccgttgtagatggccagtagacgcagatcctgggtgatatccggtgaggaccgcaccacgtccacgtgaataaacgaaagccggcggtgctcgccggcttcgatcacgccgaccccgcaacgtgtgagcccggggtcgacgccaaggataatcacgaggattactcctcgtcgagctgggccatcacctcgtcggaagcggtccagttggagtagatgttctgcacatcgtcgaggtcatcgaggttgtcgatgagcttggacaccttgcgggcatcgtcgaggctcaactcgacctcgttcttcggctgcatgacctggtcggcggaatcgtagtcgaagccggcgtcctgcagagccttgcgcacggtgaacaggtcggacggaccggtcacaacggtgaacacctcaccgtcatcggtaacgtcctcggcaccggcttcggcggcggtttcgaacagcttgtcgaagtccacgccctcggacggcaccacgatctggcccttgcgctcgaagttgaaggacacggagccggaggtggccagggagccgttgcccttggtcagggtggaacggacttcggcggccgcacggttgcggttgtcggtaaggcattcgatgatgaggccaacgccggcaggagcgtagccctcgtagacgatgtcttcgtagttggcggcgccgtcttcagcaccggcaccacgcttgacggcacgagcgatgttgtcggccggcatggaggccttcttggccttgtagatggcatcgtacagggacgggttgccgtccgggtcgccaccgccgaggcgggcggcgatttcgatgttcttgatgagcttggcgaagagcttgccgcgcttggcgtcgatggcggccttcttgtgcttggtggtcgcccacttggaatgacctgacataatgctcctagcaattattgaaacggatgatgtcaaacgaaacgattgtaggccgttaatcagacatacccgtgatgtttccgatgagtgtcttgttatgcgtaccgataagaccggtcacgcggggtgccgcacctgtgttaggcaagcggcagatgatactgcggagccagctgttcgaatgcctgggcataggcttctcgctggtcggacagcagaataggcatggtgcgtgtctgggcgacgatgggcatgaagttcgcgtcaccattccagcgaggcactacatgctgatggaggtgagcggcgactcctgcgcctgctacttcgccctgattaatgccgatattgtaaccgtgcggacgggagacggtttccatcaccttcatggcgagggtggtggccttctcgaattcgaacagttcggcatcgtcgagttcggtgatgaatccgacgtgacggtacgggcagatcatgagatgcccgacattgtatgggtagaggttcatgatggcgaacacgtgcgtgccacgccaggcgatgaggccgtcttcgtcggatttcttgggtccggcgcagaacgggcattccttcgtcttgggcttggttgggcgatcctcgctgttgcgcagcacataggtcatgcgctgcggagtccacagtcgttcgaccgtgtcctcctgaggcggaaagtccgccggattatcgacacgcacgtcagtcattttcgcaccctttcttggctcccctctctgaggggagctgtccgtgaaacggactgaggggagtgcgagccatgcaggactcccctcagtcgcctacggagccagctcccctcagagaggggagccagtaccattcacatcactcagccacagcggcgttgaagtcgtcggcggagttcacctggacgcgcttcttgatgacggtgaggatctgctcgcgggccttgtccaccggaacgccgttgagctggctgccgtcacggaagcggaagctgaccgcgttgttgttcatgtcttcctcaccgacgatgaggatgaacggcactttggacttggaggcgttgcgaatcttcttgccgaagcgatcgtcggagtagtcgatctcgcaacggaccatctcgtcctcaagggacttgacgaaaccggccagatgcggggcgaactcgtcggcaaccggcacgccgagcacctgcacgggggccagccacgccgggaaggcgcctgcgtagtgctcgagcagcacggcgaagaagcgttcgatggagccgaacagggcgcggtgaatcatcacctgacgctgtggggtaccgtcattcgcgatgtactcgagctggaaacgctcgggcaggttgaagtcgagctggatggtcgagacctgccaggtgcggccgatggcgtcgcgggcctgcacggagatcttcgggccgtagaaggcggcgccgcacggatcgtcgacgagctcgaggttggattccttggcgacctcggcgagcgtgttggtggcctcctcccagatctcgtcggagccgacgtacttgttcgggtccttggtggacagctcgaggtagaagtcggtcaggccaaagtccttgagcaggttcagcacgaaggtcagcaggctggtgagctcgtctttcatctgctcgcgggtgcagtagatgtgggagtcgtcctgggtgaggccgcgcacgcgggtcaggccgtggacctcgccggacttctcgtagcggtac

SEQ ID NO: 1517 - DNA, 21179 bp, Unknown
  R257_15m  MAG No. k141_50696
ggcaaccacgagatcatggtgcgcggcacgttcggcaacatccgcctgcgcaaccagctgctcgcctccgtgggcgaggaggtgacgtccggcggcttcacctacgacttcctcgccaagaagccgaccacgatcttcgaagcctcccgcgactacatcgacaacaaggtgccgctcgtggtgctcgccggcaaggaatacggcaccggctcctcgcgcgactgggccgccaagggcacggtgatgctcggcgtcaaggccgtgatcaccgaaagcttcgagcgcatccaccgctccaacctgatcggcatgggcgtgctgccgctgcagttcccggcaggcgaatcctatgagtccctgggcctcaacggcaccgagacctacgatatcgccggcgtcgagaagctcaacgagggcgtgacccccaagacggtccacgtcaccgccacccacgaggacggctccaagaccgagttcgacgcggtggtccgcatcgacacgcccggtgaggccgactactaccgtaacggcggcatcctccagtacgtgctgcgcaacctcatgaagtaaccaccttcttggctcccctctcttgaggggagctgtcagcgaagctgactgaggggagcaaggccggtatccgccaacggataccggccttttccacgcatgccaaaatgctatactgtatagcatcttcgaaatggaggttgccatgaccatggtccaaatgaacgttcgcattgatgcaaaactgaagaacgaggtcgaagaagtcctcaagggcaaaggcgtatcggtgagtgacgtaatccggtcgctgtggttatacatcgccgaccgcaaggaagtgccggcattggaaacgaccgccgaagagcaagcccgcgaggaggaaaagcaacgcaagctgaaactgattcgagaaggtgccggatacgtacacaaggaactggtcaaggccggactgatctcagaagacaccgacctcatggaaggccttacctacaagcagttccgcgacaaaatgtacgacgagcaacttgatgcgtattacaacatgaagagggccgattgatgaccgacgtttccatgcagcgtattttgcttgataccaacgtactgttggactatttgctccatcgtgatgatcacgccaagatggcggaagcggttatggaacttggcgcgaagaacaacgttacgttgttgtgcgcgtcattgtcgctgaaggatatcgcatacctatcatcatcggcgattcgtagcgaattcaaaccgaatgaatcggaagtggagaatttcactcgcggctttctgtcgtcacgggtgccatggcgttgtatcgagcaggtgaaggagatgtgtgacatcgtcgctgtcgatgagtcgacatgtgataaggctttttccctgcaaaaacggcatcgggattttgaagatgatctgatcatcgttgccgcgcaacaatccggtgccaactgtgtggtcacatcggatgccgaattaatcagtcattttcccgaatattgcaaaacaccggctgaaatcgtggcggcgctggaataaatgagcgtgtggctcccctcacggaggggagccaccaatgatgtgccggccaccgtagcctactgcgcctgtagacggaactgcttccagatgtcgctgagcttctgaccgttgcgcgtgcgcttccacacgtccagaccgccgccgcgacgtcctccggcggcggcacgggccgcggcggtcggagtcggatattcggagccgtcatccagacggagacgaccgttttcggtgaccgtggcgaaccagcgctcacccttgcgcggccgctcccacaccagacgctcgcccggcaccagcagaccagcgtcaatcacctgccggatcgtgacgcgccgcgaactatgagacggccgtggagaggtcttcgacaactcatcgacattctgcttggtcagatcacgggcgtccttgtcataccggatgccccagtattccacgatgagtcggaccgactcttcctgccgcgcctccagcagggcaggtgtgcagtcagcgaaatccttcaactgattggtcagcgggaaacgacgtgaatccgcgcgcaacagcatgcggtcgcgacgtgccggatattcactcaacctgtccaactgatcctcagggccctgcaccagcgccatattgccgagtcggtacatccagaaatcatgctgatcctgcggccagtccgcaaacgatttcgaccgttcgatatccaacggcataatcggcagcgcactgaaccggcgtggtcgatccaactgcatgccggccttctgctcgttggcgcgaatcagcagcagacggaccaaatcgccgtcaccctgcatctcgccatgcaaacggaccaatgcgccttcacggtcgccgtccgagacatgcaacccgttcacgcgctggaccaaatagcccttgtcaagatcacggatggcggcgttcgcataaccgcgccgctccaacgctccagtgcgattcagcgtgcggatgcccgtcacctgttccaatgcggtcagaatttccaacagccgacgctcgtcatgggcacccaacgattccagcgtggccgtggttctggcgatacgcgaggcacgaaccacaaacggcgacaaatcggcgtcgcccagcccgcgatacgaattgaccaacgcccacatggccacgggcttccactcgtggctgcggtaatcgtccaatccctcaagccggctacgcacctcggcgggcaatatggtgtcgctggggcgcgcgatgatccgccacgccatcgcatagggtgccagcacctggttgatgaacgtgggcaccgtgcctttgtcgatgtacggttgcagcacgtcggccaggaaatcctcgatgagcttgtcggtggccggcttgtgcgtgagcacgagatgcagataggcgaagaattcctcacagtcatgcggatcgtcgccaagcgggtcaatgatgtcatcccagcgggcggcgtacacgtcaagttcggcggtcgacaggctggccgtggcgcgcgccttgaacacgtcggacggggtgagcggcaggccgcgcatgttcatcacgtcgaagatgcgatgcgcgccgtcgagatcgtcggtggtcacgatgacgagcgtcacctcgttgaccagatactgcgcgaattgctggcgttcggatgccgaccaattggagatctcgtcgtacgtcttgcggatgttggcgacgatgttgcgttgcgcagcggtcgccagatcgtcgtcgttcatgtcgaacacggattcgaggttgtcctcctgcacgtgttcgcggaagaacgccgcgtcgcgctcgcgcaacgtgaggcgaggctcggtgacgatgccgcgcagcttgtcgccgggctccaccagcagcgcgtcgagttggcacatgaggtccgggtctcgctccagatcgcgcagcacggcgatgatgatcgacagggataccagccgctgctgcccgtcgatcacgtcataacggttatcgccctcgcgcaccagaatcagcgagccgaggaagtacggggtaccgggtgacttgcaggcgtcatccaagtcgcttaccagttgcaggatgttctcggccttccatatgtaggcccgctggaatgaggggattgtgaaccggaaatccggggtgaacactttcccgagtggtagttccttcgcgctgattgccatgtcaatcccttcgtcgccggcctctggacggtatgccgacgtgccgactgtgctcaagcctaccagtgttcgcccggcggcgggcgcatcacgccggctcgggcaccgacccctcgtacaagtagaacgaagacgggttttctcccggcccggatgcgggcagtgactgctcgcacacctgcgtcaggccgcgatgtacatagaatccgacatcgcacgtggtatccgtgaataggaagtactgacgtatgccggctgcgtggaatgcgctcatcatcgtctcgaacatgcgccggcccagaccgtgaccgcgcgccgccggatcaagtacgaacagcaccacttcagccgaatactcatggccaatgttcgccgcctgcttacgcagttgcctatcgacatgaagagtcccgagaatctcgctcgcagctgccatgccgtcgtgggcaaacgccagttgcaatagcttgcgcaacgaatgacgccggtgcatgttcagcgggctgcgatggtcgagctcgtcgatacgccccacaatcaatgcgacgggtttatcttccagctccgcgacaaaggccgtggtcacacgtgccagacagttctcccaatcggcctcggctgccagcaagccggtccgctcatcatattcggcgtaccaagtgcggcgcaccaggtcgatcagcgccggataatcgtctttacgtaacgttcgaataatcgcttcactcatgttctccattatgactgatatggctcgataacccgacgtgttacagtcgcgccggcaaatcggcccgctccaccagcctcgccatctgtacgcggcccatattgagcttgtccgccgcggaggagagatgcgccttggccgtacgctccgagataaacatacgggaggcgatttcggcgttgggctatgtgctgcaagacgattcgccgattacggtgtatgtcactgcgttcctatcaacggatcaagacaccaaggtgacgcatgccttcacgttgcagtgaatcgcgcggcggtccaagttgcggtcgaatgccaatcgaatctcaagtgcatgccacgcgcatggtggaaacgcccgttacgctttgcgatgagcagaacgagccgatcgatcctattcatggaatgttcagctttgttcctctaagattggtactggaacaaacgctaaaggagcgattatgacattcggtcagcagccccagaacaacgggcaatacaacccgcaatacaacacgcctgattacaacgccgcccaacagtctggatatggccagcaatacgcacagtccggttacggccagaactactatgcccagtcgcagggcgcccccacctaccagtacgcgccgcaggatgcggccggtgccggcgcgggtgccgccaccatcaacacgacgatgacctacaactatgaggaggcccgccgcgtctccgtagccaaggtgtacggcgagatgaccatcggcatcctcgtcaccgccgtggtcgccgtgctcggccagatcaccggagcctactacagcttcctcatggccaccggcatggtgggcctcatcggcctgtgcgtggtgcagattgccctggccgtggtgctcggcatgcgcgtcaccaagatgaagtcggccactgcgcgcgtcatgttctatgtgtacgccgcattgatgggcttcaccttgagctcgatcttcatggtctacgacctcggctcgatcggcgtggcgctcggtgtcaccgccgcgttcttcttcgcgctgaccatgttcggcatgactaccaagttcgacatgctcaaggccggcccgatcctgatgatcggcctgatcgtgctcatcatctcgcagatcgtgctcgccttcgtgcaggtcgacggcatgaccaagatcgtctgcgccatcggcctgatcctgttcgccggcatggccatctacgacgcgcagtccacgcgcgcgctgctgaccgaatacgaggcccagggcccggaaatggtcaagaagatctccatcctgtgtgccctgaacctgtacctcgacttcgtgaacatgttcctgtacatcctgcagctgctcggcaacagggactagcctcgccagccgattggtgggcggcatgtagcctgctcgtcaaacgtcacagcccgaccacattgtggccgggctttttcatgtctgtcacattcgcacgttaggctgtctccccgtgaaaagacaagaactcgtaggcatgctgagcctgttgttgaccgcgctgatctggggttttgcgttcgtggcgcaggtccagggcatggatttgatgtcgccgatgttcttcaacgccacgcgcttcacgctgggagcactgtctttggtgccgattctgctgtggcagcgtggccgggggagcgcggataagggcgatacagccggggtcgatgtcgttgggaccgaggcccccagggccgtctccacagatgccgcatcgaacggtgcatccgacgtcgttaccatcaccggtgccaagctgaatgcgaacaagcccgattcggccgtggcgcgattgctcgccaacccggtggtcatttccgtgatctgcggcatcgtgctgttcaccgccagcaccctgcagcagtatggcattctgtacggcaaatcggccggccgcgcgggattcctgaccgccatgtacattgtgatggtgccgttgctggcctgcgtgttcctgcgccggcgcatcggcatgctggtgttcgtggccgtggtgctgtccatcgccggcttctatctgctgtgcatcaccgatggtttcggttcgatcggcctggcggatatcctgctcgtgttcacggccgtgctgttcgccgtgcatattctggtgatcgatactttgggcggcaccgtggacgccatcaagctttcattcggccagttctgcaccaccgccgtgctgagctgggcgggttcgctgatcgaaggctcggtcgactgggccggcgctgctcattcctggattccgattctgtacgccggcatcggctcggtgggcatcgcgtacaccttgcaggtggtcggccagcaatgggtgccaccgacgcgagccagcctgctgatgagcctcgaatcgttcttctcggcggtaggcggtgcgttgcttctcggtgaagtgatgaccccgcgcggctacctcggctgcgccctcatcttcctcggcaccctgctggcccaagcgccggccaggctgccgaagtggctgcaacggtgaatgaatcggacgcaggccgattccatagcacctcagtccgtggtcttaggcgcttcacccacttgcggcgcgccgttgatgtcgcggtggatgttctgcatttgcacttcgatgttctgcagcgaacgggcgcagtcgagcagtgtctgtgaatgctcgctgagcttgttgtccggcaaatcggtcttgtagcgcagcgcatgctccagcgacgcccaataatccatggcgatggtacggaactgcacctccaccggcgtgtaatgcgcgcccgaggagagaaacacgggcaccgcgtagattacgtgcaatgaacgatacccgttctgtttcgggttcttgatgtaatccttgacgcgcagcacctgaatatcggactgcgacgacagatagttggacacggaatacacgtcgtcgcggtaattacagatcacgcggatgccggccacatcgaacagattgtccttaatcgaattgacactgattggcagattcttgcgctccagcttgccaatgatcgaactcaccgacttcagacggcgttccatatgatgtatcgggtcatggctgaaccgcacctggaactcgtcgtcgagaatctccagcttggtgctgatctcgtacatcgcgccttcatacacctgcatgaggtcaacgaatttaacgacctgttcgggagtgaaggtgcctcccggaagatccaacgctttgagacgggcttgcagatcggaggttttgagtcggctatgtcggtcaagtatcacgtccaccaatatactcggcggattccagacaatctggatgttcgcggggaatctttccaagaacccatatttaagatcgtgacaaccaatggcatacgtgaccggagcatgacgaaccccgccgatagaatcggtcgttatgaatgaagacatgatgaccgaggcggagcgtgcctcgattgcagccgatggaaccgatagcttgctgggggagcgcggcaagggcgtattccatatccacacgctcggctgccagatgaacgtgcacgattccgagcgcatcgccggcgtgctggaggccaatggctacgtccctgcaaccgaggaccagatcaatgacaatgacctcgatttgctggtgctcaatacctgtgcggtacgcgagaacgcagccgaacgcatgtatggcaccatcggccgattcaatcgcgtcaaactggttcggccgaacctgcagatcgccgttggcggctgcatggcccagcttgaccgcaagaagatcgcggatactgcgccatgggtttccgcggtgttcggtaccaagaacatcgaagatctgcccaagctattggatcagaatcgtgcgaccggcaaggcgcaggtccaggtcactgaacaattgcggcagttcccgagccagcttcccgccgcccgcgcctcccgcatcagctcgtgggtggcgatttccgtgggctgcaataacacctgcacgttctgtattgtgcccaccacgcgaggcaaggaaaaggaccgccgccccggtgacattcttgatgagatccgccaatgtgtggccgatggtgccaaggaggtcacgctcctcggccagaacgtgaactcgtttggttatggtattggcgatcgatacgctttcagcaagctgttgcgcgcctgcggaaccatcgacggtctcgaacgtgtgcgcttcacttcgccgcacccggccgccttcaccgatgatgtgattgcagccatggccgaaacgccgaatatcatgcatcaactgcacttcccgctgcagtccggttccgaccgcatcctgcgcgcgatgcgccgctcctacaggtccgccaagttcctcgatatcctcggtcgtatccgcgaggccatgcccgacgcccaaatttccaccgatatcatcgtcggattccccggcgaaaccgaggaggacttccagcagaccatggacgtggtgcgccaggcgcgcttctcctcggcgttcacgttcatctactcgccacgccccggcacgccggccgccgcaatggaacagattccgcgcgacgtggtgcaggaccggttcgaccgactggtggcgttgcaggagcagatcaccgaagagaacctcgccacattcgagggccgcgacgtcgaagtgatgatcaccggcaaactcggcaagaaggacaccgacacccaccgtgtcaccggccgcgagaaaaccggcgtgctggtgcacatcggcgtgcctgaaggcgaaccggtacctgaaatcggcgatttcgtcacggtcaccgtcacacacgccggccgccataatctgcttgccgaccccgatgtggccgctggacagacctattccgtgcgacactgagggggcgtatatgacgcaacgagtcgtctccatcgtcggtcccaccgcgtcaggcaagacggggttgggcatcgccatcgcccggcgtctggccgaagcgggggagcgggccgaaatcgtgaacgcggacgcctaccagatgtaccgtggcatggatatcggcaccgccaaacccaccgccgaagaacaggcggccgtgccgcatcatctcatcgacatcatcgaccccgaagacacgatgagcgtggcccgattccagcagcttgcgcgcgagaccatcgccgacctgcaatcacgtggcatccggccgattctcgtcggcggctccggcttgtacgccagagcggccatcgatgacatcacctttcccggcaccgatcccgacgtgcgcacacgtcttgaggaacgcgagaaaaccgagggtgccggtgctttgttcgacgagctgcgggccaaagaccccgaagccgccgcgcgcatggacccacgcaacccacgccgcaccatccgtgcgctggaagtcatcgagcttaccggcaaaccgtattcggccagcctgccgcgctaccggtacgtgattccgtccgtacagatcggactcgacctggaccgcccggatttggaccatcgcatcgacctgcgcaccaagcagatgtatgacgatggattcatcgaagaagtcgaacggctgcgcccgcatctgggtgccaccgccgtacgcgcgctcggctatcagcagatcatcgacctgctggacggtatctgggatgtgaacgacgccttcgcggacatcgcacagaaaaccaagcgactcgcccgcaaacagatgggatggttcggccgtgacccgcgcatccactggctgcaggccctgaacccgaaactggtcgacaacgcgatggccattatcgcgcacgccgacgccggcgactacgacccgatcgacgcccgagccgacgaatacacccagcatcatctgggcgatatcacggcgtaggaatcagccaaaggccggtgcaatcacccgcaatcagtgtgcaggcccctgattccagccggcgatcaagaacacgcgcgtcggattcgccgggcgtagtatcgcgtcgaacatcgtctccagtgcagacgtgtcgccccgatatgccgagtgcttggcggagcgatactcctcgcgcgtcactgagccccagtcgagatcccagccggcgtcatgcgccaagcgtgaaccgaatatacgcagcaccatcgcattgccgccacggaacggatgcagataaccgagctcatcataaatagaagcgaacgcgtgaacgaacacgtcgcgatccaacgcatgcaggttgcgcttgtccgccaactccatcgcgatgttgtgcgcgccggtctcaatgagcccagccgggaagaacgcctccggattcgcggcccgagcccggtcgttcgtcacctcgcgtgtggtgtttgaggtacgcaacttgcccgcatcctcgaacacgccttcgaacagccccttatgaatggcggtcaactcgtccaagtcgccagacggattccaccgacgttccgccaacaacacggtacgtgcgaacaccgcatccgcgcgatccgtggcatgatcatccagactgccggcagccagacgatcctttccggcagggtcggcggcggcgcgcagacgcatggcggtctgctcgtccgccacgtcgatgagatgggtcacgggctccaagccacgttcgtaggcaaccgcggcgcgcatcgttgcctcgcccggcgtcatcgcttccagtgcgcagttcttgagtgcaaatgcgactgcgctcgcacgctctgcgggtgtcatgcaacccatgataaggcatattcgcgctccagcggggaatcgactcggacgaacctcgacgaaccgcggcgaatcggctgtcgggattcgtcaatcgaccatatcgtcacggtgtcgtcaccaaccatgcacccccgtactagtagaatcagacccgatatggcacgaacagcatcctccaacagcaccaaaccccgtaaatccaaagacaacgggtctacccatgatggcgaaaccaaggtccagcccgagcttgacctcgaacctgagccgttgtggaagaagatcctgctcgcgattccgcgcgcgttcggctccggcgtacgcgccgtcaccggcgtcggcgaatacgacccagcctaccgtcgtgacggtttgtgcttcctgctgctcgtgctcgccgtactgttctgcgcgtccgaatggttccgtgtcagcggtccattcggccagctgcttcacgccatcgcggccggtgtgcttggtctgatgagcgtcgtgctgccggtgttgctcgccgccgtggccttccgactcatgcgcaattccggtaaagggtccaataacccgcgtgtggtcaccggttgggtgctgctcatgtggtcgatttgttcgatcatcgacgtggcgatcgccgccgaccacaccggattcgacatcacgattctgcaatccgccggcggcctgttcggcttcttcctcggctcaccgctcgcctggggcctttccaacgtgttcgccatcatcattttcgtggtcgtcggcctgttctccttgctgatgattaccggcacccacgtcaccgatttgccggaggatgcgcgcaaaatcgcagctaaaatccaacgcaaaccgtatgtgccgatgggccaggaggccgacggaagcgccagccagttccccaacgaggtccgtgtgggagataccacactcgcctttgccgacggtgttccctcgcatgacggcaacgacaacgatcaggccggcgatgcacggcccagcctgttcgcacgactgttcggccgcaaatccaagaccgaagacgacaaaacccttgacaagtatgctgccgacgatccgttcgaccgtgccgccagccagcatggtgccaccgccgaaaccccggtggtcgatccgatgaccggcgagattaccggtgcgcgaaccattgcatcgtcttcgtacgacggtcgtccgcacctatccagccctgcgcctgctgccgatgcggatgatggcgacgcttcccgaacccgcgtcatcaccagtggccagaccatcgccatgcccggtgggggagcggtagacgatccgtgggcacccagtgccgcccaggccggtactgtcgcgctcgcaggggcagccggggcgatgggagcggccggggccgccggtgccgcggccgcggcagccgcgaccggagcctacgcaggcgccgatgcggatggcagcggagtcggccagggcgtgcccaatacggacggacagccgaatgccgccgccggcaacggtacagacgacgacgccaataggccgtatcagttgcccgacctgaacctgctgaccaaaggtcagccccatgcgatgcgcaccccggccaacgatcgcgtgatccgggcactgacttccaccttcgaacagttcaacgtggacgccaaagtcgtcggcttcctgcgtggcccttcggtcacccaatatgaggtcgagcttggccccggcgtcaaggtggagaaagtcaccaacctgcagcgcaacatcgcctacgcggtggccagttcggatgtgcgcatcctttcaccgattcccggcaagtccgctatcggcatcgaaatcccgaacgaggatcgcgaaatcgtgcacttgggcgacgtattgcgctccgacaaggccgtgggcgacccgaacccgatgctctccggcatcggcaaggacgtcgaaggccacttcgtgaccgccgacctgaccaagatgccgcacctgctggtggcaggtgccaccggttccggtaagtcgagttttatcaactcgatgctcacttcgatcatcatgcgtgccacgcccgaacaggtgcgtctgatcatggtggatcccaagcgcgtggaactgtccgcctacgcaggcatcccgcacctgctgaccccgatcatcaccgatccgaagaaggccgcacaggccctcgaatgggtggtcaaggagatggatgcacgctactccgacctcgaattcttcggattccgccacgtcaaggacttcaacgaggccgtgcgcgccggcaaggtacatgcgcccgccggctcccagcgcaaggtggccccctatccgtacatcctcgtggtggtcgacgagatggccgaccttatgatggtggccaagaacgatgtggaaagctccatccagcgcatcacccagctggcacgagccgccggtgtgcatctggtgctcgccacccagcgtccgtccgtggacgtggtcaccggtctgatcaaggccaacattccatcccgactggcgttcgccacctcgtccgccaccgattcgcgagtcattctcgacacggtcggtgccgagaccctgattggtcagggcgatgcgctgttcctgccgatgggttccgccaagccgattcgtgtgcagggctcgtgggtgtccgaatccgagattcgcaaggccgtggagttcgtacgcacccagcgcaagccgaagtaccgcgaagacatcgaacagatggccaaggaagctgagaagaaagacagtatggagcctgacgaggagatcggcgacgacatggacgtgctgctgcaggccgccgaactcgtggtcactagccagttcggttccacctccatgctgcagcgcaagctcagggtcggcttcgccaaggccggccgactcatggacttgctcgaatcgcgcggcgtggtcgggccgtccgaaggctcgaaggcccgcgaggtgcttgttcagccgcaggacctgccgcaggtgctcgccttcatccgaggcgaaaccagctcgctcgaagccagcgccccgcaacaacccgaactcggcgaataattcacccatcgacctccctctgatgagggaggtgcccgaaggggcggagggagagaagcgcggacagcatcagcacgaaacctgattcccgaataatagcagtcaatatccagccaccactcactcaaggtaggagtatgggggtaacgtgaacactatggatgagaacacaatggacaagcagtcatcgcccaaatcatcgctgttcgacggatggaacgcgccgccgaacctggtcacctactcgcgcatcgtactcgtggtgattttcctgacgctcgacattctcgccggggcctggggtgagaacaacctgatcatgcgttgggtcgccgcggtactgttcatcatcgccgcgtccaccgataaaatcgacggttggatggcccgcaaatacaatcaggtcaccgaaatgggcaagctcatggatccgatcgcggacaagctgctcacttgcggcgcaatgattgtatgctccgcgttcggcgagctcggctggtgggtgaccatcctgttcctgattcgcgaaatcggcatcaccgttatgcgcttcttcgtcatggagcgtccgggcggcaaggtcatcgccgccgcatggcccggcaagctcaagaccgtattccagtgcgtgggtctgtccatgctgctgctgccgttctggtcattgggtaacggacaggccacgccgttctggatgaccgcttactacttcctgacctacgccatcatctacgtggcattggtcctgtgcctctactcgggtgccgtgtacctgtacaacacgttcgtcgccccgaagcggaagtgacggatattccaatgcaggaattgtgcgacagtctcgcgaccggcatcctcaagatctgcgaggcgaacaatacgaaaatctcctgcgctgaatccctgaccggtggcctgctcgccgatgcgttcgtgcgtattcccggtgcctccaacgtgttgctgggctccgctgtcacctacgacatcaatgccaaggcctcgatcctacacgtggacaaggccctattggatcgagaaggcgccgtacaccccgaagtcgcccggcagatggccatcggtgccgctcgcctatacagccagccggaatacggcgaccgaatcatcggcctttccaccaccggcgtggccggccccggtccggacggtgataagccggccggactggtgtatgtgggcctgcgcatccccgcaagcctcaccgcggaccatgtcgaagtgctcaaagccgtcgaactccatcttgatggcatgcgcgaagaggttcgtcgcctcaccgtattccacgttctgcaaaacttgagtctattcacagcaagttttaaggaataaaaccgcgggaccgtcgtgttgtacatagtggaaacactgaaccgaccttggaaggggcgatggcgatggaaacgatgacccgagtgaacgaacagatggatgtggccgccaagaagccgatggctgtgcagccgggtgtcgcccgtatgcgtgaactgactccggcccagcgccgtgcggtgatgttcgcccagcagcaggtgctcaaggcgcaggctgccaagaaggccaaggatcagcgtcaagccgttcgtgaacgtatgtgggatgaggattcgccgtcgtacaagccgactgccgccgccgagcccgtggtggttgaggaggagcctcgcgaggtttcgctgcgtggtgctatcggctacgtgctgcgcgaactgcgtacgcgcgatcgccgcacgttgcgtgaggtctccgagaaggcgggcgtttcgctgggctatctttccgaagtcgaacgtgggcagaaggaagccagctccgaactgctgagctccatcgccgatgcgctcggagtctccacttcgcgcatgctgcgcatggtggccgattatctcgacacagtcgagggctgatcggttggcggtgtgaagccgcatcccgtaatctatgtctagctgtgaacccgtatcgcttgtggcgatgcgggtttttgctgtcctgcgggtggtggcacactggcgtgtatgcgtgaacgggaattctgggaattacttgaagaggtgttcggtcgaacctacggtcgttcgctgtcgcgtgatcaacggatgtccaaattggcgaatatgaccgtggtcgaggcgctggacgcgggggaggagccacgcgtggtctggaatgtgctctgtgaccaaatggaggttccggactccaagcgttggggccacgatcataacgcgccgcccatgcccgccgtctgacactgcgggattacggagtcgctgaatcgtgaaattggcgatttcggcgtgttgcacgccaaattcgaacaaatgttcgtgtgtgtggttatagttattcacagtgacaagaagccgcatacgtgtgcacagggtgcttgtcatccgccataagccttaccgcagtaggtcttagggaggtcagatggccgagctcgggcaagctggaaccacaatggttggtttggattgcctcacatggcatgtccgtcatacggtggaggcatccgattcgcgcacgacttcgacaaggagaagatcatggcacttgagaccaagccggccaaggacccggcagccgaggacaagcacgagctcgatcccaagcgcaaggcggcgctggacaccgcgctggcgcaggttgagaagagctttggcaaaggttccgcaatgcgactgggcgaccagcccgagcagaacgtcgaggtgattcccaccggttcgttggccctcgatatggcgctcggcatcggcggactgcccaagggccgcatcgtggagatctacggccccgaatcatccggtaagaccacgctcgcattgcatgtggtggccaatgcccagaagaagggcggcgtggcggcctacatcgatgccgaacacgcactcgacccggcctacgcccgcaagctcggcgtggacaccgactcactcatcgtctcccagccggataacggcgagcaggccctcgaaatcgccgacatgctgattcgctccggtgcacttgacgtcatcgtcatcgactcggtcgccgccctagtgccgaaggccgaaatcgaaggcgaaatgggagacagccatgttggtttgcaggcccgactcatgagtcaggcgctgcgcaagatgaccggcgcgttggctcaggccggcaccaccgccatcttcatcaaccagctgcgtgaaaagatcggcgtgttcttcggcaatcccgaaaccaccaccggcggcaaggccctgaagttctatgcctccgtgcgtctcgacattcgtcgtattcaaaccctgaagaatggcgacgaagcggtgggcaaccgcacgcgcgtcaaggtggtcaagaacaagatggccccgcctttcaagtccgccgaattcgacatgctctacggtgaaggcatttcccgtgagggctcggtaatcgacatggctcagcaggttggcgtggtcaagaagtccggttcgtggttcacctatgagggtgatcagctcggtcagggacgcgagaaggttcgtcagttccttaaggacaacccggccatcaccgaggagattgagaataaggtcaaggccgagttcggtctgatcggttccgccgaccagttcgcggaagatggcgaagccgcagcagcggccgctgtcagcgaggccgccgctgccgacgtggccaaggacagcaaggccgcagcggcgcctgctgccaaaacgacccgtgccaaggccggcgcagctaaggcctgaacatgattagtgccgaagcattcttgcggcgcaatcctgttgcgtcgcaagacatgcccattgccgagcagcgtgttcagtcgaaaccgccgggacgtttttctcgacgggggagagacgctgccgttgtcgaagatcccaatgatttggacgcttgccgcgaggctgcattgcgtttgctggacgcggccccgcgtgcatccggcgcgttgcgcgaacgattgctcagcaaaggctatggcgaggcgattgtggacgaggtcatcgaacggctgattcgcgtgcaactgattgacgaccgcgcttatgccgaatcggccgtacgctattgtgccggtcgcatgatgggtcgtcgtggtgcggtcctggaacttgctcgcaaaggcgtggaccgcaaactggctgaacaggtgtgtggcgaagctgagcaaaatggcatctttgaagatgccgcatgggaattgggccgccaaatagcccgcaaaacccatggcctcgatcgtcaggtccgtcagcgtcggttttggtccgcaggcggccgcaaaggacacagccccgaaaccctccgccgagtcgccgccgaattgttggtgtagccaagaaaaaaatgagacctcttataccccgggttctgtcgtgccgtgcgcgaacgcacggcacggatggccatccatctcgacctgacgttgccgccaggctctagcagcctacccgatgacacgggcgagcagcccttaccgccatctgcttggccttgctcccgatgaggcttgccatgcgacctactgttaccagaggcccggtggtctcttacaccgccgtttcacccttacccgtcgaggacgggcggtctgttctctgttgcgctatctctcaggtcaccctgggcggacgttatccgccatcgtgctctatggagcccggaagttcctcagccgatcccaatgaagatcacggccgcggccatcaagaggtctcaagcctgcaattatacataaggtgcggaaaaggcggcatcccgccctgcggtgaggccatgacgttgcccagttatctgttttctccatagttgggcatagttgggcgattcgtgaacgacgcgccgaatatcggatggggcgtgtcgggcgtgttgtggcgtgtcgtatggagacgaatcaaatctgtaagagcttggtatatgcgagaaagagcaagaaaacgctgcctatccattgcagtatttaccatgacgaacaaacaagccagcctgataaaccggtatcaaatcttcttataggagactgctgccaaaaccccagtatatacatcgtttcattgcagagaaaagcccggagataaacatatattctctgggcgagtttccggccgttcacccattgttcgtctacaatgaaacatacccggtcggtgatgatgccgttcggaacacatatagcgggttacaccgcttgagttagaggaggtcaacatggaaatcgtcgttaccggacgccacacgcaggtcaagcaaaggttccgtgatgtggtcgagaccaagatgaatcgtgtgaccgctatcgccccagatgctcagcgcgcgcagatcgtgctgacccatgagggcaacccgcgtcaggccgataccgccaagcgcgtggaaatcaccgttatcgccggacgtaccgtggtgcgtgcggaggcttccagcaccgatgaattcagtgcgctggacatggcgctggataagttgacgctgcgtctgcgtcgtactcgtgaccgtcgcaaggatcaccgtcgtggttacgcaaacccggtcccggtggatctgggtgttatcgccccggagcccgagccggaggtgtcggaggaagagccgaacaacagcccgcaggctgcggtcgcctccgatcttggccctggcgaatccgtggaggtccaggttggggatacgccgattgtcatccgtcgcaagttgcacatcgccgagcctatgagcatcgacgaggcgctgtacgagatggaactgatcggacacgacttcttcctgttcgtgaacaaggagaccggacgcccgtccgtcgtctatcaccgtcacggttggagctacggcgtgttcgaaatcgacactccggagaatgtcaagaaagcctgagggtaagggctgctgacatgatcagctgataccgcatggaccgcttccaatatggaagcggtccattttttcgtaaaaaggtcgaaaaattcgattgctgacggtgcgaggcgctattctggtacgcggacaccaccacttatcagtcaagggagaacccagtggtcgatattgttgacaaagccctgcgaatgggtgaaggccaccagctcaagaagctggagaacgtggctaaggccgtgaacgccctggaggacgagatttccgccctctccgacgaggacctgaaggcccaaaccccgaagttcaagcaggaaatcgaaaacggcaagagcctggacgagatcatgcccgaggcgttcgccaccgtgcgcgaggtctccaagcgcaccctcggccagcgtcacttcgacgtgcagctcatgggcggtgccgccctgcactggggcaacatcgccgaaatgaagaccggtgaaggcaagaccctggtcgccaccctgcctacctacctgaacgctctcgaaggcaagggcgtgcacgtggtcaccgtcaacgactacctcgccagctaccagagcgagctgatgggccgtatctaccgcttcctcggcatgaacgtcggctgcatcatcaccgagcagaagccgccggagcgccgcaagcagtacaacgccgacatcacctacggcaccaacaacgagttcggcttcgactacctgcgtgacaacatggcctgggagaaggccgaccttgtgcaacgcggccaccactacgccatcgtcgatgaggtcgactccatcctcatcgatgaggcccgtaccccgcttatcatctccggcccggccgaaggcgacgtgacccgctggtaccgtcagttcgccaagctggtgctgaagcacacccgcgacgaggactacgacgtcgacgagaagaagaaggtcgtcggcatcctcgacccgggcatcaccaaggtcgaggatttcctcggcatcgacaacctgtacgagccggccaacaccgccctgatcggcta

SEQ ID NO: 1518 - DNA, 23831 bp, Unknown
  R257_15m  MAG No. k141_50898
cccggggttgcgcgccacctccaatgaggcatagaaggcatccatgtcgatatgcagcacggtgcatccggtctcgtcgtgaccccaatcgcgtttggcggcctcaagtctcggtgcggtgctcatgccaccattgtaggaatgccgaacgaggtcatgctcactatgtggcgcgcatggcgcggcgctcattgtcgtaatgccgaatatcgccggaattccaagggtttgcgcactgtgcggctgtttcgcatggtgggtgcgattccacggaatcgtccacattgcgtcactgtccgtaacgccttccaagtcgctgcgcgctgtcccgactctccgagtagcgtaaacctcgtgaagaaggcagtggtcggtatcctcaaccgtgttcccgtggtgcttatcgtgattggtgaggcactggtgatttatttggctacggccgtcgccaaacttgcgttcacccagctcgacccgctgtattcggtgtggtaccgcgtgggattcatggcggtgctgttgctgctgtggtgcaggccctggagcaaggctaagcgagcgcagctgtttcaccgcgacgcccgcggctgggggctggtcgtactgctcggctgctcgctggtgctgatgaataccctgttttatgtggccatcagcaatatggatatgggcattgccgtgtctatcgaatttttgggaccgctttcggtggcggtgattaccggcaaaagctggcgtgagcgggtcggtatcggcatcgcggcggtcggtgtggtgctgttggccggcatatcattggccaatccgtccggcaagggcacgtttttgtatggtctgattgcgattttgatcggcgggtcgatgtggggcatgtacatcatcaccggccggcgcgtggcggctggcggcaattcgctggataatctgtgcatcgccgtgaccatcggctggctggtccagtccctgttccttggcgtgccggctgtggctcatgtggttcaccccaaggccgatgccacgtgggcgcttgagcccggcggctcgctgaagctgctggctctgctgtttgtgatttccctgatggcctcgttcattccctatgtggtggagcagatcacgctgcgacgcaccacatccggcgcattttcggtaatgcaatccatcaatcccgccatggcggtggccgtgggactggcgtttggcgagattcccggcgttggtgaaatcatcggtgtggcgttggtgatttgcgcggttatcgttacgttctccggcgatgccgcgcccgcggacggtcaataatgtgtcgttcggcacgtcgtatccgcaggacgtggtacagtgatttgctgttgcgcattattgcgtaacgtggagtcatgcctgagtggccgataggggcaccctgctaaggtgttagtcgtgtaaacggctcgagggttcgaatccctctgactccgcaagtggttccggattgttgatttttcaacgattcggaaccttttttcatgccgggaatcggtatacatttcggtatatatttgaaggcatgaacggcacggttttctatgacgcgaacaacaagcgatggattgcgcgatatccggcgggacggttcaacaccggaaaagtgatagccggttatgggcagacggcggaaaaggcgatggcgcggcgcgacgcggcgttgaaacgcgcgttgaacggaaccatgcgcggcggaaccatcaccgtccggcatgttcttatgaaatacatggcgtggattgaacagggaaacgacaggcggaacagcatcgcgcggaaacgcgaccggttggaacgctatttgaagccatacatgggaaaaccgatgaaatcgtttgacagcgatgatgtcggcgcgattatcacggcggcacgcgcggcatcgaccgacagcgcgaacagcaagatagcaaaaaccatgtggggcgaaatacaccaaatgtgcgattttgccatacagcgcggcatgattgaaaaaaatcccacggattatgtcattcgaccaaaatacaccagcgcagcgcggcgaaccaatgaacttcacatagacgaacgcattgaacaagggcgctggatgctggaacacgcggcacgcgacggcggaaccgcatacggcatgttattactggcatgtatgggattacgcgccggcgaaatacgcggcatggaatacaaatgctttgcgcacctgctggacggcgcatgggattcaacaaccatgaccgtccaacaaatatatgaccgcgatgtcgaaaccggcgaatggcgattgatgaagcatacaaaatcaaacgccatgacccataggacgctggccgttccaaaaccatgggcatataacattttctgcttttatgaacagatacaggacaaacacaaacttccatatggatatgacggattcgtgtgtttgaacaaggacgggaaacctcttacaagaaaccaacaatccgccatatggaacgatttaagacgggcatacatcaatgaacatccggatagaaaaccaatcgcatcaaccatgcgcatacatgacatgaggcatgtcatcgcgtccgtgcttgtcatgaacggcgcgacattggaacaggtgcgccccatactggggcacatgaacgcggaaatgacggcatattacacggcactttcaaccggattcaaccgcgcgacgatgaatgaactgccggaactcatgaaccacgggaacaatctattgaacttcattaacattaacaatgaaaacaaaaaataaaaaggaaaaataaaataagcaaaaaaacgcgaacgcgaacaattccaacgcgcgcgaacaattataaccacattaaaccatagaaatctatgaaattatccgtcgagtggtagtgcgttcttggaggattagaatttgaacacatgttgaacacatgaacttgtttcatgtgtgataacgcgtgtgattcgtattatgtaatgatttttatgttgtttttgtgtgcgcctttcaaaccgggaaacaaaatggttccatatttaaagtggaaccatggaatcttttaaacatcaccatgtgttgacatcaacggtgatgttgaatatgatttttcaacattaatgtttcggcggtttaatattcactggaatatttgtaagtcccggattcggacacaggatttcatctatgattgaatcgatatcccatgtatgaaacggttcaaacaatgaataataatcctcatatgaataatcaggataatattcaaccaacgcaaccgcgttatccatattcttaatattaaaccacgccataacacgacgcgcttttctcattgtattaccatcaaccattatgtttccttccataccattgaaatgaatacacatgaaaccattaaacataacaagcgtttaaacatagtcattttgtctcgcgttcctttttcgcgtccgccatcatgcgatagacacccgcatgactggttttaagtctcactgcgatatcatcgatagtccagccctgctcacggtattccaatgccttacgcgctttacgcatgttgtaagttttcggccgattacatatcttgccggacttctgcgccgcctctctgcctgccgccgtgcgttccaatataagggcatgttccatttccgcaacagcgctgaaaatctgcgcaaccattcttcctgctgcggtttccgtgttaacagcctcacgaatagtgcgtatgttaataccattcttttccaatgcattcatattcaatactatttcattgaaattcctgccaatgcggtccatggaataacaaacaatggaatctccctcgcgaaccgcttttgtgaggttgatccatccatcacgctggaagttcacgccgctcttaccggcatcagtgaaaatacgcttttcttccacaccagcattaattaatgcttcacgctgttcctgcaatgagtagccatgcattgcctgcgttccagttgaaaccctgatataaccatataacatacttattaatcctttcaatagaatatgtgtgttttcactatctatctatcaaactgtgttcaaaagccatatcatttgagaatccgcattttcgccattgaaatggaaaatgaaaatccagtatttttcaggctttttaaatattgatagatagtattcaaaccgttcatctgattataacttttgaacggtggtatttaaatacatatttcaacattgaaataacatattattcaaataccatttgaaacgctcatttcgattctgacagcgattttcaacatttcaagtatcattagtcaggaacgcggtttttcatagtttcaatcaaatatgccgtccacagggctgaatattacgcgctctgtggacggcatcgattttcacggatttcacggattttcaatattatatattttcattcaaatacaatgaaaccggtgatttgcattctcaccggtttcattattggatatggattggattcgtgtttgaaaagtctcatgagattattcatgcatttcattcacatatattaatatatcaaacaatccaatcatatttgtttcagttaatcattttcgctgtatcactggcactattaattagatcgctgttctgattgaacatctcgggcgcaatataaacaacaacagcaacgccaataccaatgcttagaaagttaataaactggctccattgacggtttaacaggaatttcaatgataaagaacccatcaccataataataatcggcgcaatccattttgaaaccgccgcgttccaaacttcttgcagtgttgcgatgtccgctgaataaataatagtgctaatcataatccataatccttttgttgaatgttttcatgaatcatctatcaaaaggaaacggcgtgccggtttgttccttgtaccggcacgccgcaatatattatttgatgacaatgtttaaatatcatggtttcattttttaaaagcgccgccgtcaggtggacactattctatatacacagttgcgtcttcccgagtttcacgggtttctattaatcgttggattaatacagccatttcaaagggaagctccgccaacatcgccatgtattcctccaagagcaactatccccgtccccttagcccggctctacggccatctcaatcggcatgaaatagcaatgttgccaatcaagattacgaccgcttccatgaggacccatgtttattaacacggtgtctgacggcatacatccagaggttttaaatgttaggaatcacccgtccgtatctttcaaatggaaaacgagccttttattctattatttcatacacatgctttcaaatctcatctgcggcgcatgacagcctgattctcataatttcaatctcattgcggtttatgttaacctgatttgcgtttcattgaaatgctgtatgaaaatgttcattccaatgaatgattcatccaatcaatccatgctttcaaatctcatttgcggcgcatgacagcctgacgcatcccgacaccccttttgattggattaaccatttgtgaagtcgccggtgctcacctctatcaccatgatatctatcaaacatgtgtttgaaacatatgaaatttgaacaaaagcattctatggcggttttaacggcgtttcagcgtgaacatgaatacttatcgtatttcatatgaaaagccgtgagaatgccgtttaaatgcgttctaacggcatatacaccattaaccgtgaaaccatgcgtttcaaaccatggttccatacactatgaaatgtgaaaatattgtgaatattcatggcatgccgccgcttttcaaacagggcacatgaaccggtatatttttcggtatacttccggtggttttcaatacgaacacaaccggaaaccattgaaaatggcggttttatggcaacagacacggaatcggactgactccgccgattaaggttccgggtgaaagcttggaatcttttttgttttccggaaactcctgatgatgggcctgttcgcacttcgcggagtcagagggattcgaaccccgggaatacggttctggtgggttgtccggatatctgttttgcgacgcattcctgggaatgtgtttctagtgggttgcttgggggtctgttttgcgaaactttcctgggaatgtgtcgctagaaataaccgaaataaccgaaataaccgaggacggtcggtctccgcttgtggtaagcggagtcggaggtacgccattgtccgtccgcctccaaaccgccattttagcgggtgaacgagtgcggcacctcggggaaaggctaacaaacgaaagaagaatgtccactaagtgagacttttgcgtggtgttcgtgaatggtgattgaagattaaccggtttatgtcgcttgtccaatcgcttgcccatcgccttcctccccgcagtgtttgactgagatgggcggtatcctagagagagaagaagagttccgaagggtgggcaaagatgagccatatcgctgggcaggggcaacatcgctccaactcgacacgaaccaaccgtgcggcgctgattatcgtgttcgtgatcacgctcgccgttacgctgggcatcggcgcatggttcgcaacccatcgcacggacggcaatggccccgcacgcgccggagtgtcggacgtcgcgttgaataaagcgaagaacacgcccaaaccggtgaccgaacatcacggcaattcaccggattgcccggatacggactgcatcgccatgctggtcaacggcgatttgttgttccatgagggattgtggagccatttccaaggcccgaaccccaacgccacggatggcaccgccttcaacttcgacccgctgttcgcgccgatgaagcagtacattcaggcttcggacatcgccgtgtgcgaattcgaaaccccgatcgcccagcgcggcggcccatatgccgcgtacccgatcttcaacattccgccggaagtggcggatgccgcccgcaacgtgggatacaacgcctgcacacacgccaccaaccattcctgggatcagggggcggatggcatcgcccgtctgtgggacacgcttgaggccgatggcatcgcccagaccggctcgtacaaaaccgaagccgactccaccaaaccgttagtcatcgattccccgaccggcggcggcaagctgggtctggtcaccggcacggtctccctcaacggcatgaccgccgacgaggactggcaggtggatcgtctgcgcgaagacggcgacccgaatcacggcagcgacatccagcgcgcggtagacaaggccaacaaggcccgcgagcaaggtgccgatgtggtggccatcgccatgcactcggtgcaggaataccttgattacgccgattcctggcagatttcggaagcccatgagcttgccgacactggtgccttcgacgttatctacggtgccggctgccattgtgcgcagcccatcgagaactataacggcacgtggattgtctacggtctgggcaacaccgtcaccgagtcggcgaacacgccggaaaccttggtcaacaaccagggtgtgaccgcacgcatccagttcgccggcaagaagggcgtcaaggggtcgtggcgcgtcaaccgcatcgactgggtgcccaccgccaacgtgcatcaaggcaactaccaatggtgcccgatatccagcgaccatcccataggcacatgttgggacgaagcctacgacgctcagatacgccaacgcatctgggatgtcatctattcgatgggcgcggaccagaacgtcgtcaaggaatggaacatcacgcaggagcaggcggcaaagcaatagttgctcggcttggtctcaaggaggggaagccgcaaggtgacgcttttcccgtcggcctcctaatgtggagcccatgaccgagatttacgaaacccaaagcgaacgcaccgatctgcccctcgtcgtgatgccgtccgtgctcgacgcgatgatcgagcccatcaaggcccagttccccgcgctccacgacgttgcccgcgtgcgtatgttcgaggaattcacgtccgacgaggcgatcgtagccgagcgtctgaaggatgccgacgccctgctggtgggcggctaccacatttcggatgatctgctgcgcaccatcagcgagcaggggcacgtcaagtgcatcgtgttctgcggtaccggcgtcgccagctacatcaatctcgataaggcgcgcgagctgaagatccgcgtctgcaacgccgaacattatggcgatcacgccgtggccgagcacaccttcgccctcctgttcgagctcatccgccgcgttggccaactcgataaggatgtcaaggccggcaactgggcgtgggccggcggcgatggactgcaactcgccggccgtcgcatgggcatcatcggactgggcggcatcggcgccaccgtggccggcatcgcccgcgccttcggcatggaggtcgccgcatggaattcgcatgtgccgcccgagcatttcgaacgctccggcgccactccggtcgacgatctcaacgagctcatcgaaaccagcgacgtcatctccgtccatctgccgctcaacaacgccacgcgcggcatcgtcaccgccgagaaccttgcgcatgtgaagcccggcaccctgttcatcaacaccgcccgctccgaagtcatcgaatccggtgcgctgcttgcccgactgcaaaagggcgatgttcccgccgcactcgacgtgttcgaccacgagccgctgaccgccgacgacgccatctgccatgtgcccggcatcgtcctgaccccgcacgtcggctggcgtaccgacggcgcgttcaaggagctcacccgccagatgatcgcctgcctgaccgcctacttcgccggcgaggactataacgtcgtcgtctccgaacactgatagtcctgtctagcctcgcgctcaatcgaacacccagtcagccgaccaccggaacacgcttatgcagacgattctcaacacgtccgacgatcccgcccacgattcgctcgtcgaaaaaaagtccgaattcatcggcgacgctgcccatgtcgatacgctcgacgaggcgctcgcgttcgtggccgcgatccgcgagcagcatccgaaagcccgacacgtggcgtatgccgccgtgtgcggaggcgcggatgggcgactgtccgaacgcatgagcgatgacggcgagccgtccggtaccgccggcaagccgattctcgacgtactcaagcagtccggcaccaccgattgcgtggttgccgtcaccagatatttcggtggtattctgctgggctccggtggtctggtccgcgcgtactcatccgccgcatcattggcgatgaaagccgcccgcgccgcccgcatcatgaccgccaagcgataccgggtccgtctcgaatacccgcagctggcacgattccagcagattctggcgcagctcggtggcagtcaggaggatgaatcgtatgcggtgaacgtcgagttgaccgcggtggtgccgcaggatgattgcgcgcgattcgaggagtgtgtgcgggaagcgttcaatgccgcggtggtgccggatccgattgacgtggtcaacattccggttccgctcgcgtgacgcctgtatgactaagctgggcatcatgaccgacgagaacaccaccagccagcggacccagcccaccgaggccgcaaccgagactgcaaccgacacgggcgcccagcagcgggaccaaggcgcgcaggacgcagccgagtccgccgctccggtggatttcgaaccgctgaccgctacatacgagcgtctgcgtcattccaccgacccggccgaactgtccgaattcgcccgtcggccgttgcctgaccgtgccgatcaggcggcgttctcccgcgccaccgcacttttggaggctgtggccggcaacccgcacaccccggtggccgatcgcgtgttcctcgccgacaccatgccgttcccgaacgtattggtcaaactctccgaagaccccgaaccgtccgtgcgtcaagccgtggccgccaacggggatgacaagaattggctggtcggccgcctgaccaaggacccggtgcctgcggtccgggatacggcgttgaaaaacaagcgcaccagctggaagatgcggcttgagggcgcgcaggaccccactgcggatgcggagacattggatttcttgggcgtacttggcaccgaatccgaagagggagcaccggcggtgctttcctcgatggtccgccgtgccgtggcgctgaaccccaatacgtccgaagcgatgcttgccaaattggccaacgacccctcggccgaggtgcggcacgccgtggaaagccgccgctaagcacactattgctgtgttttgccgtgcaaatttggccggcaatcaccctctatccaccattgtgagcgctcacatctcactatgtgagggtaaaaagtacataatttggcggaatcacggcattttgcttacggtgtggcgcaatcaaacggcgttagactggggctatgagtgagattaccgagagtgaagagcgtctggcccgtccgttgattcgactggccaagttggtcggtgtcggcacgagttatgtgggcatgagccatgactaccacgagatagacgatgacgtcctgatcgaggtgctggcagcgctgggcatcgacgcctccagcgagaacgcccaactcatcgccatccgacgcattctgaacgagcgttactcccgattggtggcacccaccgtgctgcatatcgccggtagcgaggaccgggtgctggtgaacaccggcattctggacgtgccttcggcgagcatcacgctggagaacggcgagccatatcagggcaccgttgaagttggtcctggagatggatcccaggcctacgacttggatggcacgttcatttcgaatgcggctgtggtcattcccgccgatctgccgattggctaccatacgctgcacgtcaaggtcgccgaccgtgtgcaagacgccactttgatcagtgcacctgatcgcgtcgatctgcttgacccgatgaagggcggcagtctgtggggctggatggcccagctgtactcgattcgctcctccaactcctggggcgtgggcgattacgaggatctgaagaccatgctggtggacgccaagcagaagaccggtgccgacttcgtgctcatcaatccggtacatgccgccgagccggtgtccccgctcaccccgtcgccgtatctgccggtaagccgtcgcctgatcaacttcacgtacatccgccccgaggcgatcgccgaatatgccacgctcagcgcgggcgacaagaacgccgtcgacggactgcatgccgacaccgaaccgctgaacggtgattcccagctcatcgaccgtgacgccatgtggcgcagcaagatgcacgccctgtggattatcttcaaggccggccgtaccgccgaacgccaaagcgcgttcgaccaattcaaggcggactgcggttccgacttggaggcgtatgccacgtggtgcctgtgctacgacaagtggggagcacccaacggcgaggagagcaactgggagcgcaagttcaaccgcaactccccggaaatcgccaatctgcgcaagcagtacccggacactttggacttctaccgctggctggaatggattgccgccgagcagctgtcctccgcccagcaggcagccaaggacgccggcatgcatatcggcatcatgtccgatatggccgtcggcgtgcacccctccggcgctgacgtgtggtggaatcccgagcgcttcgccaagggagccacggtcggtgcaccgccggacatgttcaaccagcaaggccagaactggagccagccgccgctgagcccgatcaatctggaggccaccggctacgagacctaccgcaatatggtgcatggcatgttcgcccgtgccggtgcagtgcgcatcgaccacattctcggcctgttccgcctgtggtggattcccgagaaccggtcggctatggatggcgcttatgtgtactacgactcagacatcatgctgggcgttctggccatcgaggcctctcgcgccggcggcgtggtcgtaggtgaggacctcggcgtggtgccggaccatgtggccgattccctgtcgagccacggtattctcggttgcgccgttgaatggttcgagcagtgcgacggcgtgttccgcgccccctcccagtggcgtccgtacgcattggcctccgtgaatacgcacgatttgccgccgaccgccggttacctggaatacgagcacgtcaagattcgtgagcgtctgggcttgctgaccggcccggctgaggaattcgaagcctccgcaaaggccgagcaggatgcgatgctgatcatgctggtcgagcagggctatcttgatgccgacttcgccgaacatcgtgaggatcacgaggcggatatcatcgacgcgctgtaccgcgcactgaagggttcgccgtgcaagctgctcgccgcctcgatcaccgacgcggtgggggagaagcgcgcgcagaaccagccgggcaccaacaacgaatacccgaactggcgcatcccgctggccgacgccaagggcaacgtggtaccgctcgaaaccctcttcgacacccccggcgtccaacgcttcgcccaaatcttcaattcctgacccactttacctccctctgacgagccgagtcgttaagcggacagtccagtggactgtccgtagacgaggcctgaacgaagcgatagctgagagaaggcagggaattgcctcaccgtaggcgagtcggttagccgaagtgggtggaagagaaaccataaataggggaagagaagccataaacccaatggagtgtccccagttgccctatgtcaagcccggcgatatactagtggattgttgtgtttccctaaggggtccttcaaagcgctatcccactcgccatcgaggactttcagggagcccacggataatgaggttcgatgcctcttggatgcggccctgaccaagccacgccaagcagctgagacccggaacacaatatagaaaaggtaatccagtgaaaactttcactccgaagccagccgatctgactcatgactggtatgtcatcgacgccaccgacgtggtgctcggccgtctcgccacccaggctgcaatcctgctgcgcggcaagaacaagccgacctacgctccgcacgccgattccggcaaccacgtgatcatcatcaatgccgacaagattgctctgactggcaacaagatgggcaaggaactctactcgcactccggtcgtcccggtggtctgcgtcgtgactcctacgccgagctgctcgagaagaaccccgagcgcatcatcaagaacgctgtcaagggcatgctgccgaagaaccgtctggccaaggtgcagctcgaccgtctgcgtgtcttccgcggcgccgagcacccgcacaccccgcagaagccccaggtcttcgagatcgcccaggtctcgcagcaggccaagtgaaacctgagaggagataagaatcatggctgaaaacaccaacgactcccaggttgtcgagaccgaagaggagctcaccaactacaccaccgagaccaacgctggcgctggcaccggcacctccgcgatcgagccgggctacggcaccggtcgccgcaaggaggctgtcgcccgtgtccgtctggttccgggtgacggcaagtggaccatcaacggccgcaccctggaggagtacttcccctccaagctgctgcagcgtgaggtcaactctccgattgttctgctcaagctcgaaggcaagttcgacgctatcgtcctcgttgacggcggcggcaccaccggccaggccggcgctatccgcctcggcgttgcccgcgctctgaacgccatcgatcgtgatgccaaccgcgccgccctgaagaaggctggcttcctgacccgcgacgctcgcgtcgtggagcgcaagaaggctggtctgcacaaggcacgtcgcgccccgcagttctccaagcgttaatttcgcttgtcctgtaccgagcatacaaaggctctccgtggaattccgcggagagcctttgtgtttgtgtcgtgctgttttgagtgtgactcacacctgtttcatcagcgtgatgctcagcgccggcatggtccagacattgtcgtcgacgggagtgtccggcgtatcatccacaggggcatcaggcatatcatctgatacctcatcccgaggcgcggacgaggtgccgtttgcggcgtgatccgttgctggcatcgcgaatccgatggtatccgcttcatcctcagtcgaggattccgtgcgctgcatggccacttcttcgaccagcgtgcgtaccgtctcgctggcgtccggtacatgctgcgtccaaacggtggtgtcatcgttcaaatcgcattcctcgacctgaatgccatgcccggctcggcggccgttgatttcggccgagcaccatttaggcgtccagtgagtgtctggcggcaggtggaatgtgcggtcgtcagcggtgccgttgaccacaatgcacacgtccacctcactgttggacagcaatcgcatggtgaagctacgtacgcccagatcgaaccagtcacgctccatcggcgtggtgccgtcgggcaggaaccactgcacgcggcttgagggcttgagtaggccgagttgggtcagtcgggtgaagaagtcctcgtggtgatacaggtccagtgatttacgtagcgccaccagtcgagacacggttttcaggcgacgcatttcgcgtgtcttgttggtggaatacatccaatcccacttcagccacgtgatgtcgttgtcttggcagtaggcgttgttgttgccgtcctgtgtgttgcggaattcgtcgccggcgagcatcatcggcgtacccagcgagagcagcagcatgccgatcatgttcatggccgcctgttcgcgtgccgtgatgacgtctggatcatcggtgacgccttcgacgccgaaattggcggaatggttcaccgacgagccatcattattgttctcgccgttggcttcattgtgcttggagcggtatctggtgaggtccgtcagcgtgaaaccgtcgtggcaggacacgaaattgatggaggccggagcgccgcgcccgggttcggtggcgaacagatcggccgagccgcagagtcgcgtggccatctcctgcaaactgatacgaccgaaatcggagccgccgtccacatcctcaagccagaaggtgcgggccgtgtcgcggaagcggtcattccattcggcgaacggcacggagaattggccggtgcgccagccgaggttgcccagatcccacggctccataatgagcttcaggttgcccagcaacagatcggaacgcagggcgtagaggaacgggtgatgatgggtgaattcgccttccaggcgggccagcgtgacgccaaggtcgaaacggaaaccgtctatgccgatacgcttggcccagtatcgtaatgagtcgatggcaaaggtgaccacatgcgtgttggtgaagtccagcgtattgccgcaaccggtggtgtcttcgagtcgaccggtattggatttttgatggcgatagtaggccaggtcgtcgaggccgcgccagcagaccgtcgggccttcgacgccgccttcgcatgtgtggttgtagaccacgtccatgatgacttcgaagccggcctcgtgcagcgcgcgcaccatgtctatgacttcttggcgcacggcggccgcgcccttctcttgggctgctttggtggcataggagggttcgggggcgaagtagctgagggtggagtagccccagtagttcttgcggccgtgttcttgcaggaagagctcgtcctgcttggccataatcggcagcagttcgatggaggtgatgcccaatccctgcagataggcgagcgttgtggggtgggcgagtccggcgtaggtgccacgcaacgcttcgggcagccacggcgcgttggcggtgaagcctttgacatgcatctcgtagatgacggttttgcgccacggcacatgcgggtgctgcgggtcgccctcatgcttatggatatcgcgatcgtcgatggccacggacaccggcacatggccgagcgagtctacggtgctcatggcaccgtatgccgagccggttaccttgcgatccacgacatcgcattcataggagaaggcggcgggggtgagctccatggagccgtcgatgcccttgccatacgggtcaagcaggaatttgtatggattgaagcgcacgccgtgtttcgggtcccatgcgccgtccacgcggtagccataacgcatgccgtcccatgctttgggcaggtgcacgtaccacaggccgtagttcggtccggtcatgcggaacagggtctcgcgcagatacaaatgttcgataatgcgcgtgcacaccggaaactcatggatctgctggatgaacgaggcgttcgggtcttcgaacaggcggatggcgtcttggaagaaggcgccgggctcgtcaatgggctccagcacacacagccaaacctgatcggcagtttcggaacgaacaacgacgtcagccccaccgtcgtcagtgaagtacagccctgggcgagtggcgtaacgatgcaacggtgggtttttcatacctccattgtagacgtgttgtcacttctggtggaagcccttgatttcctgccgcgttccgcagcaccacagatatcgtcgagataattctcggcgaatcgcaatgcggcaccgatgatgttctggtcttcggcgcagtagctcttgcgcagattgaaatggtcggtgccgaacggactgcgtgcgatgacgcgcgccttcagatcctcgatgtcactgtcttcaagatgctgggctgcttcaccgccgacaatcacgtcgcccgcgatgatggatcgcgcgttgacgatggcctgcgccacgtaatccagccattcgtccatgcgctcgcgatgatgccgttcaccctgctcaagcacgctgaagaagccgggaatactttcgtaatcctcgggcaaggtctccggcgagcagtaggtgtccatgcaaccgcgctggccgcagtagcattcgcggccgcccggcaccagcgtcatgtgttcgatggcgccattgcacatattcggaccctgatacagcttgccgcccacgatcaccgcgccgcccgggcgtcgctccagatagacgcacaccgcatcggtgagcgtggagtcgaaccatagctcgaccatggcggaggcatcggaatcgtggatcatcatgcacgggtaatggaccgactggctgatggtttcgagcgtaagccccgtgttgcccataatggtgccgaaggtgatggtggtggcgtcgggggagaggatgccttggatggcgaacgagacgccgagcactttgccgtgcttcttttcgacgtcggaggcgaagttgttgatgatgccgccgatacgctggtagtaaacgttggtgttgcggtaaggcagggcatcgttgcgtttttcgatgacgttgccgtacaggttaatcgcgcacaggcgcagttcgttggaccgcatcactacgccgatggcagtgcgatgatcgggattgaactcataattttgcgccttgcgcccgccggtggaatcctgcagttcgcctttgcggatgagtccgtcatcttctagggcgcgcagattttgggtgatggtgggcaggctgaggccgagttcgcgttccagttcctgcttggtgacatggctatggccatacagatactgggtcatggcactgcggttgtgcgctttcactgcggtcgatggcattgccctcatatttacccctttgtacgatgagatatatgtaagtatactttatgaaagtggctttcatgtgcctcgacgcggagattatgaggcaacaatcgtatatttgtaggcgattttgggtacttttttaaaccaattttctagaaatgtggggaaaatgagtacttttggaaacttgatttaagaaagttgtcggattgcgttgtttgcaagcatgtgattttcggtaaaaagtgaacaaaaagtaccaaatcgccgaataaagtgaggatttgttcgatatttcgcacaactcttaacaaaaactgttcaatatcgcacgtgaaacgccgtcgattttgtgcgtatgcatcgcgccggaccgttcggtatattgtgactcaagtcacatatgcaatgtgacaacacatcaccggtcattttcggttactgaggcggtatcccgctggtgcaactgaggtgacgaggcgatggcccagaactttgccatataccccaagaagatcgaggaggaccccaagtggcagaagcaaagaagaaagtcgaagctgccaatccgaccccagaagagaagcaggccgcagctgaggccgaagttgacgcgctggttgcccgcgccaagaaggctctcgacgaattcgagaacctcgaccagaagcaagttgatcgtatcgtcgccaaggcctccatcgccgctctgaacaagcacctcgttctcgccaagatggccgtcgacgagaccggccgtggtctcgtggaagacaaggccaccaagaacatcttcgcctgtgagcacgtcaccaactacctggccggccagaagaccgtcggcatcatccgcgaagacgacgtgatgggcatcgatgaggtcgccgagcccgtcggcgtggtcgccggtgtcaccccggttaccaacccgacctccaccgccatcttcaagtccctcatcgccctgaagacacgctgcccgatcgtcttcggcttccaccccggcgcgcagaagtgctccgtcgaggccgccaagatcgtgcgcgacgccgccatcgaggccggtgctcccgagaactgtatccagtggatcgagcacccgtccatccaggccaccggcgcgctgatgcagcacccgggcgtggccacgatcctcgccaccggcggtccgggcatggtcaaggccgcttactcctccggcaagcccgccctcggcgtgggtgccggcaacgccccggcctatgttgattccgatgtggacatcgtccgtgccgccaacgatctggtgctctccaagcacttcgattacggcatgatctgcgccaccgagcaggccatcatcgcccacaaggacgtctacgaccagctcatcaaggagctcaaggtccgtaaggcctacttcgtcaacgccgaagagaaggccaagctggagcagtacatgttcggctgcaccgccggttccggcgtcaagcccgtgctgaactccgtggtgccgggcaagtccccgcagttcatcgccaaggctgctggcttcgagattccggccgacgccaccattctggccgccgagtgcaaggaagtctccgacgacgagccgctgacccacgagaagctcgctccggtgcaggccgtgctcaaggccgacaacaaggagcaggccttcgagatgtgcgagaagatgctcaagctgggtgccggccacaccgccgccatccacaccaacaaccaggagctcgtgcgtgagtacggcgtccgtatgcacgcctgccgcatcatctggaaccagccttcctcccttggcggcatcggcgacatctacaatgccatcgccccgtcgctgaccctgggctgcggctcctacggcggcaactcggtgtccggcaacgtgcaggccgtgaatctcgtcaacatcaagcgcattgctcggaggaacaacaacatgcagtggttcaagatcccggccaagacctacttcgagccgaacgccatcaagtacctgcgcgacatgtacggcatcgagaaggccgtcatcgtgtgcgataaggtcatggagcagctcggcattgtcgacaaggtcatcgaccagctgcgcgcccgctccaaccgtgtgaccttccgcatcatcgactacgtcgagccggagccctccgtcgagaccgtcgaaaagggcgcggagatgatgcgcgaggagttcgagccggacacgatcatcgcggttggcggcggctccccgatggatgcctccaagatcatgtggctgctctacgagcacccggaaatcgccttctccgacgtgcgcgagaagttcttcgatatccgtaagcgcgccttcaagatcccgccgctgggcaagaaggccaagctcgtgtgcatcccgacctcctccggcaccggttccgaggtcaccccgttcgccgtgatcaccgatcacaagaccggctacaagtacccgatcaccgactacgcgctgaccccgtccgtggccatcgtggacccggtgctggctcgcacccagccgcgcaagctggcgtccgacgccggcttcgacgccctgacccactcgatggaagcatacgtgtccgtgtacgcgaacgacttcaccgacggcatggccctgcacgcggccaagctcatctgggacaacctggctgagtccgtcaacggcgagcccggcctggccaagaccgacgctcaggagaagatgcacaacgccgccaccatggccggcatggcattcggctccgcgttcctcggcatgtgccacggcatggcccacaccatcggtgccctgtgccacatcgcccacggccgtaccaactccatcctgctgccgtacgtgattcgctacaacggccagattcctgaggagcccacctcttggccgaagtacaacaagtacatcgccccggagcgctaccaggacatcgcccgcaacctcggcatcgacaccggcaagaccccggccgaagccgtggagaacctggcgaaggctgtcgaggactaccgcgataacaagctcggtatgaacaagagcttccaggattgcggcgtggacgaggattacttctggtccgtgctcgatcagatcggcatgcgcgcctacgaggaccagtgcaccccggccaacccgcgcatcccgctgatcaacgacatgaaggacatcgccgtcggtgcttactacggcgtctcccaggcggaaggccacaagctacgcatcgagcgcgagggtgaggccgccactgaggaagcctccgagcgctgattgcaggcggttggcggctgctggcaccagcagtagccaccaaccgcggtgttgcagcttagtggctgcatagcggacacaaggagcccgaccccattacaggggccgggctcctttgcatatgtggcgctccctcagccggcaggtgcctccatggggcggtaacctactcatggggcggtaacttgcctatggggcggtgaaaaccccatggggcggtgtacgaaaacggctctattctgcggaaggtaaaattttaccgtccgccccatgggctaattaccaccccatgagggaattaccgccccatggaatcgctgagcgtcgctaaatcaccgcaataatgcagccaaaagcaataaagctggcaaacgcctcggtaatgccggtcaccacgggcttcaaggttgtgcgccgtgtaaccaccggcaacgcaacggcgcgggccaacagcagcacagtcatcgcaatcagatacgggctgcgtccagccggcacggcggctagcagcaatagcgccacatgccatacccacgaagccgccacgtacgaacgcttcccgcgttcccggatcatggttttgaccaccaaaaccgacccatactgcgtcagcgcaaacagcacggtggcaatcagcccgttcacgggcaatgaacccgcaggccaccaggcgtgaaggtcgaatatctggctcaaatctggcatattccgaatcgcggcgcgtgcggcggtgacatcagcggctgcgcacgaggcatgtgctgcgttgatgggaataacacatgccgtctcaacagcgttgccaaacgacgcgatcaccgtggccatggccgatgcggcaatcaccgacacggcattgccccacagcgagcgctccttcctcagccacgaggacagcatcgacagcgcaaccagcactatatataaaggagcccaacgcagtatgccggtatgcgtaatcaggaatggcaagccgatgacgatgagcgctacggcataagtgagcatcggcggcagataacggcgtgaaaagtgtgctttgaaccagtgcgcggcgctgaactgcacgcaatagcacacggcccacgtcgccaacagccaaagcgtatcaagattaggcccgccgataaagaagccagccacagcgggcagcataaccattacccatgcgccaggttggttgtcgaaccaatcgcgtttaagagtcttgcggcgggaagccatatctatcatgatatcgcagcgaatggttctcaataagaaagatgtgagacctgcattgcgacaatcgaacataggaagtgcgagaagccagtgcttccgccattatgcaacgtgtgcgattgttcggaaatgttcatttggctcacattgtgtttatgtgagactaatctcgttgagtatcgccctcggcgctggaaatggcctcggctatcggatcttggctgaagtcgtggttgcgataatcagggtcgtccaccggcagatgctgcaccaaggtatcgaacacctgactgtagattttgccgcgctcgagcaccgcatcgagcacatggccgccgaacgtcttgtcgtcggacaggaagtgctcgtggaatccggccacagccgcgccgtgaaacatcacgggggagaagtacccgagcatggtgcccttgacgtcgtggcgcaggaacacggcctgccggtcggccacctccaccagcgtggggtagggtgcctgctgcttgatgaccgcgcgtgtcttgatgaagctgaacgtgccgcgcacaattaccgaaaagaacgtgttcgcgcggccgttcgccttgacgatcttttcgttgagctcttctaggccgatatcatgacgctcgcactggtactggaaggccgcgcgatggctattagcgaatggcatggtgaagtcgtccggcacgcgttcggccacaccggattggcctatcttgtatgccacgccatccaggatgatgagctcgccgtccaagccctcgccggtgccgatgccggtgtcgccatgcttgagcaattcgccgatggtggtggtgccttccagcagccccggcacgagtaaggccaaagtgccgtgctgatataacacgttggcaccgtgctcacgaataggtttgatgttctttgccagtgattgtgtcacgagccttaagagtaattcgcgttaccgtccaactcaattaatcaatccatattcgccaacgtgagctgtgccactatatataggtaagtctcagaaggatgttggtaggcgacgccgagcggctatgccgcgaggtaatacgaacggcatgagcgcgacacgcgcgaattcctccgcgctgtcccacctcaatgcttgaataaacaagttgcctgatttgggctcgcaaattggaattaaaaaagcgagcgcgggccgggagtcacttcaagtgaagtgacagccggaaaccgcgcactgatgtcggatgaccgccagaggacgtatgtccaagggaggccatgcgcgccggtgccctagaagcaggttggtaaacagtacaacgaacatcgctagaaagggcggacggcaatggcgggacagaaaatccgcatcaggcttaagtcctatgaccacgaggtcatcgaccaatcggcgaagaagatcgtcgaaacggtgacgaacgcgggcgcaactgttgttggccccg

SEQ ID NO: 1519 - DNA, 13767 bp, Unknown
  R257_15m  MAG No. k141_51234
catagtcctgaagaaaaacgccgtcgtcatagcagtagttgcaataatctccgtttcgcgttccatccggttcggtgccgtgatcttccgggcggtaaaacggcatggcacaactttggcaaaaaccattgtccggcatttccataagcctcgccatcggcacctcaaaacgggtgctgagcagccgaatcatgtcgatgcacggctctgccgttcccttctcccagcgggaaagcgcttgttgggtgacgaacagctcgtgcgcgaactgcgactgcgtaagacctcgctcctcgcgcacgactttgataacctgaccgatcgacatgactacctcccgacctcggaaaacgattcgcgcgtctcgctgtgcgcttgctgattccagtctaagggcatgtcccgttcgccacgcgcgggtacaacaaaccgttgttcgcgcttgtatcccggaggaagaaacagctcggtcgaacctatttcctctccacccccttcaattctcccggttcctctgactcctttgcgagcgccgcggatgggatgagcacgcttacgtatggggttgcgccagacaggacgtcgtcgtagaagcgctgtttggcgtcgatgaagtcgatggaatcctggatttccgcgagctgctcgaccagccgcgcccgcttgccggcgagcatctacttgcgttcggggatgctcggctcgtggaggagcgtagggggcgcgagtaggagttcgcggctttgctgcggtctctccctcacccggctatactgggagctccctcgtcagagggagcttaaattcggtctggttataggcccatgggcttcttgggctttttgtcgctcatgagcatgaggaagctgcgggactgggcggtgatcatgaagcccgcctcatagctcagttccggcccatccgggttgtgcgtatccacgaccagctgccatttgcggccgtatcgctcatccggcagggtgaacataatcggctcgtaatgcgcgttgaagatcaggatgaagtcattgtcgaccatccggttgccgtaccagtctacctccggaatatccgaaccgttcagatagatcatcatggagaacgcatgcgtgttctgccagtcgtccatatccatgatcgaaccggtgtggtcgaaccattcgacctgcggaatcatgttcgaatcgtcgccgggctcacggccggtgaagaagcgacggcggtgcaacaccggatgatccaaacgcagatgaatgagtttggaaacgaaggcgagcagttccttgcgtcccttgtcaagatgccagttggtccaggagatctcgttgtcctgacagtaggcgttgttgttgccctgctgggtgcgggccacttcgtcgccaccgcaaatcatcgggataccctggctgaacagcaacgtggcgaacatgttgcgcatctgacgctgacgcaagtcgttgacgtccggaatattggtcgggccttcaacgccgcaattccaagagcgattgttgctctcgccgtcgcgattgccctcgccattggcttcgttgtgcttttcgttgtagctgaccaggtcgttcatcgtgaaaccgtcatgcgcggtgatgaagttcacggacgccaccggtcgacggccgttgacctgatacagatcggaactgcccatcaggcgcgaggcgaattcgggcagcgtggagggctgcgagcgccagaagtcgcgcacggtgtcgcggtagcggccattccattcggaccagctggacgggaagccgcccacctgatagccgccggagcccagatcccacggttcggcaatcagcttcacgcgcgagatgatcgggtcctgctccacgatgtcgaagaacgcggacagcttgtcgacctcctggaactggcgtgccagcgtggcggccagatcgaagcggaagccgtcgacgtgcatttcggtaacccagtagcgcagcgaatcggtaatcaactgcagcgcgtgcggcgagcgcataagcagcgagttgccggtaccggtggtgtcgaagtagtgctgctggtcgccttccaccagtcggtagtaggaggcgttgtcgatgcccttgaagctcagggtggggcccatatggttgccttcggcggtgtggttgtacaccacgtcgaggatgacctccatgccggcgtgatggtaggccttgaccatggacttgaattcgttgacctgctcgccgcgttccccggaggaggagtaggcgttgtgcggcgcgaagaagccgatggtgttgtagccccagtagttcgacaggcccttctcctgcaggaaggagtcgttgacgaactggtggatcggcatgagttcgatggcggtgacgccgagcttcttcaggtattcgatgacgctcggataggccaggccggcgtaggtgccgcggatgtccggcggcacgtccaggttgaggttggtcatgccgcgcacatgcgcctcgtagatcaccgaatcgtggtacgagatgtaggggtgctggtcgttgccccagtcgaaatacggattgatgacggccgacttcatggtgtgggcggccgagtcaaggtcgttcatcgccgaggtgtcgtccgggcttttgaaccagtaggagaacaggctttcgtcgccgtcgatgttgccttcgatggccttggcatacgggtcaagcagcagtttgttggggttgcatctgaggccgtgcatcgggtcatagggaccgtagacgcggtagccgtagcgttggccgggctggaggccggggatgtagttatgccatacgtatgagttctgttcggtcatttcgatgcgcgtttccgcatcgtgctcgtcgaacaggcatagctcgactttctgcgcaacctgtgagtacagcgcgaagttcacaccggcgccgtcatagctggcgcccagcggatacattgatccaggtctgatctgcatagttttcagtatcccactttcttgtgtcactgatgtgccggggagttgaacgtcaggagaacagcgacggcttgtctttgtcggagttcctggcgatgagtctgcgtaacgcctcatgctggatggcgatcatcgaattggatgaggtgatgcgcgtggcggcaaggtcgctccacggaatccacgcggattccacgtgctcgtccgcgtcgaaatggcgctgctcccgtctgaacgggcccaaatgcaacaccatgatgtgggccagttcgtcggtcatgccttcggacgagtagaaatcgcccacgaagtcaacacccatggtgtcacggttcggcaccacgccggtttcctcggccagttccctcagggccgcgtccatgatgtcctcgccctcgtccatgagaccggcgggaagcccgtaggcgaacatgtccgatccggcacggtattcgcgttcgatgaggtaacggtcggtggacatgtcatgcacgagcatgaccacacagggggcgtgacgcagcacctggcggccgatctcgtgttccttgccctgcttgtcggtcagagcgatgcgcatgtcgtccacgtggaagatgcgcccggtataaacggtttcgctactgatcactttggcgggcacgtccatgtcgatgccgtccgaggaggcgttcagcttatggtcgagccgatgctccagttgttcctgcttgcttcccccaaacatgtcatctcctcggaaaaaacgttttcgccacgtcactatagcgccttaatcccgatgcgcggtaatggacagcgtccatggatcggtcgtgtcgtggaaccactcgacttcaggccttgctccggtcgcttgttcgatggcggctggcacgtcatcgatcgcgtagttgaaccacatggattcgatggcggcatgaggggtgttgatgaagcagggacgcacatggctctcccccgccattccatggccgagcatgatgccttgggccctcatacgggcttcataccgggcttgttcgatggcgtcggtcaccggatggtgacgcaaatcgctggttacgtacacgtccgcaccggtggcacgcacctcgttgaacagggagtcaccggagccaggcagaatggccacatactgaacagaagtgtccgaatcgccgcatacctggatgccgagcgcggtggtcatgccatgatcggacacttcgtcgaatacacgctgagcgaaatccttcagggcaacaggcttcggcaaacgacccacacgccccaagccgaccggatgagaggcgttggcatcgtcaatcggcacgagtggtttctggtcgatgagtccgaagtagtcggccgccgcctgccccacgccgcgatacgcagcgtcggcattggtgtgccctacccacagcccgcagccgtgctggtagagcctgcggacgatgtcgccccggaaaccgagtccgctcgtctcgtgtacggaacggaagaacaacgggtgatgggtgatgagcaggtccgcgccggtggcgatggccttgtcaatgatggcggaggtcgggtcggcggcgaacacgatgcggtgcacgtcgtggctcagatcgccgacgatgagacccggctcatcccattcctcggcgtagcgcaatgggtacagggtctcgagaacgtcgatgacttgcttgagattcggcatatgtcccattgtagtgggctattgcggcaagggactcattctgcaattgcggacaagccatgctcgtgctcttcattgctcgactatcggctcgccttcgcctacaaacaatccactggactgtttgctcaacggctcagcctcctcacccgaggggagctagaaattgtcagtgtgcagcgagctgccagtcggaaccgataccgcacgatacgtccagcggcacggcaaggtcgacggcgtgttccatggcgttgcgcaccagttcggtgacctggtcgccttctcccggcgcgatttccactaccagttcatcgtgaatctgcagaatgatacggctcttgacgtgggcctctgccaaggtctgctcggcgcgaatcatcgcgatcttcatgatgtcggcggcagatccctgaatcggtgcgttgagtgccgcacgttcggcggcctcacgcgcaacacgattggtcgaatgcagggccgggaagtagcgacgccgtccgaaaatggtttccgtataccccttctctcgggcattggccaccagcgattcaaggtaatcgtgcaccttgccgaaggtatcgaaataccggtttttcaacgcttccgcttcacgtggcgcgatcttgagctgctgggcgagaccatacgtgctcagaccataggccaatccgtagctcatggcttttacgtggctgcgctggtcgccggtgatctggtcgaccggcagcttgtagaccatcgaggccacgtatttgtggaagtcggctccggagcggaacgcttcgatcagcgcctcatcaccggacagatcggccatgatgcgcagctcgacctgtgagtaatcgcagctcatcagggcctcgtacccctcccccggcacgaacacgccgcgaatctcacggccggcggcgttccgattggggatgttctgcaggttcgggtccacggagctcaatcggccggtggccgcgacggtttgctcgaaagtggtgtggatgcgctcatctgatgtattggtggcatcgatcagcgtttggacgatctgcttgagcttgttgatctctcggtggcgcagcaacgccccgaggaaaccgttggcccgctcattgtccactgatttgacatacagatcctgcaatgcggccgcattcgtggtgtatgagccggacttggtgcgtttggtgggcttcaaacccatatcttcgaacagcaccttctgcagctgcttggggctttgcaggttgatttcggtgccggcatactcccaagccatttcctgcgcctgacgagcctcggcggcaaactggtcacgcatggaaacgagtcgaacgctatcgactttggctcctgtgtgctccatgccgtgcagcacgcgggaaacaggaagttcaatcgcgcgcatcagccagcattgttcacgctcgtcgataatcggcccgagcgtgacggcgaggctgcggataatggccaaatcgcgcagacgatgttcgttcggatcttcttcgacctgatcgtcatcgaagtccaacgtgccttgcgaaggctgttcggtttcggtgaagtggatgtcgaggaagtgctcggccgcctgcttgaggctatcggcgtggaaatccggttgggtcagatacccggcaagcttggtgtcgaacatcggcaggtccatgtcaagatctaccgcgcccagaagatgcagcaattctttatacccatgcacgatggtgcgggagtgttcgcttttcaggaaccgcgcaagctgtgctcgcagggtatcggtgattggaaggggcactatggccgctgatgttgccgtggcaacggcaatggcttgtgccgtggcacgacccggcctttcgtcgccccatgcggccacggtccaagcgtggccgaccgcgtcgccgcagacggtatgccgctgcgatccatcgccatagtcggaaaccgtgaaatcggcgatttcaccgggaactttgacctcggcgcgatgggccttgacccattcgtcgaactgctccgaagaggtgatgctcgtgggttccggcaggttcagatcgagactgttatcctgctcgtcctgttcattattcgtagactcgccggctccgtatgtgttggaaaccttggcaccggtattgaaggttttcagtacacgactcctggtacgcggtccgaattcaagctccttgaacagggcgtcgatttgtgccacgtccacggtgccgaatgtcagatcctcaatatcgacgccaagatcgacgtctcgtaccagtgcgttgactttgcgattgagcttgacctggtcgatattggccctcagcgattcgccttttttgccgccgatttcatcggcgtgctcgcaaatgccgtcgagggaaccgaattggttgatccacttggccgcaaagccatcgcctacaccgggcacaccgggaatattgtcggcggtttcgccgcggagcgccgccagatccggatattgtgcgggagtgactttgtatttgtcgacgatggactgcggcgtcatatgcttcaggtctttgaagtgatggcccgggtacaacacggtgacgttgtcatccaccagttggaaggcgtctcggtctccggacaataccagtgtgtggtagccggccttgtctcccatggtggcgagggtggcgatcacatcgtcgccttcgaatcccggcttctcgatgtaggtgacgccgagggccgtgagcatgcgttgaatcaatggcagctgggtgagcagctcttcgggagccgcctcacgggtgcctttgtattgcggaagcatctcattgcggaatgtgccgcccttcacatcgaaggcgacgcccagatggtcggggttctccgcatcgatcacctgcgcgagcatggtggcaaaaccccagacggcgttggtggcctggccgctggaagtactgaagttgtcgaccggcagggcgaaaaatgcacggaaggccagcgagtggccgtccaccaccagcaatgtttcattggtgggtacggtcacgctggcctctcccatagtgtgtttgtgttgctttacgactcagcacggtgatgccgataatcagcgttcgcccgaatcagaaggcttcggatcgccgtacttggcgatgatggcctgagccaggcgcttcttggggatgcgctggtccatggaggtcttctgaatccaacggaaggcaccctgctcggagaagtcagccttgtccatcagcagacccttggcgcggtcgacgagcttgcgctcctcaagcgtgtcttcggccttcttgagcttctcttcggtttccttgagctggtcggtggtttccttgagcttgcgttcgctgcgctccacgttgtccagcagatcgttgatctcggcgaaacggcccatggccacctcgagggtcggcagcaacttggattcctcgtacggcttggtgacgtatgccatggcgccggcaccggtggccttcttcaccagatcggtctgggagaatgcggtgagcatgacgacaggggcgatgttctcatcgcagataatgccggcagcggcgatgccgtccatacgcggcatcttgacatccatgcacaccacatcagggcgatacttgcgggtcagttccacggcttcctcgccgttggcggcctgaccaacgacctcataaccgttgtcttccagcatggcgaccagatccatgcggttcacggcttcatcctcggccacgacgacggtacgcggaccatcctcggccacggccttgcgctcagcaggttcgctttcatcggctacggccttgagttcttcgtcggtcagcacctcatcgacgttgatactcggttcttcggacttcttccttgcagccatgccaacctctttcttgaattacccaacaatggggttcgtaataatttcagcgaactcctagctaaagtgccctcggtgggactcgaacccacactgcgcagattttgaggctgcttcctctaccaattgggatacgagggcgtgcctaagcactctgaagagagtagcataccgattcgactcctgcgacacaagacacgcgccagtcctccatttccccccggtaaaacaggcgaaacacgtcgatatcgtggacggcgtacccgtgtgttgcccgttcttctgcgtggtttcaccgcttacaatgggctgtagtttcgatgtatcgcttttgttaggagggcttatgagcaacgaaacttaccgtcagttcgatccctggcgcccctctccagtcaaggagatttcccgtagacagattgtggagacgcattatttcaatgtcgatcacgtctcctatgagtcgaatcagatcggttcgtttgaacgctactttgttcaggagaacaatggcgacactgtggctgtgctggccgtcaccgatgacggcatgattccgctggtcgagcagtatcgcatcgccaaccatcgttggacgttggagattccggcaggccacgccaacaacccgtccgaacgcccgaccgatgtggctaagcgcaagctggccgaagaggctggtttcgatgcctccaagcttacgcagttcacccgttttatgaacacgccgagctattccacccagcacaccgcaatcttcttcgccaccggacttaccccggcttcccgtcaggaaatcggcccggagactccgcgttccgacgtgcgtatggtgtcggtggacgatgcctatgagatggtggtcaatggcacgattgtggatgccaagaccatggtcgccattctgcgtctgaagagcggcacgctcgatcatctcaacgactagtcaccacgctcgatcatcgcggtgactacgtgccattgcaatcaccgcacaatcgcaacataacggataacgaaagccccccatccactttctggatggggggggggctttcgcgtgctatgtgctagctgtcagcagctaccagcggcctgaaatcagtcgcaagcgccaacggtgtgcacgtagatggagtcggtgcggcccggctggtgatcgccctgagcagagctcaggatgacgatcttgtcgccgtcagcaaccttgccggcatccttgaggaccttgtccgtgtagatcatcagatccttgcgggacttgtcgtggtagtcctccttgagcaggaaggcttcggtgccccaggacagagccagccagtggtaggtgtgctcgttgctggtcaggccgtagatcggggcggccggacgctcacgggagacgcggtgcacggtggcgccggtctgggtgtaagcaacgatggccttggcgttgagcttgtcggccaggtccacggcggcggaggagacggcgccggtggaggacatgtcgaggttcttgagctccgggatgcggtcgaagccgtggtcggtggcgtagccggagatgcgcgacatggtggccacggtcacatccgggtacttgccgacggcggtctcgttggaggtcatggtggcgtcggagccgtcgaggacggcgttggcgcagtcggaggcctctgcacgggtcgggaccggggagttcaccatggagccgaggacttcggtggccacgatgaccggcttggcatactggcgggccagctcgatgatgcgcttggtggccagcgggacctcttccagcgggcactcaacggccatgtcgccgcgggcggccatgacgccgtcgaaggtcttgacgatctcttcgaggttctccagagcctgcggcttctcgatcttggcaacgatcgggatgcgacggccttcctcgtccatgatctcgtgggcgcggtcgatgtcggtggcgaaacgcacgaaggccatggcgatgatgtcggcgccggtgcggatggcccaacgcagatcggcctcatccttctcggtcagggccggcagggagacggcgacgcccggcaggttgatgcccttgtgggaggacacggggccggccacgatgaccttggtgtacacgttgttgccctcgaccttggtgacctcgagacggaccttgccgtcatcgatcaggatcgggtcgcccgggtggcaatcgcccggcaggcccttgaaggtggtggaggtgatgtgctcgtcgccctcgatgtcatcagtggtgatgacgaattcctggccgagctgcagctgaaccttgtcttcgccatcggcgttcttcttgaaccaaccgcagcgaatcttcgggccctgcaaatcaacaagcgcggcaacgttgcgaccagtggcttcgctggccttgcgcacgttgttgtagaccttgaggtgatcctcgggggtgccgtgggagcggttcagacgagcaacgtccataccggcttcaacgagcttcaggaggttgtcgtaatcctcggtggaaggaccgatggtgtctacgatcttggctttacgcatgaatgcctgcctattcttgttcaatttggttcgaggcacgattgccccatttgccgaaacccagtctactagcgcgagccgactcatgacaagttttcttcacggtgtgttgtgagcgctcacattgttgtgttgactgggtttaagggttgtattctctaacgatttcaggccttctcggcgctttccatgctcttcatcttgatcacggaagccacggatgcgccgccaattgcgaccacaatcacagccagcgacagccatgtgggcacttccggcacccaatggatgccttcgccgccgttgatgaacggcaaggtattgccgtgcagggcctccatgatgagcttgacgccgatgaagcccagcaccacggacaggccggcaggcaggtagacgagcttgtcgagcagagcacccagcaggaagtacagctgctgcagaccgagcagggcgaacacgttggaggtgaacaccaggaacggatccttggtcaggccgaagatcgcgggaatcgagtcgaaggcaaacatgacgtcggtggtgccgatggtcaggaacacgatgagcatcggggtccagtaacgcacgccgttcttggtggtgcgcagcttctcgccgtcgtagtcgtcggtgatcttgatgatcttgcgtagattacggatgatgccgttttcgtgatattcctcgtcttcatcgccgccgagcaccagtttgacggcggtgtagatcaggaaggcgccgaacaggaagaacacccatgtgaagcgggtgatcagggccgcgccgatcagaatgaaaatgccacggaagatcaaagcaatggtgatgccgatggacagcacatacttctgaatctgcttgggcaccgcgaagttcgacatgataatgacgaacacgaacagattgtcgatggacaacgagtattcggtgagccagccggaatagaactcgatggcgggcttggagccggcgaagaaccagatgcatccgccgaagatcagcgccatgaccacgaagaaggcgatatgctgcacgcattccttggtggagggcacatgcggtcggcgcccgatgacgaacaggtcgacgatgaagaacagcgcgagcaccacgaaggtgatgatttcaaatgcgagtggggtttctgccatgattccctacactaacccatgtatgtgacgggtcatcgccccgcctcggtcatctgccggagctccttcttgagatcacggatctcgtcgcgcagacgggccgcaagctcgaactggagttgttcggcggcggtgtgcatctgttcggacagctggcgaatcaggtcggcgaggtcctgcgcgggcaggccggccttcaggatctcctcgtggcgtttgtctgcctcgttgggatcgagtaccggcacgcccaggtgtgtgttgccggccttgcccgcgttgcggtagccaccttcaagcaaggtctgggtgtccacatcctccttggcgagcatgtcgttgacgtcgctgatcttcttgatcaggggcttgggatcgatgccgtgttcccggttgtaggcgatctgcttggcgcggcggcggtcggtctcgtcgatggcttgccgcatggcttcggtggtctcgtcggcgtacatgatcaccacgccggacacgtttcgcgcggcacggccgatggtctggatgagcgaacggtaggaccgcaggaagccctccttgtcggcgtcgaggatcgccaccagcgatacttccggcaaatcgaggccttcgcgcagcaggttgatgccgacgatgacgtcgatcttgccttcgcgcagcatgcgcagcagttcgacgcggcgcaacgtatccacatcggaatgcaggtattcgaccttgatgccgcgttccagcagatagtcggtcaaatcctcggccatcttcttggtcagggtggtgaccagcgcgcgctcgttcctggccacgcgggccttgatctcggcgagcagatcgtcgatctgccccttgaccgggcgcacgtcgatcttcggatcgagcaggccggtcggacggatgatctgttcgaccaccccgtcggacaagcccaactcgtagtcgccgggcgtggcggacagatacacggtctggccgacgcgctgcaggaactccggccatttgagcggtcggttatccatcgcggagggcaggcggaagccgtgttcgaccagcgtgcgcttgcgggaggcatcgccctcgtacatcgcgccgatctgcggcacggtgacgtgtgattcgtcaatgaccagcaggaagtcatcggggaagaagtcgagcagcgtgtgcggtggggtgccggcggcgcggccgtcgaagtggcgcgaatagttttcgacgcccgagcacacgcccacctgggtgagcatttccagatcgtaggtggtgcgcatgttgaggcgctgcgcttccagctccttgccttgcttacgcagttctgccaggcgttcgtcgagttcctcgcgaatggttttgagcgcgcgttccatgcgttcggggccggccacgtaatgggaggccgggaagatgtggatttcgatttcctcgtcgatctcgtcgccggtcagcgggtgcagcgtggagatgcggtcgatctcgtcgccgaagaattcgatgcgcacggccagttcctcgtagacggggatgatttcgaccgtatcgccgcgcacgcggaaggtgc

SEQ ID NO: 1520 - DNA, 6606 bp, Unknown
  R257_15m  MAG No. k141_51267
ccgaactactccggcttccacaacaactgatcggttgatgcccgctagcttgcgctagttaggggttgattccttgtgaaaagggtctgcttatgcaggcccttttcgcgtatgtggctcgagatagcttgtatgcgctggggtatagtctgaactgttctgcataagcgatgaccagcgaagaaaagaggcacaccatggtcgacagccatgacgcggaaacgtacagcgcgaaggactcgcgcctgatttggatcgattgcgagatgaccggacttgacatcttcggcggcgacgaactcgtcgaggtgtctgtggttcccaccgactttgacctgaatgtgctggacgagggcgtggattacgtcatcaagccgtccgagaaggctgtgaaccacatgaacgatttcgtgcgccagatgcacacccgttccggcctgatcaacgagtgggagaatggcctgagcctggccgaggccgagcagaaggtcaccgaatacgtgctgcgcttcacgccggaaggcgtgcgcccgctgctggccggcaacaccatcggctccgacaagaagttcctcgaccactacatgccgggcctcatgagccacctgcattaccgcagcgtggacgtgagcaccttgaaggagctcgcccgccgctggtacccggccgtctacgagaaccgtccgccgaagaacggcggccaccgtgccctcgccgacatcatcgagtccttggacgagttgcgctactaccgtaaggccttcatggcccccgtccccggcccggatgatgccgcctccaaggccatcgccgccgacatcgtggccaccagcattctcaataagtagtccgccgtacttggctcccctccctgaggggagtctagagaggttgatatgcgccaaaccgaagccctagccattctgaacgccggcgcgaacgtgtttctgaccggtgcgcccggtgccggtaagacctatgtcttgaacgagttcatccgccaggctcgggccgacggcgccaacgtggcagtcaccgcgtccacaggcatcgcctccacgcatatcaacggccaaaccatccattcgtggagtggcgtcggcgtggccaccgccctgagcccgagtctgctcaaactcatcaaatcccggcgcaaacgcaagattcaggctacggacatcctcgtcatcgacgaggtctccatgctgcacgcatggctgttcgacatggtcgaccaagtctgccgcgaagtgcgtcgcgacccacgcccgttcggaggcatccaggtcgtgctgtccggcgacttcttccaactgccgccggtttcggtgtccgggcgcaaccgcgacctcatcgcccccacccccgaattcatcgccagtcgcgaacggtatgcccgtgccggcttgaaccccgaaggcttcatcaccgaatcgctggtatggcccgaactcaacccggtgatctgctatctgaccgaacagcaccgtcaggacaccggcgaactgctgaccgtgctcaccgacattcgcgaaggcgacgtgacccagtccgaccgtgacgtgctcgtcacccgtctgggcaaactgcccgagcccggccaggtcgccgtccacctattcccggtgaaccggcaggccgacaatctcaacgacatgcgcctgaaccagatcatgcttgagccgcacgagttccacgccgagacagcaggccctgccaacctggtcgaccgactcaagaagaacatgttggcccccgagcgactggtactcaaggaaggcgcggctgtcatggccctgcgcaacgacaccgatcgccagtacgtcaacggctcgctcggcaccgtgcgcggcttcgcgcaggagaacaagggcggctggccgatcgtggaattcgaaaacggcaacatcgtcaccatgaaacaggccacatgggaaatgatggacggcgacaccgtgctcgcctccgtctctcaagtgccactgcgttgcgcgtggggcatcaccatccacaaatcgcaaggcatgacgctcgaccgtgcggtcatggatctgaagcgcaccttcgcgccgggcatgggatatgtggcgttgtcccgcgtcgaatcgctgggcggactgtatttggctggcgtcaacgaacgcatgttcctcgtctcgcccgatgccgtggtgctcgacggcgacctgcgcgaagcctcggcctcggcttccgaccagttggccgatgaaggtgcaagcgcgttcaaacccgccgagccggacgaattcggtgccaatcccgatgatgacttcgcccaggacgcgttattctgacggtcgatatatcgaacgaccgctaatttgagtgtttctgcacttcgaggggcggattttgagttttcgggacatctacttccgtttcaaggggctgatgtccaagtagacagcgcttaaaaacggcggaatgacgttggtatgaagccgtttctatgtgcgattgagcggatgaccagcccctcgaaatgcaagtagatgtctccaagaggcggaatcggccccttgaagccgaagaagacactgcgaacttgtcttcattgaggaactgaacggctaccatggaataagaggtggtagttatggtgctatccgagatatttcgtggaaacaatgaggttcgcgaggccgcccgggccggtgtgcaaatcgatacggttagtgtggctagtgcgtcagatgcagcaagcgcggcagacggcagcggcaaaatcactggcgcaatacgtccgccagcggtggctggttcgttctaccccgctgaccgcacaacgctcaagcaactcattacccatcaattggattacagtcgagaggttctgcaacagttggagcccacacttccagcgggagtgccaaaggctgtaatcgtgccgcatgccggttatgtgtattccggcacggcggccgcgcttgcctatgctttgctcgaacgagggcgggggagtgtgactcgcgcggtaatcgtgggaccgactcaccgtgtggccgtgcgaggcgtcgcctgttccacggcagcggcgtttgaaacgccgctgggcactgtgccggtagacattgcagccgagcgtaaggctctgggcctgtctgtcaatgagccattgcgctccggtacacatgcccgtccgggcgcgtcggctcccgcaatgatcgtcaatggcccaacccacgcacaagaacatgcggtagaagtgcagattccgttcctgcaaaccgtgcttggcccagacctcactattgtgccgttgaacgcgggcgatgccacgccacaagaggcgggtgatgtgttgcgtgctttgtggggtggcccggaaaccgtcatcgtgattagttcggatctctcgcactatcatccgcacgaagtcgcccgcgcgttggatgaccagaccattgcggacattgcggctttgcatctgccgattcaccctcgccgggcctgtggcgcatacccgatcaacggccttctggatgtgttaaaaggccgcaaggacatgaagctcttcgagctcggctgttccacttccggcgacgacggcgtggtggcgcttgccggccaacctcgccccgcaatgcgagacgccgacgagccggtagtgggatatgtctcgtttgccgcgtgggaatccaaaccagaagcagatgctccagccggtgcagatgacttaggcgaatcgggaacagcccatggtgatgtgctgctgaaactcgcccgtgccgctatccgggaacggttgcatatcgagcatccaacagccgccgattcgaccgcgtccattcttgccgcaaacccatggctgaacgagtccggtgcctgtttcgttaccctgaccgagggtggccggctacgcgggtgcatcggttcgctggccgcccaccgctcgctcggcaaggacgtgaccgagcacgcagtggatgccgccacccgcgacccacgtttcaacccggtcaccgccgcggaatacccgttgctcaacgtggaggtatccgtcttgggcgcgcccgagccgattaccgcgaactcctgtgacgccgattcgcgcgataccggctcgaagaccgcgactctggcatcgctgcaatccggacctcagaccgacgccgtcaaacgggacggcagcaacgtcgaacgcccggtacgttcgcgcactgaacttgaggaagtattacgccccggcaaagacggtctgattctcgccgaccgtcgtggctgcagcgccacattcctgccacaagtgtgggatgagctgcccaatccgcacgatttcgtcgctcacctgctcgccaaggccggtatccgcccgtcctacgactggaacgatggtgaaatcgactgtcaacgctacgaggtgaccgcctatgccgagcactaacgcagcaaccatgtcccctcccgctggcgggaggtggcacgaagcgacggagggtggtcaccgagaatcagagggtggtcaccgggaatcgtgcggtcatacggcgtcagtcacggatgttcgtaaccccgccatagcccgctggcaaacgcaattccacgacggtaccaaccgcgctcgctgcgaactatgcccgcgccgctgcgtcctcaagcccggccaacgcggcttttgcttcgtccgctcaaaccacgacggactcatcgtctccgacacctacggccgcagctccggcttcgccgtggacccagtggaaaagaagccgctcaaccacttccaccccggttccagcgtgctgagttttggcacggctggctgcaattccggttgccgattctgccagaattgggatattgccaaagcccgcagtttcgaccggctcggcgtggaagccagtccggagaaaatcgcgcaggtcgcggccgaccggggcatcgattcggtggcgttcacctataacgatccgatcgtgttcgccgaatatgccatcgacacggccgaagcctgccgagcgctcggcattcatcccatcgccgtgactgccggatacatgagcgccgaagcccggcccgacttctacgccgccatggacgccgccaacatcgatctcaaaggcttcaccgaagaattttattggaaagtgaccggcacgcatctggccgatgtgctcgaaaccatcgactatgcggtcaacgaggcacgcacaccagaaggcgaacacgtgtgggtggagctcaccacgctactcatccctggactcaacgatgacgacgcccagctgcatgctgaatgtacatggatacgcgagcacttgggcccggacgtgccgctgcacttttccgcattccactccagttaccgcatgatggacgtaacgcccaccccgcacgagactctgacccgcgcccgaggcatcgccctcgaagagggactcaattatgtgtacaccggcaacgtgcatgatcgtgaaggcgataccacatattgcccaaaccctgaatgcagggccaagctcgtggaacgcgattggtatcgaatcattgccaaccgtttatctgccggatacagtggcaatgggcactgccccgtatgcaggactgctatcgccggacgttggtaatctgcctcaggtcgcccgcgcgatttagcgcagatcgccaatacgcgcggcgatcgtcctcattgatttgaggctcgcctcatagcgcgcggctgccacaatcagaatgatgccgcccaaagcaagccacacccaccggtagtggcgggagaattcggcccgccatggccacagcacagtcaccgtgctgacgataagaatcaccgtgccgtagatcaacggtgcttgcagcaaacgcacacccacaatcagcgcggccgctctgggtaggccgattgttccgggaccgacataggcgattgcacaaatggtggcatggccattggctgttgcgataccggttgtcgcggaactgccgttgggaattgcggggttgcagcagaaaattgcggggcccatgctgggccggttgatacaccggttgctccgcgggttccggctgattcccctgttgctcggtcggctgcgtcatcgtgccctcctacccttctagccatcattgttgtacgaatgagtccgaatgccaagatgaaggccggaatagtgcgaatagcaggcgggcttgtcggttcacgcgaatatcttggaacacatgacttccaatacccttcgtatgtcaaccatgttcctgcgcaccctgcgcgaggaccccgctgatgccgatgtcgattcggccaagctgctgcagcgcgccggctatatccgcaaggccgcacccggtatctggacctggctgccgctcggtctgcgcgtgctgaacaagatcgaggccatcatccgcgaggagatcaacggcatcggcgcccaggaagtgcacttcccggccctgctgccgcgcgaaccctacgaggccacccatcgctgggaggagtacggcgacaacatcttccgtttgaaggatcgccacgaggccgattacctgctggcccccacccacgaggagatgttcacccttctggtcaaggacatgtactcctcttacaaagacctgcccgtcaccctgtaccagatccagaccaag

SEQ ID NO: 1521 - DNA, 12037 bp, Unknown
  R257_15m  MAG No. k141_51508
caactatgacaggtctcgtcaccggcggctgcggctacttcggcgcgcatgtcgttcacgcacgccagcaggccggcgaaacggtcggcgtcgtcgacgagctgagctacggcacgcccacccgcatcgaaggctcccgtctgtacggcatggatatcgccgctccgggcgccggcgagcgtctggccgaaatcctcgacgccgaaggcgtcgactccgtgatccacttcgccgcgcgcaagcaggtcggcgaatccgtggagaagccgctgtggtactaccagcagaacatcaacggcatgctcaacgtgctcaccggcatgacccagtccaagaacgccaagaagctcgtcttctcctcttccgccgccacctacggtgtgccgccggtcgatgtggtgcccgaggacgtcgtcccgatgctgccgatcaacccctacggccagaccaagctgttcggcgagtggatggctcgcgcctgcgagcagccgttcggcatccgcttctgcgcgctgcgctacttcaacgtggccggctgcggcccggtcgaactcgaagacccggctattctgaacctcatcccgatgctgttcaaccgcctcaagcagggcaaggcccccgccatcttcggcgacgactacccgaccccggacggcacctgcgtgcgcgactacatccacgtctccgacttggccgacgcccacatcgccgccctcaagtacctcgaccgtgacgagcgcaagtacgacgccttcaacgtcggcaccggtgaaggcacctccgtgcgccagatcgtcgacgaagtcaagaaggtcaccggtctgccgttcaccgaggctgtcatggcccgccgcgccggcgacccgccgcacctgatcggctccccgaagcgcatcaacgaggagatgggctggcacgccaagtacgacgtggaagacatcgtcaagtccgcgtgggatgcctggcaggccaaccccgaacaccatatcgacgtcgacacctggaagcaggctgactgagattgacgattgctttgcggtggatgccgtgaagtgcttctgttcataagggcgtgaccggggttccggtcgcgcccttcgtcgtttgtggatgtttatggcagacgtgtccgtgtgctggtgatagcaaaaaccttgaaattacgcggaacacgccgaaatttgcacgaccggcgaatttcagtaatatatacatctgttgcctcacgcaagtgagaacaatggccccgtagctcagttggttagagcgccgccctgtcacggcggaggtcaccggttcaagtccggccggggtcgctggaatggttatgaaacccggattatccgggtttttgactgttcatggctctgtagctcagttggtagagcgagcgactgaaaatcgctaggtcaacggatcgacgccgttcggagccaccacaatgaagccccgccttgtgcggggcttttgcatatccgtcacgtacctactccggcgggctggccagtcaatgcaaaggctcgcgttcgccaacaactgtcctcctcgccgcaactacgcacgccaacagcaccaatgcgaacatcgggttagggttaaataaagaaacgtgggtcttatccgcgcgtgtcatggtcggtgcgatcgtccgccccagccgtttctggggctgtggcgctcatagagtcagtattgcagaaaaagcacctgcgaaatgcgcgtgcgaagggaatcgtgtgggacggcacgtgattttgccgattttcgacgtgccgtcccacagcgttcgaagaacgccctcagagctgagggcaaagaacggctctattctgcggttctcggcttatgtcatgcgggatagcagatacgtcaaacgattgatgtatctgctatcccacacttctgtgggacggcagatgaacaatggtaaaaaccgcgtgccgtcccacagaaacggagtcaggcctgccaccattggcgcagagggtaccacttgccgtccgggtggcccacgcgatccggcttgacggccaggaactggtgaatctggatgccgtcgagctcgaagttcagagcgcaggcggccatgtacataccccataccttggcgcgttcaaagccgacctgcttgaccgcgtcgtcccaatgctcggagaggttctggttccagtgatgcagggtgagcgcatagtgctggcgcaggttctcctgatgcaccacgttgaagccggcgtcatggatgcacgattcgatgaagccgggcgcgccgaggtcgccgtccgggaagatgtaacggtcgaggaattcgtcggtgccgggcttgccgtgaggcttgtcatggctgatggtgatctggtggttcagcagtcggcccatcggcttcaggagacggaacatctcttcgaagtagctctggtagttcttgacgcctacgtgctccatcatgccgatcgagcagataccgtcgaagtcatgctcgggcacctcgcggtagtcctgtacgcgcacttcggccagatcctgcagcccctcacgggcgatccattcgttggcgtacgcggcctgttccttggagagggtgacgccgagcgccttgatgccgcgacgggcggcggtgatgaccatcgaaccccagccacagccgatgtccagtaagcgctggccgggttgcaagtccagtttgtcgagaatcaggcgcagtttgttggcctgtgcgtcttcaagactcatgtgctcgttgtcgaataccgcgcaggtgtacgtcatggaggggccgaggaagtcggcgtagaactcgttggacatgtcgtagtggaagctgacggtttccgaatcggccttttcggtgtgcggcatcaggccacgcttgatgcgggcgaacttgcttgggccctcggtggcgggcaccggcggcttcttgaagccgtgactcagaatgccggcggatacgcgggcaatggatgcgggagcgagcgggcgaacgtatttggccagcgacaccagcttacgcatcgccggatacgggtcggcgtagtcaatgtcgtccacgtcgaaatcgcccagaatgtatgcgcgcacgatgccgatttcattcgggtgcgcgagcagctggtacatgcagttcggcgcggcgattttgaccttcaaatccgcgtctgccgggccgaaatgcgagccgtcaaaagcgtcgatacgaacgggagtgtcggggtcgagaaacagggacgccatctcgccgaccgtcatagccttgccatttgccattatctgcctcattctcttatgatgatcaccccaattgtcgaggtatcttagtcctcttcaagagactgaaaccgttgaatacaccatctggtgaaccagttcgcgttcggctgatgaaacacgaatggaattaggcatctcgcatattgattgtgtacgcgcgaagtaagcagataagagacgagtttctcggagagcaccaagcgactccggaaaatggtcttatcgttgagatctcgggcgattgaactggtttggtcaatggacaataattcgacaagtgcggaattccgccatttcttgccattattttcagtgttgttctttcagcgtgttttcaggtgaatgctcatgcgcggagtagactggggaaccgttggaccactcaaagagtgagtggaccaccagttaagacactagctcaaaaggagagtccctatggtataccgcatgattttcaaccagactgcatacttcggacgtggcgcgatcaaggaaatcccggccgtcgccaagcagcacggcttcaccaaggcatttatcgtcactgatccggtactgctggagaccggcaccgccgagaaggtcaccaaggttctggatgaggccggcctgccgtacgaggtgttctccaacgtcaagccgaacccgccggtcgagtgcatcaaggacggcgtcgccaagttcgccgagtccggtgcggacttcctgatcggcctgggcggcggctccccgcaagacacctgcaagggcatcggcatcatcaccgccaacccggagttcgccgacgtgctgtccctggaaggcgtcgcggataccaagaacccgtccgtcccgatcttcggcgtgccgaccaccgccggtaccgcttccgagacgaccatcaactacgtggtcaccgataccgccaacaagcgtaagttcgtggctgtcgacccgcacgatatcccgatcgtcgccttcgtggacccggatctgaccgactccatgccgcgcggcctgaaggttgccaccggacttgacgccctgacccacgccatcgagggttacattaccccgggtgcctggagcctgtccgactgcctgtccatgcagactattcgcatgattgccaagaacctagccaagtccgccgacggcgacattccggctggcgagcagatggcgtacgcctcctacatcaccggtatggcctactccaacgtgggcctcggtctggtgcacggcatggctcacccgctgggcggccgtctgggcgtggcccacggtgtggccaacggtattctgctggccccggtcatggaatacaacaaggactacacgggcgagaagtaccgcgacatcgccgacgcgttcggcgtcgaggacgcctacaccggcgacctggagaaggtgcgcgaagaggccgtgcaggccgtccacaagctgaccgtggatctgaagaacccgaccacgatcagcgaggtcggcgccaccgaggctgatctggaaccgctggcccacgacgccttcaacgacgtgtgcacccccggcaacccgcgtcaggccaccgaagaggacattctcgcgatttacaagtcgctgatgtgatcagtcgatgacggtaaacattagctccctctgatgagggagctgtcagcgtggctgactgggagagaagttgcggcgtagccgctgaataataggtatcggcctgcggccgattcaatgttttagcggctgcgtcgcaatctctccctcagtctcacttcgttcgacagctccctcatcagagggagcttgcataagcagagggggctcgtatatccagctacttttcgtgcttttcgtcgtagacttcgtcggtgggggtctcgtcgtacagctgcttgccttgcgcctccgccagtttcatctgctcgttgatccacgcggcttcagcaggattgatatccgcggaattcagcactttctgccacaccgggtagaacatatgcatcgccggatacatggcggtgaacaacacctccggcttatgcgtgcgcgtatgttgcggatgcgcatcaaacgtattcttaaaacgtcgcatgtagttcaggaatgaactcagcgacgtgtccatccgtcgcgcgctcatcgcggcgatcatgcgcggcgagtacacggttttcagattcttgcccatcagatgcagggaaatatcgatatcctcgtgcatcacatcggccttatctcggcagacctcattcgcgatctgatgccaggccgaagcgcgcaaggccatattcgagccgaacagcagcggctggccgccatcggcacggtagattcgcttgcgtaaggaattgtcgcctttcaacccgaaatgacgtgagggcatgtcgtaatacatcaccggaccagtggcacccatcgcggccgggtcttcggtgaagatgccggagaccacctccacccagtcaggccggatcatacagtcggcgtcaaaacggcccagcacatcgccggtcgcggcgttcaggccaaagttgcgggtgggaatcagcccctgttcatcgttctggtgcaacagtttgaccggggcctcgggatgttcggcgatgaactgttcgacaatcgcgcaggtgttgtccgtagaacgattgtccaccaccagcacctcatgcggcatgatggtctggcgagtggcgttcagcagacagtcgcggatgcgttcggcttcgttccacgctgggatgatgatcgaaacgttgagcataacatcaacaatagaaaagcgggtgtacgccgccggcgtatccgagcttcaaacccctcgctacaatggggagccatgagcgaacgcgcgcgaaacataaacagcaccgacacgtcgagaagcggtgccgcagaagccggggcagacccggacgacgagaatcgtatcgactttggtactttgttccccgccaagggagattcccgcaggccaccggaatggttcggccgcgcgctgctgtatgtggccctcgccgtcatcgtattcatgttctgctggcgctcgtggggcgacatctcctatctggtgttcgacatcatcatctcgctgttcctggcgctggccgtcgaaccgctggtggtggcgctggtggctcatggctggaagcgtggcgtggcttccgccgtcagtctggtgggcgtggccgtggtcgtgggtgtgctgctcacgctgttcggcaatatgtttgtacagcagatgattgccatggtccgcggtttgccggcaatgtatgggcagattcgtgagttcgtggaccagcacgccacgttcaagatgccggaaatcagcaatcttggcatggaaatcttcaacaatatccagacctcgtgggtcaccgatttcgccggcaccgccatgagtacggtgggtggcctgttctccttcctgctgaacctcatgaccgtggtaatgaccacgtattacatctccgccgccggcccaaagctgcgccgctccttctgccagtggctggcccccaacacgcagcgtcgattcctgctggtgtggaccgtggcccaaggccagatttcgtccttcctgttctcccgttcgattctggcgctgatcaacgccacctgcaccgccatcttcttggagatcctgcatgtgccctactggctgccgttggccctgttctgcggcgtggtatcccagttcatccccacggtcggcacctatatcggcggtgcgctgccggtgctgttcgcttggggcaaccgcgggtggacgtacgccgtggcggtgctggtgttcatcatcgtctaccagcagatcgagaacctgattctctcgccgaggatttcgcagcgcacgatggatatcaacgcggccgtcgccttcctctcggtgctggcgttcggctcgctgttcggcgcattcggcgcgttcctggcgctgccggtcaccgcatcgctgcaggccatcttccgtgcgtacaccaagcgctatgagctgattgactcaccgctgatgaacgatccgactccggagaagaagtccaagatcgtcgaggcgtccgaggcgttcggcgagcacgtattgcagccaatcggcgagcacatgccgcgtgcggccaggggatccaccaaccgcgtgccgatgaacgaggaactgcgtttgctgcaggaacagatctatgcgattccgtcgcacgagacgaaagaatccgatttggacgattccgccaccgtggcgattccgaagaacgtgctatcctccagcgctcgcaagggattacgcggcactgagccggatacggcggcgattccgcagcgtggtgccgcggatacgcagcagtctgagcggcccgagcagcctgagcggtccgccgaacagcctgagcagcccgagcaacgcaagcaaaccaagcagtctgatcaatctgcctccagcaatcctagggcagggtggcgctgatgactctgctttccgtactcgatattcttctgatgatcgtcggcggtgccggcatgatatatcagggactgtgcatcgtgatgtccctgttcgccaagcccgtgcgcttccccgacgccccgatgaccaaccggtatgccgtgctgatctccgcgcgcaacgaagaaaaagtgatcggcaaccttattgggtcgattcgcgatcagacctacccgtccaacctcatcgacatctggctggtggccgacaactgcaccgacaacaccgccgacgtggtgcggtctttgggctgccatgtggtggaacgccacaatcttgagctggttggcaagggatatgcgctgacgtatctgttggggcatatgctcgacatcggtgtggccgatgattatgaggcctacttcgtgttcgatgccgataacaagctggacaagcactacttcgaggaaatgaacaaggcgttctgctccggattcaagattctgaccagctaccgtaattcggtgaatctggcggataactgggtgtcttctggttctgcgctgtggttcatccgtgaatcgcgattcctgtctaactcgcgtatgattctcggttcctcttgccatgtgggcggtacgggattcatgttctcccgcgaggtgatgaagcggaacaagggatggaagttccatctgctcactgaagatcttgaattcactatggattcgattctgcatggcgaccgcatcggctattgcggtactgcgattctctacgacgagcagccggttaccttctcgcaaagttggcgtcagcgtttgcgttggagcaagggattcctgcaggtattccgttattatggctcggcattgctgaaacgcgcggttcgcgaacgtgatttctcctgcatcgacttcaccttgatgctgtgtccgtttaccgtgttgggcgtgattcgcgcggtaatgggcttgctgttcgccgcgtgtggcttcgtgagttggccgagccagctgcaatcgctggccagttggtccagtggcatcatcatatcggtgttgggcctgatggcattggctgcattgaccatcattgtcgagcgcgaccagatcggtgccacgaacaaggagctgctcgcctatgtgctcagcttcccgatttacattctcagctacgtgccgatctccttccaggccctcttctccaaagcccagtggaagcccatcgcgcataagggttgaccgagtccgctagttggagctgctcagcggggcaatccaacagcaacccgggggtttgcttcgctgagggttggctggtggggtagagtggatgtatgagcttagacaatactcaaaggaatgtcggatttcagccgccgatgatgccagctgccgcccccgcgcctgcacagccgtcgcaaccgcagccacaagcatggccgccgaatccgaatgcggcggtgtccattcgtggcctgttcaagcacttcgaccggaagatcgccgtcaacggactcgcgctcgatattccggtcggctcgttctatggacttgtaggccccaatggcgccggcaaaaccaccacgctcaatatggtgaccggtctattggtaccggacgccggcaccgccatgattttgggccatgacgtgtggagcgacgtgaacacggccaagcgcatgatcggcgtcatgccccagcccgaccagatcctcgaccgactgaccggtttgcaattgctcgtctactccggcatgctgcgcggcatgagccgcgatgagaccacgcgtcgcgcccaggacctgctcaatgctttcgacttggccggggccgccaacacgatggtcaccgattattcggccggcatgaccaagaagatctgcctggcctccgcgatgattcatagcccgcgcattctggtcctggacgagccgtttgaatccgtggacccggtgtccagcgccaacctcaaagacatcctcatcgaatacgcgaagaccggcggcacggtgattatctcttcgcacgtgatggcattggtcgaaaagatgtgcacgcatgtggccgtaatcaacaacggtctggtgtgcgcggccggcacggtggacgaggtcgccgccggcgaagaactcgaagaccgcttcctgcaactggtcggcggccgccacgaagccgcccatctcgcatggctcgacggcgggcaagcccaagcccaagcaccaacttcggtccagccggtccagcccattccgcttacaaccgccacgcccgccatacccaccgatgaggcccgccgatgatcagcagcgccatcaccctggtccgcctgcgctggacgctcacgctcgccaccctgcgaaaatcggcgtggcagaccgtcgcctatgtcttttccgccgtactcgcggccggcaccatcatcggcaccggcgtgctcgcatggttcatcggcatactgccgcccttcaccgtgaacgcggatggctttccgctgaacatccttggttccggaggcatcgtcaacatagtcgtcgtgctggtcggcgcgaccatgaccatcttcatcggcttcatccagctcatgatgcttggcgaaggctccaccatgaacccacgcaaattcgcgctctacggcatcgccgaccgcaacctgcaattcggcttgctgctttccggcctgtccggcatccccgcccttaccggcgtggcctcactgatgctctggacactggcctatcggcatatgggaccagccgtaatcatcagttccctcctcgccgcagtgctggccgtcatcaccatgatgagcatctccaaactgctcatcgccctatccaccacgctggtgaccagcaaacgcggcaaaggcgcgttctatatcttcatcgtgctgacgttcgttatcatctgtcagttgccgaacattctggtcaactccggcgtggccttcagcctcaacaccgaaacctggggcgcggcgaccaccatcgtcgcatggacgccgttcggcgcggccttccaactaccgttcgacgcgcttaccggagcctgggcggtgctgctcgcccgcatcgccatccttgccgtcacatggattgtctgcttcgccgtctgcacctggtgtctgagacatgaacggctcaccatcggcgcaaacagtccgtccgagaccgccaaaggcatcggcgcattcgcatggatgcccgattcggcatccggcgcggtttccgcacgcctgatcacctatctcaaacgagacccccgtcaagccatgaccttcgccatgccggtcctgttcctgatcatcttcgccttccaggcacacggcatcagcgcggtcgtctggcagtcgctgatctggtgcggctggttcatgtccgtcgtggaaagcaacgggctcgcatatgacggccgcggcttcaccatggaagtcatcgccggcgtgcgtggccggaccgacagaatcggccgcgtacgcgtctacgtcggcatcatggtcgtctacatggtgctgctctatctcgccggcatcgtgctggtcggcgcactgaccggacgctgggcgcagcccgatgacctcgctaccggcctgatcttcctcgccacgggcatgggcatcgccttgagcggactgggcgtggccgaagtcacctcctgtgtactgatgtacccggtcgcctcaatggacaagccgttctccgcgcctcaaggccgcgccatggcccaaggtttcttcccgttcgtctacatgcttggcagcctgctgctcatgctgcccactggcatcgtggcgctggtcatgctgctgacaggagccgaaggcggcatgtggctggcgattattccggtcgcgctggccaatggcatcggcattctggcactcgggacatggctgggcggtaagctgatggatgcgcgaatgctctcgattgtggcaacactcgactcgttcgcctcattgcagaaatgattgccttggcataaggagcacgatggtatctacagcggtatcacgccgtcagcgacgtgaagcgcaacggcggacccaacgatcgcatcgccgaacactgaccgtcatcatttccgcactgaccaccatcgccctgttcgcggggtactgcgccgccgacatcaccgacgtggcccccggattgttgacgttaaaacctgtcaccgcacctgttttcgccaatccggccaccgccaaatcaggcggcaccatcgccggtgccctgaacgcgaacaaggccattgattccacggccgcttctgcactggtcaacgaattgctgtccgcgcaaggcgtgggaaacgatacgtcggtgatcattgaagacgcccaaggcaccgtcgc

SEQ ID NO: 1522 - DNA, 15063 bp, Unknown
  R257_15m  MAG No. k141_52030
caacgccaacatcgacctggcccgccgtggcgccatcgcccgctcgcacaccgccacgcacatggtgcacaaggcgctgcgtgaggagctcggcccgcaggccacccagcgcggctccgaggacgccccgaaccgtctgcgcttcgacttccagtggtccaaggccccggccaagtccgtgatctccgcagtcgaggagcgcgtcaacgacaagctgcgcgacaacctcgccgtgaccaccaaggaaatgaagttcgacgacgccatcgccctcggtgccatgcacctgttcggcgagaagtacggcgacatcgtacgcgtggtctccatcggcgaagacggctggagccgcgagctgtgtggtggtacccacgtggaccacgtcggcaagatcggcatggtcaacatcctgtccgaagcctccatcggctccggcgtgcgtcgtgtcgacgccgtcgtgggccagggtgcctatgacttcaacgctcgtgagcacgcgttggtctcccagctgtccgacaagctcaacgctcgcccggacgagctcgccgagcgtgtgaacgccctgctcgccaagctcaaggaatccgatcgtcgcttggcctccatgtacgagtcccagctggccgcctcggttccggcgttggttgctgacaccaagaactccgcggccccggtcaaggtggccgtcaagaacgtgggccacttcggcgcggtcgacgccctgcgcaagaccgtactcgacgtgcgcgcccagctcggtgaagacgcccccgtggtggtggccctcgccggcgtgaacgaggatgacaagccgatggtcgccgtggccaccaacgaggccgcccgcaaggtcggcatcaaggccggtgatctggtgcgtggcgcagccaaggtcctcggcggcggtggcggcggcaagccggacttcgcccagggtggcggtgtcgatgcctccaagatcgacgaggccctcgaagcgctcgagcacgaggcgcagaaagcctgattccgtcagtggtgtggttaggcgttgatttgggtaatgcccgggtcggactggcactgtccgacccggagcttacctttgcacaccctgctggcaacattcatgttgccggcgactatttctttgctattgacgaggtcctgaacgtcatcgaagacgaacatgtggaccatgtaatcgtcggactgcccctgcagatggacggtacagaaggcaaaagcgccaaaaaagcgcgcaggtgggcggccaatctggagaagaggctgcaagcagagagtgaagacagtgattctacggagtatcagattccgcaggtgtcattgatagatgagagattgacaacagtcagtgcgcatcgtcaactgttcgaggcccataaagcttcgaacaagcacaggccggtggttgaccagcagtcggcagtggtgattttgcagacggcactcgaccgtacccgggagcagtgaggtatcggttatgaccgatgattttaacgagttctttgatgacaacacgcattgggtcgaacaggggtcagaaccaatgcgcgggaccgagccgccagaaccgccgaaatcccgcaaggagatgcgcaagcgacgtgcacagcgcaagcgcaagcgcgtcagtggcattatcatcgctatcgccatcgtcgccctgcttatcggcggcggctatttcggcgtaaccaagctcatcgcatggcgcgacagccggagcaaccagtcgacggccatcgcggactatcggggaccgggctatggcgaggtcgaattcaccgtgagcgagggccaaggcgcggcggagatcgccgataatctgctcaaggccgaagtcatcaagtctactgccgcgttcaccagcgtggtcaacgccaatagcgcgacactctatccgggaacgttcacattgaagaagcatatggccgcatccgatgtgatcgccgttctctccgacaccaaccaggcggcgggcttccttgaggttcatcccggtgaacgtgctaccgatgtgttcgccgacgccgcgaagctttccgacgttgcccaaagcgaattcgacacgattatcaagaacaagggtaaggatattctgcccaatgaagcgggcggtagctttgagggatggctggagccgggaacctacaacgtcaagagcatgaagagcgcttcggaaatcctcaaggccatggtcgataagcgtatcgccaagttggatgaattgggcgtgccgaccggcagtgaccgcgaacgggtgatgatcatcgcctctatcgccgaggccgaggtcaacaaagccgattactacggcaaagtgacgcgagtcatcgagaaccgtttggagcagggcatgtcgttgggcatggattccaccgtggcctatggcaataacgtcaagcccgcgcaggtgaccaccgagatgacccaagacgagtccaacccgtacaacacgtacaagatctccggcctgccgcctacgccgatcagcaatcccggcgatagcgccattcaagcggcactgcaccccgaaagcggcaattggctgtacttctgcacggtcaatctggacaccggcgaaaccaagttcgccgtaaccgccgatgaacatgaccagaatgtggccgaactacgcaagtggcaagccgaaaaccagtagtcacctcattggctcccctcgccgaggggagctgtccgcaaagcggactgaggggagtaatacgggattaagccccaacaaccactgccacaatcgcgcccgccaatatcaccggcacatacggcaccttgcccgcatgtgccggtgatgtgcgttgtgggtcgaatcgcgtccacaaggcaatccatgtgatgccggcaacgcccatcgccagccaccagaccaccacaggcaacaggccaagccgtccgacagacaatcccataggtatcaaggcggtcacatcgccgaatcccaatgaccgcggcaccagcaacgccaacgcgaactggatcaggcaacatagcacggtgaacaacagtgcctgcaacagcacgaacaggtcgttcgccaccactccatacgcgaaatcggcggccaactggattaacgcgcccacggccacccatgcgatcggcacccgccgatgacgaacatcctcaatggacagtgcaagcccacatagcagaccgggtagcgtgaacaggtatggcatggcttaacattaacccctagttagacgtagtcatagacgtacacacatgaaacgagggaagttatgctgcgttggcagacggcaggggagtcgcacggagaagcattggtggccatgattgaagggttgccggccggcgtgcgtattagcacggacgatatcgtttccgcactggcacgccgtcgacttggatatggtcgcggtgcccgcatgaagttcgagcaagacaaggtccgtctgctgaccggtgtacgccacggcctgaccctcggctcgccggtggccatcgaaatcgccaacaccgaatggccgaagtggaccgaggtcatgagcgccgatgcactcgaccatgacctgccgcgcgaaggccgcaatgcgccgctgagccgcccgcgcccgggccacgccgatctgaccggcatgcgcaagtatggttttgacgacgcccgcccggtactggagcgctccagcgcccgtgagaccgcctcccgtgtggccttgggcgaggtggccaagcagttcctggatcaggcgttcggcatccgcaccgtagcccacgtggtggcgctcggtggcgtgcagaccaaccctgatttgccgttgcccacacctgacgatctggaagcgttggatgcctctcccgtgcgtacgttggataaagaggccgaggcccgcatcatcgaacgcatcaacgaggccaagaaggccgccgacacgttgggcggcgtgattgaagtgctggcttacggcgtgcctgccggcatcggcacctacgtggaatccgaccgtcgtctggacgcggctctggcctccgcgattatgggcattcaggcgttcaagggtgtggagatcggcgacggcttcctggaagcctcccgccccggttcgcaggcgcacgatgagatcgtggtcaacgccgacggccgcatcgaccgtctgtccaaccgcgcaggcggcattgaaggcggtatgtccaatggccaggtgattcgcgtacgcggtgccatgaagccgattccgtccatccccaaggccctgcgtacggtcgacgtgctgaccggcgaatccgcacaagccatcaaccagcgttccgacagcaccgccgtgcctgcggcatccgtggtggccgaggccatggtgcgtctgactttggcgaagtacgcgctggataagttcggtggagacagtgttgccgaaacacggcgcaaccttgagtcgtatctcgcctcgtggccggagcacatgcgctgaacgaagtggagtatggttccgagacgactgccgcggaaccatcagcaactgtacccaccaatcgtcgagaggattcgtagattatgaccgcacgcccccgcgccgtcatcatcggcatgatgggagccggcaaaacacgtgtcggtaaggaagtggcgcatatgttgcgtctgccgttcgccgatgccgatgtggagatcgaacgtgaagtgggcatgaagattcccgcctacttcgatgaatacggtgagccggcattccgcgaggtcgaggccgatctcatcgccgatatgcttgaggatttcgacggtatcttttcgctgggcggtggcgctcccatgacgccatccacccagcatgccctcgcctcatacatcgaccatggcggtcgtgtggtctaccttgacgccgatccggcggaggccatggaacgcgcgaaccgcgggggaggccggcccatgctcaatggcaatgccaactcccgttggaagaaactgttcaagcagcgtgacccggtattccgcgaggtcgccaacgttcatgtccatacccgggggcttacgcctcagggcgcagcgaagaaagtgattgatatggtatctgagcgagcagtgcatgttaccggatcggcaattgagccgtatgatgtggtcattggcgaaggggccatgaatcatctggtcgacgtgctgggacccaagcccgccaaaatcgcgcttatccatacccagccggtgcagcgacactccgatcgtgcccgcgccctgttgcgtcagggcggctatgaggtttccgacatcgtgattccggatgccgaacccggcaagaccattaccgtggccaacggcatttgggaacgccttggcaacgaaggtttcacccgatccgatgccgtggtggggcttggcggcggtgccgcaaccgatttggccggttttgtggctgccacgtggatgcgcggcgtgcgctatgtaaactgcccgacctcgctgctggccatggtcgatgcctccaccggtggcaaaaccggcatcaacaccccgcagggcaagaacctcgtcggctcgttctacacgcctgccggtgtgctggccgacaccaagacgctggctacgctgcccaatgacatcttcattgagggtctcggtgaagtcgccaaatccggtttcatccgcgaccccgaaatcctgcatatcctcgaagaccacgcagctgaactgcgcgctttcgacggctctacattcctcggctcgccgctcgaagacgtggttgccgagctcattgagcgcacggtaaaggtcaaggcctaccacgtctcctccgatttgaaggagaagggtctgcgtgaattcctcaactacgggcacacgatgggccatgccatcgaaaagctcgagcacttccgctggaggcatggcaatgcggtggccgtcggtatggtgtatgccgccgagctggcccatctgatcggttacatcgatcaggatctggttgactatcaccgttcgttgcttgcttcgctgggtctgccgacgtcgtggaatggcagctcgttcgacgacgtgctcgcattgatgcatcgcgacaagaaagcccgtggcaacgaactgcgtttcgtggtcctcgacgagattggtcacgtcgtacacctcgacaacccgcccgccgaagccgtagaagaagcattccgtcgtatccagcagtaattgaacggccgtaggccgtgccgttcgccatcccctcagaaaaagtacttggctcccctctaacggaggtgccccggagtcggatttaccttctacctccctctgatgagggaggtgccccgaaggggcggagggagagaagcacaaacaaaaggagtcccaatgaccaaagtcattgttgtcaatggccctaacctcggacgtctcggcgtccgccagcccgacgtctacggtcgtcaagacctcgacaccctgcgcaagctctgcgctgaatggggcaaggacctcggcctcgaagtcgaggtgcgccagaccgacgacgaagccgaaatggtgcactggatgcaccaagccgccgacgagaaaaccccggtggtcatgaatcccgccgccttcacgcactattcgtatgctctcgccgacgccgcgcacatggtcattgatgagaacctgccgcttatggaagtccatatttccaacccgtccgcccgcgacgagttccgcaagcgttccgtaatcagccctgtggccaccggcaccatcaccggcatgggtttctacggctacaagctcgcgctcgatgctgtggcgcacttgctgagcgaatagaaccaagccctccagccaatcccgggtagcagtcgacgttgcgcccgggattcctgttccgacgaatcggacccgaatcctcgtccgggcgcgccttatggacccgaagtacgccgtgtattcgaccatatgctggccaaggcagaacgagatgggctgcctacgcacgactacaccggccacgtcatgaacacgccgggtcatacacggatgatagagtgaaattccatggttagaagaacacatggtaattctcaagaacacgtcaccaagcatattttcgtcactggcggcgttgtctcctctctcggcaagggcctgaccgcatcttcgctcggtcgtttgctgcgcagccgcggtatccatgttctgcagcaaaagctcgatccgtacatcaacgtcgacccgggcaccatgaacccgttccagcatggtgaggtctacgtgaccgaagacggtgccgaaaccgatctcgacatcggccactacgagcgtttcctcgacgtcttcctgagccagaaggccaacgtcaccaccggtcagatctatcaggaagtgctgcgcaaggagcgcgccggcgaatacctcggccagtgcgtgcaggtcatcccgcacatcaccaacgaaatcaagtctcgtatgcgcgcccaggcttccgatgacgtggatgtgatcatcaccgaaatcggtggtaccgtcggcgacatcgagtcccagcccttccttgaggccgcccgcgaagtgcgtcgcgatctcggcccggacaactgcatgttcgtgcacgtttccctggtgccgtacatttccgccgcccacgagctcaagaccaagcccacccagcactccgtgatgatgctgcgtcaactcggcatctccccggacgccctcgtgttgcgttccgaccgcccgctcaaccagtccatcaaagacaagatctccctgatgtgcgacgtcgatgccgaaggtgtggtcaactgcgtggatgcgccgagcatctacgatgtaccgaagatcctgttcgaagagggccttgatgcttacgtggtgcgtgagctcggcctgccgttccacgatgtcgattgggatgaatgggcagacctgcttgagcgcgtccaccaccccaagcacgaggtcaacatcgccatcgtcggcaagtacatcgatctgccggacgcctacctgtctgtcaccgaggccatcaaggccggcggctttgccaactgggccaaggtcaacgtcaaatgggttgctgccgaccgttgcgaaaccactgaaggcgcggccgccgctctcgacaacgtcgacggcatcgtgatccccggcggctttggcattcgcggcatcgacggcaagatcggcgccctgaagttcgcccgtgaaaccaagctgcccgcccttggcctgtgccttggtctgcagtccatggtcatcgaatactcccgccacgtgctgggcattgaagacgcgaactcttccgagttcgagcccgattgcgccaacccggtgatcgccaccatggaagagcagaaggacatcgtggccggcaagggcgacatgggccacaccatgcgtcttggctcctacccggccgagctggaggaaggctcgctggtcgccgaactgtacggcaccacgcatgtcaccgagcgccaccgccaccgttacgaagtcaacgtggcctacaaggatcgtctgcgtgaaggcggcctgcgcatctccggccagagcccggacggcgagctcaccgagttcgtggaactgccgcaggacgtgcacccgttctatgtggccacccaggctcacccggagttcaagtctcgcccgaccaagccgcacccgctgttcgccggtctggtcaaggcggcgctcggccatcaggcggcccgctgaccgtggatcccgcgcggtcggtccgcgcacgatgaaggcgtgacggcacggcatctcaggatgcttcgccgccacgccttcgccgtttggtgccatccgtgatgccgcatggcccgatggcgcccgcatgtaatcaagcccacagccaatatgcgtcagggcagctagtgtttgcacttgggttctgctaggttttcatagggttaagtgtgatacaaggaaggcaggatggtgaccgaaaacacagcaccaaacgccgccgctgacgtggagatgagccagtatgtggctgatcgtacccgcgtcaacgaggacaagatcaagaaggatgacgagatcatcagccagttcggcgactacaactatggttggcatgattctgatgccgccggcgaagccgcaaaacgaggcattgatgagaacgtcgtacgcgcgatcagcgccgacaaaggcgagccgcagtggatgctcgacatgcgtctgcgtggattcaaggcgttcctcgaaaagcccatgcccgattggggtgtggatctctccggcttcaacgccgacgacttcaagtactacgtcaagccgatcgagaagcaggcgaagtcgtgggaggagctgccggacgacatccgcaacacctacgatcgccttggcatcccggaggcggagaagaaccgcctcgtctccggcgtggctgcccagtacgagtccgaggtaatctacaactccattcgtgaggacctgaagaagcagggtgtgatcttcgtcgacacggacaccgctgtgcgcgaataccctgaactcgtcaagaagtacttcggcaccgtcgtgccccctgaggacaacaagttcggcgccctcaacaccgcggcatggtccggcggctcgttcgtatacgtgccgaagggcgtgcacgtggacatcccgttgcaggcatacttccgcatcaacaccccggccatgggtcagttcgaacgtacgctgatcatcgcggacgaaggctcctacgtgcactacgtggaaggctgcaccgccccgatctggtccgaggactcgctgcacgccgccatcgtcgagatcatcgtcgaaaagcatgcccgcgtgcgctacaccaccgtgcagaactggtcgaacaacgtctacaacctcgtcacccagcgtgcctacgtgcgtgagggcggcacgatggagtgggtggacggcaacatcggttccaaggccaccatgaagtacccggcctgcatcctcgccgaaccgtacgccaaggcatccaccatgtccctcggcttcgccggcaagggccagtaccaggacacgggcgcgaagatgattcacctcgccccgcacaccagctccaccatcgtcgccaagtccatctcgcgcggcggcggccgctccgcctaccgcggtctggtcaaaatcgtcaagggcgcgtacggttcgtccaactcgaccgtgtgcgatgccctgctggtcgacgacttctcccgctccgatacctacccgcacgtcgacgttcgcgaagacgacgtttcgatggcccacgaagccaccgtttccaagatctccgaagaccagctcttctacctgatgagccgaggactcacggaggaagaggcgcgaggcatgatcgtgcgcggcttcgtcgaaccgatcagccgcgagctgccgatggaatacgcactcgaactcaacagacttgtggaacttcagatggaaggatcggtgggctgattccgatgaccgacaacacaacacccgtcaaggaaatcaagattccggtcgccgaccccaacgacccgtacgcgattccggccgccatgccgtcctccgtggaccatgccgtgcgttcgttcaacgcaggcgactacccggagcccagccgcaagcaggacgaatggcgctacacgcctatcgagcgcatcaacgagttcttcaccgtgttcaagccttccggcgaaacgcagatcgaagtctccatgattgacggctcgccgttggccgaaggcgtgaagctcagccagatcaagctcggtgagggcctgtccggcactgtgtccaagcccaacgaccgcgtctccgcagtcgaatgggaatccggccacaccgcaaccattctggaactgtccggtgagatcgcccagcccgtgctcgtcaaggtgcacggcgcgggggaggacctcgacgccttccatctggtgatcgccgccgccgacaagtctcatgcggacgtcgtcgtggaacacgacggtgacgcacgattggccgaaggcgtggaaatcaccaccggcaaggactcgcacgtctccaccacgttcgttcaggaatgggccaaaaccgccaagcatgtggccaaccaccgcatccacgtcggcgaaggcgcatccctgcgccactccgtcgtgaccttgggcggcgacatcgtccgcatccgcatggatcaggacttcggcggcgaacagggcgacctcaacatgctcggcatctacttcgtggaccccggcgagcacatcgagcactgtacgatggtggtacacaaccaccccgactgcaagtcccgcgtggtctacaagggcgcgcttgacggcaagggcgcgcactccacttgggtgggcaacgcgctcatccagcccaccgcccccggcaccgactcctacgagctcaaccgcaacctggtcctgaccccgggtgccatcgccgattccgagccgaacctcgaaatcgaaaacggcaacatcatcggtgccggtcacgcctcttcggtgggccgcttcgacgacgaggaactgttctacctcgaatcccgcggcatccccgaaaccgacgcccgcaagctcgtggtgcgcggcttcttcggcgaactcgtcgaggagatcggcattcccgccatctccgaacatctgatgaccgtgattgaccgccgactggcccgtggcgaaaacgacgccatggcacaggtcctcgaagacaagtaagaacagcatttttaggagcacaacaatgtcaacactcgaaatcaaggacctgcacgtccacgtcgaaaccaaggaaggcatcaagccgatcctgaagggtgccaccctgaccgtccactccggcgaaacccacgccatcatgggccccaacggttccggcaagtccactctcgcctacacgttggccggccaccccaagtacgtggtcgactccggcgaggccctcctcgacggcaaggacatcctcaagatgactccggacgagcgcgccaaggccggcctgttcctggccatgcaatacccagtcgaagtaccgggcgtgtccatgaccaacttcttgcgcaccgccaagaccgaaatcgacggcgaggctcccggtattcgccagtgggccaaggacctgtccgcagccatgaagcgcctcaagatggacccgaagttcgcctcccgttccgtgaacgaaggcttctccggcggtgaaaagaagcgcgccgaagtgctgcagctcgaactgctgaagccgaagttcgccatccttgccgaaaccgactccggcttggacgtggacgccctgcgcatcgtgtccgaaggcgtgaaccgtgccaaggaagccaaccagttcggcatcctcatggtcacgcactacacccgtatcttgaagtacatcaagccggacatcgtgcacgtgttcgccgacggccacttcgtcaagaccggcggccctgagctggccgatgaactcgaagagaacggctacgaccagtacctgcccgaaggcgccgactccgagtccgcgctggcctgagtccgtgaccgtgggagcctgacatgccctattctcgacacgctccgggccgctcaggccaagtcgttacggtcgcgaacaggccatgtccgactcccactcgtttcgtacaattgttacgtaagtaggggaacataatggttgattttaaggagattcggggcgagttcccgattctgaatcaggagattcacgggcacccgctcgtgtacctggattctgcggccacctcgcagaagccgaatgcggtgatcgacgccgaggcgaacttctatcgtacgatcaacgccggcgtgcaccgcggtgcccacgagctggcggcccgtagtaccatggctttcgaagaggcccgtgccaaggtcgccaagctggtcggcgcgaatgcagcggaaggcgaagaagagatcgtcgtcaccggtggtgccacggccggactgaacctgctcgccaccgcattcggcaatgcgtcgctgggccgtgggggagaagccgccaagcgttttgccctgaagccgggcgatgagatcgtcgtctcgcgtgcggaacatcattcagtgctgctgccattccaggagctggcctaccgtaccggtgccaccttcaagtggatcgacctgaccgaggacggccgtgtgcgtacggacaacctcgacgaagtcatcaccgaacgcaccaaggtcgtggccgtcacccacgtgggcaacaccacgggtgccatcaccaacatcgcccctatcatcaagcgtgcgcatgaagtaggttcgatcttcatcttggacgcttgccagtccgtaccgcacctcaaagtcgatttccatgcgcttgatgtggacttcgctgcctggagcgcgcacaagatgtacggtcctaccggcgtcggtttcctgtacggtaagcgcgaactgctcgaagccctgccgccggccaacttcggcggctccatggtcgaactcgcctacatggaccacgaggcccaatacatggcccctccggcccgcttcgaggccggcacccagccggtcgcccaagtggtggccgcaggcgtcgccgccgaatggatgatgaacatcgggctcgagaacatcgaggcccatgagaagaccatcgccgccgaactgctgaagctcggcgacatcgatggcattcgcatcctcggaccgcgcgaaaacgtggaccgcatcggtaccgtggcgttcgacgtggccggcgtgcacccgcacgatgtgggccagttcatcgacgcccagggcatcgcgattcgcgtgggacaccactgcgcccagccggtgcaccgccacttcggcctatacgcatccaaccgtgcctcctccggtgtctacaattcggtcgaagatgcccaagcattggtcgaagcggccaagggcatccgtaagttctttggagtggagtaaaacagaacaccatgaacgaattcggtatgagcggggatgacctcgaacagatgtaccaagaggtcatcctcgaggcgtcaaaacatccgcatggcaaggaatcctttgcgcccaacgcggcggtcgaacagtccgcggacgcggcggccaatgtcaccgtgcaagccagccacgaatactgcacgcccggtgaatcgcaccagttcaacccgacctgcggcgacgaggcgaccatccatgtcgaagtctccgatgacgaaccgcacaccatcaagcgattggtgtgggacggccacggctgctccatttcgcaggccagcctgtcggtgatggtcgatctggtggacggcaaaaccgtggacgaggccatggatctggaacagacattccacaaactgatggaatcgcgcggtgccggtctggacgacgagaacctggaagaaaagctcggcgacgccgtggtattccaaggcgtgtcgaaataccctatgcgcatcaaatgcgctctgctaggctgggaagggctgaaggactccatcgccaaagccctcgctgcaaagaactgaggaaatatgtccaacgataatttggttcccgaaccacagccgtccgttttcgatgccgtcaacggcgtcctgcaggacgaggaggccgctcgccgcgtgatggccaacccggccttggccaagggcttcccgaacggacgcccgatcgagcactctgctgcgtccggcgatgacacctgtgcgtgtggcggtcaccatggcaaatgcggttgccgggatgacgaacagtccgatggcagcgagattccgatcaaggcgattgacgatatcggccgcgccactgccgaagacgtgcgcgaggcactgcatcaggtgattgatccggagcttggcatcgacgtgatcgatttgggtctggtctacggcattgagatcgatgagctaggccgcgccattattacgatgacgctgaccacgccggcctgcccgctgaccgaccttatcgaggacgaatgcgcatccacgctggccggtctggtcgaggagttccgcatcgactggacgtgggacccgcgctggaccatggagcgcatcacgcccgaaggccgcgaccagctcgccgcccttggcttcaacttcgacaacatgccaaagtactgagagcgcttagtaagctccctctgatgagggagctctatacgagaaaagcccc

SEQ ID NO: 1523 - DNA, 7440 bp, Unknown
  R257_15m  MAG No. k141_52355
gtcgccctggtagccgcgggccatggcgaagagcgtgtcctcctggttatcgaaggcgagacgctcgtaacgcttcggaatcacgttgaggaggatggcggtgtccagcatctgatcgtagtagctgaagtcgttgctggggatgaggccgatgccggcggcctgctgcagcttccagtgcttggcgcgcagttcggcggcggtggccttaacggcggcgaggtcgttggcacccttccagtagccttcgatgatcttcttcagttcgcggttctgcccgatgcgggggaagccggagacggaagtcagagtggacatgaatcctccaatgtatgcgttcgtaacccgacttagggtagcaaaacatccggattccaccccttataaatggccgcagagtgtcgttatagatggaatttatatccgctttagtcgaagtctttcacattgatgaccgcgagcagttcgccgctgtgcacctgccattcgtcgaacggtttgttcgatcccatgatcacgatggatgcgggcgaaagtcccaagttgagcaggtcgagtcgttcgccgtcggagtcggcggaggcgagccattgggcgctgatcgacacagtcggctcgtggcccactatcatgaacacgcggttcttggccttgacgtgggcgagctcgtcgaacaccgcctgcactcccccgtcatacaggctgaggcggtagtcgacgatcggcttgtcgccaaaggtcttgagcatgcggtccaacgtctggcgcgtgcgggtggcggacgagcaggagatttggtcgggcaccagtcccagcgactcgatacccttgcccacggccttcgcctgtttcagacctttgtcggtgagctcgcgttccgagtcgcccttgtcgccgaacggctcggccttggcgtgcctcatgatgatgaggatatggtcgtatttcttcgctgctttggcgactttgctcagcttgatgcccatccgtggctcccttcacgaaccgcctgcccggtgtggcggtgtggcggtgtggtgttacttccagtatagaggtgtgtgagcgctcacaaactcatcgtttggcggttattcgtgcgtgtgccaagttctcccacctgacggtcgaggtcacgcaacaccttacgtagtttgtggtcggagatgtcgcgcagttccagttcctcgatctgcgcctcacgctgttcgtcggtgagcgagtcgatgtcggtctgtgtgtccttggtcacgcgatcgcgctttctgagcgcctcgaacccggaggccatggcgcgcgagataacaaggaaaccggtatggccgatcatctggtggtcggggcgtacggcgaggccttgggccttccatgtgcgttcgaacgattcctggatctgcggctcggtccagcagccggccgcgcgcagggcttcggccagtcgactcatctgcgtggtggtagttacgtaactgaccaacacgccgccgggggcaatcacgcggtatgcctgctcgagtctgttccacgggtcgagcatgtcgagcatgatacggtcgaaccagtgttcgggcagttcggcggccacggagtcgaagtcgccggttttgagatcccaccagctgggggcttcaccgtaatacagcgtggcgttggcctgagccactttggcgaattcggggcgcagctcaatcgtggtcagatggccgcgctcgcccacggcgtccagcaggttcacgctcatcgcgcccgagccggcaccggactcaagcacgcgcatgccggagcggatgtcgccgagctgaatgacctgggcgatgtccttcggatacatgatctgcgcgccgcgcggcatcgaaagcacataatcggccagtcgcgggcgcatcaccgcgtactcccagccgccgatggcgcgcgacgatttccacggcttgttcttgtctttctcggggtagacctgattgacctgtgcctcgcgcttggcatgcacggtgaggatcacggtgccttcggtcttgccgatcacatcgtcatgcagaatcaggccatgctcggtctgcgtggagccgccggccacaagctgatcggtgatcttcttgcccttgcggtcggtgaactgcaccttctcgcctgcggtgagaggcccgcgcctcggctccataacttgctccttgtgtgctcggtgggtcaatcgctacaagtctaatgcatgtaagctcgttggtgaggtgatgacgatgcgaatgcagatgacaagccagatcgatgccggcggcaatgaccccattttcctgatgttccacggttacggcaacgacgaaagcgagatggtgcggattctcgacgccgtatatgcgccgacgcgagccgatgcggccccggccgcaattgccgccgtacccagctatatctcgttccgtgccacctacgcgaggccctatatgggcggcaattactggtatcccgacggctgcggcgtggacgagcgccaacgcgaatgcgcggcggtcggggatgcggtggcttcactgctggatgcctcggcattcgcccatcgcaggaagatattgatcggtttctcccaaggcggttatctgtcgtatcgtctggtcaaggcgcatccgacgttgttcgatgccgcgatcctgctcagtccttcgttcatgggcgaggaacaggcggcgcttgactcccctacccgattcttcctggcgtatggcgcgcaggaccgcacgattccgatgcccgaccagcaaacggcccatcaggtccttgaacgggccgggcatctgacctatcgcgagtattccggcatggcccatgccatctgtgatgaggaaatcgccgatatccgggatttcctacgtgccatatgatgccggaatagcttcaatatggaatatctccgttcaaagaggtaccggtccaagtagaagcggctcaacaatggcggaatggcgttggccacgcccattcatcgcgcgatggttctgcgatcagctcaattcccctgccggctgatgccgcccttatgaccggtggccttgaatggcgtggcgcgtgccgtcaccttcggccccggcagattcgtactggtattggatcgaccgcggagcccggcagccggctgggactcggagcgtcgaccagtacccgtgatgttggtatgccgtttgccgtcgtgcgcccgtttctcaccagcaccttcaacctcgtcaatatcaatgcctttggcgcgcaaagcacgtgcccaccgctcatccatcgaactcctcacacatcccattcgggtttccacgtgtactgcatgtcgtaggcgctgggcgaacggcggcaggtggttcagggtgatcggaccgaatgcggcggcgtcaaaagacatcgtttgcccccttcgatggtgttggccaacaggttccaagggtcaggcacagcgcctttctcaacccgttcgccgccacgatgaccggcagcttgcgttcacgggttcccctgcaatgcgcctcattatggcaacacgaaccgacaggtgccggctgcgcctaggatgggaaatcattgctacacgccgaaaagggaaggcgattgtcatgaggtattccacgaccgacacgcatttcgggcatccgctggtcacggtgttgcgagggttcacgacgttcgatccgacgcgctcgcgctatgaggaggtgcgacgcgcatgatcgcaagaccgccgaggattgggccaaggaggagacgttcggcgcgggtctgacgtttcgtcaggtcgccgatacggatgcgcatgacaaggcgattgtggatcatatcaacactttggtcggcccggatgatgagctgtggattctgggtgatatcggtttccgcacatcgctgacccatctgaagaactgcctgtgagcgctcaattgcaagcatctgcatggtgtgatcggcaaccatgatgactggtggcgggaagaccgccccgcacttaacctgttcgaaagtttggagccgcacgatacggttgagattgagggactcggtacggtcaatctttcgcattacccgtatcgggaggatctgacatacagttggcccgatgatgtggcgaagttcagcggcaaggcgttgccgtttaacggccgcaggctgctgtatggacatacacatcagctttcgccagatggtgcacgcccggaggcactgaatgttggcattgacacagcattgaccgccgttgagatgtatgcacgctgaacacgcgcctcaacggccttggtctcgtcatctctcgctcacaccaacggattgccggcaagacgggtcaattcggcgttcagctcggggaaatgctcgttgccgacgaacggaccgtattccgtgccggattggaatgggcaccatgcctgaatggtcatatgcttcagtcgtgaataaggcaggatgccaccggtgcgatcggctgcgggatcgctcgccatattgaattggatttcagcgtcgagcatctgtgtatgcattccgccgtgtcgaaatagtcgatgccagaatcatgggccacggccacggtacgtgccgcatcggcggcatccaacgcgtccatgcgcatcacgcccagcgccactcgtgacgcaatcatgccggattgtccgatttcctgagtcttcatagtgtctcatttctgttatcgtgaatcggcgaacgggcactgtccgcttcgttgccgggcagcaatctccattgccgctgcttatgtcaccttatcgcttgaagtgcacttgaaggcaactcgcaggcaggcagcgcgcgctgccgggcgcgtcttcgcatcttcatgtcctcgctgtgaccgagacatcgttgtgccgtaatcatgcccatttcttgtatgatgacctctatagcaacagagctagggggattccatgaatactaccgattcagccaaagtcagtgatgccaacgccggcgcaaacaatgtcatccatatcccgcacaatcccacgcttgccggattggccacgctgacccgcaacgtggcgtacaagaccggggccgatgatctggtaatggatatcatcgccccgcaatccaccgacgatgacgataaccgccgctaccccaccgtggtattcgtgcaaggcagtgcctggaccacgccgcatcgcgactacgagatcccgcagctctcggctttggcccgcgaaggctttgtggtggctacggtgaatcatcgcgatgcctcgagcgatccccacgacgtgttccccgcatatctcgaggacgtcaaagcagccatccgctatctcagggcaaacgcgcgccaatggcacgtggaccccgaccgtctcggtatctggggcacgtcgtccggcggcaacacgtcgctgctggtggggttgaccgccgacgatccgcggtatgaggacggcaccaatgccgatgagagcgatgcggtgaagtacgtggtcagctgcttcccgcccaccgacatgcttgaagctgtcgacgcattcgacgatgagaccaatccattccggctgtactatttcggcccgttcgcggccgtggtgggcgcgacccatgagaccggcatcaatgccgaggtccgtcagcgcgcggctgaaatgagcccctacctgcaggtgcgggatgaccaacagtatccgccgatgctcctgttgcacggtaccgccgacaccgtggtcccctaccatcaatccgtcaagatgcgcgaccggctggtcgagcacggcgtggacgcgcagctggtgctagtcgacggcgccgaacatgagtacgatttctggagccagcaggtcttcgacgtgatcttcgatttcattcgtgagcggagctgaacgtaagggcacacgggcgcgtcttttttataggttgccgagttctcttttagccaattttgttggagcccctatctgcgtgaacatgccatgacagttctagactgtgttctaggactgtcaatcggcaatgtgtatgaagcgtgatgtgatgggtcagacggcgattgatggagttgagggacttaatagggccggcgaaatcagcagattcagcggttcgcggtcggtggccttgccgcctataccattctggccgtgcttacttcgcgactgttgcaacggccgactaccacggaactgttgctcatcgtcatgtggatcacgctggaactatgtgcgctgactatgttgcacagttccggagctctcggggcaaccgccgccatcgttttggccatcatcctgctgattttgcttatcgccgacatggcctgctacctcgcctactgccatctgccacccatgcccgccttcatcgacggcaccgcaccactgattgccgtaacggtgttttctgagattgtcgtggcgatgattgtgtaggtccggggattttgtttgctatttcgtgttattcaattgtgtcccgaatatatatgggcactgccaaatttatgattccaatcttttcctgcggatcggcttaagataattgactctgaaggatttccaatcaccaaaaaacttgttgtccgtttcagtttgttccccattccggaatttctcacaggtcaattcaagggtgcatagaaaatccgcaacttgttcaagccggtagtcgcgtggagaagcgtcacgatagacaatggcatcttttgagagtgcatactcaatcccgcctcgcagggcatcagtaactatctgttgaccaccgtcgtaatacaccttgacagtgccataagaatggaaatccgaaagatgcgccaaaagtagattaacaatatcgcgtttgagttgcgcttcaaaacgttggcggttatcgtcaaaatcacttttacgatgcacaaacgtccgatatgtaatcggcagccgccgagtcatgataacgaataaacccagaagcctcttacgctccgataggctcatcccttcgtaagcatcatgcccggtaagcagcggcccagcatggaaagggacatcaggaagtccatagtcagccaacgactggcggtaccgctctcatcagcgaagatgctcaatacagacggcatcgcatcccccgtccccgttgacaaaaaatgccgggggagcccccggcgacttggagcctttctcgtttccgagtaaagcaatatctttatagcattttcagcccctagcccgcaagccacaaacggctattccgctaacagctgctcatattgtagccacgccatctactgcaacatcatgtcacggtgcttgtgccaacggaacagacgctcacgatggcggttcagcgtgaaacgatcccacatctggtcctcggcccacacaaccgtgccatcatgttcttcatcttcgggattgcccaaggtatcaaggaaccgctccaacccatacgccccgccgacatcctccggaggcgcatcccccgccccatcccaaa

SEQ ID NO: 1524 - DNA, 9475 bp, Unknown
  R257_15m  MAG No. k141_53110
caaggtctgggaccgtacccgcatccagaacaccatgtggcatggcgtcggcgtgctgcgcgacgaggccggactgaaaaccgccatcgccgaactcggccaaggcctcgccgccgcacacgcccaggctgatggcaacgccgatggtgctgcacgcagcgtggaggcgttggcgacccgcaacatcctcaccgtaggctatgtggccgccatcgccgcgctcgcccgcaccgagtcgagaggcgcccacgcccgcaccgactacagcgagccagtcgacaactgggcccactccgtcgcctacatcaaggactgacccatgctcacatcacacatcatccgcaccgccgtcgaagcggcgctcgccgaagacgcgccctacggcgacatcacctgcgagaccaccatccccgcggacgaaaccggctcggcccacctcaccgcgcgcgaaaacggtgtgatgagcggcatcgacgtgttcgccgcagccttcgccgcacagaacccggccgtcaccgtcaccgtcaccgtcaaggacggtgagcgattccagcgcggccagatactcgccaccgtggaaggcccggtacgcgacctgctcaccgccgagcgcatcgccctcaacttcacccagcgcatgagcggcatcgccaccatgaccgccgccttcgtggacgcggtgaacgccatctacggcgacgactatgacggacccgtcacccggccacgccgctacgagcgcacccgcatcgtcgatacgcgcaaaaccacgcccggcctgcgcccgttcgagaaatacgccgtggtctgtggcggtggccacaaccatcgctacggactgtccgacgcggtcatgatgaaggacaaccatctggcggcgctcgccgcgcgcggcatcgacctggccggcgcgatccgccacgtgcgcgaacaggtgggccacaccacgcatatcgaagtggaagtcgaccgccttgaccagattcccgccgtgctcgccggcggagcggacaccatcatgctggacaatttctcgctcgacgacacccgtcgcggcgtggagctcatcgacggcaaggccatcgtggaagccagcggcaacatgagcctggagcgagtgccagccgtggccgccaccggcgtggacgtgatctccgtgggtgcgctcacccactccgtgcgcagcatcgacctcggattggattggaactagtcatggccgatactcccaacacatccggtgaacccggcgaactgtacctggacgccgccgccaccgaaccagtgagcccggcagtcatcgaggccatgaccccgttcctgactgaggcctacgccaatccggccagtgtgcaccagcccggcaaaaccgcggcccgcgcgctggacgcggcccgcgcatcattcgccgcggcgttgggcgcccggccggatgacgtgatcttcacctcaggcggcaccgaatcggacaatctggccatcaaaggcatcgccatggcgcgcatgcgcaaactgggcctgcggccggtctacggactcgacgaaaccgatggcaaacaactggcaagcagccgcccgcgcattatcatttccgctatcgagcacccggccgtggcccaatcggcggcatggctgcacgaatggttcggtttcgaagtcgtgcgcattcccgtggatgcgcaagcacatctcgatctcgacgcacttgaacgcgagctcgacggcgaggccagcgaacgtaccacgatggtctccaccatgcttgccaacaacgaggtcggcaccgtggaacccgtggaggaactggtccgcatcgcccacgcgcacggcgtgcccatccatgtggacgccgtacaggccgccggccagattccgattcgttttcgtgactgggatgtggacgccctgtccgtatccggacacaaattcggcacgcccaaaggactgggcgcactgctggtacgcggccgcacacccatcgaaccggtgctgtccggcggagggcaggaacgcggcctgcgctccggcacacagaacgtggccggtgccgtggcgctcgccatcggactcaatgaatcgaatgcgcgcatgcaggtgcagtgccgtgaattggtcgcgtcccgagacatgctcatcgatgcggttcgccgggtcgtgccccgcgccgacctgaccggtgaccccgtgcgccgtctgcccggtcacgcctccttcatcttccccggcgtcaccggggaagcgctgctggtcgatctggacgcgcgcggcatcgctgcctcatccggctcggcctgcgccatcgggcgccacgagattcctgccacgttgctggcgatgggcctcgaaccgtccatcgccaaatcggcattacgcatgaccttccgcaagccgctgacccgcgaacaagtcgaacgcatcagcttggccatcgaagagtcctacaccgacctgacccgacactaaatctgacgccacttaccagaaaggaaacgacgtgagcaccaccactccagcgcaacccgcgcagctcacccgcaacgagcgcctcgaccggctgcccttcaacaaggcgcaccgtaaactcctcgtcgcctccggcatcggctgggcattcgacgccatggacgtcggcctcgtttccttcgtggtcgccgccatcgcagccgacccgcacttcaacctcaccccgaccgaaaagtcgtgggtgctgtccatcggcttcgtcggcatggccatcggcgcggcggtgggcggcttcatcgccgaccgcgtgggccgcaaaaccgtgttcaccgccacgctgatcatcttcggcatcgccaacggcgccatggcgctgtcctggtcgctcggcatgctgctcggcgcccgactgatcatcggactgggcttgggcgcggaactaccggtcgcctccacgctggtctccgagttttcgccgaccaaacagcgcggccgcatgaccgtgctgctggaatcgttctgggccgtcggctggatcatcgccgccataatcggctacttcgtgatcccgaacaccggtgactggggctggcgctgggcgctggccatcggcgcgctgccactgctctacgcgattgtcacccgtgtgcacatcccagaatccgtgcgattcctcgaagccaagggtcgcgaagacgaagccgaaaaggccgtgcgctacttcgaggaagccgggggagtggccccggtaacctctcccaagggcaagccgctgccgaagatcaagacgcgcgagctgttcggctccaagtacctggcccgcaccatcgccatctgggccacgtggttcttcgtgaacttctcctactacggcgcgttcacatggatgccgtcgctgctcgccgaccagttcggctccctgaccaagtcattcggctacacgctcgccatctccatcgcccagctgcccggttacttcctggccgcatggctcgtggaggtctggggccgccgcaagacgctgagcatcttcctggccgtctccgccgtggccgccttcgcgttctcgcaggctggatcagcggccctcgtgctcgtgttcggcatgctgctgtccgcctccaacctcggtgcgtggggcgtgttgtacgccgtgaccccggaaatctacccgacccgactgcgtggcgcggccgccggtgccgccgccgcggtgggccgcatcgccgccatcatcgcgccgctcctcatgccgtggttcctgaccctgtccggcggcaacaaggccgtggccttcatcatcttcgccgccgccttcatcctcgcctgcatagcagccctctgcttgcccgagcgcaaaggcctcaatctcgaagactgattacacttcagccttcactactaaagtggcccacaccaatgtgtgggccactttttgtcttatagctcccgaatgacacggcaagggttgccgtatgtcactgatcaatcgagggaacgacgggtgagattgcgcggtggttttgtgaccagccacgccaccagcagtccggttgccactacgccgaatgccagcgccgcctgcaatccccagatcggcacggtttccagccaatgaccgtccacaccgatcctgcggttccatgccacatgcagccatcccaacgccacgccggataccacgcccactggcgcgccggccagcagaatcaccgcagcctgcgtcaggccgtaacgtctgaggaatcggggtggcgcgcccacggcgaccatcgtggccatgtcgcgctgggcctgcgtgcgggccagcagcagtgaaacgagcgtggccatcagtgccagcaatgccaacaggccaatgggcaccaatgccatattgtcaccccacggcaggcgattcccgtcagtgctcgtggatgccagcggcagattttcgattgcataagctgaggccttctttacggtaacgggggagttgccaccggcgaagtctagatactcacccagatactgcaattgtttgatgccgagcgcctgtgctgttgccgggctcatcaccagcgggtacgcgccgcgcacgtagatggccttgcgcttctcgatatgtgtggcctgagattcgtttgcaattgccggattcggcgaaatggccacacgcaccatacctcccgcgtcgattgtgccggcatcgccgaccaccacaccgcccgcatcaagcacctgtgccgcctcatccgcgttcgggaagccggacaaacgcatcgcattgccatccataatgagattcacgccgcggaaactcggcagtatattcgaatacgttggctgatgggatcggtctatcggcacacaacgtatcggaacgtttgggtacagggccgaagcggcatcctggcccacccatgtggacgtgtccggttgctcttgaatcgttgggttatcacaagtgtgaccggccgggagcaatgcagcggcatacatgtagccgtgttcggcgttcaacttgtcggaatcgacttcggtcgtatcattgagctttgaccatcgcttgacatcctcggtgtacaccgggtaatgagcgcgtatcggcgtctctttgccaagccggtgtatcgcatccgacaccacagcacggtcgaactcattgctgacatgcacgtcggccccaatggccatccccgacggtccatacgtcatcgtcatcgtggaatttcgctggtccgccaccatggagccggtgattaccagtgtgtacgaggcgatgcacatggtaatcagcaccgcgcatgccgccggaacgaaccgtcgatgatgctcggctgcatccctgagtgccaggcgtgcgccgatgttcagttgggaacccgctttgccgcaccaccgtgcaaaagtgcgaatcgacaacgcaagccctatgacagccaacaaaatcgtggcaacaagcagagccatatgcgcttcggttccggccggaaccgcgcccggattgtgatcggccagcgtgggcaatggcaatgtcagactgagcgcggcgcatacgatggcggccaagaccagaatcggaccaaccgcaacacggagcagtctcaaaggattacggcgaagcttcgtgtccacgccattcgcggattcaccgtagccgatttcctctcttgtcgggcgatccttcaacgcatcgactggatgcatacgcgccacatgccgagccggcgcaatcgtcgcggcaaatccaatgatgattgccgtgacaatacccatcggcagcgagccccacgagaatccgtgcaggatctccagcggcgtggatccacgcaatgcgcctatcgcagggccggccgccaaggtaagcgcgaatcccaatgccgagcccagcacgccaccgatggcgccgataatgagaccttgcgaggaaatgattcgactgaggtcacgtggtgcagcaccggatgcggccgcgagcccaagcacgcgacgtgactgatctgccgacaccgtaaacgcgggcgtgaccagaaacagtaccagcagcatacccaccagcatggtgatgaccacagtgaccatgtggttcaacatggtagccgcatcgatctgcatcgggtagagctgcgatgcgggcggatagccgtcagtcagcacatggcgggaaatgacgatggcctgcaacaggttcatgctgcgggtgtgcgcccacgtgaccggctctggaccgaccaccaaataatggccatccacgccgacgccatcagattccaatatggctgacatccagccttccaagccccatgccgcggcttcggattcatcggtcagcccgctgactgtccaagcacgctgagtgtcggccaccgcctcgccgatgcgcccgtccaggctcatccagccatcgaacggcggagcgacgaacgtcaccgtgctaccgagagaagcgccgagattatccgccaatgtgcggctgatgacaatctgcgtattattctgcggcgccgaacccttgaccagcttcggcaacattcgttgcaatgcctcaggtgaagcctcggtcatggtcgcggtggaggccgcgttcagatcaatgtcgttcccgcttttcacgtcgatcccagccttggtctgttcgccgggttgcaacgcggtgccggtgatggcgatgagttcgggcgactgccaatacgggagcagccgatcctgttgcggcagaatcttcgcaagctcggcggccgaggccggctgctgggagggatcgtcctgccacgtgccgccgctttcgggtgactgccggaacggttggccggtgcggggcctggcggtggcggtgatgaccgcctgcgtatcagccgggattgtcgccagcgcacgcgatctggtgggcggtatggtggtggtcataccgatggaggccaccattgcggcgattggcagcattaccagcagcaaggacagtagggtgcgggccttgtgccgtagtgcgtcgcgccagccgagtcgcagcgcggcccgataccggttgcaacgtgcgccaaggcttggcctagcggcatggggaatttgggcagagcgaccgacggtggcattggcaagattattgagggctgcgcgtgccatcatgctcccctttcctcaaggttgagcaaatcatccatattgctggagccggtttcatcgatgatacggccgtccttcaaaaacaccgtgcggtcggcccaggcggcgaagcgaggctcatgagtgaccagcagtacggccgcgccgcgatctgcgcgggtgcgcaacacttcgagaatcgtcatgccggcattggaatccagagctccggtcggctcgtcggccagtagtagacggcgtgggccgaccagtgcgcgggcaatcgccacacgttgcgcctggccgccggacatgtcttcaggtcggcgatcagccatatcggctactcccacttcattgagggattgcatcgcggcctcacgtgccttgcggggattccagccatccaattccaaggggaacgacacgttctcggctgcgctcagggaaggcagcagattgaaatcctgaaacacgtagcctatcgatttgcggcggatggccgcgcgttcggccactgacagtgtggccagatcgcggccttcgaccagcacgtgcccctgcgtgggcacatcgagcccgcccgcaagattgagcaaagtggatttgccggaaccactggggcccatgatggccacgaattcacccgggcgaagcgtgagattggcgtgactgagcgcggtgacacgacgtgcatctttgccgtgaacgcgagtgacgtcgtgtaattccagcgcgcatggggaagattgcgggagagaagaaagaacgggagaagtcatgatgtgctcctatgcactattgaatggtggcggtgagtgcggctgagcttgccgtgagaggtgccgaaacggggtgctgcgccagttgtgctcgcagctgggtctcatccacggtatcgagccagcgcaattccgcttcagtgatgaaaatatggtggtcgagtactagacgtgtggcgagttcggtgggcggtgtttgccggcgcagtcgggtgatgtcgtgcagcagttgctgcaaagcgtggcgttggtgttggatgagttcggaaacatcgaggccgggtatttccacggcgacggccagcttcatcaccagttcgtcgcgtccgcgttgttccggggtaatgggggagcgccaccatcggtcaagctcttgggcgccggaattggtcaatcgccataatggtgcggccgctgcggtgccgacatcattggatccgctagtagtcggcgcggtctcttcaatcagtccgtcgcggttcaaccgctgcagcgtagtggaaacttgccccatattgagcggccaagtcagaccgatggtgcggtcgaagtccttcttaagctgataggcgctggccgggcctcgctccaacagtgctaatagcttctctgattgccataccgcatcccctttgcatagacggtttgccttgggcgaaggttactgagtaactatcgttggatatcaggttactcagtaactacccatgacggtgctgtactcagggatgattcaggggagattcaggggatacacttggcgcccctcagttgcccacggcgacagctcccctcagggaggggagtcgagagtgtggaatacaacaagtctcgcaagccagatgacatgtgactaattctcagaaagccgggcccgttgtgtgtcaaggtgtgccagtaacatcgtgacggtttgtgtgtaggtacaggttgatatccaagagcaagtactcgagaacgcaagtaccgaacgattacgcaagaaaatcagtattaagagaggtttcgatggcggttcgtggagatatccgtaatgtggcgattgtggctcacgtcgatcacggcaagaccaccctggtcaatgccatgcttcagcagtcccacgtgtttagcgagcgtgaggaagtgccggatcgtgtgatggattccaacgatctggaacgcgagaagggcatcaccatcctcgccaagaacacggccgtggaatacaccggtccgctggccgccaagtacggccacccggagggcatcaccctcaacatcatcgatacccccggccacgccgacttcggcggcgaggtcgagcgcggcatctccatggtcgacggcgtcgtgctgctcgtggacgcctccgaaggcccgctgccgcagacccgattcgtgctgcgcaaggccctggaggccaagctgccggtcatcctgtgcgtgaacaaggtcgaccgccccgacgcccgtatcgaagaggtcgtcggcgaaacctccgacctgctgctcggcctggccgacgacgtgcagcacgagggcgtcgacctgaacctcgaccagctgctggagatgccggtcatctactgcgccgccaaggccggctacgcctcggcgaaccagccggagaacggcggtctgccggacaacgacaacctcgagcc

SEQ ID NO: 1525 - DNA, 15358 bp, Unknown
  R257_15m  MAG No. k141_53520
cgcaccccactggggtgcgtggattgaaataacgacgagattcccacggatgctgatttcgagaaggtcgcaccccactggggtgcgtggattgaaataagaacagattcgtaggacactgcgaaaaacaaatagggtgctttccgccatcaacagcggaaagcaccctattcttatggtattcttatgatctctctgtcctaattagagcacctcactccgcagcaatcgcggccttgagctcctcgaccttgttggtcttttcccacgggaactcaacgtcggtacggccgaagtggccgtaagcggcggtcttcaggtagatcgcgcgcttcaggtcgagcttgtcgatgattgcggcggggcgcaggtcgaagaccttgcgtacggcggcggcgatctggccgcgcgtcacgccttgctcggtgccgaaggtctccacgttgacggacaccgggtcggcaacgccaatagcgtaggcgatctggatctcgactttgtgagccaagccggcagctacgatgttcttcgcaacccaacgggtggcgtacgcggcggaacgatcgaccttggacgggtccttgccggagaacgcgccaccgccgtggtgggcggcgccaccgtaggtgtcgacgatgatcttgcggccggtcagaccggcgtcggccgccgggccgcccaggatgaacgaaccggtcgggttgaccagctggcggtagttgtcatgcggcaccttggaacccagcacctcatcaagcaccgggtcaatcacgtgcttcttcagctcaacagcaagccaatcctgcgtaacctcaggatcatgctgggtggagatcagcacggtgtccagacgaacgggcttatcgttatcgtcatactcaatggttacctgggtcttgccgtccgggcgcaggtgcggcacttcaccggacttgcggacctcggtcagacggaaggcgaggcgatgtgccaaatagatcggaagcggcatcagcgtcggagtctcgtcggtggcgtagccgaacatcacgccctgatcgccggcaccctgtgcttcgtaacgttcttcgcggctggcggcggtctcctgatcgccagtcagacgggcaacgccctggttgatttcggcgctttgctcggtgatggccaccacaacgccgcaggaatcggcgtcaaggccgacttcggaggaggtatagccgatgttgcgcagggtttcgcggaccttggactgcacgtcgcagtaccccttggacgtgacttcgccgaagaccaggaacacgccggtggcggcggaggtctccacggccacatggctggacggatcctgggccagcagatcatcaagaatggcgtcggagatttgatcgcagaccttgtcagggtggccttcggtcacggattcggcggagataagccgatgttcttctgtcatatcatccctttcttcaggacttatcgccccgcggggtgcgaggcacaatgatacggtgtcaatttttacttgtcactgcggaagcgggcataaataaaggcccgtgccaaccagcgcggtggctcgagccttacgtcttgttcgctcctgatgatgagttatagctgattgcgataactcaggcaagcgtgtcgctcaaaatcagttgtgagagaactctcacaccatcattcggcgacgaactgtccaaacaatccaaacgaatcgtctgaatcgatcagttgccctcgttggcgtcgtcctcgcccaaggtctcctcaagcagaccctcgtcgatctcgcggaaggcgatggacagaggcttctcgttgttctggtattcgaccagtgggccgacgttctgcagcaggccctcgttgagctgcgtgaagtaggagttgatctggcgtgcgcgcttagcggcgaaaatggccagcgcgtacttggaatcggcgtgcttcatcagatcgtcgatcggcgggttcgcaagaccgtcgggtgtcgggtcagtaccaaaagccattgttcttatctccaaacattggaaaatctatctcaaccgaagcaagtgtagccgtttggggggacttctgtcagccctataccggactctcgccagaggaatgtattccaaaaaatatgtgtaagaaacgttacgtttttgcagattccattattcgactcttgacaagtggcgtgtccctcgcaaaggcttgaatagagccatgactgaaatgcgatctgcaaaaattatgtcagggcgcgtctttgcaggcgcccgagccctctaccgtgctgcgggcgtcagcggagacgacatgggcaagaagcccatcatcgccagcgccaactcgttcgatgagttcctgcccggccacgtccacctcaacaaggtcggccgcatcgtttccgaggctatcaaggaagccggcggcattccgcgcgagttcaacacgatggccgtggacgacggcatcgccatggggcacactggcatgctctactccctgccttcccgcgacatcatcgccgacaccgtcgaataccagtgcaacgcgcactgcgccgacgccctgatctgcattccgaactgcgacaaggtcgtgccgggcatgctgatggcagccctgcgcctcaacattccgaccgtgttcgtctccggtggcccgatggaggccggcaccacggtgctcgccgacggcacagtcaagagcaccgaccttatcgacgtgatgtacgccaccgccgacgacagcgtctccgatgaggaactgctcaactatgagaagaccgtctgcccgacctgcggctcctgcgccggcatgttcaccgccaactcgatgaactgcctgaccgaggccatcggcctggccctgcccggcaacggcaccatcctcgcctcccactcctaccgcaaggacctgttcaagcgtgccgccaagcaagtcgtcaagatcgctcaccagtactacgacgattccgacgattccgtgctgccgcgctccatcgccaccaaggaagccttcgagaacgccatgaccatggatgtggccatgggcggttccaccaacaccgtgctgcacatcctcgccatggcccagtccgccgacgtggacttcaccctggacgacatcgagcgtatttcccacaccgtgccgtgcatctgcaaggcctcgccgtccggcaagtgggagatttccgacgtgcatcgcgccggcggcatcaccggcatcctcggcgagctcgaccgcgccggcaagctgcacaccaacgtgcattccatcgactacccgacgctggaagccaagctggccgattgggacatcatgcgcccgacctgcaccgaggaagcccagcagatgtacaaggccgctcctggccacatcatctccccggagccgtggacgcacaccaccctgttcgactcgctcgaccgcgaccgcaccaacggcgccatccacgacatcaaccacccggagattcacgaaggcggcctcgccgtgctgcgcggcaacctggcccccgacggctgcgtggtcaagaccgccggtgttccgccggagatctggaagttccgtggaccggctctggtggtcgactcccaggagcaggccatcgaggtcattctgaacgacaccctgaagcctggcatggcgcttgtgattcgttacgagggtccgaagggcggcccgggtatgcaggaaatgctgtacccgacctcctttgtcaagggcaagggcatcggcaaacaggtcgccatgctcaccgacggtcgctactccggcggttcctccggtctggccatcggccacatggcgcctgaggctgccaacaagggcccggtggcgctcatcaagaacggcgacatcatcgatatcgatatcgaagcccgttccgtgaacgtcgaactgactgacgagcagctggacgagcgtcgtcgcgagcttgaggctggcgacggctacgtggctcaccgcaaccgccacgtctcccaggcgctgaaggcgtacgccgccttcgcccgctcggccgacaagggtgcgacgcgtgacccggagctgatcaacaagctctccggtctcaactgatcgccgattgcatagctgaaaggcccggcatcttctttatgaagatgccgggcctttactgtgcttccgaaggcgggagcgatattgcttgttatcgcacgcaggcggcgggggagaggcgtgcgcctcgggcccagtcggcggcgcgcatggccttcttgccttgcgccttgacttgggtgagttccagcggcgtgctgccggtaccaacccacacgttcttcttgcccaccttcagctcgccgggctgaagctcggccggagtgttgggattggactggtcggccggttgtgcggcgagaatatgcagggcgagggctttagcggttgactcgtcattatcggcgattggcccttccgcaaacagttcggtccatgccccgggatgtggcgtgcaggcgcgaatctgacggtcgatggcctcggcctcgtccgtccaactgatgcgggcgtccttcaccgtgatcttgtgcgcgtattccaggctctcggccggctgcgcggtgaatgtggcggtgccttcacctacggcggccagcgcatccacatacatgggcgcgccttcctcggccagacggtcaagcagttcgccggaagtctcacggccggtcagttcgatggtcagggaagcgacgatcgggccatcatccaaaccctcgcccaccttgaacacgtcggcgccggtggtcgggtcgcccgcccaaatcgcacgctgggcgggagcggcgccacgccacttcggcaggttggagaaatgcaggttgtaccagcccatgggcaccgcatcaagcacgttcttgggcaggatattgccataggcgatgacagcggcgatatccgcatgcaggtcgttcaacgcctccatgaattcgggggagcggggtttgagatcgatgacgggcaacccgagctccagagccgtcgccttgaccgggctgggcgtgagcttgcggccgcgaccggtaggcgcatcggggcgggtaatgacgccgaccacatcaaaacgtggatcggtggcaaaggccttgagcgagggcaccgccacgtcgggggtgccggcgaacacgagtttgagcatggtcctccttgaaatgtcgatgctcactgcacggccggaatgttcacgccattggcgatgagcagttcacgcagcttgaccggatcctggaaacgtacgccacggatgccggccgcattcgagccgacgatgttcatggccttgtcgtcgatgaacaacgcgccatcggccttgatgccgaactggttcaacgcggcctcgtagatttccttgtgtggcttgcgcagcttgacaaaaccggagacgagcttgccatcaagctgctgcaaaatatcgcactgttcctcggccacgtggaacagactggattcccagttgctcaggccccacacgccgatgccggcagccttcaggtcattgaccagcacgcgcgcgcccggcacgatgccggtcagggagtcgcggaagttcttgatgtagtagtcgaggatgtccgcccacttatcgcccttgtcacggcgcatgatggcgatggcctcgtcggtgctggtgccgccgtccatcaggtcgttgacatcgtagaagccggagatgtcgttgtcgaggaattcgtcgatggtcttctggctgtagcgggggatgagtacggcggccggatcccagtaaatcagcacgttgccgaaatcgaagatcacgtcggtgatcggcttgccggcgttcgcagcggcctcgccatccgcgaccagcacgtcgtaatccatatccggctctccaggccagcccttcatggtgtcctccttatagcgatgttcgttctgtaattatcgtttcacgtgttgaagacgattagatcaggtctttgggatctactcggaagcgaagctcgccgggttcgcgggacgccacatgacgagcggtttcccggtgcagtcgggccgccagctcggctcgccgactctgcggcacacggattactgccttcacccggtcggccgtggcttcgagctcccgggcgtcgaccgtgtccggttgcgcgatcggcaccgggcccaacatgccgggcagctcgccgcaggccgtccaatcgccgcccagcgcgccgatacgctgcatcagcgtcatcaccgcatcacggcggccccacacgcaggcggcggccacggccggcggcataccggtctccacacgctcctcaagatccttggctgcaagaatcctcgaatcccagagcatcagcgattgggcgatggccgggtcggtttcgccgagaatcaacgcctggccgccacgggaacgcggcgcgcacaacgacaccgcacgcttccacgcggtcaacgtatccaaccgagcatccacgcccaacgcatacaggctggtccaagcgtcgagcacggccactgcgcgatactcatgaccggatgttccctgctcggcactgatcggacgcacgcgcggttcgaaaccgggagtggcgatgacaatcatcggctggcaagccacatcgcgcaccagaccctgcgtcttgctggacaaaactactggcacgccacggaacaatccggccagctccgccgcagtgcctgcagcacccacgcgcaccacgcgcatacgttcatgcccacagcccggacacttccagttgatggcagcagccccacaccagcggcatcgcggtgtggaatcccggcggtcggccggtagttgcaacggtccagaacacttggcacaacgcgcctgacgatggcatttcgcacaactcagagtctcactgacgctgtcttgcggaatggacagcagcacggggccgctctccaaagccttagatagcacgcggacggccgtatgcggcacgcgcgccccgatggacgggtcggcaagacgcgcaagttcatcgcgattgagccaacgcacccaaggagtggcgtccttcagcggcgaggcgagcgggtgaatcgcggtggaatagccgctcaccggggtctccaccgtatccgggccggtgttttcccactggctttgcggggtgcgcgcattggccatggccacgaacacgccgccatgggacttggagcgcagccgcatcacgccacgggcctgtggatatggcatcataccgtccatgttctgataggcggcatcctccagaatggcgaacagtgccgggcctgcaaccggcgcatacatcaccgcgcgggtgccgatcaccaccttcacctggcccaacgccacggccagatacgtgcgataccggtcggccgcgggcatggtctccgcattgagcacggcgacgtcgcccacccagccgccggcgggtgccggggcgaacggtttgagtccataattgcgtagcataggcatcaggtcttcgacctcgcgcatggtgggcaattcaaccacggcagccttaccggcactcaacgcagtggccaccatccatgccatgtttcgttgccactcctgtgcaccgggcagcgaatcaaacacaaaagattggaaacgctgaccggtaagcgcgtcatgaagcacattgacgtcggcgtaattggcggtcagacgacgatacccctgcgcagctccctccgaaacggtcctggcaacggcaaaggtagagccagcaggtttggtcccatcgggattggtgccacgcccggcaaaaccaccctgcgtattatccggcaatgagccgccgaccggccgacggaccgacgcggccaaccgctgttcggcctccaccttggccacgcgcggtggcacagcgaaacgcagaatattggcccgtgtgccgccataggctttggcaatcagaccgatatcctcacgcatcgatgcgggaaccagcacatcggggctcaacacccgttcgatatagcgaatcgaagagcgcggggtatcgctggtatcggtgcgtgcccagatcacgccgctgaccctttgaccgccaaaccgcacgcgcaccagcacacccggctgtgcggcctcgctgtctttttcatcaatgaagtaatcgaatgtctggccgaggtggagcgcctgcacatccaacacgacttgcgctatgggatgctgctcggccggcgtatgctccgcaggcgcacgtttacgccgcttgcggggagccagccccgcaagcgtcaactgttctgcgcctgaagtagtcatggctcaactataagtgccggagccgaggtcggtaaaattttaccggcgcaggtaatcgagtacgtgggttaggtcgcggtcgttgatggctttgtcggcggcgagctgggtctttggcttggcacagaacgcgagacccaggccggcggcctgaatcatcggaatatcgttggcgccatcgcccacagccacggtctggctcatcggaatacccaaacggtccgcccatgtctgcaaggcgtgcaacttcacggtcttgctcacgatttcgccgagcaccttgccggtcaagcacccatcggcaacctcaagccggttggcaatccaatagtcgatatggccctcggccgccagcatatcgaccacttcatggaagccgccggacaccacgccgaccttccaaccgtgttcatgcagcgtgtcgataagctccagcgcacccttggtgaaatgcagcttgtcatgcaccgtgtcgaacacggagatcggcaggccctccaacagggccactcgtgcgcgcagcgcatcgcagaactccagttcgccgcgcatggcgcgtgcggtcactccggcaatctcctcaccgcagccagccaccacgcccaactcgtcgataacctcttcgtcaatgagcgtggagtccacatccataaccagcaggccgggcttgctcagcgtcggcacagaaaccgcagaatcagccgggctcccaacttcgctctcggcggacttgtcaacaaaatgcacatcttcttgcgtcatgcttctgattctgggaaaaccttgggacaatgccctctatgaatttttccatggcagccgccactattcttgcgaccgaccccacacccatctgcaccaccaccgaacccggcctgatcggcaccatcaccgactggctgatcatgctgatggaaaccatcggcggtatcggcgtggccttggccatcgccctcgaatccatcttcccgcccatcccgtccgaagtcatccttccgctctccggcttcaccgccgcacgcggcaccctgagtctgccgggcgcaatcatctgggccaccatcggctccgtactgggtgcctggaccttgtacggcatctcccgctgggtgggcctgcatcgcatcaatctcgcggcagacaaaatccccggcgtcagccgcaaagacgtgagcaaagccaacgactggttcaccaaatacggcacatggtcggtgctcatcggccgcgtgattcccgtggtacgctcgctgatttcgattcccgccggattcaaccgcatgaacttcctgcacttcaccggctggaccctgctcggctcggccgtgtggaacaccatcctcgtttccgccggttacctgctcggcgaccagtggtgctcgattcaaggcgcgctcggcgtgttcgaggacgtggtcatcgcggccgtgattgtggtcatcgtatggttcgtggtgcgaaaagtgcgtactgttatacgtaacaggaaatccgccgacggcaacgaatagggtctgccgactgccataagttgccgaaaatcccggatagaagggaagcgaagaacccgcatgagcgacaccgaagatctcgccgcgctgaacgatcgcctgatggccaagaaccatgcgctcgccgaagcgctgagccgcgccggcaaggaactgaccaaggcgaagtcacagctcgcccagctcgctcagccgccgctcaccttcgccaccatggtcaaggtcgattccacccgcaccgatgaagacggcatccagcacgcgtcggccgaagtcatttccggcacccgccgcatggtggtgcctgtggcctccaacgtcaacgccgcccgcctgaccgccggggccaccgtgatgctcaacgagaagctcgtgctggtcgagcagcgcgatgctgacaccgtgggccagattcgcagtgtcaagcaggtacttgacgacggtcgactgatcgttaccgacgcctccggcaatcccgtgctcatccgccgttccggcgcgctcgcgtatgcgggcatcaatcagggcgaccgtattatcgtcgatccgtccgtccgcctcgccatcgaagtgctgcccgccgagggcgacaaggatctggtgctggaggagaccccggatgtcacgttcgccgacatcggcggcctggatagtgagatcggtcgtatcagggacgccgtccaactgccgttccagcatcgtgcgctgtttgagcgctacgatttgaagccgccaaagggcgtgctgctgtacggtccgcccggcaacggcaagacgatgattgccaaggccgtggcgaacgccctatgcgagggtggttacgattcgaatggcgacggcgcaatcagtccggccgaaacccatgtcaagggcgtgttcctgtccgtcaagggcccggaactgctcaacaaatacgtcggtgaatccgaacgactgattcgcctgattttccagcgcgcccgtgaacgcgccgcggacggcaatccggtggtcgtgttcatcgatgagatggattcgctgctacgcacccgcggctccggcgtctcctccgatgtggagaccacgattgtgccccagttcctctccgaactcgacggcgtggaatcactcgacaatgtgatggtaatcggtgcctccaaccgcgtggacatgatcgatccggctgtgttgcgaccggggcgtctcgacgtcaagattcgcgtcggccggcccaaaaccaatcaggccatcgccatcgtggaccattacctcaccgacgacctgcctctggaagatggcgtcgacgcgcacgccttgtccgccgtgctggtgcatgacatctacggaacctccgaacgccgccatctatgcgacgtgcaggaggagaacggccagtggcatgcgttgttcctggccgacgtggtctccggcgcgatgctcaagaacatcgtggaccgggccaagacccgagcggtcaaggaatccatcgaaaccggcttggacgtggcgctcaccgtgccgctgctcgctgccgccgtggaagacgaataccgcgagacccgcgattccatggccgacgtggaccccgaacaatggtcgcgcatcaacggcatggacccgatccgccgcatccgcaccgccgaatagctcaagctcaaggagtactacatgaccgttaaacgagtgatgggcaccgaaaccgaatacgcggtatccctgaacaccccggaccgctacaatccggtgcaactgtccttcgacgtggtgaacggcgccgcggacagccacagcaaatccatccgctgggactaccggcaggaggacccggtcaacgacgcgcgcggcacccgtctcgaacgcgccgccgcccgcccggacatgctcaccgacgccccgcagctcaacatcaccaacgtgatcgcccccaacggcggccgcgtctatgtggaccacgcccaccccgaatactcggcgccggaaaccaccgacccgttcgaagcggtccgatacgaccacgccggagacctcatcatgcaggccgccaccgaacgcgcccgcaaacagactggcactcccattgccctgcatcgcaacaatgtggatggcaagggctcctgctggggcacgcacgagaactatatgatggcccgcgcggtgccattcgacttggtcacacgcctgatgaccctccacttcgtcacccgccagatctacgccggctccggccgcgtagggattggcgagaacagcgagatcccgggctaccagctcagccagcgcaccgactacatccacgccaaagtcggcctgcaaaccaccttcgaacgcccgatcatcaatacgcgcgacgaatcccactccaccgatgcataccgccgtctgcacgtcatcgtcggcgacgccaatcgcatggaggtgccgcaggcactgaaactcggcaccacgagcatgctgctgtggctgctcgaacatgcggacgaggccggattcgacctgaacgccttcctcgacgaactcgaactgtctgacccagtcgaggccatacacaccgtttcccgcgacctgacgctgggggcaatcttgccgctggccaacggcggcgaaaccaacgcatggcttatccagctcaaactgcgccaagccgtctaccaggttgccgcactggtcgaaggtaccgacaccgccggcgaacccgcctggccggacaaatccaccacatccattatggcgatgtggcagcaggcgctcatcgactgcgcctccatccgccatgccgccgacgatgacgaacgtctggccatgaccggcgaggccagccgcatcgaatggctgctcaaatggcagctgctcgaaaaactgcgccgcaaaatcaccacaacgtccgcacccggcgtggccaacggatggaatgatccgcgactgaaggtcatcgacctgaaatgggcggcgctcgaccccgcggacagcatcttcaccaaactcgaaccccgcaccgaacgggtggtgagcgccgccgacatcgcacgcgccaccaccgaaccgccggaagacacccgcgcctggctcagggcaaaactcgtggcgcaattcggcgatgaggtggccgccgccagctggtcccgactcactgttcgcgacccgcgcgccgcagacgagggcgaggcggtcgaattctacggcaatgccggccatatggccgctaccgaccatcacctgttctccctcgacatctccgatccgctcgccttcaccaaggcgcactgcgaaaccgaactcaattcagccgaacacgccatcgatctgctgaagtcgctggccatcaacgccgaacgatagacttggtagctatggaagaaacacgcgaagagaccccacaggacctgcgcaaccttgcgctcaaagtcgccggcctgctcgaagaagccggccagcatgccctccacgaccaactcaatccgcgtaacctcgcccagccgagcaccgagaacgcggaccgtggcccccgctacaagcttgaagtggacaacaagatcatgcgcttcatgagcgccagaatcgccgacatcgcccacttcgacggcttctggaccacccgccccgccgaaagccgccctggccagcgttactggtacatcggcaagatcgacggtgtaatcaactacgtacgtcgcatgagcgaatggacggtgaccgccgccctgttcgaattcggcccggacaacgagcccaagccgatcatcggcatcgtgcacgccccggccctcggcctgacctacctggccgccaggggagcgggtgccgtgcgcatccacaaaaccgcggtcggcgagaagcgcgacaaggtcgtgccgtcgatgacctcctcgctggatggttctgtgctgagctacggcatgtccttcatccccagcgaatcgcagcgtgcgctcgacgtggcctcctcgctcgccggacgcccggccgacatcaagcgcgtgggccccgtctcgctcgacctgtgcaaagtggccgacggcacctatgacgcctacttcgagccgatgctgcacgtgtgggatatcgcgggcatcgccgccggcaccgtagtggtctgggaggcacagggcacgctgagccgttgggacggcgaacgcatccactggcgtcacgataacgatgtagtggcctccaatggactcatcatccgcgaactgcagcattacctgcagcagtatccgtggctcgactccatcaaccagcgataattttttgactcctccggctcccctcgggtgaggggagccgtcggccgaaggttgactgaggggagtttgacagcccaaaaagaagacaacatgccacaacaattcgaacaacctcaagcacagcaggccgcgacccaggaagacgacgccctcgccaccacgcaggccgccgcccaaaccgagtccaccgaccaagccgacgtgttggacgacatcctcgacgacatcgaatccgccttggaaaccaacgccgaggaatacgtcaacagcttcgtgcaaaaaggcggcgagtgatgccccaactgcgtgacagcggcacccgctccctgcacgccacggaacccgtaccatccgccgagatggacgggttctgccgtattttcggcgtcgaaaccgaatacggcgtggcggtcaccggtgccgaacgccccgtggacgccggccaggtggcgatgaccatgttccagcccatcgtctcccgttcccgctccaccaacacgtatctggccaatggctcacgtctgtatctggacgtcggatcccaccccgaatacgccaccgccgaagcgcgcgacccgcgcgaggccctggcccaggacctcgccggcgaacacgtgatgcgcaacctagccctgaaggcccagcgcaagctgcgcgaatcctacggcgcacacgccacgatccatgtgttcaaaaacaacgtcgactccgccggccacgccttcggctgccacgaaaactacctggtccgccgctgcgtgccgttggagaccatcgaacaccagctgctgccgttcctcatcacccgccagctgtacaccggtgccggccgcatgaccccggacggcttccagatcacccagcgcgcggacttcctggacgaggccgtctcctcgtccaccacccgctcccgcccgatggtcaacacgcgcgacgaaccgcacgccgaccccgactccttccgccggctgcatgtgatcatcggcgactcgaaccgttcgcaatggtccacatggatgaagcttgccgtcacgcaccttgtgctgtgcgcgatcgaagatgccttccgccatggcgttccgtccggattcgagcagtatgcctttgctgatccggctgccgccaatcgcacggtcagtcgattccttgacaatccgcgcgccgaactgacgctcgaatcaggcgaatccgtgtccgcactgggtctgcagcgccggtattatgcggcggtcaaggccttcatcgaaacccatggcgatgcgctggcaagttcgctgccggccaccacgatcgacacgattatgggggagtggagccgcgttctggacgcgctggagcgtggtgcatacgatgcgctcgccgaccgcgtggactgggccgccaag

SEQ ID NO: 1526 - DNA, 19142 bp, Unknown
  R257_15m  MAG No. k141_53549
gtacttcttgcaggccttgaaggcgctgtagccggcgtactgagcggtggagccgagctcctcctcgatctcgagcaggcggttgtacttggcaacgcgctcgccacgggccggggcaccggtcttgatctggcgggtgttcttagcaacagccaggtcggagatggtggtgtccggggtctcgccggagcggtgggaaaccatggaggtgtagccgttggcggtggccagctcgatggcgtcgagggtctcggtgacggaaccgatctggttcagcttgaccagcagggagttggcggcgccgaggtcgatggccttctgcagacgagccgggttggtgaccagcaggtcgtcgccgacgaactgcagacgatcgccgaggcgagcggtgatggcagcccagtcttcccagccttcctcattgaacgggtcctcgatggagacgatcgggtactcgttgatgaggttctcgtagtagtcgagcatgtaggcggagtcgcgctcttcaccgtcgaagcggtacttgccggtctccttgttgtagaactcggaggaggcgacatccaggcagatgccgatctgcttgccaggctcgtagccggcggcggagatggcgtccatgatgtacttgagggagtcctcgttggacttcatcttcggggcgaagccaccctcgtcgccgaggccggtgttcaggccttccttcttcagaacgttcttcagggtgtggtaaacctcaacgccagcgcgcagagcctcggagtaggtgtcgaagccgtacggggagatcatgtactcctgaatgtcggtggcgaagtcagcgtgagcgccaccgttcatgatgttcatgttcgggaccggcaggatgtggccgttggtgccgccgatgtagcggtacagcggcaggccggcggactcggcggaagcgtacagagcagccagggagacacccaggatggcgttggcgcccagcttgcccttgttcggggtgccgtcgagctcgatcatcaggtcgtccagagcgcgctggtcagcagcgtccatgccgatgaccttcggagcgatgacctcgttcacggccttgaccgcgttaagaacgcccttgccgccgtagacggacttgtcgccatcgcgacgctcccaagcctcagcttcaccggtggaggcgccggacggaaccagacccttgccctgagcgccgtcttcggtctccaggtagacctcaacggtcgggttgccacgggaatccagaatctgacgcgcgtacacgctttcaattactgccacaactactccttaaaaacggttgtgtatcttgaatgacattcttaagagtagtgcgatttgtggacgttgtgaacaacacgcccaaaatttagtgttagcgctcacaatgccgatgcgccgcctgattgcaaggcagtacggacgaaatcgctcagtcgacgtccttgccattgaggtagtcgatttcactgtcggacaatttcagttcgctggctttgaacgagtcctgaatctcctgcgggtttctggccgagggaatcgtgaacagatattggtattgcgcaagttcccacgcgagcgtgacgcgctggtaggagcagtcgtgggacttcgcgacttcgcggaaccggtcgaacagatgctcgttgaacgggtcaaggaatccaccgagcggcgaccagcagacgaaagccaaaccgagtttttcgcaggtctccaacgtgtgttcggggtcgcggtgaaccggggagaactggttctggacggccacgagacgatcgcccaaaatgttgtgggcggcttcgatgtccgcgttgtcgattctggagataccgaccgctttggccacaccttcgtccacgagctgcttgagtgcgcccatctggtcttcgtacggcacctgcggatcattgcagtgcgagtagagcagatcgagcgtatcgacaccgaggcggcgggctgattccttggcattggcgatcatggtttcgggtcgggcgtcggcctgccagccgtagttgccgttgccgtcaagcgtgcgcagccagccggttttggtggctacgagcacctgatctttggggccatgccacgagtgcagagcatcgcggaccagatattcgccatagcccatatcctccggttcgccggtgccgggtgcgctgggcagataataggaccaagccgtgtccaaataacggactccggcatcgagcgcggcatgaatggtctcgatcgcctgatcacggttggaggggcgcccctcgatggcgagcgccattgtgcccatgccgaggcggggaatctcatagccggcaagtgttgccgcgtgttggtttttcatcgttgtggcctccatgccaagtcatcgaggagttggttagtccagaggactacctggtcggagctcatggggccttggcccagggaaccggtgaacggggtgggtacgatgagctggtgggtgaccgggcggtattgggcgcctttgtaaatacggcccatacgcatctggatggattcgggcgggtcgatacggccgatccgcacgcggttggattgcgcgagaatctccgaaatgccgagcttgcgggccttgaacttcagacgggccacgtcgaacagggtctcgaattcgaccggcggcttgccgtaacggtcggtaagctcctcttccagatccttcaaatcggcctcgttgcgagcggaggcgagcttgcggtacgcttccagacgcagcttgtccgaatcgatgtactcgatcggaatcgacgcttcgatgggcaggtcgatggacacggccaccggctcgacgttctcttcgggctccttgtacttctccacggcttcggacaccatgcgtacgtacaggtcgaagcccacgccctcgatatggccggactgctcgtcgcccagaaggttaccggtgccgcgcaattccaagtccttcatggccacatcgaaaccggagccgagcgccgtgttctgcgcgatggtggcgagccggtcatgggactgctcggtcatcggcttggacgggtcgtacaggaagtaagcgtacgcgcgctcgcggccgcgaccgacgcggccacgcagctgatggagctggctcaagccgaaacggtcggcatggtcgacgatcagcgtgttcgcattggagatatcgagaccggtctcgatgatcgtggtgcacacgagcacgtcgatgtcgcgatgccagaagtcgcggatgatctggtcgagctgcttctcccccatcttgccgtgggcgatgccgacgtgcgcctcgggcaccagcgtgtggatcttgtcggcgatggacgagatatcctgcacacgattgtggacatagaacacctggccgcctcgcagcagttcgcggcgtaccgccgcggtgacctgcgcatcctcgtaggcgcccacataggtcagcaccggcaaccggtcttcgggcggggtggcaagcgtggacatctcgcgaatgccggtcacggccatctccagcgtacgcgggataggcgtggcagacagggacagcacgtccacgttggtgcgcagggctttcagcgtctccttgtgttccacgccgaaacgctgctcctcatcgatgatgacgagtcccagatccttgaacttgattttcgggttcagcagcttgtgcgtgccgatgaccacgtccaccgtgccggtttccagaccctcgatggtctcgttgatctctttggtggtctggaatcggctcatggccgccacattgaccgggaaaccctcgaatcgttcgctgaacgtctcgtaatgctgctggacaagcagcgtggtgggcacgagcacggccacctgcttgccgtcctgcacggccttgaaggcggcacgcagtgcgatttcggttttgccgaagcccacgtcgccgcagatgaggcggtccatcggcacgggcttctccatgtcggatttgacctcgtcgatggtggtgagctggtcggcggtttcctgataggggaaggcatcttccagttccttctgccatggggtgtccgggctgaacgcgaagcccctggcgcgctggcgggcggagtacagcttgatcaggtcgtcggcgatctcgtggacgtgtttgcgggccttggccttggtggccgcccagtcggagccgccgagcttgttgagcttgggggcttcggcaccgatgtatttgctgacctggtcgagctggtcggtggggatgaacagtttgtccgccggggcgccgcgcttggaaggcgcatattcgatgaccaggtattcgcgagtggttttgttggcgccggtgccgatggtgcgctggcgcatttcgatgaaccggccaatgccgtgctgctcgtgcaccacgtaatcgccttttttgagttccaccaagtcgatggccttgcgccggcgtttcggcgttttggccacggccacggccgaagtgcggccggtcaggtcgcgttcggtgagcagggcgattttggcggctttgtccacgaagccgtcgatggcctgagagcggatgacgtcgaaattggcgatgccggtagtgttgatcgcgcgcctgagcctggccaaggtgccggccgcagcggcggtgatggtgacgtggaagccggcgtcgagcaggccttcgatgccttgggaggccttggcctcatcccctcggaattcggctgggttctgggcgtcgagctgcacatggccggtcagcgtggtgtccacgccgaaactggtgaggcgaatcaccggatgttcggagtattcgagggagctgatggtttccgcatagtcgaggaagctggctttgtcgaagctgatgggcgcgccggcgccgtggccggaagcggccacatgccagctggcggccaggaactcgttcgcggtttttgccaagtcttcggcggaacggcgcagtttctccgggtcgctcaggaggatcacggcgtgcttgggcagcatggagcccaccggttccagatggtccacgagcgcgggcatcagggattccatgccttcgaccggaatggcgttggcgatggattcgagcatgtcctcagcattgggaatcgaaccgaccaaggctttggcgcgggcgcgcacggcgtcggtcagctgcagttcacggcatgcggtggcccagatggtcttgaggccgtcgccgtaggtacgctggtcggaggcgtggaattccttgatggtgtcaatttcgtcgccgaagaattcgatacgcaccgggtgcggtgcggtgggcgggaacacgtcgaggatgcctccgcgcaccgcgaactcgccacggtccatgaccaggtccacgcgcgtgtaggcgttttcgatcagacgtttggcggcttcgtcgaggggcaggtcctcccccacggtgaacacgagcggctcgacgtcgcccagtccttggacgaccggctggatgagcgagcggatcggcatgacgagaatgcgaatcgggccgaacatcggatcggtatcgctcggatgcttgagtctgcggaacacggccatgcggctggccacggtgtccgcgcgcgggctcagacgctcgtgcggcagggtttcccaggcttcgagctgggcgatgtcgtccgggtcgccgtcataccaggagcgcagcgagcccacggtctcttcggcttcgcggccggaggccacgaccagcacgaccggcttgccgggtttgccggtcacaccctgcccgatggcggcggccaaagccgggcgcaagccttcggaaacaccggccagaacggaattgtcgatgtcgtccgaaacctcgatgtcaccagtggcgagtctaaggaaggtcttgtcctgttccagctcagacaggatgcctaccagtgagccgttgatcaggtccgggtgcgttgcctcaccggccattgaacttctcctgggtcttggcaagaccgcggaagatgatgtcctcggcggcgtcggcaccgtcagccaggaattcgggcagctgcttgcgctggtccggaccgaatccgcccagcacccagttcaccgtgttgtcatgcgcgttcgcaccgcgcttggagtgaccgacgcccatgcgcacacgcgcgtatttcggcgtgccgagggaacggtcaatcgacttgatgccgttgtggccccctgcggagccgcctgccttgaccttgatacgaccgaattccaagtccatgtcatcgtgaatcacgacgatatggtcgggctcgatctggtaataggcgctaatggaagccaccgcattgccggaatcattcatataagtcagcggcttggccagaaagaacttgacggtgcggccgtccaggttcatcacgcttttaccgagcatggccagacctttgtggtcggcgaagttcaccgtccaacgttcggcgagcacgtcggcggtcatgaagcccatgttgtgccgcgtgtcctcatattttttgccggggttgcccagtcccgcaatcagccagaaatccgatgccataatccactcctcgtccgtcttcctatattcccgtatgcacgttctgtacgttccgtacgtcatgcgcgcgttcgcctcgcgcactggcccatgcccggccggattcaaccgtcaagattgtactcaacgccgccgtcaagccttggaatcggcaagcagcagggcacggcattgctcggcatccatcgatcggaccgatgaatggtgaaacgcttcgacgtcacgagtcacgatgacgtcggcgtcattgtcctcggcaacggcacggatgagcccgtcctcgaagtcgggctcatcggaccggtacgacatacacgcatggcgttccataagtggacggatgtcgaacaattccatcagtccaccgatatcgtctcgcgccgcccgctcctcgccataatgcttgcgcaacacgcaatacacgtcattcaatgacgataccggcgccatgatctcaatgtttggctgtgcaacggcttccatgagcaaatcaacacattgtttatggaaaggcgctcgtttgtcattgcacaaatcgagcagaatattcgtgtcaaacagcagtttcatcccgtcccccaaatcgttccatacgtgcctgcgcgagaatctcctcatccgaaagaccgccttccgcctccggcaaattccggtcggcgaaacgttgaatcaactcctgctttttcctacgctcccgctcctgaatcagggagagcgtcagacgctcgaattccggcagttcccccgtatccgcaaggtagtcggtcagatcacgaatcaggtccgaataggtgcgcccattacgcttaagcactttctccgcgtcgcgcttccgttcggcattgacgcgcgccgtcaccatggccatagtcatatcgcacctccttgtaataccagtattacaagagatggagacgagtgaatcgcgtctattaggcggtgtcgccagcgaccttttcgcgctgtttgccgttgaggtaccagtaggccagcgccacgaacagggccgccgaggatattgccgagcgtggctgcggacaggttatagaggatgcccgacacgtcgagcgccgcgacgcccgccgcgtcggcgccgaaaccaaacgttttggcgaccaggcccatcggcaggaagaacatgttggccacgcagtgttcgaagcccatcgccacgaatccggcgatcggcagcaggatgcccagcaccttgtcggatacggagcgcgcggcgaatccgatgcgcacggccaagcagacgagcacgttgcacaggatgccgcacacgaacagcgtgtcccagcttggcgtcactttaacatcaactccggttggaaaaaatctcagtatgtagcattcggttctcaaataggagaaacatgcagcggcaatcaacaacttgtcgtttacgacgccaagcaagggaaacagctcagacagatgacgcttccctgcaatcggatgacatattgcgggacggcagcggattttgggcgttcttggcgtggcatcccgcaagcgttatcgcacgttatctgcaccgaatcataagaatggcagaattccaatgatttcgcaggaagagttgcgggacgcgagctatgtgcatcgtttgacgtgtgtggcatcccacgtgattgcgggataccacgtcaaaacggacgaaaatcgcgtgccgtcccgtagtttgccgttatctgggataagcgcgtccgatatatggcgttcgaggaaaagagctgatccgatacaactttttagtgttataggacaccggaatccatggagagcaagggtaaaccgcctcgggcctacaggtccaaataccagtaggacatgtcccgcatggtgccggtggagtcggtggcagcggcgggcatgaggccgaattgggtgaagccgaagcggcgcatgagggcaatggagccgacgttatcggcgaaaatgatgccacaggccttgcgcatgtggcgggcccgcgcctcggtgagcagcctgtcaagcatgaacgtgcccactcccctgccttgccatgccggatcgatgtaataggccaaatcggtgacgccgtcatacccggcacgatcgtagaacacggagagcgcaccgaagccgatgattgaaccgtcttccgattccacaacaaaaacgccgtagggcggcgtatgggattcgacccaggcgcggcgttggtcgagggtgcgcggggtgaggtcggcggtggccccacccgccaccaccgcagcgttgtagatgtcggtgatggcttggatgtcggattcgacggccggatggaaggtgtatggcatgaagttcctttgaatacgcaaatagcccgtccttatgataaggacgggctatgtcagttgaggtaaccgactcccttcagtcgccttcggcgatagctcccctcaccctgagggaagccaagttacttgtcgagctcgatggccttgttgagggcgtcttcaagctcctgctgcgccttgccgtaggcggtccagtcgccgttcttcatggcggactggctgtccttcatggcttgggcggcatcgttcaacgcctgctggagttcggggctgcggtcggaagacgagccggaatccgactttccgtccgtggtgccggactgaccaccattggtatcggaaccagattggtcaccggacacgttctcggcatcgcccgcggccgcaccggaattgccaccgaacacctgatccaaggcctcatccaacgtatccgcgaatccaacctgatcaccgaatgcgaccagcgtcttcttgagcaacgggaatgaggtcacgcccgaagacttgacgtacacgggctgcacgtacaccagtccgccaccgagcggcagggtgagcaggttgccgcgcaccacttgcgtgtcgccggattgcagcaggttcagttccttggatacatcggcgttggcgttgaagttgttctgcgcctggccggggcccggtacgttcgaatccttgggcagctcctgcaatcggatggtgccgtagttcgagcctatcttgcccttctcattgccggcatccgagtcgaccgacaggaagccggtcaggatctcacgggtggactggccagccggaatgtaggtggaggtcaacgagaacaccggttcctcggtgccaccggtctgcaaggtcaggtagtacggcggctgcaggatgtcctggtcctgctgggactgggattcggtcggatcgaccggcgtctgccagaagtcttcgcctgagtagtactggctggcagaggtcacgtggtacttggagagcagctcgcgctgtaccttgaacaggctttccgggtagcgcatgtggctcatcaggtcgccggagatatcggagagctggtggtactggccagggaagatcttctcccatgccttgatcaccggatcggattgatcccacacgtacaggtccacggaaccgtcgtaggcgtccacggtggccttgaccgagttgcggatgtagttggccttctgagagcccagggacgagaccgttgcggaagagacggtggtggaatccttggtggcggagccgaggtcggttatttgcgagtacgggtaggcgtcggaggtggtgtagccgtcgacgatccacttgacgcggccatcgaccacggccggatacacgcggccgtcaagcgtcaggtacggtgccaccttggccacgcgctccttgggggaacgatcgtagagaatctgcgattcgctggtcacacggtcggagaagagaatctgatcggagccgaagcggatcgcgtagagaatcctggagaacaggttgccgaccgaagggccgccgtcgcccttgaacgtggtcagagcaccttccgaaccggtcgggtagtcgaactcccaggcctgcgtgccttcaggggcaccgacaatcgagtattcggtggtgttcggcgagaagtagatgcgaggctcgtacttttcggattcggtgagcttgccctgggtggggatgccggattcgaagaattcgggctggccgtcggcggtcaccttgttgccgtaggcggccaccacgccgtaaccgtgggtgtacacggtgtggtcattgacccagttgcggttgtcattgccggccagatcgagctcgcgggcggcaatcacggtgtcctgggagacgccgtcaatctcgtacttgtcgaccgccagggtgtcggcgaaggtgtagtactgcttggactgctgcaactgtttgaacgtggggctgacgacctgcgggtcgagcagacggatctgcgcggtggtgtcggcctccttggccagagcgccctgctcacccttgtcggtcaccttgtattgctcggtcttgagcttgtcaagaccgtaggcggcgcgggtggcgtcgatgttgcgctggatgtaggtggattccatctcctgtgcgttcgggttgacgcggaagcgttgcaacagcaccggccatgccacggtgagtacaagacccaccacgaccacgacggcaatggaggtcaccggcacacgccaggccttgagcgcggcggaagcgcgcacgccgatggacgcctggccttcgagcgtgtgggagcgcatgagccagatgcccagcaccacgccgaggatggcggtcagcacggccatgatgaaggtgacggggatgttggcatgtacggcggtgtaggaggcaccggtgatgcgtgaaccctgcacggtgagctggtcgaagacgccaatcatctggcgcactgcccaagcgaacatgttgagcatcagccagatgccaagctggcgacggcaacgcttggtaatggagaacaggccgcgtccgttaaccggcatggtaatgcggataccgcccatcagcacatgcgtgaccacggaaaacacaaggcccacgcccagcagcatggccacggcggcgagcacgagcttcaggcccggcagcacgaacacgtagaagccgttgtctagaccgaactgcggatcggtggtgccgaacgactgcgcgttgaacatgagcagaatctcgctccagttcgcgttaaactgggaaccgaagatgacgccgacgatcagcgaaatcaccacggccacgcggcgagcggttttcgagctgacggatttgccgacctcgaccacatcgccgttaatgcgaatggtggaaccgtcggccgaatcagggcgtgctcgaatggccagccaggcggaaacgaagccggtcagggccatgagcagcgcgtaggccacccacagaccgattttcaccccgagctgggtccagaccacggactggaagccgagctggccgtaccacatcagatcggtgatgaatcgggacaggccgaagaacagaccgacgatgatggccaaggccagcaccacgccgatcagaatcttgctgccacggctggctcctgagccaccggacgctggcttacgggtgatacgcggattggccggaccacgtggagggcgggatgacccggaggggccagcgttggtgttgtgggccggaccgtccccatcggcctcgacatcgaggatgatcggatcgtcattgttcgcattgttgcgtcgtgaatcgccgccattgccgaacagtactgagaaaggatcgttaaaagacataactcaagcctatcgaaagggcgggaggtcggttatgccctgagcacagaatgaggcaacatcctgttctacgctctgttctacgcttgccggtatggacagacaacggccacaacatatgcgtccctcagcacacgccacacgccaacttcggcacaggagcattccaatcgtggcggcaatatgtgctttggcggtggtgttggccggtgtggcagtctacggatggcatgtcggatggttcgccaaatccacatcaaacggcaacaccaccactccccagacctcccagacgagtgcgttaccgcgcaccgacgttccttccccgaagaagaacgacgatccggcggcacaagcccaacgtgcggtatccgccatgacgcttgaggaacgtgtgggacagttagtgatggtgccgttgttcgccggttccgaaccctcctcgttggcttcaacaatcgccgacgagcacattggctcggccattctcattggcaattggaataccggcgtcgatacagtcaagaccgcgaccgcgcaactccaaggatatgcgccggccggcaatcgtctcatcatcgccaccgatcaggagggtggtcaggtacagcatctgactggtaccggtttcgacacaatgcccagtgccgttgagcagggcacaatgtccgctgacgcattgcgtcaatcggcaggcacgtggggttcgcaattagccactgctggcataaatgtcgatttggcaccggtgctcggcacggtggtgggcgatcgtgcctcaaatgctccgattggcgcgctggatcgtgatttcggattggatgcggccggcaacgccgaacatggcatcgccgttattgaaggtttgcgagacgctcaagtcggtgcggcggtcaaacattatcctgggttgggcgcggtaagcggcaataccgacttcaccaccgaaggcattctggatacgaccaccacgttggacggggccgaggcaggtgcctttgaccaggcgattaccaaggccgatcctgcaatggtgatgatgtcgttagccacgtatcaatccatcgacccgaataatccggcggtgttttcttctacgattatcgacggtcatattcgcaacgtcctgaagtacacgggcgtggtgatttcggattcgatatctgccgaagcgttgagcagctacgatgtaagccaattgggagtaaatcttgtcgaggcgggcggagacatgtcctgcatcggtcagacggattatgtaaagccaattgtggacggcctcaacgaacgggcgaagtccgatccggctttcgcttcgaaggtgacggcggcggcgactcgcgtaatgacattgaaaatcaagatgggactggcctgaccgttcatccttgcactggcgaggattgatgcgcgctgattcgcgctaatcctcaccagccctcgtacaaatgcacactagtcctcgtacgaatcgtcagtcctcgtacgaatacagaccatgcttgccgatgtattgcaccacgccgtcgggcaccagataccagaccggctcgtcgtgttcggcgcggcggcgtacatcggtcgaggagatggccaaggccgggatctcaagcgtatcgaccttgccttcgggcaaggtcacgccgtccgggctggagtagccggggcgcgtgacggccacgaagtgagcgaggtcccacatgaggtcggcgtccttccactgcatgatttcggccacggcgtctgcgccggtgatgaagaacagctcggcgtcgggatgttgggcgcggatatcgcgcagagtgtcgatggtgtaggtgacgcccggacggtcgatgtcgacacgcgagacggtgaatttggggttggatgcggtggcgatcacagtcatcagataccgatcctcggcgttggtgacgtgcttgtccagcttgaacacaggtcggccggtgggcacgaaaatcacctcatcgaggtcatacacccaggcgacttcagaggcggcgaccaagtggccgttgtggatcgggtcgaacgtgccgcccatgatgccgacgcgcaggcgtgtatgccagttgccgcgtgcggaaagcctgcctttgccgtggctgctggccccggccggtacggacaggtcggacatgcgccgttcggtttcgccttgggtgacggcaatgatttcggcgggctcggcggattccactgttttttcggactgaactgacgcagccgttttgtggctgccggtaacaccactcatgcctggccgccctcgccggcggcgtcatcggctgattcggtttcctcttcgatttcgccggcggagggattgtcttccttgggatcgatcttgcccatgtcttcatcccattcgtcttggaccacgcgacgaatctcggcgaaggtgggcagcgggaagtccggctggtagaggcggcggacctcggccacgcgctcggtgatgcggatgagcgtgtcggtcatgccgtcgaggtcgccgtcgtgctccatctggctgtatttgccgatgtagccttccatgagttccatgtgttcgcgcacgatcttgagctgggcattgttgaggtccacgacttcgggtgaatcggtctcgggccagccgatgagcacggcgtccgcgtattcgagcgacgcacgctgggcggcggaggcgatgccgtcctcaatctgcacgaggaacacatagcggacgatgctgagccgttcggccgcgatcttcaggccgagcttgggatcgttgaggtcgatgtcgggccgcagttcacttgccttgtttgccgtgtcagccgtagtgttcatgttgccgtcctcgttcatgcgcgcacctggcctgttccgtaaccgatccacttggtggtggtcatctcccgcaatcccatgggaccgcgtgcgtgcatcttctgcgtagaaatgccaagctcagcaccaaagccaaacacgccgccatcggtgaagcgagtggaggcgttgaccatgaccacggccgagtcgatgcgcttggcgaattcctcgatggccgcataatcctcggcgatgatggattcggtgtggcccgtggaatgcgtgttgatgtggtcgatggccgcgcccagatccggcaccaccttgatgcccatcttgagggccagatattcagtgtcccaatcctcctcggtggcgcggttgaggtcaaggccctcgatcgccgcgccggagatgatgtcatacgacgtggtgtcggcctgcagtacaacgttcgcctcggccagagcggcggcgatctgcggcaggaattcggcggcgacatccttatgaaccaatagcttctcggcggcgttgcacacacccacgcgctgggttttggcgttgatgatgatcaggatggccttggcgagatcaccggacttgtcgatgtagatatgcacgttgccggcaccggtttcgatgaccggcactttggagttgcgcacgacggcttggatcagacccgctcctcctcgcggcacgagcacgtcgatatggcctcgcgcctccatcatggcggtggcaccggcgcgtccgtactggtcgacggactgcaccagtgcggattcgaaaccgtgtgcttcaagcaccggggcgatgacgcccagcgtggcagcattggtgcgttcggcggcgtgaccgcctcgcagcaacgcggcattgccagatttaaggcacaggctggccacgtccacagtgacgttcggccgggcctcataaatcatgccgatgacgcccatcggtacgcgcgtctgggtaaggcgcagaccgttgggcagattgtatccgcgcacgatttcgccgaccggatcgggcaaggtggccacatgacgcacgccttgggcggcggcggccacgcgcggcacgtcgaacagcaggcggtcaagcttgcccgcatccatgccgttttccttggattcgagcatgtccagcgcgttggcggcttcgatgtccgcggcgtgcccgtccaacgcatccgcaatggcgagcagcagttcgtttttggcttcggtatttgcctgtgcaagacgctcctgcgcgcgtgcggcctgatcggcctggcggcacaccgcgtcgaacacctcaggactcaattcatcgctcataacagtcaagcgtaactcacaacgcggctgattgcttactccgacccgcttgttatgggatgtctgacgttttgaatcgcaaacagaaccggctcccctccgtctcaggcgggaagccggtgacgtgatgcgctccggtcagcgaatcatcactaaccggtacaccacggtggattagcgaatcagcgaatcagtggatctggtccaggtcggggtagagcgggaagtcttcggcgagcttgtcgacgcgggtcttcagcgcggtcacgtcggcggacgggccggcggcgagcgcggtgccgatgatgtcggccacctcctcatattccttcgggccgaaaccgcgcgtggccagggcggacgtgccgattctcaggcccgaggccaccgaggccgggcgcgggtcgaagggcacggtgttgcggttgatggtgatgccgcaggcggcgagcagatcctcgccctgctggccgtccatctcgctgttgcgcaggtcgaccatcaccaggtgcacgtcagtgccgccggtcagcacgctgatgccgttggccttgacatcgtcggccaggagacgttcagcgagaatcttggcgccgtcgagcgtgcgctgcatacggtccttgaattcgggggtgccggccaccttgaagctcacggccttgcccgcgatcacgtgcatgagcggaccgccctgctggccggggaacacggaggagttgagtttcttggcgtattcctgcttggcgagaatgaaaccggaacgcggaccgccgaaggtcttgtgcgaggtggaagagaccacgtcggcgtatggcacggggctcgggtgcaggcctgcggccacgagtccggcgaagtgggccatgtcgacccagaatttggcgccgacctcgtcggcgatctccttcatggccttgaagtcctcgatgcgcgggtaggcggaccagccgccgatgatcatggccgggtgggtttcgagcgcgcgctggcggatgatttccggatcgatgcggaaggtcacggggttcacgccgtacgcctcggcgtggtagaaacggccagagaagttgattttcatgccgtgggtcaggtggccgccgtggtcgagggccaggccgagcacggtgtcgccgggcttgacgagcgcctggtagacggcggcgttggcttgggcaccggagtgcggctggacgttggcgtattcggcgccgaacagggccttggcgcgttcgcgggcgatggtttcgacttggtccacgtattcgcagccgccatagtagcggcggccggggtagccttcggcgtatttgttggtcagcacggagccctggcattgcagtaccgctcgcggcacgaagttctcagaggcgatcatctcaaggccattgcgctggcggcccagttcgaagtccagcagttcggcgatctcaggatcggtttcgcagatcggcgcgttgaaagcatcggtcgctttctgcgcaaggggtgaagcggtcatgggtgctcctttggtatgggcgacaattgattcgccgttgccgccttactgtatggccggtttgtagccggcctgtttcatgatatggccggtccccgttcgatggcaatggtgattttcgccggtttgaccggtcggctacgcgagacggacggcccttctgcccacggcccacgctaaactggtgtggattcatcatccctttcaggcagaaggattcatcgtgacaaccaccttccattccacccgcagcaccaccgattcgctgaccgccaagcaggcgattcgtaagggcatcgccgatgacggcggcctgttcgtttcggacgcgttgggcaagaccaaggtggacgtggcctccctgccgggcaagtcgtaccagcagatcgccgccgaggtgctgggcgcgctgctgccggacttcacggccgaggagctgggccagtgcatcgccgactcctacggcgaacagtggtccgatgagcgcatcaccccactcaagcccctgggtgacgattacgtgctcgaactgttcaacggtccgacttccgcgttcaaggacgtggcgctgcagatcctgccgcgcttcatggcgcacaccacgccggccgatggcgacgcggacgagaagatcatgatcctcaccgccacctccggcgacaccggcaaggccgcgctggccggcttcgcggacgccccgggcaccgcgatcaccgtcttctacccggaaggcaaggtctcccaggtccaggaactgcagatgaccacgcaggccggctccaacgtgcaggtggccgccgtggaaggcaacttcgacgacgcccagtccgcggtcaagcgcatcttcggcgaccgtgccctggccgagcgtctcgccggcaattcgcacgtggtgctttcctccgccaactccatcaacgtgggccgtctggtgccgcaggtcgtctactacttctccgcttacgcccagctgctcgccgaccaggtgatcaacgtcggcgatgaggtcgagttcgtggtcccgaccggcaacttcggcgatatcctcgccggctactatgccaagctgctcggtctgccggtcaagcacctcgtggtggcttccgacaagaacaacgtgctgttcgacttcctgaccaccggtacctacaaccgccagcgcccgttcttccagaccatctccccctcgatggacatcctcatctcctccaacctggagcgcatgctgtactacttgtccgagggcgacacccgtctgatctccatgctgatgaacgacctcaacaagtggggcacgtacgagatcccggaagaactgctggccaagattcgtcagatcttcggcaccggttgggccgatgaggatcaggtacgcgagtccatcaa

SEQ ID NO: 1527 - DNA, 44272 bp, Unknown
  R257_15m  MAG No. k141_54496
acgaccagattcgtcgcctgcgtgaaggcacctacgccatcgccaagggctgccctgtgcagggcctgatcaacgtgcagtacgccttcatggccaacacgctgtacgtgatcgcagccaacccgcgcgcctcccgtaccgtgccgttcgcctccaaggccaccggcgtggcgctggccaaggccgccgcccgcatcatggccggcgagaccatcgccgaccagcgcgccaacggtctgctgctgcccaagggcgacggcggcgacatccaccccggccagcaggtcgcggtcaaggaatccgtgctgccgttcaagcgcttccgcaccccggtgggcaagaccgtcgacatcctgctcggacctgagatgcgctccaccggcgaggtcatgggcttcgaccgcgacttcccgcacgccttcgccaagagccagctcgccgcctacgatggtggcctgccgacccacggcaacgtgttcatttccgtgaacgacaccgacaagcgtcagctgccgctgctcgccgtgcgcctcgaagagcttggattcaagctctgggccaccgagggcactgcctccgtgcttcgccgttacggcatcgagtcgaacatcgtggacaagatcagcacccgcgtggacaccgatccggaagccccggtcgaggtgcatcacgccgccggctccgtgggcaagaacgtggttcagctcattgaggaaggcaagatcgacatgatcctcaacacgccgaactcgcgcggctcccgttccgacggctactccatccgtgctgccgctattgcagccgatctgccgcagtttaccaccatcaccgagttccaagccgcactgctggctatcgaggccgtgaagcataatgattatcagatcatgagcattcaggagcattcgaagcagctgttcgaattggagcgacgggagttctgatgactacacccagcagtgaggaattgcaggcacaacgttcggatttcggtctgcgactgagcaattcaatggccaaatacggaccgctgtgtgtgggcattgacccacatcgcaagctcctcaccgactggggatacaacgtcgacgccgaaggcgccgaactcttctccatgcgtatgctgcaggccgccaacgggcgcgccgcagcagtcaaattccagacgtcgatgttcgagcgctacggagccaaaggtttcgaagcgctcgagcgcgtgctctacgcggcacgacaaatgggcgtcatcaccatcgtggactgcctgcacggcggcctgtccaccacgatttccgccatcgcggacgcctatttcaagcccggtgcaccgttgctggccgacgccatcacgctgctgccgtactatggcgcgcgctcgttgaacggcttgattaccgaagcgttggaaaacggacgcggcgtgttcatcgcctccctgacttccaatccggaaggcatgagtctgcagaccgcgttgcgccagagcggcgattacaagggacgtaccgtggcctacggcatcgcctccaccgcgcagaagcataacgtggatatcgaaggcatgggctcggtgggtctgatcatcggtgccaccatcggccaatggatgcaggattccggcgtggacccctccaagttcaccggtccgattctttcccccggttacggttggcagggtgccgaggccaaggatctgaaaaccgtgttccgcggtacgcgcggcaacgtgctggttaccgtgtcccgctttatcgcctcgcatgggccggatatcgccgcactgagccaagctaccgagtcgattgcgcttgacgtacgtcagtcgctgatggaagccactgccgaaggcgcagaaaaccagtaatcagaacggaatcagatgtcgcggcatgcgtacgtatctatctcattgcatacgtcgcatcacgattcatattcttccctgttcgtcggggctgtaacagttaccggtcatctcgccggtgagccgttaccacattggattcataatcgctgcacaccacatcatctccggaggaacccatgactgaaaacacccatgccggccgtctaatcgtcctgactggccctaccgcagtaggtaaaggcactgtggaggccaagctgcgcgccgaccaccccgaagtgtgggtgtccgtttccgccaccacgcgcgctccgcgccccggcgaggttgatggcgtcaactactggttcctcgccgaagacgagttcctggcccgcgaagcggcgggggagttcctggaaaccgccgtggtgcacggcatggcccactacggtacattgctggctccggtggaggagcatctggctgccggcgtgccaacaattctggaaatcgatttgcagggcgcccgccgcgtcaagcagcgcgccgccgaactcgacttggaagtggtgtacgtgttcatcgcgccgccgagctttgaagagctcaagcgccgtctgatcggccgaggcaccgaaaccgccgaacagcaggcccgtcgcctggaaaccgccaaagtggagctcgccgccgaaaacgaattcgacgtcaccatcgtcaacgaaaccgtcgatcaggccgccgccgacctctggtccgtcatcgccaaagaatacgggctgtaacgtgtgcgaataggttctgttcgtactgagatgtccatgcttggcatggcgtgctcatgtgattatgcgtgttcagtccctgccagtcggccctcacaatagggggagagcctgacggcagggactgattcataccgatacaaaggggcatgagcccccatttgtgcgtcaaccgtttgatatgcaaatgggggcacatgcatgtgtgcgccatcttccaaaaacgtcgaattatgcaaatggggggcacgaataggtgtcggcgtgatgtggtgtggtgcgatgctgcaggtgcggtgtgacatggtgtgggatgccagcggatttcgggtgtttttcctctggcgtcccacagaacctgatgtacggtgtcgtcaccggtttgtgggattggcagaattccaatggttctgtggaatggggtgtgggatgccagccgtgtgcatcgtttgacgtgcgtggcgtcccgcacggttgcgggacgccggccccaaattggccgctaaccgtgtggtatcccgaatttctccgatatgcgagaggaatccgtccactataaggtctctagcccagcgactaatagttttcctctatgtgcgaataatacgggctgtaactaccgctttaccactagctgctggtggagaatttcggtgctgtttctggccggcgcctgcttccaacggattgcttcggattcgtgatgctcggtgacataatgccgcatccattcgaagcactgctgggtctggatggcatcgcttaatgcgcggtgttcctcattgtccgcgatgccgaagcgcacgatcaggtcagccagacggtgatgccgctgcgcggggaacagggcgcggctgatctgcatcgtgtcataatccgcgcaggcaaagccgcagccggcgatatgccgggtgttgtaatccaggaatcgcagatcgaagctgacgttatgaccgacaatcggctcaacggtgggaccggcagccggggtagcgagccatgcgatgaatcggggaagcacctcgtcaatcggatcgaggtcggccaccatcgcatcggtgatgccggtcagcgtggtgatctgacgcggaatcggccgcaagggattcaccagctgctggaattgatcgacgatatgcccctcccgcacgcgcacggcaccgatttccgtgatggcgcaactgttcgggtaaaagccggtggtctccagatccagcgccacataatcggtgggaaagagggcatcgtccatggcgattcgcccgccggcaccatgattgggctgggatggttggccgaaaacggtaatgccggaagtggtcacggaggctcctcatatcagtcggtgttcggtgacttattgtaccggcagcccggtctgacggtaaaatttttccctcccggattttctcggatatattggttaggcggccggcaacatgcggcgcatcgggaagggagcacagctgatgaaacagatagtggcaggcatcgtggcgcatgtggacgcgggcaagaccacgctgtccgaggcgctgctctaccgtaccggtgagatccgcaaattggggcgagtggatcacggcgatgcgtttctggacaccaattccttggagaagacgcgaggcatcacgattttcgcgcaccaggcattggtagaacacggcgacctgcgcctgaccttgctggatacgccggggcacgtggacttcgcagccgaaaccgaacgtgtgctgcgtgtgcttgactacgcgattcttgtggtctccggcacggatggcgtgcaaggccataccgagacactatggcgtctgctggccagatacggtgtgccgacgttcatcttcgtcaacaagtgcgacgccgccggatttgcccgcgaggccgtgttggctcagttgcgcaggcgtctgagcgatgcgatatatccgttgccggcaatggaacagtccactgagggcagcgcgctaccgttggacgcgttcgccgaagacatcgccaccctggacgaggaggcgatgaacgactatttggaacatggcgcgctgtccgtgggcagattgcgatcgatgatcgccgtacgcgagctgttccccgtatatttcggctcggcattgaaactcgaaggggtcaaggaattcctggacgggctggagacgttcacccgcgaacgtgaatggccggccgccttcgccgcacgcgtgttcaaaatcgcccacgacggtcagcacaaccgtatgacgtggctgcgcgtcaccggcggtgcgctcaaagccaaggagatcgtctcctcctcgtgcgccgcggcgtcgacaccgtcgccagcgcaggaggatgatgacatggcgtggtccgagaaagtcgatcaggtgcgcatctacaatggcgccaaattcgagacggtcaccgaagtgccggccggcttggtatgcgcggtgaccgggctgacgcagaccttccccggcgaagggctgggaacggaaccggacgccgaatcgccgtcgttgcaacccgtgttgacctacacggtgttgcccgccggagcggaatccgatacggccggcacctcgggagcggccaaacgtgggggagccggccatgacagcgcgaatcaggacgatgccgagcatgatgccgccaagtcgggaaccggccgcaatgaggagaacgacaccgccggccagaccgcggcggacaatagctcgccggcccgtccccagttcgatgatctgaccttgcacaaggtcatcaccgcattgcgtgagctggaagacgaagacccgttgttgcatgtggtgtgggtggaacggctggccgagattcatgtgcaattgatgggcgcggtccagctggaaatcatccagcagaccctgcacgaccggttcggtctggatgtgtcctttggccccggctccatcctgtaccgtgagaccatcactgcgccgatcgaaggcgcaggtcatttcgagccgctccgtcattatgccgaagcacatatcctgctggaaccaggggagccgggcagcggagtcactgtggcctcggccctgtccgaaaatgatttggaccgcaattggcaacggctgattctgacccacctgaccgagcgtgagcatctcggtgtgctcgttggcgcaccgctcaccgatatcaagatgactttggtggccggccgcgcgcatctgaagcacaccgaaggcggcgacttccgtcaagccacgtaccgggcgattcgccaagggctgatggaagccagggcaggagtcagtggccggcccgagacgccggtcgagagccggccggacaccacaggggagggcaactgccgactgctggaaccgtggtaccggttccggctcgaagtgcccgcagacatgatcggccgtgccatgagcgacatccagcgcatggccggcagcttcgaatccccggtcaccgatgacgaatacgccgtgatcgaaggcgaggcgccggtgtccgaaatgcgcgactatgcgatggacgtgaaccagtacacgcacggccatggccgtttctccgccaccttcggcggctacaagccatgccatgacgccgaacaggtcatcgcagccgccgcctacgatcccgaagccgatctggacaacacccccgactcggtcttctgcgcccacggtgccggctaccccgtcaaatggtacaaagtccccgaattcgcccacgtagactacgccatgtgaggtggtgactaccaaatctgcggccgaatgaatccgttggcctccaagaaccgttgaatatcgcgcatttccggcatattgatcgaatgggccatgcccggatacacctgttcggtcaacgtgccgtgctcgcgccagaactcacccatcgccgtcacatcggctttcgggaagatgtcgtccgcagcaccatgcccgtagaacacgggcggcttcaacgaagccaattcggcatcgcccgcaacggaccccggtgccagccatccagagcaggagacggctgcggcatatcgcttcggattgaaacgcagcagatgcgcggccaagaggccgccctgcgagaatcccatggcaaccaccggccgagtggcgggaatatgctccgcaacccatgcatcaatggcttgggcggcctcagccgcctgcttgtccaatgattcgccctccggcacaccttcatgcgcccacgcaccgaaccatgtatatcccatgccataggcgatgggtgcctgcaaactggcataatcagccgaaccggcaccgcaatagttcagcagatcgggcagatcgtattcattggaaccccagccgtgcaacagcacgaacaccggggtggtttcaggaccggtcaaacgggtcaaggccttggcaatcttcatggctcccagtgtagccacgtgaccgccgcgaccgcatttgaacggtccataagcaacccatatagcaacgccgttccattcaagtgtccgatacgttatcgtcgtagacgtgccgcacggggaacggcctcgtgcacagcagccatagagaacaccataaagggggtgcgcaatgaccaggttcaatactcagctcgtccacggactgccggttggagacaacaacaccggagccgtgaacccgccgatctacaactcaacgacatatgccttcgagaaggtcgacgcgatgccccgctatgactacgcacgaagcggtaatcccacgcgcgacttcctggaaaagcagatcgcacaactcgaacaaggcacgcgaggcttcgcattcgcctccggacttgccgcgattcatgccgtgctcagcattttcaagcccggcgaccgtattattgtaggggacaacatttacggtgggtcgtattcgcagctcaatgagttctttacccgttggggcgtcgtggtcgagtcagtcaatacccaggacattgcagcgttggaggccgccgtcaagggcgaccgcgcgaacggcatcgcgcctgcgcaagccgtctactttgaaaccctgaccaatccgctgctcaaggtcaacgacgtacgcgccatctccgcaacagcccgccgttacggtgcgctgtccatcgtggacaacacgttcgtgaccccgtacctgcagcagccgctttcccttggcgcggatgtggtaatccactccgccaccaagtacctggccggtcactccgacgtcaacgccggtctcgtggtcgtctccggtgaggatttggccaatcgcgtgtacttcgcccagaaccgtcttggaggggtactggcgcccactgaatgcgattcggtgcgccgcggcatccagacattggccctgcgcatggaccggcagcaggagaatgcgaatgccatcgcgcggtacctgctcgcgcatccgctggtcaagtccgttcattacccgggcctgccgggggccggtgaccagcgactcgccgccaagggactgaagggcgccggcggcgtgctgagctttgaagtagtgcctggcgtggaccctgcggatgtgctcaacaacctgcacatcttccgattggcggtctcccttggcgctgtcgaatcactggccgagctgccctgccgcatgacccatttcgagctgcctcgcgaagaacgcctcaaggtgggcatcaccgacgagcttgtgcgcctttccttgggtattgaggatgccgccgacctgattgaggatcttggccaggcgttcgacatcgcctacgaacaatgcctcaaacgtcacgccgactgcgatgtgttcgcgcaattaacggaagaagcgtttgcctgaccgctcgcaacacgctccatcgaatactattaccgacatgaattgggggctggaaacacctatgagtatcacgtccggaacaggtgagtttgccacgcgggcaattcatgcggggtatgaccccgcggactatggccatgcggcggtgccgcccatctacgcctctgccgcattcgatttggagaatgcgcagcgtggtgatgcgctcgcaggcggactcatcgacggattcgaatactcacgtgtggccaaccccacggttgatgtgctcgaaaagcgtcttgcggcattggagggcggtatcggtgcggtggcggtcggctcaggtatggcggccgtcagttatgcgctgatgtgcgtgggcgaaggcggcggcagaatcatcgctcccagcaacttgtacggagcaagcgtggatgcactcggtgattttcttccacaattcggcatccataccgatttcgtaaagcacatcaacgacttggctgaagtggaatcgaagataggcccggatacgcgagcgatcttcgcggagaccgtggccaatccttctacggaaatccttgatattgagccgctgtcacagctggcgcatgaacacggcatcgccctgatcgtagacaacaccgtgcccacgccgtatctgttgcggcctatcgagttcggtgcggatatcgtcgtgcattccaccaccaaaggtattaccggccatggcaatgcgattggcggcgcggttatcgatggcggtcatcttgactgggcgaatggcagattcccccaattcaccacacggcagcaggtcatcagcgatgatcgcaacggtgaatggcacagttttgccgaaagatacggcaacgaggcattcatcaagcgcatccgcatcaaatatctgcgcacgttcggcgcggtggccagcccgttcaatgcgtatctttccttgattggtttggaaacattgcctcagcgcgtcagccagcaggttgcctccgcgcaacggatcgcagagcatttgaatcgtgcagcgcatgtgatgaaggtcaactattcaggattgggatatacaccgcaatacgagcttgtaggcaagtatttccctcgcggtgtcggtcagatcctgtcgttcctggtggatggcagcgccgataatgtgcaccgaatcatcgacggcgccacagtgttctcctatgtgccgaacatcggagacgcgcgttcgctgattgtcgatcctgcgcgcatcacgcatcgcgaggttcctttggatgcgcgtatcgccgccggagtcagcgataatctcatcagactttccatcggattggaaaacgtcgatgatttgattgcggaccttgaccaagccattgccaacgcatactgacgtgtatcgcttacgtatgcggataattgttcgttctgagaaaaacctgcgctgttattcttggggcgttgtgaatttgggttgttgtattacgaaagaaggaacaggacatggctattgacgtctatggcgcaacatggtgcggtgattgcaagcaggcgaagaacacgcttgaggagcttggcgccgaatatacgtggcataacatcgaaaccgaggatggggcggccgatcgtgcggtggccatcagcggccagcagcacattcccgtggtgctctatcctgatggtactttccaggtcgaaccgtcggctgtggatatcaagaacaagctcaacgagctgaatatcaagtaaagacaagagttgtacgagtttgacgatctgctgcatctgtgagcgaacaatacgtcggcgtccgatgtgttattcattggcgtgaatagcactccataggcactggatataaccacgccgaaacacaggtgagcaagcgcgtctacggtaagggattgtgcttcgcgaacgagcgttgacgtgcataacagcagcgaaaagggagtatcgggatgattcggattaggggagtgagcaagagctttgccgacaccaccgtgctggatgggcttgatcttgacattcctcgacaaaatgtggttactgtcatcggcccctcaggctccggtaaatccacactgttgcgcattctggatttccttgagcacgcggattccggtaccgtcgatttcggtgatggtcttgtggatttgaccactaccaaatctgccgacattcacaaggtgcgttcgaaaatcgggttcgtgtttcagaactacaacctgtttttgaacaagacggcattgcagaatgtgaccgaaccgttggtgtattccaagggaatcaagcctgatgaagcccgcaagatcgctattgagcaactcgatcgtgtgggacttgccgattttcatgatcggtatccgagcacactgtccggcgggcaacagcagcgtgtgagcatcgcccgcgccgtggctatgaatcctgagctgttggtgcttgacgagcccacttcggcattggatccggaaatggtcaacggggtgctgggggtcatcaagcaactcggtagcgaaggcatgaccatgctgatggtcacccatgagatgcggttcgcctatgaggcatcgaatcatgtggtgttcatcgaaggaggccatgtggtcgagcagggtgatccgaagcggatcttcgaacatccgcaggaggagcgtaccgtcgagttcctgtcttcaaccaacaatgtgctgatgattccggtgactcggtagaggcgtttcatggctgttgtaattaattgtgacaatatcaagagaggggtttgtcatgttcaataatcaagtgattcgcaaggctgcggctttgctgtccggtgtcgccgtgctggtttcggttgccgcatgcggttcggcttccgcttccaactccagtgcattggagcaggtcaagcaggccggcaaaatcgtgttcgccactgagggcacctatgctccgttcagttaccatgactccaaaaccaatgagctgaccggttacgatgtcgaggtggccaaggccattgccaaggaggtcggtatcaaggccgagtttgccgagggcagcttcgactccctgcttgccggtgtggatgccaagaagtacgatacggttgccgatcagatttccgccaccgacgagcgcaaggccaagtatgatttctccgaaccctacacctactcctacggtgtcgtcattacctccaaggagaacccgaagaacgtcacttcgttcgatgacgtcaaggggcttcgcgccgctgaaaccggtacctccaactggaacaagaccgctcaggagaagggcgctactatcgttcaggttaacgatttcggtcagcaggtcgatgccatcacgtccggtcgtgcagatgtgtcattgaacgatggccttgctgcgctcgactacctgaagcagaagccggatgcggacatcaagattgccgccaagtccgagaagactccggccgcctacctgccgttccgcaagggcagcgatgacttggtcaaggaagtcaacaaagccattgtcaagctgcagaaggatggcacattgaccaagatctccgaaaagtactttggcgaggacttctctcaggagtgacatgtttcccggctctcctgtaattaggggagccgggaaatatgagctggcctcgtgaagattacgagcagacgcaacatataccacacaacaaaggatgaccaatggacgcacgagtatggggaatagtcgtagattcctttgctaagctactgattcccggtatcactgtgaccattccgctgacgctgatttccttcgctctcggtttgatactggcgattgtggtggcgctggtgcgtgtggctaaagtacctgtggcctcccaaatcgcgtggttctacatttgggtgtttcgtggtacgccgttgctggtgcagttgttcgttatcttctttggattgccgtccgttggcattacgattccggcattgccttccgcggtaatcgcgttctcgctgaatgtgggcgcctatgccgccgaaacattgcgtggtgcgattcttgccgtgcctaagggacagcttgaagctggcttggcggcgaacatgccgtatgtgacgattatgcgccgcattattctgccgcaagcattccgctccgccttccctgcattgttcaactccttcatcgcattggtcaaggacacgtctctcgcggcgaacatcaccgtggtggaaatgttcatgacggcccagcgcattgtggcgatttactacgagccgctggtcctatacattgaagtgggcttgatctacttgctcttctgcacgttgcttggatggcttcaggattactgcgagaagaagctcaacgaacacttctgatgtgtttatatggcggcagtgcttgattcaagtcgggtgtttccttggttgaaatgcccgactttgttgtttctgacgtgcgacttggctgattcaaacattagtgcacaagatgtggctgccggagtgaacggaacatgaaatctgacgttcgctttcttggacttgcctgtgagagctatcagttcccgggcgtgcgatggtagcatggatggtgttggggcgcggcacaacgatatgccgtgcttgacccttgtgagaggagttttatatgaccatcgcaagtatgttgggcggaaccatgctgttggtgctaattctattagtcgttcttatcgtgctgctgggcgccgcattgttcatcgttccgcagcagcaggcgtacatcatcgaacgcttcggcaagttcctgaaggttcagttcgccggcattcacatccgtatcccgttcgtcgaccgcatcgccatgaagaccaacatgcgcgtcaaccagctcaacgtgcagctggaaaccaagacgttggacaacgtgttcgtgaccgtcgtggcctccacccagttccgcgtgaacccgaacgacgtggccaccgcctactacgagctgcgcgatccggccggtcagctcaggagctacatggaggatgcgttgcgctccgccatccccgctctgaccttggacgacgccttcgcccgaaaggacgatgtggcgttcgacgtgcagaaaaccgtcggcgccgagatgagccgtttcggcttcaccgtggtcaagacgctgatcaccgccatcgatccgagcccgcaggtcaagaacgcgatggactccatcaacgccgcccagcgcgagaaggaagccacccgccagcgcgccgaggcccagcgcatccagatcgagacccaggccgccgccgaagccgagaagacccgactgcagggtgaaggccaggccaactaccgccgtgaaatcgccaatggcatcgtcgatcagatcaagagtctgcaggccgtgggcatggacatcaacgatgtgaacaacgtggtgctgttcaaccagtatcttgacgtgatgcgttcgttgtccgaatcgaagaacaccaagaccgtggtgctgcccgcctccacgcccggcggttaccaggacctctacgagcaggtcaccaaggccatgctcaccgcggccgagacgaagtaatcaccccgtttgcaaatcctcatccatcgatagtgaagcccctccaagcgaggggcttcactgcgttccgcgctgattccgacaagtgcgcaaatgggccgtatacagattgtgacgagtgtgagaatcatctacttatagattgtgacgaatgcaaaaatacggcatttatagaactcgataagtgtaaaatacaggatattacaaaatcagacgagtgtgaaacgaaggggtggaacatgttgaaacgcaaggcatatcagcgtattgctttctggaaagagcataagaccaaccaagcattgctcattaccggtgcacggcaggttgggaagacgtatctggttgaggaatttgggcagagcgagtatgagcatatggctgagttcaacctattgcttgacgacagcgtgcgtcgttcgtttgcgcaagccaccagtcccgatgatttgatgctgcgtatttctgttgctgcacaagggccgttggttgtagggaagacgcttatcttcattgatgaaattcaagcatgtccacagattgtcacttttatcaaaggactggtggaccggggagactatgactatattctttccggctcattattgggcgtagaactggaggatgtgcgctccctgcctgtcggatacttggatgaatttatcatgtatccactggattttgaagaattctgttgggcactggggctgtcggaaaccgtcttcgacattgttcgtgacagttacggtgccgtaaaacccgttcctgattttgtccatcagcgtttgacggatttgttccaccggtatctgttagtcggtggtatgccggctgcagtgacttcgtttgttgagagcaaggtcatcgatccagtgcgtgcgattcagaccaatattcgcgcatactatgagcatgacattaagcagtatgcgccgaaggataagagactggtcattcaagaaatgtatcgacttatccctagtgaactgcaaagtcaaaatcgcagattccaagtcagttctattgccgaagtcaaacgattctcgcagattgaagatgaattcctttggcttacccgtgctaatgttgcgctgcccgtatttaatgttgccgcccccgtggccccgctgagagccagcaaagaacgtcgattgctaaaactgttctattccgatgttggattgctgaccagctcgtatggaaaaaagtcagcactgggcatactggatggtcaggctgcgatgaacatggggggagtctatgagaatgtcgtggctcaggaacttaccgcgcatggattcaccaatctgtattactttacgaaaaaaggaattggcgaactggatttcctgatagagaccgatgatggtgatgttttggccctggagattaagtcgggcagatattaccgttctcatgcggcgcttgacaatgcgttgagcgctgatggctacaccattgacaaggcgatggtgttcgcggaaaccaacgtgttccaagaggaaggcgtcacatatttgccgatgtatatgctcacgatgttggttaatgagtgatcggtgccttggtggtgcgatgcaggcgatatttgtgatggcggtcgataaggaggtgctcaacgattctgttgtcggaccggttccgagctggtcatgaggcgtcattggaaagttgcggtgtgtagggtggtgtctttgccgagagtacagtgtttctcgaaaaatgcggtgcatgcgatatgtttaatgtaattctaaatattacattaaacatgagtgagcttcccgaattcaatttgtaagtgcaacgttcgtctttgggtagcttgtcttcgacattagcttgccgagttcgcggtatcaaacctcgttgggtgtttcccagtccaggaccttcatgggggtgtcgttgatctcgtcgacgatggcctgcaggtccgcgtccgtcaggtcgtcgaagctggttctcttgggcaggtagcggcggatgcgcccgttgcggttctcgttgttgcccctctgataggacgagtacgggtccgcatagtaggtgagcatgccgagcgactcgtccacgagcaggtggcaggaggattccgtgccgttgtcccaggtccggtcgatgcgcgcgggcgcggggatgtccttgtagatgtcgtattcggcgcgcggtggacggcgcgctcttgtcggggatgaacccggcgaacagacggcggctcttgcgttcgacctgcgtgtcgccgcaccgcctcgacgggggaggcgccgacggccgtgtctgactcataatggccgaactcgcggcgcgggtccacgcgtttcggacgttcgccgatcggctgtgtcctcagctcgtcgatccggacacgttcctctgccgacaggtgggaatacactctcatatcgagcgcgacactttctctctggttatgaacttgaacacttccagccatggagcgggtgttgcgcttctatttagaactcgtgcggtctatcatcacatctgtgtttcgctattgtggggaggcgtcgtaaatgccgattatcgcgggattccggccgttttgtgatgcggtggcgacgtcgtggcggacgagtgcgtatgcgttgcgtaggcgtccggtgcgtacggtggtgatgtggctgtcgatgttggtgatgatggcgatgccgtcgttgcaggtgtggctgatcggttgggcgtgcggcccggacgggcttggtatggggtcggggctgggcgtgggccggttcgcagtgatcctggcggtgctgacggtgggcgcggtgttgatgtcggtgtcgtcgtcgttggcgcagaacatgcgtgacttgttgcaggagccattgatggccgaataccagtccgatctgaccgacgcgctggcgcgtctgactcccgcgcagacgttggacgacgaggtgacgacgcaggtgcgggccgcgcgcgacgcgatcccgtacaacgtggcttcgcaggccgcggacgcgacctcagtggtgggcgcgctggcgtcgatggtcatgctggccgcgtccttgtggcatatgcatccgttggcggcgctgatgatcgcgttggcgatggtcccggagctgttggcccagttcggcgtggagaagctcacgaacgagttatggcccaagcgcggcagggagtcgcgtcgggcgaactatttcgaacggttgttggattatccaccgtcgagcacggagatcgcggccacggccggttcgttcggcatccctgcgcaggcgcgcgtgcgctatttcaatatggccggcatgtgggagcgtatctcgtggcgcacggtgcagttgaccggtgtgagttcgctcgtgttcgccgtgctgacgggcggcgcgttctggctgatcctgacgtccggccatgcgtccgtgtcgagcatcccggccgcgttggtgggcatcatgacgggattgtcggtcacgcgcaccactggcgaggcgttcggcaacctcatggcgtccacgccgatgattcttgcctacgaacggctcatgggcctgctgcgcgcgaaccccgcgatccccgaaacgaccggtccggtcggcgtgcacgtggagcatctgacgtacgcgtatccgactgttgcaaagcatgacgatgacgcggatgacgcgtcggcagcgtcggttccggccgttcagactccggcgttggacgacgtgtcgttggatgtcgaagcgggatcgatcgtcgcactggtgggcgagaacgggtcaggcaagaccacgctcgtcaagctcatcgccggcatcctcgacgccccggacggcaccgtgaccctgccctcgggcgcggacggcgggaacggtcgtaccttggggtcgtgggccgaacggttgggcgcgtcgagcatggtgttccaggatttcacgcacatcgaggtgaccgtgcgcgagttcatcgatcccgctctgcggcaatcggacgatgagttatgtgacgggttgcgtcgcgcccgcgcgctcgacatcgtggatgggcttcccggcggcttggatacgcagctcggtcaggagtggggcggcgttggcctgtccggcgggcaatggcagcggcttgcgctggcccgcacgttcctgtccggcaagccgttgtggatactcgacgagccgaccgccgcggtcgacgccaccgccgaggccgcaatctaccatgatctgatcgccaaccgtccggcgggcaccactgtgatcgtcatcagccaccggccccgcgtgctaaccggcatggaccggattatcgtcctcgaccacggccacgtcaatgaaaccggcacctaccgtcaactggtcgaccgcaacggcaccttcgcccggctcgcacacgacagcctcgaatgagctcgatggcatatccggttgattgttaaaaactcagtggccggccgacagattcgtccgacgaggctcgcgcgagtgatcataacgcgggtcgcgtcggatatgcgggagatggcacgccttatatcaaaagcgatgattttcaaataaggacacggccccatcagccggtcgcgggtactacagtgaaccacaacgttcctcccccgatggtttggggaaacacagaaagaggttggtcgtcggcctgatcatcattgcgattcgcaccggcttcttccgcaagaagctgggtgccagcgagaaccttcaggagtatttcgcctgaatcgggcttgtcgtccatccgcattccgcctcagctactcatatcgataacttactaacaatccattcattgtcttcttaccagtaaaggaatcgccatgtccaacttcattcccaacaccgtttccgcagaacgcaagcccgtggacatcgtcaccggcacctatgtggactatgccggcgtgacccgtgccaaatccgttcccgcccgcaggcgtgaagccttcgaacgcaacggattgggcgccgccctggtctgggtggtgttcggcgcggacaactcgttcgccgaaaacgagaaattcaacgtgtccggcgatctgcgcctgcaccttgacacttccgcttctgcattgcgtgccatacgagcgtgaagcggcggttctctgctcggtgcatgccaacgtatacatggatgtcagccttgccaatacgcatatgggagcgcaggtgagggaagtgctgcgcaatgttctggcgtggtgcgcatttgacaagttgctctatgcgtcggacggcgtcggcatcagtgaattgcattatctggccgcggtgctgttccgcaggtatattgcgcgaatcgccatcgactgggtatcggatcgcatggaacgcgaatcaggcgaaacgggttatcgacgccatcgcgcatgccaacgcggaacggctatacggtttggcgtgaacgggtacttcgccggtgccgtcacttcccgaggaacgccgggatggcttcagccgccgcgtatcccttgcggtacatcatctccagaccctcgaagttcttcttcagggtgttgaggccgtacaaatcttcgggtgcgaggatcagcactttgccttccgcttcgtaatgcttggcgagttcgagttcgtcgttgtaggtcttgtagcgtatgcgcagcctctcggctgcggcagggtgggagcgttcgaggatgcgggccggagccagatccttctgctgcttgcgtacttcgtcacgcaagcgggacagaatcaggatcacgcgatcatagccgtcatccagcgccttctgtaccgggatcggatcggcgatgccgccatcgaaatacggcacgccatccaccacatacggctcgcaggccaccggcacggcggacgaggccttgatgatgtcgaaatcatcgaagcggacgcgcgacttgtcgaaatacttggtcgagccgtcttcggcattgcaggccaccacggtgaatccggtcggattggcctcgaacgccgcgaaatccaacggattctcgccatcgtgattgctcagcgtgccgtagatgtagtcgaggttggcaaagttgtggttcttgaagaagctttccgcgctcgcgtactccttacggaacgcgtatctggtgtagaaggtgtggttgcggccgtgctggcgggcgatgaacgaggtcatattggccgcgccggcggaaacgccatagcacatgtccacgtcgatgccgtcctccagcattcggtccataacgccgcagccgaaaatcgcgcggaacccgccgccgacatcaatcattgccgtcttcagtgccatatcagcctcctattcatcatcatgcatccgatcacgcattcagcaggtcgcgtgaaagccgtgtaacacgttcggacagatcggaattggcgagttccacgccgccggtcgcgtcttcgggtgccagtttgcccagggactccagcaccacgcccagatggcgcacggtgccctcattgccgtcgatgacagcagcccgttcgggcagcagctcgcggaagtagtcgcggtagaacacgaaatgcgtgcagcccagcaccactgaatcgatgtgctccatgtcgtactggtcgaagtagccatgcagcgtgcgcatcaccaggtcatggtcgccgagccgcccggattccacgatctccaccaagtcggggcaaggctccttgaaaatcgtgttgttggaatcgaatcgatccatcagtttggcgaacttccgctcacgcaaggtcaggggagtggccgccacaatcaccctctggggaatatgatgcgggtcggaaggcacgtcgccccggtcgcacgccactttcagggccggctccatgccgatgatcggaatatcgtagtgttcgcgcaaatcgttcaccgcggcggaagtggcggtgttgcatgcgatgaccacggccttgatgccttgacgcacgaaccgttcgacaatatcgaaactcagggccctcacctgctcaggcgtcttgacgccgtacggggcgttggccgaatcgccaaaatacagcacatgctcggccggcatatccttggcgatttggcgagccacggaaataccgccaagacccgaatcgaatacgccgattggagccgaagagctcatgcctgaatcctccctatagccatgcctgcaaccgtatgttgccgcgaccgatcacaaagccgattgttttgcggtgttgtttcgctccctagagtactctgaaagccatgagtcttccgcaacgagtaaccaagacacacgcaaccggcaatgatttcgtggtgtacctcgacaagtccggcaaattcgagcccaccgccgatgaggtccgattcctgtgcgaccgtcacttcggcattggcggtgacggcttgattcgcctgacacggcctgatttcgtgtctgatttaagcgatgatcagctttcggacgtactggccgggggcgcgaaatggttcatggactatcgcaatgcggatggatcgttggcggagatgtgcggcaacggtacgcgcgccatcaccttgttcgctcagcgcgagggcgtggccgactccaccgagccgttccgcctcggcacccgtgccggcgtcaagattctgacgccacgcggcaatatgaggccgtacggagccaacgtgttccaagtcgaaatgggggagtggaagatcggcgaaaccgacgcctacgaggtcaccatccccggcgctgagggctcggcgcgcggcacgttcgtggatatgggcaacccgcacgtggtcgcggtgatcgaggatgccttcgcgtccctgccagtggttgaatcactggatttggtcaccaaaccagtggtggctccggtcatcgaatccgaccagaatgtggaattcgtgcgggtcgacgacatcgatcagaacaccggcgtgggtgaagccacgatgcgcgtcaacgaacgtggctgcggcgaaaccctgtcctgcggcaccggcctatgcgccacaggcgttgtgctgcgggccaagaccggcatcagccactgggacatcaccgtacgtggcggcaccctgcgcgtggacgtcaccgacagcgacgtgaaactgaccggagcagccacgctggtcgccgatatcgatttgttgtaaaggaatcaggcagcgaacagggacgcgccttcggtgacgatgatgagtaccacgatcgccacgatccacagtatatcgaccatgaggtcgatgttgaggcggtaatacttattgagtccggccggcaccgccgcgacctcaacctcaccgtcgccatcatcagcagccacagccttacgtgacggcaatccctgcacggccacggtcgcatggctcaacgccatgaactggatggtggtggagaacatcagggtcaggcaccacgggcacagcgcgtgaatcacgaacagcgactgcgtgctcagccagtacgagtaggccaaagcggccagtccgcccagccacgtgcaggtcgcgaaccaacgcggcaccttcacacgagccaaaccgatcaccgcgatggtaatgaacaccgattcggcggcgatgccgaagaacgcgttcggatagctcagcccgccgaacttcacgatttccgcctgccaggactgggccaccgccgaacaggacaccaccgagttcagatcgcagccgagcgcggactccggatgcctagccaactgcaaagtctcggcggacagaatgagcgaggcccccaatgccactgccgaggcgatcagcatgatgagatatgtccaagtggcactgtggcgccatccaatcaacggtcgcgcctccgccaagccaagcggcgtggtgttcgtggtactggatgatgtgtcggttgcggtgttacgagtcatcatgtccctttcgatagcgctgcgctccagattagcctctgcggttgtcagctgagtgccgaatgtctggtcttggccgttggcagaaggtgacgacctgtctgcgccttgcgtgggaatgctgagatgaggttacgatggaaggtatgactggatatgtgatgcctttggagccgcccgccgtcgggtgggacatccattgccataccgtcttctcggatggcacggaaacgccggccacattggccgaacaatccaaggcattgggactcaagggcgtggccatttccgatcatgacaccaccgccggctggccggaggccgaagccgcatcccatagggtcggtttgccgttgctccgcggcaccgaaatcaccgccacggatgagaacgtctccgtacacatgctcggctaccagtatgatcccacgaatcagcacatcacggacttgttcgccgatactcgagccgcacggttgcaacgcacgcagcgcatggtcgaattgttgtctcgtgattatccgattacctggcaatccgtgctcgcccaagtcaaggagggtgacaaaaccaccattgggcggcctcacatcgctgatgctttggtgagtgccggcgtatatcggactcgttcggaagcgtttgcgaatgcggtcagcgcctcatccaaatactatattcccacgccctcgccgacctctcatgaagtggtggccgccgtcaaaggggcaggtggtgtgattctgatcgcccatgccggtgatgtgagccgtaaccgcagactgctgtccgatgaccagatcgaagcgttgatcagcgagggattggacgggctggaggtatggcaccgaggcaattcaccggagcaacgagaacggctgctcaccatctgccgccggcaccagctgctggtcaccggcggatctgactggcatggcaaaggcaaaccgaacaaactgggggagaacctcaccgacgaggccactgtcgaagagatcgttcatcgcggcgtgctcccgttatatcggtgattcgcggcaatacaaagcggccttgagatgatgcccaaggccgcttatgcgcgattcacggtcacagcgtgccgaaaccgacggcgtgcttggtttcggagccgatgatcgcgtaaccgagtgccttggcgggcacgatgatgcgacggcccttgtcatcggtcatatcgatcgtcgcgttgtcggccacggcctgcgcgatggcctggctcacattatcggctgattcgtcggtgctgaagttcaccggtcgtgccacgttctgaatgcccagttcgatatccatataaggctccttgttctgccgtctttgtgacgaacatcatggtaagtggccgtcaccggccgaggttctgtactctattgtgccgcgtgtctgcgtcgtcatgtgcggtgttacgcgctcggcgtggcgcggaacaccgcacacgacattatttggatgatgtggatgattcggccagcggattgccctcgctgtcatacccgtccaacccggcacgggcatcgcgcagagcgcgttcttcccgctccagcagcggaatcaccgtggtttgggcactcgaggctccgtgctgaacgagactgtccggagtatcgtcattcaccgcatcgtcggtcggggcggcggattgagacgcaggggaagcgtcggttgacgtcgtgccgctatgcccgttcatactgaggagctccttcagcgtgatcgtcaccgaagaatgggaagcgccatgtgagggctgcggtttggtcgatcctgtaccggttgcggtgccggagacactcgcttgcgggtgattggcggtccggtcagcatcgggttcgacttccggggtaagatccacgtcgccagcggccacgatgtcagcggaaccggtgcgatcgggatcgggcgtgtcgtccgagacctcggccgccgcagtaccggtgtcggactgctgcggttgtgcgggtgcctgatggcggtcgtcctgcaacaatgtgccgacggtgattgtggaaggcgaaccgggcttcgtcgacgcggcggcggccgaccctgcggctggggccgatgccggagtgtgcttgatcacgcccaactggtgtgcgagtcgttcgacctgtgccttgaactgcatgatgcgattgttgtccgcacggttcaacgcctgaatgaattcgcccacctgttccatctgcaaccacaggttggccctgagcatgatgagatcgtcaagtcgagagcccatcatgcggccgtatgcggaaagcacggcgttgcgatgggattcgtcgagcttgccgaaaatccaggcaaggtctcgtgccggatcgttgacctgcatatcctgccagttggtcaccgtggtgatggtggaaccggagaacaggaagtcgccgtcggagaatccgccgtgaaccgtgcaggtggagaacgaccacaatccctcggtgtccatgatacgcgcccagctgtcggtgatttcttggggaacatggccggcggagcgtaagcggcgaatccagacggtcagctgcgaacgaatctgaccggtggtgactaccggatatttggcattggccagaaaagtcgaaggcagacgatgaatggctccgatggcggtgccgacggccgcgcagtcatccaatgtcaacaggtcgagaggacgtgcctgaccatcacggtggacggcgatcatcacggtcgtctcgcctgtgggaccgggcttgcgcggggtcagcggtgtggactccgcctgggcctgctgccccacggcctgtgcggtggccgtctggccgggttgggaaacgtctcccgggacgaatgcgaccacacggtccatatcgaagccgaggccaccaagctcgcgcgcggctgccagtgtctgcgccgctttcacacggcggatcagacgtgtacgcccttccttgctgtcagtggcgtatacgtcgtacaacttgcccgaggcatcttggatcacggtctgatcgatgcctttggcctcgtcggttgcgctggcctgcacgttctcgcgtacgccggccacccccagattcggcaggacggctgaggcgagtgccgccaacatataatcgctacgtttcatcacccttccacactaatacatccgtggcgattcgcaccgcagaatgacacgcaaaacgcatgattctggcgatgttttgtcgtgagcccgattcagccataggcgtgagtcgtgccgtgagcgcgaatcgtgccacaatggacgcatggaacaggcgcaggggattcttgaggggctcgatgagcggcagcgtaccgccgcgactacgttgcaagggccggtgcgcattatcgccggcgcaggtgccggtaaaacacgcacggtcacgcggcggatcgcctatgcctgcgccaccggggcatggaagccggagcgggtgcttgccgtcaccttttcggtaaaagcggcggcggaaatgcgtgcacggttgggccagctcggcgtaggggaaggtgccggacgttccggttcgggtgcgggaactgccggagtcacggccgcgaccttccactcagcggcattgcatcagctcaacagcgtctgggcggacatatgcgaggctccattcccgcatgtgatcgaagatcagcgtgacgtcgtctcccgcgcgatcatccgcgccaccgcgcgtaccgatgccgatccgctgaccgttcgcgatgtgctcgccgaaatcaattgggccaaaatctcgttggtggcggtggaagattatgcccgggcctgtgccatcgcccatcggcagccgcccgccggacttgacaccgctcggttcgccgacgtctacagcgcctacgagcaggaaaagacctcgcgtggcgaaatcgattttgacgatattctgctgctcgtatgccatatcatggatgattttcccgaagccgccgcccaaattcgttccaccatcggctggctcaccgtcgacgagtatcaagacgtctcgcccctgcaacacaggctgctgaccctgtggctgggcgggggagggcctgacggcaagagcgcgatgaaccgcaacgtatgcgtcgtgggcgatccggcccagaccatctactcgtttgccggtgcctccagctgggatctgctgcgtttcgccgatgaattcgggccgctcgccgccgatgtcaatctcaacaccgactatcgttcgacgccggaagtcgtgaatctcgccaaccgggtgcttgcggccgcgccgaaccgtgaggattacctgaaactggtttccgcccgcgaatccggcccgcgcgttacccgaaccgcttatgagagcgatatggaagaggcgcagggcgtggcggcacgcatcgcccggttggtcgccaacggagccaagccgtccgattgcgcgattctcacccgcatcaacgcccaacagccggtattcggtgccgctttgcgcgctgcaagactgaaataccgcgttcgtaaggattcgggatggcaatcatccgcgctcgccgacgatgccgcgtccaaacgtgcgctattggaggcgatgggtttggacgccaccggacttgccgcaaacgacgatcccggcgttacgatttccacgatccacgcatccaagggtctggaattcaagcacgtgtttctgatcggctgttcggaaggactcttgccgtacggttcgccggaaacgggggatgcgctggaagaggaacgccggcttatgtatgtgggcatcacccgagctgaggattcgctgcatttgtcgtatgcgcggaccaaggatggttatggagcgcaacacagacgcccatcacgatttttgtgacgggcgtcggtaatgaatgtgaatgttcctgaacgttcaggaacgggaattggctgaaggacggttgactatgcctgcgtatcctccgagttgccgttgccgccatcttctccgtcttcgccgagaagcttggacagttcggcatcccaatcgatatcgccggtcttgccatctgcggcagggtgggaggcggaaccgttggcatcggaagaggagcctgaaggggcgtcggatgacggagacgcgccatctgcgggcttgtcgctaggcagcgaaggcagcagatcgggatgcgaccacttggcgtcacggccttcagggccttcggcggcggtgatcatctcccacaatccggcggcctcgcgcatgcgcttggggcgcagctgcaaaccgagcagactttcgaacgtacgctcggcggggccacccatcgcgcgctcgcggcgcatcatctcacgcaactgttcgatatgaggcagatgggccataccggcgcgccacaccacgcaatccacccagccctcgaccatcgccagcagcgattccagcgaagccagcgcctcgcgctgttcgggagtgtcggggatgccgaccttggtgagattcaccgcgccggaaatcgactccggatccatcgacgtggcgtcacgcagctgttcctccatcgcatccagatcgatggagatgccgcgtgcgtacttgccgatgagcgcctcgaaacgcggcatcagccacggtaccgaggcatacaggcgggcgtgagccatttcctgcagggccaggaaggaaagcacttcggattcgggaattttctcggtggtctcgaatccggagagcgcagcctcgaacgcggcggcgtcggcggaggcatcggagccggagacttgggcggtaccgtcagttgccggagtatcgctgttgccggccgaagtgaagccaatgggattggcggaagcgtcggtggatgtggagaacggattgaccgagtcggttgaagtgccggccgtatcggcctcgggcgcaggagtctcaccgttcagcatcttcgcgtattcggtggcgttctgggcaatcagtccaccagccggattcttcagcaatgcgatgccctgatcgaaactgccatgcacttcatggctcagattgccggccgcatgccccaactgcatggcaaaggacgtgttgcccagcagcttcatcagctgggctggatctttcatgccgtcgggaatcggaatcggcaccggtccggcgaacatgccggcaatctcgccatcgccgaacgcgccgccaagacgctccgaaatcaccgaagccaaagcgtcgttcatcgactcggccacaggagctgcgaacttcgcccactggtcgatggtgccttccacccagccggcgcgggtcagcacatccggatcgccgggcgcgggattgaactcgcaggcggtatccagccacaggttcgcctcactcatcgcgcggcgagccgcctcgccatccacggcggacacgctggacgcggaaccggaggcgttggcctgctgcaaggcaatcgacttggcgagcttgacgttgatcggcccttcctcgacagtgcgctgcatatcgcccatcgtgttgagtccgccggcgctgaacgcggccatcatctgctggacttcggatggattgggcagtcggctggggtcctgactcatcagctgttcacggatctcctcaggcaactggctgatctgctgccaggccatctcgccctgaatggggccgaagcatttgatcagccactcgtgaatcgcgttgtcgtccatgcgtatccttctttgccgcggtgtgttaccccaagtgtagggtctgcccgggcctgttcgctcgtggccgagcaatttttccggtttatgttcgttttcggctgatttcggccctccgcttacactgtagggtatgtttgcacgccacaggaatcaggaaccagacttcgtccaggagcagaagagcccgactgcggattcggaagcgggggatgggcgcatgccatcgttcgaagtgaagcatgattcgcgcctatctcgtggaatcagccgtgctcgggcctatgcggccgctcgtccgaaacgccatttcgtcggtgcattcgccgtgttgcttggtgtggtgattctgctgctgcccagcccgtacgtcatcgagatgcccggacccacccaagacgtgctgggcaaggtcgaggatggtgcggttatcgacatcaccggtaccggcgtgacgacgtataaggattccggcaagctgctgctgaccacggtgaacgcgtccggcgtgcccgggtacccgatcgtcaacgcgcaggccgtctggggttgggccaatccgcaggtggaggtcatgccgcgtgaggccacggtaccggtgggccagagtgcggaccagtatcagaagaaagtcgaacaggacatggccggttcccaggattcggccagtgccgtcggtctggcgcatgccaaagcccatgcggacgaactgggcattgacgccagtacattgcaacacgccaaggtgacgatgcacgtggacagcatcggcggaccgtccgcaggcatgatgtacacgctcggtctcatcgacaaactcacccccgccaacgagagcggcggcaagaccatcgccggcaccggcaccatagacaaggacggcaaagtcggcagaatcggcggcatagagctgaagatgcttggcgccaagcgcgatggcgccacatggttcctggctcccgcatcgaattgttcggatttggccggccgcgtgccggatggtctgcgcgacgtcaaggtcgccacgctggacgaggcgtatcaggcgttggtggccattggcaaggggcaggccgacgatttgcctcattgcgaggcatgacacgcgcggccagtcgttgtttctggtgagacgactcgcatgggtctgcccacaatgcggcgattttcggccgcgttaacgcatttgttcgcgaagacttgctaatgtgtcccctgtgaatcaaacggcatcacagaacgctgaagaatttggtttcgagcccggcgatatcgttcaggagtggctctgggacgacgatgtggacgattccattcgtgcccagattgaagagctcacgggcgaggatctcgtggacgaggactacgactccgctgtggacggcgtcatcgtatggtggcgcgacggcgatgatgaggacgaattgtccgatacgatcgttgacgcctacgcggtactgggcaatgacggcccgctgtggatactgactcccaagcccggccgcccgggtgccgccagctcctccaccgtgcagtccgccgcacagaccgccggtatgaacgccgccaccccgctgaccgtcagctcggactggaacggcatccgcctgcgcgcattcggcaggggccgctgataagcctcaatcaatacgcttgactttaagcgtgttgactggcgtcgcgtgctgcgtagtgctgctgggcgtgactgaatgtcatcgcgattgagcgctacggcacgcgtatgcgacaccacgtgtcgcgcagtgccggccatacgctattgttgtcatttgcgggcaattagctcagttggttagagcgccacctttacacggtggatgtcgggggttcgagtccctcattgcccactttcatttttcatcacttcgtgcaatcccctcattccacagacatgggctgtgacgatattccctgacagtcttcggcaaggggttctgaaatctcagtgagatgcgcgcagaaggaaaccggcagtactgctacaaaatcgtgaatttcggtcttcttggtcagatgcgtctcaatagtcacgtaaagttgtggcagagtgtttatatccagcaggaggtcgaatagccgatggcgcaggaacttcgtgaaggggacggcaagtcgggcatcgcacgtgcgggcaagcgcaagtgggggtatgaccccgctcaggtggacgctttcttggagcgcgcccatgctctgtatgacagcgagggcatgaatctcacccagcatgacattcagaacgtgtcctttgatttgcgcaagaacggctatgtgatcgcacaggttgacgccgcgcttggacgtctggaacgtgccgtggtcgataagcagaccacatgggagatcgcacagcatgggcgtgtgacgtggaaggcgaagaccgagaagctgtatcacgaagtccagaaccatgcggagcgtgacgagcgcgaacgcttcaagtccggagcgcccaagcagccttcgtacgataagaagcaggtggatcgtctggtcgaccagattgtggacaaggcggcggccgcattgggcgttgacggcgtgaccgaagatgatgtacggtctttggccgatctcaatgcgaatacggtcaacaatgtgatcttcacccagcgcaagggcaagaaaggctatgacgagcgacaggtcgattacttcctgaacgcctgcgtgcagttgctgagtcgcttggaatcctatgcacgtgtggccgatttcgtgtccggcgagcccacggctcctgcccagaccgccacgaacgtgaccgttcaagcgaacggcgtctcgccattgttcgcttccggaacgcagcgcccggcaactgacgaacgttttgcgccgtctgccgttgctcatgacgaatcattcgatgccctgcatcaggccgagcagagcttgttcactgctccggctccggttgctcccgcggcgccggccgcggcggcaccgatcgcctatgcgccggctcctgcatcgttcgatgcttccacaagcaccaataacaccaatgcggaacagccggtttcctttgctcccgcagcatacccggtgcatacgtccaacgagtctgcggcgaagcccgtctccgagacgccttccgtggctcctaccgcagctgttgcggctgagcctcccgccagtgccccgtccgcaccggtttccggtgtgaccgctggcagcgccccctcgtttgctccggcacagtcgtcatacgaatccgcagctccgtcatcgaccccgtcggtgttcgcggaacagcccgtggatatggtgcaggacggttcctctctggccgctctcgcccacatggctgcggtttctcaggaacttccggcggtggatgcgccgtccttcgctcccaagatgcccagccttgatacaccgaatgcgctgaaattgaatgaggtaccgggttcggtttcatccccggcgccctccgccccggcagcgcaacctgtgaatagcactgccgacgaggctgcgtccgctgccatgccggtctcctttgctcccaccagcaagccggatcgtaacacgaactccattccggttcgcgtatccgatagtcagcctgcagacagcacggtctcccgtccggctgtggaatcatctgaatacgttgccgcctcccacgacacggaagcagctcagccgtcacaggataagcacgattccaacgattcgttcccgctgctgttcccgcttggcggtaacttcgattcggatatccccgacctgtcgttccccacactgaacaatgacgatacgaagaaggaaaagtgagcatagcctccaactccaccgtcatcattctcggatccaccggatccatcggcacccaaggacttgacgtcatctcgcgtcaccctgaacgatttaccgtcaccggtctggcggcgggcggagcacatatcgagctgctggcgcaacaggccgcacagttccatgtgcccgaagtcgcggtgtttgatgagaccaaggttccagcactgcaagcggctctcgcacaggccggcgcacaaggtgtccgcgtgaccggcggtccggattcggtcatcgccatggccggatccggtgcgaatgtcgtattgaacggcatcaccggctcgatcggcctcgaaccatcgatcgcggcgctcaaggccggttcccagctggcattggctaacaaggagtccgtagtcgcgggcggtcatctgctgttcagcgcgcaagtgcgcgagaaccagatcaacccggtcgattccgagcattccgccatctggcaatccctgcgctccggaacccacgccgaagtcgccaagcttgtggtcaccgcctccggcggcccattccgcggctggaaacgtgtcgacatggagaacatcactcccgagcaggcgctgcatcatccgacgtggaacatgggaccggttgtcaccatcaactcctccacactgatgaacaagggcctcgaagtcatcgaggcgtcccgcttgttcaatgtgtcgcctgaacgcatcgacgtgaccgtgcacccgcagtccatcgtccattccatggtcgaatttgtggacggcgccacgatttgccaggcttcgccgccagacatgcgtctgcctatcgcgctgggcctgtccgcgccggaccgcatgaccaatgtggccgccgcgtgcgactggacgcaagccgcaacttggacctttgagccgttggacgatgaggcgttccccgccgtgcaactggcccgccactgcctggccgcctccgagaagcatacggcggtgctcaatgcagccaatgaacaggccgtgcatgcgtttcttgatcatcggctgccgtacctcggcatcgtggacacggtcaaagccgtgctggaccagatggacgccgagcttcgtggtaacccgctgttcacggacgtggaggaaatgaaccagcttgagcttgaagcccgccgacgcgccgacaacctgataaacaagcaatgatgaataccttgaatacggaaaatcccatcgaaaagccgttccgcaaaaccggtgatccggtcgacctgaccagcgaatcgcccttgcacccgcgccgcaagtcccgccgcatcatggtgggcccggtgccggtgggcgggggagcgcccatctccgtgcagtcgatgaccaacacgctcacggccaacgtacctgccacgttgcagcagatcgccgaactgaccgccgccggctgcgacatcgtgcgcgtggccgtgccgagtcaggacgatgccgacgcactgccggaaatctgccgcaaatcgccgattccggtcatcgccgatatccacttccagtccaaatacgtgttccaagccatcgacgccggctgcgcggccgtgcgtgtgaaccccggcaacatccgtaagttcgacgaagtcggcccggacatctgcaaggccgccaccgacgcgggcatctcgctgcgtatcggcgtgaacgccggctcgctggacaaggaactctacgccaaatacggtggcccgactccggaagcgctggtggcctccgccttgaaggaagcgcacatgttcgaggacgtcggcttccacgatttcaagatctccgtcaaacaccatgacgtcatcaccatggtcgaaacgtaccgactgctcgcatccaagggcgattggccgttgcacctcggcgttaccgaggccggccccgcctggcaaggcaccatcaaatcctgcctggcgttcggtgcgctcttggccgagggcattggcgacacgattcgcgtgtccctttccgcgccgccggtcgaagaggtcaaggtggggtgcaaactcctggaatacatgggattgcgcccccgcaagttcgacatcatctcctgcccgagctgcggccgcgcccaagtggatgtgatccagctcgcatccgccgtcaccgaaggcctgaaggacgtgaccgcgccgatccgtgtagccgtcatgggctgcatcgtcaacggtccgggcgaggcacgcgaagccgacctcggcgtggcctccggcaatggcaagggccagatcttcatcaagggcaaggtcatcaagaccgtgcccgaagaccagatcgtcgacacgctgctcaccatagcgaacgatatcgccgcccaaatggaggccgacggccaagtgcccgtcaattccaccggcccggtcgtggtcccaatccagcatcccggtcactgattcggccgaataggccctcggcgtaaatatcgcggtcagattacaatagcgcacgtgtcgcaagaagaagagcatcgcctgactgttcgatccaagccgtggaccagcacccaccggctgatggtcagcctgcccatcttcattatcctgatcggcgtgctggtctccatttccaacctgaccacggtgccttggaacatcgaacccaccggccagtcgatggccacgctcaccgacgataccgaagtcaccttcgataacccgtccggagaaacgctgccggcgaaaggcacgtatgaggtcaccgagcgatacatcacgctgaacatgaccagcgacggcaatctgaccaaggagcctggtgatcggggcaaggccaatgcggacggcgtccaagccatcaaggtattgattcgggaacctcagaacgcatcaggcaagcgccccggcgtggtgttcatgcacggtgccggatacggcacctgtgacaactcctttggcgacgtggcctccgatatggcttcggccggctttgtgaccgcagtgctcgacaaacccgtctggagcaccaccgacatcaaccgcgattatccggcctcagccaaggcatatgatcaggtcatcgaatacctacgagcccaaagcgatgtagacgccgccaaggtcggcatctatgccacctccgaatcgacatggatctcctcatatctgctcgaggacgatccggacgtcgccttccagattcttctgagcccgatggtgttcagcccacgccaatcactgggatttttcgtcacccaggacttcactcttgtcggcgcgaacgaaggctatcgatccatcgtccaacgcgtgttcagcgcggacaccggcctgttcggactgaacaattccgacctcgccacgctcaaacccgccgcttacgccgtacccacctatgtggcttacggttcaaaagacgtgatgacggcgcaggtcgacggcgtgcgtgcgattctctacaacgcccacaaagccgataactggaacgtgaccgtgcgcagctatccggtcgccaaccatgtgctgcgtttgggggatgagtccgaagcgggcaccccgtttgcggacgcctatgtggacgatctcatcgattgggccgtcggcacttccgccggactcacgcagaccagcgaaaaggtggccggcaccaatctgtaccaatcaatcggtctgccgggcgctttgaaggcaagacgcgtcggcaccatatatggtgtgatcctgcacgtcacggtggtactgctgctgctcgcatccatcgtgctggcactggtggcgctgggccgcaaaatcgcggcggatgcccgatggcggcgcgagaaacgcgaggccaaacgtgcgggcatgctgataccggaacggcctgtgatactcggtttcgcacatggtttcggcaacgcgctgctgactttgaccctcaccactcttgccacactgctcatcttctttgccggacttggacaggtgattatgggtgtggtcaaacttgcatggggcagcgctcctaccgagacgccgggcgtcatgtattggagctggccggtcatccaagtggtgtccgtgctggtgctatgggcttggtcccgcgtctttatgcatctgatagaggtcgcttccgcccgcggactgattcagataccccctcgtcgtgaatccgttcgagacatcgtcaccggtgccgacccggtactcgcctccacccgtctgggccgagtcctgttctggctggtggccttcaccatgctgtacatactgttggtgttcgccttctggggcctgtttatttactgactacttcattgagtagagtctgccgggcgtcgcggggaaaggagatgagatgtcgctgtaccgagacgaaggtgtggtgttgcgcacctccaaactgggcgaagccgatcgtatcatcaccatcctgacgcgtgggcatggcaagattcgggcggtcgccaaaggcgtgcgtcgcaccaaatcacgctttggtgccaggctcgagccgttcatgcgagtcgatgtgcttatcgctgaaggccgctcgcttgacgtggtctcccaggctgaagcggtcgccgcttacggtgctccgatcgcggcggattatgcggcgtatgaggccgccaacgtcatcgtcgagaccatcgataaactcgccagcaccgaacacgagcagctgacgaaccaatatcggctgctcatcggcgcgttgaacgcgctcgccaaacaatcccacgccccgcaagccataggcgactcctatgtgatgcgcgccttggccttggccggttggacgccacgattgggtacttgcgtggtatgcggcaaggcggagccggcgtacctgtccatcgcgtccggcggcgtgatgtgcgaagccgaccacactaccgatgcgcgccgtatcgcgccgttcgtgttaaaccagttcgatgcactgattcgtggcgattggtcggtgcttgatgccgcgcctgtggagcgggttgtgcaggagttggttgaagattggggggagtattacctcgaacgcccgattcgttcgctgcgcttgatagattcatgagtatggcttttgagaacgttgattacacgtcgttggacattcccgcagctccgttcagcgaccctgcccgtattcccgacttccccaagaacaaggtaccccgccatatcggtgtgattatggacggtaatggtcgttgggccaagcagcgcggcatggtccgcaccaatggtcatcaggccgccgaaccggtggtgttcgacactatcgccggtgccatcgaagccggtgtgcggtatttgagcctgtacacgttctccactgaaaattggaagcgttcgccccaggaagtgcgcttcctcatgggcttctcgcgtgaaatcatccaccgccgcgtggaacagatggacgagtggggtgtgcgcgtgcgttggtccggccgtcgccccaagctgtggaagtcggtgatcgacgagcttgaggccgccgaggagcgtaccaagaacaacaaggtcatcgatgtggtgttctgcatcaactatggtggccgtgctgaaatcgccgacgcctgcgccgccatcgctcgcgaagtgcgtgatggcaagatttccggcgaccgtgtgactgaaaagatgattgccgaccatctgtacaatccggacgttcccgattgcgacttggtgatccgtacttccggcgaacagcgcacctccaacttcctgccgtgggaggccgcctacgccgagctcgacttcgtgcccgaactcttcccggactgcggccgtgacgtgctatggcgctccatcgaccattacatccaccgcgatcgccgatttggcggcgtgaaataaagaacagtccggtggactgttcgttcacgccgcctggccgaggccgataggacatgaccaggtaatgatgagtccggcgaagccggtccttgattgctgggggtgtgaaatagtccttgttaagcccctcaaaattgagggggctgagccgtaaaacaaacagcccgatgggctgtttgtaggcgaaggcgagacgagagtcgagccagaagaatgcgagcggcagcttgtccgtaattgcggtcgagctgtccgtgtagcggactgaggggagttaccggcacacctcagccatcctctctgtaaactcatccaaaaaacgtcccgaatccgcaccaagtgccacatgcacatgcggcatggaatgattcaccagcccaaccgggtctccggtggtccggcctcgtactccattgaaatcaccggtattggtctccgcgcgcaacgcaagatcaaaacaatcgaccagtgaagaatcaagtgcaaccgccgccgccaacggatcatgcaacggcatgccgccagagaacagtgcggggtcggcttccaaatttgccttgatggaaaagtccgcgagatcagccaagaaccgcccgcgcttggtccccgtcgcacgccactggtcggccgccgatcgcggtagcaaacactggtgagtcacatcaagtcccaccattgtgatgtctgcgccggaatgaaatacacgattcgcggcctcagggtcttggatgatattcgtctcggccaccgcatcccaacaattgccgggttgggtaagcgtaccgcccatcatcaccagcctgagtttcgacgcaatatccggtgcccgagtaatagccgcatccacatccgtcaacggcccggtagacagcacggtaacgtctcggccaaactcgcgaacctgctcaatcagatactcaatcccatccgcagcatcaacggagcacctccttgtgcccccgctgacgagagctgtcgatgtagccgactgggggcggtccacagaccgaaagcgacccacacgaggataagaccccgacgccggatgagcatgaacgtcccccgccaaatacccgccaacagaaacaaccccatcgggcacatcctcagacatgtcatccccagacatatcatccccagacatatcatcaccaggcacaccagctccatcagccagagccccggcccctgccagccaagtattccccagtccatccttcccatgaaactgggcacaccctgcatcgggaataaacgcatcagcccaagaaggatgctcggagcccaaaaacaccggaatatccgcccggccaaacaaatcaagcaccgcgcaagtattggcataagccgtgttcgcatccacattgccataactggcgatcacaccgctcagctcgcactcatccgccgaccccaacaaatacgccaacgccaacgcatcatcaacaccggtatccatgctggcaataatgcggtcaggacgttgggccatggaatcgcctccttgttagcatgattcgctatgaataaccttatcggccgatacgcaaaaatgcgtcctttcctcatgggaaggacgcatttttgcgtagattcaaactcggaatatcggaaattacttgccgaggaattcgtcggtgccaaggtccttggcctgcggggcctcatgaatcaccttgtcatgactgtcagtgtaggcgtcttcttcagccaggaagtcgaagtattcctgagtgcccttgaagtcgttggtgccgagcacgaaagagccgtccttgatcttggccggatcgccccagtactggccgtcgacgataacctgcatgctcttcttgacgaattcgggcttgaggttggcgtcaggggcttcgtccacgagaatctgcgcggcgtcatccgggttggcgtacgcgtactcgtaacccttctgagtggcctgagtgaacttcttgaccaggtcgggattgttcttgatggtcttgtcattggtgatgatgccgatggcgtcggcgttgccgggcacgccgtagtcaggctcggtgaagcagttgagcttcgggccgtacatgtcggcctgcacgccttcccacgtggcgtagaagccgccgaaatcggccttgccggattccatggtctggaaggtggaggtgccgacggtcaccttgtcgaactcgcccttgccgccgtcggtctggatcatgcggcgcaccacggcgtcggactcgttggagccgaaggtggcgaaggtcttgccatccaaatccttaggggacttgatggcggtgttggacgccagtgcgcaccaaatggcgctcggcttctgctgcacctgcagcacctgcttgatgtgagcgcccttcagcgtgtagatgcccacattggtcaagttggacagggcgaagtcggccacaccgttgttcacggcctgttcggcaccggcctgggccacggccacgatatccacgtcaagaccggcatccttgaagtagcccttgttcttggccacgtacacgccgatgtggttggtatcgggcgcccaggaaagcatgaaagtgaccttcttgaggtcggaggtgttggagttggaggagtcggcggtgttggtctgaccacatgcggcgaaaccgaaagtcatagcaagggcgcccacgagggcagcggccttggatacaaggcttttcttcataatgatggttccctaattcgttgtctctctatcgttctctgggattgcttcgaacggaagtcggcagaaaacgatatggagggccttgatttccgttcgaccagcgcccccgacattccctatgaaagctcaagaaagccggtttgccacacgctggtaaagctgttccattatagagacagggctggagacctcatgagaagccgccccgttcagtcggttctggccgccggcttgtgtctttgacggtaaaaagaactactggtccgcgtcggggtcttcgtcatcgccggccgggccgagcaggatgcgctcgctggcgttcaccgccagcatcagtacgcatgtcatcaggataatgacgatggtggcggagaagatcagcggcgtgcggaacgaattgtaggcagcctgcagccagatgccgaggcccttgcgcgcgccaagatattcagcggtggatgccgtggcgaagatgtatgcggcagatacgcggataccgccatagatctgacgtgcggcaacgcgcagcttcacgtgccagagcgtccagaccggggtcgcgccgcaggtcaatgcgacgtcggaatagaactggggcaccgcttctagtccgcgcacggtctgcacggcgatggggaagaggccgaataccgccacgattacgattttgccggaaatctcaaagccgaaccaaatcaggaacaacggggcgatggaaatcagcggcatggtttgtgcggcggcaagcagcggatagaacgccgcgttgaacgtgtgcgagcagtacagtgcgatgccgatcataatgccgaagaacacggcgaacaggaagccgaccacgccctcatagccggtgatcgccgcggccgggccgagcgtgttccacgtttcgatggtggcggcgaaaatctcgcttggcgcggagatcatcgtgggggagacatgtcctagatccacccacgtttcccagactgccagcaatacgatgacggcgatgacggtgggcatgcggcgcttgaggcgcttggcgatggacatgggatgtcaccttgctttccgcgccagtccggtttgctggtggcgcttgcggccggggcgtggaacagtaaggtgaggagcctgcgcgcctgccggtcgtgtgatggattgtgttatatgccgtccatcagtataggcgaaggcgaacgacaggggcacacaaaaaacctccctctgtgagggaggtgagagagctactccagtccgatggacttcatgtggtggagcttcagggaatccaccttgagactaccggactcggcggcgagcttgatggcacgcgggccttcggaggcgtaggagtaggagctcagcacctggtggccaccgttgacgtagacctccacggagccgcgatccacgaacacgcgcaggtccagcttgccggaggccagttcggtgtcggtcagtggggcggcgcggtagccgcgatcgccgttggccatggcctgacgatccaccaccacgcggccgatctggtcgtcataagccacgtaggtgtaggcaccgtccttagtggcatgaatcttcaggcccgcacgctcggcagtggaggcggccaagtcgatggtcatttcgatctccacggcctcggcgtcatcggcgatgacctgctcgccatccatatcgagcgtgatcgaaccatggtcgagggtatcctcgcgcaggccttccatttcggcgaccggcgcggtgaccacgtcgccgtcatcgtcaagggtgatctcgcgcggcagggtgagctggccacaccagccgtcatcctccatgggaatcggctgcacgaacgggctcatccagccatagacgatctgacggccgtccacgttgaaggactgtggggcatagtagttgtggccgcaatcccacaggcggaactcggtttccggcttgaattcgccgcccggctcccacgtgccgatcatgtagccggcgttgttgacgttgcggttcatgaagccgctgggcttggaccccatggcggagaagccaatgacccacttctcgttgccgtccttgtctttgatggggaagaagtcggggcattcgagcatgaacacgtccggatccgggtgctggaagagcacgcgctcgtattcccagcggaccatgtccttggaggagaacagccacatctggccgcgcttgtccgcagaggagacaccgaaggtcatgtaccaggtgtcgccggtcttccagaccttcgggtcgcggtagtgatggtcgaccttgtcggtcgggcagtcgatgatcatgccgcgcttggtggcgctggtcagctcgtcgttgtccggctcggcgagcatctgcacctgcccgtcgccgccggtgttgtcttggccgttggcccaacggtggccggtgtcgtagaacttgagcttgccatcgtcgccgattactgcggaaccggagaatacgccgtccttctcctcttcaagggtcggggcgaacatgattggctcacgcttccagttgagcatgtcggtggaggagacgtgtccccagtgcatcggaccccactgggtg

SEQ ID NO: 1528 - DNA, 5860 bp, Unknown
  R257_15m  MAG No. k141_56118
ccgaattcgagaacggcgacaccggcgagatcaagtcccagaccgtgttcatgggcgacttcccgctgcagaccccgcacggcaccttcatcatcggcggtaccgagcgagtcatcgtctcccagctcgtgcgttccccgggcgtctacttcgaccgccagcaggaccgcacctccgataaggaagtcttcggcgcgaagatcatcccgagccgcggtgcatggctcgagttcgagatcgacaagaaggaccagccgcaggtgcgcgtggaccgcaagcgcaagcagtccgccatcgtgttcctcatggccatcggcatgaccaagtccgagatcgcccaggccttcaaggactacccgctggtgctcgacgccctggagaaggaaaccctcgagacccaggacgaggccctcgtcgacctctaccgcaagattcgtccggccgacaccccgacccccgaggccggcaagaacctgctggactccttctacttcaacaccaagcgctacgatctggcccgcgtcggccgctacaagatcaaccgcaagctgggtgtcgaggccgatttcaacgaccgttccctccaccaggaagacatcatcgccacgatcaagtatctggtggccctgcacgacggtgcggcgaccttcccgggcaagcgcaacggcgaagacgttgacctgcgcgtggacgtcgacgatatcgatcacttcggcaaccgtcgtatccgccaagtcggcgagctgatccagaaccagctgcgtaccggtctgagccgtatggagcgcgtggtgcgcgagcgtatgaccactcaggacgccgaggccatcaccccgcagtccctgatcaacatccgcccggtgaacgccaccatcaaggagttcttcggcacttcccagctctcccagttcatggatcagaacaacccgctgtccggtgtgacgaacaagcgtcgtctttccgcactgggccccggcggtctgtcccgcgaccgcgcctccatggaagtgcgcgacgtgcacccgtcccacttcggccgtatgtgcccgatcgagtctcctgaaggcccgaacatcggtctgatcggctccctggcgaccttcggccgcgtcaacccgttcggcttcatcgagaccccgtaccgcaaggtcgtcaacggccacgtgaccgacgaggtcgagtacatgaccgctgaccgtgatctcgaccacgtcatcgcccaggccaaccaggaacttgacgagaacggcaacttcgtctccaagtccgcccttgcccgagtcggcgaggaagaggcagtcgatgtgccggtgagctccgtggattacatggatgtctccccgcgtcagatggtctccctcggtgcctccctgattccgttcctggagcatgatgagggccaccgtgcactgatgggtaccaacatgcagcgtcaggcagtgccgctgatcgaatccgagcgcccactggtgggcaccggctccgaatggcgcgccgccaacgattccggcgacgtcatcaagtccgagaaggacggtgtggtcacctacgtgtccgccgacctgatccgcgtgatgaacgacgacggcaccaccagctcctacaagctggccaagttccagcgctccaaccagaccacctgctacaaccagcgcccgatcatccatgatggcgagcgtgtggaggccggctcggtgctggccgatggtcctgccatccagaagggcgacctggccctgggcaagaacctgctcatcgccttcatgccgtggaacggctacaactacgaggatgctgtgatcatctcccagcgcctcgtgcaggacgacaccctctcctccatccacatcgaggagtacgagatcgacgcccgcgaaaccaagctgggcgccgaagagatcacccgcgacctgccgaacgtcggcgaggacgctgtggccaacctcgacgagcgcggcatcatccgcatcggcgccgaggtcgaggccggcgacatcctggtcggtaaggtcaccccgaagggcgagaccgagctgaccccggaggagcgcctgctgcgcgccatcttcggcgagaagtcccgcgaggtgcgcgacacctccctgcgcgtgcctcacggcgagaccggtaccgtcatcggcgtcaaggagatcacccgcgaggatgccgaggaggacggtgacgagctgcccaacggcgtcaaccagatgatccgcgtctacatcgcccagcaccgcaagatcacggtgggcgacaagctctccggccgccacggcaacaagggctgcatctcccgcatcctgccggaagaggatatgccgttccttgccgacggtactccggtcgacatcatgttgaacccgctgggtgtgccttcccgaatgaacctcggtcaggtgctcgaactgcacctcggctggattgcccactccggttgggacatctctttggatccgaatctggaagccgagtggaagaagctgattccgtccggtgccgagaaggccgagccgaacaccccggtcgccaccccggtgttcgacggtgtcaagcctgaagtcctgaagggtctgctgtccactacgctgccgaaccgcgacggcgaccgtctggtcggccccgacggcaaggccaccctgttcgatggccgtaccggtgagccgtacaccaagccgatttccgttggctacatgtacatgctgaagctgcaccacctggtcgacgacaagattcacgcccgctccaccggcccgtactccatgatcacccagcagccgctcggtggtaaggcccagttcggtggccagcgcttcggcgagatggaggtgtgggcccttgaggcctacggtgccgcctacacgctgcacgagatgatgaccaccaagtccgatgacgtcgacggccgcgtgcgcgtctacggtgccatcgtcaagggcgataacctgccgccggcaggtatccctgagtcgttcaaggtgctcctgaaggaaatgcagtccctgtccctgaacgtcgaagtgctcaacgccgaaggcgtggccatcgacatgaaggatgaggatgacgatccggccagctccgctgacgacctcggcttcaacattggcgcccgccccgacgcggccgccaaggaagaccagaaggccgaagagcccgaataccagtgatccctcgggctgcatgcggtcaatacgccgcgtgtagccccgccaacgtgaaataaataacgtacagagacctttccggtttgcactacccctcagtcagccttggctgacagctcccctgacaaggggagctcgggaaggtctcaagaacagaaacggattaacaagtgctggacgtcaacgcatttgacaagattcgcatcggccttgccaccgccgatgacatccgtggttggagccacggtgaggtcaagaagcctgaaaccatcaactaccgtacgctgaagcctgagaaggacggtctgttcggcgaacagatcttcggcccgacccgtgactgggagtgcgcctgcggcaagtacaagcgcgtgcgcttcaagggcatcgtctgcgagcgatgcggcgtcgaagtgacccgcagccgcgtgcgccgtgagcgcatgggccacatcgagctcgccgccccggtgacgcacatctggttcttcaaaggtgtgccttcccgcctcggctacctgctgaacgtcaccccgaaggatctggagcgcgtgatctacttcgcctcctacatggtcaccgaggtgaacgaggacgagcgccacaacgatctgcccggcctgcaggacgagttcgattccgagatcaagcgccttgagcagcgccgtgactccgacatcgaagctcgcgccaagaaggtcgaagaggatctcgccgcccttgaggagaccggcgaggccaagggcccggcccgcaccaagctgcgtaacggtgccgagcgtgatatggccgccatccgcacccgctacaacgaccagatcgcccgtgtggacgccgtcttcgacaagttcaagaagctcaagcccggcgacatggtcgacgacgtggacctgtggcgcgagatgcaggaccgctacggcgattacttcgacggctgcatgggcgccgaagccatcaagaagcgcctgcagtccctcgacctggagaccatctccaaggaactgcgcgaggagatcaaggacgcttccgaacagcgtaagaccaaggctctgaagcgcctcaaggtcgtcaacgccttcctgaccaccggcaacaagccggaggccatggtgctcgacgtgatcccggtcatcccgccggacctgcgcccgatggtccagctcgacggtggccgtttcgccacctccgacctcaacgacctgtaccgccgtgtgatcaaccgtaacaaccgtctgaagcgactgatcgagctcggcgcccctgaaatcatgctcaacaacgagaagcgcatgcttcaggaagccgtcgactccctgttcgataacggccgtcgtggtcgcccggtcaccggtgcctccaaccgtccgctgaagtccctgtccgacatgctcaagggtaagcagggtcgtttccgtcagaacctgctcggtaagcgagtcgactactccggccgttccgtgatcgtggtcggcccgtccctgcgcatgcaccagtgtggtctgccgaagccgatggccctcgagctgttcaagccgttcgtcatcaagcgcctcgtggacctgaactacgcgcagaacatgaagtccgccaagcgtctcgtggaccgcggcgacgccgaagtgtggggcgtgctcgaggaggtcatctccgagcaccccgtgctgctcaaccgtgcacctacgctgcaccgtctgggtattcaggcattcgagccgatcctggtggaaggcaaggccatccatctgccgccgctggcctgcgccgccttcaacgccgacttcgatggtgaccagatggcagtccacctgccgctctccgccgaagcccaggctgaggcccgctcgctgatgatggcttccgacaacatcctgaagccggctgacggtcacaccgtgaccatgccgtcccaggacatgatcctcggtctgtactacctgtccaccgtgctggaaggcgccaagggccagggccgcgtgttctcctcgctggaagaggccgaaatggccctcgaccgccacgagatcgacatgcaggccaaggtgctcatccgcctgcctgagaccttcgtgctgccgaagaactgggagcccggcgaggtcaaggtgctcgacccgcgcgaaggcgaggacgaggtcgtcaaggaagagcgcttccacgacggcaccgtgctgttcgccacctcctacggccgcatcctgttcaacgagactctgccgaccgactacccgttcgtcaacgagcaggtggccaagggccgtctgtccaagattgtcgacgacatcgccatgcgttactccacccagcaggtggccgccacgctggatgccctcaaggatctcggcttcacccgcgccccttggtccggtgtgtccttcgccttctccgacgtgaacgagccgccggagcgcgacgagaagatcgccgagtacgaggccaaggccgacaaggtcaacgccaactacgagatgggtctgttgaccgaggaagcccgccgtcaggagctcattgacctgtggaccgagtgcacctccgaggtgtccaaggaagtcgaggacaagttcgacccgacctccaacctggccatcatcgtgcagtctggtgcacgaggcaacatgatgcagatcaaccagatcgcaggtatgcgaggcctcgtggctaacccgaagggtgagatcattcctcgtcctgtgaagtcc

SEQ ID NO: 1529 - DNA, 22375 bp, Unknown
  R257_15m  MAG No. k141_56211
ggctacggattcacgcggggggggggctgggcgcctcggccgaggaagcgcgaacgggcgcggcgacaacaaacactcgaccgtcctgcaattccccaagcccaaagccaacagggagcatccgacgatgaaacccgttgaactcatccaaagcatgctcaggaacagctgcagacccggcggcatcgtctatgacccgttcgccggcagcggctccacgctcatcgccgcccacgggctgcgcatgaaagcgctcgtcgtcgaactcgacccgaaatacgccgacgtgatctgccggcgcttccaggaatacaccggcatcatgccggaactcgacggcaaaccccacgacttcaccaaggacaactgaagggaggtgaggaaccttgaccgccgaatccgacgccaaggccctcaacctgttcctcgccgccacacccatcggccagatcaaaaccacgatgggctaccggtcgaccacaagcgcgatggcggcaatcacccgcgccctcaaaagcgcgcgatccggaaagaacccggacgccgcgcgcagcatcgagatcgaacgcctcgacagcatctacaggcagatctacccgctcgccctgcaacaggatgctaaggccatcgaccaatgcctcaagattggcgaacaacgcctgcggctcatggatgcgccgaccaaggcgcagaagggcctgctcaaagcatatgaggacaccgtcaaagcgctcgatgaccggctgaagcccgaagacagcgctctgattcaatccggccgaatgatcgccagccagatcgactacgccgtcacccacggcaccggcatcgaagtcaccaaagccctctacctcatgccgcacttgatgaacgtgctacgggagctcggagccacgccggacgctcgcggctccatcgccaacgcgatccaggatgcgaagccgaagcaggtgtccgacgaattcgaggaatacctggcgaagatgacctaggaggatgcgcatggacatcggcgagatcgacgacgacgcccacggcatcaccacccccagaatctacacgccaccgctccggcccctcaccccggccacatccgacggctacggggtcatcgaattcgccgaacgattcctccacgtgaacctctacccatggcagaaatggctgctcatccacggactcgaaaccaaccccgacggatcctaccggttccgccgagtcgtcgccgaagtcgcacgacagaacggaaaaaccaccgtcatgagcgtcctatgcgcatggtggctgttcgtcgactccggccgccggcccaaactctccccatcatggaagttcctcatcgtcggagcagcccagaccctcgacaacgccagagccccatactccgccgtactcaactggtgcaaccccacgccacaaaccgacgaggaagccgcgctcgcggtgcctgccctccagaagcgtgtgcagcgggtcaacaacagccacggcgaagaggcaatcatctgccgcaacaaggcgcagtacatcgttcgagccgataagaacatccgttcgaagtccgccagccgcgttgtgttcgatgagcttcgcgagcagcatacggacgatggctggaacgcggtcagccagaccacgaaggccatctggtccagccaactgtggggcatcagcaacgccggcgactaccgcagcatcgtgctgcgcagggtagtggacgagggacgccggctctccgactcgtggaacgcgagcgtcgaaaccggccagcagaccgtcgaagaatggacggaggcgcacgacgcatcctacgggtacttcgaatggagcgcgccggatgggtgcgggctcgatgacctggatggcatacgtcaggcgaatccttccctcggctatgggccgatgacctaccgaagcgtgatcgccgacatcaacggcatgaccgaagcggcatatcgcaccgaggtgctctgccagtgggtgaccgcggacattacgccgttcatcgatccgaagcaatggaagcgcggcatcgacaagaaatccagtatcccgttcgaaaaccgtgtggtgctcagcgtggatacctcggcggaccgtgagaccacatacatcgcagccgccggataccgggccgacggtctgccacacgttgaactgatcatgcggcgcgacggcatgctctgggtacccaagtatctgggcatgctgcgtgaatcatggccgaacatcaccgagatcgccatccaatccaagggatgcccggccgtcgacttctgcgatcctctcaccgaagccggctggaccgtacatctcatcgagggattcagggtgggcgcatgcacaggccggttcaaggaccgcgtgaaggaaggcaaactccggcatctgccgcaaccggccatcgaacagcaggtgagcgtggccatcaccagacggcttggcgaagtcgaagtgtgggaccggcagaaatcggccatgcacatcagcgggctcatcgccgaaagccaggcgctctacgcgttggaaaccatgaacgccgaaccggtgaaacaacagcgcagcgcatacgacaccgaaaccggacacggactgctcgttctctaggaaggaggctgaatcttgagcatctggcagaaactcaccgacatattccgccccacctaccacatcagcttcgacatggccgacgcgatgaccatcatccaaggccaatcggagaccgaactgtacaagacccagccgcatctgcgcacggtcatcagcttcctcgccgacaacgtcgctcaggtcggattgaaggaattccgcagaatttccgataccgaccgccagcgcatcacggattcgccactaatcaaccttctcaagcagccgaatccagacatgaccggcttcgagctgctccgccaattgaccgcggatctggcactccacgacgtggcctactggatcgtcacccaagcccccgaccgggacatggaacgcttcggcggctggcagatcaggccgatacccccatcatgggtgaccgccaagcaggaaggcagcgtgttcgccccggcctcctaccgcgtggatacgggactcggccgtggatggatcgacgtgcctgccgaggacatgctcgtcttccatggctggaatcccaccgacccgaccaacggggtcacgccggtcatggctttgaaggacatcatcaacgagcagatccaagcctggagctaccgcacgcagacatggcagcgcggcggccgagtgggcaccgtgctcgtcagaccgaaggacgcgccgccgtgggacgacaccgcgcgcgaacgcttcgcccgcggctggaaggaattcaccgacaagggagcccgcgccggcagcaccccgctgctcgaagacggcatggaactcaaacgcctcggcttcaacgcgcgcgaggaggaattcagcgaagtcacgaagctcagcctgcagaccgtggccagcatctaccacgtcagcccggtcatggtcggcatcctcgacaacgcgaacttctccaacaccaaggaattccgcaaaatgctgtattcggagaccttgggcccgaccatgcgcatgatcgaggaccggctcaacacgttcctcgccacgatgatcggcgccgacccgctcgactacgtggaattcgacatccgcgcgaaactgagcggcgacttcgaggaacaggccagcgtgctctccacatcggtgggagcaccgtggatcacacccaacgaagcccgagccacacagaacctgccccgcatcgaaggcggcgacagcctcacggtgccactcaacgtcacccagggaggccaggcaagccctcaggacggcggcgacccgatacggccctcatctgatacggacgaaaccgcgaagaaccacatcatcgccatgtggagggcaaggctcgacaaaagcgtgcgcagcaaactcggcgccggcatcgacgtggaaagcatcggctggctcaaatggcagaacgagctccaatccgacctgaccatcaccgcgcatatcgaccaattcaacagcgggctcatcgccctggacgaaacccgcaaagcccatgacgaatacgcgaaggagcaacagcatgcggaccaaacagcttgattgccggttcaagaccaacaacgagaccgacgacctgcaggaaggcgaattcatcgcctatcccagcacgttcacccgccaacccgactgctacggcgacgtggtagcccccggagcgttcctcgacagcatcacccactggaaggaaagcggcaacaccatgcctgtgctctacgggcaccgcatggacgaccccgactacaacatcggaggcgtcaccgacatgggcgaagacgaccacggctggtggatccgcggcagcttcgacatggactcgcccaaggccgcgcaaacctaccggctcgtgaaagccaaacgaatctcgcagctctccttcgcattcgacgtggacgacgaaggcaccgtcaccctcgacgacggcaccaaagccaacgagctccggaaactcaccgtctacgaggccagcttcgtccccatcggagcgaaccaggacaccagcgttgtcgccatcaaaagcatcagcgaacaattcaccaaagccggccgcatgatcagcgccgcgaacgtggacatgctcaccagcatcagcgaacaactcgcgcaggcctccaaacaaatgaaggattttctggcatcggcgacggccagccaggagcaggaaaacacccagagcgacggtgcgaaggcatcggagccggacaaggccaagaacgaggagccccaaggggccaagtccgaggagcccaaccggaaagccgaagcggaagcgctcgacctcgccattcgaatcgccctcaaagggcagaaaggagagtagacatgtccactctcatcgaaaagcgagccgcgctgatggcgcagctcaaggagaagcaggccggactcaaggccggggaaatcagcgacgatgacgccaccgccatcaagcagctgctcgaccaggtcgaccagctcgaccagcagatcggcaaggccgaagaccaggcgcagatgatcgccaagatcggtgcgctcgccgccgcatcgacccccaccggcaatgactccggtggccaaaacgatgacgctccggccaaaagcgccggcgacctgttcgtcaagtcgtatgcgaaggacgtgggcacccatctcaaggccggctacgcggtcgaattcaaggccaacacggacacccagaccgtgggggactccaccggggcgttcgcaccttatacggtgcagaccgacacccaggccgtgttcccgtaccagcgtccgctcgcggtggccgacctgttcagccagggcaccatgggagcctccacgaacgccgtcaaatacccggtgttcggcgaactcgaaggctccgcgggcacggtcgccgaaggcggcctcaagccccagctgcacttcccggatccgaagtggaaggccgatgacctcaaggaggtcgccggctggttcgccatctccgacaacatgctcgacgacctcgactggctgcgtggcgagatcaccgacttcgccgcctacaacatccagctgctcgaggaaacccagctgctctccggcgacggcgcggacaacaacatcgacggcctgttcaaccgagagatccagaccctcggccagggcgcagactccgacgcggaccgcatcttcaagtgccgtaagctcatcgccaccgccaccggcttccagccggacggcatcgtcatcaacccgaccgactacgaggccatccgcctgtccaaggacgcgaacggccagtacttcggtggcggtttcttcaccggccagtacggccagggcggcatcatgcaggatccgccgctgtggggcgtcaagaccgtggtcaccgaagctatcgcacccggcaccgcgctcgtcggcgctttcaaggccggcggcaaggtgctgcgcaagggcggcctgcgcatcgaatccaccaacgcgcatgccgactacttcatcaatgacaaggtcgccatccgcctcaaggaacgcctcaccctccaggtgaagtacccgaaggccttcgtcaaggtcacgctcggcaagccgaccccggccacgaagtaaccccgatcacaggaaggagagcccagatggcagaaccccccaaaggcaccccggacatcatcgagaaccccggagagttcaccacggacgggctcttcttcctccgtgccgcacaagccgcgatccgtcgcgaatgcggatggcacgtcaccccaagctggacgcacactatccgcgtcgacggctacggcggcggcaccctcatacttcccagcatccgcgtcaccgacattggcggcctcgaattcgacggcatcgaccatgccgatgacatcgactggtcggagaaaggcaccgtggtgctccgccacggcacgctgccggatagacccggagccataagggtcacactcaccgacggctgggaacccgaagacgtgccggaactacacgcgctcatgctctccctggccaaacgagccgccacggcaccggcgccgatgatagcctcgcaaagcaccaacggcagcagcatcagctacatcaccaacggcggcgccccaataggactccaactattcgaagcggaaaaacgccagctcgacccataccgactcacgtggggagcacggacggcatgaacgcgctcgactacatcaccaaaagctcaaacggattctcactctccggagccaccgacttccagcgcctgcgagccagacgcacacctcgcgccatgaatccgaagcaaaccgatgaggactggcagcatcccgacatcatcgaacttcgcggcgctctcgcatcctccaccagcacgcggcttcccgacgcgctggatatgcagaccaccagcaccgccgtgctcaccatcgacaatcccaaagccgatgtgcgcataggcgaccgcatcagagccatgccggatgacggccgcctatgggaggtcagcggcttcccctcgaacgacgtgaacgcgttcagcggctggcagcccacactcgaaatccaactcaccgaatggaggggatgacacatgccggcggcaggacagaccacggtcgacttcaacaactcgttcttcgacgagatgctcaactcggccggggtgcgggccctgaccagaggggcggcggagaaagccctcaacatcgccagggcgaacgccccggtggataccggagcctatcgagacgggctccaagtggaggccgtgcagcatgcgcaccgcaccacctacagggtggtcggcaccgacgcgaagacaatgctcatcgaatcacagaccggcaacctcgtcaaggcattgaagaaggcgaaatcatgagcgtgatctcaccggacatcgagcaatggctgtgcgattatctgcgagaccgggtctacgacgtggaaggcctgcaattcgacaaccggaaaccggaagcctatcgcggcgattatccgctcgtcaccatccgcgacgacagcggatccggagacgggctcgcgcaattcgatcgcagcatcggcgtcaacatctacggatggacccgcgcccatgacaaaccatgcaaggacctcgcccgccgaatccaagctctgctcatggacgatgccatcgcatccgccgagaactctcctgtcatcgcggtcgaccactcccaatgcaacggcccctacgtggtgccggagaacgaacccaccgcccactactacctgatcatcgcctattcggtgatcggagaaatccaataacccaaccaacaaacaccgaaaggaaccatcatgacagcagacgctcagggcaacgacctgacagcggtcaagtacgtaacctcatccaagatcatcatcgccccatacgatccaaccgcgaagctcaccgcatccatgatcgcgaagaccgtggccgacccgatcaccacgctcaaggacatcttcagcaaggggcacgcggtcggcctcatcaccagcgacggcgcgccgcaggacgcgcgagactccgatgacgccaccgaattccaccagcccggctacatgctcaacgccgacccgaacctcaccctcgcgttcacggtcgccgaagacaacgaaaccgtgcgcggcatgaccatcggcacccccgatgccgacggcgtctatcacgtgagcgacaccatccaggattccaagtggatcgcctaccaggaaacgcactacaagaccggcacaatccgccgccgcctcggcgtactgcagaccaccggcagcgaacccgcgcaggacacgcgaggcgaagtctccggcatcgcgctgaccaccacctggcagaaggacagcatcgtcgacaacggcaacagccgctacctgcagtcctactacatgccgaccaccaccgccaccgagaccggcaagtaaaccgaacgtccctcgcatgagcttcttctcccatcggcatgcaagggacctcccgccgatgggagaaaccgataggagaacaccatgaccgcaaccgaatggacgccaaccctcgaagacttcgaaaactggacagacgacgacgaacaatccgcgctcgacgccatcgcctcgcggatgaagatccgccacatcatcaagaacgacgaatactgggcgctcgcccccggcggagtcatctacaagctgccaatgttcctcagcatccacgatttcgaggccctctcatccgcagccgatgattccgaaagcatcgaacagatcaaacgcatcctcacccagttcgccggcgaggaacaggcgaagaagctcgaagacgggccgacacagatcgcgttcaacctgcttcaggactacggggccaccctgatgaagacccaaggcgtcgaattgggaaaatcgcaggattctgcagaaccctcagctccaaagaaggagtgaagatccgcgccgacttcgccaaagccggatggagcctggaacgcgacctcggccgacgactgcgctacgcggacgcgataagcctccacgaagccatgagcgtcgacccgtcaacatacacgggagcttccgccctggggctcgcgttccccatgaccgccaccgacatcaccatcctgcacgccatcggcgccaacggactggtggacacaagtgacgacagcgggaatccggatgatgcggcggcgccgacggaaatccgcgacgccgagccccacgagagcgccctattcagcatgtaacacctagcaaggaggaattccgatggcgggaggcgcagaggtcggcaccggccacatctccatattccccgtgatgaacggcttcagaaacgccgtgaacaaggagatgaagaacgccggcaaaaccgggtcgaaaaccttcgacaaggccttcggaaccggcaagaagataggcagccggttcggcacgtccttcaagaacggattcaaaggcagcgcagaccagcagctcgccgacgacgtgctcaagccgttcaagaaggacgtggcgcaagccacctccaaagcctccgccgcccttctcaactacaagcagtccaccgtggccgtcgccgcggcccaggacaaactcaacgccgccatcgcgaaatacggtgccgacagcacccaggcccaggccgcagccatcaaggtcgaacaagcccagctccgtcaagccaatgcactagagaaatctcaggaagcctcggaacgggtcagggaggcgaaaagggcgcttaatgccacagaaaacgagttgaacaccacgaccagcaaaacgacgggtgtattcaaatcgttcgcgtccgggctcaaaacctccgattccgcactgcttggcgcaaaaggcatagtcgaaaacacatccgaggcattcggtctcctcgtgcgcagcctgctcggcgtcgatgccatctggaaaccgttgggcacgaagatcagcggcttcgccagcacggcagtggctaaactcagcggcttcgccgtacaggtcggcgcgaaaatccaaaccggactcaagggagccatcagcgccgcccaacaaaccctcaaaggctggggcaacagcatcgccacaaccgtgtcaagcatcgccaaaccaatcggcgcggcaatcaacgcctggacacaaccaatccgctcattcggaggcaagatcggctccgccatcggaaacgtcgccggaaaagtaggacagaaactcgcgcctgttgccaacgtagccaagaactacttcggcaacatcgccaccgccgccggagccgtatggtccaaactcccagccggagcacagaccgccgccggggcaatcggcagcacgctcggcaacctcgcctccagcgcgggcaacgcattcaagagcctcgcctccagcgccggctcgcacctcaagagcctcgccaccggagcggtcgccgcagtgggagcgggcatcaccgccatcggagccaccgtgctcgccacaggcaagcaggcgctggccgcctacgccacgtgggagcaggcggtcggtggcgtggacaccctgttcaaggatgccagcggcacggtgcagaagtacgcgtccgaagcgtacaagaccgcgggcatcggcgcgaacgactacatgaaccaggtcacgagctttgcggcaagcctcgtgagctcgctgggcggcgacaccgccaaggccgccgagatgggcaaccaggccatcatcgacatgtcggacaacgccaacaagatgggcaccgacataggcagcatccagcagacctaccagtcgctcgcccgcggcaactacgccatgctcgacaatctcaagctcggctacggcggcaccaagagcgagatggaacgcctcatctcggatgcgaacaagctgcccggcgtgctcaaggacggcaacgacctgagcatcgattcattctccgacgtggtcgaggccatcagccgagtccagaaggagatgggcatcagcggcaccaccgccagggaggcagcgaccaccatcgagggatccgtggactcgatgaaggccgcatggcagaactggctcgccggcctcggcaacagcaacgcggacatgggtgcgttgagccagcagctcgccgaaagcatcgccgccgcgctgaagaacatcctgccccgagtgggccagatcgccaagggcgtcgtgaaggcgatacccgcattgttctccgatctggtgacgctcctgcccaaaccgttccagaacgcgatcaacgccatcggcagcgtgttcaacggattgggtgacatgttcaaacccgtgcggaacgccatcgccccgctgatagcctcattcgtggcgctcggggccggaggcatagcgccgctgctgtccaagattccgctgcttggcggggtcctgggaggattgagcggaccgctggccgcattgggcggacccatcggcatcgccgtggccgccatcggcgcgctcatcgccaccacgccgaaactgcgtgacgcgttcggagaacaggcctccgccctgttcacccggttcaaggccgagatcgcgagcatacagcctgcgttcgacgcgttggtgaaaagcatccagggcatgctcaagcagatcatgccggtcatcaccgatgccatcggccagttgataccggttgttggctccatcatccagacgatgctgccgctgatccccacgatcatcgagccgctcatcaacggactcaccggcctcatgccggcaatcagccagatcgtgacgagcctgctgccgccattgacggacgccatagcggcattgctgccattggccgcgcagatcatcagcatgatcacgcagatatccggacaggtgctcgccgccctcatgcccgtcatccagcagatcgtggacttcatcggccagatggcagccgccatcggcccggtaatccagcagctgatcccggtaatccaacaggccgtggcaggcatagtcgcgctgctccagcaactcatgccggtgatacagggcatcgtctcggtggtgggaaccgtggtatccgcgatcatcggattcatcactggctcgctgctgccggcggtgcaggcgatgctcccatacgtgtcaggcgtgatcagtggaatcagcggcgtcatccaggccgtcgtcggcgtagtctccggcgtcatcagcatggtcacctcactgatcaacggcgactggcaaggcgcatggaacgcgttcaagagcatcctctccaacgcggcaagcggcatcggcagcgcactgcaaggcgtcatcagcgccatcaaaggcgtgttcgccggagcaggcactctgcttctcagcgcaggcaaggccatcgtccaaggccttatcgacggcatcaccggcatgatcagcaaagccggcagcgccatcaaaggcgtcatggataccatcagctcgttcatcccgcactcgccagccaagcgaggccccttctcgggaagcggatggacgccgcaccgcggccgcgccatcgtcgaaggcctcgtcgaaggcatggacaaggcaagcccagaagcagccaaatccatccgcggcgtgatggccggcatcagcggcgccatgaccacgaacagccagatcgacacgacagccgcagccatcggaacaacggcgctcgccaccggatccggcgccagcctcgcggatctcatcaccgagatacgcggcctgcgctccgacctgcagtcactgcacgccgacctcggcccgaccatcgcgaaatacgcgccggccatgaccatccgcgaaagcaagcgcaagctcggcatagtccaaggagggaaccgatgagaaccatgacctacacctgcggcaccacccagcaccgcgtggtcgacctcatcgcacccgacggcatcatggtcaaccgcatcgaatccctgcgcacccacgcatgggatgtggaactcgccgcgcacggcatcgactccgcagcactcaacgcctccaccgtgcaactggaggcgaagtgcgcggatctgacgatgctggacacggcaagcaacctgttcgacgccgacatacgggccctagcctccacgggaaaccggaacaaagccggaaccatcaccgtggacggctgggcccaggccgcactcatcaccggcatcgaaccatcacaagaccttccaaacccagcgaaatacgcgctcaccgtagcgctcctcgacggcgtatggcgcaaaccagccgacacgcagcacttcctccccgacgaactgcaatccggcctctaccttgactacccctacgactacccctacgactacaaggcgccaacgcgcggcgccaacgccatcaacaccaccggcgccccaatgccgttcaaaatggtcatcttcggcccctgcacgaacccgtcaatcaccatcggcggcaaccgatacgaactgaccatgaccatcccaatcggcgcatacgtcaccatcgacagccaaaccggccacaaaaccatcacgatgaccgacatcaacggcggcactaccaacgtcttcgacaaagccacacgaggcaccggcctagacggcggacgctacatcttccaaccgataccagccggtgaaaccaacgtccaatggaacggattcggctgggacctgaccatcatcatggaaaggagcgccccagcatggctgacctcataatcaccgacagcgctcgcaagcccatcgcatccctcgacgactacgagctcgacctggcctacggcagcgatgagaacgacttcaaactcacctgtctgccacaaccggcggccggctctctcatcatgatggacggcaccgagtatggcggcatggtcaccgtccgtaacacggacggcagcgtggaaggccccacctggcatggcatgctctcacgtcgaatcctccagcccgatgcgggtaaggactacctcaccgtgagcggcaacgccgcgacaatcctcaacacgttgttcaaacgcatcggcctcgatagcttgttcaccgccgatgcaagcaccgtgaccatcggcggctggcagttcgaccgatacacggatgcgtatacgggcgtcaccaagatgctcacggcaaacaacgcgaaactccgactcacatggcttgacggccacgtgcacgccatcgccaaaccagtcgatcattacggcgacaccatcgacagcgacctgctcgtcttccaggcgtcgctcgactcgcagccggtgaaccacctcatcggcttggggcaaggggatctgcatgaacgcgtggtcgtccactggtacgcggactccaacggcaaggtcagccaatccaagacgctcacagggctcgcggaatacacagccatctacgactacagcaatgcccaagccgacgaactcaacgagaaaaccaaagagaaactcgaagagctccagacacagggcggcgtgagcgtcactctcaacgaccgtagcctctcgatggatgtgggagataccgtcaccggccgagacaaccggctcggcatcacgattaccgtgccgatctccaagaaaatcgtcaaggtcaacaacggcatcatgagcgtcgactacgaatgcggcaccgcggacggcgtcaccacaagcctcagcggcacggcggaatccggtggttccggtgctacgtattacgcggatggcacgaccatcacgatgaagaacaacacgttctcggccgtggtgactccgagccgcgtcgacggggtggagaagaccgccaccgacgcgtacacgctcgcatccggtttctcgtccgagatcggcaaggcgcagcagacagccaccgaagccaacgccatagcggcggcgaacgtggcggctataaccgcggcccttcccttatccgcgagcagaaatggtcaggccgtgcacctcacggcagcggaggccacagtcaacggatcaggactcatgagcgctgcggacaaaaagaaactcgacggattggagaactacacgcttccagccgccaccaacggcacaatcggcggcgtcaaaccggacggcagcaccattaccgtcaacgatgatggcgtcatcaccgcgcacgccacctcggccggaggtggacccgtgatgccgattagctatgtggtgatgaacaccaccggagccaatccggctagtgacttcggcggcatctgggagcagcgcccttcgctgggcgcatatgtgtgggaaaggacgaaatgagatgacggcgacattaggcaggctcggcctgctggaggcgaggctgctgctcgtggccggcgtgaccaaccggatacgactgctatgggtgcgcaacatcctgcgagcggacggctctcgcgccgcggtgccggtggatctgaccggctggaatccccggctgcaattgcgcagggatggcaaggtgctggcggatctgagcgactgcgtgacgctggactcgcacggtcatgtggacgtgagcgtcacagacgaacgctcctcgacgcttatgccatgcgcgggtgcgtgggacctgctgctggaaagcccgcagggggaagtgacgcgcctcgtatacggcgaatgggtggtcgccagcgccatcagcagaaaggagttctcatgatccgcacactggacggctgctcgtgtgacgaggggccggtaatcatcctcgaggacgcgatcatcggcgacgtgagcatcgtctacgccaccgacgcggacatcgacaacctgttcccaacaccaaccacagataaggaggaacacgatggctaacaccagcaaggtcatcgacctggaccggctcacccggttcaaagcaaagcaggacgcggccaacgacgccaagttcgccctcaagggcgaaggcggctcgatcgccacggccgacaaggcgggcatcgtcaagcccggcggcgatttcgacatcaccgaggacggcaccatcagcctgtacaaggcgatgggcatcaactcgttcaccgtttccccatcgcaggcggaacgcggttcgacggtcgcggacgtgaccgtcgcatggagcctgtccaagacgccgaaatcgctcaccctggacgacaaggcgcaggacacggcatccaagggcacgacactctccggcgtgaacctcaaagcggacaagacgtacacgctcaaggccaccgacgcgcgaaacgccgtcgccacccgcaccgccgacgtcgctttccgcgacaagcgccactggtgggtcgccgtcagcctcgacgcggcgggagtgaccgaccagatcatcaaccaggcgaccggcgaactcgccgcatggtacagcaaaacgttcaccctgaacgcggcggccgggcagcacatctactacgcgttccccgcgtcgtggggcacgccccgattcttcgtcggcggcttcgaaggcggcttcgcgttgttgaagacgttcgaccacaagaacgcgagcggcgcgaccatcagctacgcggtctggaaatccacgaacgcgggtctcggcaacaccaccgtcgaagtgaagtaaaggagaaccctgatggcaatcgaactgatcgacacgctcgcgccgaagaacaacggcacgttccccatggtcaaagccaaggatgtggacgtcgacggcaaacgactccccgagaaactcaaggagctcgaaacggctgccggaaacatcgagaccgccaccgacgcggacatcaacaacctgttcaaccccagcagcaagtaacgaaaggaaaccatcatggccacgaaattcatcagcctgaacaacctctccgcattcctcgccaaactcaagaccctgttcgtcgccaaggaactcaagaccggcagccccaacacctacaaggtgctctccgacaacaacctcaccgacgaactcgtcaccaagatccagaacgcgggagactccacgttctccggcgcatacgcggacctgaccggcaagccttccatcggcggcaaggagatcgccagcggtaaccataccgcggccagcctcggcctcgccacccccgcggacgtgaccaccgccgccaacaacgcgcgcgccggcgccatcaacgacgtcaagaatctcggctaccagaccgcagccaacgtcaacaccatcgtcaccggcaagggctaccagaccgccgcccaggtcgacaccatcgtcaccggcaagggctaccagaccgccgccaacgtggactccaaggtcaacgccgcgaagaccgaactgcagaactcgctcggctccgcattccgcgccaagggatccacgatgttcgccagcctgcccgcccccgcatccgccaccaagggcgacgtgtggaacatcaccgaccagttcaccaccgacgaccagttcgtcgacggttcaggcaagaccctgcccgccggcaccaacgtcgtcgccgtggccgtcaccgccggcgacaccaccgtcatgaaatgggacgcgctcacaggcatgatcgacctgagcggctacatgcgcaaaaccgacctcaccccggccagcgacgccgaaatcgacgccctgttcgcctaagggaccccggccatggcggaaacatacgtcaccctccacggcctcgcacgggcggtcacgaacctgctgcaacgcaccaacacgcgcactatgttcacggccgcccaccccatcggcgagatcatcgaaaccacccccaacctcgaccccaacacaatcggtggcacatggacacgcctccccgacaccatcggacgaggccgcctctggaaacgcaccgcataaacgtcaggagaacacatgacagtcgaactcatcaccggcttcgccggcaccccacacatcggcagcgacgacatcggcgcattccaggccggcatcgtcggacctggcgactacgcgctcgccaccggtaatcagctcagggccaccatgagcaacgcgaacaccatcgccgtccaatccggtgatgccgtattgaacggccgccatgtgcacctgaccggcaccaccaccgccaccgtgcaatccggcacccaaggccagaaacgcaacgatctcgcggtgcttcgctacacgaagaacaccaccaccggcgtggaaacctgctcaatcgtggtcctcaagggcacccccaccaccggtaccccggcggatccggcccacaacaccggcagtatcctcgacggcgtcgccacccacgacatgctcctctaccgcatcccgatcaacggcatcaccgtcggtaccctcgtcccgctcttcaacgtgctgagaccaatgaaggacgtgtgggattcgctaacccaatcgtctgtattgtttactggcccctacgcaatgagggtaagactcatgcgcataggtcgcatcgttacagcggtcggtcaaccttcgccgtcatctagttatgtgaccggagaattgaaagctgtagagataatcccggaaggatacaggcctgcgactaacggcacgatcctgtttgtatcgaacaatggcggtgcagtcagcagctggtacatagactctgacggacgcattaccgttcgaggcagagcggataaagggtattaccaaacctgcaccggcagctggctgaccgcctagctttcgctaacccccaccgtcctatgggagggcgccagcggcaaaaccggcaccctcccgctcgccgaatcgatcacggatttccgcgagctgatcatcgagggtaatgatgatgaccattacccgaggctgttccacactgccgccgaagcaggatcgatcgtcctctcattcgtcggcatgaatttcgtgaacgggctcgcgtcaggcaaggccactctcgtccggatcgccgacacgagcgtgcagatcatcggacaccgaatccacgtgatggaaggcaacacgtcagacacgcagtgcctgaccatcacgaggattctcggcgcgcgttagacggcggggatcaccgcaaaccggacatccatcgtgatgttctgcggggtgccgacctggatggcgcggacgatcttatggggcacgtcgtagcatgcgaccagcgccgtattcactccggtggtgacgggcgtgaaaacaaccacatcgcaaccagtgtagctccggccgaccagggcacggtattccgcatcggacaggacgtcagcgacgttgccggtgaacgtcacggtttttttgccggaccgtataggggttagcgaatccctatcagcgtatgagggcgtgctcccatgtgcgttgtgcttcgcgcagcacctcgctgtccggccgcaggtagtagcgggcggtggtagcgatgctggagtggccgagtgcgcggcttacgactgccacgtccacgccggctcctaacgcggtgctggcccaactgtggcgcaggttcctgcgtggcacgtagggcaggttctgcgacctgcaccatgcggcgtagcgacgagcgacctggccgggattcaacaggccgatgagtcggccaccttctcgtggcctgatctcacggagtcgaagtaccgcgaatcgcggcagcacgacggtgcgacggctcaactcggttttcgggtccactatcacttcgtggccgtcaacccattgcaggcctcgcctgatcctgactttgccggtgttgaggttcagatcctgccattccaatccgagggcttcttcggtgcgcaatccgagacagatgctgcagatcagccaagcctccaactcgtgtccatggaaaccttgcaatagttgccgtatctggcggatatccaatacttccggctcatagccggatggcttcggcggtgtgaccctcccggccacgtccacgtccaatattccgagccgcaccgccgaacgcagcatctgccgcaatacggcccacgccttacgcgccgcacctggtgatgatatcgagtcaagccacgactggatacgcggccccgtcagatccgccagatccatgtcacccaattcgggtcgtatgtgacgtcgccatgcacttgcatatccgacgcgcgtgcattcgcgcagcctgccacatgacggccaatacgactcgtcccaatactcattcagcaacatttcatacctccaaaacccatacgcagcatggccgttccatgcggatctgcgtgtgggttttccataccgtaggagccgtgcatgaacctgcccgagggattgccagcatgggcgtacatcgtggtgagcgccctggtgctcgccgcccagatcgtcaccgccatctggatcaaccacagaggggacgaaagggaccgggcgacgcgaggcgagatcacgaacaaccacgcgctgccgttgcgcgacgacctcgacgacaagaaccggcgcacattggacgccatcgaattattgcgcgacacggtagacggtctgcgtgacgacatgaacggcgagttcgcgaccgtcaatcgtcgcatcaccactaccgagcagaacctcatcgaactgcgccacgaggtcaacgacctccggcgcggaggaaacaaccaccaatagaaaggaacaccaatggcaaacaccaaaggcgtggccgaccacaaggccgccaacaccaatatccccggcctgaccgcggagcgcacgaaatccatcgtgctgctgctcgtccagctgttcagcgtcgtccagaccggtctgtccatcgcgggcatcagccagctgccgttcacatcggaccaggtgagcacggcgatcaccggcgtcatcgccgtcatcgcatccgtatatgcgtggtggcgcaacaacaacttgaccgtggccgccgtgcagggccagcaggtcgtcaatgccgtcaagcttgcccaggacacaggtaacgccgtggatatgccgggcgaggtcgtgcccatgagcgagatgatctccgatccggacgccaagaccaccacggagtgactaatagtgcagatcaaggaggagatcgtcaacgcagggcacggctacctcaatccgtccctgttcgccgtccacagcacggcgaatcccggcgccacggcccgcaaccaccgggacctgtggtcgcgaggctacgactacgcggtgcacctcacgtccgactggaccgaggcgattcattgcgtgccctacgaccggctgtgctggcaggtcggcaacggcaacggcacgtgcgagggcatcgagatctgcgaggccaccaacgcgtcggacttctggcgcggcatcgacatcgcagccgacgtgatagcccagcgcctccgcgcgcacgggtggggcgtcgaccgcatgcacccgcaccaatggttcagccagacctacggcggatccgaccatacggaccccatcccgtacttcacgcgcttcggctacaactggggagccttcgtccaactcgtccaacagaagctatccggcaacaccggaacacaggaggtagatatcatggcggcaatgatgatccgcaacgactccacgggagtcatctggtactgcgagcccggcaaggggcgcaccgcgctcacacaccccgaccaggccaacctgctccagcaggcaggcgtgccattgatccacggcaacaacggcgccccatggtggagccgcttcgaccagatcgacgcgctcgtgcgcaagaccatggaacagctcggcgtatgaaccgcatccaatggctcgtcgaatgcgcgggcctgatcgcagccgtactcgcactcgaactgtatgcggcgctcgccgacgaccaaggcatgccctgaaaaccgaacgccccgctcaggcatcgcagacggctctacatgagccgctctgcttgccgggcggggcgttttcttgtatacaattgaatcaacacaagaaaatagagtgtcaatagtgtgtacgcacaaaaggcgagacgctgaaacccttgaaaacacagggaaacgaaaaatacgaacacattcaaatttaacgtcagcaagtagttttcctcggttccccttcctgaggggagccgtcgcggaaagcgactgacgggagtgttgcggaaaggtccgagcagtgttggttgcccagacctttcttcatgttacgaacctttatgaacctcgttgagatgagatgtttgcgtctacttttcttaggcttccgcgttctcgtcggctcctgtggcgagaacattcctcaatgatttcgatacctgtattttcagcggacgttttccggtctgtacgaccagccccgcggccaagagctcttccacgtatttccttgcgctctgtttggacagtccgatgtgatgggccacttcgtccaacgacatggatttggacgagtcgaacagctcttcctgaatcacgccatagagcaccgagacggcattgcgcgagaggccatgcctcttttcaagctgtgtacagagtatccgacctttgtcgagctga

SEQ ID NO: 1530 - DNA, 6351 bp, Unknown
  R257_15m  MAG No. k141_56760
cgtccggctgcggaaaacacaacatcggccgaaggccgataccgcttcctaccgcacaacggccataatcgctccggcctgttgcagctccataaccttggccgcggcctccggcggcattgcgaacgacaccagtcggtcgttgcttcccaatgcgccagtcgtatccggtttgtcgacattcatcaccgtggcgttctcggccagcgtgcaatcggcaccttcgcaaccgacggcggaaaccagtctcacctgatcgccggccaatacatcgtcgacgctactggccaagcggacttcaatcaccgtagtgccggtcggtgctacgggcgcatctctggccatatgcgtggaaatgggatcggctgcttcgatattgatttgcgccaccttgcccaccacatcctcaatattgcacgcccaagatgggcctatcgcagataccggcatatcagccaactgaacgtcggcggccagaataatgtcaccccgtcgaatcgagcgagcggccaccaccatcggctcggtctccaccacggccaatacggcttcaagcccaaacaacactgcgagtcccacgcacaacgcagcagtgagtcggcgcacggcatccgccatgcgccgtcgccgcaatgagccgcgcgcaggcggcttaataaacgaaaaggtcaccatgcaaccatggtgacctgaagtttttcgtaagcgcaagctgaatcgacctatgtggttctagcttaccaagttatccacaacgcttcaaacccgtgcaacagacagtgcccgtagtgccaatatccgcggcataccgccgtcgacaccgtcgtttacagaggaaaaacggggagccgaccttacttgccggatttgtcggtgcggtagaatccgtgacccttgaactcaatcggcacggcggaatacaccttgcgcacctgctcctgcgagcacttggggcacacggtaatcgggtcgtcgttgaacgactgctgttcggtgaagtcatagccgcagttcttgcaacggtaatgataggtaggcaacggattcctccaacaaagtcatatttctcgcgcatggcgtgcaacaccatgccgtgcaaccgttcatatcctagtcgccgccctgacacattggcgttacggtcttactagccagcctgcttttgccactctggttccatcggccagtgtgcgtggctggttggtcagtctggcttgcgccgagtatcttggccggccggtcaactcagccggcccgattcgccaagccgccggtatccccccggcgtcagcactccgtcggccggcacatcatgtggttcggccggcaaatcggtgtccaacacctcccacggccagcacaccgcaatcagggggcacgcgggcttgcgtcgagccaaggcccggtcataccagccggctccacgccccagacgattgccttgcgggtccactgccaaagccggggcgatgaccagatcggccttctccaacgcttcgggcggtagaactgcgccagttggctcatcgggtctgtgatggacggtgctgggagagctgcagctaccggcattgttcgcgccacccactgcatccatcgagcgcaaggattccaatgaatccagcacactccagccaatttccaacccagatcccaatcgtggcaccaacacgtggcagccatgagccaacagccatcgcaacagtggccgggtttcgatttccgaacccatcgacacatatgccgccactgtggaaccatcctgaatcatgtgtgccgggaaccgtcgcaccagcaattcaccggccgctccacattcttccgctggaatgcgcttgcgccgagacagtatatggtggcgcagcgtcgctttatccatcttttctgttttctccgtgccgctgtggtcgctgccgatattcatgccattgtccgcttcgctcataccgcacaatctagtgtttccaccgtaaaacgaaagtggccacggtagcggcgcaagcccttcatatggctacaataaaggccgtgtcagttttccagtcgattaaagaggcgttcaagctggaccaccagatccgtccgccgcgcctcacccatcccggtttcccgataatcctgcgccccctgaccatggacgatgaggacggctggaacgaagtgcgctggcgcaacaacgactggctggcgccttgggaatccggcgacccgatgcatggcggctccatcaccttcaatcaatgggtgcagcgacagcgccgtaatgagcagcatggcgtcggcgtgattttcgccatcgaataccagatgcgtatcgtcggccagatttcgttgggagccatcgcgtatggtgccatgcgcaccggtgtggtcggatattgggttgaccaacggtacgccggccacggatttgcgccgatggcactggccatgcttgccgattgggcactcggagacccattcgggcccgcgttgcatcggctggaaatcgccattcttccggataacgcgcgctctttggctgtagtgcgtaaggtcggagcccatcatgagggactgcgcgagcggtatatgtatgtcaatggccagtggcgcgaccacgtaacatttgcgctgttggctgaagatatggggcaagggttctctgccagactcgccgccaccggttccagataagcgtcgaccggaagaattccgctccgacacgcccggacggaaagccccagttcgtcggtacgtctcctatccttgactctatgggttatgagtcactgagcactgtcgtcgtgctggtgattgtggcgattattatcgttgtatggctgcccgtacgtacggccaacggcatgaaacgtgtggacgagcaccggcaggatcgttattcgccttccctgcatatcgttgatgcagagaacggcagacgattcggagacatcaagccgcataaggcgaaaggggcagcaatgccagcatcaacaccgtcagcgaggctgacacctgagcacatcgcccatgtgcgggaactgcgccgcgcggccatccgccgccggcagattctcgccgtatgcctgcttgccataaccgtgttggtgtttgccgtatcgttccccctgcatttcagcccgctgcttgctcttattccgttcgtgctgttactgctggtgctggtgctgggagccaatgcctcacgccaggcccggcaatgggaacgcaaggtggtccgctacgagcggactcatagcggtacgggctggtccaagaaaccgtctgccgagtccaaggacagcaagcgtgtgaacaaggccgaaccggttgcggccgtaactgcgcctgccaaggagctttccgagcatgttgaggatgctgccaccgaggtcatggaacagcggcagattcgccgcgcgttacgcgatgccgagattgagcaggccaaggccaaggcgttgcgtcagtccgccgccgcatatcaggccgcggcggagcacgccaaacagtctgagaagtctgatactgcacagtccgccgccgataagcctgccgccgaaccgtctgctatggtcgatgaatccgctgaccgtaagtccgctgccgaaaccagtgaatcttccgccgcgcccgatgcctccgctcgcacggataagtcgactaagtcggataagtccgtcgcccctcgagttgaaccatcgcttacggtgcgtgatgagcgtgatgagcgcgacgatgccgctgccgacgctacgtcggaactggtcagcgtacgccctgcccgagcactggatgtcttcgatatggccacctcgcaggatctcatctccttcactttgggcggggaacataacgccgacaacgctccggaaagcttggagatcaagtcgacccgtcaggtgtccaaggcggaacctgtcgaacccgcagtggcggaaaagttgattgacgaggcccgagccgtcaaggccgcggacgatgccaaggccgccgatgcgggcaaggctgtcagtgccggaaacgctgtagacactgagtcggagcagcgcgatgatgccgatacgaacgccgctacggacgccgatgacgaggctgcaaacgccgcccagcgagccgcattccacgaatccgaggagcgtgccgacgtcgaagcgccagcggcgaccaccgattcgttgggcgcaggcctggactccattcttgcccgccgcggcaactgagcgttgcgattcgccgattttctctcacagcgttagcactcgagttggcagagtgctaataatcgcgctacgatgtgtcctagcgcaaagggacaacgcaagtgatcgtcagcctcttgaggcgttctggcgcggcattatcgaactacaagtagatacgaggtgacccacagtgtcgattaagctcacaccgttggaagacaagatcatcgtcaagcaggccgaggccgagactcagaccgcatccggtctgtacattccggacaacgccaaggagaagccgcagcagggtgaagtcctggccgttggcccgggccgtcgtgacgacaagggcgagcgcatcccgatggatgtcaaggtcggcgacaaggtgctgtactccaagtacggcggcaccgaagtccactacgagggtgaggactacctcatcgtcggcgcgcgcgacattctcgccatcctcggctgattagtcgcctagcgaacttcaacaaccccgactgttcccacgaacagtcggggttttctcttgtcaggcggagaggggctcccctcagagaggggagccgaaaaccgctcccgccaaacgcccagccatgcctgctatgcataaaggtgcatgcgcgcagcgtagttgagttcggcgttgcaccgcatctacactgggtaacggattggggtccctatggaagaggctcagtcggcgacttggccgagcggcttaagacattttgcacaagacggcagtaggtcgacggtatgttgtttttttccgtgtcgcaggttcgtggtgtcgtcgctgtgccaatggttgtctctctaccgacgctgagtgccgtggcatgaggccagcgtcggcagtgggccacgaaatggcgatgtgccgatgctgagccgcgttggcgtcgttatagggccagtttttggaccattgccgacggcaaatcggcgtgttgtgtcggcgacggtccaaaaactggcggtctgccgacgctaagtgccgtcatcgtcggcagaccgccaggtattgtccctgtgccgacgtaaaaagccctgccatcgtcgtcaccgagccatcttgtgactcactgacggcggcagcagggcggaagaggccgaaatcatgcgcgcggtgcggtctcacacctcgaatccggcctccaccagcgcgtgatcgatgtcgcgaatcaaatcgtccgtatcctccagacccacggccagacggaagaagccgcggtggaactcaggcgggtacaggtactggcgctcgtcatcctcaccgaggaacacgatcagcgattagtcatggccgagcgagacggcagacgtaatcacattgagcttggaaacgaattggttgtgcccgtcgtggtcggtgtcgaggccgaacgacagcacgccgccgaacccggagtccgggcgggccagctggctggccgccacctcgtggtgcaggtgcgattccagaccggggtacgccacgaaacgcaccacatccagcgattcgagatgcttggcaatcgccaaggccgaggcgtcgtaggacagcgcgtaggtgttcgccagcgtgatggggcgacggatcgcgccggtttcggcgtcgaccccgttgccgaggtgaatggccagcgtgccgaatccgagcggctggtcgtcgaatgattgtccgtgatgtacaagatcagaagccatgcgcccagcatgccggcatgcgctgtgccgccgcaagcaggcggcgccactcgaaaaccgcgccattgcaaggttctggaacaccatataagaaaaatgattggtagaagtgcggggtgcagccttggtcggggctgtttgcagggccgaagcggaccctgaaaccacgctgtgagacacgccgataaaaccgcagaattccgcggtaaaacaaggttcgcgtagaggtcgatttgcgtacttggaaaatatgtggttatatagccaagttgcctgttgaggtcaaacaccgcggcgggaaacagactggcggatttcccaagcggtcaaagggagctgactgtaaatcagccgcttcgtgcttcagtggttcgaatccactatccgccacgccccgatagctcagtggtagagcacttccttggtaaggaagaggtcgtgagtccaattctcactc

SEQ ID NO: 1531 - DNA, 28574 bp, Unknown
  R257_15m  MAG No. k141_56806
tgggccatgcggcgtttggccaaaccgatctggcgcatgaagcccatgtccaacaatcgggtgagaagctcagtggcgtagcgctgctcctccggcgtggcaggacgcagctgtactgcggcggcaccgccattcacgccaacacctcctcccgacacgttggcctgcaccggctgcgcaccgctaccggtgtcgtcgccaggcagtggcaacggcatgacggccagctcgttgatcacctgattcagcatcggcccgccggccttggtgaggttgtgcatccacagcccctgcggggtatcgtcggatggcagtccgccggcggccgcgatcgcctggaacagggtgcggaacaccgaagtcatgaaatggtcgatggtcagctgcccgaacatggtgcggtcgatggcgcgcggcacctgaatcagcacggccatgaactgctgttcggcgatgaatacggcgtcgtcgatcttgaaatatgcctgttcggcggcgtcacggcgctccaacgccttgcgcgtggccggattggcatatgggttggtgccgggttccacacgcggctcgtcacgctcgaatcgacgtttgggcgcgtaggcgtcctcatcgcgtacatgcatctgccggcgcgcgttcatcacctcgcggcgcatcacctcaagatccacgccgatacggcccgcggacttgcgcgcgtaagcgtcccatagggagcggtcgcgaatctgcgccaccagcggggccacggctttcatcgcacccacttggccgggcgtgtaggtcaggtcgaaccggctgatggcggcgtcgatcacgaagtcatacaacggtttggcgcgggcgatcagcgagcgcactgcttcgttgcctcgctcgatgcgcaggtcgcacgggtcgagattgtcgtcggccacggccacgaaggtttgggagaggaaggccgaatcaaggccgaaggcatgcagcgcggctttctggccggcggcgtcaccatcgaacgtgaacacgatgcgcgagctcaacggctggtccttgaccttcaacggcccgaccagctggaccgcgcccagcgaatcgtcggcgatcaggcggcgcacaatcttggcgtgctcggcgccgaacgccgtaccgcacgtggcgatggcggtgtcaatgccggccaagtgcatggccatcacgtccgtatagccttcgacgatcaccacctgtcgcttcttgacgatggcggatttcgccaaatcgatgccgtaaagcacctgggttttgcggtagagctgcgtgtccggcgtgttgatgtatttggcggcgatctgatcgtcttcgtatagtttgcgcgcgccgaagccgagcgtgcggccggtcgaatcgcggataggccacgtcacgcggccgcggaaatagtcatagatgccgcgctggccttggcgggccaagcccgcgtcgaggatttccttctgcgtaaaccccttggaggccaagtggcgcacaagattatcccaaccttggggcgcgtagccgcaaccgaaacgttcgcagtcggcttgggagaagttgcggcctccgagcagcttgcgggcgggcagtgcttccttggtcaggatctgggagacgaagaagcgttgggcttcctcgcaggcttccagcagtcgggtgcgcttggagccggtgttctcgcggttcgggccgttgccgctgttctcgtagtgcagctcgatatggtacttgtcggcgagcagttccacggcttcgcggaagtcgatgttttcggattgttcgacgtatttgaatacgtcgccacccaagccgcagccgaagcagtgccacacgccgagtgaggggcgcacgttgaagctgccggttttctcgtcgtggaacgggcacaggcccacgaaggtgccggtgccggagggcttaagcgttacggtcgcagatacaatgtcatacaggtccgcggcggcgcgcaccttctcgacatcctctttcttaatcattccgaccataagtctctagagtaccgcctcacctgagacacggtaaatttttaccgtcggttatcatttcttccgcgaaactcccttcagtcgcctacagcgacagctcccctcacccgaggggagctggctcgcgcagcgagactgagggaagcacccgtccaacacgccctcagcacaagatggagtgcagggccagagcggagttgtcggtcaggcttgcgacctgatcgatggcgacgcgcaggcgctcgttgtcattggtggattcattccaatcggccaggaactggctttccaaagcgtcggatgggagcggcgaatcggccataagcacatcgaccaaatccgatacgatcttgagctcctcctgatggaatggctcgcgctcgcgaggcgccatgacgaagtacacggcgatgcccttcaacgccacgatctcgtaattcgtgtcctcgggaatcacgatgttcgcggaataccgggtcaacggcccgggcccatacgtgtcgcgcgtggcggtttccaccgaccagcagaagcgaccgatcaaatcggacgtgatgttcttgagctgtgccaacgattcgcgtgaaccattgaaatgtgcagggaacaaatgctctcggcgcaatcgcatgaacgcggccagcagcttgtcggcatcccacttcgccccataccatgcgcgcgtctgctcgatgatgtggtccagcatcttcggatcggcgagcacaatcggatcgaacgcgccggtggcgatggaatcctcgacgtcatgcacggagtaggcgacatcatccgaaaggtccatgatctggcattccatgggtttggcggcctggggcgcgccgattttgagccagcggaacaccggttcgtcatccgggtagacgcagaacttcttcgaccgctcccccttggggtgtcggtcggcttcggccaaggtccacgggtatttgacagccgcatccaaggccgcacgggtcaggttcacaccggccgaacgcccgtccgggtgaaagatcttgggttcgagccgggtcaggatacgcatggtctgtgcgttgccctcgaagccgccgatattgctggcgatgtcggcgagcgcacgctccccgttgtgcccgaacggcgggtgaccaaggtcgtgggccagacaggcgcagtcgaccacgtccggatcgcagccgagcaatgcgccgatttggcgaccgatctgggcgacttccagcgtatgcgtcagtcgggtgcgggcgaaatcgtcggtaccggcaatcagaatctggcttttcgcgcccaaacgccgcaaagcggacgaatgaatcagtcgcgcgcgatcgcgttcgaaagccgtgcgcgacttggatttgggcggctcgggtgcccatcgctcctcgtcgaaggcgttgtagccctcatcgctcagcacctgttccccatccaacgttgtttccatatgccaagcataggcacacatatcggccgcagtaatcccgacttcccgaatatgtgccactgacgtcaactcaacggcacatattcgggagattggggccgatttcccgaatatgtgacgctcagcacatgtcaacggcacatattcgggaagaagggattacggggtgccaccgtatggcggtaatgcaccttatagcagcgtggcggggtcgagcttggcgaggtcggcggcgggcagtacttcggcggcatgctcgtaaaggcgcgggatgcggttgcgcaggcaggtgaagatctcgtagctgatggtgtcggcggcgcgggcccaatcgtcggcggtaggctcaacgtaatcctcgccgcggcccgggccgaacagttcgaccgtgtcgccctcgtgaacgccgagttcggcggcggatccgtgcaggtccacgatgaactggtccatgcacacgcggccgcacacgcggtagagcttcggaccttcagtggtcatgatgcgcaccgggccgcccggcttctccacgtgcttggcaccttccatatcgaaaccggaagcggagcggtggatgccatcggcgtagcccagcggcacaatagcggtcgaggtgttgtccggggtcaggtaggtgcggccataagagatgccatggccggcctccacatccttgaccgtgccgagctgcgcctgcaggcgcatggccggggtcagatgccagtcgcgcggggtgcccatcgcgggatcgggctcgtagccgtacaggccgatgccggggcgggtaagttcgaagtgaatctccgggcggtccaaagtggccgccgtgttggccaggtgacggatctccggcggaatgccggcctgttccatgcggcgcgtgaagtccttgaatgtttcgatctggcggtcggtggaggacacgaattcgggcacatcgggcgaatcggccacggcgagatggctccactgacccacaatatgcaacacgccctctttggcgagcggcacgagtttggcgagcgcggcgtcgaatccggccggcgtgaaaccgttgcgaccgaagccggaatcgaccttgacgtgtacgcgggcgggcttgccgagcttgcgtgcggcggcggccacggcatcgatgccgggcagggagccgaccgatacgtcgatatcggcagcgatcagctcatcgaatggcgcttcggtgccgttgtagacccaagtcagaatgcggcaacggtcggggccgatgccgagtttgcgcagcagcagtgcttcatgcgattgcgcggtgccgagccatgtcgcgccgccggcgagcgcggccagtgcggcgggcagcagtccgtggccgtatgcgtcggccttgaccacgcccatcaccgccgtgccggagttcgggccgccgaccacggagaccaggtgggccatgttgtcgcgcatggttttgaggttcacgatggcctgtgcggggtattggcggcgggcggccgcatagttggccttgccctgctcggacgagaatgcgatttcgggtgctgcgttcatgctcataggcacctattgttgcgcaggaatgtgacgtgtggtcacaatcgtttgttttcgcccggcagtcgtacactaatgaccgatatgcggtttctcggaagccgcctttgattcccggcgttgaggcgtgccgggatcccggaaatccgtccggtctagccccatatcttaagtttcatgagagaagaacatggatctgtttcgtaagaaaagcgtggatcagcttgtcgccgaatccactcccctgaagcgcacgatgcgcaccttcgatctgacgatgctcggtatcggcgcgatcatcggcaccggtatcttcgtgctcaccggcaagggcgcgctcaccgccggcccggccctgtccgtatcgttcctgctggccgccgtctgctgcggtttcgccggcctgtgctacgccgagttcgccgccatggcaccggtgtccggctcggcctactcctatgcctatctggcgttcggcgagctcatcgccttcgtgatcggctgggatctgattctggagtatgctctgcaggcggccaccgtgtccgccggctggtcgggatacttcaacaagttgttggaaggcttcggactgcatctgccggtcgagctgaccgccgcctacggcaccaacccggacgtcaccacctacttcaacctgcccggtttcgtcatcgtgctgatcatcacgtgggtgctctcgatcggcatcaaccagaccaggcgcaccaatgacgtgatggtgctcatcaagctcgccatcatcgtgctgttcatcgtgtgcgccgtgtggtatgtcaagccgtccaactggcagccgttctccccgtacggcatctacactttccagcccggctccacccagccgtacggcattgtgccggccgcatccatcgtgttcttcagcttcatcggattcgacgccgtgtcctcttccgccgaggagaccatcaacccgaacaagacactgccgcgcggcatcctgctgtccctggccgtttccaccgtgctctacatcgtcatgaccatgatcatgaccggcgtggtgccctacaaggagttcgccaagtacatcgacgccccagtggccggcgtgattctggagaccggcatgaactggctcgcggtgatcgtgaacctaggcgccctcatcggcatgaccacggtgatgctcgtacagctgtacggccagtcccgtatctgctacgccatgagccgtgacggcctgttcccgaagttcttcggccacgtgcacgagaagtaccgcaccccgttcaagggcacctggttcttcggtctgctgaccgcgttcgccggcggcttcatcaacatcaacgtgctgttcgagctggtgaacatcggtacgctgtccgcgttcatcatcgtgtcggccggtattctatggatgcgcaagacccagccgaatgcgccccgcggcttccgcgcgccgggcgtgccggtcaccccgattctggccatcgtattctgcttcgtgctcatcgccggtctcaactgggagacctgggtgcgtttcgccatctggttcggtctgggcctgatcgtgtacttcggctacagccgcaagcgctccaagctcggccttgagcagaaggccggggctgacaccaaggtcgctgcgactgaggactgaggtctatcggctgaccgatagtcgatggctgctttcgtgaaaaccgtacgctgagttactttcagcgtacggtttttgcgatatgaggccatgtcggagaccaccctggaccgtatggtcagaaaaagcgtcgaggaggccttgaacgcgatgcccgctaccagcggtgcatggtccgcttcgagcgcaacgtcctcgccagggtcaacccccgcaaccgcgaaatcagacggcgcacgcgcatggtcggcagcttccccgacgaacgcagcgcgttgatgctcgtctgcgcacgcgtgcgctatgtcacgtcgaacgagtggtcgacgcgccgctacctcgacatgtcaagactcggtgagaccgtatgggaagcgaaccgatcatcgccacagggacgggcgaagaccaaagtgcgcaagatatcgggcactaccccagcgcaagctctcccagggcatcaccgccggtgccgtgaaatacccccccccagcagcccggctcaccccagacaaaacgccgtggcgggacgggcctgcgacaggaaaggaagtaagcatcatgctcgacgcattcaccacagcgaaccccgcgccggggctcggacaaggcgccttggatgccgtggccatgaggacccccggccgcacccgctgcatcaacgccgaaaacccggacggcggcaagggccgcgcggccatggcggccagcgcgttgggcccctcccgcaagggaagcccctgcatcagcacggtgagatccggggaatcggtgacattgatggacgtcgagggccccggcgtgattcgtcacatctggatgacggtaaccgaccgcacctcccccaccggccccgacgtgctacgcaacctgatcctggaattctactgggacggcgaggactccccctcggtgcaatgcccgatcggcgacttcttctgctgcggacacgcccagtcctgcaccatcaactcaattcccgtcatggtcaacccgaaccggggcttcaactgctacttcgccatgccgttcgaacacgcgcgcatcgtgctgcgcaacgaccacaacgaggacgtgcccgcgttcttctaccaaatcgactacaccgaatacgaccggctgccggccgacacgatgcgcttccacgcgcagtggcgccgccaacgcgtcaccgaactcgcccacgactacgtggtgctcgatggcgtcgaaggacacggcacctacgtcggcacctacctggcgctcaccgcgctcgaaagccgctggtggggcgaaggcgaattcaagttctacatcgacggcgacggcaaataccccacctggtgcagcaccggcgccgaggactacttcggcggcgcctggagcttcgccgaattcgacgaacacggccgcatgtacgagcgcaccttcaccggcccatacctcggcttcccgttctactcgcagaacctcgccggacgcgaaagcgcctactgggacactgccacccccgtgacccgcggcctataccgttggcacatccccgacccgatctacttcgagcgagacctgcgcgtcgaatggcagcagatcggcaccgaggaagccggcaacttcgaacgacaggacgacgtggccacggtcgcctactggtaccaaagcgaaccacacaagccattcgccccaatcggcgaccgcgcgttccgccggccacggtgacttcctcgatgcctgtcggccgatggggctccatcggccgacaggcatcgccatgtcttctccattcacctgcgcggtgaatggattggcaacggtgtgttaccccgggattcgactggacgccgccgcacgacgacagcatgacagccgcaagcaccgccacgacgcccccgacccaacgtgttcttctcacacactgattctaccgtcagaaaccgatgacggtgcagaaacgagcacatcagccggcagccacactcaccactcgtggcgctgataggcgattctggtggtgtcgaccggccggtcgagcagctggatcaggccgcaacgggcgaagccggagctttcgagcacgtgctgcatggccttgttattggggtgggtgtcggcgcgcacgttgccgtagtgcttcagggcccacctgatgcagtcgcgggccgcgtggcgcaccagaccggatgcggcgatgcggtggatggtcacataggtgtcgttgtccagccaggcgccgtcgattttggcgtaggtcggatccttgcccgggcacagggcgaactgggccagaatgcgttcgtggccattgcaggtgtcgaccagcagcatcgtacgctggttggcgatgtcgtcttcaatcaccgattcacgcggaaattcgttgccccactgggtggggttgccgttggcggccatcaacgcgcgtgcgcgtgcgtagattttctgcatctgcggcagatcgcgcatggtggcgtggcggaaacggcggcctgtcgccttgtttgcagcgttcgactgagtcacttctcacctctccgacatgccgggttgccggcacggtgaccggcgactaactgacggccaacctaccatgccgtaggcacaagaaatcccgtccgcgttgcatgacggacactaataaacaatggcttccgtccgcaggagccggacagtccagccgagttgaggacagccaccctcagtcggcttcgcccccggctcccgccagcgggagccgaatcagaattgaatcgaatcagacgaatcagacgaccttgcgctcgaacgggtcggagctgatgccttcctcaaggatctgcttggcccattccttggcggcgaacaggctgtggtcgcgatagttgccgcagctcttctcggtggtggcgggcacgtcatcccatgtggccttgtatgcgatgaactccaacgattccttcaacgccttggccacatcctcggtggagtgggtgccccaggtcagcaggtggaagccggtgcggcagccgaacggcgagcagtcgatgtagccgggaatgcgttcacgcagcagcacggcgatggtgtgttcgatggtgtgcaggccgccggtggggatggcctgctcgttcggctgggtcaggcgcagatcgtaattggagatcacgtcgccgtgagggcccgtttcggtgtcgatgtaacgcacgtacggcgccttgaccttggtgtgatcaagctggaatgattcgacgacgggcttttcggccttgtcttctgccatgctgttgcctttctacttgctgagtgttcggtcatgaagtatcgaacagtcatcgtagtcgcgccagcccaagaacgcccgcaaatactccgcggttcgctataggagattgttatgacgcactcccggcattgaacgaggcgatggtttgcatgaagcactggccgtagaggtcgagcttgtgttgaccgacgccgttgaccgccagaaattgcgcgttggtaaccggcttgatgcgggccatgtcgcgcaaggtcttgtcggagaacacgatgtacggcggcttgccgatttcctgggcgatggtgcgtcgcagttcgcgtagcttctggaacagcgattcctcgtcatcgtccgggatatacgagcccagcgcatcgccgggaacattggcggaatcggcagtatcagccactcccccgctccgaccggaaccggccgccgccgacttgcgttccacccgtttgatctcatagtggaagtcgggagcggcggtttcggccgcccgcgcaccgaacatgacgattggcatacgcccttcggcgattgacaggtacccgtccgtggccatctggctcaacacgtcgcgcacgcgagcctcgttcacgtccttgagcatgccgaaggtgggcatccgctccgggttcagccatgccagatcctgtgcccgcgaaccgcgcaggatcttgacgatcttgccggaaccgacgcgctgccccacgtcatgcacgcaacggctgatcgcctgcgccacgcgggtcacgtcgatggtctcgaacgtgctttcgcagttcgagcaggcaccgcatctgccggactgcgaagagtccgccgcaatgtcttcacccgccgcggaaccagcattcggcgacaattcctgaccgaaataccgggtcatataccggtgcaggcagtcggcggtgcggcagtagccgaccataccgtccagcagccggcgcttggactggcgaacgatctcctgctcttcgggagtcaatcgctcgttctcataatcgttatccagcaaccgacgccgggtgacgatgtctgactcattccacagcagcgtgcatcggctgggctcgccgtcacggcccgcgcggccggcctcctgatagtaggcctcaatggattcgggcagattgtggtggatgacgtaacgcacgttggacttatcgatgcccatgccgaaggcgttggtggccacgaccaccggcaccttgtcggtgatgaagtcgcgctgggccacctcacgcgcgtccggcgacatgccgccatggtaggcgacggccggatgccccatctggttcagcgtgtcggcgagcgcttcggcggtcttgcgggtggcgcagtagacgatgccggattcgtccggatggtcggccacataccgcgccacccatgcggccttgtatttggtctccagtttgaccacatcaaaatacaggttcggccggtcgaatccggtgacggtgacggccggattccgcaatcccagcagtcccacgatgtcccgacgcacccgttcggtggcggtggcggtgaacgcacccaccggtggacgctgcggcagcccggcgatgaaatcgccgatacctaagtacgacgagcggaagtcctgaccccactgggagacgcagtgggcttcgtccacggcgatcagcgagatcggcgtacgggcggcaaagtcgcggaatcgcccggtttccaagcgttccggggccacgtacagcagtttgatctgcccggcggcggcttgggcgaacaccatcgcctgctcgtcgggagtttgagtggtgttgatgaacgcggccggcagaccgaggtcgttcagcgcatcgacctggtcgcgcatcagggaaatcaagggagatatgaccaaagtcgcacccgggctgagcgcggcgggaatctggtagcacacggacttgcctgcgccggtgggcatcacgcccaagacatcgcgtccggcaagcaaagcctcgacaattccttgctgtccgggcctaaacgagtcatagccgaagtatcgtgtgagcgcctccagcgccgcctgatgtgctgtcataaacgaccagtgtaggccgaccgcggatggatttcatcgtataacggaatacctcgtaacgatgtacgtagcccttccgtattattatgcgtcgaggaacgctattcccggcatatcacacgatatgccgctttgagagaactaagacggggcattttatggccaacaatacattttccttctcctctcctgacgatcaggagacggcggtgctgcagcctgtggccgccgatgggctgttcgcagccgcggccacaggtaccgccacgccacagcaaagcgacaatggcaccaataaccatgccgacaatacagcctatgtgggtgaacatgttatggcatctaccaccgctaaatcacatggcaaggccgcacggatcgccatcataaccatatttgcagtgttgcttgccgcattaatagcctatttcttcgtcggacgttggtacttccaagacaaggctgcgcccggtgttcatttgggcaatgtctctgtcatgggccagacccgcgaagaacttgcgaatactgtgaagcagcagctgaataacaccacagtgacgttcaccgccgaaggcaacagcgtcaaagcctcgctgaaggaccttggcgtcaccgtcgacacggataaaaccgtagatgcgctgttgaacgcgaagaccggcgacgtggccaagctcaatattttcgatcagccgcatatcgctctgaccgccaccagggacaaagagactgccgaacaattcgtcaccgccggcctggtcgatgaggccgaccgagcgcagattgccaccgttgtctacaacaagagcaccaagcagttcgattacaccgcgggtcaggatggcaagggcccggatatcaatgttgtcaatgctgcagtcaaggaggccgtcgcgaccccgggcgaaaatgcgacggtgccggtcaagctacagactgcaaagaatccgattgatgacgcgagcgcacagcaaacacagtttgacgccaatgccaagcttggcctcaaactgaccgtggacaacggcgtgaacaagagcgtcaccatcccggccgataccattgcctcattcctcaagcccacggtgaataaggcgggtggcaccatgagtctggtagtcgaccgcgatgccatcaccaagtacgtcaccagtgacagcgtaaccaaagaactgactgttcccaaggtgacacgcgaggtctacatcacgccgaaagacgaaggcggcgtggaaattggtgccgataagacactcggtgtggatggtattgaagtgactggtgccggggacgcccccgaacgtctggctaccgccatcgagcagaaccagtccactgattccactgtggctgtgaaagacagcccatatgatgtcaagcaggtcgaggtgcctcataacttcgatacggcaaatggcgataagtgggttcatgttgatctgacgaaccagactgccactgcatatcagggcaccacggtggtcaagaagttcaacatcgcttctggcaagcccaccgccgatggttccatgctgtccgataccggcacgttctacgtgtatctcaagtacgaatcgcagaccatggttggcgaaggctacaaccagccaggcacgccgtgggtttcctactataacggcggcgaggctctgcacggtgttcctgcatacatgtggggcgagcaccccatctatgtgcagcagggtatcccaggctcgcacggctgcatcaacatgcaggtggccgacgccaagtggatgtacgactttgccaccatcggcactcgtgtggtcgttgatggcaccacaccgacttccggtcaggcgttgcgcccggctggtgcggatgccaccggatggcagggcggcaacgccagctgattcgatccatgtttaatcgataacggaaaatccccgacccttgtgggccggggattttttgtaggtaccaatcgatagcgagtccgccgataagcgtggtggcaccgtcaatacggtgccaccagtaccgtcagtacggtcagatacgatccaacgcctgcttgagatcggcgataaggtcgtcggcgttctcgataccgaccgaaatacgcaccagattggcgggcacctgcagggtggtgccggccacggaggcgtgggtcatggcggcgggcacctcgatgaggctttccacaccgccgagcgattcggccagtgtgaagatctgcgtgtggtccacgaagtgcttggccgcctcggcaccggccgcgagctgcacggagacgatgccgccgaagccgccgtgcatctggcgggcggcgatttcatgacccgggtgggactcgaggcccgggtaccagacgcgctcaatcacatcagagggctgggattcgagccattcggccaccttcagggcgttggcactgtggcgcttgacgcgcagatccagggtcttcaggccgcggatgtccagccaggagtcgaacggggagggcactgcgccggcggcgttctgcaggaaggcgaccttctcacgggtctcctcgtcgttgaccaccacggcaccgccgaccacgtcggagtggccgccgatgtacttggtggtggagtagaccaccacatcggcgccatcggccagcgggtgctgaagggcgggcgaggcgaaggtgttgtcgaccgcgaccttggtgccgtacttgtgggcaacttcggcggtggccgcgatgtcggtgatgttgagcagcgggttggacggggtctcgacccacacatactggtagtgcttggaggccaatgcggtttccacggctttcagatcggtgatgtccaccacgtcgaggcccacaccccacggcacgaacaccttggagagcaggcggtaggtgccaccgtacacatcgttgccgagcaggatgttgtcgccgggcttgatggtggagcgcagcagcacgtcgatggcggccaagcccgaggagaagctcagcgcgtacttgccgccttccacggcggcgagctgctcgtcgaagctggtgcgagtggggttgatggagcgagagtagtcgtggcctcccctgaggcccaacacgccatcctgcttgaaagtggaggtggcgaagatcggcgtgacgaccgcaccggtggtcgggtcgggctcctggccggcgtggatggcgcgagtggcgatgtcggtgttggcgaacttggcgttgtattcagcggacatgatattgggttcctttcgggattgttccgtattcgaaggtaaaacaggtgcggttagttagcgcggatgttggtattgattcttttgatagctagttatggagtccatccgcagctccctcatcagagggagttccgttaaggtactgctcggcgagggagggcttgctggtgcgttccacgatgtcgccgtagccgttggcacgcatccagtcgtcattgaagatcttctccagataactgcggccggaatcaggggcgagcaccaccacaatctggttctcgtccaaatcattggcaagcgcgtacttgatggcgctggccacggccatgccggacgagccgccgaccagcaacgcctcctcgccggccagacggcgggtcatttcaaaggcttcggcgtcggatacgcgcacgatgtcgtcggtgatgttccggtcgaaagccttggggtagaagtcctcccccacgccctcgatgtcgtactggtggacttcgtcgcgtgaggaagcggagtagatggagccttccgggtcggagccgatgaccttgaccgcgccgttggaggcttccttgaggtacttgccggtgccggagatggtgccgccggtgccaatgccggccacgaagtgcgtgaccttgtggtccgtagcctcccagatctcggggccggtggtgtagtagtggctcagcgggccgttcgggttgtcgtactggttcgggcggaagccgccgggaatcgtgttggccagtcgttcggcgacctggtagtaggagcacgggtcgtccgggccggcgtcggtcggtgtgacgatgacttcggcaccgtaggcgcgcagcaccgcgcgcttggattcggaaaccttgtccggcagggtgaacatcgtgcggtagccgcgctgctgggcgaccagggccaggccgacgccggtgttgcccgaggtgggctcgacgatcacgccgccgggcttcagctggccggactgttcggcggcgtcgatgatgcgctcggcgatgcggtccttggaggagccgccggggttgaagtattcgactttgacggcgatggtggctttgacgccggccgcctgcgggatgtggttgagcttgacgagcggggtgttgccgatgagttctgcgaggctgttgtggatggtcatgtgaagtccttcgttgctggggttgtgggggtttgctgcgttgcgttcgtgaaccgacgttcccagacgaatggactgtggctttggtttgaaaatcgagtattcccgctcactgtacggtgaatccgaaaagcgaaccggtttttcatgttaaccacggctcgcgcattacacgattacgcttgtgccatcggatacatgaaaagtatgcggcagattcgccgcgattcgaatgctccatctcaagttatgcgtcactgaccgctcgcccaggggcgtcggttagcgacaacaacatgagataatctgcatgcctcacaccatagcacaacccgcgacaagcgcgtgtcgccggcggccggctcccctcagggatgggagccaaaaaggtctataacgaggctgcctcgatgagctgacgggtgtaatcggattgggggttgccgagcacttcggcggtgggacccgtctcttcgacgcgcccgtcgtgaagcacgaggatgcggttggcgatgtgctgcaccacgccgagatcgtgggagaccatgatgatggcggtgctcggccgggcctcacggatagcggcgaaggcgtcgaggatctggatgcgcgcggccacgtcgatggcgctcattggttcgtcggcgaggattaccttgggctcgttgatgatggcgcgggcgatgaccacgcgctgcgcctggccaccagacaggtcgattgggtaccggttcaagaagtccgccggttcaagacccgccatggtcagagccgcgaccacccgctcgtcgatatcggtgttgttcagatcacgtcgctgcagactcagcggttcagccaccgatttggcgacttgccaacgcgggtcgagtgatgagaacgggtcctgaaacaccagtcccgattcgcggcgcagggtcgcgaatcccggcgattttcggccgccgacaatggattggctctcgtattccacgctgccggagtccgcggattccaagcccagcataatgcgggtcagcgtggatttgccggatccggagccgccgatcacggccagacattcgccggcgtggacgtcggcggagacgtcgaagaggacttggtggcgtgcggtgcgcggtccgaaggatttggtgatggagtgggcggagaggagtggcacactgctgttactcatgcgaatcctccttgggggtgtggagggtgagggtttgggcggcggcgaccaagcgttgggcttgcggcgtggtcggtgcagcaagcaggtcggcggtgggtccggattcgacgatgcggccggcgtccagcacgtagcagcgggtggtggcacgcgcgagtacggagaaatcatgggtgatgaacagcatggatgcgccggcgtcgtccaccaacgaggtcagcaggtccacgatctgacgttgcgtgatggagtcgagcgcggtggtgggttcgtccgcaatgatgaatcgcggtgaggtgatcagcgccgtggcgatgcccacgcgctgctgttggccgccggacagttcgtgcgggtatgtgccggccacgtcacggtccagtccgaccttgtccagcatggtattcactcgctcagcacgttcggccttggtcagatcgtagtgcagtctcaacggcaacgcaatctgctgcgccacggtcatcaccgggttcagcgcatgggccggattctggaataccgtacccacataccggccgcgcagatcggcaagcgtatgctcgtcggcgtacgcagcggaatcgtggcccgaggtggcaaccctgcgttcaccggcaacatggtgcctatctgccgcgccgcgttcttcgtcagatcctgagtcatcttcctgcccatgccgcgactcggcggtttctccggacaggatggcggtttctcccatcgtgatggtgccggacagcacggcctcgcgcggcaacaggccgagcaatgacttggcgatcatcgatttgccggagccggaggaaccgatcaggccgacccgttcgccgtccgcgatggacagatcgacatccgtgacaatcggtttgccgccgatagcaatattcagcccgtgaatttcaacgctcatcatccgtctccttcggcgctgccactgcggactgcgccgcagtgtcaccggctcccctagccaccggcacaaccgcaccgggcacagtcatctgccgcaacgcgggattagccaccgggtcggtggcgtcgcgcaacgcgtcgccgaacaggttcagcgcgaccaccaccagggtgacgatcagaccgggccacaccaccgtcaacggaaacacgttgatgagtttgaccgaggtggccagcgaatggccccagctcggcacccccgcgccgacgcccacgcccagataggtcaggcccgcctcggccagcaccgaggtgcccgccgacatcgacgattgcaccatcagcaccggcgtgatgttcggcacgatgtgtctgaccagtacgccgaacccgctggcaccgttcgcccgggccgactgcacgtatcccgagcgggcggcgagcagggcggccggacgggcgacgcgcgccagatgcagcccgtagccgatggagcacgcgccgatcaccacggccgcggatgcgccgaacggcacggcgagcagcagggcgatgagcacggtggggatggagatcagcgcgtcgaccacggcgaccgacgccgaagcgagcgccgaagaacgggcgaccatcagcccgaccagtaggatgccgatggcagccgagcagacaacggtgagcagggcgatggcaaggttcgtgcgcgatccggccatcagccagctcagcacatccgcgccggtgccgtcggtgcccggccaatgcgcggacgacggcttatcccacacgtggtagccgtcggtggccagcagcgactgcggggtccagaacaacgacaccagggcgacgaccatccacaaccccagcacgatcagcgagtagcggccggtgccccgggaccagatggtgcccagaaccacgcccgaacgacgccatcgaccattgcgatcaaccatcattcctcctttccggcggccagacgcgggtcaagcagcgcgtgcagcagatccaccgccaggccgatcagcaggaagaacgcggcgagcaggaacaactcgctttgcacggccaccagatcgcggttgccgacatcgcccaccaaccgggcgcccagaccgggcagggcgaacaggttctccaccaccatcacgccggtgatcatcgaggcgaacgccagccccaccaccgagacgagctgcggagccgccaatcgcaatcccacgcgcagcaacgcctgggtgcgggtcatgccgcaggacatggccatatcgatcggccctccctcatcggcgatgccttccagaatggagcgcgtgtaacgcatgatgcccgcaccggacacgaatccggtggccagcgccggcaggatcagggacgagaccgcccgcccgggagcgccccacccagcggcggggaacccctgcgagggcagcagaccgacaaggcccacgccccgtgcgaacaggaggatgagcagcaggccgctccacagggccggcacggcgccgcccacgatggacagcacgcgcaggaaaccgcgcacggccggcgaccgggagatcacggcggcggcgcccatggacaagccgagggtgagcgcgatggccagactcatcacgatcagcgggaacgtgatcgtcgcacgttggccgacctgggaggtcaccgcccgcccggtcagcgccgacacgccgaggtcgccgtgcagcagccctccggcccagtcgagatactgcacgacatacggccggtcaaggccgaattcggcgcgcagggccgccacacgcgccggcgatgcgttcatgccggccatcacgaccgccacgtcgcccggcaggatgcgcagcatcgcgaacaccagcaccgagatgccgaacagcgccgccgcgaacagcagcaagcgttgcatcaagaaccgcataacgcctcccttatcgattccctcgccaccgcccgtggcgtcaccggccggatgggccgtccacggtcgggcgtgccacggaatcactcccgcgccgcgcccgaccgatgggttccgggactacttggtgtaggtgatccgccagaggggcagcacggtctggctcaggttctgcgggaagccgtccacgcccttggcgtaggcgatggtgaccttccagctgaacagccagtcggccggcgcgtcctcggagacgatcttcgcggccttggccagatacttcgaggcctcgtcatcggaggtggcctccagcgccttggcgtacagggcctgcacgtccttgttgtcgtagtggaagtagtagctcggcgtggtccatccgtagaagtcgtggctttcggcatggtccacgagcgaaagatcgtagttgccgttggcgtgcacgtcctgcagccaagtggagaactccacgtagttgatcttcaggtcgatgccgatgggcttgagctggctcttgagctggtcgccgagctcggtgccgtacacgttggcgtaggtgagggtcaggtccagcggcttcgactcggagtatccggcctgctccatgagcttcttggccttggccacgtcatgcgggtacaggccgctcagatcctcgtaaccgggatcgaccttggggatcggaccgccgaggggggcgtccacgccgccgcgcgaggcgatgatctgcttatggtcgatggcgtatcggatggcctggcggacgcgcttgtcggagagcttgtcgttggccatgttgaaggcgagcacgaacttgtcggaaccatcaccggacttgaccacatagttcggatccttgcggaacggatcggcaagggtggcggagatgggcgaaagcacctgcacgtcgccgctcttgagggcgttgatgctggcgttctcgtccggcaggaaccggacgatcacgttctcggtcctcgccttgtgctcggtgccccaatacttggggttcgccttgagcacgatcttgtcgttcgggtcgaaggagaccacggtgtacggacccgagcccaacgcgccgttcttctgatcccaggtggcgtccttgtcgtagaccaggccgggacggctggtgaggtaccacagcatgttcgagttgggcgcggagagggtgagcctgaccgtgttggcgtccacggcctcggccttgtccaggctcttgacctgctcgcagtcgtagtacttctgggccttgagctcgttgatggaccacgccacatcctcggcgtcgagcttgtcgccgttggagaagttcatcttctcgttgaggtggaacgtgtaggtcaggccatccttggagatctcccagctcttggccagaccggggtggaccttgttgtccgagccgcgcgagacgagaccctcgtacacgttgccgatgaggatctgctcaagggccgaacccgactggtggcggatgtcaagattgaccggggcgagtttgaggccgacggccacggtgtcggatcggctggccgagacggaggcgttcgcgtccttgcccttgcctttcccgccgaagacggtgacgcccacgatgagcgccgcggccacgacgaccgcgatcagcgtccacagccaccacttcgggccgccgttcttcttgtttgatgatttcgcgcgcgcgttcaggctcgcgtcggtgctggcggcttgattcgcgccgtcgatgttcctgtcttcggttgcgccggactcgccgtgcacaccattgttctgggacatggatactccctgatgcattcgggcatgcttacgcccgaatatggtttcgttgttatcttgcgtggttgaccgcccattcgggtcgatcaccacgttctactatatccccggacacgccggaggcaatggctatactggattgcggcgccgacggagggtccgcggcgaccacaacacgcggcgcatcgtcgggcaacgacgcgggaagcgctggcgtgggcacacgtgcggccttggcataaggccgggaggcagctatggcacatattcttctgggcgtcaccggcagcatcgccgcgttcaaggcctgtcatctggcatccgattggaccaaggccggccacgaggtgcgggttatcgaaaccacagcggccgaaggcttcgtcactcccctgacattcacctcactgacccatcaacccacccgtaccacgatgttccccgcttatccggccgcgcacggcgacgtgacggccaatccgaccgtgccaacgaccatcaatcatgtggccgatgcggcctgggccaatctgctggtggtggccccggcgagcgccgacgtcatcgcccgcatcgcctgtggattggcggacgatacgctgacgtccaccattctggcctatgaggggccgaagatcctatgtccggcgatgaacgtgcatatgtacaacaatccggccacgcagcgcaatctgaaaacctgcgccgaattgggctggcagattgtggagccggaggaaggcaatctggcttgcggcgacgtgggacgaggccgtatggaagagccggcgcgcatcgaggaagtggccgctcggctgctggcggatgcgcaggatgaccaggcttcctcatcttccccgctcaaggggctgcgcgtgctggtcactgccgggccaacgcaggagccgctagacccggtccgctatctgacgaaccattccaccggcaagatggggtatgcgattgcctcggccgcagccgaatttggtgccgacgtaacgttggtctccggtccagtcgccttgaccgcgcccgatgcggtggatgtggtgcgcgtcatgaccgcgcaggatatgttcgatgcggtggccgacgccttcccggcggcggatatcacgattatggccgccgccgtgggcgatttccgcgtggccgagattgcgccggagaaaatcaagaaggccggccgcagcagcatcaccgtggagctggtttccaacccggatattctggcgtgggccggcgaacgcaagcgcgacgacggctcgcagatcctgtgcggattcgcgatggagaccgagcatctgattcgtaatgcggagaagaagctgacgtccaagcattgcgacatgctggtggccaacaatctgcgcgacgccggtgccgggttcggcaccgacaccaacgttgtcaccgtgctcacgtccggagcggaggatgccggcaccccgaagatcgagcattgggacaagatggacaaaaccgtgcttgcgcaacgactgttgctgcggctcgcagcgttgcgttccggcggcgcgagcaatgtcgatgacgagaacaaggaggcctgacccatgctgatggcggtcgatatcggcaatacgaatatcgtgatcggttttctggaggtcgaccgcatcgtcggctcctaccgcatcaccaccaaggcgacgcacacctcagacgaatacggtctgatgatcacgcagttcctggctttgagcgattacatggccgacgatgtggacgatgtgatcgtctgctcggtggtgccgaaggtgatgtattccttccgcgcctcgctgatcaaattcctcggattggaaccgatggtggtgggccctggcgtcaagaccggcatgaacattcgtctcgacgaccccaaaaccttgggctctgactgcatcgccgactgcgccggcgcctaccacacctatggcggcccggtgctggtggccgacttcggcaccgccaccacgttcaactatgtggacggttccggcacgattcgctccggcttcatcaccacgggcatccgcaccggggccgaggcgttgtgggggcagaccgcccagctgccggaagtggagatcacgcaaccgcagtcgattctggccaccaatacgcgcactgctatgcaggccggactgtattacacgttcctcggtggcattgagcgcacgattcagcagttccgcaaggaaatcgatgagccgttccaagtggtagccacgggagggctcagccgcattttcaagaacgacaccgacatgatcgacgtctacgattcagacctgatcttcaaaggcatggcatacatctactcgcgcaatgtgaagtaacgcggtgtgcaggcatcggccgcgcatagcgcagtcgattccgtccctccccgaaaaacctactcaaaaccctacttaatcgtaaagccctgattgaggccgtattctcggaggtctttctgccatcgggccaggccgtcggagagactgactttcttgccgggcttctccaatggttcgagcgggttgctttcctcgtccttcatgcccatctcaatggcttcctgtcgctgctgataggcgtggaaactgccggaccactcgtatgcctggcccaccgtcgatttgaagtcactgcgcgcatacacttcgaatggcagatactggtatccgaccgacacatcctcggcggcctccgacagtacccggttgaacttctgcccgccgaaatacgggatttcaatgccacggtcattggtaatcgtggttttatccagaaaatcagcggaattcagggtggcgtaatcggccgggaaggcaccgccgtctacacgcgcgctaatgccttgggcgtcatgcgccacaaagtccacgaaacgataggccgcatccggcttacgggtcagttgcaacacggtcagcgccgagccgccattttcggcgttggcaggctgcccaccataggtgggcatgggagccacgcgccacagaccggccgcgcccggcacattggacagcagcagcgacggcatccaagccccagagaacacggaggcgatggtgccggtgcccactctgcttttccaccgatccgaccatgtggcggaggtggtgtcaacaagcccctcatcgatcattttctgccagaattcggtgaaccgttgggtgccggcatcctcatccaaatcgatggtcacggttttgccgtcggccgacgtgtggaacggctgaccaccggcgagccagaccatcgcgtcatagaaactgccgtcgcccgagtcggcggcgatatacgcgccgatctccttgagcttttcggcggcctcgtaatagtcatcccaagtcttgatcttggtggcgtccacgccggcttggcggaacacgtcttcgttgtagaagaagcccatcgggcccgaatccatgggcagtccataggtacggccggcgagctgcacggacgaccatgtgccgagggtaaagaagttggaataatccgagccgattttgtcggtcagatcaagcaattggccggagaccgcgtactgcaacagtgcatagtattcgatttgagccacgtccggcgtgccgtaaccgtcttgaatggcggtattaagattgccgtagccggagatattggtccatttcacgcggatgtccggattggctttttcgaaacggcggatgacctcccccatgctcggttcccagctccatacgctgatctccgtacggttgtcgtccgtggcctgcccgcacgaggccagggatacggaaaggatggcagtcactgctatggttgccattcttttgattcgctgtccgatcactcgcatggtgacgagtgtactaggcggggcttaaaacggtaaaagccccgtgacgggattcgtcacggggctttgtgtatcgaacggggtcgcgccggcggccccttcgcgattgcgaatcaccacgtgcggcgcgttgacgccgaacaaacgttcacccaacagtacgagcgggtaatcgccctccaaagctgcgatatcgtcaaccgtcatcatcagagggcttaagatgagcccatccgcgctgtgcgtgcccatcgatgcgatgctttccagcttgcgggcacgattgttggtggtggattccacgatgacgccatagccatgttgccgggcctcggccagaatatcctcggcgagttcggagaagtacacctgccgcagatcgggaataaccagcttgagcaaccgggtacgcccggaacgcaggtttctggccgacgagttgactttgtatccgagcctgtcgatggcttccgcaatacgcgcggccatcgcctcgctcatatatggctgtttgttcagaaaattagacaccgaggctaccgaaacaccggcctcatgggccacgtccgccatcgtcactctgtttttgcctcgcacggtgaccaccctacccgactttgctggagatacgaaaacgactcccctgctacgatgagcagcaagggagccgttgggtaattaggcgctatgcgcggttttacagcttgacgacgagtacgccgttgggctggatggcggccgtgtgctcggactcgttgacctgggccagcgaggcgaccagcggttcgccttccacgtccacgaccgcaacatcgtgggtgcggttgaacaggaacacgaagtggttctcgccagtttcgtccgcacgctcgacgcgcagcacttcaccgcgatcgtcctcagccgaagtctcgatgccgagttcctccagcagcacgggcaggctcttggccaaaccctcacggccgagacgggcaccgacgtatgcggccttgccgtcgccgaagtcgttgacggtgatggcgggagcgccgtcgaaaccggtccacttatctgccttgaaggaggcgaccacgtgagcggtatcggccacggaggtgatcacgtcggcgaaatcgtgcgccacggtcccgttgtccaagtcgaggtggtccatggcaccggggaagtcgttgcccatcggggcgaattcctcaacgcgcacacccaccacgtcacggatggaaccggggtagccacccagccagacgtgatccttgtcgtccaccagaccggtgtagtaggtcacgaacagcttgccgccgttcgccacatactcgcgcacgcggcgcgtggtctcttcggacaggatggtcaggctcggcagcacgacggcttcgtactcgtcccaagggccgcgaaccggcaccacgtctgcggtcagaccgttgtccgccagcgcgcggaaccacgcgagcggctcggtccaatggcgtacctcctgagtaggcgtggcggtgtgttccgtagcccactgggactcgtaatcgaagacgacggcgaccttggacttgaccagcttggtgctcagcaggccctcgtcagcaagcttgttgaggtcggcacccagctcgcacacatcgcggaagatctgggagtcggggcccgcgtgaggaaccatcgaagagtgccacttctcggcaccggccttggactggcgccactggaagtagcagatggcgtcggagcccatggccaagtgagccagggagtcgcgcaccaattcgccgggttcgacgcgatagttgatcgggcgccaattgacggcggaggtggagtgctccatgaggaaccacggattcttgcgggcgatgccgtcgcacagggaggccgagtaagccagctcgtcgaagtgagcttcgccaggagtgaagtagtgatcgttggacacgaagtccacgtcgtaaccccacttgtcgtaatcgatgccggcaccgccggcggagaccatgaagttggtggtctgcggcttgggggcgatctcgagcagggcgtcgcgctcggccttgtaaaagtcgagcagggcgtcggagctgaagcgcttcctgtcaagcagcttgcccgggttcatgaagttgccgtcgccgatgaagcgcggcgggatgatctcggaaaaattgttcatgcgctgcgcccagaatgcggtgccccaagcgtcgttgacggcgtcgatggtgccgtacttcttctcgcaccacttctggaaggcgcgctcggcgtcttcggaatagtcgaagcggttgtggcagccgtactcgttgctcacatgccaagagaccacataggggttgtccttgtagtgctcggccatcttgcggcacaggttgagcgcgtagtcaaggaagaccgggctggtggcgcgccagtgctggcgggcaccgggctggcagacgtcgccgcggtagtcgacccagaggatctccgggtgggcctgggtcatccacatcggcggggatgcggtgccggaggcgagatcgacggcgatgccggccttaccaagcttgtcgatgacgcggtcgagccaatcgaagtcgtacacgccttcttcgggctcaagcttggcccaggagaa

SEQ ID NO: 1532 - DNA, 3689 bp, Unknown
  R257_15m  MAG No. k141_56947
catgcacctgtcgggcggccagcgtcaacgggtggcggtcggccgcgcgctggtcgccccgggccgcgcgatcctcgcggacgagccgacgggcagcctcgacccggagatgaccgacgaggtgattcatctgctgcagcatgccgcccatcagctcggcaaatgcgtaatcgtggtgacgcattccaagcgtgtcgccgactccgccgatgtcgtgctgcgtctcaggagcaagaaactgacccgggcgtgacccacctgggccgggcggcacccatacaccgcttcggcatttcggcaccccggcgaccgggcactccggtatcccggcccttcggcattctggcacccccgcgctccggcaccccggcgacccactcgcgttgccggggtgccgtattcgctctgcgccataatgtgcgtgataatggaatcatgccagtgatgaatgatgaagtgcccggcgaggttgaaccgcaccccgattgttggactggagtaatccagattcgatgatcggaggtgcggttcaaaaggcccttttttgtgtcggattacgaaccgcgcgtttcaccgcttgccgttgtagatctcgttgtcgatcacatcggcgaacacgcggttgacggccgggcgcactaccttcagcgacggcgtcaggcacttgttctcctgcgtgaactgcgtgcccagcacggcgaacttgcgcacggattcggcacgcgagaccgtcgcattcgccttgtccacgtactgctggatctcctcgcgcaccgcggcgttcgtggcgagccggtcgaccggcgtctccgtggacaggccgtgcgcgggcagccaaatggccagcgactccgggtcaagtgtcaccagcgcgccgatgaacgggcgctggtcgcccaccaccacgcagtgctccacgatcgggcacttgacgatctcctcctccagcggaatgggggagacgttcttgccgccggcggtaataatcatgtccttgattcgaccggtgatgatgatgcggccggcgtcatcgatctcggccaagtcgccggtcctgagccagccgtcggcggtgaacgcctcggccgtcttctccggcagattgtggtagccgcggaacacgttcgggcccttgacctgcagttcgccttcgtcggaaatgcgaatcgaggagccgggcgcgggctggcctacggtgccgatcacattgtcggtcacgcgcgtggcggcgaacggggcggcggtttcggtcatgccataaccctgaatcatcggcagaccgatgccgttgtagaaatgcgccagatcaagcgaaagtggtgcgccgccgcaggccacatacttgatcttcgggcccagagcaccgcgcaccgtgcggtagacgagcgtttcatacttggcgcgctcggcgatttcggcaaacgtgtgctgctcgccggcctgctccttgcggctccagacgcgcgcagcctcggcggccttgacaaacaggcggcccttccagccggcaccggccttgtgcgaggcggcgttgtacaccttctcgaacacgcgcggcacgcccagcaggtaggtcggttcaaacgaacgcaggtccggcagcagggacttggtgtccggcagataaccgaccacgccgtcatcggaggcgatggaggcgtactggataaatcgtgcgaagcagtgggccagcggcaggaagagcagcaggcgcggatggtcgtcgagaaccacctcatgcaacgcctgcgaggcggcgatggtgatggacacgaagttcttatgggtcagttcggcacccttcgggttgccggtggagcccgaggtgtagacgatggtggccagatcgtccgtgcgcacggtggccacgcgctcgttcagttcctcgtccgaaacagccacgcccagaccttcgagcgcgcccagtgcgttgccctcgatcatgagaatctgcttcaaggcagggcagtggtccttgaccgagtcgagccggtcgaagcgctcgcgattgtcggcaaaggccagcttgaccaccgaatcgttcatgatgcgctgggcctgcggggcggagtcggtgtcatagatcggcacgcttaccgcgcccaccgcggccagtgcgaaatcgagaatgccccattctagacgggtggaggaaaagatggtcaccgcgtcgcccttggcgatgccgagcgcgatcaggcccttggcggccgagaccacgcgctcgtggaattcgccggtggtgacgttctgccagcggccggggccgattttcttggcggcgattaccgtgtccgcgccggtgcgggcaaggcgatcggtaagtagggagtagatggtctggttgtcgcggatttcgatggattcgccaggcgtggtgtagtggtcaagcataagcgggccgtgtccttacgtgcgttgcatgatggctgttgacaaaatcgagccattctgacaagttaggttacgctggcgtaaggttgcgcgcgttgtgggcaatggagaagttgtctgtctggttttgtggattgtatacaacaccgtgtctaaccggtttgctctacggttatgacaccgtgtccatttcgggagccatcgacttcctgcaggacaagtacgcgctgagcccggccctgcagggtctggtcatcagctccatcatgatcggcggcgtgatcggcgccggctcctccggcttcctgtccgataagtacggtcgccgccgaagcactggtcgccgcgcaaaagcagcactaggccgcgtttgctgcgtctattggcgaattgatcatatgggtcgtctgcgtgcagacgacccttttgcgttccgtcggcttctgacaccgtagaaacgtgctttctcggcttcgaggggctgattttgccttatctggaagtctacttccacttcgaggggctgatgcccaagtagacgcggccctaaaacggcggaatgacgttgacgtgtagccgtttatacttccgattacatggatgaggagcccctcgaagcggagatagacttccggcaaatgcgaaatcagccccttgaaacggaagtagacctccggcaaacgcaaaaattagcttcctcgaaacggataaatgcacgtattgggtgtagttgatgcttcagcccctgatatcgaagcatatttcttctggttggcgcgtctagcatgcgcactccgcaatcgaaaattctgtggcctctctcactttaaaagtctggcatgtgcgagggcgttcgcttaaggtgaatgggattgcgcggaatgtggagcgcagggtcatgaccatgcgcgtgctgcagatccagctgcgctcgctgaccgccatggatatcgtggcctacggcggtgcggcggccggcattggtgtggcgttatggcaatacgcgcataccaccgcagccgccgcaggagccagcaccgccggctggtcgccgatcatgctcgccgcccacctgcccggcgcattcgcctacctggcctacggcctgcaatacctgatgccgttcggtgcgggcttcccgctcaccctcgccggactgctgctgattgtgctgctgtccgccgaattctttattcccatgcgtcagcttggctcgttcttccacgtggcgatgaacggcatgacctccaccaagcgcatcttcgctctgctggacaccccggagcccgagcatg

SEQ ID NO: 1533 - DNA, 7205 bp, Unknown
  R257_15m  MAG No. k141_57778
attgcgccagttgcggttgaggccatcgacactaccgggtgcggagatgcctttatgggcacggttctggccggacttgcctcgggtcatgcgttggcggacagtgcgcagttggcctcgtacgtttccgcgtacgccgcgactggggtcggtgcgcaagcctcttatggtactgctgctcagattcgtgagcggtttggtacgaattgattactgagaagtgtggagtattgccggccgtgaattggtgcagacctaacacgttcatttaggcgctatgcagtgtcgaatgttctcggcgcggattttacgaagtattgccagcaaatgcatcaaggcaatggcggcggtctgggcgggactacggccacgcataacagtatcgagtactcgaatgagtcctatgacgcgaaaactcggaccgtgacgatgcatgccgttatcgactggagtgatccgtaccgattcggggattcgaccggcagttttactgcgccggacatcaccgttgtctttgacaagtccgggaaaatccagcgcattgactccacggtctggggattcccgcctgcccgataattatcggagggcctgaaacatgcacgttctcatcagcgctgcggatcgacgatgctgcaaccatacggcgtcatacccgcatgacgtgagttacactatgtagtaaagttatttactgaaatactgcgtattgttacgtactgaggcgtggaaggctcaactatggtcacgatgaaggaaatcgcacagaaatcaggcttctcgcaggccacggtatcccggctgctcaatggggacccgacattgtctgtcaaagaggagacgcgacgtcgcatcatcgaggtcagcgagcagcttggctacgctaccggatcacgccgtatcgcattgccacgccgtgtggccgtactcgacaacgccacccgcgaggaagaactggcggacgcctatttcgatgaactacggtccgtgctcagcgacaatgccagagcccagcacatggaactcacgtcgttttcccatatcgacgatctgattgccgacgccggtgatttcgacggcttcatctccatcggaccgtccgtactctcttcggatagactgttgaagctccatctggtattgccctatggcgtattcatcgacaccaatcctgcgcccagcctgttcgattcggtacaaccggatttaagccaaaccattttggacgcattggatatgttggtgtcctcgggcaaacgacgcatcggctatatcggcggtactggcttcacgatgggtttgcacgaatatccggaagacggccgattaaccgcattccgcaattggaccgagcgtttggggctggatgcggaaggcctgatttacgcgcaaggcgcgttcactgtggacaccgggcgcactctaggggaggaagcggttaacgatcatcgagatgacatgccggatgcgttcatcgtggctgcggactcgattgcagtcggcgtactgcaggcgtttaccgctgcgggagtgctggtgcctcgcgataccagtgtgatcagtatcaataaccaggccatcgcccagtacacttcgccgacattgaccagttacgatatcgaccagaatgagctggccgatactgcgattacgatgcttgccgaggccatctccagtcggcgcacgctgcaccaccataccttcatctccaccaccctagtggtgcgtgacagtttcgtaccagtacgataaagaagctccctctgtgcgataaagaagctccctcgtcagagggagcttctttatcgctgttagaacagttccagattcacgtcgagcgtgtaggcgcgatcggcgggcagctggtactgctcatggacgggcgcgccccatgaatcgtctccgcccacgcccatttgcgcggccaacaggcgcaggaacgtgtgacggaccggcggcaactcgttctggtgggtcgcctcttccagcatgagcgagctgtacggcaacaggctcgccgcgaaatgttcgctgccggcctggctgatacgcatgccgtgtccttgggcgtcaagcacttcggcccaacgcaagtcttcatggttgccggtctcctgcggcaccagatacggtgcattgtcttcggccgcggtgcgctcgaaaatgccgagcttgccaccgtgcagacggtcgtgataggtttcctcggggccaaggccgtagaagcgcaggttctcgtactgcttgggaagtgtccattccaatccgaatgccggcagcgtcggcgcatcggtggcaccggcatatcgggcggtcagatgtacacgtccgctggcggcatccacctcatagcgcacggcaacttgggtttcgcccggttcggccaacgtatgacgaatgccgccaacgggcaccaacctcgttgacggcattcgtctttccaggacaccgcaatcgcggatgcatgccgtttacgcgttgaatacgtattggtcaaggcggcgcatggcctccttgacgcggctcaagggcaatgcgagattgacgcggatgctgtagggggcctggaacatgtcgccgtcctgccatgcgacgcccacatcccagccgcgtttctccaactcgggcaggctcaggccgtggcgttcgcaccactgctcgcagtcgagcagcagcatgtaggtgccttccggtttggccaaactcactccttggaaatgcttggtgatgtagtcgtaggcgtaatcgacgttgccggtgagcaccgccttcagttcgtcgagccactcatggccttcgggccggtaggcgccgatcagcgcgtgcatggaaagcacgttcatgtcgttgtagtggcatttcgagcttttggccacgatgcggtcccggagcgtgggattgtagatgatgtggtagcttcccaccagtccggcgagattgaaggtcttgctgggcgcgtagaacgccacggtcctgttgcgtgcgtcctcgctgaccgattgggtggggatgtgctggtggttccccagagtcaaatcggaccaaatctcgtcggaaatgaccacgcaatcgttggccttgtacacttccatggccttctcgatttcccaacgttcccacacgcgcccgcagggattgtgagggctgcagaacacggccacgtggatgtgatgctccttgagcttcctgtccatatcctcgtaatccatgcgccatacgccgcgctcgtccagcgtgagcggactgtggacgatgcggtagccgttgttttcgatgctccgggtgaacccgatgtaggtcgggctgtgcagcagcacgccgtcgccgggggcggcgaacgcggtcagcgcactgatcacaccgcccaggaccccgttctcgtagccgatcgcctcccgggtcaatccggtgaccccgttgcgcgtggactgccagtcgatgatggagctgtaatagtcgtcggtgggggagaagtacccgtaggcgggatgcttcgcccgttcgatgatggcctgcggaatcgtgggcacggtcgggaagttcatgtccgccacccacatggggatgacgtcgaaaccctcgcgtggcgggtccggcgcgaatcccgggtcggtgcccagtccgtcgaccgcgatcgaatccatgccatgcctgttcatgatggacgtgaaatcatacgtcattgtccgacaatcctttctcggtccgtggtggccggtcccaatctaaatcgggctcctgacggtgccgtggccgtgggcggcgatttgaccgcgtggcgtgttaggatatgcaccgttatgaggcagtgatccgttatcagcggggagtcttcggaagaacggcggcaatcgcccagtagaaccgacgggatcggcccgagacagccgaacacaagcggtcgcgcaggctcgcggctccgagtgcaacagttcggagcggcgcaaccggtgcgataagcgaggtggtaccgcggtgcggagcgcataccagcgctcgtcatcgtcctcgtaggcaggaacggcagacatggctgttccgggcggaacacagtcggttccggctgcgaggcgattgactaatcggcccacggttcggtacgtgacattcgtgaaaccagccggcacacgtcggcgcccggcaatcgccatcaatgacgctcctgtaggaccagtgcacagtactaacaggagatttacggtgagcgaaaacgtatatcccaaggcgagcgagggcggcgagaccgcgcacgtcgcgccgaaccccagcttccccgacatggaggagaccgttctcgactactgggacaaggacgacaccttccagcagtccgttgaacgcaacccttccggcgaccacagccagaacgaattcgtgttcttcgatggcccgccgttcgccaatggcctgccgcactacggccacctgctgaccggctacgccaaggacgtgatcccgcgctaccagaccatgaagggccgcaaggtcaaccgcgtgttcggctgggacacccacggcctgcccgccgagcttgaggcgcagaaggagctcggcatcgactcggtcgaccagatcgagaagatgggcatcgacaagttcaacgacgcctgccgcgcttctgtgctgaagtacaccaacgaatggcagaactacgtgcatcgtcaggcccgttgggtggacttcgagcacggctacaagaccctgaacatcccgtacatggaatccgtgatgtgggccttcaagcagctctacgacaagggcctggcctaccagggctaccgcgtgctgccgtactgcccgaaggaccgcacgccgttgagtgcgcacgagctgcgcatggacgctgacgtgtaccaggaccgccaggacaccaccgtatccgtggccgtcaagatgcgcgatgaggacgacgcctacgccgtcttctggaccaccaccccgtggaccgtgcccaccaacttcgccatcgtggtcggcgccgacatcgactacgtcgaggtccgcccgaccgaaggcaagttcgctggcaagaagttctacctcggcaaggatttgctgccgcactatgagaaggaactcggcgagaattacgaggtcgtgcgcgaactcaagggcaacgagctggcaggccgacgctactacccggtcttcccgtacttcgcgggtgacgaggccgaatccgaaggccacgtgcccggcccgaacggctacacgatcttcaccgccgactacgtcgacaccgtcgaaggtaccggcctggttcaccaggctccctacggtgaggacgatatgaatacgctgaacgcgcacgacatcaagagcaccgacgtgctcgacgatggctgccgcttcaccgcgcagtgccctgactacgagggcgatttcgtgttcgacgccaacctgccgatcctgcgcaacctgcgcgccggcgacggcccgctcgccgagattccggaagagcgccgcgcgatcctcttccaggagaagagctacgtgcactcctacccgcactgctggcgctgcgccaccccgctgatctacaagccggtctcctcctggttcgtgtccgtgaccaagatcaagccgcgtctactggaattgaaccagcagatcaactggatcccgggcaatgtcaaggacggtcagttcggcaagtggctcgccaacgcgcgcgactggtccatctcccgcaaccgcttctggggttccccgatcccggtgtgggtgagcgacgatccgaagtacccgcgtgtggacgtctacggttcgctcgaagagctcaaggccgacttcggcgactatccgcgcgacaaggacggcaacatcaacatgcaccgtccgtggatcgacaacctggtccgcgtcaacccggacgacccgaccggcaagtcgcacatgcaccgtatttccgatgtgctcgactgctggttcgagtccggttccatgtcgttcgcgcagttccactacccgttcgagaacaaggagaagttcgaacagcacttcccggccgactacatcgtggaatacatcggccagacccgcggctggttctacctgctgcacgtgatggcgaccgccctgttcgaccgcccggcgttcaagaacgtgatctgccacggcatcgtgctcggctccgacggccagaagatgtccaagcacctgcgcaactacccggacgtgaacggcgtgttcgacaagtacggttccgacgccatgcgctggttcctcatgtcttcgccgatcctgcgtggcggcaacctgatcgtcaccgccgaaggcattcgcgacaccgtgcgccaggtcatgctgccggtgtggagctcctactacttcttcaccctgtacgccaacgcggccaacggtggggctggcttcgacgcccgccagctgcgcgcggacgaggtcgccggtctgccggagatggaccgctacctgctggcccgtacccgtcgtctggtgctggccgccgagaagtcgctgaacgagttcgcaatctccgacgcctgcgatgcggtctccgacttcatcgacgtgctcaccaactggtatatccgcaacacccgtgaccgtttctggaatgaggacgcttccgcgttcaacacgctgtacaccgtgcttgaggcgttcatgcgcgtgcttgcgccgctggccccgatggaagccgagtccgtgtggcgtggtctgaccggtggcgagtccgtgcacctggccgattggccgttcgtggtggacgagaagaccggtgaagacaccgaactcggccgtgtgctggtcgacgatccggctctggtggacgcgatggagaaggtgcgtgaggtcgtctccggcaccctgtccctgcgcaaggccgccaagatccgcgtgcgccagccgctttccaagctcaccgtggtggtcgagaacgtggacgccgtcaaggcgtacgacgatctgctgaagtccgaacttaatatcaagaatattgagttctcgactctggaggacgcctccgcccacggtctgaagattgttcacgagctgcgtgtgaatgcccgtgcggcgggtccgcgcctcggcaagcaggtgcagttcgccatcaaggcctccaagtccggcgactggcatgtcgatgctgcgtccggtgcgccggtggtctccacgccgtccggcgaccttgcgctggtcgaaggcgagtacgagctgatcaaccgcgtggaggaggagaa

SEQ ID NO: 1534 - DNA, 23015 bp, Unknown
  R257_15m  MAG No. k141_58054
cctctggcaacatggtgtgccagaggcacatggtgcaaatccatgacggccgattatcggcttatattctagcggcgtagcgtgctggtggtgtgatggtgaaccatgagcatgaaacgaacgccaccgccggcgtcatgggcggaagacatcaatgattggcttgaatctctgaaggcggccggtctcagtgacgaaacggtgcggtgccggcgctgcaagataaccaaggccgcacgtgatctggcaaagacgcctttggaagtcacggctgaagacatggtgcattggatggcggcgcagaaatggaaaccggaaagccgcaagggataccgcaacacgctgagcagcttctacggatggctgtataccaccggacggcgcggcgacgatccgagtgacgaactccccaaaatcaagcgtcccaagcccaagccgaggccatgcccagacaagtacatcatcgccgctctgcacaaggccaccgagcgtgagcgggtcatggtcagactggcggcggagtgcggattgaggcgcggcgagatagcgaaggtgcacagccgcgacgtgatggacgaccttttaggcaaatcgctgataatcaccggcaagggtgacaagcagcgtatcgtgccgctgccggacgatctggccgattacatcgagcattgcggcggctggctgttgccgggccgttggaacgggcacgtagagcagtcttatgtcaatcgccacatatcgcggctgctgccggatggctggggttgccactcgctgcggcacaggtacgccacgaagacttatgagcagacgcacgacctgtttctggtagcgcgtctgctcggtcattcgtcggtggagaccacgcagatttacgtggccatgcccgacagcaggctacgcagcgcgttggatgccgtcaggcttgccgtgtaacccgtggtctgtggttcagcgcttcagatagtcggtggtaccggccgggcccagtgcgatgtagcggtgttgtccgctggcggctccgatgtagcggccccagtcgtagccgtccgcgcggctggtccagccgtcgaggttgacggtctggccggccgaatactgggccacgatctgggcgccggtgctcggctgcgcgcgtacgttgagcttggccacgttgacgcgccacgcgccggcgatgccgctcggcgcggccggggcggcggtcttgggtcgcaggtagccgagcaggccgttcttggtgatgctggcctgatgcgtggctccggggttctgcgtcaggcacagcaggctgccgccctggtcggcgatgacgatggccacgtgcgtgtacggggtggcgggggcgttgccccagaacgccacatcgcccttgcgcggcacggtgccggcagggagccggtcgaacttgtcgcgcaatgcgggctgctggtcccatgtgctggtgtagacgctgccggcgtacccgttgacggtgttggtcgccgactgcggtacgccggccacgtcctgcgcgtaccggctccatagatcccagcactggccgccataggccccatcgacgtcaacggccctgccgttgtaggtctggatgaattggtcgattgtcattgtcatggttgttttcctttcagatgagcgtgagcaggaacagtgcgatggccataccgaatacgacggccacgatggtgatgaagaggatcgcgccgatggcgagcagccagtcggcggcggtgctcaacggcgagggtcgttgccatgcatgaacagcatgacgatcgttataccgacgatccacagcattgcggtggcgaggatcatgacttgccgtcttcatcgttatcgttcgggtccttaccgctgcggaacaattgcaacagggggctgttcgctatttcggggttgatctcgccgaggttctccaatatcgagctgatttcggtgatgctgatgtagacggcggcgggcacgatgaggggcatgctgtagccgaggtccagatgggcttggccgcgttccacgatttcggcgagcagcatcacgaggatcaggccgcttttgtgccagagcccgagccgcattttctcgctgctgatgtcgtgctgcatggcggccttcatgaggccggtgatgtagtcgatggctatgaggatgaccactatgatgagtgcggccagttcggtgtcttccatggttgtcctttcttccgggggtttattcgtcgtcggcggtccagatgcccagcagcgagaactcgctggtgggattggttatcgaccattgggttatcgtgtggccggagatgcacgcgtcgtcggtgccgggggctatcaggttgtgggtgatgctgattcggttgcggatcgagccggccttgccgaagccctgcggcacggtgaacgggctgtatgaggcgttgtcgtgggtgatgacgccggcgttgtagacgaatcgcattgatgcgatgacgaggttgttgaatctgaccagcagggcatcgttgagggtgattttcgccgggtcgtatgtcggtttgccgattcggacggtgccgagcgcgccgagcagcggactgtagcctgcaaggatgctctcaatggcggcgaggcgtgcggcgtaccggttggcgtcggtgccgttgaagtcgaagcgtgtcagggctttttcgatgccttcggcctgctgttggaggatatcgggtaggtgggcgatgggttcgttgtcttccgggtaggggagtccgaatgtgggtgtggtggttacggtcatgtggtctccttgattttcgtgacgtagcgcagcgcgccgagtttccagttgcattggccgaacgtggctgccgtcagttttttcagttccgcgcaggtcggtttgccctggctggtggtgtcctgcgcggggaagagtctgatcttgtgagcccaacggctgcgtttgttggtcgcgtcgtaggtgagcgtcccgccgatgacggcccaggggccatgggtggccggcacggtacgctcgaagcgcgatccgattatggtgatgacgcgggggttgcagtagaggaacatctgcgagaacaggtcgccacggaaggtgatctgggggagtcggacgcgctggttctgggttttcaggtagttttcggcgcgtgtggtgtccaggacgttgatgttgttctgcgaggcgccggaatcggcccagttgactgtcacgctcaggcagttctccccctcatacgtcgcggtttcaatctgtttgacgaggcttccgtcctgggagacctcgtagagctggccggacgatgacgaagcgagtttgagatgggagtagcgcagttcgagctgagtgtagtagctgtccggtgccgtcagggtcgggttttcgtcgatcagcacgttttccgcgtcagcgtaacgatgatcacgggtgatgtcggtgccgtcgtcgccggtgatgattctcgcgccggcaaggacggtttccacgtcccaattgagatacacggcttcaagcgatggcaccgtggacggctgacccttgtatgacatgaagacagagcgatttatctcaagggtgtatgtgccgttgatctgtctggtcttcactgattccaaccagtccaggaggcttgatttctggtctgccttgatgccggcaaggaaagtgctccaggggagccaatagttattgatgccgtcgttggccagccacgccttgatttgcgggccgatgttgcctttcggccaccattggaacccctgcaccatttcctcgtgctgattccagttggggcccttgcggcagtcatttcgcagcacatatatgcgatctgacgcggtgatgctcaaccggtcatgtccggcgtcgttggcgagtatctgcacgtcggttatgatgccgtcgaacatgcagtatttcaccgggttggggccgttgtcgatgccgttttcggtccagtccggcgcgatggttatacggtgcccggcgagcgtcgtgtaaacacggctgtaatcgccgttcgggtcgatgaacgtgatcttgagcacggcgggcacggcagcgtcccatggcgcgctcacgccccactcgatggtgaagggggagagtggcacgggaaggccggtgccgttcacgcgttcgggcaaaagcgtgttgtccaggtacacgcggcatttttcgggaaggcgggttgcggtgctcatagtgccagttcctttcctctgacgcgcgcccaacggtcgaggctgctgacgatttcgccggccaccttgtcgttgtcgagatttccgtgagcgtccacgttgatgttgacggtgagcgatgtgggccgtgacgtatcggtgcggctgagcggggcggccagtaccgcgcgggtgaggttcggcgtcgcgtaggcggtcgccgccagcggcgttatgctgcgcgccatggcatactgccgaacaggcagcgcgtaggcttgcgcgctgtagctctgcgcgctcaagccgcttgccgcgctgctagcgcccgtgatcttgccccagaggtcggatacccagttaaacgcctgcttgatgccgcctatgatgctgtcgaacacgcccagcaccttgtctttcaatccggtgaagaagccgataatacggttgatggcgtcttgggcggggccgggcagtgcgttgaacatctgctgaccggcctgtttcatgccgtcgaaattcaacgtgaacatgctcagcagcagcttgaaatagccgcccagaaagtcggctaccggctggaacgcctgacctatcgcgttccaagtgtcgatgccccattgcttgaggctggcaccgataccggcaagccaccccatgaaggcggtccacttgtccgctatccactgcgccgccgctgctccagcggccttcacgctgtcccagttcatcaccagcagcgcgattaccgcgacaaccgccagaatcacggcaatgaccggcagaaaagcgagattcaccgagccttgcgcgattgccacgacggtggccacggcgctgtacgcggtcatggccgcgttcaacgtgatgataaccgccgcaaccgccgctatgacaccgataagcggcaccagccacgagatgttctgctgcacccaagtggcgaactcggcaagtttcgccgccacctgtgtgagaatcggcaacaatgcttcgccaagagtggccttggtgttctcgaacgccgccgccatgcgctgctgctggccctgtagggtgtcggactcacgcgcgaagttgcccgtggccttgccgctctgcgcggtgatcgcggccagcgtggcttgcatcttggcgttacggtcgcccgacttgtacaggtcgcccaagcccatcgaagccgcttgggccttcaacgtagcatcgttaagagagatgccgtatttctcgattgggtccatttcgcccttgagcgcggcgctgagcgcgtccacagcgtcggcggtggtgccgccgaacatggaagacaagtcggcgccaagggtgataagctcgttggtcttgtcggccgattcgtccacgctcatgccgaagttctgaagctgggagcccaccagcgtggcgaactcgttgtactcgttcttgctgaggcccacggcctgtgccgcgttgtcgctccactgcttcatctttccggcgcttgatccgaacacggtttcgacgccgcccaccgactgctgaaggtcggcggcagcgtcaacgcacaccttcgcgcccgcgccgatggcggcgagcgaagcgccagccgcaaccgaagccttgttcaatccttccttgaaggtcatagacgcggccttcgccttatccatagcggccacggcgcttgtcgcgtcaccgatgattcggatagccaacacggctgatttcatgtctcacctcacctcgttctgcgtcgaatgtcttcggtttcctcggcctcttgccgcaagaggcttacacaggtgccccagtcggcctcgtgcggctgtgattcacgccgccatgcccacggcgtgccgccgaaacgcgcggccagtacacagctcagttcaccgaagccgccgctgtcccaccggtcgcaccggtcgaaaaacccggcgcgtccgccatgtcgccggaagagaccggcacggggccgttcatggtttcggcctggtcctcggtgtcggtcgggtcgttgtttatgtccacgacggaaaccacggtgtcggcccactgctcgaacggaacagaggtggcgccgatttggcggcagcgcacgtaggcggcgtaggcgttgagcttcaccacggcgtccaacgcgctgccccagcccttcgccttcgcgtgggtttccgcttggcagcgctgccacatggtcacgcaaacctcgtccgtgtggccgtccaagtaggtgatacgggtgttcggggtcttggtctcgttgttcatttcgttaatctcctgttgtgattcggttgatgattttctgcaccgcgtccgcgtagagttgcgtccactgtggttcggtgttcttagccgccttgttggcgaacatggttgctttgatgttgtgcttgggccagccgtaattgattacgcccgcgtacttcaccttgccgttgttgccggcgcgcaccacaccggccttctgtgtggcacccgcgcgtatcgatttcgtgagacggcccgagcgttgcggggccagtgccttggcggctggtgccacgatttgcgcggcctgttcgttgatgtcgcgcaagtccttcaggtcggcgccggcctgtctcaggcccttggcgagctgtgccgcgcccttgagctgcaactggctgttgccgccagaggctatgtccgccatgattaggagtgggacgaaggcgcgtagtctacggctttaacgtcgatggcgacgaacgaaaaatcattgctgttcttcgtcttcacgtcgccgccgaactggatggacgcgattaccacgttgccggtgagcttcacgctgccctcaaggttcggcacccactcgaacggcagcgtcttaccgctgttcttcaggcaccagacctgtaggccgttcatggagaagtcctctttgattgaaccggtcagcgcccaagtctcggtctgcgaaccgccctcggtgtggccgtccagaaaattgtcgttgtcctcggtatcggtcgagggttccaacgcggtgttgataacgtccgcgctgaagtcctgttcgctgcccgacgcgccgattttcagactgccggggccaagcgtgcgtgtctttgccatgattgtgttcctttcagttgatttctagtgggttcagggtgatttcgtaggccgcgaggttgccgacacccgcgagactgtaggtgacgggtttagcggccttcatgttcaggtggcgctcatgcaagcgctccaagacggggataatcaggtctaggctttcaatctgcgtggccgtggtgcccgcgataaggttcaccgtccactcggtgttgacgaactgccagccttcgtaggtgatgttcggcgggtcgataagcaccgcgactttgctgggcagcgggcgggcttcctgagcgtcgatggtgatacatgtcacgaggtcgccaatcatgtcggtgagcatgtccataagcgcctcacgttcgctgataatccggctcatgcaatcaccagcccgcccgtgggtacgccagccgcgttgagcttgggccacacgctgcgcaacgggtcgcttgacaccctgtagggttcaagcgagccgtcgccaacagccatgacacccaacctggcgtcacgactgttgtacaggtcggcggcgcatgacgtgatgcagtcggcgcgcacggtgtcatccaccgtgtgcccgtctatcgcgccggccacatagctgatggcgctggtgatggcgcgttgcactcggtcggtgtcgccggccgggactccgatttcgtcacgcaccgacgcttcgtattttttccagtccaccaaggctgactcctttcatgatgattgctatggatggtgcgtggctaagggttagtcgattttgtacaggcggggagtgaacgtcttatcgacctcgcccgtggtgttgacgaaaatgttgcattggagagtgccggccttcaaggttttcggcccatagttagtagggccgaacacatttgctccttcgctcccgtcgtggtggagcctttgaaacggtacgtgcccggtgtcggtgccgtgaccgtgatccccggggcggcacccactgtcttaggcagtccggtgacacgcggatacaggttcgctaattcacaccccccccctaaggctcgtgttgtcgggtcgcatccactcgtgcgcggtgttcccgagttcgagttggattttcaggttgcccgacacgctgccggccgtgacgccgccacgcaagatgcgcagctcgacgcgtgtggtccccttggggatggtgaccgcggtgttgtttttcccccgatagacgccgccgaggctattcgcgttggcgtagaggccgatgaccaggtctccgggcacatcgcccgtgtaggagaggatgagaggcacgccaacgatgccttcgggcacgtcgagctcccagcgcacgcccttgtacaatggcaccgattcggtgccgctgtcgaaatcaagcgacccgtcctgcgccacggtgacggtcagaccgttggccgacgtgggcccgtaggacagcaggttacgcgagagcaccgtgaccggcacgtcggtttttaccgctgggttgacggtgctggatatcgtcacgtcggtttttcccggttttttcccggtgattgtgatggtggtcattggctcacctcgatgtcgatcaggtcggtgccggcagtggtggcggttactgtctgtggtgccgtggctggtgtgatcgtggttttgatttttgcggttttgcccgcgatgacggtcaggctagccggtgtagcactgagtcccgtgggcgtcagacttttgggaactggacggggataaggcccaacggctgcgtggcggcgacggccaggtagccgtagacgctgtaattttcggtgagcttggtggggtcgccatcgctgagctgcgtcgggccgccgctttcccagaccgttaccgcttcggggtcgatgaagcacgccgtgccggtggggcgcttgggaggagctggacggggacgcggaggaatcggccggcgatgccggtgaggtcgaagtctccgatggtgtccgagccgtcgccggacaggtcaaagaatcgactgccggtgtccttgagcttgatgagcgcggccatgacgtccttggaaacgccgaggcgagtgagggacacgttgcggtcgtcggcgagttcggcggagtccatgatcaggcccgcccactggtcgatggtcatggcggtgagcgcggcgggcgcggcgatgcggttggggttggtggatgcgtctcgctgcgcggcgatggtggaatacaggtagttgcgcacggcggtttcggtcgctttcgcgtagctgttgcgaagcgcggccaatgccgtgttcagcatcggtgtagtgctgcgttcgatcacctgacgcgacagcgtggtgtagccgccgtaggtgtcgataccgacgctcttggtaccgaacgtgaccttgccgaacggcagcgcggcaccttcggcagtctgcttgccggtggtcgtggtgtcggtggccaccacgttgtattccatggtcatgcccttggccggcagcgtgtcgtgggtcaacaggttggtgaccttgcggcgcatctgaattagtcgcaggtcgtccgcgatccaggtggtggtgttgccggtgttgccggtggcgatgaggtcacggcattcgtgcatcaggttcacggcggcttcctcacctcggtagagggactggaggtagtcgcctgcggtacggtattccgcgcccagcggcttcggcttgtccgggcttccggcgtgtgccaatgcagccttgaggctgcgctgttcgtccttgatgccgtccagcatctccatgagttccttgtccattcgggtttcctcgctttccttcgatggatcgtgtttttcgatttcctgggtgttcgtttcggcggcgctgcgttggccggtgattttcgccgcctcataggcgggccagctgaccacgcttgtttccagcaggcggacacgcttgcggtgggttataccctgcttgtcggtttcgtcctgcactgggatgaagccgacagacagggagtcgagagcgccgtctcgcaggagggccaccacgtcgcggcctcgctgcgtgtccgagattctggcggtgatgtgcagaccgtcgttacggctttccgctcccgtgatgcggccgatgagttcgccgtgctggtagcagagcttggcgttgtcaacgtcgtcgaaacggcagtcggggtcgaaggtctcggctcccttccaggtgtcgatgatgctgccgaagggtacggcgatgccttccaatgtgcggccgtcgccttcctcagcagcgcgtaggcatatgcctttgaatccgatttcatgacggttcactggttcacctcttccggttgcggcgcgttgatgagcgggggcagggcctcgcgtgcgcgcacctcgttaatttccatccatcctgattcgagggcggtcttgtaggcgttgaaacggtcgctcatgtcggcgcggcgacttgaatcccagtcgaacgcggcggtgcggcctcgtggcagcagtctgttgaacagttcctctatctcgcccgcgtaggcggccagcgtgtagtcggcgaactcaatccagctttgctcgatgttcgaataggtgagattgctgccatcgactgcggcgagcatgatggacgcgggaatgcccaacagtcgcgcgatctgcgtggtgtcgaacttctgggtttccaaaaactgcaagtcggccggcttcatgtccagcggcacgtatttcagcttgctgcccagcaccttgatgtcgcctgcggttccggtggccttccatgcctctttcgcgttcctggcgatgtcgggcgtcaccttgtcctcggaggacaggtagcccttgaggttgctggaatcggtgtagaagcgggccttgtaatcccgcgcctgctgcgcgctttcgacttcctcgcgtgccgcaccgatggggccgaggcctcgcagtcgaccgggcacgttcaaaaacttgcagtgcacgatctggtcggccgtgtagtccacaccgagatacgagtaacggagcttcggcgccgctgggtccttgccgtcgtccgagacggtcacgagcgagggcggcagcacctcgcaggtcacgacctccccggcgtagcgcacaagccgtacgaaggcgttgccgtccaacaccatgctggccaccatgtcggcgaggaagtcacggcgggaacggttcacgtccggctggaggataagcgagctcacggtgtccagcttcagaccgccgcgcatctcgtggatcggcagaccggttatcgcggtctgcaacacctggaccccgcgaaacacggtggacaggctcaacgggtcgcacaccggctcgcggctgggcggcctgatgccctcgggcatatcatccgcatcactgcgggtcaggatacgcccggcgagcttcatacgatcccagagactcaggttgttcattccgccgattatgcgagtctggttcggtttccgtccaccaccgtgccgccaagtgccgccaagtaccgccaagtaccgccaagtaccgccaagtaccgccaagtaccgccaaacggtcagtagatttgcaggggtccggagtcttcgggacggtgcacggctccccatgcggccaacatgcagctttcgagcggcgaggtgaggcctgtgctgcctcgccggctcaatcgccatgcgtcgccggcccatttgcgtgccgagttggcggcgctggcgtcaaggtcggggtcggcggcatgtttgatggtgccgttgttcagcccgctcacatagctttgcccggtggtcaggaagtcggccgcgtccatgtccacgaactcgatgacggggtcaccgttccggtcggtgagattatgcagccggtcggagaggtcggcggcggtgccgcgttcatcgatgacggcgggcgcatggtaagtttcgcacaatctcgtgatttcggcgggcgcgtatccggtgccgtcgagaatcctcagcaattgcgtggttatggtgccatcgtcgttgacgatgccggcgctgatgctggtgtgggtggcatccacgtccacggcgatgccgaacaccaccgggcggtccccgagttcggccggtgtcaccggcatggtggctgtggcattccatgttgtttcgtcgatggcgcggtcggtgatgccgtcgtctctccggttgccgaacgctctcgcccagcctgccgggttgcccttgaactgctcgcgaaagtccctgagctgtgatttgtcccaaagcagtcccgctgccgggtggtagcgcatgatgacgccgaggtcttcagggtcttcgcctgaggggagtccgaagtcgaaccagcaggtgcggcgtgattgttcgccggcgcggcactcatcgagtttcctgttgaagaaggtcgagtctgcggtaccttcggtcgaggttatccacagctggggttgcacgccggtggccttcaatcgtgtggccatggtcggcatgaagccgtcgagaatcgtgttgccggtctcttcggacaatgaaaacgcctcatcgagtgtgatcttgtcgccctggacaccgtggccggccaccttcgtcactgatttcggcattatcacgctgccgttgacgaatggttgtcggaggtcgccggcacccatgtaggggcgtgcggtgatatcggcgagtggtgacgcctgaatggtctttagatatttcttgaaatggtcgcccgcgtccttgcctgtctgagcgaggtaatagatatacctatccggcccccattgcgagttgcgggtgtccaccgcatccacgagcgtcgatttaccgcactggcgtggcgtcgagagaatcacagtgtcgtaatagtaggttccggttacggggtcgatttcaccggccacgtccgccacaagctgctgccagggcagcaatggggtgccgagcagcttggcgaactcggcaactatgggcccgtccgtccgccgttccgagtttcgctgcgttccgccgcgtaccggcgtcatgccttcgccttctgcagcagtccggcaagggcggggttgacttccttctctgccggaaacatctcgttgagctcctggaaccacaagagcaactgacccatgacacggctggtatcacgtcccttggcgttcaatacgtcgaaattgcgcgcgatgttcaccatcgtcttgcaaatgaacacggcgcgtgaattaagcttgcggccacgcacgaagtcctgtatcagttccgtcgtcgctttttcctgaagccccgccatgatgttgtcgtaggcctcgaagcctggcaaggtttcctgactcattattttttcaatctcctgttttcgttgttattccgccgttttcaaatttttttgctcgtttcgagagagaaaaaaacttggcgcggggtcttttggctggccggtcgtttaaaaaagcgactaccattgcggccgcgcgtcgattcgttcgcattgatcgcgcaaaccgagcgccgcgagtctggcgcgtcgcgcacgctgcctcgcgtccagcaattcctgcgtgagatggagcgaataccattgccttgccgtgagcttcgcaccctcgttgcgatgctcggcagtgagccggtcgaacaccatggatgcgccggggtccaccacatgcagctcgtagtcaagggccagccattcatccaacaggcgcgggtgcgcgcgagtggacggcaatgatttgataagccacacctcgaccggcgcgttcattctggcgagcttgttataggcaccctgccaagccccttgcgccgtggccacgagcgggccagtggcctcgtgcttcacatccacgtcaagcatcaacgcttcggccaaacggtcgaagtccaggataagcgcgccgttgccggcatgttcggccacatacgagctcttgcccgcgcacggaggccccatgaccacatgcaacgtggccccatagcccgacagcacgcgattgcttcggctgatgttgcaatgcttgcaggcacgccggatgttcgcaaccgtgccctggccaccggccttgaacggaatgatatggtcatcctcttcaccgaccttggtgcagccgggcagattcagccagcattcattgccccacaaatcgatgacggtctgccttacgcgcgcaccgacaacctgacgcctcgccatcactccaccttccccttctgcgttttcacccacatatccagatcggccagctcgtacaggcacggtgaattgatagcgtcaccggccttgaaccagacggggccggtgttgtccgccctcatgcgctccatctgacgctgcgatttgtgcagatatgtggccgcctgcgcggtagtgagcttcgccctcggattcatccaaccccctagaacagattcaacttcgattgcatcgatgcctgcgatggggccgtctggccagactgcgcggccttgcgccggaacaccgatacctgcccctgcgcccacaggtcgaactggcgtgcgtccagcgtccacgcgcagccgacgcgccgcactcccattgccggccagtcgcctcccaacgcggccagttcggtgcccttgcgcagacgcagggcgttcagtacgcgcatcgaatccggcaacccggtgtgctgttccttggccaacgcaacgatggagagccggaagccctccaacaggtcggccgcgtcatgcggagcactccacgggctcaacgcctcggcaaggctcggtttcgtgcgtgccatcagtccatcacccaagcccacgagccggtccaccgggccaacgcctgcatggcctcgcgcgcatcccagcagcgcatcccgtacttgcgggtcttcgagacggggcattgcgccaactgcatcatatggaacgcctggttgtcgtcgatgcgcccgttacgcctggtcaatccggcccaacgcgcgatctgctcgatggtcaccagaaacgattccgtggtcttcctcgactggatgaactcgttgagcttcggaagcaaccggatacccgcgtccttcagattcatctcgaacgttgctctgctcataatccgtaatccccttacgttggtttctcatgtcccttttgggagggagtgctggagaggtcaagacccgaagattctcggccgagacgcgcaacgcgaaatctcggccgagaatcctcaagtgggtctcgctttcggtcggtcggccgtcgattgcaagagcaggccgaagcctgccgggaatggtccccaaatccagccccacacacaatcgcgtggtagtgctgcccgattccgcctttaccagcggctggatagggtcggtggcaacctcttagtctcgcgagtaccgcagttgcaatgcggccggcttcccgccaccacagcgggcataggtagggctaggcgtagccatacgcgccatcacagccattccattctcagtgacccgatagcgtcgggcacgcatacgcacgcttagaggcgtctaaagatacctagaactactcggggccgtccggcaatacggccagacagccgataagcccgcgaacctcctcgggcgtaaacacatagaccttcgacctgaaatccctgcgccgcgtatggggcgtgatgcacaccatcagacaaccattggccgtcgtggccgactgaaacctgtagcccatatcactcatggccaaacctcccgccgatgcgctccggcacatccgccagcaccatgcccgcgcacaggcaggcgacgccgaccaatgcccacaggcccatgacggccagaatcaaaccagcgaacaccgcgcagaacgtgagaacgcccttataaagcccgtgcatgcttcgcctccctgataaccctggcgaactcgcggttgatgcgcaccatgtcacccatcgacaggccgtccacagcgaaataatcaccatccacactgaaacgaataccgaactcatacgggctccccgcatcaccggtcagcttgaactccgcactgaaacggttcccgctgcactcagggtcgaacaccgacatcagcgcacctccgccatgcttggcggaaccttcggcccctcgactgcgaaaacgcaatccgggcacatcttcgagtgcggcctcatacgccacccacgagccgacatggccatatccgggtcctgattcaacggcacaaacgcctcggccccgcacacgtcacaacgaaccacatacgcaatcatctgcaaaacctccatcggtcgaatggttgaaaagggttccttcccccgccgtaggcttgaaaaggaagaaccaagccaaggaagaacaaacgaaggaaggaagaatcaatgaacaatcctgcgcaatacctgctgcaactattcgaagcagcagaacgagataatgggcagacgttcacggcgcgtgattcatcggcagccatggcggaaattgagcgccaagccgcaatgcttgaagccggcggggacagcgccatgcccatgattcgtcgggcgttcccggaaatatgggaaaagatattccggtcattcctgcgcgtgcagaacaacaatttcaatgcaggcggcatcgcggaccagcaagtactgtcgcttggcgcgcaaatagccttagcccaaatgcgcaagacgaatccattcgctgtgtccaagttctcggaagcgcaacgagaatcagctagaacgtttgcacaagaatttgcggaggccgtcaaaaacgacggaaccttgccagtggagctcaaggaatacgttgcttcgctcgttgtcgagctccagtcagtgctggacaaatatgagatgaccggtgacttcgttctggcggatgccctgaatcgtctctttgcggcggtgttcatggcggaaacgcagacgcaggataagtcggggtggcaaaaattcaaggaggaaaaggcaggtccgttcatgcaagcgttccttggtcttgctttgccgaatattctttctgccgctcagcttgttctccagataactcagggatgaggaacaggcggtatttctcgaatagcccgagcctgaaaaggtacgacgagccggtttgctgaccgattgtcaccatggcaaggccaaaaagaatctgccatgcttccatagccagcaagccggcgacgaacgcccacaggccaaaggcaatctcggtgaatgcgaaaaacagagtccagccgttcggcttcttctgcgtaacaaacatcacgccacctccaaaggcttcgcatagtcggaacgaccaagaaggaaatcgacactcacatcgaagaaatcagcaatgcggctgatgtcacgaagagtgaaaggtcgttttcctctgagtttgtttgacaacgtttgtgggtacatgcctagtgcggaagccaagtccctctgaagggtatgggtctgcttaagcagcgacaacacacgctttcgtgtaccacttccgttatcgagtaaacacatacggtaagtaataacacattgacgatgatgatgaataatgtcggcgtgttgcaaacagtaaacaaaagtggtaacttaatgcctatgacaacgacaattagccaaccagtaggaacggcccctgattttcagaacgtggccgtaatgaacatcaagctcatgctcaaggttcgaggtgacactcaaaagaacctggctggttacatgggcaagaatcctcaaagtctttcacgcatgatgcggccagggtatgcgtggacattcaacgatatgtgcttggctgcgcgatatctcggcacttcggtagataccttgatgcgtcaggatctgactcttgcggacttgatgggggataacaaatagcctcggggtggcgtggccactccgaggctgattgtgaaggacctttatcaatcctcgttcgtagcggggcatggatttgaaccatggacctctgggttatgagcccagcgagctaccgagctgctccaccccgcgtcggcttgtctctcagacagctctatctacaataggtgcagattccagaaagtcaacatcggcgtgtcgtgtcattttcccacggttctaaaacgtgaatcggctcacgcagcgaggggtttggggcggagccggagtcggggtgataacgcgccataaatggccgttataggaatgccctgaaccgttatcccgaatattgacataataggaacatgcctatcaagatccccagtggcctgccggccagagatatcctcgattcggagcgcatcttcgctctggagaagcccgaggcggagcgtcagcgcgtccgcccgctcaaactggtggtcctgaacttgatgcctaagaaaatcgagactgaaacgcagctgctgcgtctgatttccaagtcgccgctgcaggtcgaaatcgacttcatgaagacctccacgcatgaggccacgcacgtttccgccgatcatctcgtcaagttctacgaaaacctcgatgcgttcaaagacaactattacgacggttttgtggtcaccggcgcgcctgtagaacatatgccgttcgaagatgtggactactgggacgagttcaagacgattctcgactgggcctccacccatgtgttctccaccatgtacctgtgctggggtgcgatgggcgcactgtactaccgctacggcatccacaaggtggattaccccgagaagattttcggcgtattcccgcagtacctgcaggacgaatactgcttcctgaccaatggcttcgacgagattgatctgcagccgcactcccgcctcgccggtgtgaacgaaaacgaggtacgtgccaaccatgaccttcagatcttgacttgggggccgcagtccggcccgggcctaatcgccacacgtgacttctccgaagtgttcgcgctcggccattgggagtacggcaagtacacgctcgccgaggaatacgagcgcgatatggccaagggcatgaccaacgtgcccttcccgaagaactacttcccgcatgacgatccgaagctggaaccgttgttcgtctggcgtgcccacgccaatctgctgtggcgcaactggctcaactgggtgtaccagaccacgccgtacgacctgaccgaggtgccgcagctcagggctgagaagaagctcggtactgatcgttcgattcggcatgagccgggcgggccgcgccaggatgatttcaagccgttcgcccacgacggatacggagtgatcagagggtagcgcaaatgccgcacatcctcgtattatgactaatagcgcacaacgcttgcgcaacatccgaaaaaccttgcgccgccgccgattccagaagacgcgccggtgtagtattgacattgtctagacgcaggcaaataatcactcttcagtcattcggagccgaatgcccagcgcagactccgtgtccgcgcccggcagactccacaccgaggagacgaaagtaacgagcacgtcacatttgcctgcccggtgggtttaaactgacacctgatattgaagaagcaggaggcgtgatatggtcggttcgctcggcgcaggattgctgttggctgacgaggcaggcgctcatctgccctcggttggtgacttccttcccccggagattctgttccagggaactccgtttgctatcaaccgcattattttgattcgtatcgtggcaaccatcgtgctgttggtggtgctcggcgtgaccgcaaagcgcgccaagctcatccccggccgttggcagggcgtggtggaatacggtcttgacttcgtgcgtgacaaggtcgtctatgacgtgatgggcgaggttcgcggcaagcgctacgtgccgatgatcaccaccatcttcttcacgattttcatcttcaacctgtgtggcatcatcccgggtatgaacatggcggccaccgccactgtggtcatgccgctggtgttcgccatctggaccatggtccagtattggatcgccgccgcacgttcgcaaggtcttggccattatctgcgtcacgagctgttcacccccggtgtgccgtggccggtctacatcctgttgaccccgattaacatccttgagttgctggtcatccgtccggcctccctgaccatccgtctgttcgccaacatgatttccggccacctgatggtcgccacctgcctggcattcgcacagtactggatcgtcgatgcagccaacaagctgcaaggcatcccagtcggcgcgatgtggttcgtcagcggtcttgccatgacgtgcttcgaggcgttcgtcgccttcctgcaggcttacgtcttcgccattctttccaccgtgtacatcaacctaagcttcccggaggagtgaggttcaaccccctctttcggaacccggcctcgcctaggtaggcaggaccgaacgaaataagatttataacgtcgccaagtacgttagaaaggaaacacaatggatatcatcaccctcgcagcggtcgccggcaacctgtccgtcatcggttacggtctcggtgcggttggccctggcatcggtctgggcatcctcttcggcaaggccatggaatccaccgctcgtcagcctgagatgtccggcaagattcagaccatcatgttcatcggcctggctctgatcgaggtgctggcactgatcggcttcgttaccgccctgatgttccactgatcgaacgttttctcagtcgaatacagaaggcaaaacgaatccaccagtgaaaggaggacttcataatgacgctcgcagaaggcggaattgatctgttcattcccgagacctatgacattgtgtggtccctgatcattcttgtcatcgttgcggtgttcttctacaagttcttcatgccgaagttcaatgcgatcttcgacgagcgcgccgccaagattcagggcaacatcgccaaggcggagcaggctaagaaggacgccgacgaggccaaggccaagtatgaggcccagctgagcaccgcccgtgtggacgccgccaagattcgcgacgacgcccgcgcagaagcgtcccacatcatcgccgacgctcgttcccgcgccgagtccgatgcggcccagatcaccgcatccgcacagcgctcgatcgaatctcagcaccagcaggccatcgtctcgctcaagggcgaggtcggcgcacttgccaccgccttggccggcaagatcctcggtgccaagctggaagacagcgacgtgcagtcctcgatgatcgattcgatgatcgacgacctgggcgccaagaagtgaccgtgaccatccgtaaccagaaagggaggtgaccatgcgaggagaggcatcacgtattgcagaccgcgagtcgcgtgattcgctggccccgaaactgcgcgacacccgtgaggacgcgtggcggatcggcaacgaactgttcacgatcaccaaggtgctcgatgacagcattcagctggaacgcgcactgaccgacccgtcccgcccggtcgccgacaaggtggccgtcctgaagggactgctcggtgacaacgcgcatcctatgaccatggagatcatgaccgacttggtctcccgccgttggagccgtgcgcgcgacatcgccaacgcggtggaggacttcggcgtggacgccatgatgtactacgctgacgccaccgacgccacgctgcaggtatccatcgagctgtccgagctgcattccgcactgctgaacctgccggtcgtccgctccaagctgtacgactaccaggccaccagcgaggcccgtgtgaagctgttccgcgaggtgttctccggcaagaccctgaacaaggtcaccatgaggctcgccgaacacgccacctgcaacctgcgccgccgccgctacttggagaccatccagtggctgatcaacaagttctcccgccacatgggcgagtcgatggtcaccgtgaccaccgccaccccgctgaagaaggagcagattgagcgactggtcgaggtctactccgccaaggtgggccgccaggtgcacatcaactcggtggtcgatccgaccgtactgggtggcatgcgcattcaggtgggcgacgaagtcacggacaacaccgtggtcgcacagctgcagaacctgcatcgcaaggtgcagacggaggcgactccggcctgaccggccgagccaatccgtccaacaccacacacaagcaaagacttgactgaacaataaccaatagaaggagtgatcatggcagaactgaccatcgatcccgcctcgattcgcaaggccctcgacgacttcgtgtcgtcgtacaagccgagcgacacccccacccaagaggtgggatatgtcgccacggccggtgatggcattgcgcacgtgacgggattgcctggttgcatggccaatgagctgctgacgttcgaagacggcacgctcggcctggcgttcaaccttgacgcccgtgagatcggcgtggtggtcctcggcgatttcgcaggaattgaggaaggccaggaagtgcgacgcaccggcgaagtgctctccgtgcccgtcggcgacggctatctcggccgtgtcgtggacccgctgggcaaaccgatcgacggcctcggcgagatccagggcattgagggtcgtcgtatcctcgaagcccaggcccccgacgtgatgcaccgccacccggtcgacgagccgctgtccaccggcctcaaggccatcgacgcgatgaccccgatcggccgcggccagcgccagctcatcatcggcgaccgccagaccggtaagaccgccatcgcgatcgataccatcatcaaccagaaggccaactgggaatccggcgacccgaagaagcaggtccgctgcatctacgtggccatcggc

SEQ ID NO: 1535 - DNA, 4799 bp, Unknown
  R257_15m  MAG No. k141_59158
gtccaatacgcggccgcatgcctgacccatgccgttggtggtgttcaccatcaccttcacgccgcgtgacttcagttcgggcagcagcaccatcgccgggctctgcgcgtcgatgaccacggcggtggtcttcggccagcgttgcgaaatccagtcggcggcccatgcggtgccatgccgtttcgtatcccggtattccgccaattcgatgtgcgcggtgccgtcccggtatttcatgcacgcgccgatggccagtgccgctgcgatccggggacatgtcgatgccgaacgaggtgacgccgccatcggcgcgtgcttccacggtgccgttcgcccacagttgcgggttgatggcgctggagacggtggtttcgtcccatatgccaaggccttcgcggcgtaacgagtcatcgcccaggttcttcttcatgcgcaggattgccgcttcgccggtgcgatgcggatacgacgggttcgccacggcccattgcctgcggtcgtcggagtcggcgtccttgtcggcgctgaactccacgtacagcatgtcgctgctgccgcccttcaacgcctcgtcgcggcgcatggaaaacacctcggacggatccgagggcttcggcggcgtgcccatgtagacgatcagcgggttacgcgccgcgttcgtcgtcgggatcatgtcgtccaacgcgcgctcggtcaggatctgcgcctcgtcgaacacctcgatgtccacgctgtcgaagccacgaccgaaaccattctcacgggcaccgaacatgacgcgggatccgttgacgaacacgatttcctgctggccgttcgcccttctcggctcgccgtcaatgaaccggcttatcgccttgcgccgcaccaaagcgcacatgaacttgaaggtttcatcgctcgtgcgcgtcctatgcgcggtccacagcaccttcaaggggcagtcgctcaggatgcccagcatcacgatcatcgtgccgatcaggaacgtcttgccgacctgacggcagatgctgacgaccacgccgccgatatcggcggcatacacgccatcggaggtcttgccgaggatgcagcggcccaatcgccgctgccagccgtcgtactcgatgccgcacagcctcgcctgagcctccaccttcggccagccggtcgtcacaatatccttgggcagcaccacatgccgcgccacatcggacagcttgtgccggtcgggtctgacgctagacctcgctcggatcgaacggttcatcctctacctccgtcgcggtcggcgcactggccccgccgcgctcggattcaagacgctcaatctcccgactcacctcaagcagccgacgagtcaacgacgccaaatcacgcggcggcgtaccatcgtcaaacaccgcaacttcaaggcgattaagcgttcgccgtaacagctcaagataattgttagactcattcattggaactcttggcgcttccttataattgctatatggacgagaccagtgaaaatgccgatggcgaagcaactcaaaatggtaaaaaacacccaattcgtgacttctatagacgtcacgaaagcggcatcaaactttttctaggcattatggcagccgcatcaatactggctctgcttgatgctggtaacgataagcaagaacgagacaagatcaaagagtcccatcctgtagatgaagatgaatttgactcacctgacgatgaagagattcgacaggctgtgaatgccgcccaagattctttcagtccaagaatcattgatacgaatgtctctgatagcacggtgtctttcaatatcaaatcagcgtccggcaaacaaacttggcctcagcatttcgagttagaaaaggatgaaaacgggacatggaacgcaacttcacgctggggcaccatcgataacggctcgtatagtacgagtcctattccagacagtgccatacgagaggttctaaaccgactcaacgattaattgggaaaaacggcggggagggatttggctaatactccggggtagccgaacgccgggctgggaggataccgtccccagaccagttaccagtccgaagtgctgaacggtatggcagtgggcttgagggccggagcgcctttgaccttctgtcttgcccatgcaaggctcttgtcgcttttgagttggttgcaacagcgatgcaccttctcaaggttgcgcagatccgtcgcacttccgccgcgactcactggaatgatttcgtccacttcggcgctcattggatcaggccatctaatcgcgtcgtcaatcagtctatcgcagatggcgcagggcacttgctgtgcgagcactcgctgtctggcgaggttgcgggcctgacggttgatgcgccgtggatccctgtagcttttgccgtggggcatgtggttggcctatgtgtgtggcgggtgccgtgatgcctgtttcgcaagcagggatcttcaattatgcgtgaggcttggtgggcttcacggcacccgtgggtatgaatatgccccgccggagaaaggagtaaagccggcggggcgggggaaagacttggaaggttgccttggtgttccctgcattgaacggcaacactatcattttcgccgtgttgcatttcccatgcaagctccacagggccttgcgtctaccagatattcgatatggcggaatccgttaccgaaggtaacggtatcctcggtcttcctgttacagccggaaatcattgttggtgttggcttcctagccccttatgtattcctctgtaacaggtgcaacaggtgaagtatgggagtcgtgtggtgaatgagggtgcatggggtcagttgcatcagttacatgtatcacagattctgtgagggctgattcacgttctcataacatatttgacaatgatccgatgaagttgtaaaccaataatagtttgcatgctttgggatgccagtgtgggggttcaaatcctcatcgtcgggatgccatacggtgcgcttctcctgttgctgaggttgatgggtagatatctcggcaagaattccgatgaggaaggaaagggggtgcctatgagcaataaaactcatgaacatcgtaatggagtatggtcaatgattgttacggtagtagcaagtatgctagagggaaccaaagaagttctattggactctctagctggtctcttaggagacttcatcagcaacggtattgcgcactggcgccccaaggcatacaagcttttttggattaatttgtgcagggaattgaccgtggacaggcttcgccagctccttcctaatgtttggagggtttgttaagctcttacgccactgcggcggtttcactcgtcttgcctgcatcgatggctttgagccgcatctggtccacggcgttggcgacttcgttgagtcattcgggccagagtccggcgtatacgtcgagtgtgatgctcgccgtggcatggccaagctgtttctagagggtcttgacatccgcgccgcaggcgatggcgatggacgcgtaggtgtgacgtggctgtggatgttcacagcctcgccctccatgcccgcgttgcgcacgccgggataccagatgcgtgtcctccagctctggtcgtggatgcatccgccgcgtttggcccggaacaggaactcgttcttgctttgtccggcggtctgctcctccagttggggaatgagagactgcggcagggcgatggtcctcgcctcaccgttttttgcgtgccgagttgcatcctgccttccccgtcatcggaccatgtgcggcggatgcgggctttgcggttcctgaagtcgagatcctgaatctgcagagcgagcacttcgttgatgcgcacgccggtgtaagcgaggaatcgcaccaacagttcgacttccggcacggtgaggaacaccatgtcctcgtccttggacacaatctacggtatggtgaccagcttggccgggttctccggatccacttgttggtgatggcgtattcgaacaccgccgccatgacgaccttgacgatgctatgcagggactcagcggccgcggcttcttcttgccggacagctgggccttatacccgcccttggagagtttgttcacccatgattggagttcgttgggtgtgatttcgagcagcgtcttataggtgtcgtcgaatccaccggtggcggcgatggcgatgataccgaacaagacggatgcggaaaggtacacgggtccgacgtatccgccgggaatatacttcttgaacacccaaacgaacacgggcacgatcaacgaacccggacccgagcgtggtcacgatgccaatatccgcataatcctccttagacgatgtaggcggcctacggcatcgacgcctacggaagcgggttcgacatcagaaaaagactgggccggacgccggcgctaacccatcaacacgcgcggataagacccacatttctttacttaacccagaagccccactccccgagcggaagtagggctccggtcgggctgacaggatttgaacctgcgacatcctgctcccaaagcaggcgcgctaccaaactgcgctacagcccgatgtgcccagccaaaggcaaagcacaaatgttgagtataccataggccgagactgagcccgtcttcaattatcgccgggttccgtaggccttggcaaccgaatccggggccattggactcgacccgcatcttccaccccgccgatggtccaaataatcggcgcaatgtaggccccctcccattgcgttcctaagtgcgcgccgaaacgacgagtgcgcgaacataggtacgca

SEQ ID NO: 1536 - DNA, 56449 bp, Unknown
  R221_24m  MAG No. k141_514
aatgccgatacggtaggtgtcgccgccaatgcctcggcatccgatgcgaagtccgacgccaatacggacgccgacgccgagcaatccccgcagttccccacgaaactcaccatcaccggcgtcgtactcgacccgcgcgacctcaacaatccagacggctattcgggcatgacctccttccggtccacctcatccgaggactatacgttctttgcacccagcgacggcgtgaccggcaatatatacactgcgatatcggttgccgtcactggtgcgtccgattttgacacgttttccgatgcctacgatgaagccatcaaaaccgtggccgaccgtatcgaacatcagatacaggccacacgccagaaagcccgtcgtcaacagatcgtctccagcgcgcagcgcaaactggatgatgccaaagacgaggccaacgagcagctggacgaagcccagaagcagatcgacgacaactgggccgagctggaagccaacaaaacgacattgcaagatagccgtaccgaattggagaacaacaggacaaccattaccgatggcgaacggcagctcgccgatggacgtgcgcagattgcatcggcccgtcaacagatcgcgcaaggtcgccagcagatagccgaagcgcgcacccagctcgaatcgggcaaagcgcagctcacctcggctcgcaaacagctcgatgcggcgcaaacggaactgactgccaatcgcacgaaaatcgaacagggcattacccaaatcgaccaaggcgtggcacaaattgatcagatgctgtccatgattcaacaggccgacaatctactggcgcaacttgacccgaatatcgacttcaactcacccacatggcaggccatcaagcaactgctcgcgcgccttggcattaccctgcctgaagtgccgtcaatcagtgagctgcggcaacagctggccgccaagcaaacggaactgcaaacgcagcgagacagtctgacccagcagaaagccgatttgcagcgcacattaaacgaaaccattgcccccgcacaatccaccttggaccagcagaacgcgcaactgaccgccaaggaacaggaagcggctgcaggagaggcacagctcaataccaaatccgcggaactcgaagcgaatgccgcaaccctcgaaacccagtcggcgcaacttgaagcgcaggccgcccaactggccagcggcaagcagcagctcgaagaaggcgagcggcagctggaagaaggcgaacaacagctcgcggacggcaaggcgaaactggatgatgcgcagtctgaactcgatgcgaagcgaagcgaagcggaaagcgaattcgccaagcagcaacggcgcatcgacgatgtggccaacgcacgttggtatgtgcagacgcgcgcttcgatcgacggattcagctcgctcaaatcagacgtcagttccatcgaatccatcggccgcgcattcccgattgtgttcctgctggtcgccgtgctcatgagcctgaccaccatgacccgcatggtcgaggaagaccgcggacttatcggcacctaccttggactcggctatggcggactcgccgtgtccagccggtatctgctgttcgcgttgctcgcctgcctggtcggcggcggcatcggtctgctggtcggattccttggcatcccggcattcctgctggtggtgattgagggactgtatatattgcccggtgtgcgactcgaatacgactggctgtacggttcggccggcatcgtgctgttcgtggtcggcgtgggcgtggccaccgcgctcgcctgtcgcgaggagatacggcacacgcccgccgcgctgatgcggccgaaggcaccgaaagcgggcgctcgcatattgctggagcggattcgcccggtatggagccggctgaacttcctcggcaaagtcaccgcgcgcaatatcttccgattcaagtcgcgcttgattatgaccgtgggcggcgtggccggttgcacggcgttgattatctgcggatttgcgattaatgacaccgtcgacacgattggcgtcaaacaatacgagcagatctaccagtacgacctgatggtcgtggccaatgacgatgacgccaccgcgatgcgcaagcaggtggcacaagatggccaaaccaccgaaacgctgaatctgcgcgtggatagtggcgagatgagcaatgcggcgcaggaaagcgaagccgtgcagctgatgaccgtgcccaacgattcgctgaatatcttgaacgatatggtcacgctggaacaagccggcgatgatggatggtttgggctgcccaatatcttcggcaaagcgggtggcggcactgtagcgctggacgatagtggcgtgattgtatcgcagtccgccgccaactcgctgaatattcatgccggcgacaccgtcacgctgggcaatggcggtagcagccgggccaaggtgcaggtcacggccgtgacgcgcaatcttattggctctgatgtgtacatcagtgagcgactgtacgaccagaagtttgcggccggcggtgtgacgtcttcggcttcgggagatggcactgcctcgaccttgacgtggaacgcgatgctcgccaagctgaaaggttccgagaccgaacaggccgaatatgcggatcggttgggcgaggaatcgtcggtgctcaaggccgtgagctgtgcgcatctggccgccacgtttaagttcgatttgatgggtgccgtggtggcgctgattgtggggctcgccggcggcctggcgctggtggtgctgtttacgttggccaatacgaacgtgtccgaacgcatccgcgagatggccacactgaaggtgctgggcttctatgaccgcgaggtgcacaactacgtgaaccgcgagatgatgatattgaccggtatgggtgtggtggttggtctgccgcttggcaggtggataggcggattactgactgctgcgttgaatatgccgtcgctgtatttcgaagtggaagtgcactggtacagctatgcgattgccgtggtggcgacgctggcgttcgcgctgctggtgcagctgttcaccaacccagtgctcgatcgcgtagacccggtcagctcgctcaagtccgtggaatagaggtagaagttcaattaggtgttggtgaattgaacttttttggcggaatatttacagcatcatcgcatgtattcttgagctgagcggttttcgcgacatatttcggtgatacagtctgaacttgttttgaacgagtatcgcgtccggtacgtaacaatcgggcggcggagaagagaaatgaaatcagtatggccgatacgaatgtgaatggtggtacacggcaggctacgggcaaactcaagtctgtcgaaagcctggaccagaccaacgagatggagcgtggcctgagcaaccgccacgtgcagttcatcgccatcggcggcaccatcggcaccggcttgttcctgggttcgggcaagtcgctggcactgaccggcccctcgatcgtcttcgtgtatatcctggtcggcgtcatcatgttcttcctgatgcgcgccatcggcgagatgatgtaccgcgaccccagccagcacaccttcatcaatttcatcacccgctacctgggcaacggatgggggcatttcgccggctggacgtattgggccgcgctcgtgctgttgggcatgaccgagatcacggccgtctccacgtacttcatcaccttcttcgacacgttcggcatcgacctgacccattggaaatggctgattgaactgtgcttcctggtgtcgctggtgtccgtcaacctgatcgccgtcaaggtgttcggcgaggtggaattctggttctcgatgatcaagatcacgctgatcggcgcgatgatcgtcaccgccgtggtcatgatcgtgatcggctaccattacccggccgcgcggattcatggcgtggatcatgtgagcccggcgggccacgccggactcgacaacctgttctccggcttctcgttcgccccgaacggctggatggccttcctcatgagcttccagatggtgttcttcgcctatgagctgctcgagttcgtgggcgtcaccgtctccgagaccaagaatcctcgtgaggtgctgcccaaagccgtcaacgagatcatcgtgcgcgtgctcatcttctacgtgggcgcgctcgtggccatcatgtgcatcgtgccgtggacctcgttcaagccgaacgaggacggctccttcgcctccccgttcatcatggtgttccagtatgccgggttgaactgggcgtccgccctggtgttcttcgtggtgatcaccgccgcgtcctcgtcgctcaattcgctgttgtattccgccggccgccacctgtaccagctgtccgaggtgtcgccgaacccgatgctgaacaagctcggcaaggtgtccgatcgcaaggtgccggcccgcgccatcctggtgtccgcggcgctgatcctgctgtcgccgatcgtcaacgccatccccggcatctcgggggcgtttgtgctgttctcgtccgccagctccgcggtgttcctgttcatctacatcctgacgctgctggcgcatcgcaggtaccgccgttccgccgatttcatcgcggacgggttcgtcatgcccgcgtggaaggtgctcaacacggtggcgatcgtgttcttcgtgttcatctacctgacgttgttccttgcggacgatacgcgcaattccgcgattgccggcctggtgtggcttgtgggcttcggtggattctctatactgcgcgaacgctaccgtagccgcgatttgaaggccgcactggaacacaaggagtgattggacgggctgattggctggcggctattagttgggtggctgttggctgttggcggctgactggttagcggccgatagccaatgaccgggctgatcgtcagccaatcggctgcctataggtctcattgatacattcggtcatccgattagtgcatttgcgcggacaattagtgcattcgatcatcggattagtacatcagtgtgcaattattagtacaattagccgcctaattagtacattaggacataaaacaatgtcctaatgtactaattagatgctaaaatacgataagtgccatgtcctaatgtatgaattatcgctatgaagggcggaatgcgatgacgcaggatgaacttatgcaagtgctgcaggccggtgaatcatctatggtcgagttcaagcgctgcagcgaattgcctcatacggatacttttgagactgtatgctcattcgccaatcgttctggtggcagcatttatcttggcgttgacgatgacggtcaagtgctcggcgtcgattctaagcgcgttagtgagatagagcgcaacgttgtcaacgtagtgtctaatcgtaagatgttcgaaccggctccaatggtggaaacggaacatatcgagtacgacgaacggattattgttcgtatttgggtagctccgagttcttcggttgtgcggttcaagggcgcagtgtttgatcgcattgctgatgtggatacacacatcgaaagcgatatccagattagtcaaatgtatattcgcaagcagaactactattccgaacggcgaattttccgttacgtgactccgtttgatttgcgtcctgagctgattgcgcgaatgcggcagctggcggtcgctcagcgagctgggcacccttggggaactatgtctgacgaagaactgttccgcagcgccaagctatacgatcgtgattacacgaccggcgaagagggctttaatcttgctgcagtgctgctcttgggcaaggatgaagtcatttcctcggtttgcccagcgtatattactgatgccgtggttcggcgagacaatattgaccgatacgatgaccgacttatggtgcggaccaacttgttcgattcgtacgagcaactccgtgaatttactgagcggaatctgcctgaccgctttgtgttaaagggcgataagcgagtgagcccgcgtacgatgatcgcccgtgaattggtggcaaacagcctcatgcatcgggagtattccagtccggtggtggcgcgtgtcaccattgataatgaatccatccggacggttaatgcttcgcgctcattctttgaaggtcgaatgaagctgggcgagttcacgccaatgccaaagaatccgattatcgctaatgtgtttgtgcagaccggcatagccgagcagctgggtagcggactgcggaatctgataagagcgtcccggcaatatactgagcgagagcctgagttccgcgatggtgacatattcgaggcgacgattcctattgttcctgcgctgaagaccgtggatggttctggttttgctagcgtgagatctgtagttgagaaagatgccgaagagggtgcgaggctcattggcggggaacgtgtggatggtaagaaagcagatgcaaccgcatcgggtgaaattgattcgcgggcagcgatgctgtcggcgatgaaccgacgcttgacagaggttgactatgtgactgtacctgaactcgccaagataacagagctcgataacagaacagtccgcaaattcctaaacggtttagttgcgcaaggaaagctgattgctgaaggcaacacgcgtggtcggcgttatcggaagggatagcgggcgcgatatctcgatgcagtgggattcacttaagggctacggcaaatatgattcgtagcgattgggccagcgcaattcgaatggctcatgactttgtgcgtcgtttgtggtctctgaagttgtttgctgggtgacggttttgtgataaaatcgctcatatcaaaatgtttgcgtaaacattttggctgcgccgaaagaaggagtcgacgtaggtcatgtatcaggcaaagaggccggcgcagtgaagcaaaggccgatttttccggtataaggcggatagcaggaacactaaggagaccaatgaaggtactgagcaaatcgcttgctgcaatggttgcggcggcaacactagtgggaggaggggcgtttgcggttgccggcactgcgtatgcggctgataacgatgccattaccgtgaccccgaacccgtggtatgccaacagtttcgatggctggggcacctcgctggcttggttcgccaacgccaccggcagcctcggcgaggaatcggccatcaccaccaatctcggcgatgacgcttccaaggctaaggctgtggaatacggcaaacagctgcgcgaacagttctaccagtccatcttcggtgatgaaggactggacctgaacatggcccgctacaacgtgggcggcggcaatgcctccgatgttgcctacggctacccattcatgcgccaaggcgctgccgtgcctggcacgtggaaagatgacgccaccggctccggcacgtatggcaatggcgtaaccaccaagcaggccgacaaagacaagatggctgcggcattcgacccgactgacgacaaccagtatgacttctccaagtccgccgcccaagactggtggattgagcgcggtgccaccggcgataaccctgacatcaccgacgtagaggccttcgccaactccgctccgtggttcctgaccaacagcggttacgccactggtggacgcaactccggtagcaataatcttgcaaaccctgagaaattcgctcagtacatggccaagaacgtcgagcacctcgaaagccttggcgcaaacgttgacacggtcgagccgttcaacgagtccgagaccagttactggggcactccgggcgacatggcttcgaagtacaccgatgagagcgatgacaacaccaagctcattaacaactactgggataagtactactccgacaaagataagtccgtcaccccatactccaacgcgctgaagaagccgcaggagggtatgcatgtcagcaacgcccagcagcagcagacgattaccgcactcgctgaggcgctcaaggacaatgatgacaccatcatcgcagccaccgatgccacgaactccgccgacttcgtcaagtcgtacaaccagtacccgcaggcgatcaaggaccttatcggccagtacaacgttcacgcctactccgacagcaaccagatgcagtcgcgcgatatcgctcaggcagacggcaagaagctgtcgatgagcgaggtggacggctcctggcagtctggctcctacaacccgtacggtttcgacaacgcgctgggcatgatgagcaagatcagctccaacgtcacccgcctgcagtccaaggacttcaccttctggcaggtggtcgaggacctctacaacatgcagatgggctcgaatgtgaatccggccggtgagaacaccaactggggcaccgtgctcatcgacttcgactgcaccgtggctggcatggacggcaagctctactccgagcgccgcgtgaacaacaacggcggtaccaccgatggacttgaaccgtgcacggttattgcaaacgccaagtacaacggcgtcaaggccatcacccacttcatccacgcgggcgacaaggtcatcgccaacaacgatgaagacaacaacatgactgccacctccgacgatggcaagacacagaccgtcatccaccgcaactccggcacctctgaccagaccttcgtcatcgacctgtcgaagtacggcgagattgccgacaacgcttacggtgagctctacctgaccaccgaaacctctgccgaagacaagaacgcgggtgtcgattccgccactccggaagtcttcgccaagaccagcaacgtcaagcaagctgaaggctctgtgatgattgacaaggctgccaagaccgctacggtcactgtgcccgcccgttctatcgcctccatccagctcactggcgtgaccggctacgctaaggatgctgccgtcgagaccggcgacacttaccagctcgttggtaagcagtccggcaaggccgtggctgataccacttctggtgattccgcgctgtccctggccaacgtcgcttccgatgccgagaacgccaagaagcagacttggacctttacccagatcgagcagcccgccgactccgagcgccctgatctgaaggcttatgtgattactaacgccgaaggcaaggtgctggtgtccaaggatggcacgaacgcgctttccaacgaaacggttgaggccgctaagtccgacccggctgccaagtggattctcaacacttccgatggttcgacctaccagctgctcaatgccgcgactaagacgaacctcgatgtggataactctggtaccacagtcggcacgaaggttggcttgtggcagtcaccgagcggcacttcgccgtccgccaaccagacatggactctacgcaatgtaacgccgaccagccagaagaccgtgaacgtgcagaccgccgttaacgagaaggccgcgctgccgaccgaagtcacgctctactacacctggggcgaaggcaaggccacggttgccaactgggatacttccaaggtcgatgtggccaaggaaggcacctacgaagccaccgctaccgccaccgatgtgtacggcaacgagttcaatgtcgccgctacggtctacgttggcgcgctcaccgtttccgatccggtatcggctacagtgctggccggcaccagtgcgagcgaggcgaaggccgcgcttgaggctgcgccggtgtatctgcacgtcaaggcatcgcctgcattcgagggcgatgcggctaaggttacgtggaacttcgatgggcttgataccaagctcgccgatgccaaggctggcgacaacattgccgtgaccggtacttaccagctggacgacgcgaccacgattgcgctgaagggcgcgatctatgtcaccgccgccacgcctgagaatgtggccgacactgcttccagcctgaccgtgaccaaccagcagacggaatacagcaagggcgatcagtggaagaagctcaccgatggtgacacgtcagctgaagcctgggtgacgtggaactctgctggtgactattccgccagcccgaccgccacgattgacttcggctctgagtgtgagcttagcagcgtgaccattacgtatggtgacaaggctccggcttccgccaaggccgagtacaccactgatggcgagacgtggatgcaattcggtagcgatgttaagcctgccgcaggccagacggtgacgttcaaggccgataagggcacagtgaatgccacgaaggtgcgcattgtgaacaccgtgaacaacgactacatgaacgccaccgaaattcaggcattcgtgacgccggttcagggtgctgcgaagaacatcgccgcggcctctggcacgaacttctcggtgaacttccaggagggtgcctccgcttccaaggccatcgatggtgacactacgtcaaagggttggtccacttgggcttccaccgcctcgacggtggacccggtcgccacgttcaccttcgacgaagctcagaccatcaccgaagtgaagaccttcttctactacgatggtcgtgcgtcttggccgaagagccagacgctggaatatcaggatgaggctggcgaatggcatggagtcggtaccaaggatggctggaagatacaggccggcgatgccggctctggctccgacggcatcaccgccgccgacaccccgaccgttgacttcgtgctcggcaccccggtaaaggccaaggccatccgcctgactaacacattgcaggacaccaaggtgtacatcaacgtggctgagatccaggtgttcgcacaagacagcacggtactcaccccgcagccagcatccgatgccacgctgggcgacctgcgtcttgacggcgaaaccgttgaaggcttcgacccggccaaggccgactacacggttgatctgccggtcgacgccgaggcaaacccggtgctgcaggccttcgccaccgacaatgccgccgccgtcaaggtgactggcgacgcggttgagaacggcaagcttggcggcaaggccgccattacggtgacctcagccgacgagtctgagacgaagacctacacggtgaccttcaacgccttcactttggcttcgctcaaggtgatcggacccacgaagaccgagtacgccatcggcgacaagctcgataccgccggtctgaaggtgactgccgtctaccagagtggcgacaagaccaaggaagtgccggtcgctcttgacgacccgcagcttgcgattggctcgttcgactccaccaccgcaggcaagaaggcgattaccgtctcctaccgtggtgtgaccgcgaccttcaacgtcacggtcaaggccaacgcagtcgcccctggccctgaagaacagaagcccggcaacaccaacaagcccggtgccaccggcaacggcaacaagaacacggtggccaacaccggttccagtgttgccgccatcgctggcgctgtcgctctgctggccgctgccgcgggtgcactgttcatgctgcgcaagcgtgcatagcaccctcgcgcagtaatgggtgaaggaacaagccggcaatattgactattgccggccggttcctccgctctttgaccataattggtccgacaagttgaatactgagttttcagtatcggtatattgatttgtcgaaccttttctggcttcgcggatagcgacataactgtttgttcaaaaaaccgttatcatcaatcaaggaaccaaatcaatgaagataaacaataagggcaagggcgctcttatcgcggcaattaccgccgcggcaacgctattgtcatgcgggctggccgctgcaagtgccagtgcggcaggtgtggattacctgcctaccatcggccaagtgccgacatacaccaagttccagcccacagccgatccgggcaagaacgctagcgattacttccagccatattggtatgccaagaacgccaatgataatggcggcacacacatccaagcgcacggtggccaagtggtcaaggttggcgacgcctactactggtatggcgaagaccgttccaacggttacgacaacagccccggtgttcatgcttatatgtcgacagatctatacaactggaccgatcttggtgtggcgctgcgtgcggtgaccagcaaatctcagttgacggataagagcaatgccgattacgcctacttcgacaaggcctacaacctgaccaagtccgacggcagtgtggatgctgccaaggccgacgcaatcttcccgtacctcaacaccaaccccgatcaggatggtgatggcgcggttgattccgtacagggcattttcgagcgtccgaagatcatctacaacaagaagaacaagcaatacgtgctgtggtggcattccgatggaagcaccacgccgggcggttccaactatgcacgtgcacttgcgggcgtggctgtttccgacaatccggcgggcccgttcactatggtgggtgcctatcgtttgcctaaccagaacaattggaaagaagccgcaggtaaccccagctggggtgagaacggtgacagccgcgatatgactgtgttcgtggacccgaaggacgacggtgcctatgtactgtattcttccgaagccaatgccacgctgtacatcgccaagctcaacgatgattacaccaatgtagtcaagaccacgaatgtggaccagtccgaggggcaaaagcagtactctgctgacgggcagtacccatacattcttgcagacgctactacggatgccccggtgcgtggcgaagatttccaaatcgtcaaacaaaatggttcgctggaagctcctgccgtattccaatatgacgggcgttacaacatcatcgcatctggtgcaaccggctgggccccgaacaagcagacctactacaccgccgactccatgctgggaagctggacccgtggcgtggaaaaggacgatgtcaacgagaacacgtggtacaacaacatgccggaaggcgcggatggtctgttgtccgtgggcgatacccgcggcaccacattcggttcgcagtcggctagtgtgctcgcagtagaccaggagaaaggtcacttcatctaccttggtgaccgttgggattccggtaaagccgattccacctatgtttggctgccgctgaccatcggtgagaacggcaccatcgaaatgcacaatcctgctcaagaaggcgagcccgacggttgggatctgagctattggggcaaccatggtagcgccaagggcaagctggtcaactggactgtggaaaccggcgatgatttcccgaagaccgtgaacacgggcggaaccgttactctgccggacaccgtcaacgtcaaggaaggcgacgataccattgctaccaaggtgacatggaatgtggaaggcggtacggcagtcagcaagtcgaccaaggctgctggtaacacctacgcattcaatgtgccgggaacctacaccattacgggcactcttgccgagagcagtaacttcaatccgggccgtacattccgtagaaccatcgatgtttcctgctccaacccgatttccggaagttggaaggaagctcattggaagggcggcagcgcgtgccaggtttctgcgtccggcggtgcttatgacttcacgattacggacaacgccaatcgtggcgtctggacggatcgcaacgagggcagtgcggtgtaccagcctgatgctctggacgtgaacgaaacgctggaaaccacggtcaagccgctcgacttgggcggtaatggcgatccgcgcgccggtctggtggtccgtaacggtcttactggcgctaacggcggcaagggatatgccacgttacttgccagcccaagcggcgtttacatgcagtacgattccaatgccgatggctacatcgataaggaaacatcgcatgttggtaccggcttcggcgaccaagtgcagctcaagctggagcgcacctcaaccgatactctgaaaggctactggcgtgcttccgcgaacgatgaatggcaggatgtcgctacggtaacgctgaccggtgcggacgtaaccgggctcgatgccggtgctttcgccacgtcgaacagcaatgccggcgcattcaccgtggccttcaacggcactgcgttcggttcgcagactgctgctgtggagtccatcgcggccaagggccctgaagccactatcgccaagaggcagacgctcgcgcataaggacgtgacggttaccgctacgctcaccaatggcaagacgcgtgtactggagccagatgaatacacgttggaaggcttcgacaccaccaaattgggcgagcaaaccgtgacggtacgccttgtcagtgattcttcagtaactgccacgctcaccgtgactgtggaaagcaaccttgcccggttgttctgctcgtccgccgcagcctcgaagtatgagccggccagcagctgggcctccgcttctacggccgacctgacttgtgacaacaatctgagcaccaactggtcgaactggggcaccggcgacacctcgccgtggctcagctacaccttcgataaggcatatcagctgggcaggctcagcgttgcggtggataaggccaagggcgaggccgctccgaagagcttcactgtatcgtacctagctgaagacaacgccacgtggactgatgccacgctgccggcagtcactgtgaatggtgctgctggagccgtgacggaagccgatgtgagcgctctgcccgccaccaagggcattcgcctcaacttcacctacgccgatggcaatgactatgccaagatcgctgaagtacgcatcgccgaaggtgaagcaacgccaaagccgcagccgtctagtaacgccaatcttgctgatctgactgtggatggcaagacggttgacggattctccgcggatatcaccgaatatgccggtgcgctggccggagacgctgcttcttacccgacggtggaggcgactgctgctgacgcgaaggctacggtgcaggtggagcaggcttcgaccgagaacagcggcgtggccacggtgactgtaactgctgaggatggcacggcggaaacctacacagtgacattcggcgaactgcctcagttggccgagcttgctgtggaagtgaccaaggattcctatcaggtaggcgataagttcaacgctgccgatgtgaaggtatccgccatttacaaagtcggcgataccgaaacgctgcgcaagctgattgatccaactgatggtgatctgaagttcactggctttgattctgccaccgcaggcacgaagaccatcaccgtctcttatcgtggcgtgaacgcgacgttcgaagtcacggtcacggccacggaggtcactcccggccctggagagcagaagcccggcgataccaacaatcctggcaacactgctaagcccggtaacactgccacgaataagccggctgctaatggcgctgcgcccctttcgaatacgggtgttgccgtggctgccattgcggtcgtggttgtggtgctgacagctgcggctggtgccttgctcgtcatccgcaaacgccgcgcataaccatggcaactgctgagtggcgtggattgcgttgctattgagcaatctgcgattcacgccactcagcgagtgcacccgagtgcgcccgagcttgcgcaatgcaggcgcaatacagtgcaaacagtacaaagcaacaataatggccggtctgagccagctgctccatgcgagggcagctggctcagaccggccattgtgtctgcaagtacatgcaattagagcatgaacatgtggaagccgttgagcgttactggttgttttgctttgttgttgcgctcagcagtgcgacggacgtccgtccgcagtgtagtgcagcgctccgtgaaccagcgccgatgtgaaatgcatgttgcacatgcccgcttcttctgcttcgtgcgtgcagccggcgatgctgcataggttcataccccgaatcatggtcataccccctctttgggatggcatccgtgccgccatctgccttcagagcatagcggacaattgttgcattgcctaggcggtacaacgctttctgtggcctgtatcacatccttgccggcgttctgcggcgtggttgggcgtgtacatgtgctcttgtgcggttttgttgtgtgtgatttgggtatacggatagagtttcttctctgcagtggcaagggcctctcggccggcgagccggctgatttctcccatgcgttgctcaatgatttccgttttgcgagtctgaacggcaaaatagctctggagaagtgccacttcttctttcttaggatcaccgttttgagcaatgagatagcaggcgtatcgggtgagcttgacgtccgcgatggagcgggtggcaccgctgccgagagtcacgtctcgcgtagtgtcacggaaatgggattcaacggatacgccggaattgtcgcaagcttgcttggctcgtgtaatagctttgctgaagttttcccatctgtcgtaccccatataggtcattagctcgcgtgcataccaatactcaactttggagtcctcggtggtgtgtgcgatagtgctgagttcgctggttttgcgtgtgatttcgtcgcggttcatgggtgtgtccttatgtttttcatgaccattttcgtgactccacgaaaatggtcaaagccaataattgcaatggttttgaggtatgggcgcgctccgcccaactggtctgtcttcgtccgccttttcgaccagatacctcatggagcacaatgccaacgtcgctaccgttggcccagcaaatattcttagacgacgccccgaagtgaatatctatgcggctttcagaatatcaaagagcgtggagtgtgtgcattatgcgttccaaaaatagtttctagtaatgaattgtttacggtgtgagatattcttgggggtgtttgcggcgctctgccgtgtggcgaatgggaatggatggtgctcttatgggatttgagcaggaagcagttagtgaactgtatgccagcgtgtggggcaatcgttcgacgatgcagagggaattcactcgtggagcccatggtgagcagttcgtgctccgggagctgtccatgaaggggacgcaaacgccgtcgcaattggcatcggcgctgcaggccagttccggccgcatctccactgtgctgtcgtctctggagaaaaaaggctgggtcacgcgtgacattgattccaaggatcggcgcattattcgcgtgaatctcactgattccgggcgcgagcagtctcatcggatgatagaggaaatgcgttccgcaatttgctggattttctcgcaaatgggggagcggcgcacgcgcgaattcgttgacctggtgtctgagttcaccacatatatgtcgatttgccatccggggcggcctcggccgacggctgaacaagtgcgtgaggcattcgtggagcgggacaagcgcgtggctgaacacatggcagctaagcgcgcggaggctgagcgagactagcttcctcccgctggcgggtctctccctccgtcactgctgcgcggtgacgcctccctcgtcagagggaggtaaaggtgattgaggacgctcacagcgaacatacagaagtgcgtataatatctcacagtgtaagtaatcaaacaatggaaactattaagacatcgtgaaccgataatcaccgataacccagccaacttaagaaccaatcgccaataaccaataaccaacccaaccaacacaaggggaaaccaatgtttcgcatcatgaaatacctctccaaagcggagatcggtcagatgctcatcgccctggtgaccatcgtcgggcaggtctacttcgacctgaaactgcccgactatatgtcagacatcaccacgctggtcgagacgccgggcagcgacatgaaggacatctggatcgcgggcggcaagatgctgctcatctcgctcggatccgtggcgtgtgccatcatcaccggctacatcgctgcgcgcgtggccgcctcgttcacccagcgtctgcgctcgctcgaattccgcaaggtcgagtccttcggcccggccgagatgagcaagttctccaccgccagcctcatcacccgttccaccaacgacgtcacgcaggtgcagatgttcatcaccatgggcctgcagctcatcgtcaagtcgccgatcatggccgtatgggccgtgtgcaagatcgccggcgaaggcttcgaatggacgctcgccaccggcatcgccgtggcggtcctgctggtgtccatcaccgtcatgatggccatggtcatgccgaagttcaaggtcatgcagaccctgaccgacaacatcaacctcgtggcccgcgagaacctcaccggcctgcgcgtggtgcgcgcctacaatgccgaggactaccaggaagccaaattcaccaaggccaacaaggacctcaccgagacccagctgttcaccaaccgcgtcatggcgttcatgatgccgttgatgaacaccgtcctgaacggcctgatgctcgccgtctactggatcggcgcttacctcatcgacgccgccgggctcaaggacaagctcaccgtgttctccaacatggtcgtgttctccaactactccgtgcaggtcatcatgagcttcctgctcatgagcatggtgttcgtgctctggccgcgcgccgacgtgtccgcgcagcgcatcatggaggtgctcgacactgagccaatcgtcgagaacggcaccaaaaccgccgccgacgtggccaaaaccggccagaggggcaccgtggaattccgcaacgtcagcttcacctacccggattcgcgcgaggcgatgctggaaggcatcaacttcaccgccgagcagggccagacggtggcgttcatcggctccaccggctccggcaagtcgtctcttatcaatctcgtgccgcgcttctatgacaccagccaaggccaggtgttggtcgacggcgtggacgtgcgcgactacgacctgaaggccctgcgcgacaagatcggctacgtgccgcagcagtccgtgctgttcaagggcaccgtggcctccaacgtgagctacggcgatcagccgggcgacccggcggaggtcgagatggccgatacctccaccccggccgggcgcaagcgcgaggccgcgttgatcgccgctggcgaggccgcggaaggtgccgatataccggccgagcagctgaatcgcgtcaaggccgccgccgacgtggcgcaggccagcgagttcgtggcgcgcatggacggcgggtattccgccgcgatcgcccaaggcggatcgaacgtgtccggcggccagaagcagcgcctgtcgattgcgcgcgcggtgtaccgtcacccggaaatcctgattttcgacgactcgttctccgcgctcgacttcaagaccgaccgcgaagtgcgcgacgcgctcgcccgcgaggccaaggattccaccaagctcatcgtggcccagcgcatcggcaccatcatgaacgccgaccgcatcgtcgtgctcgacgacggcaaggtcgtgggtcagggcacgcacaaggaactgctcgacaactgcgacgtataccgccagatcgccgaatcccagctcagccagtcggagcttacggcgtagggggggcggcagcggtagctccccatgtcaggggctgagccgtaaagggaacagcccagtgggctgttcccaggcgaagacgagctgataagcgagcgactaaaacagcacagctgactgaggggtagtcgcgtacggcttctctccctccggcgcttcgcgccacctccctcatcagagggaggtcaatacggacttttaaggagtaaaacaaatgccaagaggaccaatgggcggcaggcgtgccgtcgaaaagccccatgatttcggcaaagtcatgggcaaactcgtgaactactgccgcaactatcttcccgtcatcatcatcgcgctcatcctgggcgcggccggcaccgtctgccagatcgtcggcccggacaagctcaaggacatgaccaacgagatcgtcaaaggtctgcccgccatcgtcaacggcagaccggtgatgaactcggtagatttcggcacggtgggccacatcgcttggactttggtggccctgtacgtgggctacgccgtgctcggctacgtgcaaagctggatgatggccaacgtcacccagcgcaccgcccagcgactgcgcgagtccatctcggtcaaaatcaacaaactgccgctcaaatacttcgacaaggttagctacggcgacgtgctgtcgcgcatcaccaacgatgtggacgccatcggccagacgctgggccagtcgctcggctcgctgattacctcggtgacgctgttcgtgggcgcgctggtgatgatgttctacaacaacgtgatcatgaccctgtgcgccatcggtgccagcctcatcggcctgatcatcatgatggccatcatgaagtcctcccagaagtacttcgcccggcagcagatggcgctgggtgatgtcaacggccacgtggaggagatgtacgccggtcacctcatcgtcaaggcatacaacggcgaggccgattcgattcgtcgcttcgagaagtacaactcggacctctacgagtccggctggaagtcgcagttcctctccggcctgatgatgccgctcatgaatttcgtgggcaacttcggctacgtggtggtgtgcgtggtgggcgcggcgctcgcgctcgacgggcagatcgagttcggcgtgatcgtggcgttcatgatgtatgtccgcctgttcacccagccgttggcgcagttcgcccaggccttccagaacctgcagcgttgcgcggcggccgccgaacgcgtgttcggcttccttgaggagccggagatggaggacgaatccggcaagtccgctttgcttgggaccaacggccacgaagtgaagggcgacgtggaattcagccacgtacagttcggttacgaaccgggcaagccgatcatccacgacttctccgcctccgtcaaggccgggcagaaggtcgccatcgtcggcccgaccggtgccggcaagaccaccatggtcaacctgctcatgcgcttctatgagatttccggcggctcgattgcgattgacggcgtggacaccaagtccgtgccgcgctggaacgtgcacgaccagttctccatggtgctgcaggatacgtgggtgttccgcggcactgtgcgcgagaacatcgcctactccaagcccggcgtgaccaacaagcagatcgaggatgcgtgcaaggccgtgggcctcgaccacttcatccgctcgctgccggacggctatgacaccgtgctcgacgacaagtcgtcgctctcccagggccagaagcagctgctgaccatcgcccgtgcgatggtgcaggacgcgccgattctgattctcgacgaggccacctcctcggtcgatacccgcaccgaagagctgatccagaaggccatggacgcgctgaccgtggggcgtacgagctttgtgatcgcgcaccgcctctccacgattcgcgacgccgacatgattctcgtcatgaaccacggcgacgtgatcgagcgcggcacgcacgacgagctgctggcggcgggcggtttttacgccgacctctacaacagccagttcgcactcgctgactgacggattgtttcctgcgttagcggattagcagattagctatactcggctcccctctccgaggggagccgtcaacgtagctgactgaagggagcaacccatcggtccgcccgagggaatgctccactggatgtgatactgatgatttcgtacattagtgtgtgaaaaaaccgcccggaaaattgggggattgggcggcggcacgattggcgttgaggatggcgcattcgaaggggaaatgagcgcgtagctgggtggccgaggtggtgaacagagcagtggcgagtccgtcggccagtgcggtgctcaaagatgctgcgtgcggcatgacggccacccatgtggcggctacatcgtcaaccggcagaccgtcgatggcgttgagcagatggtggagctggtggccggcggcgtcggaccagtggcggcggctgggggagctcgcgcagaatgcgccccggttgagttcggccaatcccacggcgttggaggggtcggacgggtcctcaagggcgatggtgatcggcttgaccgtgcgtatgagcatgtcgccgccggcgtcgatgacgtattggcggtcatcgtgcgccgactggcgcgttcgcctccggtcgccgcgcagcatccccgcgagcaggtccagcagatatcctttgccgcacgcgccgaaatccagtgcgacgggacgccgggtgaccagtgtggcgccatgtcgctccacgtcgccgtcccaggtgggccggccgtggatggcgcccagacgcccgccgcgggcgtcgggctcgacggtgaacgaatagacggcgtcgtagccgagtcggatcagatcctcgcccacgcatgggtcgatggccccgtcggtgcccgagtacagggcgtcgtacaggtcgaacaggcccgatgcccagtcgggaaagtcgaagacgccgccgcgcgcggccgtgcgcatccggctcacggtcgaatcgtccctgaatcgggacagcgtccgctcatacgtgtcgatgaacgcgccgagccggtcgtgaagcccgtccgccagcggggcgtcggtgtgcagcagcaacccggtgcccagcgcttcggggaaagcagcgacgtgcggcagacggtcggtcagccgcacgtgcggtcggtcgtgcggcggtcggtcgtgcggtcgttgtgtcgggccagtcatgccaccatcgtagtgcgtgcggcgcgtcggcgcttgatccgggtgcctgcaccgaaacgttaccgtgccgacatgtgtgcgacacttcggcgtcaaattgcgtttgaccgcactccgtactatattgttgcgagttgctttgcggagcaaagtaacatccaaggggctgtagctcagttggtagagcgcttcgttcgcatcgaagaggtcgcggtttcgactaccgtcagctccacgagaccctctgcattcattccaccgcagagggtctttttatttgtcttcgttgaaattctgccatctcgcgtttcaaggggctgatttggggtttgccggaggtctacttgcgtttcgaggggctgatggtcaagtagatacgccgccaaaatggcggaatagcgttgcgtcaaagccgtttgtactggtgcttcaccggatgaggagccccttgaaacggaagtagacttccggaacatgtgaaatcagcccctgcaaagggagaatgcctcgattccgccatggattgtcgtggattgctctgtggtatgggcaatactgggagtatgacaagcgcagatgagttgaatgagcagtatgacgctgacggtagcgtgacgcaagtgcctgaacgcaatgatgaagttcatgccggcgaatccgccgccacccaatcccgcgaatcggccgtgaccatccccgccggcaccgtggtgctcgccgcaaccccgatcggcaacgtcggcgacgcctccgcccgtctggtggccctcttggagcgggccgatatcgtggccgccgaagacacgcgccgcctctacgatctcgcccgtcgcctcggcgtctatgtgaacggtcgcgtcatcgcctatcacgaccacaacgagcgcgacaaggccgacggcctgctcgaccaggtcgaaaccggcgccaccgtgctcgtcgtgtccgatgccggcatgcccaccatcaacgaccccggcttggccatcgtgcgccgtgccatcgaacgcggcctgcccgtcacctgcgcgcccggcccctccgctgtgctcgacgcgctcgccctctccggcctgcccaccgaccgcttctgctacgagggcttcctaccgcgaaagcattccgagcgcgtgcagtatctgcgcacgctgttgcccgaacgccgcaccatcgtgttctacgagacgcctcatcgcattgccgattcgatggacgatctgctggacgcgttcggcccgaatcgcccgatggccctgtgccgcgaactcaccaaggattatgagcagattcgtcgcggcccgattggcgagattcgccaaagtgtgattgatgatccgccccgtggcgagatggtgctggtcgtcggcggcgcgtccaacgaggaggccgaagcggccgcgcccagtacgttgagcgtggatgacatggccgtgctggccatcgaccgtgctttggaggacggcctgcgtatcaaggacgccatcgcgcaagtggtgcaggagcatccactggctgacggatcgttggccaatcgcaagcaggtgtatgcggctgtgctgaaaatcaagggatagcgcagcagccggcgattatctccccgttacgcttccatcgactcgaacaatatttccaacgcctgccggaccccgggcccaccacgctgcgagaccaattccagcaaaggcgcgtcggctttgggattggcaaccagccatttacgcagttcgggcacgtgatatgcgatgtgccagagcacggcaacatccgtatcgggcgaacatgccaccgcgggcgtaagtctgatgggtggttcaggcggcgcggtcatatccgagattgcgcgcgatgcggattcggatgagtgtgccgccgccgcgtggcgaggcaaccgttgcgcctgccgcaaatgccgtaaacggtgagcggcatggcggcctctgcgatggcctctggcaatgaatcccctcgtcatgcgcattgctccaaagccggttcgtcaatctccttctgcaccgattcaaaaaacatgcgtgcgcgtccggcatacttgtgatgccgatgctccttgacgatttgtagacagtcgtttggccgaaactggtacgcggacatcagctgacacaccagtgcgttgacggtggaaggatcggggatgtcttcaggactcatcaccaggtcgcaagccgtacgggctggcgtggtgacaggcagcccgccgagcttgatgatttgctccggcaacgtcaatcttttgaatacgcggatgcggcggctgacggatgccgagcggaagtgcgatgtggagatcacgtctatggtgctcggaaagtcggggcctcccagccatacccaagcggcggtcatcgaacacaccacagtgccaaacggggcgacctccgcgacgatttttgcgcgaccatacagtgtgcccgaatgctcgatccagtagccggcggaatcgtcgagcttacgtaacgcgccgaaggcggccagacggttaaggctgagcggtcccggcagatccttggtaaacagtatcggcggcaccgcgggctgcgcggttgccggcgaggtgactgttgtgatgtccgtcatcggacctgctgtgatatccatgaccgaacaatatgcagaagtacggcttgcgcgccaccggataagcgaaaacggtggataagtgcataacttcactaggtgcgcgaatgatgtggataactcggtggatatcgacaggcggaagtgtgtgcggatgtgcgtggacgtgcgtacggatgggtgcgtggacgtgtgtacggatgcacgtacggatacgtgtgcgaatgcgtatgcggataagcgcgcaagcggtgtacggataagtatgtgggggaagttacgggcggataggtgagtgggatgaggatggcggcgcggcagctatccgggcgtgtccccgccgcgccggataatcaagccttatgagtcatgttttggtgaatgttgcttggccgtatgcaaacggcccccgtcatatcggtcacgttgcaggatttggtgtgccctccgacgtctacgcgcgctacgagcgcatgaagggcaatgacgtgctcatggtgtccggcaccgacgagcacggcaccccgattctcgtcgaggcggagaaggaaggcctcactgcccaggaactggccaaccgttacaaccgcgtgatcgccaaggatctgtgcgacctcggcctgagctacgacctgttcacccgcaccaccaccggtaaccacgagcacgtggtgcaggagatgttcaagcagtgcttggagaacggctacatctacaagggcacccagcaggtggcgattagcccgtccaccggccgtaccctgcccgaccgctacatcgagggcgagtgcccgatttgccacgccgaaggtgcgcgtggcgaccagtgcgacgcctgcggcaacgagctcgacccggacgagctcatcaaccccgtctccaagattaacggcgaaaccccgcgcttcgagcagaccgagcactacttcctcgacctgccggcgctcgccgaagccaacaaggcatggctggagacccgcaagggctggcgcaccaacgtcatcaacttctcgctgggcctgttcaaggaggtcaagccgcgcgccatcacccgtgacatcgactggggtatcccggtgccggtgaagggctggatcgacaacccgaacaagaagctgtacgtgtggttcgacgccgtgatcggctacctgtcggcctccatcgaatgggcccgccgccagggcgacccggagaagtggcgtgaatggtggaacgatccgagctgcccggcctactacttcatgggcaaggacaacatcaccttccactcccagatctggccgtccgaaatgctcgcatacaacggcaagggctccaagggcggcgaaaccggcccgatgggtccgctcaacctgcctgagcaggtggtggccagcgagttcatgaccatggaaggcaagaagttcagttcctcccgcggcatcgtgatctacgtcaaggacatcctcgcccgctaccccgtggacgccgtgcgctactacatttccgtggccggccccgaatcctcggattctgacttcacctgggccgagttcgtgcgccacaacaacgaggagctcgcctcctcgtggggcaacctggtgaaccgcgtggccaacctcatcaacaagaacttcggcgagattccgccgctggacgaggattcgatgaccaacgaagaccgtggccttctggaagaggcttccgccgcgttcgacgtggtcggctcctccatcgaaacccaccaccagaagcacgccctgtccgaggcgatgcgtgtggtcggcgacatcaacaagtacatttccgccaccgaaccgtggaagattaaggacgaccaggctcgtctcggcaccgtgctgcacgtggccgcccaggccgtgtctgacgcgaaccacctgctcgcgccgttcctgccgcactccgcacagaaggtgtgggaggcgctcggcggcaccggcaccttctcgccgctgcctgagctcaaggaagtcgaggatctcgacaagcccggcttcacgtacccgatcatcaccggcgattacgagctcggtgtgaacgtgcacccgtggaagagcgaggcgatcgaggtcggcgccgtggtgcctaagcccgcaccgatcttcgccaagattccgaccgaggccgtggaagaggagctggctcgcttcgatgaagcgctggctgctcgccgtgccgccgaagccgagcgtctggccgccgagaaggccaagctcgccgccgagtgattcggcattgctagctcgtagctgacgggccacctcgcacatgaagtgttgcgaggtggcccgttgccgtatgtgcggtcaagccccgacaatgcgaggccggttgtcggcgggcgtcacaaattcgtcacactccgccaagacttttcccagacaagcacatcaattcgccaagcatggggcggttatatagaagatgtcaacggaatgaagttcataccggtggcgaggttcttcgaaccccataactgaacccttcttctctcttctctctcacccggcggccccctccgccgggtttcttttttttttaatgctgggaatgccatgggccgcatattgaaaaaaggattatggcagagtgctgtctgtttacaataaggcattgctgttctagaaaataacaaagaaggggggactgatgatgtataccgtcacattttcgggcaacctgactcaagcggaatcggccttggtcaagcgaggcgccatacagatcgccgcgttgctggccgcaaaaatcactggccgcggactcatcatcaacgacggtgacaccgaatactcatgggatttcatcctggtcgatgccagcagcgatgagcggcacacctttgacgagaggctattgcggatgctgtccgactacatccacgccggtttccccgatgccgtgatccgccacgccaagcacgaggctccaaagctcggcaaataatattggtcgcgtggtgagtcccatacttccgtcggaatatcgctatcgcgatatggtcgcatgcctgttgcgcattgaagcgttcgacctatgcgcagttgatgttccggtgatgacggcaaccgattgacgcgattaccgggacagatttcgctgtcccggttcgtgatttcggcttctttttgggaaccgggacagccccccttgtaaacgcccattatccgtaatcccaaaaccccggaattccgccgatgtacgatggcgaatattgcacggtggggtgataggtgaatgaaattttgtcttggttgctcaaaaaggggcgaaatggagaaccgggacagcgaaatctggcccggtccacacataaatcgattgacatcgctaccgggacatcggacacggacaccgagtcgcgcagcgtcggcgcaacatggatactgtacgactttcgcgataaacgttatattcttcgtcgcctccgccgggcgatctcatcgagtggcgttgccgtcaaagtgaaatcgaatacggcacctcgcaatgccaactgccgcccgacccggtaggcgagttcggcttgggatggctcatcggccatgttcgcggcagtggcgatgatgacgatccaatgatgatgtcgcagcagttcgcgcttgtcgttgtcccgccgccactggtttttgtcggtgcgatgatgatcgccgtcatattcgatggcgacgcgaaattcgggccaagcgagatcgagcgttatcggcgcgccgttgctgaatgtcgcgccgggcaccgtgtaatttgtcacggctggcggaagcccgtatttcgtcgtcgcgatgcgggtctttgattccattggagagtccacgcggggcgtaatgaatgcaagagcgatcatgcacttggattttgcgttgaatttcgggagttcggtgacttgccgcacgaagtcctgataaatgccgtcagcagtgcggccgctcgccagacccggcttgcgggcgattgccgtaaggattgcgtcgccaagtatgaccagcgattcgagcgatatatgagcggcgagttgtgcccaagtgtgtatcagatccagtgcgtacacatgtttgttgatacgcacattgtgcgcatcgctcagcggcttccagatgtgtggtgtcgttggcggcacgatggcacgtattcgtgtgcggtgtgagtcggagacggtatggagctcggcggggtcgatatcgcaatccttgggaagcggcacggattgcagtatcagcgatgtggccatgccgaagagcaccggttgcccgagctgttgcgcggcgtccgtgcatcgtttaagcatttcccgcttacgttgggtgagggtttcgctcattgctggcgacacagggcctgtaatcacagttggcgcggaactcgccatacgtggtgatgaacgtagctcaggattgatggtgcgcgcagacgcaacgcccggtgtgtggggccgggtccagccggacggttcgtcgtcgaatacgccgggcggtggagtgggcaatatgtcgttcatgacgccaccgtagcgcagcggtcacatgctcgctatgaaaaccggggtatgtggctctagcttgcgggagatgtggataactctgtggataactagttcggaacaattagcgaggccggaacctaccggcaattggccgatgatgacggcacttttgctcagctcagccgcgatagtctcgaataggtgcggccgggcgtactcgcataacgtaatgccccttctctctgaacagagagaaggggcattcgaatatatgctcccgccggcggaacgtcagcggcagcggcgggtgaggggctgccaggggtcgagctcgaccggttcggcggcgagcagggcgcgggtggcgtcgtcgaggtattccttgcggatgatgagctcggtgacgtagcggtcgaaccaggcgtcggacatgacgtagtagccgtccttgccggcgtccttgccccagctgttctccaccttccagcggttcggcttgccgtcctcgccgaggttcacgccggtgaaagtcatggcgtggttgctcgggctgtcgccgtattcgaggccgtgggccttgtcgccagtgaattcagtgccgaacagctggtcgacgcgcaccacggactggtcgaagaagccatccttgcgcagcgcgaactgcgtgcagtcgcaggcgaaccagatcgggtgaccggcggtgagctggtcaagcgcggccttcttgaacacgtccagcggcacgttgacgaactccatatcgcccgcctcggccacgttcgcgctgaagcggatgcggtagcgccggttgaacgggcggttcttgagtggggcgttggccagcgtcgcgaaatcgttgacgtccaccggcacgtacttcttgtagaactcaagcggggtgatgccgatctcgcgaatctgcgggcgctcgtccttaccggttttcggcttgtcggacttgttcttatcgcacttgcaggccttggcgtcggatttgccctcgcatttgcaggagtcgccgcacttgcaggattcggtcttgccgtctgcgtcgacctcggccttgcacttgcaggccttgccgtcgcacttcttatcgtcctcggcgtcatccttggtgcgcgcgaagaagtcgaacttctccggcggctcgccaagcgacacggcgcagatgcggtacacggtgcccatgtactcgtccttcagcgcgcgcagctcgtcctcgccagcgcccgcagccgaacggcggcgcagctcggctgcgaactcgcgcagcttggagttgaggtactgcttgaaatcatcggaattacgggagttctcggactccgggtaggcgctcttgggcaccagaccgtacttgttcaccagcgcggcgaacatctgccaccagccgccgtcatcggacgggccccagttgatggcctcgaacaggcgcgagtcggtgggctcgtcgagcgtgcgcagcacattctccaggtaggtgttcgacttctccatcgcgtcccagaagaacaggtaggtctcggagaactcgaaatcctcaagattccagcgatgcatgagttcgtaacgcagcgtgttcagggaggcgaacatccagcagcggccggaacgctcctgattggtgatcgaaccctgcttgagttcgatggagaagtcgcgcggcagcgcacgcacgccgcgatagtcggtggccgccttgagcacgccggccgaaaccgccgcgtccgccgcgatcaggttggcgcggtccttgttgaaatcctcggtgtacgtacgcagaagttcgggtttgatggcccgtgcgctggcgtctgtcgtcatgatgcccctgtctgatgctgatgatgctgatggataatccgttgccggcggcggggactgtcaccatccgggccggcggactgctgacacgaaagtataaggcatgtccagcaaaggctcaggaaatacaaaattaacaaacggatgtttgcccaatacacagtaagtgttttcgcagttttctgtacaggaaaaagtcggaaaagtcaatacccatattccatatattggactcaatttgtggttttgagcgggggggggtatcactttcccagttatctgggaggtggttgggtgttcaagtacatcatcaagcgcattgtgaactacgtgatcatgctgttcgtggcagtatcgatgacgtatttcctggccagcgcattcatggatccgcgttcgaactacatgtcgcgcaatccgcatccgccgatcgcgtcgattaaccggtcgctcgatctggccaacatcaacgaccagacgccggtcgtcatccgctatttccgctggctcaagggcatcctcacccagtggaactggggcctgagcccggaccagtcgccggtggcgccggccatcgcctcccgtatctccgcttcgctgcagctggtgacgctcgccaccgtgctctccatcctcttcggcgtgagcatcggcgtgtacacggccatccgccagtacaagtggcaggaccgcgtgctcaacaccaccgcaacgttcttcctggtggtcccggccgccgtcatgggcctgatggtggtgctgctggccatcaacttcaacaacatcgtgggcagccgcgcgttctacgtgaccggcctgcactcctaccaaggctccaacccggtgctttgggtgtttgactatctgcagcacctgatcctgcccaccatcgtgatgacgattccgggcatggtgggctaccatctcacccagcgtacgtatctgctcgacaccatgaacgccgactacgtacgcaccgcccgcgccaagggcctgacgctcaacgcggccattcgccgccacgcactgcgcacctcgctgatcccgactgccgtggacgtggccttctccatcgccggcgtgttcaccggcgcggtgatcaccgaaaacgtgttcgccatcaacggcctgggcatgtacttcacccagaccatcgccaacaacgacatcaacggtgccgtggccgtggccgcgttcggtggcgtgtgcacgctgtccggcgcgctgctggcggatatcttctccgcctggcttgacccgcgtatccgactgagctgagccccgcgcaaaggacgatctaacatgatgaacgacaacgaaaacatggtctccgacgccgccgcccaggatatggaactcaccgatccgcagggcagcgaaccgcagtccgccgacgccaggaacgcccaggaggcttccagcgccgacgacttccaccgcaccggccgcatgcagctgtacgtgcgccgcttcatgcgccgcccctcggccgtggtgggtctggtggtgctgattctgctgattcttttggcgattttcggctcgaaattctcccagtggagctacgatgagcccgatttcgccgccctcgcctcgccgccgtccgcccagcactggctgggcaccacggtcggtggctcggatatgtacgcgatgatcatccgcggcctcggccgttcgttgaccatcggtatcttcagctcgttcggcaccacgatcatcgccgccctggtgggcacggccgtggcgttcttcgaaggctggttcgagcgcgtgggcatgtggctgctggatatgctgctcgtcgtgccgtccttcctgctcatcgccctgatcgtcggcatggcggccggcggcagcgactggctgtggctggccatcggcctgaccgcattcggttggatcggctacgcccgtacgctgcgcacgctgaccctgagcctgcgcgatcgcgaatacatccgcgcggcgaagttcatgggtgtgccgtccttcaccatcatcgtgcgtcatctggtgccgaacctgggttcggtgctggtcatcaacaccgtgctcggcgtgatcggtgcggtcaacagcgaaacctcgctgagcttcctgggcctgggcatcaaggcgcccgacacctcgctcggtacgctgctcaacgccggccagtccgtggtgcagacctcgccatgggtgctgatcttcccgtccgtggtgctggtcgtcctgaccttctccgtgcagctgatcggcgacggactgcgtgacgccatcgacccgtactcccgttctggcggcaaggccgagtgagaggggagacgggcatcatgagcgacgaacgcaacgcaagcaacgtaacaaccaacaccaaccccaacaccacaggagcgcaaggcatggcatccgaaccggtgatttcagtacgcgacctcaccgtcagcttcgcctccgaagccggcaccgtgcacgcggtgcgcggcatgaacttcgacctgtaccccggcaagaccctcggcatcgtgggcgagtccggctccggcaagtccgtgacctccatggccatcatgggcctgctggacaagaacgccagcgtcaagggctccatcacctaccacggcgaggaattgctcagcaagtccgatcttgagatgagcgagatccgtggcaagggcatcgccatggtcttccaggacccgctctccgctctgaccccggtgttctccatcggcgaccagatcaaggaagcgctggtcacccacaatccgaagatgaccgaacagcagattcacgaccgctccatcgagctcatgaacctggtcggcatcccggacccggaggaccgcctgaagtccttcccgcacgagttctccggcggcatgcgccagcgcgtgatgatcgccatggccattgccaacgacccggacgtgatcatcgccgacgaaccgaccaccgcactggacgtgacgatccaggcccaggtgctcgaagtgctgcgcaaggcccagcgtgaaaccggcgcggccgtcatcttcatcacccacgatctgggcgtgatcgccggcgtggccgacgacatcgtcgtcatgtacgccggccgcccggtcgagaaggcggacgtcgactccatcttcgaccacccggccatgccgtacaccatgggcctgctgggtgccgtgccgcgttccgaccgcgaacgcaacagccgcctggtgccgattcctggctccccgatgaacctggtcaacatgcccaagggctgcccgttcgcgccgcgctgcccgctggccaccgacatatgccacaccaccgagccggccatggagccggtgcccggccgcccgggccagttcgtggcctgccaccgcacccaggagatcgtggacaagggcctgaccttccacgacgtgtacacggtggccgaggccgccaagtcgaagttcgccggcatcccgcgcgacgaacgcaagatggtgctcgacgtcaagcacatgcgcaagaccttcccgctgaccgccggcggattcctgcgccgtaagatcggcgaggtcaaggccgtggacgacgtgacgctggacgtgcgcgaaggcgagaccgtggcgctcgtgggcgagtccggctcgggcaagtccaccacgctcatggagatcatggagttcaagcagccgcaggacggcgagatcgagatgttcggcaccaagctcgaacacaagattccgcgcgagaagcgccgcgagctgcgttcggccgtgcagtatgtcttccaggacccgatgagttcgctcgacccgcgcctgccgatctacgacatcctggccgagccgatgaaggtccagcactactccaaagagcagatccgcgaacgcatcggtgaactcatgcgtctggtggagctgaaccccgaccaggtggaccgcttccccacgcagttctccggcggtcagcgccagcgcatcgccatcgcgcgtgcgctgtcggtcaacccgaagctcgtgctgctcgacgagccggtctccgcactggacgtgtccatccaggccggcgtgatcaacctgcttgaggacctgcagaacaagctgggcgtggcctacctgttcgtggcccataacctgtcggtggtgcgccatatctccagccgcgtggcggtgatgtacctgggccgcatcgtggaatccggcgacaccgaagacgtgttcgagcacccgttgcacccgtacacccaggcgctcatcagcgccgtgccggtgccggacccgaaggcggaacgcacccgccagcgcatcgtgctgcagggcgaggtgcccagccccaccgagacgttcgaaggctgcccgttcatgggccgctgcccgctcatgcccaagctgagcgccgaacaacaggcccgctgccgcggcgaacgcccggcgctgcggccgtatgacacttcccgaccgagcggccatcaggttgcatgccatttcgcatgacggtcggaaccatatagaggaggaaataacaatgaacaagacacgtaagctgaccgcgctcgccgcggccactgcggcgcttgccatgctgcttgccggctgcggcgcgggcaatggcaacggttccagcaacgcctcgagcgccaccgaaccgccggccggcatcgattcgtcgtacaccggcgacctgcccatgccgaaggtcaccgagcgttacgacaaccaccagagccgtgacaacgtcaaggacggcggcacgctgaccctgtccatcgtcgaaatcggcccgaactggaactacctgtcttccgacggcaacaccggctacatgtccgagctgtggagctggtaccagcccagcctgctcatgaccgaccaggtcaatggctccccgattaaggtgaacccggacttcctgaccgacatgaagctcgtgagcaaggacccgatggtcgtgcagtacgacatcaacccgaaggccaagtggaacgacggctccgacatcgactggaccgccttcaaggccacgtgggaagccaacaacggctccaacccggactacaacccgccgagcaccgacggcttcgaccgtatcgccagcgttgagcagggcgacagcccgaagcaggtcaaggtgacctacaagaccccgtactacccgtggcaggaagtcttcggcgctctggtgaacccgaaggccgccgacccgaagaccttcacccagggctgggtgaagaacccgcacaacgagtgggccgccggtccgtacaaggtcgactccttctccgactcccaggtcaccttcgtgccgaacgagaagtggtggggcaacaagccgaagctggacaagatcgtctacaagcagatggccgacaccgcctccctcaacgccttccagaacggcgagatcgacgccgtggaggccaacaccaaggacgacatcaaggccatccgttccgtcaaggacgcccagctgcgcatcggctacagcaccaagacccgcgtgctggagtacaacagcaagtccaagccgcttgacgacctgcaggtgcgtaaggccatcactcaggccttcgacgtgaacacctacaacaacgtgcagttccagggcctgaactggaaggccgagcagccgggctccgagctgctgctgccgttccagaagggctacgagaacaacctgcccgccgaggccaagtacaacgtggacaacgccaagaaaacccttgaggccgacggctacaagatgggcaaggacggctactacgccaagggcggcaagacccttgagatctccttcactttcttcggtgacaacgccacccagcaggccctcgccaacgcctaccaggcgatgatgaagaaggccggcatcaaggtcaaggtcgtgaacgtggccgagtccaagttctccgacaccgtgtcttccggcaactaccaggtgctgccgatggcttggcaggctccgagcgccatgaccttcgtggtgtccgccccgcagctgtacacctccgacggcccgtccaacttctcctacgtgggcagcaagaagatcgacgagctcgtcaagaaggctggcagcctctccgactatgacgagcagaccaaggctgtgaacgccgccgagaaggaagccctcaagctgtatggcactatcccggtctccaacccggcttcgtacctcggtgcgaagaagggcctggccaactacggcccgtccggcttcgccggcaacctgccgcaggacatcggctggcagaagtgatgacgtctgactgacgtctgacatggccgccgcgccgggaacggccggccgcacgcatcgactgcatggctttcgatgccggacgcggcctgcgacaggttcccggcggggtgtgaccgcggcagcatatgccttactctccttatttctgcatatgatgctgcggttgggaagcctcccgtttgcgcgcttatgcgtcgcgcgcgaacgggaggcttttgcatacttgccgcgattccaccccggcaacgatttgtccaccttgctgcccgcgcggctgaaaccgtatccaccttcctcttcccggatttgtgacgctgacggttgccgagcgtcacaaatccgggagatagtcgcccttacttgttgtcagaacttggtgagcccggatttgcggatatggtcctcccagccatccggcttaggcagtgtgaccagttccctcattgtcacggcagggatcgcggccgccacgatgcacaagcccaaagccacggacgtgactgagtaaccccagtgttgcatggcgatgccggacagaaatgtgatcaccggggcagcaatcgtctcaatcatgcccatgccggcgaatacgcggcccatatgctccttgttgatgagcaatgattggaatccgttgattaccgcattgccggccggtagggccagcagcgaaattgccagaaacgccatacgcgcaagaatccacggagccagcgctgcgccgagcgcgccgatgctcatcagcacgtagaacgatacggcgactatgccgccgcgcacatgctgaaccagcacggaagagatgagcgagccaacgatgacgcccacagacacagaaacgttcatgaaactggctgacaccacatgtgatgggtcggagccgatcgagagcaccgtaatcagcaggaacgagttgaagcacgcgaacgccagcgcgctcgacaaaatcaggcgacgttcgaatcgctcgctaagaagccagcggaatccggaaaacatctcacgccaatactgtgacgcggatgatgtcgtggtcgttgtctgctcgtcagcggcctgagtgatgttggccgcatcgccattctcatcggcctcatcgtcggcaagggcgcggccctccgtattggtccgcccgccacgatgccagtattttgtgatccgcatcgccgccgcggtttccaatagattcagcagcgcgctgactgcgaatggcagccatagaccgccgccgatcaatacgccacctactggtgcgccggcgagttcgagggcggcatcgcggccatcattgaggcttgacgccttgggcagcaattgatcgggaacgatgcctcgtagcatcgtgttgctcgtggttcctaggaggcctgagcgtatgccgaggcatatcgcaagtaccatcagcaccgggtatatgagtaatcccgcccatcctagggccgcgcatatgccgaacagtgcgaaaccaatcaggccgaacgcaatcataagttttttgcggtcgtacttatcttgtaccacgccacctggcagccgcaataccgacgatatcatggtcatgattgaatccagcagcgtcgcctgtgccggtgagcccgtgacggtctgcgcgatgagtggcattgcgaaaccttggatacttgatgacagcgacgtgcatgaatccgctacgaaccatttgccataatccgtgccgcgccatagcgactcggtggtgttgctatgtgaattgtgaccgttgggctgtgttgaagattggttgttgactgttccgatgtaatcagccattgtgatcatctccgtattcatcgatgcttgagatattctattatgttcgtcttcaagcgccgcaccggactcacccccggccaataccgcgacgcctttacaacaccgtgtgattagggaaggtcagggtactaaccctgggaaagtgcagtattctgcattattaaccctaggaaaaatgtaattttggacaatcgcaaccctaggaaaaatgtagaatacgcgaattgcaaccctaggaaaagtgtgtattgcggtatgatggagcgacaggacagtgatttgtgatgtacggtcctatgcgatagggagggcggcatggcggagttcaggcgagatatatataccaggttgtcggcatgggctgaagcgacggagcacaagccgatagtgctgtgcggcgcgagacaggtaggcaagactcatgtgcttaaggtgctgggtcgggacaagttcgagtcattttcttatgtcaacttgttcgatggcggtgcaaaggctgcgttgacaggtgtggattcggtgcacatgttgcttgattccatggaggcgtttaatggggttcgcgttcggcccggcaagacgctgctgtgcatcgacgagatacaggaaatccctgatttactgactctgttgaaagcgctccatgaggaaatgccggatctccatgtcgctgtagcgggctcctatctgggcatggctcagcacgaagacctgtcattcccggttggcagtgtcacctccatcgatatgtatccgatgacgtttgtggagttcttggaagcggtcggtgatggagtgatagccgaacgcatccggaaccagcgtattgagacacttgggggatttgcggaacgtttagagcgaagggttcgtcagtactgttttgttggcggcatgcccgaagtcgttgagacatttgtagaagatggctatcagcatgcgcgtgccgtgcagaaagaattgttatccaattacgacatggacttttccaaacatcccagaaccggtgtggatagtgagaaaatgcgtttggtgttttcctcgattccgtcccatctggcgcgtgagaatcataaatttatttttggccacatcgctcgtggcgctcgggcggcgcaatatgaatccgcgattcagcagattgtcgattctggtcttgcgttgcgggtgtatcgcgtcgaaaaacctgcggcaccattgccgtcataccgtgatgattccgcgttcaaactgtatctccatgatgttgggctgctggcagtggccctggatctgactcccgcaagcgtggtccttggtgatgacgggctgaccgaattccgtggtgcgttaacggaacagtatgtttgccagcaattagtggccgccggcatcacaccgatgtactggtcgaatgcgaacagtacgggagaagttgattttgtctttgcaggtaatggcgcaatcattccgttggaggccgaagctggtaccgagcgtcataagcgtagcttgaagtggctgtgcgacaaatacgggatttgcggttaccgtacgtcgatgcggaattacaaggagcaggattggctgaccaatgtcccactgtggatagtcgggagctacttccgcccgtggttggcgagtgattatgagccggatggcggagctgatttagggccgctaccgaatactgatgatgaaggatgactgaagccgcgagatatggttcggccggttgctgacttgggatatggtccgcgaccggccggcggtcgaatccgtcatgccgcggtgcgcaccaccgtcacgccgtacggctccagcatcagatccctgcccagtaccgtgccgtcaagcaccgactcgcatccggcgaacggcgtatcctgccacgccgtggccgtatccgcatggttgatcacgaacgtcaacgactccccgcgtgacgggtaccgccgcgtaaccacctccaccggctccggcgagacgatgccggtaacgccggcccggcgcaccacgtcgccgaccacggcgtccatgccggcctcgtccagcaccgcaccggcgaaatacgccgtgcccgcgccgaaatcgttcaccgtcaccgccggcgtaccccggtagaacacgtcgccggcgtaggccgccagcgggcgcgccccgccgtcgagcttgatcagcccggcaaccagcgagacccgggacccgtccgtgtccgcgtcctcgccctcgcccgaaccgaacacgacacgcacgtcgcggccgtccgggatcatgtccatctcctccatgcgcattccgcacacctcacggaacgcgcccgggtatccgccgaggattacgttgtcatgctcgtcgtgcatgcctgccatcaccgtcgccaggaacgtgccgccggcgcgcacgaacccctcgaccagctcacgaacgcccggcttggccatcatgagcgccggcgcgaccagcacgcgatagcccgccagccgcccggcgtcaatgtcttccggcaccacatccaccgcgatgttgcggtggtggaacggcgcataccagcgccgcacctgatccggatagtcgaagcccttcggcagcaacgagatgttctcggtcgaccaatacgaatcccagtcgaacatcagcgcgaccggcgcctcggtcagaccgcccacgaaccgcgcgccgtgcgccgccagctcgccgccgagcgcacgcacctcgccgtacacgcgctcgtcctcgcgcccgccgtgcgagatcaccgcgccatggtacttctcgaacccgccgcgcgactgcttgagctggaaatactgcacggtatccgcgccatgcgcgaccgcctgatagctttccgcacgcatccgcccgggcgcgcgcagtacgttgcactcctgccagttcgtctggttcggcgtcgactccatgagcatgaacggcctgccgtcgcccacgccgcgcatcagatcgtgcttgaacgcattgtcggaaggcgtggtgtgcgggaacggataatcgtcccagctgatcacgtccatctcgcgcccccaacggaaataatcggcaccctcgtaggtgtccatgaggttcgtggtgatcggatgcatcgcgtcgaacgcgcggatcgcgtcgcgctcggtgacgtaggtgcccagcagcgagtcggactggaaccgcttgtagtcgatgctgcaggcggacagagtggcgcgctcgccgtccagtccgtcgctgatcgcgttcggcggtaggatctgggcgaaatcggcgtaggtatggctccagaagttcgcgttccacgcgcggttcaacgcctcgatcgaaccgtacttgcgttcgagccagacgcggaaggcggcggcgcagttgtcgcagtagcagcggccgccgagctcgttggagatgtgccaggcgatcagatggtcgttggcgccgtagcgttcggcgagcttgccggccagcgcgccggccaggcgcaggaagttcggcgaattcgggcaggcgttgtgccgcacgccgaagcggtggcgacggccttcgtagtcggtgcgcgtggcgtcggggtagcgttgcgcgatccatgcgggtagcgcgccggtggacgtggccaggacgaaaccgaagtcgtgcgcgaccagcaggtcgacgatgcggtcgagcatggcgaagtcgtagcggctctcgtccggctggatcagcgcccaggagaacacgttgatggtggcctcgttgatgccggcgcgttcgagtttggcgatgtcgtccgcccaggtggattcgtcccactgctcggggttccagtcgccgccgaagacgaagcggccgcccggtgcggtgatggtcggtgcaggcgatgcgggtgatgcgggtgatgcgggttgggtgtgtgccatggtgtcggtcatgatgcgtactcctttgcgatgacgatgatgcggcctgcggccggtctcggcgttgtggccggcgtgcggcggactcgcgttggggtggttcggcgtcgcgccgtcgggagcggcggtccctgtgtgtggtgacgttgccccttcagcgttaaaccgatttaattcctggtggccattatgtacgtcgaggttgtcttcgtcaaatggatgattgaaggtgtcggcagctgctcggtgagatgccgaaaagcccataaatacctaaggaggacgccatggcggtgacgatgcgtgatgtcgcgaaggcggcgggtgtctctcctgcgtccgtgtcgtttgccctgcgcggcgatcccagaattaaacaagaaacggcacggcacatcatcgacgtggccaatcggatgaactattcggtcaacatcactgccaagagcctgcgttcggggcgaaccggcgtgatcgaggccgccgttttccagcttgaccggccgttctacgcgcagctgctcgccggcgtgtcgaatgcggcgttcgaccgcggcatccaggccgtggcgcagcagatctcgaccggcaaggtcggccatgagaaaagcatcctcgagaaggtcgccaacaagttctgcgacggcgtgatcctgagcgcgggcggcctgagcgacgccgagatcattgagctaagcaggggcaagccggtggtgctgctcgatgaccagtcgtaccaagggccgttcgactcggtgttcacgccgtgcgagaacggcgccgaggccgcggtgacgcacctgttcgagatagggtgcaagcgcgtcgggctggtcggtacggacttcataccggccgaccaggcgcgccggtcgatgcacgtgggcgaccgacgtctgatcggctgccatcgcgcgttcgagcggcatgagcgcacgctgaccaaggccgacacgatccagctgttcgactgggacaccgacgacgcgtaccgcgcggtttcgcggcgcatcgaggagggggacttcccgttcgacgggctgttctgcatgaccgacgcgatcgctttcggcacgttgcgcgcgttgcgcgagcatggcatcggcgtgccggacgacgtggcggtgatcggcttcgacggcgtgcgcgagggatcgtacagcgcgccgacgctgagcacgatcgcggtggacatcgacaagcttgcccgcgaggccgtcgacatcctgtgcgagcgcatcgaggaggggtgttacggcgcgccggccatgcccaagcatgtcacggtgggttatgaggtgctggtgcgcgagtcgtccaaccgcacgcgctgaccggtcgtccggtggttgttcgcggtggatcgccgatcggtgggacaactcgcggcgtttttttgtttaattatttttcgttgtccggtgcgattccgcgcgttccacagcccttgtgtttaaaaggttttgcaacgagttgacgccgtttgaacggagtgctataaatacaactacaagattaaatcggtttaaaaccgggctcttgcacggaagacaatgtggtttctttcggcatacaacatggcgtatgccaccaacacaaaggagagttgcaatgtcaatgaagatctggggcaaacgaatgctcgctctggcctgcgcgggagcgatgctggtcccgctggccgcctgcggctcggacgccgacgccggcaagatccggctcagctacctgagctgggacaacgagcagacgtccaagccgtacatcgacgagttcgagaaggaaaacccggacatcaagatcgatttcagctacgcgccgccgaccagcgagtacatctccacgctgcagacccgcctcgtcggcaaccaggccccggacgtgttcatcatcacctccgagaatcgcgacgacctcatcgacaacggctacgccaaggacctgaccgacgagtcgttcatgaagaacatctcccaggccaacaaggacttcgtcggccgcgacggcaagacctacggcatgtcgatcacctcgtgggtctccggcatcgcctacaataaggatctgctcaagcaggtcggctacgacgagccgccggcgaactgggacgacttcctcaagctgtgcaagaagctcaagaacgccggcatcgagccgttcctcgagccgaacgccgacgagccgagccgcttcatcgacgccttccagggatccatcctcgagaagaagggcgtcgacccgaccacgctgtccacgcaggaaaaccagacgccgggcaccgacgagctcgaggccgtcaaggaatacatccgcctgtacgatgagggtggcgtgacccgtgacacggtcggcatcagcggcgacgacatgaagacgcagttcaccaacggacaggtcgcgatgatcgtcgacggcgcgtgggactttgccaccttcgaacaggccggcatgaactgggacttcgccccgatgcccaagctcggcgacgactacacgcagtacgcgcagggctccgcctccccggcgtgggcgatctacgcgaagctcgacggcgacaagctcaaggccgccgagaagttcctcaccttcctgtcaagcaagtgggcgctgcagaagcataacgacgccggcgacgctgtcactgtcgacgggttcgacgctacggtgatgacgcagtaccagaaggtctacaatcaggacatcaagaccggcaagtactacctgcacaccaacttctattcgaagccggacattctcaagagcgaactcaaggcgcagaaccagcagctggtgcaggggcagatcacgcccgaccagtacgccaagaacatcgacgccaaggtcgcggccgcgcagtgacccgcaacggatcgcacataatcacacatagataactacaatctccggttcgtcatgaaccgtgcgcatggtaatggggcggcctgtcggctgcggctggtcgcccttcgcatgcccgcaatcggatttcggtcataagccaatgtcaaaggaggatggcatatgagcgcaacaatgcaaggctcggcggtcggcaacctgccgccgttggacgaagacctgtatcgtcggcgtcgtcgtgcgcgtggcctgcatgaggacgtgacgtcgttctggttcctgctgccgatcctggcggtgttcgtggttctgttcctggtgccgttggcacagaccgcgtacttctcgttcaccgacttcaacggttacagcatggacatgaactgggtcggtctggacaattacaagaaggtgtttacggatccgtccaccctgcagggcctgggcttcacgatcctgtacgcgatcgtggtgatggtcggggtgaccgtgatcgccattccgctggcggtcatcctcaaccgcaagttcgtcggccgtgatttcgtgcgctctgtgttcttcttcttctcggtgccgtcgctggccatcatgggcatggtgtggaagtacatcttctccccgatgaagaccggcgtggtcaacagcgtgctcgcggcgttcggtttgggaccggtgccgtggctgtcgaacaactctctggcgaagttctgcgtgatcttcatcgcgatctgggcgcagatcggctggcatgcgaccctttacttggcgttcctgcaggcgatccccgcggacctgtacgagcaggcgaccgtggacggtgcgaacaagtggcagcagttcgcgcatatcaccctgccgcagctgatgccgggcatcgtgacctcgacgttcctgctcatgtcgggcggcctgaaggtgtacgacctgccgttcacgatgaccaagggcggcccgggctattcgacgtacacggtcacgcagtcgatcatccagcagggcatcggccagtcgcagtacggcatcggttccgcgctggcggtcctgttcttcatcgccacgggcgtcgtggtgttccttcagatgggcatttccaacctgatctcgaggaggttcgagtaaatcatgggcaacaaggcttcttccgtcacggccgcgccgaagggcatgaacttcacgacgcgcaagaggatcggttcggcggtcaccagcgtggtgatgatcctgatcgcgctggtatgcgcggttccactgtggtacatcctgatcaacacgttcaagacgattccggacatgtccgccaacccgctcggcctgccgaaggaatggacgatcaagaactacatcaacgcgttcgagacggtcccggtgttccgctccctgctgaacacgttgatcgtcacgttcttcgcggtcgtgatccaggtgctcgtcggcgccctggccgcatacggcatgattctgcgcaagtccacgttcaccgccgcggtcggcgcgatcctgatggtcgcgttcgtcgtgccggcgcagacgacgctgatccccctgtaccgcatggaggcgaacgcacacctggtcaacaccttggccggactggtgattatctacctgggcggagcggtgttctgctacttcctgatcgtcgggtacatgcgcagcctgccgttcgaactgatcgaggcggcacgcatcgacggcgccggcccgctgcgcatcttctggtcgatcgtgatgccgctgatccgcccgatcctgacgaccgtggtcgtgttccagacgatgggcacgtggaacgacttcatgaacgcgaatgtgttcctctccagctcggaactgcgcacaatcgtgctgcaggtgtacaacgcggtgggccagttctcgaccgattggccgagcttcatgaccatcaccgtgctcgccctgctgcccgtgttcgtgttcttcatcttctgccagaagtggatcgtctccggcctcgtcgccggttcggtcaagggctgatcggctgatcgactagtcggctggctgatcacggtattaattccggctccccactacgctcatatcatctccttccgcggcgtgtggggagccatgttcttcaccagataggaatttcccatgggtactgttggcactgtgctacaaacatcgccaaaaccgagagccgtgcctcgtgacggccttcctcatcgcgtgaataacgcggtactgaccactaatccgctgcgcaggtattgcgccgacccgaatcttgccattttcgatggccgatatttcctgtactgcaccgatgacggtgtggataattgggacaccaccgcgttcagtgtgtatgtgtctgacgacttggccacatgggagcgatatccggcgctcgacttgcgcgatgtgccgtggtgggatggctcggatggtgcttgggcgccttccgtggtacagcgcgcggacggcaaatacgtgttctacttcgtggccggttcccagatcggcgccgctgtgggcgaatccccgtgcgggccgttcgtgcctgagcccgaaccaatcgtgcgcgaaggtacgttcgattgccacaccattgaccccggcgtatacgtggaggatgatggcacccggtacttcctgtggggcaacggcatagcttgggccgcgccgctcaatgaggactgtctgtcgttcgacgaatcgcgcgctttcagctgggtgccgggcgatttccgtgaagccatctggattcacaagcgcaacggcatctactacgccagctggtcggagaacgacgcccgagagccggaatactgcgtcaagtacgcgatggccgaatcgctgcatgggccctggagcgaaccgcgcgtgctgattgaacaagacccggcgcgcaagctgtatgccaccggtcaccataacatcgtgaatattcccggcaccgacgaatggattatcgcgtatcaccggttcgcctacaatccggccggtcgctgggctggaggcgatggctgtcatcgcgaagtggtattcgcgccgcttgactacaatcctgacggctcgctggttcccgtccgcccgcaagttggttcctacgtgcgttcgctgacgttctgacctgtaggctgtctgtctctgtctgttcgttgtcttcgccttgcttgcgtttttgtacgttttatctgtttcgtgagttttgtgcgttctgcggatttcacgcgtttcgcgcagtgccgtacgctgatcaccattcagcgtgcggcacttttgcatatctcacgtgttgcgggagatgccgattccgtcgcacaatacgtaaaacgtgaatgaaccgctcactattcttatgttttttgtgactcagagtgtgttttgcatatgtaaaaacgtgaatgctaagatgatatcggtatgtgattgtgtgatgacctgcgtgttttcagtcattctccacaaaagaggaggggaatatgctcaagcgccatgcatatgaccagttgctggattggaagaaccgtaaaaccaagtagggcttgctggtcacgggtgcccggcaggtgggcaagaccacgctgattgggcagttcggtgcagaccattatgagcatgtggctgaggtgaatttcatcgaaatgcctcaggcggtcgaaacggtaagcaaggccaaggacaccgaagacctgatactgcggttatcggtactttccggcgcggaaattacgccgggcaagactctgctgtttcttgacgagatacaagcgtgtgaggacatgcctacgtgttccatgatggcaacgcggagactgttggacgagccgaatacctgcccatatacatgctgggttgtttgagcgtgatgtaacgcgcaccactttcccgggaatgtcgcggattgggtctgttgcccgtcctagaggttcggtccattgacccagccctgttacttcacccttaccgtccgcaatggagtgaaccgactaatccatatccgcaaaatcgacaagcgtcactgtaccgtcttgcgccgcgcgggcggcgacatgctcgtcgaagcctgatttggagaacagcatgtaatggctggtttcggggtgcagcagtctggcgcgattgcgcagcacttccaactgctgcagaccggatggcacgctgcgccatttgcattcgcagaataggagagttttcggtttttctcctgaagccacgatgtcaatttcctcctgactgcgggtggtcggattggcgccccaccaacgtccggcatcaagcatgaggaaaggcaatgcctcggtaccgttatgggaccatatccactgaacacagatgtcttcgaacacctgccccataaagtcggagatagtgcgcataacacggtcggcggcgagatcggcatgaccggattgaatgagggacatgttgttcggcacatatcggtaccagaatcggaagaacgagtcctcgatacggtagatcgtcttgcgaggagcgtcctcgccgaaaggtgtctccttgcgaacgattcccagatcgatgagattgcgcaaataggtggcgcatgaggacgattccatatggcatgcggtggcgatggtgttcgaccgagatgccccggaggcaatggcctggattacggcgttgtactcggccggactgcgcagctcctgcttcagcaagttgtctggctcctcaaacagatagcagcttgggtcgaggatgttccaacggatgttgtctcggatgctgatgccgtcgtccagttgccgaagatactgcgggataccgtcggtaagtccgtaagcaatggcggcgtcctcgttgctgtatcttggcaagaacttgcggacatcggcgtagccgaatggctccactttgatttgagcggtgcgtctgccgtacagggggctctcatacccaagcacctggcgctccatgaacgacatggaagagccgcataacaccatcatgagctgactgtcatccttatggcggtcgatggcatgctgcaggaccgaattgatggtccggtctgctttagccagatatgggtactcgtcgatgacgaaggcgatgcgttgctttgcggccagcgcgaacaccgcttccagtgcggattcaaagctgcggtatacgggcgttgtctcgaacgcctctgagcccttttcatacagagcaatgctgcggcttaacgattcgagattcttgggagcgctggattcgattgccgaaaagaaaatcgtggggcgatcttcgaggaagcggttgatgagtgtggtcttgcccacgcggcgacggccgtagaccacgacgcactcgaactgctgtgagctccagcggcgttccagtgccgaaagctccttatctcgcccgacgaacatggcccttgtctccttgttttgctgtctgccctggcgcacacgcgcaaattatagaatcgtaatttacttaattatgattctataatttggtcgactggtatgcaacaggtctcgagcgtgcattgccgcatgcgcaacgtttcgcgcgacacattccagggactgcttcgcgaattgggcctgtttgggggcgcagcgacacattccggggaatgcgtcgcgaattgggtcgtgccgcgttgctaatgcggggaacacgcagagttgcaggctgttgcgattggacgcaggccgtctagactaatacgcgtttgcgaaagtcgaacgtgcttcgaccggtgaaggagagctccggtcgtgcggccaatgacaggcgcagtgcgaagcacggctgatcgtgaatcgcggcggcagcgattgccgcgtgcggcgcaggagcatgccgcaccataccacaagcaaacaatccccaagaaacggtgatctcctcacatgtacgtcgatccgggaatcgataccagcgcaagcaatctcaaatgggtgctgccatactgcaaaccagacctgccccgcgtggtaggcgcgctcctactgttcatcgccaacaacacgatggccctgaccattccgattctgtccggtatcatcgtggaccgcgtcatcgtcggcggacatgccgacgaactgccacgtctgtgtggactgatgatcctcatgaccatcatccgcgtgggcgcgcgatacggctaccagatgtggatggagcgtttcggccagaactcggtctaccgcctcgtctccgacgaatacgagaagctgcacgagctcgacttcacgtacttcaaccacacacgcaccggcgacatcatgagccgcctgacctccgacaccgacgcgatccgccactgcctgagttgggtgagctatcagatcgccgactgcgtggtcatgttcgtgggcgccctgtgcgtgatgttcgccatcgattggcgactcgcgctcgtcctggcctgcgtcacgccgttcatttttgtgctcacgcgcggcctgtccacgcacgctcacccgctgttcttctccatccgcaactcgctggcctccctcaactccatggtcgaagagaacatcgagggcaaccgtgtggtcaaggcattcgtgcgcgaaccgtacgagaccgaaaagttcgacgagcacaacgacgattacatgcagcgcaacatggccctggcctacaactcgcgcaagtacatgccttggctggacggcctcggcttctcgctgcagctcatcacgctcggcctcggcggctttctggtcatcaagggctacatgaccctcggcaatctggtgagtttcaactccttcctgtggatgatcgacggcccggtgcgccagtccggctggctcatcaacgactggcagcgattcaacgccagctgcatcaagattcgtaagctgctcaccgaacagccgcgcatcgtggagaagcccgacgcggccgaagccgtcaagcaggcggtcacgatcgtcgagcaggtcaagcgcgatgatgaggctaccggagcgcccggggcttccggaacatccggtgcccagcagtccgccgaacgcaagtcctgcccgctgcacatcaagggcgacatccgcttcgaccacgtcagcttcgccttcccggacgacccggagaccccgatcctcaaggacctcgacttcaccgtgcccgccggctccaagctcggcatcctcggcgaaaccggcgcgggcaagtccacgctcgtcagccttatctcccgcttctacgacccgaccgtgggccatgtgctcatcgacggcatcgacgcacgcgactggccgctgaccaccttgcgctcgcaggtgtgcatcgtggcgcaggatacgttcctgttctccgacaccatcggcggcaacatcggttttggtgccagcgatgatagcgacgaccgatatatccagaaaatggcccagatcgccggcgcggacaatttcatcaggtcgatgccgcagggttatgacaccgtcgtgggcgaacgcggcgtgggcctgtccggcgggcagaagcagcgcctgtcgctggcccgcgcgctcgcggacaatccgtcgatcctgattatggacgatacgacctcggccgtcgatatggagaccgaggcggagatccagaagcacctcaaggagatggacggcggcaagaccatcgtcgccatcgcccaccgcatctcgtcggtcaaggattccgacctgattctggtgctcgagcacggacgtatcgtcgaacgcggcacccacgccgaacttgtggccgcacacggccgctactgggacatctaccacaagcagctcggactccagtccggcgccgcacaggggttttagaagaggacttatggcacaacgcaatacattccgcgaggatgaggagctggaggagtccatcaacctccacgacatcgctcgcgtcggcaaatatctcaaaccgtatatggcacaggtggcgcgcattctcgtcgtcgtcatctcgatgagctgcatcgtcgtcgccgtgccgtacctgaccaagatcatgatcgacgaggcgatcccgaacaaggacctcggcaagctcggcatcctcgccgtaatcctcgccgcgctgatcgtgctgtacgagttcgggctgcgctaccgcacggtggcgatcacgcgcgtcggccagctcatgctcaaggacatgcgccgcgatatcttcacgcatatccagacgctgcccttcagctacttcgattcgcgcccgcacggcaagatcctgatccgcgtggtcaactatgtgaacacgctttcggacacgctgagctccggtctgatcaacgtgatctccgacgtgttcaccttcgtgatcactctgatcgtgatgttcgtgatcgactggcagctggccctgtggagcttgatcctgttcccggtgctcatcatctgggtgcgcgtgctgcagatcttccagcggcgcgccttccagaagctctccaacaagcagagcaacctgaacgcctacatccacgagtcgatcgccggcgtgaagaccacgcagaccttcgcgcaggagcaggcccagttcaggaccttccaggagcagcagggcgaggtgcgttccgcgtggatgcacgccgtgcacatccagttcctcatgtggccgggcgtgcagaccatctccgtgatgaccatctcgttcatctacttcgtcggcgtgatgggcttcgggggcgtgaacgtgaccaccggcgtgctcatcgcgtttgtcggctacgcgaacaacttctggaatccggtgatcaacatcggcaacttctacaaccagctcatcacctgctcggcgtacctcgagcgcatcttcgagacgctcgacgtcacgccggagatccgcaacaagcccgacgcggcggacctgccgcagattcgcgggcgcgtcgacttcaacgacgtggtgttccgctacgagaaggacggccgtaacatcctcaacctcgtggacttccacgtcgaaccggggcgcacgatcgcgctggtcggcccgacgggcgccggcaagacgacgatcatcaacctgctgtcgcgcttctacgacgtgtccgagggctcggtgacgatcgacggccacgacgtgcgcgacgtgacgctcgcatcgctgcgccggcagatgggcgtgatgctacaggacaccttcatcttctccggcaacgtgcgcgagaacatccgctacggcaagctcgacgccaccgacgaggaaatcgaggcggcggcgaaggccgtgcacgcgcacgagttcatcatggaactgcccgacgggtacgacacggtggtggaggagcgcggatcgaccctgtcggccggccagcgccagctcatcgccttcgcgcgcgtgctgctcgccgacccgcgtatcctaatcctggacgaggcgacgagcaacatcgacacgcgcaccgaggaggcgatgcaggccggcctgcagcatctgctcaagggacgcacgagcttcatcatcgcgcaccgcctgtcgacgatcgagaacgcggacgagatcttctacatcgatcacggccagatcgtcgagcacggctcgcacgcgcagctgctcgccgccaagggcgcgtactaccgcctctacgagtcccagtacgcgatgattcgcgtggccagcggagcgccggaagagtgacgagatgttgcgcacaaggatgcgtttagcggcgtttcacatagcgggtgctgcgaccagcaccgattttgatgatcgtaccggagtccaacagtgatttcagcgtgcgctcaatggtggtggtgctggtatcgggcatgcgagcgagaatatcggccttggagagtggaactagggattgatcaagcagtgcttcaatccgcgttcccttggtggctactcgcggtgctccctgcgttctgccgcctgccgtgagattgatgcgttcgtcgaattccttgcacgcggacagtatgatgccaagcaggtagttcgtgaatggcgcataatcattggcgttgtcgtcccatccttgggtgcttgcggccag

SEQ ID NO: 1537 - DNA, 6607 bp, Unknown
  R221_24m  MAG No. k141_1424
ccgccatcttccacttcaagtggtcgaatcgcggaatcagccggcggatatcatgtgccgcgtcgttaccagtcaagccgggaaattcgttgcagacggtcagtcgaccagcgaattgatctggatgacatggtcgcgctgcggaccggtgccgatcgcggagatacggcagccgctcagctcttccaaacgcttgacgtaggcctggcaggtggcgggcagctcgtcgaaggagtggcagtcggagatgtcttcatcccagccgggcatggtctcgtaaatcggcttggcggcggcgaaggcggcctgatcggtcggcatgtcgtcgtgacgttcgccgtccacgtcgtaggccacgcagatcggaatctccttcaggccggtgagcacgtcgagcttggtgagcacgatgtcggtcaggccattgacctgggaggcgtaacggttgacgaccgcatcgaaccagccgcaacgacgcggacgaccggtggtcacgccaaattcgtgaccctgctgacgcagccattcgccggactcgtccagcagttcggtggggaatgggccttcgcccacgcgggtgacgtaggccttggagacgccgattacgcgggtgatcttggtggggcccacgccggtgccggtgcaggcgccgccggcggtcgggttggaagaggtgacgaacgggtaggtgccgtggtccacgtcaagcatagtggcctgagcgccttcaaacagcacggtcttgccttcgtcaagcgccttgttgagaatcaggccggtgttggccacgtacggcttgaggcgttcgccgagcttcagcagctcctcggtggtctggtccacgtcgatcggacgacggttgtagagcttgaccagcatctggttcttctggtgcaggctggcctccaccttgtcgtgcagatggtcggcgttgaacaggtcatgcacgcggatgccgacacggttgatcttgtccgcgtaggctgggccgatgccacggccggtggtgccgatcttgtgcttgccaaggaagcgttcagtcaccttgtcgagtgtacggtggtagggcgcgatgatgtgtgcggcctcgctcaccttgaggtgggagcaatcgatgccgcgggattccaagccgtcgatctcctcgaagagcacttccgggtccacgaccacgccgttgccgatcaccggggtcaggttcgggttgatgatgccggagggcagcagatgcagggcgtacgactcatcgccgaccaccacgctatggcccgcgttgttgccgccgttgaagcgcgcgacgtaatcgaccttggtgccgatcagatcggtagccttgcctttaccctcgtcgccccactgagcaccgataagaacaattccaggcatgatgcacctccgcattcgcacgattccgccggaaacagactaccttacaccctctactcggggcgcggccatctcacgcaatcgggcttctggtgtctttgccgcgcgttgcgcgaggcgggccgacaccaaggcgccgccacggcgaatgacagtttatttgggtgttatctgagtgctttgccggccgagccgagttgcttgcatgcctcagccacgcgggcggacatggattcctcggccttgcggccccaggaacgcggatcgtagaacttcttttcgcccacttcaccgtcgatcttgaggaccttgtcatagttctcgaacacatggtcggcaatcgggcgcgtgaacgagtattgcgtgtcggtgtcgatgttcatcttgatcacgccatggctcacggcttctgcaatctcttccggacgggagcccgaaccgccgtggaacaccaattcgaacggcttgccgttgggaaagtcgactatgccggcggcgctgggcagctcaccctcgaccaccgcgcgcgccacacgggactgaatatcaccgagcagggcgggacgcagcttgaccacgccgggcttgtaggagccgtgcacattaccgaacgtgaaggcggccatgtatcggccacgctcgcccaaaccaaggcgacgggccacttcaaggccatcggccggcgtggaatagaggcgttcgtcgattttggcggaatagccgtcttcctcgccgccgaccgcgccgatctcgatctccagcaccgtgtgcgcggcctgcgacttatcgagcagctcctcggcgatgtccagattttccttgagcggcacggtggagccgtcccacatatgcgactggaatgtgggctcctgaccatgcgccacctgatcggcctcatgtgcgagcagcggttgcacccattcgtccagatactgcttggcgcagtgatcggtgtgcagggcgatggtgatgttcgggtacttcgcggcgacctcgtgtgcaaaagcggccaaggccagcgatccggtgacacggtcgttgacgccgatgccggaaaggtatgcggctgcgccgacggacacctggatgatgccgtcggattcggcatccgcgaaccccttcagcgcggcgttcagcgtctgcgagctggtcacgttgatggcagggtaagcgtagccgccgcgtcgtgcggcgtctagcatttcggcataacgttccggtgttgcgattgtcatggcttcattatcgctcggggtgtgcccgccagactaggttctggagccaggcgagctgtgaactatctcacgaggaacaccatgatgataatcatggcgaagccgaccaaatcggtcggggtaaagaccgcgccggcgaataggacaccggtgatagtggcggttacgggttcactggtgccgagcatggtggcgcgcattgcaccgcagcgctgggtgccgccgaggaatagccaataggcaccgaatgtgccgaacaccacggtgaataccatcagaccaatgccgaaccagtccaacgcgggggcggtggtccacgggcgcacgagcggcagcagcattaggccggaaacgatgaacatgacgccgctggccatgaagttgccccatttggccattaatgcgatgggcagaatcgcaagcagtgacgtgcatacggcatcggtcaggccccacagcagaccgggcagcggcagactgagctggctgagatcgccgcctgtggcgatgagcaccgtgcccacaaaagcgagtaccacaccgatgctttcgcgtttgccgggcagccgtttgcccataatacatacgaatacgagtacaaccagcagattgagcgtctgcagcactgtggccgtgccggaattggtccagtcaatggccttcaagtaggagacctgcaccatgagcacgcagaagaacgcgcacagcaggagtctcgggtaggaacggtagtccttaagcgagttgatgaacttgtcaggcgtgaagattcctgcgcaaaccagaaagatgacaccggccaatagctcgcgcacgcaggcgatccacagcggatcggcgtgatagtcgttcatcaggagtttggagacggtggcgttgacgccccagaagacgcctccggcgagcgccagtccggcaccgacgaagatgtcgtgcggggtgcgttcgagggttggcgttggttggccattggttgcagcggtcttgggttcacacatcgcccatcacgatacgcggacgacgtgaattgttctcatatagcggtcatacggcaggaaaataagctctcaaaagagggaaaaccgttgaaatttcaaggaaaatcgatggagcggacgacgggagtcgaacccgcctctaaagcttgggaagctttcattctaccgatgaactacgtccgcatgtgcgcttccacgcacgagaggcaagtgtatcacctatgcggcaccttgcgccatgtgccggtttgagttctgtgctggactagtgaattgcgcgcgtggaatacgtggatgcggccaccggagtgccgttcatttcattggccatttgcatcaggcgtgcgatgcgctgatcagtcggcggatgcgtggagaacagtttggagaaaccgaccgcggagaacggattggcaatcatcatcgcggagacggactgggtgccggccgttttgcgcatgggcgtggtctgggcaccataggagatcttgttgagcgcggaggccagggcctcggggtcgccggtcagcagactgccgtcttcgtcggcgtcgtattcgcgagtacgggagatggccatctgaatcagtgatgcggcaatcggcgcgagaatcacgctgaggagcacgccgatcaagccgagaccgcctgaattatcgcggtcgtcgcgcgagttgccgccgccgaaatacatcagagaataaccgaggtacgtgatgacggtggccatggcagaggcgatggcggaggtcagaatgtcgcggttgtacacgtgcatcagttcatgacccagcacgccgcgcaactcgcgggcgttcagaatctgcaggatgccctgcgtgcagcatacggcagcgtgacgttcgttgcggccggtggcgaaggcgttcggactcatggtgggcgcgatgtagatgcgaggcatcggcttgccggccttggcactcagctcgcgcacgatctggtagatttcgggggcttcctgctcgctgacctccctggctcccatggatgcgatggcgagtttgtcggagaaccagtatgagccgaacgtggtggccaacccgataatgacgtagatgcccagcgtctgctgcctgccgcccgtggcccaccatatcagcatgatgatggcccacatcaaggcgaacagcagcgtagtcttcaggccgttgaaatggccgtgcacccgtactttggcatccatgaggctcacactaaaatcactgcctgaatattggctggatgtgcgccgaggggtgaatcggatgggggttggcggtgcttacggtgcggttggcggggatcggaatagcctgtttacatgagattgacgatgcttgacagtgcggttgcttggcctgttttaccgctttaccgctttaccgattggtctgatcgggacgctttgcttgtttggcctgctttggctgcttggatcgtttggcccatcggcctgctcgactggcatgacactggcttttatataaataagaacgctggcgtataaccggcgttcttatttatcgatgtatcaatcgcgccgattgctgctggtgcagttgccggtgcgatgagctgatagtcaatcaggccagagcgagctcacgcatctggtcgggctcgatgaccttcttgtgctcgcggccctccttggcgccttcggcgcgctcgaaggcgtcgaccttcttccagccagcgaagtcaatcggcttgacgccgcggctttccagcagtcggtcgatggattcggggtcgcgatcctcggccacgcgaccaccttcggcggccttggccagatcctcaagcatgttggtcacgatggcaagtgcgtcggacttggtggagccgatcaggcccaccgggccgcgcttggcccagccagtggcgtacaggcggtcgcgcacttcgccgccgtcggcctcggtggtgatgcggccgtcgccgttggcgttggccaggtgggcgccgtgctcgtcgtaggtgatgccgggggcttcggcgggcttgtagccgatggcgtggtagacggcctcgaccgggtagtcggcgaactcaccggtgcggcgcatcttgccgtcggcactggtttcggtgcgttccacgcggatggccttgaccttgccgtcctcgccgaggatctcggtaggggcggagttgaagtgcacgtagtacttgcggtcggccgggttgccttcgaagtcgacgtcgccgtcatcttccatgtcctcggccatctcgcggatggcgaacagttcctcgaccatctggcgggtgagcttgtccttgccggccacctcgatggtctcgtcgtccaaatcgaagtcgtcctcgttgatgatgagctgcacgccgggcagcttctccatctcgcgcagttcctgcacgctgaacttggcctgggccacgccacgacggatgaacaggtgcagcaccttggccttgttctggccgatgccctcgtacacgttgtcgggaatgtcggttctggccttgaggtcgtcggcgtcgcgcatgagctcgcgggccacatccatggccacgttgccgccgccgatcacggcgacgttctcggccgtcagcggccattcgcgggcaccggtggggtaaccgtcataccattcgacgaacttggcggcaccgtacacaccttcaaggtcggcaccgggcaggttcagcggcttgtccttgaccgcgccggtggcgaacagcacggcgtcgtaacgggccagcaggtcgtcaagagtcacgtccttgccgaattccacgtcgcaatagaggtggatgttcgggttgtcgagcgtcttctcaagcgcggaggcgatgaacttgatggacgggtggtccggggccacgccgtaacgcaccagaccgaacggtaccggcagcttctcgaacaggtcgatgcgggccttggtgccgaggccgagttcttcgcccagtttcttgagctggcgcaggaagatgtcggaggaatagacgccggcc

SEQ ID NO: 1538 - DNA, 9077 bp, Unknown
  R221_24m  MAG No. k141_1766
attgctcgacgattctggtgatctgccccagtcgtttgatcttgccacggcgcgtcagatggtagcgcgtggcgaaatcgttcctgcgtccgaacagtgccagcgtttcgtcggatacgctcggagtcgccttggtaacggtctgcttgagcgtgtccggcgtgtcgacggaccggttcgctgccgcctcacgttcggctttcgcaggcgtcagaatagggtcgaccctgctggaaagcggagtcgaccctgattccggcgtagtgcgtgtgggcttggtcactcggccttgccctcgtcggcgggcttgtcggcggcgctggtgtcggctacggcagcagctttgtcgccggcttcggcggcggccttcttggcgtcatccaccgtctcgctcaccttgcgcttgagctcggtgttcagcgccttgccctgctcgaccgtaatctcacccttcttgacaagttcgtcgacgagctcgctgctcttctcatatccggtggcaagggctccgatgcccgccagcaggaccttgcgcaggccatcacccagaagatcaaaatcagccatgatacccctccttcgaggtccgacatggcctggtgccatgtctcgtaccaccaagcctagcgcaaacaacagggcaatgtactagaccctcagactgatttcgactgatttttcgctgattggtacttaccgaggactcaccgagaattcaccgaggacgttcggcggcagccttgcgcgcgttggtggctacttgatcgatccgggcgagctccttggcttgttcgggggtctgatcggacgtatcgaacgtaccgtaacgacgagtcacggcggtttcgataaggaaatcgctgatggcggggtttttaggcagcaacgagccgtgcatgtaggtgccgatcacgttgtgcacgcgcgcgccctcggtatggtcttcgccattgttgcctcggccgtcctgatcgacggtgccgagtggctgaacgccttcgcgcaggaaggtctggccggagtggttctcgtagccaatcacatcgccgaactggtcggaatgctcaacaagattgccgatcatacgcacgttctggcccacggtataagcaccgataacgccgatgccatccagacgggtgccgtccacggtttcaaagtactcgccgaacagctggtacaggccgcagatcatcagcatcggcgtaccgtctgcggcaagcgagcgcagcaggtcggcgcgatggtagaagtcgtcgatgattttcttctggccggtgtcttggccgccgcctcccagaataaggtccacctggtcgggccagtcgtcgccttgattgtactggtggacgaccggttcgtaaccgtacagttccagacggcggcggatagtcagcacgttgccggaatcgccgtagatgttcatgtctttgggatacagggacaccacatcgattgttctggccatgtcgcgttctccttgtcgatgtcttcccgctaaggggaagtcttattcctcaccatgtcctcccgcaggcgagaggtggcgcgcgggcgctagagggtggttacttgcccacgcccgcgtcccgtacttcggtgatgcggcccagtacggcacgggttttgagcatggcggtgtaggtgcagtagatgtgcttgcgtgtgccgggattggcgttgacgaatgcggtgaccgcctgttcgaggtcggtgttcgtatcggcgactggcacttggtcataccccaagcgcaatgccatgtcccaggcgcgcacgccggagaccatggcgacaccggacgcgcgcaaagaggtgaagtccacgtcccatagccagctcatgtcgcggccgtcggcatattcgtcgttgatggcgatcatggtgtccgcgttggccgggtcgaagctggcgagcgagaggcggaagcccatcgggttcttgaccagcagcagttcgaccggggaaccgttgacgtcgatgacctcgccacggccgaaagccggcgtgacgcgggaaacggcggcgatgagctcgtcggcggacacggcgcaggcgttggctgcggcagtggccttggatgcggcggcattgtcttgcatcaccgcacgtaccacggcgagcgcggcggccgcgttgtacaggttgtagacgccttcaagtttgacgtcggtggcgtagtcctggctgtccatctggaaggtggccttgtggtcgcccacggcggtaagtgtcacgtcggcggggagttctgccgtgcctgcggaagctcccctctccgaggggagctgtccgcgaagcggactgaggggagtactgactgaagggagcggcccggccataccttccaccgacacggtcgtggccatgtcgtcatcggacgggaaatagtggcgcaaatcgtcggcgaggccgaagtatcgcactgtggtgccagccggggccttcgcggcgagcgcggcgatacgcgggtcctcgcggttcagtaccacagtgccggtagtcgccgcagccacatggctgagcagtttggccgtggtgtcgatttcaccgaatcggtcaagctgatcgcgcatcacgttcagcagcaacgcataacggggcttgacctgcttgacgaagtggacggcgtacgcctcatcgagctcgagtacggcgatgtccgcgtccaatttgccgccgaaagtgacttcggtgagcagtgcggagaccacgccgcgcacgaagttcgagccggtcggattggtgaacaccttcaatcccagatcggagagcatcgaggcgaccatgcgggtggtggtggtcttgccgttcgtgccggacaccaataccacgccaagcggcaactgcccgagcgtacgggtcaggaagccggggtcaatcttttctacgactttgccgggcaaagccgaaccgccatgtttggtgacgcgggatgcaaaccgcacgaagcggcctgcggccacggtggcgaacgcataccacggtttgcgggtctgcaccacggacgattggtcttgcgaaacatcgcgtgaaacgttgcttgccatcatcacaccccctgattgctgttgtagtcctgcggcatgtccttgaatttggacgtggcaccgaggaaggcgaggtggaaggtttcggtcgggccgttacggtgcttggccatgatgatatcggcctcgccggggcggtcttccttgtcgtagaagtcagggcggtggaccaggaacaccacgtcggcgtcctgttcgattgagccggattcacgcaggtcggagagctgcggcttcttgtcattacgcatttccgggccacggttcagctgggaaagggccacgaccggcacttcgagttccttggccaagagcttcagggcacgggagaattcggacacctcttgctgacgggattccacggccttgcccgaggtcatcagctgcaggtagtcgatgactacgagtttcagatcgttggtctgcttcagacgacggcatttcgcacggatctccatgaggctcatgttcgggctgtcgtcaatgaacagtggcgcgttctgcatcttggtccagaactggttcagggtgttccagcgttcgggggtgatgtcgtcggcgcggcgcagggcggccatcggaatattggtttcggcggagataatacgctgagcgagctccaccttgctcatctccaagctgaagaccacggaagtcatgttgtggtgcaacgcggcggcgcgggcgaagtcgatgccgagcgtggacttacccatggccggacgccctgcgacgacgaccatctgtccgggctgcaggccctgggtcacgtcgtcgatgtcgcggaatccggtcggcacgcccttgttgacgagaccctgctgcagtttgtccagctggtcgagcgcgtcgtggaccaccgggccgatggcggcatagtcctgacgcaccttgcccatcgacatctcgtagatctcggactgggcgaggttaaccacatcctcagcctgcgatccctcggcggaataaccgagctgggcgattttggtgccggcggcgatcacattgcgcaaaatggcccgctgatggacgatctccgcgtagtacatggcattggcggcggtcggtacggatgcgacgaggctgtgcagatagtccgcgccgccgaccttgtcgaggttgccatccgccaacagctggttggccacgagcaccacgtccaccggctgactggcggaaaacagatcgatgatcgcgttatagatcgtctgatgcttgggctggtagaaatcggtgacgtcaatggtctgcgaaacttcgccgatggcatccttactcatcagcatgccgccgagcacggccatttccgcgtcgtcatcgtgcgggggcactcggtcgaaaatcgggtcgccgaccgccgccgacgtctgcgcgccgccccggcccgcgcggtcgccacgatcgccacgatccgagccactgccgaacccattctgatacgagtgttcacttccttctgccatagccttcaagtataggaggtggcgtggcgagcggaagatatcgcacgactacgttcattaggtcgattcctcactcattaggtcactgtgcttggtaacaccacaaaccatgcgcttggaatggcggcattctgaggcgctcgatcaatatctctcaaagtccaccgacctaatgaatgcacaatcgacctaatgaacgcatgaaagtgcaagtcgtgccgaatcatcgcgcaccaatttcatcgttggttcaccttgcggtcagcgcggcgacacgctgaagcgtcaaatgtggatagaaaaaatagttatccacattttggggataagtctggggataatccactcatttatccacatattggggataacttggtggacaagctgaggataactttgtacggctgcactaggtgcttgcgcaacgtagctaagcatgatatgcgtgtgagcgtgcatagcaactccaccagcattcatcgccaaatcattgcgttggcgctaccgacttttgggcagctcatcgcagaaccgacttttatccttattgacaccgccatcgtcggtcacattggcgatgccgctttggccggactgtccatcggatcgaccatcatcctcacggcagtcggactgtgcatattcctggcctactcgaccactgcgcaggtggcgcatctgctgggagcgggtcgtcgtcgcgagggactgcaggcaggcattgacggcctgtggctggccttgagcatcggcaccgtactgggattgggattgttcgcggctgccgagccattatgccgggcactgggcggtcagggcgaagtattggaacaagccgtgacctatacgcgcgcaatcgtgctgggtgcgccaggcatgctgatggtatatgcggcgaacggcattttccgaggattgcagaaggttcgtatcacgctgatcgctgcggtgggcggcgcggtggtgaacacggcgcttgatgtgttgttcgttattgtgctgaattggggcattgccggctccggagtggcgacgctgatagctcagtggttcatggggctgttcctggtaatccccgccattctgtggtcccgggcggacggtgcgagtctgcggcctcgtttggccggtattgcggcagccgggggcgacggactgccattgttcattcgtacattggcgattcgtgcggccatggtggctacggtcgcctgtgccgcgcgcatgggtactgccgtgttggccgggtttcaggccgtgaactcctcttggaattttgcgatgaacatgctggattccgtgggcatcgccggccagacgctggtggccacaacgctgggcgctggcagcgtgcagcaggcgcggcggttgacgcgggcgaccgggcgtgcggggctggtcaccggcgcggtaatcggcacggcttttgcggtagtcggcctgttcgccgggcacttcttctcccctacgccaaatattcagacgttgattgccgttggcatggtgacgatgggcatcttcttcccactgcaaggctggatgatggcaatcgacggcattcttatcggcgcgcgcgactaccgctatctggcaggcacctgcacgctgaccgccgtggtgtatgtgacgctcatactcatactggccaatatggtgacgccggcgctgacgagcgacctgatgcgtaccgccgtgctctgggccgcgttcaacgtggtgctcatgggagggcgcggcctgtccaacgggctgcgcgtgcgctcggacgcatggatgaagtaggtatcggccgcgcgaagtgctgggcgattccgtttacatcgcggcgcgagcggcggaatacatgccgcgcacgatttgttcgcgccacttggaccagccgtattgcttggtgatggtctcaccggcggtggcaccgagcgaggagccgtcggcccgggtcaggtcgaacagcatatccaacagcatcttgtcgtggtgcaagcggtcggccaactcctccgccacggccggatcataggggtccttacccgtggcaaattcggatagggtcaaatgctcacgcaccagcacggtggcccagtcgacgatgtccggcgcgtagcccatacgcttgagaatcaccggcacatggcgggcaccctcggcggcgtgatcggccacgaacgcgcgcttgccgatgtcatgggtaataccggccaacagcaacgccttgaaatgatcgtcatcataccgtcccccggacggtgtctcacgacccagacgcgacgtgacctccaccatatgccgatcgatggtgtaccggtgggcggccgaggcggacggacggttgcggacgccgagccattccggcatccatcgacccggaatgtccacgaagtcgatgctctcccacacttccataagattcggcccgcatgcaagcagacgaataaacagctcgcgcgattcgtcatcccactggttgtcgtgaatcgggcagtgcttcagattaaccaaggtagacggattgatgggcaaaccgaattcgccggccgccacggccatacgcaacgccagcttggcatccttggcaggctcggcaccgggtgccaacaccaattcgccttcgtgcttggccacgccgggagccaccacgtcgaattgcggggcttcacgcttgccgccagagcgctgagagaacatctggaagaacgcgaatcgcggcttttcgtgggtcagcgaatgtccagcgcgggatgcggtggaatcaagcgagaaggagatgcgccggccgatacgggcaagcagcgtctgcaaatcgtcgatcgagtaggcggcacgctcgttttcgggccaagtcggatcggcaaggccaagcatggcagccactttggcctgatagggcgtcagcatcaggttggtatccttgccggccaccagatggatgcagtcgcgtacgtcgagcagacgttccacggcttcgtcgtagatgccgtgcgggcggtcggccagccatgagacggcgagcgcggagacgagcaccgaatcgcgcaaacccccacgggtctccttgatgtcgggctgattgacgtattggaggcggccgaattcgtcgagtcgggctttggcggagtcgagcagttcgggcaggcgcttgcgggcggccttgcgccagcgttcgaggatggatgtggcggtggtggtaatcagagcagtgtcgccggcgatgggcttcacgtccagccagcccatggcggcgggaaggtcatggtcggtgacttcctcgcattgggcgcgcgtgcggatggagtggtcgaggtccagaccgctgtcccatagcgggtaccagagtttgttggccaactcgttgagctgctggtcgttcaacgtgcgaggctcgtagatgatgaccaagtcgaggtcggagctggggcccagttgaccacgtgccagcgagcctaccgcggcgaagccgatgccggagtcgggcacggggaaagagacatccttgcaggccgcattccacagctccgtgaggcattgcatggccagttccgtgcgggctttacgcttggtcgcaccattccggtagacaccatcgtcatccggctggctcatatccatgaatcgttgtttcaagccatctactgctgaagtcattgcttcatctttcattgccaaaaaggtccccgcacggcgtcaattcgcggcgtgcggggacctttcccatgcagtccatccccttctaggcatggacgtctgtgttatcagatcgcggcggaaccggtctcaccagtacgcacgcgggccacggagtccagcggagcgacccacaccttgccgtcaccgatggtgccggtgccggcggacttgatgatcacaccgaccagcgtctcggcatccgcgtcatcggacagcacttcaacgcgaatcttcggaatcaggtccacggtgtactcagcgccacggtagacctcggtgtggccgcgctgacggccgtagccgttggcctcggacacggtcagaccgtgcactccggcggccgcgagggcctccttgacgtcgtcgagcttatggggctggatgatagcggtgatgagcttcatctcacctcacctccttgagaacagagctggcagtaccagcaaaatcgtaagcacgttcgccctggtcggcaagatcaatgccgccgacttcctgagcttcggtgacgcgccaaccgatggtcttctccagggcgaaggcgatgatcgcggtgatcaccgcggagtagaggatggcgacgagagcgatgaccagctgaacgacgagctgcttccagtcgccaccagccagcaggccggtgccttcaccgaagaagccgatgaggacagtgccggtgaaaccaccaacgccatgcacgccgacgacgtcgagggagtcatcgtaaccgaacttgaacttgagaccgcaggccaggcaggtcagaacaccagcgatggcgcccatcacgatggcccacagcggggaaaccacatcggcggccggggtgatggcaaccaggccggcgaccatacccgaggcggcacccatagcggtgtag

SEQ ID NO: 1539 - DNA, 5406 bp, Unknown
  R221_24m  MAG No. k141_1994
cgcaagaacggcatcatcccgctgctgcgcccggacggcaagacgctcgtctcggtcgaatacgcgaacgacaacatcaccgatccgcgcgcgattcgccacgtgctcatctccactcagcattccgacaagctcgcgctggacgacgtgcgtgcgcaggtgcgcgaatacgtgctcgaaccggtgctcgccacgctgggcgtggacgcgtccgaagccgaagtggtcatcaaccgttcaccgttcatcaacggcggccccaaggcggacgccggcctgaccggtcgcaagatcatcgtcgacacatacggtggcatcgccggccacggcggcggcgcgttctccggcaaggatccacgcaagcccgaccgttccgccgcctacgccgcacgttgggccgccaagaacatcgtggccgccggcctcgcccgccgcgcgcaggtgcagctcggctacttcaaccgcgtggccacgccgatcaccatcgacgtggagaccttcggcaccgaaaccgtggcccgcgagaagatccagcgcgccgtggccgccacattcgacttccgccagctcgccatcatcgaccagctcgacctgcgccgcccgatctaccgcaagaccgccgcatacggccacttcggccgcgacgacgccgacttcacgtgggagcgcaccgacaaggtcgacgaactgctgaggaacgtcaaatgagcgataccggcgacccgttcaagcacgaatacttcgacgacttcgaacgcgaccatcccaacattttcgcctcgaaactcgcgctgctggaagtcgccatcacggcggacggcacgcgcgacatcggatacacggtgtccgtgggcgccggcaccggctcatacgaggcggcgctgcggcgcgacgggcttgacgtggaccgcatcatcgagccgtcggcgaatctggcggccgaagcgcgcgggcgcggcttcgacgtgaccgaggcgctcgcccaggacgtgccgttcgaggacgcctcgattgacacgatcttctacaacggcagcgccttcgggttcatcgacgaagccacgctgcgcgacctgttccgggcgcattaccggcagctcaagccgggcggcgtgctcgccctactcgacgtgccgccggccagcgccttgggacttgcggtgcaggcgtcgttcgtcatacccggcgaatcgtatatcgcggaagtgctgcgggccagctggtacggggctgaaaccccgcacaaggaatactggcgcactaccgacgactatcgcgcgctgcttgaggacggaggcttcgaacgattctccacctggcaggcgctgcgccggcacctgatctaccagaacgacgcccgcgagccggtggccgaaggctatcaggagggaagttacgtggctttggtggcgcgtaagtagcgtgtcttgagctcgttaacggatgaacaaggaaagggtatgactacatcgactacattacagacaactcgttggggcaaggtggctatcggatcgttctgtgcgatcctgctgacggtgggcctgtccgcctgcggcaacgcggcgggcacctccgcgccgcaacagtccggaaccagcagcaaggtgagcgatgataatgccgcgcaccatcatcaggcggcgtcggccgaaaagaccgaacagtcggatggtcagctgaaggacacgacggcgggggagtcgggagattcgaccggcacgaccgggcagtccacggatcaatcgaccgcgggcaatccggccgattctggttccggcgccggcgccggtgccaagacggccggcggctccggctgctgccacgacgagtgatgggaaaggaacacccatgggagaaccatttttcgaccggtacaaggacaacggccagattctcgacaacacctggcgcgcgcgaccgaatatctacgagtcgcgtctgcgactgctgcaccgggcgctgaccacccgcgaaccgggcaagatcctgtccatcggcatcggcatcggctcgggcatcttcgagaccctgctgcgcgaacgatacggcatcgaggtggccgaggctgtcgaaccgtccgcaagcctaggcgccacggcccgcgagaaagggttgaatgtggtggaaagcaccgcgcaggactgcgactacgcgggagcgccgtacgacaccatcgtctacaacggagcgagcttcggcttcattcccgatgacgaaatcgagtcgaccttcgcccacaaccgcgaagtccttgccgacaacggccgactgatcctcaccgatgtgccggcggaaagcacgcttggcatcatcctgaagctcgcgcagcgctacgacatcgcacgcgaggacatcgacgacctgctggtcggtacctcgttcttcaatctcgacacgcacgcctacaaaccgaactggcatccgattccctggtacgccgacctgctgatccgcatcggctaccgcgatctccagttcttccagaccgtgctcgccaatccgccctaccaaaacgatcaggtcgaagaccccatcaagggctacactcaaggcaactacgtggccatcgttgcctcgaagtagtggcgggtgttgggtgcttgattgctgcgctcaggtttctctgtgttggaggaggaacttgagcgttttttctttaacaacgaaggtttcgctcgaatcgtgataggttcgagctcgctgtgtgtcctggtgccgatggcgtggttgccaccgttgttgtgtcaatcgtttgatggtgaaatggtgcgcagtatggtgtcgtcgcgagattatgaaaatggcggaattccaatggtccagcgaaatggggtgcgggatgccggctgtgtgtatcgtttgacgtgcgtgtcgtcccgcacggctgcgggacgacagccccaaatcggccgaaaatcgcgcggcatcccgcatttctccgatatgtgggaggaatgcgtccgccatatggtgattgaggcagaggcccgatgagatacgactatgtgacaccgtcacaggcagtgttgccacgagtgatattgcaacgggcggtattgcacgggtgccgtcgcgggttgtgccaacacccataggatacgccggcgcaccactcactggaagtggagctgcttgccgctttcttccgcgtcgacgttgccggtggcgagatccatgagctgttggaacagcgggaacatgagcagggtggagagaatgccccagatgttggtgaacgtggcgggcagtggcatgaacagcaggacgagctgcgccgtaaacatgacgttgagcagcggcatatcgtcgtcgtcacgctgggctgcgggggccataggcgtcgtaataatcaggagtactcatgccttacggtatacgagcttccccgccggttttccaattggttccagtgtttgttttcctgaccgatatcggccgcttccacttgccggccccgcatggccaaattcacagcggcaagagtacttccggcacgcaaataaggggatgcagcctcgcctcatatctcatatgaagcgaggccgcatcccctatcagcagcgaatcatcggccggccaagaccacacacagactcataatcaatccatgccggcccgccaacaccaacgatcaccaggttggaatctcggcgcccttggactcgttctccatgatctgtcggacgttcttctggtggtaggccttgatgacttccttgtagatatccttgtccttatcttcggtgcgggccacgatcacgttgatccacggcttgttgacgtccttggtggggtccgggtcgatcttgaagattgcgtccttctcggggctcttgccgtaatcgaccacggcgttcgcgttggcgatgccggccgccgcgtcatcgagcgagctcatgatcatgttgcggtcggtgggcaccagctcgatgttcttcggattgctggtgatgtcttcctgggcggggtagatgcccttggccgggtcgttcttggacgggtcaaccttgagcacgccggcctcctgcagcacgatgatcgcacggccgccgttggtgacgtcgttcgggatgaggaccttgtcgcccttcttcagttcggagatcttcttgattttgttggagtagatgttcagcgggctgatgtacgcctcgccgatcaccgtgaacttgtagcccttctccttgatctcgccgttcaggaacgcgtaatgctgctgcgcgctcagatccacgtcgccggcggacagcgcctggttgcccagcacggcgctcttcatggccacggtcttgacgcgcaccttggcgttctccgcttccaggttcttgttcacctggtcccacagcgggtcgtcggtcgaggtggtcagcgccaccttcagcgtggtgacgccgtcggacgccgaagccgagccgcaggccgccgccgtgaacagcacgccgagcgcggacacgatggccaggcccgcgcggatgcgtttgccgactcgcgaccggccggtccagatgttcgtctcagtgttcattcttcctcccgataatggttccgatggtttggatgatggtgatgaaaatcagcagtgcgatcacggccgccacagtgacgtcgagctggttgcgctcgaagccgtaccggttcgcgtagtcgccgaggccgcccgcgccgatggcgccgatgacggcgatctccgagttgaagctgatgcaggtgatggtggtcacgcgtgccagtccggagatgctttcacgcaggtagacgtgccagatgatcgagagcgggccgaatcccatggcttgggccgattcgatcagcgtggggttgagcccgttgaacacggattccacctggcgtgagaagaacggggtgatgcccacgatcagcgggaagatcgcgccttccacgccgatggccgtgccggcgatcagtcgggtcagcgggaacagcaacgcgatcatgatgacgaacggaatcgaacggcacaggttgatgagcttgtcgaagaactcgaagaccggccggttctgcagcaggccacccttcttcgtgaccgtgagcagtatgccgaagaacaggccgagcacgaaccagaacggcaccgccgtgaagaacatgcgtaacgtgtcgatcagcgattcgacgaacacgtcggggttctccatcacgtgcgggaagagcttgtccaggatggtcatcgtgcgttctccttgtcggtgttttcgaccgtcgtggtctcgacggcatcgatgtcggccttcgccgcacccggttcgatgaccgtggtgcggatgcccttgcccttgaggaattcaagcgcctggtcgatctgcgcgtcggagcccttgtatttggcgacgatgctgcccagcgggtagccgtcgacgatgtcgagcgaggcgaacagga

SEQ ID NO: 1540 - DNA, 6944 bp, Unknown
  R221_24m  MAG No. k141_3154
gcttttgtgctgatatagggatttgtgctagtcgaatccgcgaaatgttcagtaaatgttcacgtagcgaaatcggcatagaatgcgagcaaacgcataacggcacggtgctgttcctgcgtacgccaacgccaggcgaaccgccggaaagaaggggtctccatgattgagacagcggacgatatcaagacgattgcgaacgtcggcacgggaacaatgggccatgcgatcacgttgcagttcgcgctggccggatatccggtgcatctggtcggccgcagcgaggcctcgctggagaaggcgatgaaggcgatccgttctgatgccgaggacttctcgccgaagccggactgctcaaggccggcgacaccgtggacacggtgctggcccgcatcaccggttacgccgactatgcgagcggcgtggcggacgtggacttcgtcatcgaatccgtggccgagaaccttgacatcaagaagtccgtctgggccgaagtggagcacgccgcccccaaggacgcgattctgtccacgaacacctccggcctgagacccaccgcgctgcagtcggtgatggggcaccccgagcgcttcgtggtggcgcacttctggaaccccgcgcagttgatgccgctggtcgaagtggtgccgggtgaaaagaccgatccgaaggtggtggacatcaccttcgacctcatggacaagatcggcaagaagccggcaaagatcaagaaggaatcgctgggctttgtgggcaaccgcctgcagctggccgtgttgcgcgaggcgttctacatcgtccagcagggcatagcggacgcggccaccgtggacgacgtgatgaagtacagcctcggccgccgctggaacctggtcggcccgatcgccagcatcgacctcggcggactcgacgtgttctacaacatcagcacctacctgttcgacgacatggacaacggcaccggcccgagcccgctgctcgccgaaaaggtcaaggaaggcaacctcggtgccaagaccggtcagggcttcttctcttggcagggcgaggacggcaagcgcatcatcgaaacccgcaacaaggccctgctgcgtgcgctgaaggacgatgccgcggaagcgtaaagcgcgagcgacgaattctcgcgtaacgtgtgctacgatggaaggctcccttcggggagccttcgttgtgcttgcgttgttcttcggtccaacttttcgacatgcgtatacgttgttgatagcgacaattgcggaaaacgcttacagtatgatgtgcacacggacaacaagccgatgattgcaaggagcggtgacgacgatgacatccacagaacacaatacgcgagccgacatgttggcccacatgggcagccttcagcaggccgcctacgtgcgcccgatcgagtaccaggagggccgtgcccacggcctcaaggccatcgaggtgaagaacggcccgctacgcttcgtatccatggccgaccgcgccctcgacgtctgccagttcgaataccgcggcgagaacctcaccttcctgtccaagccgggcctgaacggccgcaaccagttcgacaccaacgggctggaggcgcagcgctccatcatgggcggcctgttcttcacctgcggcttcgagaacatctgcgcgccgtacgtcacgcctgagggcggcaagtacccggccggcagcttcccgatgcacggccgcatccgcaccacgccggccgagcatgtgggctccgacgcccactggaccgccgaaggcgactacgtgctcgaggtctccggcgaaatgcgcgaggccgaactgttcggcgagaatctggtgatgcgccgcaagatcaccagcgtgtacggccagccgtcgatcacggtcgaggatgaggtgaccaacgaatccttccgcgacgagccgctgatgtggatgtaccactgcaacttcggctggccgttgctcgccgaaggcgccgaagtcgtgatccccagccgcaaggccaccccgcgtgacgagaccaccgcagccgacaccacgccgtggaacgaaatccaagcacccgaggcgaaccgccccgaaagcgtgtacctgcacgagctcgccgccgacaagaacggccgcagcttcgccgccgtggtcaaccgcaagctcggacttggagtcgtcatcgacttcgacgccagcctcttcccatacttcatggaatggaagtcgatgggtgcgggcgactacgtggtcggcctcgaaccctcgaactccagcgtccacggccgcggctggcacgagcagcgcggcgacctgcacaccatcgccccgcagaccagcgaacgtaagtccctgaccttcaccgtcatcgaaggcgaggccgcgattgacgggctcatcgcccgccgcgacgccctgcttggctgaattgtgagataatatcggccgatatgtgaacggctgattagcgtggggagcatggttacccgggattcggaacagtatctgcgattcaaacgggagcacacgctgccctcgcatgaggcgattatggactggtatcgcggcaccggcatgcgtccgtatctgcaggcgcttgacgacgccggccgcaagaagttcgaggccgaagtgttctcccaagtccgcgaggaataccccacacagtcggacggcagcatcattttccccttcccgcgtttcttcttcctcgcgactcggtagaagctcgtcggattcgtgtactgggcggcgcgacctgtttcccgcgccgccagctgtgggttgacctcgctactgggcttgcggtgatgccgctggctgctgcgctgcttccgattgcgatggcatttgcatatgcggtgcgatgctggggagtgtgccgtcatgcatgcactgcttcaatatgaggtctcgctgggcgatgaggtcgtcttcgatctggtcacgcacgtcgcgcacggacgagaaatacaggtagaacgtggcgtgattgtagccggcgagttcggtgatctgacgcaccgagatcttctcgatcggcttggtttcatacagcttccagaacgcctccttaaggcgattgaccgtctgctgcgtaagttgcgggttcttcttgattgcgattcgcggtatggtgatttcgcataagacgcacaaccccatcgattcgtcggtcaaattcgtgaccttctcgatgcgatgctgtcgctggtggtcacgcaggacgggctgttggaatcccagggaaccgcgcacgcggcgcaatcctcgggactgttcggcatcgggctcggcgtggtggccgtgatcatcggcctgtggatgttgctgagacgtaagtggacggcaacggaataggaatagtgacagcggaatagcgcgcgtgatattggtacgcgacgtatcgtaaaagcggctacaatacttacggcaaaagtctttgcaacgagaaggaagacatgactgagcggcgtcgagcacggatgaggattcgtcgtcaacgaatttacgttgtacggcgcattgtggttgcggtatgcgcattgttgtgctgcgttcttgccgtcttctcgacgattgacgcccaacgggtgtggccccgcggtgagtcggtcgcacaggggcaggcagaggttcaggggcaggcgcagaaggtgagtcaatccgcgcaacagtcggcatcgcgagtgtctgcatcggcctcatccttggaccgccagcaggtaccggtctttaaccaggcgattcaggagcagcgtgacaaggaagcgcaacgtgcgcgatggacgaatcccaccggcaagcagcctgatttgtcgcaatactccgatctcagcgtgaaagtcagtatcgccaagcaggaagtgtatgtgcaatccggcggtgagaccatctacacgatgatcgccagcaccgggctcaacgatacgaccccgcgcggcaactatgttatcgggatgagaggcgatcacttctacaatcccgcagaaggcatgggtgctgattattgggtgcgattcaacggcccgttcctcttccactcggtgccgaccggggcgaactccggcgagtatatggaagaggaaggcaacaagctcggtcagccggcctcacatggttgcgtgcgactcactgtggccgatgccgaatggttctacaaccaaattccggaaggcacgccggtcaccatcgcctgaggcttggcctgagatcgatactgaggctatcgtgctttaggcgtctgatattggtcgtcggtagtgaagcaggtgcgatagaccatggccatgatcagaccgtcggccagcaaggtcagcgcggcgatggcaccgaagaccacgaactggtatttggcggcgttcagcggatctccgccggctatcacctggcccgccatcatgcccgggatggtcacgatgccgctggaggccagcgaagcggtggtgggcagcagtcccagccgaatcgacgagatgacggatggacgggcggactcccatgccgtcgcccccaaggccagcatcatatccacctcgtcgcggcgttcctccatgctttcatagaatcggctcagcccgacagcgagcgcggaaacggtgttgcccagcagcatgccggtcaggggcaccaccagctggggcgcataccatgggtgtgggcgcacgatgagttcggtgaccaacgccagcatgagcagcatcgtgatgaccaggctcaggaagatcggtccggcaagacctttggggatgccgcgcgcgcgggatatcacgatctgcaccgccgcgaccagcatgaccgtcatcagagcgaacaccatccacacgctgttcgaacgaatcacgtagctgatgatgaatcccatggcgcacagctgcacgagggcgcggcatgccgaccacatcagggtcctgccgatgcccatgtgcatgagttcgctgacgatggccgccacggccaccatgcccaacgccagaacaagaccccaggtgtcgatgtcgtaggcgccgttcatgggcgcacctccttatcccgcgtcagatcggtgagccgtcccgcatcgagcatcagcgtgcgggtggcgcgtccgtccggcggacggtgtcggatgcggatgatcgccatgccgtgtgcggccgcgtccgccatgatcgcggccactttggacgcgttgtcgtcgtcgagtccggcgtccgcctcatcggccagcagcaccttcgggtcggtgagcagcgtgcgggccaacgccacgcgtgccgcctgaccgcccgacaggtcatgtggcgcgcgcgccaggtcgatgtcctcgcatcccatcgcgtccagggtcgtgcggatacgttcgtcgggcagcaaccgtgcggccctgccccccttgcctcgaatcgcgagcgtccagggcagccggatcgcctcggccacgtccttgccggtcagtatcggtttttgcggcaggtaggagacgtcccgccgccactgctgtgcgctgaattcgtcactgcccacgccgtcgaggacgaacgtgccgtgcgcgtgcgggttgagtcgggcgcatgcggtcagcagactcgatttgccggagccggacgggcccaccaggtcgatgatgtcgccgcgttccatgctgaaggacaggttgtcgaacaccgtgcgttcgtcgtccgccggcgatcgcgcggggacgacgcaggacacggatatggcttcgaagaaggatcgcatattcatccagtctagtcgggggtcacgtgggaaaccccagcgcccggattcaatttgtaagtgcaacgctcgtgcagagcaaggcaacggtcatctgctgttcctgtagtccacccaactgcgcgaagccgcagatactttccgcgcccaaccaagcgaagaacgaccgctgatttcgcgcaccgacgcgcaagccatgctctccgacgcaatccaccgatgccatgaacgcttcattattcatgtcaataagccaggaaatgcatatagcaaatccttcgattacactgaattcatcaaaaccgtgcaggctatcgcgggcaatgccctgcaatccagtgattacgcaagcgcatgcgaaaacttacgattgtgcatacacgaagtccacgcgcttctgctctcgtccgaaaacgatgatgattccgagcctttgctcacgcttatggacggtctggcgatgcgcgtgcgatgctatatggagaatgtggcggaattcgccgactcccctaccgccggcaaagcattgaacaccattgcacaggcaacgaatgacaagaacatgcggcaatgcgaaccattgaacaacatgttgctgatttccagcgcgctcgccttcgcccaatatgacgacaaacgcatgtgggcctatgacgtaatcgagaacgcgataacgcgtaatctggaatactcgttcaacgaagagagcgaagaaagcgacgaggacgacgaggatacgaacgaggtcgatggcgagaccgacttcttttctgcaacgacaaatccgacacccattacgtgggtaagctgcgcaatctgttgcgcatatacggcggtctcagcgcggaagaatggcacgacgtggctattgaactggccaaagattgcgtacgaaacatcatcgaccgcatcaagtatcagccggaaatgaccaccaaaggcggcacacagcgccacaacagctggcgcaatcccgcttacgagaagctcatcgtggatgagcggctttcggacgcggccctgacctattgtcccatcgtagattacccgccgctgccattgctacgccccgggttctagatagaagcgcaacacctgctctatggttggaagtgttcaagtccacaaccgaagagaaagtgctgcgctcgatatgaaagcttattcccacctgtcggcagaggaacggatccggatcgacgaattgcgcaacagggacgggctcggcgtgcgccaga

SEQ ID NO: 1541 - DNA, 4198 bp, Unknown
  R221_24m  MAG No. k141_
cggcagaccggcggccgccgacaccgtggccatgaccgccgccttggccgccatcatggaacgggccatagtccgaacgacccattgcgtcgctcgcatcgaggaaccggcgccggaacggactgttcgccgtgctcggccgtctctggctagaacagggcccgtgcgtttccggagtgcgctttgagtcaggatggaacggcctccacgcatgttgccacgacgagctacgcggactttgccgggccgccggctcttgcctcgcggcgatatgactcgggaggcaacggaagcgggagaatggccgagggcttcgccatcagccttatcggtgtcgtcgcttgagatttgcgcttgcagcaaagcggaggtctcctccgttgctctcgccagatggcgcagcgctatccggcttggcccatcggaccggcttggtctggccaacgccggcttggacggctgaccctcgatcttcggggcaggagcggcattgccggagaacggcgggacgtcctcgcccttaagcccgatgggtcggccggcccgcagctttcggggcgctgggccggagggctgcgcggtttggcttgcccgtccgatgggctggggcttgttcatggatgctggtcctcgaatttggtggtgtacagctggtagagcaggctgccggtgtcgagtcgtccgtcgaaggggatgaacgcggtgccggacttggccatgccctggccgggctggacaccggtgaagaagccgcgctgctcgtccgagagtttcagcagatcgcacagggcgtcggcgtcggtggggttctggttcatcaacagcaggaagtcgctgttggcgagcatgagccgggcggccggattggccaacagttcctcgatgttctgggtgatgccggtgggcgacaggccccatttgcgcgccctcttgtagatgcgcaggaatgtctctgccacatatgggttggagaacagcaggtggaactcatcgacccacagccatgtgcgccgtccccgggcgcggttgcgcacgacgcggttccacacctgatcgagcacgaccatcagaccgaaggtcttcaattccgcgcccagacccgacacatcgtagaccagcagccggttcgaggtgtccacgttcgtgggatgcgcgaaggcatccaggctgccggtggcgtagatctccaacgcgcgtgccgcatccacggcctccggttcttccagcctgttcaagcgttccgtcagatcgaccagggtcggtgcgggccggtcgggcttctcatggtgctcgcggtagagttgcgtgaccgcgcggtcgatcaggctgcgctgggccttgtcgatgccgtccgcgccgccgatcagagcctcgaccatgttcagcacgctcgcgcttttgccccggatgggatcgctctcggaatcgtccgcgtactcgatgtcgagcgcgttgatgtgattggaggagcgttcgccgatctcgatgcgctggccgccgagcctgtcgcacaggggcgtgaactcatgctcggggtcgatgacgatcagatcgtcctgctcgcgcagcaggaacgtctgcgtgatctcgctcttggcggcctggctcttgccgcttcccgtggttcccaggatgaacccgttgccgttcatgcccagggtgcggtcgatgaccagcgggttgccgctcctggcgttgacgccgtggaacacgccacccggctggcacagctcctgactggtgaaaggaacgagtatcgaggcgctggacgtggtcagggtccgtctcatcggcggcaggggatttcccaggggcagcgccgcgttcaatccctcgacctgcatgtaggtcagggattcggccacgcatgactggccgtccaccgtggcctccacctcgcgcacgacctgcgccaaccgttcgggagtgtcggcggctacgtcgatgaccatgagcgtgtccatgagccggtcgccgttatgctccaggtcacggcgcaattcgctggcctgccccatgctttcctccagatcgtgcggcagtaggtcctcgggcagatgctggcggcggttcctgcgtctctcgtcgatggcctgcatgtccatctccgcgatcttgcggttcaccagccgcaacccctcggccttcgcatggggccgcagatgcacgctcacgatgatgtctgccttgatgtccgtcagggaggcgaccagctggtcggaaagccactcggggaaatcgcgcaccatcaggcattgatgccacacctcgcgcgtgcccgagcacagcttgacccgacgccggtcgcccgtgtcgatggcatacggagccacgcagtccttcgtgcacaggccgcgcgaccgggagaacgcatcctcgtcgaatgtgaaacgcacgccggggcgcagcacccggtgcagcaccttgagccgttccgcgcggttgagtttggagcctcggcagccgcccacggaacgcaattgcgcgatggcccgcaaggccgctcggttgagcgtggccacggcccgctggccgtcctgctccgcaagggtcagcgtcaggtacttgtcgcacacggtgccgctcgactggcccgacagcttgcggcgcacatgacggtcgaaatcctctcgcaacgcatccaggccatcgcccttgacgcccatcgccagcccttggcctgccgattccgggtccaatgtccgggtcatcaccgtgacctggatgcccatgccctcgcccaccgagttgaggaaccgtccccaacgctccaccacatccatctgcacgtcctgcgaggcgatctgataactgatgtcgctgatgcgcagcgtcacgctccaacggtcctgccccagataggcgacgccaccgggcagcatcgaatcataggcgaccaactccctgctcgaccgcgcgaccttggcggacccgccgcctttccttttcatacgcctgccatactcgcgttccttgctctcaacggccacgcccgctccttcccgcgcccctgcggagggcgcgttccctcaacgacggtttcgccggccacctggccggctccagattctccagtgtgtggatgttcctgccgaagcgctggcggatcatgtaacccagatagcgttccggcttcaggcccttgggacgccaccagccccacaacgccggcggcagacacaccacgaacaacaagtacgagcccagatcgggctgctccagcagcaggaagaacacggcgacctcgccgcctcccagaacaagcatgagcgccgaggcgaccaactgccgccatcccatgccccacatgaccttcgcctccacgctggcgatctccgcatacacgcgcatctgcaacgccatagctcctccttagaatccccgccacgctcactcgccgcccgcgattgcccggctgacgcgttgggagaccgcgatcacgaaaaacaacagaatgcccgccatcagcagattgccgaaattgcccgtcacccacgacaccatccccgacccatcgccctcgggcagacgcaccgcgtcgatcacgatgcgctgatagaacaccagacacacgaacacgcacaccgcgttgagcgacgtgcgcgcataggccttgaaataacccacgcccaccggcctggtgtcctcatgcaccagcaaggcgaacggcaacgactggaacgcggtcagcgcatacaattcgatgaacctgatgtacagcaccacggtgaacaccaccgccgcgagctgcgagaccagccacggaatcgccagcaggaaaaacaaggccgcctgccccatcatgccggcatcctcgacctgctcccgcatcaggtcacccaactggccgccggcgccggacgcatcgaacgacagttgcgaggaagcgccctgcatgaggaactgggtggccgaatcgaacgcacgcaggaacaatcccgcgttctgaaccgccaggaacaccagcgagaccttgaacaacgtgccagccacgatcttcacgcccaactcgcggtcggactcgatgcgcgtggaattacgcgccagctccaaggtgaacaccaccgccagaaccaccgaggtcaacggcttgaccgccacgtcatgcacgttcacggccaactggtaaagcgccggattccacgtctccggcccctgcgacagcatgccagtggctatcgaaccggcgccaccgccc

SEQ ID NO: 1542 - DNA, 8936 bp, Unknown
  R221_24m  MAG No. k141_4671
cccattaccatgtttggtaggccccgatggtcggggccgggtcgccggttccggtatgactttcctgccctgtcgtcgatgatccggggggtgttgtcgccgggaacggggacgcccgatgaccgctgataggaaccaggccggctacacggacgcttcaggggcgcatggcgcaggtctcgtcgtaatgtgggtgcggcgcgggcgtccggactcctccgagcccgcggcgaccggaaaaccttcatgacgggaggaatgatgatgaccccggacgacatcgacgtgtgggtcggcctggacgtgggcaagagcgcgcaccacgcgcacgccctcgaccatgacgggaacaccctgtacgacaagccgttgaaacaggacgagaaggccatccgcacgatgctgggcaagctctccaagcatggccgtgtgctgctggtcgtggaccagcccaacaccatcggctccctgcccctgacggtggcgcggaacatggggatcgcggttgcctaccttcccggcacggccatgcgcaggaccgcgcagctgctgcccggggacgcgaagaccgaccgcagggacgcgcatgtgatcgcgtgggccgcgctcaagctgcccgagacgctcagggacgcgggcccggatgacgagaccctcgccgccctgaagctgctcgccggccacgacgaggacctcgcccacgaatccacccgccacgtcaaccgcctgcggagcctgctgctgcagacccaccccgcgttcgaacgcgcgctcaagggcgagagaatcacgcgcgacgcgacgctcgcgctgctcgaacgatacggcgggcccatgggcgtgaaacgggccgggatcgaggacgtgaaggactgggccaagtccaacgggcttcgcgccggccgcatcatcgacgacatgttcaaggcgatcggcgagcagaccgtcaccgtgcccggcaccctcatggccgagaccatcatcccctccatcgcccacgacatcaagacgatcagggaccggcggcgcgaggtcggccgccaggtcgagaagctcctggaggaccaccctcttctcacggtcctgacgtcgatgcccgggataggcgtcaggaccgcaagcaacatcctgctcggcatcggcggcgacatcgccaacttcaaatcgtccgcccatctggccgcctacgcgggcatatcgcccgtcaccggccaatccggcaccagcatcaaaggcgaacggccctccaggcggggcaacaaacgcctcaagaacgcgctgtggcagaccgcgttcgtcgcatccaccaaacacccgccctccgtggcctattacaagcgcaaacgcgaacagggcaaacaccacaacgccgccgtcatctgcctcgcgcgtcggcgctgcgacgtgatctacagcatgctcaaaaacggaaccctctaccaggaaccagccctcgtagcctgaaccgggccacacgggaaaggacgccggacgccaccggcagggcgaagcgcgcccacgacagccaaccggaatcccgacacgtcaactccccaaggagttgacaaaaacctaggaacacccccctcgcgtatcgtgcgaacgaggtcgtccttgaccagcgaagtcttgttatcgataaagccctgagtcacaacgtttattctagtggaggaggggccaaggggcagtagcgacgccttaacatttgtcagggtattgcatcgtgtgagtatatacgattgttcatgagtgagtaatcagagcgaagaggaagaccaaaatggacaagaaattagatttgacggaaccgattattgcatggttactagaacctgatagcagtcgtgcagaagtggcagccatgttgcgtgatacggggaaacgtttcgagctcgctgttccgttcaggggcaattttgataaatatcagcagtggtttttatcgagcgggacggttgttcttaacgataagcctcttgagccagtggaattgccgagcataattcgcacggtatcgaatggtaggttttatacccttgtgggatgtcaggtgagtggttctgtgtctgcaggaaccggaactggaattgtcgttcctacatatgtggttttcggtactagcgaaacgaatttcgaaaaaatacatgcgatgcgttctaacattccaggtttgtcaccgtggtcgggagtttcctcgctctcgctttcttttggtgatggctcttcaaagaaaactgaagtgattgcggagccgcgcaatgagatcatgatcgatgagtcagtgggattgaagctgcggcctgattattccgtaagaacatctttgaaaagagatgaggttactgctcgacaaatggtttccatcgaaactagggcagatgaattgcagggttggacatggcatttgttctatcatcgctctttgttgaacctgcttactatttctgattgggttccaagaacgtttactaacttggaggttcttcggaacgaggattcctacgaattagataggaaaaaaagagaggtatggcaccctgttttgtcatatatgccgcgagttgactgttcccactttgagaatcctgagtctcagtatctctttcgcttttctgacatccgtgaagaaggaattcggaaatggcttgaactagtagatagatgtcaacaaggaatgactcttcttgcctacgtggcgaaggaacaggaacatcttgcccttgaaacgttgaatatgctggcggggaccatacttgactgcattggatggtacgttgttgagacaaagaatcagacagaacggatgatacgaaattctaaaaccggtgaaatacgttctgccggtttttaccaaatgcttgaggctgtgcaagaggaattaggagatgtctttccatttactgatccagaagattggagaaggaatatgagaaaggcattcgtcggaaataagcatggcgatgcggaaggcgtagatttccaaacaatgtatgacgtgacaatgcaatcattggtcattgcgcgaatgtgggtaggtctgcaattaggtgctgacgggaatacgttgaaggaacgtgtctcttctgatgaaatcggtaagagagttagtcggtttattgcatggtagtgtgccgagtcggaagctgttttgtagcatgcttctacggacatcaagtcaggcttcttgctttggagagaagtgcatctatattggacagatacaactaattgaagtatccaaagctttatagtatggtgatggcaattgtggccaataaaaagtccagtaaaactcttttcgaacaagtaatcatttaagagagggtaaagcaccatggacgctggcaagaaaatcctgctggacttattgaccggttcgctccggttcgtcgtgccggtgtatcagcgcagatactcatggggcgagatgcagtgccggcaattgtgggccgacatcgtaacggctggcaggcatcctgacagaacccatttcaccgggtcggtcgtgtggatgcaggaaggcggcatcggcccggatggtgtcagccggtgtctgctcatcgacggccagcagcgcctcgcctcggtgaccctgctgcttatcgccttggcagaatacgcccacgaacacccggagaacctgcgcttctccacagacatgatcatcgaccgcggttatcttgtcgacaagtatgcgactggcgaaggccgctgcaagctgacgctttccggcgacgaccgggacgtgctgcgcggcatgtgcgaccatgtgcttgcccttgaccggccgaatcatgggaaccaggccggaacaacgtcccggctggaaacgaaccttgatctgttccgctcacttgtcgccgcaatcgatgatgcgaacgtggtgtgggatggtctgcagcgtcttgaagtcgtgtccgtcaccctggaccaagggcgtgacgaaccgcaactggtattcgaatcaatgaattccaccgggcttgatctggagacttccgatttggtgcgcaattacatgctcatggggtgctccatggccgagcagaacgccctgtacgccgactactggctgcccatggagcgtgtgctcggcagtctctcattcgacgcgttcctgcatgactggatggtcgtcacgttgaagaggcccgtgtccaagaaccgatacatgtactcggaattcaaacgtttcgcagccgacagctccctgccgcgcatggaacgcacacgcgggcttctggagaacatgctggaatatgccgggtattatgccgccatcaaaggcatcgcgtctgccggcagcggcgacgcgaacgtggaccgccgtctcgcctcgatccaaaccctggacagcactgttacggatccgatgctcctgtacatgttcgcggcatggaagcatgaacgcataacccgggacgggctgcggcgcatgctcgcggatctcgaatcgtatctgttccgccgaatgatctgctcggtatccagcaacggactgaacaagctcgtcccgtcgttgatcgccaagctcgaatcagcggaagacgatccggccgaaaccttcgccgcgctgctcctcaccgaaaccgccaaagccacgcgcatgcccacggataaggaattcaggcaggcactgctcggcgagaatctgtaccgccctgcctcgcgctgcaaatatctgctcgccggattggaaaaccacaaccatcccaaggacccgcggtccttcgacgaatacaccgtcgaacacatcatgccacagaacgccatggcgcatgccgaatggcgcgatatgctctccgaccccggacgattcccgctgctggtgaacagtctgggcaatctgacattgaccgcatacaactcggaactttccgacggaacattcgaacagaagaagaaccgtgcgatcggcgggtatagtagcgaatacctgtccatttccgccgaactgcacgacgctacgcaatgggatgaacaggcgatcgcgcggcgcggcgtgcgacttgccgatcttgcattgcaggtgtggacaagccccacagcgggggaacaggctatgcagactctccgcagcaggaacttgagccaaggagagcgcgaacagaatgccgtcgatttcgccgacttatgcaagagagggatccttacagccggtgacatgttggaaagtcggtatgccggcgtaaccgccacggcaaccgtaaccgaagaccatcgcattcgcctgtccaacggcgagatattcgatagcccatccggcgcgttccgccgcgccagaatgctcgaaaccggcgagaacaagcagatcaacaacggttggacagtgtggaaagtcgcggacggcagaaccttggacgaactgcggcaagtcagcaacaatatctcactgcggcgcagcttctggaatggcctgtatagatatgctgcaacgcggcccgactttgttgctgtatacggcgacccatccggtcgcaagacgaacagcgacacatggatcagcttcggcgtaggctcggggttctgccacccggatggagcgttgaatattcgagacggctacattacggtcgacctgtatttcatcgacacgttccagtacacgaaactttacggcatgaaggattccgttgaacggatgctgtctgctttgggcgaggcgacttgggacgagccggaagccgacaagaagaaccgccaccttttggtacggcatgatgtggatttctccggcggtatgacggaagcctaccaatggatgacggacgggttgctcgccatgcgcagcgtgtacgatctgcttgtctgattgctcgatctgctacgtgttcagcactgtatagaatgagcataaccatccgaaaagaggccgccatgaaatacggaatgaggacacccagctggaagaagagcctgtccgcgcgcacgaaggggcttgccgcccgtgcggtcaagcgtgcgctgattcccggttacggcaagaagggcatgggctggctgcatcccaagcgcaagctgtacaacaccatctacaagaagaccacgttcagcctgttcgacctgttcaagtaaccggggctaaggggggggggaaaaatcacatgtgttccaatccagacacgtacgagttccgactttcattagaccttcctcaacagagcgccgttcctactgatacgttttctgccttgcgggaaatccatgaatattcagcggagaacggcccgcgtttccacacggctgctgagatgtttgattctctgggaatatgacaggtcccgccatgcgaacattgcgcatggcgggatctggttttgtcgctgttgagctgtcggacactcaggcgagcatgacctcgatgttgttgccttccggatcgtgcacgaaagcggcgtaataggtcggtccgtagttcgggcgcaggccgggctgtccaccaacttcgttcgtatcctcgttatcctcggcactttcgtcgtattcttcgctgaacgagtatcccagattgcgcgtcatcgcattctcgatcacgtcataggcccacatgcgtttgtcatcatatcgagcgaaagcgagtgtgctggaaatcaacagcatgctgttcagtggttcccattgccgcatgtccttgtcgttctcggcctgtgcaatggcgtccaacggcacgtagcgtttgagcagaccgtagacggagaaactggcggcgagcacgattgccatccacgggaacgtcggtgactgcgcagtgaacatgcccacgcccagcgccacgttgagcagaggcgtagtcaggtacgcgattgaggtctgcagcgcctggccgttgaccaccagatatatgtacagcaaccaattcacgctgatagccgtggcggcggcaagttccagcgcgaacagccttttgctccgctgtgcgcgtcaaagcgcggcgatcgcgcgatgatatgcgcgatagcggcggaacgccatcagcagcgcaatcatgaccaccagcgtggcgatcagccgatacgccagaacgctgatggcattcatgccggacagcgcgtgccagtacagcggcagcacgccccagccgatattggaaacgagcggcgcggcaatccccatccgcgtctgctcgacagcacgaaccgaagtcatacccgccaccatagtgcctgatgtgtcactgccgtgcgtgtgctcacacggcatttgttagaagcttttccgggaatcgaatacaaacccaatacggtccgattatctcagcaccgctcccgaatgaaatcgaagatcatatcgaacacctgcgggctccagaagtcgtgctcgtgttctgcgccgtcgaccagcaccagccgcgagtccacgccgtgttcgagaagcctcttgtgcatcttgaccgactgccggtaggggaccacggtgtcggcggtgccgtgcagcagcatcgttggcggataggccaccccgtcacgcacctgcaggtacgggctcatgtcggccgcccggcggcgcacgtcgtcgctcaatccggtttcatgggtcgccccgaccactgcggcgaacgggccgaaatagtacagccggaacgggtcatcctcgttgccgaacgcgtcgatcgcctccatcatgtcggtgggcgggaagcagctgaccacgaagctcaccgcgtcgctttcggtggcataactgccgtcttcataccgcgggtcgtcggcagtgagccccaccagcagagacgtgttgccgccggacgacgtgccccagatgcccagccgctcagggtcgacgtgccagcgccgcgcgttcgcccgcaggtaccggatcgccgccttgacatccttcagataggcagggaacacgccactggcgtcacgcgaggcgttgcgatggttcaccgtcgccaccacgaatccctctcgcgccagttcggatagctgcgggatctcgtaatcacggtccggtgtggtccacgcgctgccctgcacgaacaccacggtggggtaacggcggtcatcatcgtcgccggtggattgcggcgcgatgatgtccatcaccagatcatcggccccggtgcgatacgccacgttgcgggtgagccgggccaggccggtgagcgtgggattattcggtacgtggacggtttcgacggttcggtcttctgacggcgtgatattcggcatgaggcaatgttacagcgaatggttctcaataagaaaggcgcgagtccgttatgtgaggaaacgaacacggattacttcataagcccggtattttgccggtctctgaaatgttcgattgtgcggaaatgttcggaatcctcgcacttttcttattgagaacgattcgctgctacatccggaacgcagcgcgcgggtacgctaaactgtgtacagctcagaaactcaccccaaggagatgccatgaacccgagacgcgggccgatcgtcgcaggcgagaagatccaattcaccgaccgcaagggcaagaagatcaccgaccagctgaccgccggtggcgtcacccagaccgagcacgggatcattctgcacgacgacgtgataggccgcaccgagggcgtggtcgtcaccaccgtcaccgccaagcgcgaggctcaggtcaatgcggaccatcccgaacgcgacaagaacaagccgtggaaatcgtcgcgcgccatcggcggctgggagtatgcggtgatgcgcccgcgactggccgattatgtgctttcgatgccgcgcggcgcgcagatcatgtatccgaaggacatcgcccaggttgtccagctcggcgacatccgctccggcatgcgcgtgcttgagtccggtgccggctcgggcgcgatgagcgtgaatctgctggacgccgtgggcgagcgcggccatctgaccacgatcgagctgcgccccgaattcgccaaagtggctcaggccaacgccacg

SEQ ID NO: 1543 - DNA, 11454 bp, Unknown
  R221_24m  MAG No. k141_5195
gcctggttcctatcagcggtcatcgggcgtccccgttcccggcgacaacaccccccggatcatcgacgacagggcaggaaagtcataccggaaccggcgacccggccccgaccatcggggcctaccaaacatggtaatgggtatctcgcgtccttgggccccggcaggagtatcccgtcggggcccagtgcgttttgggcggcaacccgctgaatacccggtaagatgtctgaggtatcaacaaacaggtcaggaggtgacgcgcatggtggcgccaagccgtgatgaccgtagcgtagatgcattggtgaaatccaaggcagtacttgatgtattggcggaactgggaccaagcaccgcaaaaaccataagcgaacgtactggtgaacccgtaagctcaacgtatcgtttgctggataatctcgtcgcagtcggttgggtggaacggggcatcaatcgtggcgagtatcggcttggcatcgattgcgtacgtatcggcggccaaatcgaaagcagactggacattcagcagatcgctcgccgtaccttccgcgcccatcacggccagttcggcatctggggtctgttcgttcggaggcgattgcgcacggtgtgcatcgagacacgcacccgtgagacattgcaaagctatgcacagctggtgggcaatagcttgcctctgagcatgagcgctccctctcatgtactgacggcctggcttcccccggctcgctacgagcagctgttggaacactatgcctataccaacgagctcggcggcacattctccacgatgcgtgccacagcaatgggacaggctcgtcatatacgcgaatgcggcttcacctatgacgtcggccagaccatggccggctccgtgactatcagcgtaccggtattcaatcacgccggagagattcaagcggcaatcgccctgagtggcctttcccgctccttggaacctgagctggcctgtctggtagatgggcaaccggcaacggcatcggttcaagacatggtgcgattggtgcggactgccggccgtgaggtgtcgcgaggccttggatacagtggtgatcatcttggcctgaacagttgaatatgatgagtcagggataagtcaggggaaggaacgtcgacgatggcggaagacaaacgtgaaccgacccgcgctttagacaaggcgagtcgtgtgatggacgcattggcggcggagaatggcctgtcgccggcagatatcgccgacgcctgtgatatcccgcgatcctccgtataccgcgtgctggatggactggtcgatgtggggtgggccgtaacggatacggatggtaactactcattatcactggactggctgcgattggctgatgccgctcgcacgtctcgtaccgaatggcagcctgcgattgcggtcatgcatgccatcaccgcgcaaaccggcatgacctcattcctcagtgtggtctccggcactgaattggtatgcgtggaatgtgcgcaaggtcatgccatcgattcgctgatcctgcgcccgggccgcgtgctgcctctgcatgctggcgcggccggccgcgtggccttggcgtatttcgaggatgccgatgtcgaacgctatcttgcaggagtgccgtttccggcatataacgagaacacgctggtcagtgtggaacagttgcgcgaggatattcgcttgactcgcgaacgtggatatgcactgtcggatgaggatgtgacgttgggtgtcggtgccgtcggtgtaccgattgtggacaacgagtccggtcgcgtgatcgccagcctgtccgccggtggattcgtggacgaagtgttagccactcaagaatccttggccgcgttactgcgcgatggcgtacgcgaaattcaggcagcctgattcggcccgctaggctgtcgggctggacggttatgtccggtcagctatggcctttgccggctacggttctgctggttatgcttctgcccgactacgctgcggtccgttacgcttcggccacacgacccaacgcgatggcggtgatcagcacgtacgcctcgcgcgggtcggtggcatcccagccggtggattcggcggcgcgcttcaaacggtagcggatcgtattgggatgtacgttgagctccttggccgtggtctcgagcgaaccgccgaacttcaggaatgtggagacggtgagcagcgtcggatcatccgggcctgctgctgtcaggcttccgtagaccacgcggaccagttcgtcacgggcgtccgcgtcgccgatcaacgcacgttcgggcagggcgtcgtcggtgcgtaacgggcgcggcaatggctgcacggtggcggccagggccggcgcggcctgaagacagtagagcgtggcctgaatcgaacgcatcgcgccatcggcaccggtgcgctgtggacccaaggcgattggccgatcggcggcgaacgacggggcgatggtattgcagatgatttccggcgtggccgcaccgaccggacgaatcaacgccactacggcggtgctgttgccgatcgggcgcttggcggtcagacacacaccgccgaaatcggccacgattttctcgatttccttggccgtacgtgcggcggaccgggcagggtatccggcgatggtgtaacaatcgaagtcatgctcgaaaccgaggatggtgaacagggactccactcgttcgtcggccagatgattgaacaggcactcgaacagcacggtgcgtacgcggttggtcgcggtgatgccgggtgcggccgaatcggatgaatcgggcgcacccggcataccggatgcaccggacgaatcgacaacgtcggcagcaagaagttcgagaaaatctgacatagtcactagtgtagcgtcgctgattggcgttgcctttcagccaaagactctcgccaatacgtcagcaccacgaatccgaatacaaacgcaaccggcaacatgtgccgctcgaaattattggccggcgcggtaatcatcacgcccatcagcagtagcagcggaatatgggtcatgagggtgagccaacgtcggcgaatcacctcggccgcgccgatcagcaatgtcatcaccacgtagaaattgccgtgcgtaggccagccgagcacgggaatactgccccatacgcgagtgaagccggcgatgtgctcacgccagtcatggttgtaatccttgatccatgtggagtttttctgcacgtaatcgctggccacgtaataatccatcgatacgtacggctgatcgttcacattgaagtatccgaagcatttggccagcaacgcatccagcgcgatgatcggattgtccttgacgatttcgaaccatgccttgttgaaattggtcatatcctcgggcgtcaccgtgcgccacttgtagctgaccttcttggcctgaataccggaggatttcaccgggtcggcatcctgctgggagtaagcgtcggccatctgatcgagattgaagacgggcgcgaggttctttttggcttcgtctgaaataccgtccggattgcgctgagccacgcgggcgatcatttgcagctgtacgccgcggctttcgattggatcgccgccgatgatcgcaccagaggagatggcgaaggagatgccgccgtgaatcagtacggtggggatgagcagcgccacgacgtaagtcgcccagcgtttgcggtcggcgatcagagccagcacgatttgcagagcgatgatgtaccacgcatatttcgcggaaatcagcatcaccgacgtggccaggatgaaggcgatgaagctgtggcacggcaagtggacgggcgtggcgatggcaggggtctgaggatgtttgcgggtgccggcggggtgccaggtctggacgagttcataccagacgctgaaccaccagacgaacgagaacgcgaacagcggcgatttggtgatggagatagtggaaaacacggccagcgggcagaccatgaagaacagcagaatcaggaatctggccaatcctccggcctgtgggggaacggcggaatccgttgccgtttttcctatccaaggtcggttcaggaatcgattggcggcggcagcgcagcagaacacggcgaacagcgtctgcagggcagccaacgtcacgatgccggcatcgtttgagccggtcagatgcctcgcaaacgtgactatcgcgccatagaacacagtgagtaccacattgtgctggtcggtcagatacgtgggatcggacggccacatgtagtgcgcggtggggtagatgtccatcggcacgaaggagaagaagccgatatagggctgtttcaggccggtccactggttccaagcccagctgaattcgcggatctgtgagcggaggtccgcgccgaatgcggccagcagagtggtcggcacccagagccagccgacaaaaaacaccagcataagcttccagaaccggttcgtgccgcgtgtgatccagcggtccagaacagtgacggtggacgtgacgatagcgcgaacggtacgacgggtcttggctggttggctggcctgctgatcggcggcgggccgtgatgtttcgctattctgctgatggtggcgtaggcgctcgccgatggtcttcggcagtatgcgctggcctgctgcgaatcgcgccatcagcgtgatgattccgagatatatcaggaacgacacgacgaatattgcgatattggcccagttccaatgggcgagggtgccgttctcctcgtcccggtacagcgggccgaccgccgagcacagtgcaagccacaggcaggccagcacggccagtgtccagcgcgcggcagcgcccacgcgcgcaagatgcgggtgggactggcggctggatacggcggcaagcttcgcggtggctggtgacgtcatgacaatatatggtagccgcacaggtcaacggttgatattcgatgtctgccgggcatcgccattgttcgcaagccaatacgacggccgggtgcatgcgtgggctcggcgaatgcggaatttccgaagttgtgaacgctaacacgggctgtccggcccaaaatggttgattttgtgcgcttttccgtggaatatcgcgggcaaaaaacggcgcaaccgaggtaacgtagtgtccatgatgattgcattgaaagctgcaacgccgcagctacccagaactacagccgtcgcggatcatgtggtcgccgtggacgaaaccgattcgaccaacgcgctggccgcgcagatgatcggcgacgggtcgttgacgctgcccgaccaccaggatggcgaactggcggtggccgtggtggccgccgaccggcagaccgccggccgtggccgcaatggtcacaagtggatcagtcagcccggccgttgctcgacgatgtcctatgccgtgcgcattccgcgcgcgatcgccaccgacgaatccgtcaatggctggctgcagatgatcgccggactggtcacgctggacgccctgaacggcatgatcgaggaatacggtgccgcgccgaaccagccggactgcttgctggaactcaaatggccgaacgacgtgttctgccacgggctcaagctgggcgggctgctctcggaactggtgattccgccgtcgtccggtactgatgctgatgccgatgacgacgtcgtcatcgtgttcggcgtaggcctgaatctggcgctgggtgcctgttggctgcccacgccgcagtcgacttcgctgcagctgcatgtcacgggcttgccgtcgtttggcgagatgcgcgatgcggtggccgaacgtcaggtcgagggcttccgtgaacgactggcgaagttcatcgccgacccgaagggccaggccgagtcgttgcgcgaggaaatgaaggcggtgtgctgggcgcgcggccgtcaggtcgaggcgcatttcacggacggcaccacgctgaccggcgaagccatcggcctcaacgaagacgcctcactgatcctgagaacacaagacggcacggaccatacggtccgcaccgccgatgtgggagtgctgtaatagccggccagtagctagctagtagctcaggtcagcgaccgagcttggacaggccggcggcggccagagaggccaccacggccttgatggcgtcgccgacgacgaagcccatggaggccagggccacggcggcgagcggcgcaccggtcaacgcggactggatgatgaagccgaaggcgtacaccaccacgacgccgccgaccagcgcggccagcaggtagcggcccgcggtgcgcgcggcggccgcgaaggacgaagtgtcggacttgccgcgcagcagggcgatgaccaccacacccggcaggaagccgaagaggaagccggcgctcgggccgaccagggccagcgtggaggtgccgccggcgaacaccggcaggccgaccgcaccggccgccagataggtggcgacggcggcaccggcctgacgccacggcagcatgagaccggcgagcatcaccacgaacgtctgcagcgtgatcggcaccggcgtgcccggaatcggaatctcgccggcggccgcggacagccacatcagcacggcgaacagcaccggcttccaggatgcggcgacgatacgacgggcgagcggcgtggtggccgctgcggatgcggtggtgtgtgaagtctgcatatcaataacccctatgttgtgtgatatcgccgtgaacggcgggcggtatgcgatggatgaggggaggttccggcgggccgtgcggtatccccgacagcccgaaccgtccatatggtggacggttccaaatgaatccggccctgtgcgggcgaatcgtgcggcgatggaccgatgccggtccggtcgccttccgttcgcccgcagatgagccttcccccgaacttacggttgccatcgtagaggtgttcgatttcgtgcggtttcgtaccaacttacaaaattgtcgatttcgatttgtcataagttgacgaacgcaaccgtaacgtcaacttcttgaaccggcgcgcaaggatgtgcaatcggcggatttgcaacgtttttgatagccggcgccaacggttacgttgccggaacctacgcgcgcgtttgttcgtagcctacaaaagggcgtgaaagcttttgtgcgaacgcggcttgccctctcctctatatggagagcacaatttgacactatggctcatactgtcaaaaaactgctgattgcgaaccgaggtgagatcgctctgcgcgtggtgcgcacggccaaggagatgggtatctccaccgtggccgtctactccgaacaagaccgcaatagccgctatgtggacatggccgacgaggcatacctgctctccggcgacacctacaaggacacgtacctcaacgaggatctgctgatcgacatcctgcacaaaaccggtgcggacgccgtgcaccccggctacggattcctttccgaagtgccgagcttcgcgcagaaggtcgaggatgccggtgccatctgggtgggtccgcaccacaccgcgctggtggatttgggcgacaagatcaccgcccgccgagtggccttgcgcgccaaagtgccgccggtgcctggcctgtccgaaccggtgaccgacgtgcgaacgctgctcgacttcgcacacacccacggctacccgatcatgatgaagcgcactgatggcggtggcggccacggcatcaccgtggtgcatgacgacgaggagctgcgccgcttctacatgaaccacgacgcgctgcaaggcggcgatctgaaggaatacttcatcgagaagttcgtggacaaggcacgccacgtcgagacccagtccgggcgcgactcgcacggcaacttcaccgtgtactccacccgtgactgctcgctgcagcgccgcaaccagaaactcgtggaagaggcgcccgcgcccttcctgtccgaggaaatcgtcagcacgctggaggaatactcccgccgcctgttcaccacggtcggctacgtgggcctgggcacctgcgaattcatggtgaccccgaacggcaaagtgtacttcctggaagtcaacccgcgtctgcaggtggagcacaccgtctccgaagaggtcagcggcctcgacctggtgcgcgaacagctcaatatcgccgccggtggcgagctcacccgcgcccccgaaccgcgcggccacagcttcgaactgcgcatcaccagcgaagacccggccaccaacctgacccccggctccggcaccttggagaagatccagtggccggccggccccggcgtgcgcatcgataccggtgtggaacagggcgacaccatctccccgaagttcgattcgatgatgggcaaggtcatcgtcactgcccagaaccgtctcgatgccgtggcccgtgtgcgccgcgtgctcgacgagctcgtgatcgaaggcgtgcccacgccgattccgctgttcaaggagatcttccgcaacgacgacttcaccgccgagcatggccatccgttcgccgtgtccaccaagtggctggagcgcacgtacctgaaccgcacgccggcttccgccgcctccggccagccggcctccttggccaccgccccgggtgccgctgccccggccgcgcccgacaagtccaagtcggagacgttcgtcatcgagatgaacaaccgccgcgtcaagctcaccgtgccactcgacatcgtggagaacatcaccggctcggcccgcgcccgcggtgccaagcgccccacccagccgttgcgcggcgcaggcttgcacaacgtggcctccggtaccgccacggccaacgacggtgccaaatccggcgtcatcgcctccccgatgcaggccgtggtcacgcgcatcaacgtgtccgaaggccagcaagtggccaagggcgaccttctggtggtgctcgaatccatgaagatggagaactacgtgtacgcgccggccgccggcgaagtgaagaagattttcgttggcccggccgatggcgtggaggccggcgacacgctggtcacgctggacgtgaacgccggcaaggccaaggccgccgacgccaagaaggagggcggcaatgactgacatcatggattcgccggccgtgaaggccgcggctgcggcctcggccgccaacgccgcccagccctcggcccaccagccgctgcgcaccgccgtggtcaaggccgccgaactggcccgcgccgccgaagagcgcgcccgcgacaagcagcacgctaaaggcaagaaaaccgcgcgcgaacgcctcgacctgctcttcgacaccggcacgttcgaggagatcggccgcttccagggcggcaacatcgccggcggcaacgccggtgcagctgtcatcaccggcttcggccaggtctacggccgcaaagtggccgtctacgcccaggacttctccgtcaagggcggcaccctcggcaccgccgaaggcgagaagatctgccgactgatggacatggctatcgacctcaaagtgccgatcgtggccatcgtggactccggcggcgcccgcatacaggagggcgtggccgctctgacccagtacggccgcatcttccgcaagacttgcgaggccagcggcttcgtgccccagctgagcctgattctcggcccctgcgccggcggtgccgtctactgcccggccctgacggacctcatcatcatgacccgtgagaactcgaacatgttcgtcaccgggccggacgtggtcaaggcctcgaccggcgagaccatctccatggccgaccttggtggcggcgaagtgcataaccgggtgtccggcgtggcccactacctcggcgaggacgaatccgacgccatcgactatgcgcgcaccgtgctcgcctacctgccgtccaacagcgaaagcaagccgccggtctacgcctacgccgtcacccgcgccgaacgcgagaccgccaagcgactcgccaccatcgtgcccgccaacgaacgtcagccctacgacatgctcgaagtgattcgttgcatcgtcgattacggcgaattcgtgcaggtgcaggaactgttcggcgcctccgcgctcgtcggcttcgcctgcatcgacggcaagccggtcggcatcgtggcgaaccagccgaacgtgctcgccggcatcctggacgtcgactcgtccgagaaggtcgcccgattcgtacgcctgtgcgacgcgttcaacctgcccgtggtcaccctcgtggatgtgcccggctacaagcccggctccgaccaggaacacgccggcatcatccgccgcggcgccaaggtgatctacgcctacgccaacgcgcaagtgccgatggtgaccgtggtgttgcgcaaggcgttcggcggcgcgtacatcgtgatgggctccaaagccatcggcgcggacctgaacttcgcgtggccctcctcccagatcgcggtgctcggcgcggccggcgcggtgaacatcatccaccgccacgacctggccaaggccaaagcctccgggcaggacgtcgatgcgctgcgggccaagtacatcaaggagtacgagaccagcaccgtcaacgcgaacctgtcgctggaaatcgggcagatcgacggcatgatcgaccccgaacagacccgtgaggtgatcgtcgaatcgctggccacgctcgccaccaagcggcgcgtcaagcgcaccaccaaacaccacggcaaccagcccctctgatttctgaagacatcaaccaaacacaagtaaggaaagcaatgaccaccttcttcctcaatcgcctggccaccgagccccatgcgctcgccttcgccggccagtccaccccgtggccggtagccctggcagaccagaccaccgatcccagccttgacgaggccctgcgcggccacatcgccgcagccaaccgactgctcaccccggtcgccgccgacctgctgaccaccaccggccgtccggtcgacctgttcggcttcactccgaacccggcccgcctcggcgccgcagccgacgccaccgcgtccgtggaaggcgtgacactgacccagctcggcgccctgctcgacctcgaacacctcggctacagcgtggcccaggccaagccgctcgccgtgctcggccactcccagggcgtgctcgccgtgcacatggcccgcgccatcgaggccgccggctccatcgaggccgccggcaagaccctcgacgagattctggccgtcgccgccctgatcggtgcagccggcactcgccgcgtgcgcgaactgggcctgaaccccaagtatggcgaagccagtccgatgctctccgtcaagggcgccacccgcgaacaggttgaggctctggtcaagcgcgtgaacaacgcccgaggcccgatctccatcgccgtcaccaactccgacaaccaccacgtgctttccggctacccggaagacctggcagcactcgccctcgaagccgagcgcgagcacaagcaccaggccaagctgcgtgaacagaagctcc

SEQ ID NO: 1544 - DNA, 2550 bp, Unknown
  R221_24m  MAG No. k141_9152
ctgatcagctacctgcaggcatacgtgcagatcctcgtcatgaccgagggcggcccgggcacctccacctacaccatcagctacctcatcttcgatcaggcgttccagaagtacaacttcggcgtcgcctccgcgcaggccgtcgtgctcttcctgttcaccggcgtactgacgctcatcatgttcaaggtttcgggagatacggatctgtcatgaacaagaaacgcaacatcgtcggttggatcctgaccgcactacttttcgtcgtcgccttcatcaccgtcgtcccgttcatctggatgctgatctcgtcgttcgccccgaacagcgagatcgtcaaggtgaccggcggcctgttccccacgccgtccagcgtcgagaactacgtgaacatccaggagaaattcaactttctgcgactgtttgccaactcgctgttcgtggccggtctcaaaaccgtcatcgcgatctacaccagcgccgtgctcggattcgtgttctccaagatgcatttccgcggccgcgacctactgttcggcgtggtgatgagcaccatgatgatcccgtgggccgtgaccatcatcccgcagtatgagatgttcaccaactggggtctgcaggatacatactcatcgcttgtgatccccggcctgatcagcgccttcggcatcttcctgttccgccagtccatcggcggcatctccgacgagctgatagaggcggccaaactcgacggtgcatccgacacgcgcattttccacagcatcatcctgccgatgagccacaacaccatcgccgcgctcgccatctttacgttcctgtggaactgggaggactacctgtggccgttcctgatggtcaccgacgagaacaagcagctgctcgccgtcggactgaaggcgttcaacggccagtacggcactgattacggcggcctgttcgccgcgacctcgctggcgatcgtcccggtgatcgtggtctacatgatcttccagaagcagttcatcgccggcatcgccaccggctccggcaagtagccggagcagcctgagacggcctgccgggccggttgggccatcggcctgagacggccccggtctgaatcggcctgagccggctgccggccgggcacgcgttgcggcttcccaccctgaccgggaggccgcaaccacataccatgcaccatagttgaatacagcacaacgcactttctcgcgaagggggagaaccatggcaaagtcgcctgatccgaaagatttcacagtggatgcccgtcccgtcatgcgcggggagaacgtggtggccggcgattgctggcgcatcgggctgatcaccgattcgctcgtacgcttcgaatggtccgatgacggcacgttcgaggatcgtcccacgcagacggtgctcaaccgcgatttcggggaggtggtgtcatacgccgtcaccgaacgtgacggccgcgtcatcatcgacaccgcggccctgaccatcgtctacgaccagcagccgttcagcaaggaaggcctgagcgtggtcgtcaaaggcgtggccgacacccagttcaacacctggcactacggcgacgcccagcgcggcaacctcagaggcaccgcccgcacgctggacgaagcggacggcgccatcgagctcggcgacggcgtgatctcgcgcgacggctgggccgtcatcgacgattccgccgccaacatcatcatcgaaaccgacacagtgaacggcaaggcgaacccgttcggcacctgggtatccccgcgcgccaccgccgaaacggacttgtacttcttcggctatggccaccgctacatcgaggccgtacgcgacttctatcgcctgaccggccccacgccgctcctgccgcgcttcgccatgggcaactggtggagccgctactaccggtacacgcaggacggctatctggccctgatggaccgcttcaagcgcgagggcatcccgttcaccacctccgtgatcgacatggactggcatcgcgtggacgacgtggacccgaagtacggttccggctggaccggctactcgtggaaccgcgaactgttccccgacccgccggccttcctcgccgacctgcaccggcgcggcctgcgcactacactgaacgtccacccgcgcgacggcgtgcgcgcgttcgaggacgcctaccccgaagttgccaagcgcgtcggcatcgacccggccaccgaggagaacgtggaattcgacctcaccagcccggacttcgtggacgcctatttcgacatgcaccaccgcatggaggccgaaggcgtcgacttctggtggctggactggcagcagggcggcgtgacccgccagaagggtctcgacccgctgtggatgctcaaccacatgcactacctcgactcagggcgcggcggcaactggccgctcaccttctcccggtacgccggccctggctcccaccgctacccggtcggcttctccggagacacgatcgtgacctgggaatcgctcgccttccagccgcagttcaccgccaccgcttccaacatcgggtatggc

SEQ ID NO: 1545 - DNA, 21028 bp, Unknown
  R221_24m  MAG No. k141_9610
cagtaaaggaggaacaatgggtcagggtcaatcatccgtttttgatctcgcggcagtggctgcggcgtccaatggggggaacaacgacccgctgctgcctccggcacgattcatcggcgatccgcagaagccgagtcgtatgccgtataacaagtacgccgcctacgacaagcagatcccgtttgattacccggagcgcacgtggccgggcaagcgactgcagcgcgcgccgcgctggtgctccgtcgatcttcgcgacggcaatcaggccctcgtcaacccgatggattccgagcgcaagctgcgtttctggaacctgctcgtctccatgggattcaaggagatcgaggtgggcttcccgtccgcttccgaaaccgatttcgacttcatccgtatgctcatcgagcgtgagctgattccggacgacgtgaccatcgtggtgctcacccagtgccgcgagcacctcatccgccgtacttacgaggcgctcaagggtgccaagcgcgccatcgtgcacttctacaactccgtgtctgtgctgcagcgcgaggtcgtgttccgcaagaacaaggaagagatcaagaagctcgccaccgacgccgccgaactgtgcaaggacctcgagaacgaggccaagggcatcgacctgtactacgagtactcgccggaatccttcaccggcaccgagccggagtacgccgtcgaggtgtgcaacgccgtgatcggtgttatcaagccgactcccgagcacccgatgatcatcaacctgcccgccaccgtggaaatgaccacgccgaacgtgttcgccgacgaagtggagtacgtctccacccacctcgacgaccgtgactccgtagtgctctccctccacccgcacaacgacgaaggcatgggcgtggccgccaccgagctggccgtgctggccggcgccgaccgtgtggaaggctgcctgctgggcaacggcgagcgtaccggcaacgtcgacttggtcacgctgggcctcaactggctcacccaaggcatcgacccgcagattgacctgtccaacgtgcccgagatccgcaagacggttgagtactgcaaccagatcaagatctccgagcgtcacccgtacgccggcaacttcgtgttcaccgcgttctccggctcgcatcaggatgccatcaagaagggtctcgaggctcgtcaggtggccgccgagcgcgctggcgccgatctcgacagcttcgtgtggcttgtgccgtacctgccgatcgacccgaaggacatcggccgcacgtacgaggccatcattcgcgtcaactcgcagtccggcaagggcggcatggcctacctgctcaagaccaaccacaatcttgacctgcccaagcgtctgcagattgaattcgacaagatcgtgcaggactacgctgacacgaccaagaaggaagtcaaggacgaggatatctggcgtctgttcaaggacgagtacctgccgatcgaacagtccggcatgaccgccgccggtgtggttgtgggcgatactcatgacgcctcgctcgcaccgtggggccgcttgaagctgctcaaggtggccgtcagctccggtgaggatggctccgataccgtgctcaaggctcgcctgctcgaccgcggcgtgaacgtcggggtcgatgcgcccgtggagcgcgaggtctccggcatcggcaacggtccgatcgccgccttcctcaacgccatttccaactttggcgttgacgcctcgattatggattacgtggagcacaccatgtccgtcggcaccgacgccatggccgcctcgtacgtggaatgccaggtcggcgaggccgatgatgcgcagatcgtgtggggcgtcggcatcgattcgtcgatcaccaccagcgctctgaagtcgattatctctgccatcaaccgttcccagcgcaagcgctgagcgctaacaacaaaacaaagctccctctgattgcatcagagggagctttgttgtctgtgcttacttactactgggtgacgccgttggtgccggtgttcccgccggtgcctccggaattaccattatcgttgccggtattgttcccgttgctcccgccggtattgccgggattgttgccattgttgccattgttgccattgttgccatctccgccggtagtggtgccgggataattcggacactcggtggaatagctcggattggcgaggcactgctgggcgaactcctgggcctgctgttgcttcttggcttcctcttcggccgccttctgctgtgcgtcctgctcagcctgcttctgcgcgtcttcggtggactgcttgttggtgttgttggacaggccgctgctctgtcccttgcccaagccccaagtgccgtcgggtccaccgatcttgccattgtctttagcggccgggaactgctccacctcggtaccttgcaaggcctgagccatgaactcctggaacaggtgggcggggtatccagtggaagagatgccgtatccggagaaggccggcaccgcctgcggattgcccttatcgtccgggttccagatagcccacacattcatcatgctgggggtgtatcccacgaacgacgaagccatttcgtcgttggcggtaccggacttgccggcgatgggtcggcccagcatgttggatgtgccggccgccgtaccgtacgtggtggtgccctgcatggccttctgcaccaaagcgcagtcgttggcatcgaacaccttggtgcctttgctgggcgcgttgtacatgtccttattgttggaatcaagcactttggacaccatgtgcaaggtgctcttcacaccattgttggcgatggtcgaatggccttgcgccaaatcccacacggtcagggcgttgatgcccagcacgttgtacatggagttttcatcgatatcgccctgaatgcccgcttcatgggcgattgcggccgtgcgcttcggcgtcagatgctcattgacgttcatgaacaccgtgttcaccgagttggcggtggcctgatacagattgatgttgccccagttgttctccagagcgttattcacctcttgatccaagccggtgaagtgctggtgggaattgccgttgaacaacgtatcgaagctgacgccggattgcgcggcccccagcaaagcgaacggcttcatagtcgaacccggttcgaatacggcctgatcggcattgttgagctgcttggacagataatctgaaccggcgtatacggacaatacttcaccggtcttcgggtccagcgctatgccgccgatttgcagggattcaggcatgtcgtccagacgggtgtcgccgatggactgcataaggtcctgcttgctcttgtcgatggtggtgatgatcttgtatccgccggtatccaaatcctctttggtaaaggccttggactgcaccagctcacggcgcaccatatccagcagataaccgttcggccccgcgtattcgttttgctgcgccaccgcggcagtctgcgggaacttggcatcagtgtgctgcttggcagtgatgtaaccatcctcctgcatgatgttcagcacacgcttgaagcgcgatttggccatatcggcgttatcggccggatcccacgtggacggtgacggaataatgccggcgatcatcgccgcttcagacagcgtcagatccttggcgtccttattgaagtatgccttggccgctgcctggatgccgtaggagttgcggcccagatagatggtgttcatgtaattgcacagcacctcgtccttggactcggtttgcgcgattttgatggccacgatggcctcgcgcgccttgcccacataggatgtggtttcgcccatgtaataccgctcggcatactgctgggtgatggtggaaccaccttggcgcgtgcccttggtcacattattaatgaatgcgcgggcgatgcccctcagatcaagacctttatccgtgtagaacgtacggttttcggacgccacaatcgcgttgccgatgtagtccggcagcccctcgcaagagatgattgaacgattctgttccgcgtaggagccgatcgcggtggtgccgtccgcgtaatacacggtggttttctcggccaacgcgaacttttcgggttgcgggacctcggtggtggtgtacaggtatgcgaatactgcgataccggccagcaagcccagtccaatcagggagaagaagatgcccagcacccatttcagtacacggtgcttgccttttcctgtgttctttttcttcctgttcggggctcgatggctattggaagccttgtggcttgcgtggcgggaacggctctcctggggcgtataggggccctcctgtgcggagtggtcggctctgctttgcgcggtgcgcggttgcctcagagcggggccattgcctcccgaatgtgcacgacgagtataagaagccatggtgtccaccgtaactgttggccttgaacaatcgtttgacgtgagcgtaaccacacgcatttatgccggtatttttccggaattcttacaattgggcacgttccttgatgctgcatgaatattgcctgaatgcgctggttggcctgccgtgcgacccggcgcgcacgtttcgtgtcgctgcgctggtccatacgtctccatagacttatccccagcctccacgcggcgctatgtcacccaactcccccagggcaggaatgcagcaagggtaagtggcctctgacgggtgcgtggaggttttccatttgtgcggatttggccgtgagctggcacgagcacggctccctgtccggggcgcggccgtacagtcgaacgtatgaatgacgcacagacccctagaattcgcgacccgcatgcggcggtcaatctggtcggctcaggcgcagcgcagcctgactcgtcgtcgaacgttgttgacccattggctgcgctcggcccggtctccggttcagatgcatcggcatccacatcaggctccttaggggatttcaggccgctgggcatggacgatgcggatggggcatctgatatcgaccgtggcttggcccggcttgacccgctcaccgtgcgcccgcgaatctccagccgcgtactgtgcgtggtattcggtctgctcctgatcgctgtcggcttcggcgtgtggtgggggtgcgtgtttaccgaaaacggacaatcgtacgacgaactggtctggaaaaacctgcacaacgatgtaccgtcctggaccaccggcatgatgaacgccgtcgcacaatcctggctggttatcgctgtcagctgcacaattgccgcaatcggcattattacggcgctgattcgacgccgctggtggttggccgggcaaatcgccgtgttcgccgtggtctgcttggccgtcacccgtatcaagggtctgttgccgcgtccgttcatcatcaacactgaatcgcctgccgctaattccgcgccttccggacacacgatgctggccgcagcctgtgcggtgattctgctgcttaccgtgcctcgcgcggttcgagctttggcgggcgtcatcggcgtggtttgggcggcgaccgtcggtgtctctgtgatatacgggcaatggcatcgcccttcggatgtggcgatgtccatcctgctggtggcgggattggccctgctcgctctggcggttacacgcaagtccggcatggacgagccgggccaccgcgtctcctcagtgagtgtgcagatcgtcggcagcgtgctgattaccgggggcctgctgttgctcgcctacagcggttatgcgatctggcaggtggtgccggggctcaatgtcagcgccagttgggcggttcagggggcgaatgtcagcgctgttgtgggcattacgggtgtggccatgctcgcattcggactgttgctggccctacgtcagatcactgcagcgcccttaagcaggctgggcctgatcggcgctccgccggcaccgcccaaacggtaaaacatgaggtgcgaacggccgaatttgcccggcacaacggcggaatttggcagttggatatgattcatgagtattatgacgccagaaacgtcgtgtgtttcgcgcaatacataaggagtgggtatggctaccaaactggtgattgtggagtctccgaccaaggcccacaagatcggtgactacctgggcaaggggtacaccgtcatggcgtcggtcggtcatatccgcgacctcgcgcagcccagccaggtgcccgcggcagacaaggccaagttcggcaagttcggcgtggacgtcaacgacgggttcaagccgtattacatcgtcgacggcgacaagaagcgtacggtcagcgaactcaaatcggccctgaagaacgccgacgaactctatctggcgactgatgaggatcgcgagggcgaggccatcgcgtggcacttggtgcagaccttgaaacccaaggtgccggtcaagcgcatggtgttccacgagatcaccaagaacgccatcaacgcctccctgaacaacacgcgcgacgtggacggcaatatggtcgacgcacaggagacccgccgcatcctcgaccgtctgtacggctatgagctgtcgccggtgctgtggcgcaaggtgggcccgggcctgtccgccggccgcgtgcagtccgtggccacccgcctgatcgtggaacgcgaacgcgaacgcatggcattcaagcgtgtgccgtactgggatatcgtcgccatgttggccgcgcctgacgcgctgggggagcgtgccgaattctccgcccgcatgatcgcgctcggcggcaagcgactcgccggctccaaggatttcggtgccgacggccagctgaccccggacgggttcgcggcgaacgttcgccagcttgatgaggctggtgccactgccgtggctgaagcgctgaggaccgccgatttcactgtgatgtcgatggaaaccaagccgtaccgccgccgcccgcagccgccgttcaccacctcgaccttgcagcagaccgccggcaatcgcctcggcatgggtgctcgcgtcgtgatgcgcgcggcccaaagcctgtacgagaacggctacatcacctatatgcgaaccgattcggtgacgctgtcgcaggaggccatcaccgccgcccgcaacgccgtctcctaccatttcggcgacaagttcctctccgccgagcccaagcagtacgccaccaaaaccgctggcgcgcaggaagcccacgagtgtattcgcccggcgggctcgcgcttccacgacccggatgagctggcttccaaacttcccggcgaccagctgcgcctatacacgctgatctggcagcgcacgctcgcctgccagatggctgacgccaccggctccaccgccaccgtgcgcctgtctgcgccggccggccccaccgagggcgaggccgtgttccaagcgtccggcaccgtcatcgaattccccggctttatgaaggccacgggggaggggcgcaagcccaaagccgccgctcccggcgctggggctggctcggaccaggctgctgccgccggcaagacggacgtcaaggccgtcaggggtgacgcctccgaatccaacacctccctgccgccgatgagcgtcggccaacaggtcgaggcaagcgacatcgaaccggacggccatgaaacccagccgccggcccgctacaccgaggccacgctggtcaagacgctggaggccaaggagatcggccgcccgtccacctacgcgagcatcatctccacgattatggatcgcggctatgtgtatgagcgtggccgtgcgctgatccccagctggctcgccttctccgtgaccaagttgctcgagacgaacttccccaagctggtcgactaccagttcaccgccgagatggaaaacggccttgaccgcatcgcccacggcgaggaatccggccgcgactggctcacccacttctacttcggttccggcgagggcgccgcccgcaacgccgacgaggcgcacgaaggcctgcaacagcaggtcgcgcagctcggcgagatcgacgcgcgcgccatcaacaccatcgacatcggcgacggcctgcacgtgcgcgtcggccgttacggcccgtatctggaagacatggagcatctggacgtcgaaggcaacccgaagcgcgcgtctctgccggacaccatcgcgccggatgagctgacggtggccgtggcccgcgatttgatcgacaaccactccggtggaccgcgcgagctgggcgttgacccggtatccggcggtaccgtcgaggtgcgcaatgggcgtttcggcccgtatgtggcgctggtgccgccggctgaggcttcggctggcgctgctggcgatactgctggtgcttctgcggccaagaagggttcgaagaaggccgcggccgccgccgcgtcgcgcccgaagatggcctcgttgttcaagacgatgagccctgaatcgctgtcgctggaagacgcgctaaagctgctgagcctgccgcgcgaagtgggcacatacgaggaaaccaacgccgaaaccggcgaggtatccgaatgcacggtggccgccaacaacggtcgctacggcccctatctgaccaagacgggtgccgacggcaagtcggagacccgctcgctggcctcggaagacgagatcttcacggtcgataccgacaaggccaaagaactgttctcgcagcctaagtacggccgcgggcgtggccgtggtgccgccaagccgccgctgcgtgatttgggcaaggacccgaacaccggcaagaacgtgaccatcaaggacggccgtttcggcgcgtacatcaccgatggcgagaccaaccgcacggtgccgcgtcagtacacgcctgaatccatcacccctgatgacgccttccgactgctcgccgaaaagcgtgcggctggtccctccacccgtggccgtcgcggtgctgggcgtgccggtgccgcgaagtcgggagccaagggagccaagaagggcgctgcttcggctgcgaccaatgccgccgaggccaagcgcgccggacgccgtgccgaggtgaagaagctggcaaacaagggctggtccaaccagcgcatcgccgaaaagctcagctccaccgccgccaccgtcaagaaggatgtcgactggctgaccgccaacgagggctacgagcgccccgccgtaattcccaagcgtggctgagcggaattattgctctacttgcgtttcaaggggctgatttctcgttttgagaatatctacttccgcttcaaggggctggtcatctgctgaaccacgagtatgaacggctccgcgccaacgtcattccgccgttttgggacgttgtctacttgggtaacagcccctcgaaacggaagtagaccttcagaaaagaccaaatcagccccttgaaacggaggtagagctggtttaactgcctgttgggcgcaactctgcgcctaacgctaaggtcaatagcatgagcggtctgtttgtttcgtttgaaggtgtcgatggcgtgggcaagaccacgcaagtcgagcggctgcgtgcgtatcttgaggctcaggggcgtaccgtggtcgttacccgtgagccgggaggcactgcgctaggcaaggccattcgccaactgctgttgcacggtgtggatgggggcgccgtcgacatcgcaccgcgcgccgaggcgctgctattcgctgcagaccgagcccagcacgttgccgaaaccatccgcccggcattggagcgcggtgaagtggtgatcaccgaccgctatttagactcttccttggcttatcaggccggtggccgcgaacttacgccagaagagattcgagccttaagcatgtgggccaccaacaacctgctgcccgaccgcacatatctgctggatatggatccggcgctttcccacaatcgtcttgagcatgccgaagatcgcatggagtcggccggcagcgacttccagtcccgcacccgtcaggcgttcctcgacttggccgtggccgagccgaatcgtttccacgtgatcgatgccagccagtccatcgaacaggtgtggtccgccatcgaagcggacattcagacactgctgcgggacaatgttgcagatgtggatacggtgatggcgcgatccggggcgtctacaggagccgtgacgatgggcggtgtccgatgagcgtatgggattcactagtcggccagcagccggtaatcgacatgctcagtcgcatcgcgcagggcgacccgggtcagatcacccagtcgtggctgatttgcgggcctcccggctccggccgttccaatatggcccgagcattcgcggcggcgctggaaagccccgaccacggcatgaacgatgagcccacgcgcgtcacccaacaggtgctcgctggcacccacccggatgtcacagtgctggccaccaacaaagtgaccatcggcatcgaccaggtgcgcgagatcatcaccgcctccgagcaaatgcctgccacggcaccatggcgcatcatcatcatcgaggatgtggaccgcatgctggagcgcaccaccaacgtgctgctgaaggagatcgaggagccggctgaacactgcatctggctgctgtgtgcgccgagtgcccaggatgtactgcccaccatccgctcgcgcacgcgcatcgtgaacctcgccgtgccctccacccaggcggtggccggattcctgacctccaccaccaatgtcgagccaaaagtggcgcagcgtgcggcccgtctggccgagggacacatcggcatcgccaagttgtacgccactgacgagcaggtgatgacggatcgcgacgaattggtggtgggcgtactgaacctcgctcgcgcctcggacgcggtgctgctggccggcagccttatcgacaatgccaaggcccaggccgaggcggacgcaagccgcatcaccgccggccaggaagcggaattccgccgcatcaacggactggcaccgaacgaccgcatcccgccgaaactgcgtggcgcgttcaaccagatcgccaagaaagacgatgtgaagcgtttggtcacccgccgtacgcgcgacgtattggatcgtgcgctgaactccatcgcctccatctaccgggatgtggcggtgctgcagaacaatgcggaggattcggtgggcctcatcaacctggagaaccgctcgccgatcaccgaattgtcggtgcggttgaaccgggccggtgccgtgacccgtctggacgaagtggcccacgcccgcaagcgtctagccggcaacggcaacccgctactggtattcgaatccctcttctgcgccctaattccataacccgacgcaaccagccccctctgacgagggggctgtcgagcgcggcgagactgggggagagacccccgtaacgcacagcccccagtacgtcacacatatgagcgatactgggacatatgaagatttccgccgatttcaccgtcattccggacgattttgccaaggccgccgcgcctgagtacttcaacggcggcgtgccggtcgtctccttcccgttctacatcggtgatgtgaaccccgaggcccgttacctgcactgggagttcgtggacccggattcgattccggtctgcggcttcgagtggattcactggtccgtggccaatctgccgattgacgcgctgatgtacgacttcaatgattcgcatgcgttggccatcccgccggacttctcccgtcagctgccggccatgattcccgagaccgtgcaaggccgcaattcttcggcctccaagttcttgggccgcagcactgacccagcggtgatcatgcggtacaacggtccgcagccgccggacaaggaccacgagtactacctgcaggtgtgggccaccaagaagccgttgcccggcttgaatcagggcttctggctcaacgagctgttgcacgcgctgcgcaacagcggcgaagcgcccgacaccgacggcatcttcctgaccggtaaggcgtgatttttagttggcgtatgtgagctccctctgatgagggagctggccgccgtaggcggactgggggagagacagctagagtgactacccctcagtctcgctttgcgagacagctcgtcctgcaattacggacgggctaccgcccgcaacatctgtggtgggacttatctcccaccctcgcctacaaacagcccaccgggctgtttgctgaacggctcagcctgacaaggggagcttgaataagagaaaggacaccatcacactatggcctgcaccacgattctggtaggcaaagacgcgagctatgacggttcgaccatcattgcccgcaacgaggattccgcgaacggcgagttcaacccgaagcgcttcatcgtcgtgaaaccggaggaacagccgcgcgaatacaaatcagtgatctcccacctgaccatcactctgccggacgacccgctgcagtacaccgccgtgccgaacgcggacctcaaggaaggcatctggggcgaggccggcgtcaacgaggcgaacgtggcgatgagcgccaccgagaccctgaccaccaacgagcgcgtgctcggcgccgacccgttcgtggaatacacgccggccaggggcgatgagcccgaggtgcccggcggcatcggcgaagaggacttcctgaccatcgtgctgccgtatgtcaagaccgcacgccagggcgtccagcgcctcggcgcgctgcttgaggaattcggcacctacgagatgaacggcgtcgccttctccgactccaacgaaatctggtggctggaaactgtgggcggccatcactggattgccaagcgcgtgccggacgaggcctacgtgaccatgccgaaccagctcggtatcgacgaattcgaccttgaggacgccctgggcgaccaggaagcgcacatgtgttccgaagaccttgccgaattcatcgaaaccaaccatttggacctcgcggtggagaacaccaccccgttcaacccgcgcgacgccttcggctcccactccgactccgaccacgtgtacaacaccccgcgcgcctggtacatgcagcgcttcctcaacccgtacgacgaggtgtgggacggcccggacgccgaccacaagcccacctccgacgacattccgtgggcccgccagcccgagcgcaaggtgaccatcgaggacatcaagtacgtgttgagctcccactaccagggcaccccgttcgatccatacggccagctgggcgatgagcgcacccgccacatgtaccgcacgatcggcatcaaccgccagagccagcttgcggtgatgcagatccgcccgtaccgcccgcaggcctcccgcgccatccagtggatggcatacggctccaacccgttcaacacgctggtgccgttcttcccgaacgtggacaccacgcccgcttaccttgaggacaccaccacccgcgtgacgtccgagaacttctactgggccaaccgcatcatcgccgccctgtgcgatggcgccttccgctccacgtccaacgccgtcgagcgctaccaggagaagaccggtgcgatgggtcaccgcttggtcgccgccaccgacgagcagatcgcccgtctgggcttgacggccgccgaggaagccgcgcagtctgccgctgaagaggaattcgaggcggataacgtagacggtgatgtgcagccgatgaccccggacgagaccatcgccgcgctgcgtaaccccgaggtgcgcgagattctcgccgccgccaaccagaccatggccgaccagctcaaggaggaaaccgacaagctgcttgactccgtgctgtacactcgcagcatggaaatgaagaacggcttccacatgtccgacttttagtccgtattgagctcccctccctgaggggaactgaccgcgaagcggactgagaggctaagctgttaagaaacagcccagtgggctgtttctaggcgaagaggcggcggcggccgccccaccaccccgctccgccatcatcaacacagaaaggcattaaatgaccaccatcgaagacttcaccagccagtacggcctggtccagaagatcgacgcattcggttacatgaagtacctggctgagaacccggacgccccgtgcaagcacggcaaggtggtgctcgtcaccgccgatacgccgctcaaggcatcgcgcggcgaaggcaagaccaccacgaccatcgccttgatcgacgccctgaacaagcgtggcattgatgcggccgccgtgctgcgtcagccgagcatgggcatcaccgcagccggttccaagggcggtgcctccggcggcggcaaggcatccctgacccaccccgagctcatcgactggggtctgtgcggcgaaatgggcgccatcgaggcggcccagaacctgctcgtctccttcgccgagaaggccatcgatgaaggcaagcttgacacgattctcgtgccgcgtgtctccgaggtgccgagccgctccctgcgctccaccgccgtggactacggcaagggcaacgtgccggagaaggtcgtgctcacgccgacctgcgagctcatgcagatcatggtgctctcccgctcgatggacgagatttccgagcgtgtatccaagatgatcgccggcaccaaggacggcaaggccgtgaccttcggcgagttcgtggacctgtggcgcatcaccggcattctggccgacgcggtcaagccggccaagaccgagaccgtgaacggctccccggtctacgtgcacggtggcccgttcgccaacgtgtccatcggcattccgacgctggtttccgtggaaatggcctgcgctctgcatgacgtggttgtcgtcgaagccggttacggcaccgacgccggtgcccagaagtggctggacatcgcctgccgcgagtatggcgcgcagtggccgtccgccgccatcgtggtgacccgcgcctccacctggcgcgacgatcccgagctggcctggcgctacccgttccacgtgcagcgcctggagaacctggacattccgaccttcccgctcatcaacctgtgggaaggcgaggacgatcaggttccgtccctgaaggccaccgccgacgagctgggcttccgcacgccgatcatcggcaacctgttccgcgacggcggcgaggcgctggccccgcagcttgacggtttcgtcgacgcgctgcagaacggctccatgccggccgaaccgcattcgcacaagggcatggccctgaccgagaacgccaagtgggtggccgagaacgcctacggcgtaccggccgagcgcgtgatctacaagccgggcttcaccgagtccgtgtccgaggccatggaactgtgccagagcgcaggcatctcgctggatgatctggcgttcgtggcggtcaagtccccggcgaccatgaccgacaacgaccgcgcccccgaagaagagcgcaccgtgaccctgaagaaggtcgaggtgcatgccggtgccggtctggtccacgtcaacctgaccaccagcctcaccacccccatgcccaagattgtgtgatgacaggcatgaggtgaggtaactcgctttcgaggggcggatttccggttttccggaggtctatctgcgtttcgaggggctcttcgattgcgaaacccggagtatgaccattgaaattgcaatgtttatactccgggtttcttgttttaaaagccccttgaaacgctagtagagcttctgaatgttggaaatcagccccttgaaacgtagaaagcccgccaccggcgggctttctacatctgagcttccctctttgagggggagctgtcagctaagctgactgaggggagccagaatacgcaaactagttgccaccctgagccattaaacggaaagcccactgggctttccgtaggcgatgcgaacagctatgctgcgaggggaatggtggcaactagaagttgccgccattccagccccaatcggtggtggcggtgtagcggatgtaggtgcggtcctcgggaatgccgagtgtggagttcagcgcggccataatgctttcggtcagcttttcccaagcagagcccggcacagagcggccgaatacgttgacctccacataggcggcgggctggtcatcgctaccaccgaagtagattggcatattgtcctcgaacgggcacatcagccagccttcggacttgcccggcacagcggtaatcgccttgccgtaggcggccttcagtgcctcacgctgctcgggggtggtggacacggacacatgagtgtgaataacgggcataattcctccttgattcggttcacttccagtctagcctcagcggctgctgttgaacatggcatgcggacgtaggaagctgcttgcagaacggaccggggcaaggccaattggggatattattggcctttccagccaatacacgttccgcagtcagcccaatagtgttgaatactcttgtgagaaaactgattgaacagctgatgaagttcggcattgtgggcgttatcgcctttgttatcgactggggtatcctcaacctattggttggcatattccacatgcacaacgtgctggctgccaccatctctttcatcatctcgctgattttcaactatctggcgagcatgaaattcgtattcaagcatcgtgatgacatggcacgctggatggagatccttatcttcgtggcgggtgctgtagtcggtctgttcatgaatgacgcgattatctggatttccacctatggtatgaaccatgatgcctatgtatcgcagcatgccgaatatctgttgcgcaccaatatcggcaagttggtggccactgccgtggtaatgatctggaacttcttgattcgcaagtggctgctcgacgatacgcacaccaatgcgatgaaccgtctgaagtccgctgaaaatcgactgaatgccgaggagcttgaagccaagtggcagaacagcttctcccacaagctcggcatctggtccttggagcacacgcccaaaggctggccgaagtagcgttttgacgtatgctaagccccctcgtcagagggggcttagcatacgtctcacacactcacttcagtcagggtcggctgctcggtggagcccttgatctgcttgaagccgatcagtgcaatcaccagcgaggccagtgccaaggtggtcaccaccatgaagcctccgtgcgagcccatgcggtcgatgaactggccggcaatcgccgaaccggcggaggagccgatagaattcatcgcacccatccacgccatgccctcggtcaagcgagagggcggcaccagatgcaacatgagctggttgccgttgatccacgtcggggcctggcatacgccaataatcaagtagatgatcatgatcacccacagatgcttggcgaacaggaacgtactgatgccgatgttcaccacggccaggcagaagtagaagcgcttccacagggcaatcgaccagttcttcgcgccatacaccaatgcgcccatcagcgagctgaaggagaagcaggcaaacacaaagcccgtgtactgcttcatattcgcttcggtggcgaacgcaataatcgagatgcccgtggccgactggaacgcgcccaaaccgaaccaggtgacgcacaccgcaatcagacccggaccccaaatggacgccttcttgcccgaacgcgcatcggcgaccgcctgcttaatggctgcgttaatcgtggcctcatcggtcacgccttcacgctcaagacggcggcgggtctcctcggcggcggtttccaccttcagcgcctcagccttggcggcctcgcgctcacggtattccttgcgggagatgccctcggcacgcgccagcgcggtctgcgacggtggctcagtggtcagctcggtcaggaacatcagcgcaccgaccaccacgcacatgccggtgaacgagaacgccagcaaaccggagatcacggccagcgtggaggccagcggattaccgatcacccacatgcattcgtcgagcacgccgcacagcgacagcgcgcggttcgtgcgctcccggtcacccttaagaatcttggtccagcgcgcgcggctcatcgcgccccacggcggaatggcggccaggaacggcgtcagacagtacagcacccattccggcgcgcggttggtaatcgccgtcaccagcgcgatggcggccacaatccaaacgataatcgtcggaatcgagacctgcctctggccgaacttgtcggtcagcttgcccagcagcggcgtggccacggccagcgcaatcgcctgaatggcggtgagcatgccggccagcgaatagttgccgtaataatgctgtacggaaatggtgatggtcatgccgaccatcgggaatggcatgcaggcgatgaccgagccgatggaataacgggcggtatgcggaatgcgcagtagttccgcatacccaccaaagactttgtggcctacttccttgatgccggccagaatggtgctcgagttcgagttggacgagttattggacataacagcactacgctcctttccgctcccgattggatgtcccccgctggcgtggcgttgccggcgaagccctcatcgaatgatgtgttgtccatggtcgcgcaaagtttgcgtcggattttcccatccgcatatttgcgtcacggatactctacgggtgtccactccgcgacacgcggtagattggagatattaagacaacgttctcatgcccctcagggcgggaagcagaaaggcggctcatgagcgctaccaccatccatttcgtccggcatggcaaggtatataaccccgaccatctgctctatgagcgactgcccgacttccatctttccgaccttggccgtcgcatggctcaagccaccgccacgtacttggccaagaatccccaaaccaatacgattgcagccgtctactcctcgccgctcgaccgtacgcgcgagaccgccggcgcgattctcgatgcgctgaaccccgtgcgcgaggctcgtggcgaggcttcgctcacgctcaccactgatgaacgggtgattgaggccggcaacgagttccgtggcaagcgcatcggccatggcgagggcgcgctgtggaagaacggcaactggaagctcgtcaccaacctgtacaagccgagctggggtgagtcctatcagcacatcgcggcgcgtatggacgacttcgcccgcgagaaggtggcccagcaccccggcgagcagattgtggtggtcagccacgaatcgccgattttcagttatcgccattatctggagaccggccaccccgagcactggatgttcctgcggcacacggcgctcgcctccgtgacctcggtgacgtacgacaacgaaaccggccgtgtgatgtcaatcacgtatgtcgacccagcagccaacgtcaagtaacggcacactggtgttaggacattggctcccctcggagaggggagccaagacgcactgcaatcgagtggtggacgcaaaggagcatagatgaccattgaactcaatcgtgaggcaatcgcacaggtcgcggcattgccggcggtaactgaggccgccgaagccggctcggcgctgatcagcctgtggccgctgaccgaagccatgcagatggacaatgacgcaaagtacgcggagaacctgcaggtgcgcgtcacccgcgcgttcgcccgcgtactgaccggcgaggacgtcaccgtgcccgacgccgaattcgtgtatgagggtgccgatgagattcccggtcgcccgcagaacatcgtggacgccctgctcgccgccaatgacgcctacgacacgatggccgactacgccgagtccggtgatgccaggctgatcgttgaggcggccgacgtgttgggaatcgactgggattccgcgacggcggaatcggtgagggaggcggtcgcggccatggaagcccaggtcgaggccgacgctgaagccgatggtcgtctggccacgtctgccaagcccgccgatgtggctgttcggttcgccaccgcgctcgccgtgtgcgatgcgttattgggtgaggtgtccggtgatgctgtggccgatggttcagcggacagtgtcgccaatgctgccgccaagattctgccgattctgctctacgtcaacgaactgcgcgagcagtgctcggtgccgcgcatctgcctgaccgacgagcagatcctcgggttgcttaatgcccgtgccaaagccgccgacgcagacaccctgaccgccaccgccgaatacatcgctcctctggccgttgccgaatggaacaagcaccgtgaggatgtgctctggaacccggacgaggctaagcgtcaggccaaggaagaagacgaaaagcgcaataaggaggctctggccgccaagttcgcgcatgtcaaggatgatcccggcaaagagaccgtggagttgtaaagagtaagggcgttgctctggccgatgcttcgctcgtaacggttagaggcctggtgcctctccctccgtcatcgctttgcgatgccacctccctcgtcagagggaggtggggttactgcttatcgattaccgagccgcgatcggtcagcgtcgggtccacgtagatgtggcgggttgtagaatccgggttttggatgcggttgatcagcaggttgatggccgcctcggccagatccttatcggacgagcgcagtacggtcagcgggcgggagctgggcgtggcaaagccgttgacggagatcatcgagatatcgtccggtacgcgcttgccgcggcgctccagggtctgcgcgatggcgatcgccagataatcggagtgcaccagcatggccgtcacgcccgaatccagaatggtgtccacgatttggttgacgtccctggtgttgtacggctgaatgccggtgatggtgaacgggcattcgatggcgtcgctttccgtcacgatttgcttccagccatcctgaatcagctccgaagtcggtgtatcggtgaacgccgcgcccacacgggtgtgaccgtgttgcaggaagcgcaccgccgccttacgcacgccatagggatggttgg

SEQ ID NO: 1546 - DNA, 3562 bp, Unknown
  R221_24m  MAG No. k141_10101
acctctaaatagacatcgggggcatttacattttccaaccatctcatacgccataatttacgttttccaaccaaatttgagccctgttcttacgttttataaccagaataaggtgcactgggctacgttttccaactttggtgtctagctgggctcggaccagctatggttctgaaactattctgatggatttaccgcagttcgcctgccaagtatggctccacgaatgcgaggttgctaccgcgttcgagtgagtggaggtcttgcatggcatattgccaagattcctcccacgttgtcggattgccgtgtattcgccgaagagattgaagggttgtagagaacaggttcgggttgcgggtaaagcggtctgctagtttgatggcgctgctctgcttgtgctgtgcgtctagattgtcaatcctaccgcgaaatgcgtgttcgaggttgcggctgacgtagaacaggcggtacgggaccatgagcgtggcgcggccgttcttcttcctgaacccatcgagtttcagcaaggcatccacgccgtttcgcttggtcgtgcgatccgcaatcaggatagtgcggtttggcgtgatgatgtcggtcgttgaatattgcgttccatccaccaatgggtcttcccgcactcggtcgtcagatgtgaacgccccgtctaggtcgcagatctggatgacatggccgagctggccccaggtgcggtcgtggtctctgaggtagtactccacgagttcgcgcaccgtctggacaggattgtccgctggatagaacccgttacgacgtcggaactcctcacggtggtttggcgcagtcaacacgtcgcagtggaattcctgcccttggaataggcggttctcgattaacgatgagaatgccggcacgagcaggctggcgtcgcttgctccttctacgaccagcaggacgatcttgcgtttagccacggttcaccttcgttccggaggcgttgagtgctgccagatcgtcgtcgatgtcatcgtcctcatcgggatggccggcggcatagagactgttgccgaacatgcgtggtatgggcgaatcatagatgtcggggccgctccatccgagctcgctggccgtcaggtaccgtcggcgctggttgttcgtggaggacttgcgggggatgatcgcgaaccggttattggggtcggtcactgtagtgcgaatgcagccgttcggcagcacttccaacgcacgcaggttatgggcggtgaacaccagctgccctgcgcacccgtccgccaactggtacagcatgtcaccgagcagcaactcgaacacgccggagtcgaactcatccacggcaaccagcgcgttctcgtcgttatacgcgtgcttgagatagccaagcagcgcggtgatgcgtatgatgccttcgctctcacagcggaatgggaccgtgatatcgccacgacgcgagaacagctccgcggtgacccgatcctcgccatctttgccggaaggcgcggttccgatcttcagcaggacatgcagaccaggcacgagggcgggcaggatgcggtcgaaggactccacggtctgtccaagtcgtttcgcctggcccgtggtcagcgggttcggttgcaacaggtcgaacagaaactctgtgttgcgacctgcggaatcctcctccatgatggggatgaacgcatatgcggcataggagccacgacgggtagtggatacgaagacatcattggtcgcgtaatcgcataaggccttgcgtaggcgtacgaactcatcgaaacgttcgttgatgtatgtcagtgatctggcggacacaccattcgcttcccgtacgcgggagaccgcccagtcgatgaggaactcggcatcgggtcggtcttcaagcgtggcacaccgcgagaacaggaatgagcgcccctccatgtacgcacgatcagcggtgcgtgagaccacggttttcaccgaggtgaccgcctcgatggagcgccacacatataccggagttgacacgaaaccatcggtctcagaatcctccatccgatgccccaacgcctccctgcctaggcgtgagagatcgtcgccgatgcgaaccgactcggaaacgacgcgcgctcgcgttgaatccgggttcgctctacgcagggacaccttgtattcaaggtagctgggcttctgttttcccccgatgaggagcgtcgccgtcaaggttgcaagaccggtgctgacgctaatggcatcgccggcggtgtccggcagcatattcccggatagcagcgcgcgcagtatcccgatggcatcgataacggtggtcttgcctgatccattctgtccatagatacccgttacgctgccgccagcgggcagatcgtcaaaatccaagacgccgtgcgatatgttcctcatgttgtctagaacaagtctttgtaaacgaatcatcgcattaccgttctttaaaagtcataataatcaatttataattgaaatacatgattattgtacaacataagatatattttcgccaccaaatctcgcaatcggtattcattgattgcgctgtcagtgacctatcggcggcctgtcaatggcctatcagtgcccttgcttccggtacttttcctcagtcccggctttatccggcatccaccagctttcgtgcgcgcggtaccagtcgatggtcgcggccagaccttccttgaaatcggtgtactttggcacccagccgagctcggtctgaagtttggtggcgtcgatggcatagcgcttatcgccaccggggcggtcgttcacatggtcgaagtcattggcgtcacgacccatgagcttcagaatcatgtgcagcacatcaatgttgttgtattcgccattggctcccacgaggtaggtttccccgatgcggcctcgggtgagaatagtccagatggcactgcagtgatcttccacgctgatccagtcgcgcacagccagaccttgcccgtagagtttcgggcgaatgccggcaagaatgttcgtgatctggcggggaatgaacttctccacgtgctgataggggccgtagttattgctgcaattgctgatggtggttttgagtccgtgcgtgcggtgccaggcgcgcaccaagtggtcgctggcggccttggacgccgaatacgggctggacggtttgtaagggctgagctcggtgaatttgcgctgttcgtccagagccagatcgccatacacttcgtcggtgctgatgtggtggaatcgaatatcgtggcggcgggcggcctcgagcaacacgtacgtgccggtcacgttcgtgttgaggaatggggaggcgtcgagaatcgaattatcgttatgcgattcggcggcgaagtgcacaatggcgtcaatcgggggtactgcggctgcagagcgttggttcagcccagaaaacagggattccacaagctcggcatcgcaaatattgccatgcacaaaggtcaggttcgcggccggcacgccatcgagattctcgcgtttgccggcatacgtgagcgcatccagaacagtcatgtggacctgcggatggttgcgcgcc

SEQ ID NO: 1547 - DNA, 24513 bp, Unknown
  R221_24m  MAG No. k141_10540
cctgccgcctacgccgatcagcaatcccggcgatagcgccattcaagcggcactgcaccccgaaagcggcaattggctgtacttctgcacggtcaatctggacaccggcgaaaccaagttcgccgcaaccgccgatgaacatgaccagaacgtggccgaactacgcaagtggcaagccgaaaaccagtagtcacctcattggctcccctcgccgaggggagctgtccgcaaagcggactgaggggagtaatacgggattaagccccaaccaccaccgccacaatcgcgcccgccaatatcaccggcacatacggcaccttgcccgcatgtgccggtgatgtgcgttgcgggtcgaatcgcgtccacaaggcaagccatgtgatgccggcaacgcccatcgccagccaccagaccaccacaggcaacaggccaaacagtccgacagacaatcccataggtatcaaggcggtcacatcgccgaatcccaatgaccgcggcaccagcaacgccaacgcgaactggatcaggcaacatagcacggtgaacaacagcgcctgcaacagcacgaacaggtcgttcgccaccactccatgcgcgaaatcggcggccaactggattaacgcgcccacggccacccatgcgatcggcacccgccgatgacgaacatcctcaatggacagtgcaagcccacatagcagaccgggtagcgtgaacaggtatggcatggcttaacattaacccctagttagacgtacacatagacgtacacacatgaaacgagggaagttatgctgcgttggcagacggcaggggagtctcacggagaagcattggtggccatgattgaagggttgccggccggcgtgcgcattagcacggacgatatcgtttccgcactggcacgccgtcgacttggatatggccgcggtgcccgcatgaagttcgagcaagacaaggtccgtctgctgaccggtgtacgccacggcctgaccctcggctcgccggtggccatcgaaatcgccaacaccgaatggccgaagtggaccgaggtcatgagcgccgatgcactcgaccatgacctgccgcgcgaaggccgcaatgcgccgctgagccgcccgcgcccgggccacgccgatctgaccggcatgcgcaagtatggttttgacgacgcccgcccggtactggagcgctccagcgcccgtgagaccgcctcccgtgtggccttgggcgaggtggccaagcagttcctggatcaggcgttcggcattcgcaccgtagcccacgtggtggcgctcggtggcgtgcagaccaaccctgatttgccgttgcccacgcctgacgatctggaagcgttggatgcctctcccgtgcgtacgttggataaagaggccgaggcccgcatcatcgaacgcatcaacgaggccaagaaggccgccgacacgttgggcggcgtgattgaagtgctggcttacggcgtgcctgccggcatcggcacgtatgtggaatccgaccgtcgtctggacgcggctctggcctccgcgattatgggcattcaggcgttcaagggtgtggagatcggcgacggcttcctggaagcctcccgccccggttcgcaggcgcacgatgagatcgtggtcaacgccgacggccgcatcgaccgtctgtccaaccgcgcaggcggcattgaaggcggtatgtccaatggccaggtgattcgcgtacgcggtgccatgaagccgattccgtccatccccaaggccctgcgtacggtcgacgtgctgaccggcgaatccgcacaagccatcaaccagcgttccgacagcaccgccgtgcctgcggcatccgtggtggccgaggccatggtgcgtctgactttggcgaagtacgcgctggataagttcggtggagacagtgttgccgaaacacggcgcaaccttgagtcgtatctcgcctcgtggccggagcacatgcgctgaacgaagtggagtatggttccgagacgactgccgcggaaccatcagcaactgtacccaccaatcgtcgagaggattcgtagattatgaccgcacgcccccgcgccgtcatcatcggcatgatgggagccggcaaaacacgtgtcggtaaggaagtggcgcatatgttgcgtctgccgttcgccgatgccgatgtagagatcgaacgtgaagtgggcatgaagattcccgcctacttcgatgaatacggtgagccggcattccgcgaggtcgaggccgatctcatcgccgatatgcttgaggatttcgacggtatcttttcgctgggcggtggcgctcccatgacgccatccacccagcatgccctcgcctcatacatcgaccatggcggtcgtgtggtctaccttgacgccgatccggcggaggccatggaacgcgcgaaccgcgggggaggccggcccatgctcaatggcaatgccaactcccgttggaagaaactgttcaagcagcgtgacccggtattccgcgaggtcgccaacgttcatgtccatacccgggggcttacgcctcagggcgcagcgaagaaagtgattgatatggtatctgagcgagcagtgcatgttaccggatcggcaattgagccgtatgatgtggtcattggcgaaggtgccatgaatcatctggtcgacgtgctgggacccaagcccgccaaaatcgcgcttatccatacccagccggtgcagcgacactccgatcgtgcccgcgccctgttgcgtcagggcggctatgaggtttccgacatcgtgattccggatgccgaacccggcaagaccattaccgtggccaacggcatttgggaacgccttggcaacgaaggtttcacccgatccgatgccgtggtggggcttggcggcggtgccgcaaccgatttggccggtttcgtggctgccacgtggatgcgcggcgtgcgctatgtaaactgcccgacctcgctgctggccatggtcgatgcctccaccggtggcaaaaccggcatcaacaccccgcagggcaagaacctcgtcggctcgttctacacgcctgccggtgtgctggccgacaccaagacgctggctacgctgcccaatgacatcttcatcgagggtctcggtgaagtcgccaaatccggtttcatccgcgaccccgaaatcctgcatatcctcgaagaccacgcagctgaactgcgcgctttcgacggctctacattcctcggctcgccgctcgaagacgtggttgccgagctcattgagcgcacggtaaaggtcaaggcctaccacgtctcctccgatttgaaggagaagggtcttcgtgaattcctcaactacgggcacacgatgggccatgccatcgaaaagctcgagcacttccgctggaggcatggcaatgcggtggccgtcggtatggtgtatgccgccgagctggcccatctgatcggttacatcgatcagtatctggttgactatcaccgttcgttgctcgcttcgctgggtctgccgacgtcgtggaatggcagctcgttcgacgacgtgctcgcattgatgcatcgcgacaagaaagcccgtggcaacgaactgcgtttcgtggtcctcgacgagattggtcacgtcgtacacctcgacaacccgcccgccgaagccgtagaagaagcattccgtcgtatccagcagtaattgaacggccgtaggccgtgccgttcgccatcccctcagaaaaagtacttggctcccctctaacggaggtgccccggagtcggatttaccttctacctccctctgatgagggaggtgccccgaaggggcggagggagagaagcacaaacaaaaggagtcccaatgaccaaagtcattgttgtcaatggccctaacctcggacgtctcggcgtccgccagcccgacgtctacggtcgtcaagacctcgacaccctgcgcaagctctgcgccgaatggggcaaggacctcggcctcgaagtcgaggtgcgtcagaccgacgacgaagccgaaatggtgcgctggatgcaccaagccgccgacgagaaaaccccggtggtcatgaatcccgccgccttcacgcactattcgtatgctctcgccgacgccgcgcacatggtcattgatgagaacctgccgcttatggaagtccatatttccaacccgtccgcccgcgacgagttccgcaagcgttccgtaatcagccctgtggccaccggcaccatcaccggcatgggtttctacggctacaagctcgcgctcgatgctgtggcgcacttgctgagcgaatagaaccaagccctccagccaatcacgggtagcagtcgacgttgcgcccgggattcctgttccgacgaatcggacccgaatcctcgtccgggcgcgccttatggacccgaagtacgccgtgtattcgaccatatgctggccaaggcagaacgagatgggctgcctacgcacgactacaccggccacgtcatgaacacgccgggtcatacacggatgatagagtgaaattccatggttagaagaacacatggtaattctcaagaacacgtcaccaagcatattttcgtcactggcggcgttgtttcctctctcggcaagggcctgaccgcatcttcgctcggtcgtttgctgcgcagccgcggcatccatgttctgcagcaaaagctcgatccgtacatcaacgtcgacccgggcaccatgaacccgttccagcatggtgaggtctacgtgaccgaagacggtgccgaaaccgatctcgacatcggccactacgagcgtttcctcgacgtcttcctgagccagaaggccaacgtcaccaccggtcagatctatcaggaagtgctgcgcaaggagcgcgccggcgaatacctcggccagtgcgtgcaggtcatcccgcacatcaccaacgaaatcaagtctcgtatgcgcgcccaggcttccgatgacgtggatgtgatcatcaccgaaatcggtggtactgtcggcgacatcgagtcccagcccttccttgaggccgcccgcgaagtgcgccgcgatctcggcccggacaactgcatgttcgtgcacgtttccctggtgccgtacatttccgccgcccacgagctcaagaccaagcccacccagcactccgtgatgatgctgcgtcagctcggcatctccccggacgccctcgtgctgcgttccgaccgcccgctcaaccagtccatcaaagacaagatctccctgatgtgcgacgtcgatgccgaaggcgtggtcaactgcgtggatgcgccgagcatctacgatgtaccgaagatcctgttcgaagagggccttgatgcttacgtggtgcgtgagctcggcctgccgttccacgatgtcgattgggatgaatgggcagacctgcttgagcgcgtccaccaccccaagcacgaggtcaacatcgccatcgtcggcaagtacatcgatctgccggacgcctacctgtctgtcaccgaggccatcaaggccggcggctttgccaactgggccaaggtcaacgtcaaatgggttgctgccgaccgttgcgaaaccactgaaggcgcggccgccgctctcgacaacgtcgacggcatcgtgatccccggcggctttggcattcgcggcatcgacggcaagatcggcgccctgaagttcgcccgtgaaaccaagctgcccgcccttggcctgtgccttggtctgcagtccatggtcatcgaatactcccgccacgtgctgggcattgaagacgcgaactcttccgagttcgagcccgattgcgccaacccggtgatcgccaccatggaagagcagaaggacattgtggccggcaagggcgacatgggccacaccatgcgtcttggctcctacccggccgagctggaggaaggctcgctggtcgccgaactgtacggcaccacgcatgtcaccgagcgccaccgccaccgttacgaagtcaacgtggcctacaaggatcgtctgcgtgaaggcggcctgcgcatctccggccagagcccggacggcgagctcaccgagttcgtggaactgccgcaggacgtgcacccgttctatgtggccacccaggctcacccggagttcaagtctcgcccgaccaagccgcacccgctgttcgccggtctggtcaaggccgcgctcggccatcaggcggcccgctgaccgtggatcccgcgcggtcggtccgcgcacgatgaaggcgtgacggcacggcatctcaggatgcttcgccgccacgccttcgccgtttggtgccatccgtgatgccgcatggcccgatggcgcccgcatgtaatcaagcccacagccaatatgcgtcagggcagctagtgtttgcacttgggttctgctaggttttcatagggttaagtgtgatacaaggaaggcaggatggtgaccgaaaacacagcaccaaacgccgccgctgacgtggagatgagccagtatgtggctgatcgtacccgcgtcaacgaggacaagatcaagaaggatgacgagatcatcagccagttcggcgactacaactatggttggcatgattctgatgccgccggcgaagccgcaaaacgaggcattgatgagaacgtcgtacgcgcgatcagcgccgacaaaggcgagccgcagtggatgctcgacatgcgtctgcgtggattcaaggcgttcctcgaaaagcccatgcccgattggggtgtggatctttccggcttcaacgccgacgacttcaagtactacgtcaagccgatcgagaagcaggcgaagtcgtgggaggagctgccggacgacatccgcaacacctacgatcgccttggcatcccggaggcggagaagaaccgcctcgtctccggcgtggctgcccagtacgagtccgaggtgatctacaactccattcgtgaggacctgaagaagcagggtgtgatcttcgtcgacacggacaccgctgtgcgcgaataccctgaactcgtcaagaagtacttcggcaccgtcgtgcccccggaggacaacaagttcggcgccctcaacaccgcggcgtggtccggcggctcgttcgtatacgtgccgaagggcgtgcacgtggacatcccgttgcaggcatacttccgcatcaacaccccggccatgggtcagttcgaacgcacactgatcatcgcggacgaaggctcctacgtgcactacgtggaaggctgcaccgccccgatctggtccgaggactcgctgcacgccgccatcgtcgagatcatcgtcgagaagcatgcccgcgtgcgctacaccaccgtgcagaactggtcgaacaacgtctacaacctcgtcacccagcgtgcctacgtgcgtgagggcggcacgatggagtgggtggacggcaacatcggttccaaggccaccatgaagtacccggcctgcatcctcgccgaaccgtacgccaaggcatccaccatgtccctcggcttcgccggcaagggccagtaccaggacacgggcgcgaagatgattcacctcgccccgcacaccagctccaccatcgtcgccaagtccatctcgcgcggcggcggccgctccgcctaccgcggtctggtcaaaatcgtcaagggcgcgtacggttcgtccaactcgaccgtgtgcgatgccctgctggtcgacgacttctcccgctccgatacctacccgcacgtcgacgttcgcgaagacgacgtttcgatggcccacgaagccaccgtttccaagatctccgaagaccagctcttctacctgatgagccgaggactcacggaggaagaggcgcgaggcatgatcgtgcgcggcttcgtcgaaccgatcagccgcgagctgccgatggaatacgcgcttgaactcaacagacttgtggaacttcagatggaaggatcggtgggctgattccgatgaccgacaacacaacacccgtcaaggaaatcaagattccggtcgccgaccccaacgacccgtacgcgattccggccgccatgccgtcctccgtggaccatgccgtgcgctcgttcaacgcaggcgactacccggagcccagccgcaagcaggacgaatggcgctacacgcctatcgagcgcatcaacgagttcttcaccgtgttcaagccttccggcgaaacgcagatcgaagtctccatgattgacggctcgccgttggccgaaggcgtgaagctcagccagatcaagctcggtgagggcctgtccggcactgtgtccaagcccaacgaccgcgtctccgcagtcgaatgggaatccggccacaccgcaaccattctggaactgtccggtgagatcgcccagcccgtgctcgtcaaggtgcacggcgcgggggaggacctcgacgctttccatctggtgatcgccgccgccgacaaggctcatgcggacgtcgtcgtggaacacgacggtgacgcacgactggccgaaggcgtggaaatcaccaccggcaaggactcgcacgtctccaccacgttcgttcaggaatgggccaaaaccgccaagcatgtggccaaccaccgcatccacgtcggcgaaggcgcatccctgcgccactccgtcgtgaccttgggcggcgacatcgtccgcatccgcatggatcaggacttcggcggcgaacaaggcgacctcaacatgctcggcatctacttcgtggaccccggcgagcacatcgaacaccgcacgatggtggtacacaaccaccccgactgcaagtcccgcgtggtctacaagggcgcgcttgacggcaagggcgcgcactccacttgggtgggcaacgcgctcatccagcccaccgcccccggcaccgactcctacgagctcaaccgcaacctggtcctgaccccgggtgccatcgccgattccgagccgaacctcgaaatcgaaaacggcaacatcatcggtgccggtcacgcctcttcggtgggccgcttcgacgacgaggaactgttctacctcgaatcccgcggcatccccgaaaccgacgcccgcaagctcgtggtgcgcggcttcttcggcgaactcgtcgaggagatcggcattcctgccatctccgaacatctgatgaccgtgattgaccgccgactggcccgtggcgaaaacgacgccatggcacaggtcctcgaagacaagtaagaacagcatttttaggagcacaacaatgtcaacactcgaaatcaaggacctgcacgtccacgtcgaaaccaaggaaggcatcaagccgatcctgaagggtgccaccctgaccgtccactccggcgaaacccacgccatcatgggccccaacggttccggcaagtccactctcgcctacacgttggccggccaccccaagtacgtggtcgactccggcgaggccctcctcgacggcaaggacatcctcaagatgactccggacgagcgcgccaaggccggcctgttcctggccatgcaatacccggtcgaagtaccgggcgtgtccatgaccaacttcttgcgcaccgccaagaccgaaatcgacggcgaggctcccggtattcgccagtgggccaaggacctgtccgcagccatgaagcgcctcaagatggacccgaagttcgcctcccgttccgtgaacgaaggcttctccggcggtgaaaagaagcgcgccgaagtgctgcagctcgaactgctgaagccgaagttcgccatccttgacgaaaccgactccggcttggatgtggacgccctgcgcatcgtgtccgaaggcgtgaaccgtgccaaggaagccaaccagttcggcatcctcatggtcacgcactacacccgtatcttgaagtacatcaagccggacatcgtgcacgtgttcgccgacggccacttcgtcaagaccggcggccctgagctggccgacgaactcgaagagaacggctacgaccagtacctgcccgaaggcgccgactccgagtccgcgctggcctgagtccgtgaccgtgggagtctgacatgccctattctcgacacgctccgggccactcaggccaagtctttacggtcgcgaacaggccatgtcagactcccactcgtttcgtacaattgttacgtaagtaggggaacataatggttgattttaaggagattcggggcgagttcccgattctgaatcaggagattcacgggcacccgctcgtgtacctggattctgcggccacctcgcagaagccgaatgcggtgatcgacgccgaggcgaacttctaccgtacgatcaacgccggcgtgcaccgcggtgcccacgagctggcggcccgtagtaccatggctttcgaagaggcccgtgccaaggtcgccaagctggtcggcgcgaatgcagcggaaggcgaagaagagatcgtcgtcaccggtggtgccacggccggactgaacctgctcgccaccgcattcggcaatgcgtcgctgggccgtgggggagaagccgccaagcgttttgccctgaagccgggcgatgagatcgtcgtctcgcgtgcggaacatcattcagtgctgctgccattccaggagctggcctaccgtaccggtgccaccttcaagtggatcgacctgaccgaggacggccgtgtgcgtacggacaacctcgacgaagtcatcaccgaacgcaccaaggtcgtggccgtcacccacgtgggcaacaccacgggtgccatcaccaacatcgcccctatcatcaagcgtgcgcatgaagtaggttcgatcttcatcttggacgcttgccagtccgtaccgcacctcaaagtcgatttccatgcgcttgatgtggacttcgctgcctggagcgcgcacaagatgtacggtcctaccggcgtcggtttcctgtacggtaagcgcgaactgctcgaagccctgccgccggccaacttcggcggctccatggtcgaactcgcctacatggaccacgaggcccaatacatggcccctccggcccgcttcgaggccggcacccagccggtcgcccaagtggtggccgcaggcgtcgccgccgaatggatgatgaacatcgggctcgagaacatcgaggcccatgagaagaccatcgccgccgaactgctgaagctcggcgacatcgatggcattcgcatcctcggaccgcgcgaaaacgtggaccgcatcggtaccgtggcgttcgacgtggccggcgtgcacccgcacgatgtgggccagttcatcgacgcccagggcatcgcgattcgcgtgggacaccactgcgcccagccggtgcaccgccacttcggcctatacgcatccaaccgtgcctcctccggtgtctacaattcggtcgaagatgcccaagcattggtcgaagcggccaagggcatccgtaagttctttggagtggagtaaaacagaacaccatgaacgaattcggtatgagcggggatgacctcgaacagatgtaccaagaggtcatcctcgaggcgtcaaaacatccgcatggcaaggaatcctttgcgcccaacgcggcggtcgaacagtccgcggacgcggcggccaatgtcaccgtgcaagccagccacgaatactgcacgcccggtgaatcgcaccagttcaacccgacctgcggcgacgaggcgaccatccatgtcgaagtctccgatgacgaaccgcacaccatcaagcgattggtgtgggacggccacggctgctccatttcgcaggccagcctgtcggtgatggtcgatctggtggacggcaaaaccgtggacgaggccatggatctggaacagacattccacaaactgatggaatcgcgcggtgccggtctggacgacgagaacctggaagaaaagctcggcgacgccgtggtattccaaggcgtgtcgaaataccctatgcgcatcaaatgcgctctgctaggctgggaagggctgaaggactccatcgccaaagccctcgctgcaaagaactgaggaaatatgtccaacgataatttggttcccgaaccacagccgtccgttttcgatgccgtcaacggcgtcctgcaggacgaggaggccgctcgccgcgtgatggccaacccggccttggccaagggcttcccgaacggacgcccgatcgagcactctgctgcgtccggcgatgacacctgtgcgtgtggcggtcaccatggcaaatgcggttgccgggatgacgaacagtccgatggcagcgagattccgatcaaggcgattgacgatatcggccgcgccactgccgaagacgtgcgcgaggcactgcatcaggtgattgatccggagcttggcatcgacgtgatcgatttgggtctggtctacggcattgagatcgatgagctaggccgcgccattattacgatgacgctgaccacgccggcctgcccgctgaccgaccttatcgaggacgaatgcgcatccacgctggccggtctggtcgaggagttccgcatcgactggacgtgggacccgcgctggaccatggagcgcatcacgcccgaaggccgcgaccagctcgccgcccttggcttcaacttcgacaacatgccaaagtactgatagcgcttagtaagctccctctgatgagggagctctatacgagaaaagccccgcatgatgcggggcttttccaagtctggactggtcaatcagtcatcgacgatggtgttcttcgggacaaccgtaatgccgtccggcgtgacggtgaagccacgggccagatcgtgctcggtatcgatgccgacagtggagttttcggtcaggaccacgttcttgtcgagaatcgccttgtacacgcgggcgcggcggttgatgatcacaccgtcgaacagcacggaatcgacgatctgtgcccacgagtggatacgcacattgggggagagcacggagtggtgcacttcaccgccggagacgatcacaccgggggagacgatcgaatcggtggcgtggcccagacggtcgcggccggcgtgcacgaacttggccggcggcaggttgccggacatcgtgtaaatcggccaatcctggttgtacaggttgaactcgggcacataggcgatcagatccatgtgcgcatcgtagaactgcttaatcgtaccgacgtcgcgccagtaagcgtgatcagtgaccgtggaacccggaatctcgttcgagttgaagtcgtagacgccggcctcgttgcgggaagcgaagtacggggcgatgtcgccgcccatgtcatgcttggtgtcggcagccttctcatcgagagccagagcctcgaacagggccttggtgttggcaacgtagttacccatggaagccagaatctggttcggattgtccggcagaccggtggtggtggccggcttctcctggaagttcctgatcatgttcgggtgatcgggatcgacctcaattacaccgaactggttcgattcctcgatgggctggcggataccggccacggtgaactcggcgccggactcgatgtgctgctgtaccatctgctcgaagtccatgcggtagacgtgatcggcgcccacgatcaccacgatgtccggctggacgtcctcgatgatgttgatggtctggtagatggcgtcggcggagccgaggtaccagtgcttgccgagacgctgctgcgcgggcacaggggagacgtacgagccaagcagcggggagaaacgccagacctgggagatgtggcggtcaagcgagtgagacttgtactgggtgagcaccacgacctgacggtacccggagttcaccagattgctcaacgggaaatcgatcagacgatacacaccaccgaagggaacggcgggcttcgcgcgatcgcgggttaacggcatcaggcgggtcccctcaccacctgcaagcacaatcgacagaatcttgggattcttggccatcgtaactgtcctctctgttactgagcgtctttcgacaccgcactgctgggccggatgcttccttgcattcggtttacatagttaataattgcagaaaaattcgaacatgcaaggctttcgcccccgcgtgccgtgaacttgcgatgaacagtttcgtagatttgtttaaggatccggccttttcggagcgcgtgcgattccttagcgtgtcgcgtagaacgccactgcgctggatgccgccacgttcagactatccacgccgtggctcatcggaatcttcacggtcaaatcggcgcgggcaatcgtatggtgggacaggccgtcgccctcggtgccgaagatcagcgcgagcttgtcgatatgcgtcggatcttcgtcaggcgcgtgcagacggcgtgtcagttcgtccaacgaaatcgaacgatcctccaatgccatggccacggtggtgaagcccagcgacttcaactcgtcgatgccctggaacggccagtaatgcttgttttcggtaccgtcgtcgttgaacccggtgatacgggtccacggaatctggaatacggtgcccatcgacacacgagcggctcgtcggtacagcggatcaccgcaggagggtgtgaccagcacggcatccacatcgagcgcggccgccgaacgcatcagtgcgcccacattggtgtggtccacgatgttttccattactgccacgcggcgggcgctcctgcagacctcggctacggagggcagcggccagcgtcgcatcgcgcatagggcgccgcgatgcagacggtagccggtcagacgcttgagctgctcaggtgaggccacgtagacgggaatatccgcgccccagcgcccgtcgatgaagtcgaaggtgtctttcatgccctccagccaaggttcctcgaccagcagtgacagcggttcgcggtcagcggccagcgcgcggtcgatgactttgggggactcggcgatgaacacgcccttggctggttccaagcgattgcgcaactgcatttcggtgaggctcacatacgcttcgacgcgcgggtcgtcaacggtgtccagcgtgatgaactgcattggtggcctttcgtgtgtgcagataacgaaaaaccccttgcaatgcaaggggtttatctgtgcccgagacgggacttgaacccgtacgcccgtataaaataggcactagcacctcaagctagcgcgtctaccattccgccacccgggcaggtgtcgtttggacaacgagtaaatagtttagcatgaaattacagggatgcaattcgcgcgtgtgcccggcgtgtcgcgtgtagccttgaagtcatgactgatgccctttttcttttcgacccgcaggtcgacgatgtcccggtgaacagcgacgaacttcacgccggctggaagctaaccctgcccgcgcacatcaagcgccatgctgtgcaggccatgcgactcaaggcgggggacagcctgcaactttccgacggcaacggcttgagaatccaggcagtgatggccgatcctgaagccggacttgctgaagttgtggaagtggggcgcgaacccgagccgctcacccgtttggcgctgattcaggcattggcgaaaaccggccatgatgagcaggccatcgatatggctacgcagatcggcgtcgaccaagtggtgccatggcaggcggaccgatccattgccaagtggaaggtcggccgtacggacaagaagtggaattcggtactggatgccgccaccgagcagtcgcggcgcgcttttaagccgcaactggaggcgtgcgcgtccagcaaggaggtcgtggccatctgccgcagggcctgcgtgcatggcgatgtggtgattgtgctgcatcaggatgctaccgatacgtggtccggcgtggaggagaaggttacgcagttggtggaacgcacgctccaggacggccggccgcggactgtcagtgtggtggtcgggcctgagggcggcatcagtgagcaggaggtagctgatttcgtcaaggccggagcggtgagctgcgtactggggcacaatattctgagagccgcgacggccggtcctgtagcgttgtcgctgttgtctcgggtgttgggacgttacgagtaacgcccacgcgctaagctggtgcgtagcaacatcaaaccaaggagcatgatgagcgaatccgacgattgcctgttctgcaagatcatcgcagggcagattcccagcagcaaggtctacgaggacgagacgacctacgcattcaacgacatcaaccccaaggccaaggtccacgtgctcgtggtgcccaagaagcactacgccaacgtcgccgaacttgccgccgacgacccgaccgagctggcccacatcgtctccatcgcgcagaacatcgccgacaaggaatttcacggcgcctaccgactggtgttcaacaccggtctcgacgccggccagaccgtcttccacgtgcacgcgcacgtgatgaccggcgaaaagctcgacgagtagtaggggaatatccgcttcgtggcaacgactacacgtaccatcaccatcccgccccaacttgaccccgtcgccgtgctcggcccggttgacgaggtcattcgcgaggtggagcgcgcctttccggacctgacgattatcgtgcgcggcaaccgcgtggcgatcgtctcccgctccaagcagaccgaagcccaggccgcacaggccgaggatttggtcaacaccatcatccaagccgcctacaccgcgcctatggacgccgacaccgtgcgtcgcatgctcgaccagaacgtgctcaagaaccacgtgcgcctcgaacatccaggtcacggcccggtgcgtgacaaactggcgcaatcgacctcaaacgaacgcgcccatgcacgttctgccggctcccacgacccgacgtaccgcaagcccacggttcccggcgtcatcacctttgccgccggcgtgccggtccgtgcgaaaaccgccggacaagtggcctacgtgaacgccatcgaatcgcacaccatcaccttcggcattggtcccgcaggcaccggcaagacgtatctggccgtggccaaggctgtgcgtgccttccaggacaagcagattcgccgcatcatccttacgcgcccggccgtggaggccggcgaaagcctcggctttctgcccggcacgctgaacgacaaggttgacccgtatctgcgcccgctgtacgacgcgcttggcgacatgctcggcgccgaccagctcaagcggtacatggacgacggctccatcgaagtggcgccgctcgcttacatgcgcggtcgtacgctgaacgacgcgttcgtgatcctcgacgaggctcagaacaccaccgaacagcagatgaagatgttcctgacccgtctgggcttcaactccacgatggtcatcaccggcgatatctcgcaggtggacctgaccgtgccgcgctcgggactggccaccatcgaacgcatcctgggcggcatcgacgacatcgcattcgtgcatctcaaaaccgaggacgtggtacgtcaccagctggtcggccagatcgtggccgcctacgaccgtcactccgccatcgccggcgaccaccgcgacatcgaacacaagggccgccgcaaccataccgacttcgatgcccgccagcaagcggattcaaccaaccaaagtgagacagacgatgagcgttgacgtcaccaatgaaacccagtgggtcatcgaccccaaggtcttctccgatttgggtatttgggtactcgaccagatgcgcgtgagcacccagtccgacctgaccatcatgttcgtggatcccgatcccatcgccgaactgcacatgcgttggatgaacctcgaaggcccgaccgacgtgatgagcttcccgatggacgagctgcgccctggcgacggcaaaaccgtgatggaaggagtgctcggcgacatcgtcatctgcccctgggtcgctgcccaacaggctgccgcagctggacacagcaccatgcaggagatgttattgctcaccatccacggcatcctgcacctgctcggctatgaccacgtgacccccgagcaggagcgccagatgttcggcctgcagcgacagctgctgctcaccttcttcgccctgcgccacgatgccaacgtgcaggccacgctgcccgccggcacacccgacgcgctggccctgtacgacgccgcgcacggtgctggccgcgacctcgattccaaataaacttccaaatcaatcacaccaaattcggattattcgataccgttcaaggacattcaaggacaccgaaaaaacattatggagtattccagtaccacgctgatcgccgtcaccgtcattctcgtacttgtggcgaccctgttcgtctggctttcgctgaccatggccgccgctgaaggcgccgtggcccgcgtaacgcgagccagcctcaacaatctcatcctcgaggtgcagaccgactccgaagcaagccagttcctcaagatgaagaagatcgacaagattcatcgcgtgcaacggctcatcgccgaccgttacgccaccgccggcagctgtgcgttcttccgcatcgcctgcaatgtgctcgacggcgtactggtgtcttccatcgcatccctgtggggtgcggaactgtgggttgaactgctcgccggattcctgttcgcgattatcgtagccgtggtctccgtactggtccgcccgcgcaccgccggcatgaccaagccggtcgacatcatgatttccaactcgcgcatcgtgtcgttggccaccaagctcacgccgttcgcacgcatcggtggcgacaagtccggttccaaggggtcgggccgccgctccaaggactccgatctgtccgacgacgaggagcttgagaagattcagctcgagcagggcaaggccgccatcgaccgactggtggagtccaacgacttcgatccggaagtctccgaaatgttgcgcaacgtgctcaccctgtctgatacgttgactcgcgagatcatggtgccgcgcaccgatatgatctgcatggagcgcgactccacactgtcttccgcgctgaaactgttctcccgctccggtttctcccgcgtgccggtgatcggtgaggatgtggatgacctgatcggcgtggcctatttgaaggacgccgtgcgcgccaccgccttcaacccggcggccatggaacgcacggtcgaatccatcgtccggcagccgctgcttgttcccgaatccaagccggtggacgacctgttccatgagatgcagcgttcccgccaacatgtggccgtggtggtcgatgagtatggcggcatcgccggcatggtgactatcgaggatgccatcgaacagatcgtcggcgagctggaagacgagcacgaccgcacccagcgtaccgagccggagaaaatcggcgacaacaagtggaagatgcccgcccgtacgccgattgccgatctggaggagatcttcgagatcgacattgatgaggacgatgtcgataccgtgtacggcctgctgaccaagattctgggccgcgtgccgattgtcggtgcttcggccgtgacgcgcggtctgcgactgaccgccgtggactccgccggacgccgcaagaaggtgtccaccatcgtcgtcgaaccggcgcacgtcgagggcggcgaggaaaatagcaggacccatgaggaaactgacggcgagcccgtcgaaggcgatgataccgccagcaaggagtgatatgaccgaccagaacaacagcacgaacgacgtcgatgacattgacgtcaccgatgcttccgatgttgccggcgttgccgaagtcgacgcgaccggtgaaacggagaatgtgaccaagcaggacgtgccgtatcgctccggattcgtggccgtggtgggccgcccgaacgtcggcaaatccacgttgatcaacgcgttgatcggcaagcagatcgccatcgcatcctctcgcccggaaaccacccgtaaggcgattcgcggcatcctgaccgccgaccacgcgcagctcgtgctcgtggacacgcccggtatccaccgcccgcgtacgttgcttggccagcgtctgaacgacgtggtcgacgaatccttggccgatgtggacgtggtggccttcctgctgcccgccgatcaggaaatcggccctggcgacaagcgtattctctcccgactgcgtaccgacttcgccaccaagcgtgaggacggtacgttcaagtggcgcatcccgctgattgccatcgtcaccaagatcgacgagcttggccgtcagcaactcatcaacaagctcatcgaaatcaacgatttcgccgatttctcggacatcgtgccggtgagcgccctgaagcacgacaatctggccgaggtgaagaacgtgctcattgagcacacgcccgagggcccgcagatgtacccggacgatcagatcagcgaggagcgtccggaagacaccatcgccgaactcgtgcgcggtgcgttcctggagaccttggacgacgagctgccgcattcgctggccgtggtggtcgattccatcgactatccggaagacaacgagaccggtcagggctacgatggcaaggctcaggtcaatgtgtccatttatgtggagcgcgactcccagaagccgatcatcatcggcaagggcgcctcgaacctcacctacgtcaagaagaagctacgcaccccggtcaaccgcatcgtcggccaaaaagccaagctcgacctccacgtcaaggtagccaaaggctggcagtccgaccccaagcaactagaacgcctcggcttctaggaatcggccttcggccggttataacaaagggagattccaatggaatctcccttttgctgtactcgagtcctccttacttcttcttggtgtacatctgggtgttgaggagggtggagtagcgcttgatgaccttggggcgaatcaccttcatggaggcggtcatgaggccgttctcctgagtgaactcctcgggcaggatgatgaacttgcgtacggattcggcgcgggagactccctcgttggcccgatcgacccactgctgcacttcggcgcgcacggcggcgttccttgccgcgtcctcgagggacatgttctcgtcaagccccttggcggcgagccacgggcgcaacgacttctcgtccaacgtcaccagggcggagataaacgggcgtttgtcgcccagcaccaacgcctgggagacgatctcgcaacgctggatgacctcctcgatcgggccgggggagacgttcttgccgcctgcagtgatgatcagatccttcttgcgaccggtgatgtacaggaagccatcgttgtcgatacggcccaagtcgccggtggcataccagccatcttcggtgaacgacagctcagtggcctcgtcgttcttgtgatagcgcgggaacacggcacgacccttgacctgaatttcgccgtcctcggcgatgcgcagggagaatccggggaatgcgatgcccacggaaccagcgtggaacggcgtacccagcgggttgaacgcgcacggtgcggtggtctcggttagaccatagccctcgtatacaggcacacccgcgccacggaagaaagccagcagttcggggtcgagcggggcaccgccggccacaatccacttgacgcgaccgccgagcacttcgcgcagcgaagagtagacaatcggatcgaaggcagcgcggcgagtgcgggtcagtgcacctgccttgccattggcggagacttccttcatatagttctgcgcggccaccacggcggaggcgaacaccacgccctttggaccgtgtccggccttctgggacgcggcgttgtacaccttctccagcacgcgcggcaccacgatcatgagagtgggcttggccacctgcagatcgctgatcagcgtcttgatgccggtggcgatgtagatgcggacgttcgaggagacgacgatgtagttgatggcgcgggcgaaggaatgggcctgcggcaggaacagcaggatggtgttcctcttgtcgtgcagtagatcgggcatgtaggtcggcagattcagcgcggtctggcagtagtgttcatgggtcatttccacgcctttcggcgcggccgtggaaccggaggtgtacacgatggagcacaggtcggtcttcttgaccgaatcgatgcgctcgtccagctcctcgtccgagaccgtggtgccgtaggccttgatttcgtccaagccaccggtctcgatggtgatgatgtgctccagggacgggcactcttcgacggacccatccgccttcttacgcatgtccgtgtcctgcacgatcagcagtcgggcatcggagttgttgacgatattgcgaatctgctcggcggaatcggtgtcgtagatggtggcgagcacgccgccgcacgccatgatcgccgcgtcggtcaggtcccagtcgtaggaagttcggcacatgaatgccacggcatcgcccttcttcaggccgtaatgaatcaggcccttggccacggcacgcacgtcagccaggaactcgttggcggtgacggtcacccaatcgttgccggacttgtaggtgtacagcggctcatcgcccatacgttcggcgcggtccgcatacaggtcgtagatggacgtaccttcgtccagcggcggattgccttcggtggaggtggtgagcaggccggtggcggggtcgatgtcggtgacggtcaggtggccgtcgtcccaatcgtcgctgtgaggcaaagcgatattggtctcgaccggcacgtcggcgttggacaggtaatcgggctcgtccggggtgtcgtcgtggaccgggtggacgaagtcggatcccaacctgagcgccttacgggtgagattgatagtgtgctgcgtgaaggaattgataaccgacaagtcttgctcctgtaaacctttcagtgtcgtccagccatgaggcgaacgcttctcaaagttcaaattgtaatcgcccaaaccgaactcgtcaccttacgcaaccgtaggattctggcgggttaggggagtgcgtggcaaaatattgcacaggtcccgatattgttgagtaaccgtgagctacgaaacggtgattgtcaataattacggtgattgtcgataattactgagcggttggttgctgatcgatgccgggtgattgttggacgacttccgagcaattcatccgcaatgcacatggacacattcgtatttctcactaatttcgggttcgtttctgtttcgattggcggaatctcaagtcatggtctttgctttccgactacactttctatgcggataaccatgtccattttgaagtagaacaagaaagggctctcatggcgcaaaacccagaagccaccgtggtgttcggcgttttgaacgaaacgtccgaaacggaatcccgcgtcgcgctgacgccggatatcgtcacccggctgaagaggagcggtgtctcttcactgattgaagcaggtgccggcattgctgccgactacaccgatgaggattacgaaaaggccggtgcgaaggtgaccagccgcgacgaggtgctcgccgaagccgacgcgctcggttttgtggaccgaccgtccgccgagaccgtagccaagctcaaggccggccagtgggtcattggcatgctcggctccttcaccgatgccgattacgtggccgcgctcgagaaggccggtctggtgggcatcgccatcgaaaagctaccccgtaagctttccagcgcccagtccatggatgagatgacctctcagaactccgtgatgggctacaaggcagccatcaccgccgccgatgcttacggttccttcctgccgatgatgaccaccgccgccggcacgattcgcccggctaaggcgctggtgctcggtgccggcatcgccggcctgcaggccattggtacgctgaagcgtctaggcgcggtcgtcaccgcgtacgacgtgcgtcccgcctcccagggcgaggtcgagtccctcggcgcgaagttccttgatctgggacttgacttctccaagggccagggcgagggcggttatgcccgtgcgctgagcgccgaagagcaggctcagcagcaggctgccgtcgatgagaaggccgccggctttgacatcatcatcaccaccgccaaggtcccgggccgtaagcccccggtgctgctcaccgcagccggcgtcaagggtctcaagcgtggtgccgtgatcgtggactgcgcagcatccgacctcggcggcaacgtcgagggttccgccgtcggcgagcaggtcaccgagggcggtgtcaagctgattggcgctccctacctggcctccggcgtcgccaccaccgcatccaacctgctttcgcgcaatgtggccgacatcctcgtgcacttcgtgcgtgacggcaagctcggccaggatctcaccgaagaacttgacgacgcgctggtggttgccggccgcgccgccgccccggcagctgctgccgatgccgagaagtccgagaagtaaggaagaaggaataccatgcctaccctcgtcgtttccattaccctgttcgtcctcgcgctgctcatcggtatcgaggtcatcggcaaggtgcccgccaccctgcacacgccgcttatgtccggc

SEQ ID NO: 1548 - DNA, 8381 bp, Unknown
  R221_24m  MAG No. k141_11556
cggagccggagccggagcgggcgccggagcgggggtcaccggagtagacggcgtaccgccctggttaccggtatccacccggttggcggcgtcctgctgttccttctggtactgacgattgtaggaatcgacctgggaagcgatcagtacggtctgggccgcctgcttggcggattgggaatccagactgtcgatcatggaagacagttcgtcacgccttgtttcgccctcctggcgtagcttgtccaaagcgtcacgttcgctttgcgcggtttcggcggcggtctgtgcggaagcggccttctcatcggactgggtcttgagcacagcgatctgcttttcgatggccgccagacgttcgccacggttcttcgacgtgctcagtgaggtcgcggcggaggaagccgcattcgcctcgttgcgggacaacgcgtcccgggactgcatggagttgacgaagtcctgtgtgctggtggcacccgtcaccacgctcatcacgtcggaagcattcgagccgtgcatctcgtcacgggccagctgggccacggcggcgtgcgcgtcatcgtagtccttgccggtctgcttgatccgctcctcgagcgtctccttgtctttctgcgcggcggaaagacgtttggatgcggcgtcggcctcgtcctgagcggtggcggcatcctcgttggcctgcgtgaccttggcctgcgcggcgacaatcttgttgttggtcagatcgtccagctcaagtaccttattcgccaggtcctggctggcaccggccagctgctgcttgagttcggcctcgcgctgtaccgacgcggcgtgctggttctgcgcattgatcaggtcggaataggtgtctgcctgggcaggctgtgccgagctgaacgccagacctcccacacaggctgcggcggccaccagtgccgccagtgcgggcttgatcacacgtacgttcgtcatatgtgaatagtcctttcgctcacttaagccaataccataacatgcgaacctgagaggcttgcacacgatgtcatcacatttctcgcgggtaagccggtcgcgttacgccctcaaataacgccgcaacgagatggttgaagcgatgacggacagcagtatcgcgcccacaaccaggaacggcgatatcaccagtaccgtgagctgattcacataaggaatccaggtaacggatttcgccagccagccggtgacgaacacgttgacgatggccgaaagcatcaggcacgagagcaccgagccgatcagcgaggcgatggtgccctccagaatgaacggcagacgaatcgtccagttcgaggcacccacgtacctcatgatttcggtttcggttcgtctggatgcggcggacatacgaatggtggttccggtcagcaggatggcgaccaccaccatcacgccggcgagcacggccgtaaccgccgtggctcggttgagcacggcgaacaccgggtcgaagatctggcgctgatcggtaacgtcttccacaccctccttgccagagagcacttcggagaccacctgatatttggtggggtccttgagcttgagccagagggagtcctgcatatcgtccgcggtcagcgtacggccttggaattcaccgttcgggtactgcttggtgaaggtgttgtcgtagaaatcctgcttgctgacgtagtcgatgttggagaccacgtcgttgagttcatcgcgaatggttttctgcagtgccgtgatctcattggctgagggcgatttgccggaagcacagttcgcggactggctggtgccgtcgggacatagccacaccacgacctcgaccttgtcgtaccagtcgcccttggctttggtgatctgcgcctgagtaagcaccgaagcgccgatgaacaggaatgagatgaaggtgaccagcgtcagcgacagcagcatcgacaggttacgggtgaggttggcccacgtttcggacagaatgaatcgtgctcgcatgatgatcccccttactccttcgcgccctcagcgggttgatcgtcggatgtttggtctgcggcggactgctcgtcagcaggctgctcggcggcggactgctcgttggccggcggtgcgggcggttccggcggtgcgggcggctccggcggggccggcggctcggcggcggatgacacggacgtatcggcaaccgcggcggtcgcggcggactcgtccttgaccaggtcgaacgcctgggtgctttccagggcggcggcctgctcatccaacgaaatgcctttgccccaggtcagcgtgtcttccagcggcgcaaacgtctcgccatagcggccggtgcggccggaatgcacggaattggccaaacgggcgatgccttcagacggctcgtcactgccctcgatggccttggtcgccgccgccagcacatgatgggcggtgtcggacttggcttcgacttcggcatccgggaagaacagggcggaatcgtaggagccatgagcctcgtcacgcacgatcttgccgttgtgcagttcgaccacgcgcttgcgcatcgagttgacgatctcttcgttatgcgtggccatgacgatggtggtgccggtgcggttgatggcgtccagcacttccatgatgcccagcgaagtggtcgggtcgaggttgccggtgggctcgtcggccagcagaatctgcgggtgattcacgtaggcgcgggcgatggccacacgctgctgctcgccaccggagagctcatgcggatagttcttttccttgccggtgagtcccacggtattcagcaccttgggcaccaacgatttgatggtggaccgccgcgtgccgatcacctcaagggcgaacgccacgttctcccatacggttttgttattaagcagcttgtaatcctggaacacgaagcccagcgaacggcggtactgcggcacttgacggttggtgatgcgccgcagatcgttgccggccacgcgaatctcgccgctggtggcctcctcctcgcgcaacagcaggctcaagagcgtggtcttgccggagccggacgcacccacaaggaacacgaaatcaccgcgttcgatatcgaggttgatgtcgtcaagcgccggtcgggtgcctttgggatagatcttggacacattgtccagtgagatcagtgccataatgctgtttactcctcggtttcggtggcgcggcgctgttcatggcgccagcggatgccggcctcgatgaacgcgttgatgtcgccgtcgaacacggcctgagtctggctggtttcgtagccggtgcgcaggtccttgaccatctggtaggggtgcagcacgtaggagcgcatctgatcgccccagctggccttgatgtcgccggcgagctccttcttcttcttggcctcctcctcgtggcgcagcacgagcagtcgggactgaagcacggccatggcggaggcacggttctgaatctgcgaacgctcatcctgcatggtcaccacgatgccggtgggaaggtgggtgatgcgcacagccgagtacgtggtgttcacgccctggccgccggggccggaggaacagtaggtgtccacgcggatgtccgtatccggaatgtcgatatggtcggtggcctcgaccagcggcaccacttccacggcggcgaagctggtctggcggcggccctggttgtcgaacggggagatacgtaccagacggtgggtgccgccctccacggacagacggccgtaagcgtagggggcgtccacctggaaggtggcggacttgatgcccgcctcttcggcgtaggaggtgtccatgaccttggccttgaagccgttacgctcgcagtagcgcaggtacatgcgcagcagcatctgcgcgaagtcggccgcgtcgacgccgccggcaccggagcggatggtcaccacggcggaacgttcgtcgtattcgccatcgagcagggtctggatctccatctggtcgagatccttctgaatctcgccgatttcgctttgcgcctcgtccagagagtcctggtcaccctcctcgtggccgagttcaacgagcgtttccacatcgtcgatgcgctgggaggcggagttcagacgcttcagctgcgattccgcggcggacagccggctggtgatcttctgggcgttttccggatcatcccacaggcccggggccgcggcctgcgtttcgagatccttgatatcggccttgagccggtcgacgtccagcgccttggcgatggattcgtatttggcgcgggcttcgccgatcgcctgggtaaagtcaaattctgccatcgtggtttaccttactgttgattctttgagattctttgggaagtcacgtccttgttgacagccttcgcacattcctctggcgttggcgggcattgccgcgccacacacgcatccgcctgcaatccatgctgccagaaggttccgggcctgccttgccgatagccggccgggcgacctcacaaatccctcgcatcagacgtgttcaactgcgggcacgaatatgcgaaggcaacgtcaaagccccgcgtaaatcgccgggatgatcagggagccgagcatggccacagctatgacgacacacaccacacgcacgatggtgcggcggcggttctcacgctgctgtcggccgtcctgatagttactcacgagaccaatagtgtactcaccgcttacgaccgcaggacttgccgccgacgccagccctgccggcgggcccccacggccctttcctttgcgctttcagcgccgccagatggtgtttcatggccaccagcatgatgtgcgaatcctcaaggcccaagtggcgttcgttgtgggcggaatcaagcgcgccctgacgtttggcgtaggcgtcgagcgtgttgtctccgtaaggatgctcgttggtgggtaccgcgccggggtcccactgccggctcatcggcagggtatcgatgatggtgatgcgcccggcacggtagctttccgcgtatccggcgacgttcagcatgaaccagctatgttcgaaggtggcgttatgcgccacgtacggctgctgggtaagccgcgcgagcaggccggcctgggcttggggccattcgtcgaagagtcggtacccggcctcgctgctgcggccgcgtacatcgatgccggtgagtttggcgatgagggcgttgccgagcgccgcgttttccggcggcacgccaaaagcgagacgggactggccgtaggcgtcgccggcggcgtaatagccctgctcataggcgtatgtctcaggttcgccggccgggcgcggactggccatgttcatgaactcgaagccgacgtcgatgatgtagtcacgcgccggatcgatgccggtggtttcgatgtcgatgcccatcaccgcgtccacgtcgcggccgggcagataggcgtcgcgccagtcgggcttgggatggtggccggtagcgttgccagacgaggcggcaccacccggcgaagtcgcgccggagagattggcgcgggccatcgccgcatcgcccgcacgcttctggaagcgctgggccttacgccgtttggcgcgtgcgtcaagaatcgccgccgtacgatcttggatatcgtccaaggcgactgttgtggggaacttgacatcgctgttttcggcggcagtgtttccggcagatgcgccaccggcttcgccgctcagatccagcatgccttggtcatcgttcgatgggcggctgccggagtacggcctgagcacggcaacggtagtcctcccccgccgttcgcgactgaccacccataggtgttgctgttcgcccagatgcaacagcgtgttgatgttgtcgttgagccgacgattggcgtaggcgagcgcgcgaggcagacgataggagccgatgaatcgatcgtaatcggtcatgaatgtgctgttgcattgggcgatgattgattccagatgctcgcgtgtggcgtaatcgatcttcaatgcgtcgtggatagcttgtggcgtcagttccggttggtccaacccgagctgaggctgtgctgcggtttcgccatattgctcaccatctgcagcaagcgccagcaatacgctgatgccatgcatcaggtccagcgaacgcacccagtcccagtcaatggtggtgccgtcggcgtctttgggcatggacgccgcccattggggaatgtctcccttggcggcgtccagccatgtgcggtcgatcatagtgcgaagccgagttcttcggcggcctcggtgggtaccgggtcgtcgcaccaataatcctcgaggttttcggtggtggtcagcgaacggatttcggcgcgatcgatatacagttcgccgctcaaatgatcggtctcgtgctggaagatgcgtgcgggccagccgtgcaacggctcgctgtggtgcttgccgtcttcatcatcccattcggcggtgatgtcgagccaacgcttgcgcacggcctggtatccgtcgaagctcaggcagccttcgtagaacgaggcggttttgtcgctggtgggtttgtagctcggattgatgatcacgtggaaggggaattccgcgatttcgcgcggatcatcctcgtcgtcgcgcacgtggtcttcgaccacggcgagcgcgagccccaagccgatctgggtggcggcgagccccacgccgggcgcctccagcatggtggtgtgcatcgtatcgatgagtttggcgagcgtacgcttggaaagctggccatggtaggccaccgtccgttggcgcaacaccggttcgccggcctgcacgatgggcaggagcttctccttgccgccggttttgatgagttgttcgacatcacggttgagttcgaggtcgactttggcgttctttccaaacattgcttttccttagggaagggtgctacagcgcgagttcttcggcgacgatcttggcgaggcgggtgcagacttcgtcggcgtaggcctgggtggcggcttcggccatcacgcgtacgagcggttcggtgccggaggggcgcagcagcacacggccggtgtctcccagcagttcctcctcgcgggccacggcatcctggatgcgcttgttggtggcggcggctttcttgtccacgttcggcacgttgatgagggtctgcggcagctgcgggaagtcggcggcgagctccttcaggctcttgccggacttgacgacctcgttgcacagggtcagtgcggtcagggtgccgtcgccggtggtggcgaattcgcggttgatcacgtggccggactgctcgccgccaagcgagtaatcgcccttgagcatttcctcaagcacgtaacgatcgcccacggcggtttccacggtcttgatgcccatgtctttcagggcgagcttcagaccgaggttgctcatcacggtgaccacgagggtgtcgtggttgagcttgccttcgcgctgcttggcacgggccagaatgcccatgatctggtcgccgttgatcatgttgccgtcttcgtccacggcgaggcaacggtcggcgtcgccgtcgaaggccacgcccatcacggcatcggtggccttgaccatggcctgcagctgctcggggtgggtggaaccggcgttcttgttgatgttgtagccgtccggcgaggcgttgatcacgattacatccgcaccggcacggcgcagggcttcgggagccaccacggaagtggcgccgttggcgcagtcggccacgatcttcaggcccttgagcggcttgggctgggttttgtcatcgttcagcggagcgatggtggccaccagatgatcgatgtacaggttggtggcggtggtctggtcgtggctcacgcggcccacgccggcaccggtcgggcggtcccagtcctggccgagcacggcctcgatgtcgtcttccttctggtcgggcagcttgaagccgccgcgtgcgaagaacttgatgccgttgtcgggcatcgggttgtgggaggcggagatcacggcacccatttcgacgttgagcacggaggtcaggtaggccacgccaggagtggggatgatgccggcatcgatcacgtcgaagccgccggcggccatgcccgcggacagggcggaagccagaaaatcaccggacacacgggtgtcacgtcccacgagcgcgcggcggcgtccctcaggctgatcgtcttgggtgccggcgtcgccgagcacacgcacggcggcatcgcccaaatccaacgccagacgtgcggtcaaatccctattggccagtcctcgaacaccatcggttccaaacatcttcggcatatgaagttccactccttgtatcgcgttacccgcaccatcgtagtcgttgtgctccaccctaggacccgactcggcaaaaaacgccacggaatctgctctaggaccagacaatggcattcccga

SEQ ID NO: 1549 - DNA, 2543 bp, Unknown
  R221_24m  MAG No. k141_12131
aaatcgtgttcgatttcttcgatcagctgaagtcccgtaccaaaggctacgcctcccttgattatcatgaggacggcgaactgcgcgaccgcgaaaaggtccacatgatgggcattggcatgacccacgatcccatcgagatcggtgtgatcagccccgatatgacccgtaccaaggcactcggtgccggtgaggtcggctacatcatcaccggtgcgaaagatgtgagtcagtccaaggtgggcgacaccctgacctcggccgtccgcccggccaccgagccgctgcccggctaccgcgaccccaagccgatggtctacgccggtttgttcccgatcgacaacgcgcaattccccgaactgcgtgatgcactcgacaagctcaagctcaacgacgccgccctgatctacacgccggaaacctccgtggccttgggcttcggcttccgctgcggcttcctgggtctgctgcacatggagatcgtcaacgagcgactctcccgcgagttcggcctcgacctgatccagaccgccccgaacgtcacctacgacgtgaccgccgaggatggcagtcagcatcatgtgaccaacccgagcgaattcccggacggcaagatcaagaagatcgtcgagccgatggttgccgccgacatcatcacacccaaggaatttatcggtgcggtgatggatctgtgccaggaccaccgcggcattatgggcacgatggagtacatctccaccgatcgtgtcgagatgcactaccgcattccactggccgaaatcgtgttcgacttcttcgaccagctcaagtcccgcaccaagggctacgcttccctcgattaccatgaggatggcgagcagtccgccgatttggtcaaggtggacatccttattcagggcgagaaggtcgatgcgttcagtgccatcgttcaccgcgataaggcgtattcgtacggtgtgatgatgaccaagaaattgcgtagtctgattcctcgccaacagtttgagattccgattcaggccgcaatcggttcgcgtatcatcgcgcgtgagaacattcgtgcgttgcgcaaggacgtgctcgccaagtgctatggcggcgacatcacccgtaagcgtaagctgctcgaaaagcagaaggccggcaagaagcgtatgaagatgctcggccatgtggaggtaccgcaggaggcgttcatcgccgccctgtccaccggcgaggactccaacgaccgcgacaccaaagacaagatccgcgccgctcagaagaccgagggctagtgttcgaggtctacatccacgtcccgttctgcttgcggcgctgcggttactgcgacttcaacacctacacggctacggatcttggtgcgggggcctcgcgcggcaactatgccaatatggtcattcgtgaaatggccctgaccaagcagtggcagctcgaccacggcatcgaggagccaccggtctccaccgtgttcttcgggggtggtacacccacgattctcgccgcccgcgatctggtcgccatgctcgatgccatccgcaagatctggagcatcgcgcccgacgccgaaatcaccaccgaagccaacccggacacggtcaacgaatattacatcaatgagctcgctgccggcggcttcacccgcgtttccttcggcatgcaatctgccgtgccgcacgtgctcaaaaccctcgaccgcacgcatacgccggccaacgtggccgcaggcgttaatgccgccaataaggccggcctgcgctccagcgtggatctgatttacggcgcaccgggggagagccttgacgattggcgcacctcggtcacgaccgccatcgacctcggcgtgaaccacatctccgcctacgcactgaccgtggaacccaccacgaaaatgggtcgtcaaatcgcggccggcactctgcccaaacccaatgacgatgacgaagcagccaaatacgaaatcgccgacgacctgttcgccgccgccggcctcgaatggtatgaggtctccaactgggcccgccccggatacgaaagccagcacaacctaggctactggcgcaatgtcgactgggctggcgtagggccgggtgctcattctcattacaacaatgtgactgagattgaccgcccccagtcagctttgctgacagcccccgccagcgggggcacaaccgaggccatcgcccccgctggcgggggctgtccggcggaagccggactgggggtggttcccgtctcccacggcctgcgcagctgggatattgcgcacccgcgactgtggggaactgccatcaacgagcatcgcataccgtgggccgatagcgaggcaatcactgcggaggagaacctcgaagagctcatcatgcttggcctgcgtttgcgcgaaggccttgacctcggccgcatcaatcaggccatcgcagccaacgagaacacttcatggcagaccattgccgtcgattcgcttcgaccgatggttgacgaaggtctgatcaccatatccggcaatcgtgtcatccccacccgccgagggcgcc

SEQ ID NO: 1550 - DNA, 48644 bp, Unknown
  R221_24m  MAG No. k141_14746
gggcgcaggacctggtggattcatgcccgcccgcccctcatcccgcgcgccgacgttcgctcgccccatgctcctccgatttcacgcgggccgggtacggcgacgccctggcccgtctcgtcgaccatctgcgcgccggcgacgcctacgtcgtcaacatggcgcagcgcctgcgcctggagacatccgggagcccctatgccatctaccgttatctgcgcacccacaacccggccccgttttccgcctatctgcgcgcaccgggtctcgacgtgtgctgttcgagcatggaacggttcatggagattcgctcggggcatgtggtgacgcggcccatcaaggggacccggccgcgcggcggcacgccggacgaggatcgggcgaaccgagaggaactcgcccgcagcgagaaggaccacagcgaactgctgatggtcgtggacctcgaacgcaacgacctgtcgatcgtctgcgaaccgggttccgtcggcacggaccccgactttgccatcgagacgtatccttccgtattccatctcgtcgcgaccgtcgaggggacgctgcgcaaggatcgttgcgccgtggacgcggttcgcgccgcgttccccaccggttcgatcaccggcgccccgaaggttcgcgccatgcagatcatcgacgagctcgaacgcgcgccccggggattgtacacgggcagcatcgggtatttctccgatacgggcgattgcgatttcaacgtcgtgatccgcaccatcgtgcgggagggaggcgagacgtcgctcggcgtgggcggaggcatcaccgtggaatccgatttcgacttcgagtacgacgagacgatacagaaggcccgggcgctgcgtgaggccgcttccgttgacagggggagcgtcggcgagtacaatcgtgggcaaaacgaataactatcttcagggcagggtgcgattccctaccggtggtacagcccacgagccgcaaggcatgatttggtgagattccaaagccgacagtacagtctggatgagagaagatgaaagtacgttcatgcttcgtcgtacgccctgaaatgatgccatatcatttcagggcgttttcgtgttcgcatgaaccttcttttgtatgccttggatagcgtatgggcgcaacatgcttggaggcgtacatggacgatgcgcagtacatgggactcgcgatcgagctggcgaagcgaggggccggatacgtgaaccccaatcccatggtcggcgcggtgatcgtcaaggacgatcggatcatcgggcaggggtatcacgagatgttcggcggattgcacgccgagaggaacgcgttgcggcattgcacgcagtcgcccgccggggcgacgttgtacgtcacgcttgagccgtgctgccattacggcaaaacgccgccatgcacggaggcgatcgtggaaagcggcatcgcaagggtcgtcgtcggaaccttggactgcaatcccgtggtgtccggcaagggcgtgcgcatgctcgaggaccacggcatacgggtcgatgtgggggtgctggccgacgagtgccggcatctgatacgggtgttcagcaaatacatcaccacgcatacgccgtatgtcatcatgaaatacgccatgacgatggacgggaagatagcgacccataccaatcaatcacggtggatcagcggcgaggagtcgaggcgtcgggtccatcagctccgtcgatccgtcgcggcggtcatggtgggggtgaacacggtgatcgaggacgacccgttgctgacatgccgcatggcacacggaaggaacccggttcgcgtcgtctgcgatacgcgattgaggacgcccctcacctcgcggatcgtgcagacggcgaatgacgtcaggacctatatcgccaccgcctgcgatgacgaacgcaaggcggaggactaccggcggcacggctgcgaaatactcgccgtcggaaggaagggcgaccacgtcgatctggcggacgtggtgcggcgcctgggggatatgcagatggacagcgtgctgctggaaggcgggagcgcgatgaattggagcgccctcgaacagcggatcgtcgatgaggcgcacgtgtacatcgcgccgaagatattcggcggcaccgcgaaaagcccggtgggcggccaaggagtcgccctgccttccgacgccgtcatgctccggccccgcgcctgctcccgggtgggagaggattatctggtggaaagcgaggtggtgtattcatgttcacgggaatagtggaggaagtcggaacggtggcggacatacggaggagcgccgccaactgcacgctgtcggtcgatgccacgaacgtgatggaggacctccatatcggcgacagcatggcggtgaacggcatctgtctgacggtcgtcgatttcgaccggcgacgcttcaccgtcgacgtgatgaatgagacgtggcgcagaacctcgcttggcgtattgcgccgcgggaacggcgtcaacctggaacgggccctgccggtgaacggaaggttcggtggccatatcgtcaccgggcacatcgacggcacgggcagcatatcctccgtgcggcgcgaaggcaatgccgtgtggtaccggatcgcggcgcgaaacgagatactcgaaggcatcgtcgagaaaggctcaatcgccgtcgacggcatcagcctgacggtcgcggagatcacggaaagggacttctcggtatcgatcatcccgcacaccttggcgcagacggtgctgggcgagaaacgggtcggcggcgtggtcaatctcgaaaacgacgtattgggaaaatacgtgcggaacatgatgacgacccggacgggactgacgcaggatctgctgtcccggtgcgggttctgagaaaggatgtatgaatcatgaaccatcagtcggggcaagcggcgttgcaggcgctgcgggaagggaagctcgttctggtcattgatgacgaggaccgggagaacgagggggatctcatctgtgccgcgcagtcggccaccacatggaacgtcaatttcatggcaacccacgccaagggattgatctgcatgcccatgagcgagcaactggcccacaagctgatgcttccgcccatggtcgagcacaacaccgataaccatgaaaccgcttttacggtgtccatcgattaccgtggcaccacgaccggcatctccgccgaagaacggggattgacggctcgcatgtgcgtctccgatgacgtggaacccctcgatttccgcagaccggggcatatgtttcccctggtggcgaagaagggcggcgtcctggaacggaacgggcacacggaggcgaccgtcgacctcatgcggttggcgggattgcgtgaatgcggcctgtgctgcgagatcatggacgacgatggccggatgatgaggacccccgacctgacccggttcgcccaggagcatcagatcccgctcctgaccatcaaggaactgcaggaatacaggaaagcgcacgatacgctcgtcgaatgcgtctcgaccgtggcgatgcccacgcgatacggggaattcacggcgcactgctatgtgaacaggttgaacggcgagcatcatgtcgcgctggtcatggggaatctgggcgatgggaccgatgtgttgtgccgggtgcattcggaatgtctgaccggtgacgtcttcggctcgttgcgttgcgattgcggtcagcagttggacgcggcgatgcggacgatcgcggagcatggctcgggcgtgctgctgtacatgcgtcaggaagggcggggcatcggtctggtcaacaagctgaaggcctaccgtctgcaggacgagggcatggacacgctcgacgccaatctcgcgttgggattccccggtgacgcgagggagtactacatcggagcgcagattctcagggatttggggatacggtccatgctcctgctgaccaacaatcccgacaaagtgtatcaattggaagactatggaatggagatccgcgacagaataccaatcgaaatcgaagccaatgcttacgacagtttctatctcaaaaccaagaaaaaccgcatgggacatatcctgaacatggaggaggaataaatgcacacgttcgaaggcgatctggtagccgaaaacatcacgataggcatcgttgtggcgaggttcaacgagttcatcacctcaaaactgctggcaggggcgctggacaccctgaaaagggagaatgtccgcgaacaggacatagcggtggcctgggtgccgggcgcctttgagatacccctgatcgcgtcgaagatggccaagagcaagcgctacgatgcgatcatctgcctgggcgcggtcattcggggcagcaccagccactacgattacgtgtgcaacgaggtctcgaagggaatcgcgcagaccagcctcgacaccggtgtgccggtgctgttcggcgtgctgacgacggattccatcgaacaggcgatcgaacgggccggcaccaaagcggggaacaagggttccgagtgcgcgcagggcgcgatcgaaatggtgaatctgatccgctccatggacctctgacggcgaaccacccggctgcgggcgggggtcttccagacgttcccgcccgcttcgcgccacacggccaaggcccgatcgatcgccgcgcccgctaccgcagggtgagcgttgcggccaaagccagatggtcggtgtccggcacttcgaaggacgtcacgccggacggtctgagcccttgggtgaacagaatatggtccagttcgatgcgcggccacttgagccagcgcgggaaggtgaggttcggtccggcggcttgaatcagactcgcgtccttgaatccggacttgagcaacgcgcggaagctcgggtggtcggtgctcgagttgagatcgcccataacgacgacgatgttgcgattgctgacggattttgcacgggcgagttctcgcagacccagaatgccggccgaccaatccgcgcagccgcgcatcggcgatttcgggtgagccgaacaaagcgtcaccgtgcgagtaccggaggttttgagggtgatggcgggaacgtcggcggcagggatggagaccacgttgggcaccgctgcgctcggctcgtagcgggaatagatcacgttgaatccgccattatcggtctctttggcgtctccgaactgatggtaggggaggagttcgttgatgtcggcttcggtaagacgtgtgatgaggtcgtcggtgacttcctgcaaggccaatacgctgatattgcgttcgcgaatattgcgaatgatttcagcggcgtcggcgcgtccgtatcgacaattcatcgtcataaccgagaactggggcgagagtgtttcacgcgttgtttcacggtgcccatcggggactgtttcgggtccttccttcggagtgtttgaggtgctcgatgtattgctgttatggctttttgacagcgtcggcgaagttgtttcacgggctgtttcacggtgggattctctgcgtttgccggctgggtcgattgacgtaccccagtagttgatgcgctgtgagctggcaatcagcgcgaccacaataagcgacgacatcgcagtccattcatgttgccatgcggcgaccgcggccagaatcatcaaaggaacccacagcagcggagtcagggcaatcatgtacggaagcggcatacgggcctcgagaccggcgggcagcgcgcttaaggccgtccataacagtgcgatgattgccaccgcgctgaagattgtcgtcatggaagttcctttcgaaatataaattgaaccgagatataacttggctcccctctgcgaggggagccaagttgtgagatcagcggccgaacagtccgccaaggcctccgccgaggttcggcggcagttcagtgccaccatcgacgttgcccatcatctgttcaaggccggcgggcagggccgggttctgcggcttcttggcgaaggcggaaccgccggtcgaaccggaggatttgccggccagcttgtcgcgcaatgccttctcctcggcctcgcgcttcatcggattgccggatttgccgcctttcttcttgttcttgcccttcttcttgccgccgcccatagccgggccgccgaagccggggatgccgccgcccatgccgccacgattggacatgcgcttcatcatctttgcggcctgctcgaaacgctgcagcaaagcgttcacctgagaaaccgtcacgccggaaccataggcgatacgggcgcggcgggaaccattgataatcgacggatcgcggcgctcggccggggtcatcgagcgaatgatcgcctcggtgcggtcgatttccttctcatcgaactgctcgagttccttgcggtgctgggccatgcccggaatcatgccgagcagcgacttcatcgagcccagcttgcgtacctgctgcagctgatcgaggaagtcgtccaggccgaaggagccttcggagattttctcggcggccttgcgggcctcttcctcatcgaactgcttctgcgcctgctcgatgagcgtcatgatgtcgcccatgtcgaggatgcgcgaggccatgcggtccgggtggaagacctcgaaatccttcaggccctcaccgttggaggcgaacaggatcggcttgccggtcacggacgccacggacagcgcggcaccaccgcgggcgtcgccatcgagcttggagagcaccacgccggtgaagtccacgccctcgtcaaaggccttggcggtcttgacggcgtcctggccgatcatcgcgtcgatgacgaacaggatttcgttggggtgcacggcatcgcgaatgtcgcgagcctgcctcatcagctcctcgtccacgcccagacgaccggcggtatcgatgatcaccgtgtcgtagagcttctgcttggcgagttcgatggaatcgcgggccaccttcaccgggtcgccggaggtctggcccggagctgcgacggcctcgccgccatcggattggacgcccttttcgggagcatagacgggcacgccggcgcgttcgccgaccacctgcagctgcgtcaccgcgttcggacgctgcaaatcggccgccaccagcagcggcgtgtggccggaatccttgagccagtagccgagcttgccggccagcgtggtcttaccggcaccctgaaggccggcgagcatgatgatcgtcggcgggttcttcgcgaagttcagcggacgatcgaccccttggccgagcacgtcggtgagctcctcgttgacgatcttcaccacctgttgggcggggttgagcgcgtcggacacctcggttcccagtgcacgctcacgcaccttgccggtgaaggaacgcaccacgtcgagcgccacgtcggcgtcgagcagcgcgcggcggatttcacggatcgtaccgtcgatatccgcctcggaaagcttgcccttgctcttgagatgcttgaacgcattcgagagtctgtctgtcaaagatgaaaaagctgccataatgggcaacagtctagccgccacgcgggaaattgcggtgttggggacgacgctttccggggaatgcgtcgcgtagtagtcagggatgttgggcattcagacggcaaatgccgtgccgtccgctcgtggcgaagccaatcgagtgcttccgataccatggaaaccgtaaagaatcctgtgttttttggaatgcttacgctgttttgaaaatcgctggacaccgcttatacgcagactgccgtgcgctccgaaccatgacgttcgggccaacgcagacatgccgtgcaataaggaaggcccactgatgcccacccaaaaactactcgaacgcaaagccctgatcgttggtatcgtcatcaacgtgctgcaggtcttagccggcatggccgtgttcttcatgaccggcctcaaggccatgttcctcgacttctccttcaccgcgatttccgtcctgtccggaatggtggcggtgtatctctcgtcgcgcacggtgcgaaccaccgagcgcttccccaatggcatgttcgcactggaacccatctacgcgatctgcaaggccattttcaccatgtcgttgttggtgtattcgctgattgacgtgtgccgagtagcgtacgactacttcgtgttcgggtccggcgaacgcattgaaaccggcccggtggtcatctacgagatcctgaccgtaatcgtgtgcttcagcctatacacgtattaccggcgttccaatcgctccatcggcgattccagcaccatgctcaccgccgagtgcaagagcacgttggtcgacggatcgatgtcgttcggcatcggcgtggttgccatcttcctgatgctgctaccggccggcggtccgcttgacttcctgcactacaccggcgatttcttcatcaccgtggctttggtggcattgaccatcaaggagccgttcagcgtgctcaaagaggcgttcgtggaattggtcggcggcgtgcatgacgacgatgagaccaacgcctacgtggaggccgaggcacagcgccatctgcctgccaacaccgactacgagcagacgctgatcttcaagaccggtatgaactacaccgttgacgtgtacctgagcggcatcggcgaaaccattgatgtagctgacctcatcgaatgcaagcgctcgctggagaaggagctcgccaagcgcctgcacatcgtggacgtggacttcgtgtttgactgattgatgggtttgaagcggctacttcaggctccaagtggaaccctgcgggccgtcttcgatggcgatgccggcctcggtcagggcgtcgcgaatctggtcggccttggcgaagtccttggccttgcgggcctcggcgcgggcgttgagctgctcggcgatcagtgcctccagcgccgcatgttcgggcgactcggccgtgccatcagcggcaccgccagcagacacccacggctcggccagcgggtcgagacccaaggtgtcgagcatggcacgcacggcgagcagcgcctcacgcacctcggccttggcggtttcggaatcggcgcggtcagccagctgtgaaagcaacgtgttgccggaacggatggcagtgaagattgcggcggtggctccggacacattgacgtcgtcattcatggcggccacgaaatcagcgggcaggtcgtcggcggagacggcagcaacctcctcgcgagaaggctgaccgcccagtgccacaccggcgcgctcgatgaagttcgagacacggtcgtatgcggcctgcgcctcgaccaacgcctgatcggaccattcgagcatcgaccggtactgcacggagcccaaagcgtaacgcaccacccaagcggaatgctcggccagcacgctcggcacggacaggccggtgcccagcgacttcgacatcttctcgcccttggcggtcacccatgccgaatgcatccagcgcgcagcagaggggtagccggccgcgcaggtctgcgccatctcgttttcgtggtgggggaagcgcagatccaaaccgccgccgtgaatgtcgaagccatcgcccaggtaacggtgggacatggcggagcattcgatgtgccagccagggcgacccacgccgaacggcgtcgaccaacgggcgtcctcgggatcggtgtccttgggggccttccacagggcgaaatcacgcgggtcgtgcttgtcgggggaggcgtcggccgggtcgaccggattgtacttgtcggcaccggtggcgtccacggacgggcccatgcggtcggccacggcggcggcctcatcgacttcggaggtctgcttctggtgggtgagttcgccgtaatgcggccaggatgccacatcgaagtacacgttgccggtgggcttgccgtccgcatccgtgaccacatagccgtggccgttgtcgagaatgcgctgaatcaggtcgatcatgtccgacatgtggccggtggcgcgaggttccacggtgggcggcagcacgccgagcgtgttgtacgcctcggtgaattcgcgctcgtaataataggcgcgggcccaccaacgctggccggcggccgcggccttatcgaggatcttgtcgtcgatatcggtcacattacgcacaaaagtgactttgtagccgagcttcaaaaaccagcggcgcacgatgtcgaacgccacggcggcacggatatggccgatatgcggtgacgactgcacggtggcgccacacacataaatgccgacttcgcccggcttgagcggcacgaaatggctgacctggtgcgaggcggtgtcatacagattcaggccttctgcggccttggcgacatgcaccggcgtcaggcttgaaggcatgacggaaatgttgaaatcctgcggttcttggctgtttcccataacgctcaagcgtagggtccgaaccagacatgctgaattgttactcgaagagcttggtgaacgcttcacaggcggggcccgaacgaggtgacagacggatgagaagcgggacaacagtctcgcgagaacacgtctttgaccgctgcggaaactgcgagattcatggatttgccctgctcgttacgcaaacggggaacgctcgtgccacaatagaagtcatggccacaccacaagtgctcattttgcaacatgtcccatgggaacgcccgggacgcatattgtcgaacctcgaagacatcggtcttgagacggtgacgatgaatatcgtcgacaaaaagaaaccggacttgcctgatttcggcgaactggctggcgtggtaatcatgggtgggcctatgggcgcgcttgattacgacaagtatccggggctgaaggcggaagccaagttggcgcgtgccgccgtggcttcaggcaagccgattctcggtgtatgcctggggcatcagattatcgccactgcgcttggtgcgcagctgcgtaagggcgatgcgccggagattgggttcgcgccgatcaagcgtgtggacaagcatgacttcttctccatgtgggataagcagctgacggtgctgcactggcataacgacgtggtgggcttgcccgagggaggccagctgctggcacgttcgtcttccaccaaggtgcaggcattccgactgggatccgcgctgggcatgcagttccatcttgaggtgtgcggctcgctgctggacgaatggctggatgagccgagcatggtcaaggatctcaaggccgcgggtgggtccaagtcccaattgcgcgagcagttcgcccaatacgatcagctactgcatccgctcgccgagcaagtgttctccggttttgcggcccgctgcaactcctacgctcagacgctgggcaaataacgtttgtgggccgccgctgggcaagcgtggcgctacattggtgagtcatgccgacttatgacattggactggaacacgtttcgctcgctttcgctaccaaaaccatcttcactgatgtgacgcagggtgttttcgagggcgaccgcatcggcatcgtcggcaagaacggcgacggcaaatccacgttgctgcacctgttccgcggcacccaggagccggattccggccgcgtgacgaagcgcggcggactcacgttcggcatgcttgaccagcgcgatccgctcgacgacaacgccaccattcgcgaagccgcacttgaggggcgcgccgactacgaatgggcgtccgacaacacctcccgtgaaatcgtcgaggcattgctcggcggcatgagtctggatgccaaggtcggctccttgtccggcggccagcgtcgccgcgccgatttggcccgacttctgctcaaggattgggatattctcgcgcttgacgagcccactaaccaccttgatgtggtcactatccactggcttgccgagcatttgaagaaccgctggtccaaaggccagggcgctctgttgctcgtgacccacgatcgctggttcttggacgaggtctgcgaatcgatgtgggaagtccacgatggcgtgatcgagccgttcgagggcgggtattcggcgtatatgctgcagcgcgtggaacgcgaccgccaggcggatgtgcgtgaaacgaagcgccgcaatctggcccgcaaggagctcgcatggctttcgcgcggtgcccgtgcccgttccaccaagcagaaattccatgtcaaggccgcgcgcgagcttattgccgacgtgccgccgatgcgtaacacacttgaactgaagcaaatggccacctcccgtctcggcaaacaggtggtcgatttggtcgacgtgacgcagattttcgaaaaaccgcagggcatggccgatatcgacccggatgtggcggcgctctccgcgtccgcttcccgcgtggatgtggtcaacgccatgtacgccgagccgcagctgcacggttccgttgaggtggcggtcaccgacatgactgacctgcgcctggtggacgccggcgtgccggaagccgtcgaggccgctgaggaagcgcgtaagaaggccgaggctgagagcggcaatccgcagcttgctgacgatcgcgaggttcgtcgcatgaacacgggtggtgaaaccatcggcggtgacactgctgcaacgaattcggatgatggcactgctgcagccggtgtcacctcggctgcacgcaaggtgacggtttccggccgcgagattttggatgatgtgacatggctgattggcccgggcgaccgcttcggcatcgtcggtgcgaacggtgccggcaagtccacattgctgaagttgattgacggttcgattactccgaccgtgggccatgtgaacatcggcaaaaccgtgaagttcgccgtactctcgcagcgtcttgatgagctggagaaactgggccagtacaagatcaaggaagtgctttcccgctataagccgagctacattgtggatggcaaggaagtaacgccgggacagttgatggagcgtctcggctttgaatccgcccagttgatgacgccgattcgcgacctctccggcggacagaagcgccgcatgcagttgctgctcatcctgctcgacgagccgaacgtgctcatcatggacgagcccggcaacgatctggacactgatatgctcgccgtcatggaggatttgctcgatacttggccgggtacgttgatcgtcgtatcccacgaccggtacctgctggagcgcgtcaccgatcagcagttcgcgctgattggcggcaaggtacgccatctgcccggtggtgtgcaggattacctcgatatggttgaggctattaagaacggcaagggattgccggctgacacgcctggcttcgcgggcaccggtagcagctcggcgaagtctggtaggggtaaggcggccgccgtcaatgttgctgcatctctccctcagtccacttcgcggacagctccctcgtcagagggagccaataacggtgaggactccacctcgaagctcaccggcaaggccttccacgaggcatccaagcgcgtgaatgccatcgagcgcaagcttgccaaactggaagagcggaagaccgaacttgaggcacagatggccgcacatgacccgagcgactacgagggtctcaacaagctcaatgaacaactcaccgccgtcaatactgaaagcgataatctcgaagccgaatggctcgaactctccgaacaattggagtagcgggagaaaccgtaacgttcacaaggcctcggtagtttgccggggcctaccgctatgcaaactcccacggattaatcaattccacgtcggtaccttcgaagtccttgatattgcgcgtggctatggccgcatcccaggaacaggcaattgccgcaatcatggcgtcttgaatactggtaggtgtgcccctgcgttcgcgttcgacaaggatatgggcataatccgcagctgcctgggtgtcaaatgcgaacgtcctgtcctctaatgtcataagcgccagcttgacggtcgtatctgtgtactttcgtcgtttgccttcaggcatgcgacatattccgaccaacaactcggcgacggtgatggcggtggttgccagattgcttgtatcttggttcctcagccaattggcaacgtgttcgtctggctgtttcttgatgatttcgctgatgacgttggtgtccagaataatcatggccgattcctattcaaaagatactggcggtcgggaatcgtcggaatttcgctcggatagtgggagttcccccttgtcgagtccctcaaaatccatgttcttcatgaattcgcggatctcgtcgtagaaattggtctttcgtgtgatttcatgcgccaccgtgccggccagccattcttcaagaatggatcgcacctgagattccatggagcggttgtttttctcagccacttctttgagctgttgaatctgctcatcgggtatttttcggatggtcaatgttgccatgatgcacctccttgttgctgtcataatgctagcataaggtgctgtcattttgcttgcagcacgggtgatgaggtatgcacgcatgaaaaaggcggatatgcatcatgcacatccgccctttgagcttggactgggtctccccgcagtcgccgaatcagcgcccggtaacctcggaaccgacgaccttttcgctcagggcgcgcgggccgcgggtcacggctacggcaccggagcgcaccagctcaatcacaccgtaatgctccaaaagccccagcagcgcatcgatcttaccttcggcaccggtggcctcaatggtcagcgattccggattcacgtccaccacacgcacgcggaagaggcgcacgatctccagcacgtcggaacggttggattcgtcggcggccaccttgatgagcaccagttcgcgttccacggtggagttcgggtcgagctccacgatcttcagcacgtgcagcagcttgttgagctgcttgatgatctgctccagtggcacggcctccacgtcggcggtcaccgtgacgcgtgagatgtccggacgctcggtgggggagacggacagtgagttgatgttgaacgcacgacgggcgaacaggccggcgatacgcgccagcacgcctgggcggttctccaccagcacggacagcgtatgacgctgggaaccaggctgggatgcaggatagttagccatgagtgttctcctctcctcagtgctcgctcgcagcggcagcggcggtctcgtgctcgaacacgccggtcgcatgctcgtccggaccggttcccggagccggggtgccgccggtcagcggcttgatgccgggcttgtacgtcacctcgtcgttggaagcgccggcggctaccatcggccacaccatcgcatctttccacacgcggaaatcaatcagtaccgggcggtcgttgatctggttcgccttttcgatggcggcaatcgcctcttcctcggtgaacgcgcggatacccacgcagccgtatgcctcggccaacttgatgaaatcaggcacttcgagcggcgcatcgccgtcgaccagtgccgccgcaccatcggcaccgtgcgcctcgccatcgagcaggttggtctgcgagtagtggtgctcgtagaacagcgtctgccactgacggaccatgccgtacacggagttgttcagaatcgcgatcttcaccggagcgtggtccaggaacgcggcggccagctcctcagaggtcatctggaaggaaccgtcaccatcgatcagccacaccggcttcttgccctcgaactcgcgggccgagcccacggatgcgccgatggcggctggcagaccgtagcccatcgtgccgaggcctccggaggagatccaagcgtgctggttctcgaaatcgatgaactgcgaagcccacatctggtgctgtcccacaccggtcacccagatggtggacggatcggccatctcagagagctttttgatgacccactgcggggccattgatccgtcggtcggctcatcccacgtcatcgggtattcctcgcgccagccgtcgatcgccttccaccagggggccagattcggcttgccctgaatggcctgcgtgcgctggatttcgggaatcaagtcgtcgagcacggtagccgcatcgcccacgatcggcacgtcgggctgacggttcttgccgatttcagccgggtcgatgtcaatatgaatcacgcgggcggtcggtgcgaaggcgtcgagcttgccggtcacgcggtcgtcgaaacgtgcaccgatggccacaagcaggtcagcgcgctgcacggcaccggttgcggcaatcgtaccgtgcatgcccagcatgccgaggttcttcgggtcggagtcgggaatgatgccgcgtgcgggcagggtcgtgaccacgggggcgccggtcaggtcggccagagccttgacctgtgcgccggcgttggagcgggcggcgccgccacccacatacagcaccgggcggtacgactgagagaacagcttcgccgcgtcggacagcacacggccgtgcgccttggtggtggggttgtagccgggcagaatcatgcgctgcggccatgagtagtacatgtcgccggtctgtgcggtcttggtcagatccacgaccaccgggccagggcggccggtgttggcgatgtagtacgcctcggaaagcacgcgaggaatgtcctgcgcgcgggtcacgaggaaggagtgcttggacaccgggtaggtgatgcccacgatatccgcctcctggaaggcgtcagtgccgatggcctgcacgcccacctgaccggtaatcacgaccatgggcacggagtccatattcgcgtccgcaatggccgtgaccacgttcgtggcacccgggccggaagtcacgatgcacacgcccaccttgccagtggccagtgcgtagccttcggcggcgtggccggcggcctgctcgtggcgcataagcacgaagcggaacttcgtgttgtctttgatctcgtggtagacgggcagaatcgcgccgccaggaatgccgaagacgtcctcgacgccgagatcctccagcgaacgcaccagcgcttgggcgccagtcatcttctcgccatcaacgatggtctgcttatcgggggccgcgttgattttcggcacgccgctgaatgcctgcaaaggcgtgggtaaagccatgattcctctcacctcatagattttgccgcgaacctgcccgaccttgggatggggccgggtgcccgcgtgtctgattccagtcgcttctccgagacttgtggccccggcacgactcgtcgctcatgttggtatcagtctattcgcaaatctgacagcgggcttacttagtccgcgtcttgagcgagtccagtgacttccagcccgcttcggcggccgccagctgcgccttacgcttgctggagcccttaccgatgccgatgatgtcgccgttctcgcccaatgagacgcgcgcggtgaagatctgcgcgtactccgggccggagacctccatatggtagaccggctcatccttgccgaggccgtgcgccttgacggtcagcgaggtcttccagtcaagtgccgggccctcggtggccacttcggcgagcgtgtcgtcaataagccggtgaatcaccttgcgtgcctcgtcgatgccgtgttccaggaaggttgcgccgatgagcgattccacgatgtcgcacagaatggagttcttctccgcgccgccctgctcggtttccccgtgacccagcagaatgtaggggcccaccttgagcttggttttggcgatggcgctcagcgcgtcttcggagacggccttggcgcgcatcttggccagttgcccctcggtcatatccgggtgaatggtgaacagcgtttcagtggagaccagttcgagcaccgcgtctcccaggaattcgaggcgttcgtaattggccacgccggggtgctcatgcgagaaggagcggtgggtgagtgcctgcacgagcagatccgggctgagagtggtgcccaacgcttcaagaagctcgttggccggcgtcggctgctgtggggtttcattgctcatgattgttgtatggtccttcacgcgatggtgatgtgttgtgtgttgtgttgtgttgtgttgtttgcgatgcgatggtgtacgtaatggtgcacttatgcgaagaccccgccacccgtcgatggcagggccttcattcaagccgttatcgcaggactcacttggtgtgagccggctggatggcggagcggtaggtgcggccgcggtagttaccgcagctcgggcaagccatgtgcggcagggccggagcgccacagttcgggcagttcacggtcgcagcagcggtggccttccagttcgcgcgacgcgagtgcgtgttggcgcgcgaggtcttgtacttaggcagtgccatttgagtatcctctatttcgttcgaacaattgagcttaagcgtccgttatcttaacgcacggctcgtacaaactccgttcaggcgcgcgtcactcggcctgctcgccgttctgctcggcctcgagctgggctttgagccccgccaatccggcaaaacggatatccgtcacatcgtgatgatggtcgggatcctcgttcagatcggcaccgcactgcgagcacaggcccttgcaatccggtcggcacagtggctgcaacggcagcgattcgaccagcgtgtcgcggatcatcgcctcgatgtccgcgaatgcgccgttctccagcagcggatacgtgtcttccgactcgtcctcgccggcgatgatgtcgatctcgtcgtccttcttgttcttgccgcccttgccgttggccttgtcctgacccgactcatacgggaagaacaccgtcacatcaaccggccagtcctcgtcaatcggcttcaggcagcgcgtgcactcgctgacgaatggcgcgaccaggcggccggtgaagatcaggccgtccacaatcgaatcgaactgcccgctcacatgtacgggctcaccatccttgatgccgacgatgctgtcgccaatgccggaaggggccgggaaatcggcgtcaatcggcttggattgaccggcgcgcgaagcaatctgcgctaccggaatggcccacggggaatcttcaactcgtgccatggtatgttcttggtgcctttcgtatgttggctggagttattcgttactggcgttattcgcgttactgatgttgccggcgttgctggcgttactgggcttcgggatagtcgttcagcgtcaggtgcggcatctgttcgccggccgcacgctggcgctcttccagcacgttaagaccggcctgcacatcccgactgagtttgccgagctgctgggacagcccttccatcaccgtagtgcagtactggtccgcgccttgggtcagatggtcggctctggtctgtgcctggtcaagaatcgcgcgcgctttctgccgtgcaagctcggtgacgttctcttggccggccaggaactgtgcctgttcgttggcatccttgatcatgtcggctgcgcggctttgtgcggaggcgacgatggcgttggactgggtctgtgccgattccagacggcgctcggcctcgcgcatgagggcggaggcgcgctccaactgcaccggcagcattttcttcaactcggaaagctggtcggtgaattcgtcgcggtcaaccttcaccatgccgggggcgaatatgctggacttcgcttcgcccagtgccgcctcgagctggtcgatgatgtcatacaccgtggtgaattcctcgcggctcttgaccgtggccgggtcgtcgtccgtggtttctcgcaggtcgggcatttcgttcatgaacgaggggcgagtgccggcggcctgagcggtctgagcttgtgcccgggtctgctgagctgcttgggcctgcgctttggcctgcatctgtgccggagtaggggtaggcgcggcgggcggcgatccggcgagaacatcggcctcttcggtgggtgccggcgcggcttgcgtagacgcgggcggttccggggcggacggctccggagtggacgatgcggcgtccgcattcggtttggtcagatcgacgtatccagtggggtggtcatcgctcatagtcattagtgcatcagtccttccgctgacgttcctcggccagggcatcggccagcatcggcacgacacaatcgggcaccatgccggtcacgtcgcctccatggcgggccacgtccttgacgatggaactggagatgtgttcaagaatcggatcggccggcaaaaacagggtttcgatgccggcgagcttgcgattgaccagcgccatgccgagctcggcttcatagtcgccgttctggcgcagacccttgacgataacggtggcgccgaccttcttgcagtagtcggtgatcaggccgtcggtggaagaaacagtgacgttcttgcaaccggctttgtcaagggcacggcggatcacgtcgactctggtggcttcggaaaacatcggtgttttcgcggcgttgacggccaccaccacatgcacctcgtcgaaaaaccgcgccgagcgctcgattacatccaagtgtccggcggtaacggggtcatacgagccggggcatactgcgatagtcatgccttatagcctaccgcgaatggtgtgcttcgtgctgccgagcgtgcattgttgtcgcgtcggcgtatgaggcagtgtgtgcggtgccgtatgtggcgtcggtgcggcgttgtgtgcggcattgttatgtggcattgtatgtggcggggtggcgtgatgcgcgacatgggtgtgtggaggtgtgcggattacgcgccaatgggtttcgcgggtaacgacgggaatctatgatggagtgcagtcgaatcgttgaatacgaggaaagaagtgcaccatgacttttgccgagatgttcgttgatgatgccgaaccgctgcgcaacccggaccaaggtgccggcacgtcggtgctggaacgcccggaaaccaaggagtctccggttcgtgacgatggcggcgacgcggatcgattcgcacattatgtttctaaggaccgtatcgccgaatcacgcgcgaccggtcgtccggtggtcgccctgtgcggcaaggtctgggtgcccaagcacgatccgtccaagtacccggtttgccccgattgcaagcgcatctacgaagaaatgacgcgctaaaggtggtacttggctcccctcagcgagggaagccaaaatggtcaccgagccgaaatctcgtcgatcagcttgagctcctcgtcgctgaagtgggtgttcttcagcgcgccgatgttgtcgagaatctgctgaggcttggaggctccggtcagcacggaggtcaccttaccatcgtgcagcagccatgccaggctcatctcggccagcgtctggccgcgttcggcggccagattgttcaggtccacgacctgcttgtgcagtttctcggtcagggcggaatcgttgaggaatcgcggatcgtgagccatgcggctgtcggccggaatgccgttgagatagcggttggtcagcaggccctgtgccagcgggcagaaggtgatgaggcccttgcccagcttgaaggcggtctccttcagaccgttctcctcgacggtgcggtcgaggatgttgtatttgttctggttgatgatgaacggcacgtgcaggtcggcgagaatcgcggcggccttctccatcgtcggaccatcgtagttggacagacccacgtacagggccttgccggagttcacggcctgagccagcgcgcccatcgtctcctcaagcggggtttccgggtccgggtggtgatggtagaagatgtccacataatccaggcccaggcgttcgagcgactggtcgaggctggcgagcaggtacttgcggctgccgaggtcgccataggggccggcccacatttcgtagccggccttggtggagatgacgagttcgtcgcggtggtgcctgaagtacttggcgagcagcaggccgcagttcttctcggcctggccgggttcggggccatagttgttggccagatcgaagtgggtgatgccgttgtcgaaggcggtgaagatcagggacttcatctggtcgaatggcgtgatgtcgccgaagttgtgccagaagccgagtgagacggccggcagcttgaggccggaggtgccggcacggttgtaggtcatcgtgtcgtaacggtgcgggttgggggcatagatggcggttggctcgaacattgagtctccttacaatgtcatttttgttcttacgaatgctggtctgcgatgggcaaaccgacgccgatcgagtggtattcgtaagtgttcttggatactaaggttccagttcaagtgaacttgaatgcaaacggctgcgacgcttcggcgtgtcgccgcagtaaggagtcatgatgtcctacaccattcgtcaggtggccacgcagttccatatgcagccctctacgccggtgaagactggccggattggcgcgagtacaaaaaccgcgcctattccattgaatgctgaggccatcgagtgctgagctggatgccggctgggcactaagaccgatgtgcgtcgatcgtgggcgcgtctatccgagtaaggccttgctcggcagtgcgcggtcgagcagccagacaacgagcgatatcacgaagaacgctatggccagcttgccgcagctaatgccgaacccttgccagccgagtgcgtcgaggttgatgaagtcgtacggatacggactgccgccggccgccggtccggaccccggccaaatcgtcgcacgggccagcacgaagaccaagtatgcagggaagtacgccagccacgagaacatgtaatgccagcggaaacgccggtgcgggtcgaatagcacgaaatcgataaccgccataatcggggcgattttgtgcagcatcgtattggtcatgatgccaataacctgtggcacgtatgccgggtcgtccggaggcatcaggaagaacgccaccagtgcggtgactatggcgtacacagtcaggcatcccttaggccatgcaggcggctgaatacctttgagcagtgtggccgcgccggcccacagcatcacgatgcccagcacgaaaccggtctggaacgtgaaatacacccagaactgcggtttggaccatgcctcatatgtgcccacgaagcagaaaccggcgatcgcaaagcgccacaacgccacgatgaatctcatgcatcgagtctaccgcttcgccagtgggctgtatggctttgcccggactacacttaggtgcaacttcaccacttatgtaggaaaggccttgcaatggtcgattattcgccggctctgatgaccgacatgtatgaatacacgatgctcgacgccgctctgaaagacggtaccgccgaccgcaaatgcgtgttcgaggtgttcacgcgtcgcctgcccgaaggccgtcgctatggcgtggtggccggcaccggccgcattctggatgcgctggaacatttccacttggacgaagcggacctgaagttcctggccgaccgtcacgtggtaagccccgagaccattaagtggctggagaacttccacttctccggtacgattcgcggttaccgcgaaggtgagatgttcttcccgaactccccgattttgcaggtcgaaggcacgttcggcgaatgcacgctactggagacgttgattctatccgtgctgaactacgattccgcagtggcctccgccgcctcacgtatggcgtcggcagccaaggatcgtccttgcatggatatgggcggacgccgcactaacgagtgggccgccgtggccgccgctcgagccgccgtagtgggcggattcaagggtaccgccaatctgctggccgcccagctgtatggtctgaaggccattggcaccgccgcgcattgcttcacgttggtgcatgattccgagcgtgacgccttcgaatcgcagatcgaggcattgggcaagaacaccacgctgctggtggacacctacaacatcgaggaagccgtgaaaaccgccgtcgaggtggccggtcccgaactgggtggcgtgcgcatcgactccggcgacctagccgccatggcccagcgtgtgcgcaaccagctggacgccctgggcgccacgaacaccaccattaccgtgaccaacgatttggatgagtacgcgctcgccgcattgcagaccgcgccggtcgactcctatggtgtgggcaccatgctggtcaccggctccggcgctcccacttgtgcgatggtgtacaagctcaccgaacgtgaaggcgatgacggcacgatggttccggtcatgaagaaatccaaggacaaggccacagtgcccggtcgcaaactggcattccgctcctacgaatacgcgttagccgaagccgaacacgtgatttccggctcggaggagaagctggccggtttcacgcctgaaccgacgtggaagaacctgctggtcgactttgtggatcatgggcagatcgacgctcagtggcagggccatgacgccatcatggccgcccacgactaccacgccaaggcgttgtccgaactgcccatcaccgcgcagagcctcatgaagggcgagccagtgattcctacggagactcaggttctctgaccgtatctcactggccgcatccctttggttacattggctactcttccctctgtctgtgtccctctgtctgtgcccctctgtctgtgttggccgcactcctgtggtcgccgccgaggcggggagatccaacccccggtcgcacccccgtgtttgcaccccctgtggctgtgtcccggggctgtattggccgcgtcccctcgggctgaactgcgtcccggttcgccggacgtggttccagctgagggtggccccccttgtttttttttggggggggggtactgttcaccggggaaatatgtatatgtgcatgctgttgcaatgtacattttgttgtcagttgacaacgtcttgattcagatgaattggcgggaaatggccatttgtcttatccaattgatttgaagaacgttgtcagttgacaacgttttgtacatggtgcggaacgacacatattcctatcctggtcaggatgccgacgaggtggagtgaaaaaaccaaaccatttcagaggatattgcaccgagacgttgtgggattgccgtgttgtcggtgatgttacagagatggcgcagtgttgcgtgaggggtgttgcgtgaggggtgttgcgtgtgatgttgcgtgtgatgttgcgtgtgatgttgcgtgtgatgttgcgttgggctgattgggaggaatagtgtgccgatagaatgccgtgatgcgtgcagagcaatcgtttgcggagcaatcgttgaagaatcgtgtgaactgatgcgatacgaatcataccgtctctgaattgtgggatatgacgaatcgtatcgtcatgggattgtgggatatgatgattgcggtttgatgaaatgaccgggaaatcggccgaggcaaggtgacttcgatgagtgaaactctcaatgatgagaacgcggcgggcaacgatgacgtatcagagcggcgcgctgtagagcatcgagcgttagaacagtgcgatgtcgtgcatcacggtgtggtatctggttgccctgttaattcgtgtgcggctgtgctgaatgaagtgatgtcgcagactggttggaatgcctatgagcttgcacagcgtactggtttggatcggtctgcaattggtcgcgtattgcgtgggcaaagaggtatgttgtttgatgttttggccgaggggcttgagcgggctggttttggtcttcacctagaagccgtggccccctcgcaaacgattccggaagacgaattgcacatgttgttggcgcaactgcgtaggcctcctgatttcgatgcaatagaaagcggagcgacctggtctacgttgaagatgctctgcgtcaatctgattcatgctcggaatgttcaacatcaacgtatatcgttcgtccgagcggttgcacgggtgaacgatgcgtgctggattgcgtttctcgctggtttataccgttttctgcgttgggatatcaacccaaggaacagacgcttgacattggttcctccgtaccggtatggcttggatggatggtggtccccactgccgagcgcggcaattatgcacgtgcttcatcgatatgaagagccgttgcatgacatggactatacatatttgccgttaatcgattacgaactcaacgctatgcagcgcaagcaattcaaccaagatttcatggaatatggcattcttattccagcggacgatctttcccaatcctcatcaggtacgcaggcattgactctgtaagcgagtggtgcataagaaaatagtggcgtgcagccaagtgtcatggaatggatatgtaagcagggaatgacattgcgctggggtttgatgatggttgacgagttgctatccaggcatagagcggatggcgtatgctggggcgcatggttgaaatcaaagacatgcttggcaatcaccaaataattcgtgccgacggccgcaaggtcgacgagctgcgccccgtgcgcatcacccgccacttcaccgacgcccccgaaggctccgtgctcatcgaatgcggtaacacgcgcgtgatgtgcaccgccacttttacccccggtgtgccgcgttggcgcaaggactccggcctcggctgggtcaccgccgaatactcgatgctgccgcgtgccaccgccgaacgcaccgaccgtgaatccgtacgtggcaaaatcggtggccgtacccacgaaatcagccgactgattggccgctgcctgcgtggcgtcatcgatatgaagacgctcggcgaaaatcagattcagcttgactgcgatgtgcttcaggccgatggcggcactcgcacggcttccgtaaccggtgcgtacgtggctttggtcgacgcagtcaattgggcggagaagcaccgccatatcaagtccgccagccgcgtgcttaaggactatgtgtccgccgtatcggtgggcgtgatcaacggcaccccgatgcttgacctgccatacattgaagacagtcaggccatgaccgacatgaacgtggccatgaccggttccggcaccttcatcgagattcagggcaccgcagaacaccgtccgttcaaccgtgccgaactcggcaccctgcttgacttggccgaaaagggcaacaaggaactgcaagccgcccagcgtgccgctttgtccctagactaagccagctccccttcctttaggggaggttgtcggctggaagccgtacggtctgcaatgtccagctcccctgacaaggggagccttcttaaaggagaacccatgcaaatcgtcgtcgcaacccataacgaaggcaagcttgtggaaatccgccgcattctcgaagaggatcttggcgcggatgccgaaaacatcgaactggtgtccgctggcagccttcacctgccggacccggtggaaaccggcgtcaccttccaggagaacgcgctgctcaaggcccgcgccgtggccatccgtaccggtctgcccgctgtagcggatgattcaggtctcatcgtcgatgtgatgggtaacgctccgggcattctgtctgctcgctgggcgggtgctcacggccacgacaaggccaataatgcgctgctgctcgcccaaatcgaagatattccggatgacaagcgtaccgcgcgcttccgctgcgccgccgcgctggtggtcccggacaccgaggccagtgccgacgtgaccggtggagtggctgccgacggcatcaccgtttacaccacggctgcagatgggagccctgccccggtgcatgcccggtacgccatcaagtcggagacagtggaactcggcgacatgccaggtcgtatcatccgcgaggctcgtggcgaacacggtttcggttacgatccgctgttcgtcccggacgaccagcctgccggtcgcgtcagcactgagcctgaccatgaaggcgagccgctgaccagcgccgaaatgactccggccgagaagaatgcgatttcccaccgaggcaaggcgctgaaagccttggtccccgctatcgaggcgctgctgcactaagtcgtctaggctgtctaactgcactgagccgcgactaagccacagttgagtcgcggctcagcaactcagcccctcccgaatcgggcaagtgtctagcaagcgcctatgacctagcaagggcgatacgaaagaaggccggcgcttagtgcgtcggccttcttgatgaacaagagccacccgatagaatcgaactaccgaccttcccacgaacgagggggatgctctaccactgagctaaggtggcgtggctccaagagccaagtagagaatatagcactgcgtttgattcaacgcaagccggacgttcagcatcttcgggccattgttctttgagccattgtggaggcaatagtgcgaacgatgtgcacacctcatctgctcggaccccattcgtcgtgtgcgcgttatgctagcatggtgagcctgattgactcggaggcagagggaagcatgcgtgattttgtgctggtgaagttgacagacgaagagttcgatgatttctccgccaggcatccacaaggcaatttccaacagacctcggcgatgggacgccttcgcgccgcgcaggggatcgacgtcgaatatctggccctcaaggagggcgagaagatcgtcgcggcggcgctgttcgaaactcaccgctctcgattctctacatttgcggccatccatgatggcccgatgtgcgactatcacgacaccgaagcattgaccttcttcatggatgcgctgaaacgccatgccaaggcaaagggtgcttcacagctggaaatcacccctgaatccccgtatcggcttcgcgacaccaatggagcttctttgccggatgaccagaacggcgctcccgacaataagctgatagaacggctcgaggcgatcggcttcactcatggcggtttcaccgtgggctacacggcggttccacgttggcgctacctcaaggatctgaccggcattaccgatgagaaaagtctgctgaagtcctatgacaagcgcacccagtggagcgtgaagcgtgcccaatcgatgggtgtgcatgtgcgtgagctgtcggacgacgagttgggggtattcgcacgaatcgagcggcaaaccgccgaacgtcgtagcttcgaataccgtggcgaagcatatttccaccgtttcaaggaagcgtttggcaacaaagcgcattttatggttgccgagatccacatcgacgaatatgtagcggacatgacggccaagcgtgaagcactttcggccaaggtggcggcattgaccgccaaaaacgccgaacaccccaccaccaaaaccgaacgtcagctgggggaggagacccgcaatctggcggcagccgaaaagcgcctgaacgaggcggccgagttcgccaaagacggggatgtgctgccggctgcggcatcactattcgtggagcatccgcgcgaggtcatctacctgttctccggtagcgtcgagcagtacaagcccttctacgcctccgcgctgattcagcatgacgcgatgctgcatttctgcgtggaacacgggctgtctcgctacaacttctacggcatcgacggcgtctttgatgatcccgatgacgaggggcgtggtgtactggagttcaagcagggcttcaacggatatgtcgaggaacttccgggcgagttcgtactgccggtcaaaccggtcgcctatgccatgaagcaatttgcgcacaagctgctgtcgcggtaaacggacgcagcacacaggccgttccagagcccagagtaacgatcagagtaacgacaagtaagaaggttcgattatgacgcaatccgatgcaggcgtcgcctcactcacccctaccaggatcactcctgccgagctggatgcgttctccgcagctcaagtgcaaggtagtttccagcagacctcgcagatggccgccatgggtgcgttcaacggtccggtggactatgtgggtgtcaagcgcggtgacaagctgattgccgcctgctacgtggtgtacacgcagtcccgtttcggtttggaaggctcggtctggtgcggaccgctgtgcgattatgacaatccacaggtggttgaggcgatgaccgaagccctgcgtcgttcggccaaggcccatcacgccatcagcgtatcctgctggccggccgcagtctaccgtctgcatgatctggacggcaagccgaccagcgacccggacaccacgatgatggacaacatggcccgcttcggttggaaacatggcggcttcaccgtgggctacgaatccgtggtgaaccgctggaacttcgtcaaggggcttgacggcattcataatgagaaggaactgctggcctcgttctccaagtaccgccgtaagaacatccgcatcgcccaggattccggtctgcgcgtgcgccggctggaacgcggcgaactgagcactttcgtcaagctgtgcgatatgagcgccgcacgtcaaggcttcaagagccgcgatctggcctactatgagcgtctgttcgataccttcggcgacctgatcgagttcaaggtggtcgaaacccatttcgacgaatatctggacaccctgcaatccaagctgaatgcggcctccaaagacaagcgcaacctcgaacgcctgctccagcgcgcgcaacagcggccggaaggcacggccaagaagggtgcctccgacccggcaacgctggaaaagcgcatcgccaccgcagacaagaagatcacggcgctggaaaagaccatcggcgaagtcaatggcatcatcgcctcggacggcccggtcattccggtggaagccggtgtctacttctggcatccgaacgaggtcgtctgcctgtccagcggcgaggacgatcgtttcatggattactacccgtcttccctaatccacttcgaggcgatgcttgactgcatcgcccgtggcgtggagcgcttcaacttctacggcatttccggcattttcgacgccaacgatccttcctacggcgtctggcagttcaagactcgcttcggcggattcgtggaagagcttccgggcaagttcacgctgccggtggacggactgcgcttcggtgtatccgaagccgcacacaagctgctgcatcgctgacaaacagtggcgagcacggacacagaaataaggcacaggtgacgacgagatgagcgcgactgcgaatcgaacagatacgacgtatacgtttggcgtgattacgcccgaagagttcgaccggctttccgaagccacaagccagggcagctttcagcaatggtccgggcaggtccgtcttgccaagattcgtgggcatgaagccgaatgcgttggcgtgtgcgacgcatccggcaatctggtagccggctgcgtgattctgtacctcaatggtcgtttcggtgcagatggctccgtatatttcggccccatcggcattagcgatgatccggctctgctgcgggccataaccgaggcgattcgtgaatcggcccgtcgccaccatgctgtttccgtggcatgctggcctaacgtcgcctaccgtctgtattcctcggacggacagcccgacggcgagccgaacgatgcactgctgaccggattcgccgatgcaggctgggcgcatggcggattccataccggttatgacgtggtctgccagtggatgtacgtcaaggatctcaccggcatcaccaacggcaaggaactgctggcatcattcggcaaacgcgctcaatggagcgtcaagcgggcgcagtcgatgggtgtgcacgttcgcgaaatcggccccgacgagttcgacgtgttcgccgatatcgaacggcggaccggtgaacgccgcgggttcgcgacgcgcggcgcggactatttccgccagttcaagcaggcgtatggcgcggatgcgcatttcatgctcgcggaaatccacatcgccgaatatgtggcggatatgaccgccaagcgcgaggccttgcagaccaaggtcgcacagctgcagacgaaatacgatgaacgtccgaccacgcgcatcgaacgtcagctgggggaggaatcgcgcaatctcgcggccgccgacaagcgtctggctgaggtggagggatatgccaagaagggcgatgtgctgccggcagcggcttcaatgtttgtcagtcaccccaatgaggtggtctatcagtattccggttcgttggaggagtacaagccgttctacgcctcggcgctgattcagtacgaagcgatgctgcacctgtgtgtggaacagggtgtgagccgctacaacttctacggcatttccggcgtgttcgacgatccgaacgacgagggccgcggcgtgctggaattcaagcagggcttcaacggctacgtcgagcagatggtaggcaaattcacgttgccggtggacaagttccgcttcggcgtgagcaatctggcgcacaagctgctgcaccggtagcagctggcggccgggggacgaacctatgtgggttgcgtctcgcctgaccgtgtgcccgccgtgtgcccgtcgtgtgcctactcgcgcatttgctcacacgcccatcagcgcgtgagcaaatgccatcatcaccagtgaaatcatcgcggtgattgccagcgagaagccggccagtttggcgttgccgagtactttgtcggtgaacagcgtggagaaaatggcgattggagccaacgcgcagatcaccatcacggcgcgaatcgaagccgagaacggcagcaggaaccacgagatcaacgcgaaggcgacactgaacggtatacgccaagcgatgacggccatgacttccttcacatcatgcttggactggggcaaatccatgagcatgcccaccatcagcatcgacaccagcgcgttggcaccgctcaacggctgggttatagaggcgatccaatcgggaatcttcacgttggcgacggtcaacgcgatcatgagcagatacgtgtcgaacggcaccgagccgaagaagctcttgccgatggtgcgcagcaatgcgcggcgggcaagccgtttggcgtcgcgatccttgggcttttcgtacggcaaggtgggaaccgaaccggcgtgttgttcggcaagtgttttgccgggctgaatatgcagcagttgctgggtgagcacattggtgccggcggccaccatcacgcagttgccgatatcgaacatcgcagccggcaccaccgcgcccgcaccccagaatgactggacgaccgggaaagagaaacaaccgagattgaagccggcgccattgagcatcaggaaggcacggtcggtcacattgcgcttgcgggtggccagaaagatgaacacgatcgggataaaagcaaacaggaatgcgaataccgaaataagcagcagcgagatgtcatgcggattggtggcgaacgagtatacgatggcaccgggtagcacgatgttgaattccgcggtttgcaacacgcgataatccttctgcccgaacaggccgaaccgcttgaacagatagccggcgagaatgatcagcaataggccaaccggcgtaagaatggcggacatacacttctctccttggctcacacaggctcacggcgcacaggctcagacccacaatgctgtgaccattatatttgccgccttggcattgccatatgtagaggcgtccgcaagggcttgcaattgcctcacgcatatacgaagagcctcccggaatcgttggcgatccaatgtttccaggaggctcaagccggtgcgcgagatgggacttgaacccacacgtcaaagacacaggaacctaaatcctgcgcgtctaccaattccgccactcgcgcgtgcatatccgcgtttccacaggtgtggaagatatacaaaaccctaggccggacagccattacagaccagccagcctagggcatccgagccacttgtcagaatcgaactgacgacctgctcattacgagtgagccgctctaccgactgagctaaagtggcttggttcgcggaaggcatttcgccagccgcgcacaagaaattaagtataagacatctccgcgaaaagtccaatcggcggcttggcggttgtgtcgtgaccgctcggttgaagatgacggttgtgccgcgccacgaactgttcgataatgcaaacgatggcaatccgacatcgctgactgatttttgttctgttcatgtccgaatttgtgagtattctgtttggtgatacggagcgcatccgagccgtgagcgaaggcgctccagtcactgatgaaaggaatggaatcctatggccatcaatccgcccgttgacgccacccagacccccgagtgggccgccctgcagaagcactatgacgagcttcaggccgaaggcgtgagcctcaagaagtggttcgctgaagacgccgagcgtgtcgacaagctgtccttcgacgccggcgacctgcacttcgatctgtccaagaacctgatcaagccggaaaccctccagctgttcgccaaccttgccaaggccgtcaagctcgatgagcgcaccaaggctatgtacaccggcgtgcacatcaacaacaccgaagaccgcgccgtgctgcacaccgcgctgcgccgcccggtcgaagacgagggcaagtacatcgtcgacggccaggacaccgtcaaggacgtgcgcgaggtgctcgaccgcatctacgccttcgccgacaaggtccgttccggcgagtggaccggtgtgaccggcaagaagatcgagaccgtggtcaacatcggcatcggcggctccgacctgggtcccgtcatggtgtacgaggccctcaagccgtacgccgacgctggcatctccgcccgctacatctccaacatcgacccgaacgacctggccgagaagaccaagggcctcgatccggagaccaccctgttcatcatcgtgtccaagaccttcaccaccctggagaccctgaccaacgcccgtgaagcccgcacctggctgctcgaagagctcaaggccaagggcgccatcgacggctccgacgagaagaacgccgaagccatcaagaagcacttcgtcgccgtctccaccaacctggagaaggtcgccgaattcggcatcgacccgaacaacgcgttcggcttctggaactgggtcggcggccgttactccgtcgactccgccgtcggcacctctctggccgtcgtcttcggcccggcccgcttcgaggagttcctgcacggcttccacgagatcgatgaatacttcgccaacaccccgttcgagaagaacgtcgtggtgctgctcggtatgctgaacgtctggtaccgcaacttcttcaaggttgcttcccacgccgtgctgccgtacgaccagtacctgcaccgcttcccggcctacctgcagcagctgaccatggaatccaacggcaagtccgtgcgttgggacggcacccccgtcacctccgagaccggcgagatcttctggggcgagcctggcaccaacggccagcacgccttctaccagctgatccaccagggcacccagctcatcccggccgacttcatcgcgttcgtcaacaccccgaacccgaccaaggacggcgaccaggacgtgcacgagctgttcctgggcaactacttcgcccagaccaaggctctggcgttcggcaagaccgctgacgaagttcgcgccgagggtactccggaagagatcgttccggcccgcgtgttcaccggcaaccgtccgaccacctccatcttcggcgtggccctgaccccgttcgcggtcggcgagctgatcgccctgtacgagcacatcaccttcgtcgaaggcaccgtgtggggcctcgactcctacgaccagtggggcgtcgagctcggcaagcagcttgccaagcagatcaccccggccatctcccaggacgacgacgccctcgccgcccaggacgcctccacccagagcctgatcaagttctaccgcgcaaatcgcgaattctgattcgctttgctcggtcagaattcgtgattcgcgcgaccgcggctgtgctgtctggtgggcagtctggcgactgcccacgtcgcgagttctgattcgttcctctggtgccccctcgggtgagaggagctgtcagtgtagctgactgagggagtctctctcacgactagtgcccgacatcttcggatgccgggcactttgcatatacggattgctgtcagtcagatgagtcgaacatggtcatattccgcttcggcatctgtttgcaggcataaaggcactatctggccaactcacgtggctgattcgcttattcgcccttattcgcctcatccaggctcagcagatcgtcatcggcatcgtaatcgaagagttcgccgtaacggccccactccacggcgatggcgaactgctgatgcgcctcgtcgttggagtaacgggcgcgcagcaggtccagcatgagctcgccgcggagcttgccttccgcagacttccgcagtgcatgctcaatgttgcgcaccagcggcgcgtgttccatcgccagtgaggcgaacacctgcttggcgcgcagaatgtccgccttatgccaggcgtcgcccgcctcggtgatctgcacatggccgtcgcgtaccacgatgacgcgcagcatcgtaccggcatccaccagcgggaacaggtcgtccacctcgaacgaaagagccgaggccaaatctgccaagtcgatgccgtgaggatgctcggcaaccacatccagcagaccggcaagcccgcccggcgtggcgttgggcagcggatgctccttgattttctcgatggtcttggcgggctgaaggtctgatgcgtccgtgacagatgcgtccgtgacaggtgcgttcgtgagcgatgccgatggcgatagagcctcggcttgttgcgtaggctgcgaggcctgtccggtcaaaatcgcgtacagtcggtccaccatcgcctcgaattcgacactgtgacggtcgcgcgggcgctgcagatcaacccgcacatcggcaatcagatgccccgggtgcgagcccaacaccaccactcggtcggccatctccacggcttcctcgatgttatgcgtgaccataagcaccgacttgatgctgcgctgttcgctcgaccacagcttgagcacttcctgacgcaggttttcggcggtcagcacgtccagggcggagaacggctcatccatgaacagcgcgtccggccgcagcaccaaggcgcgtgcaatgcccacgcgctgcctcatgccgccggacagttccttcggatacgccgattcgaagccgtccaggccgatcatgtcgatggcatccagagccagtttggtgcgttccgcacgtggtacgccgcgcgccttcagaccgagttccacattgtcttgcacggtgagccacggcatcagcgcgaaggtctggaacacgagtgcgatgccgggattcgggccggtcagggcctcgccgcgatacttgaccgtgccgctggtcggcttgaccagtccggccagcgcacgcaggaatgtggacttgccggcacccgaacggcccagaatggccacgatctcgccctcgtacaggttgaacgagatgttgtcgaacacggtgagttcggtgccgttgtcggccgtgaagcgctggccgacgtgctgggcttcgatgatggtgttctgcggggtcaccgcccgcagcgaacgaatggtttccattgcaacagtcatattattctccttaagtctttagttcagtgcgaaacggcgctcggccatgcgctgcagcgggttccagaacaggcggttgacggccaccacgaacacgctcatcacggccacaccgatgatggtcctcacggtgttgccgctttcggtggcctcggcgatatacgcgcccaagccggaggcggtcagcgtatgccgtccataacttacgatttccgagacaatcgaggcattccacgccccaccggccgccgtaatgccgcccgtgacccacgagccgaataccgccggcaaaatcaaatcgcgccaccgctgccagcgccccagctggaagctgcgcgtcatctcacgcagatcgtcgggaatctggctggccccggcgatcacattgaacaggatgtaccactgtgtgcccaacgccatcagcagaatactgccccagttgatatccacgctgcatgccacgaaccagagcgtgacgaacgggaacgtgaagttcgaggggaagctggccagcacctgcacaatcggctgcataaaccgcgaaacgcgcggattcatgccgatcatcgcgccaatcggcacccaaatcaccgagcagacgagcgtaagcagcgccacgcgcaggaacgtcaccatgcccaacacgaacgcctgcccgagctcgccgaatcccgcatcgcgatgaatcaccagcataagctgcaccagtccgaacgcacacgctgccaacaccagcactgtgaataccacgtcaagcgcgcggctgcgtgcggacttcacgtccgccgcccaacgtccaccggtccgacccaacgggcgggccagcgtgtcgaacaggtcgccgagaggcctgaacagccaggccaccatctcatcgatatgtgactgacgaatgatggtcagcaccacactggtcttgcgcaccgccgactcgctttgcgtaatgcggaacttctccgcccacgcggtcagcggcttccacagcagtacgtcgataagcagcaccaccagcaccatcgtcacgatggcccagcagatggccgcgagattctcctcggccgccgcctgtgccacgaagctgccgatgccgggcaacgcataggtgcgattgttcaccgagatcatctcggaggcggtcaggaagaaccatccgccgcccacgctcatcatgcagttccacagcagcggaatcatcgcgttcggcacgtccagtgtccagaatcgttgccagcgtgtgagctgtagtgagcgggccgcctcgtcgagttcagttggttcgctggtcagggaccgggtgaacgagaacgccatgttccaggcctgactggtgaagattgcgaaaatcgacgcggcctccacgcccagcatcgagccggggaacagcaccatccagatggtgatggtggccgaaagaaagcccagaatcggtaccgactgcagaatatccaacagaggaatcagcacgcggctcaggcggcggcagcgcgcggccgccgtgccgtagatgaacgtgaacaccagtgagaagaacagtgccacgagcatgcggaacaccgagcgcagcgcgtaatacggcaggtcggcgagatgcgtactgacttgtgacggcacgcctttcgggccgatcggttcgccgatcgccggcagaatccaagcgatcagaccgaacagcgccagaataccggccgcgaccagtacgtcggaggccaggcgcacggcgaatggctggcggtcggacgcggcggtggaagggttgcgggccgacgcatttggacgcgcgccgacgcgattgaatgaaaacatggtcatgaaaagacctccctatgcataggaaagacgaattatgcaagggttatccggggagccaaggaacactacaggcgagagcccgacttccggataacggaatacaagaaaacatggtcatcaccaccgcaactatgactgttgccggcggcggaactactggaataatcaccgtccatcggactctcacctccttcaagccgtgcgctgaaacgccagatcaataccatcgtcggtatccatgcgaccagcaggaggggcggaaagtattcgaatccgccgattcgagccatcgttcaagcttcagcatcgcagggcggtggaattgcgttagttcatgccttgatccgacaagaactgctgacctgcgtgcagtgtctccactgttagcggcagcaacccatatccctgcggtagcctcgcctaccgacgctcccaagataaagcccgcctgcaggtctgtcaactacgtcgcagtgccttggtgttggaatgccatccgacagccgttctgtccgcaataatccgtacaattgacgattgctgtgtcgagaagtgggccgccgcataagcccacgtctccatgggtccagtccgaacggccgcaaggcctgactttcggcggatcggcaggcttcccaagggcaaacccgagggataacgagaacaggccaacgcacgtgatgcgcaatcgcgtggatggccccagatctgtggctgatatgcggcagcactgaaggaaaacaatggttaacgctgttgaggcttttgacgccaagcacatgaagccggctgaggaaatcccggccttccgtcccggcgacaccgtcgacgtgaacgtgaagatccaggaaggcaacaactcccgtatccagaccttcaccggcgtggtgatcgctcgtaagggcgctggcgtgcgtgagaccttcgtggtccgcaagatcagcttcggcactggtgtggagcgtcgcttcccggtgcactccccgtccatcgactccatcaagctcgtgcgtaagggccgtgtgcgccgcgccaagctgtactacctgcgcgctctgcgcggtaaggccgctcgtattgccgagcgccgcgacaactccgctaagtgagtcgattcgcgggtgcaatcgtgggcctgatgatgcaggtgcgcgaataaaccgtgaaattcagcccggaaccgtttcggtttcgggctgtttccgtattttccacgtatgatggacgggcgccggcacccctcatatccggcagcatgaatcgcgaggagatggtatgcaggacgatcaggataacggcgaattcccggtttccgacaatccggagagcaaccagacctcgtatgatgacgaggccgatgcccgcgattcccgcacgttccaagtcgccgaccacggcatcgccccgtccccggttcccccggcaccggcgcgcccggcgtacgccgcttcttccgctggtgcgaatgccgcggcagcatcatcgatggatgatgaccacttcaccctacgcgactttttcctgtggtgcggcgttcccgtgcttatcgtgctgctgattcgcattttcgccgtcggcttttacgagattccttcgcgctcgatgatggacaccatggtgcccggcgatcgcgtggtgaccagcaagctcacccccaagatcttcgatctgcagcgcggcgacgtcgtggtattcaaagatcccaacaactggttgaacgaggagcagagcagcgctcccggtggcgggtacctcatcaagcgactgatcggcctgcccggtgacgtggtcgaatgcaagggcgcgggccagccggtgaccatcaacggcgtggccatcaatgagacctcctacattcgccccggcgtggacccgagcgctttcccgttctcggtgaccgtgaccgagggccacgtgttcgtcatgggcgacaatcgcgccaattccgccgactcccgctatcatcaggatgacggcgatcgcggcttggttcccatctccgatgtggtcggagtcggaatcgcgagatactggccgcttgaccggcttggtgcgattgatgaccaccacgaagtcttcaaggacgtgtctgacgcttccggctcgaattcctgagtcttttttgaaccgtgtgagtctttgaactgattgagttccgggccgtctgaatcctgaaccatttgaacctggaccgtctgaatcctaaccattgtgagacgatgggagccgcgcatgattaccccgacacttgacttggaacgcagccttgcggcccagggctatgaccttattactggattcgatgaagtcggccgcggcgcgctcgccggtccggtgatggtcgggtgcgccgccatctgggcctgtgatttggcgccgcttgacggcgatgattccgccgaactgtccgggcggacctacctcggcgtaccggacggcgtggccgactccaaaatgctcaccgaacataggcgcgaggcgattttcgacgaactgcgcgactggtgcgcggcctacgccgtaggccaggccagcaacaccgagatcgacgaatggggcatcacctatgcgctcggcgtggccgccctgcgcgcgctcagccaagtcgaacgcgaacttggcttacggcttggagggggattgacggcaaaaaaggctgcgggggagattgtggaaggtcgtccgggagactccgtaggggaatccattggaaattgtggggaaagcgttcgcgtcctgcccaaagtcgccggaattctcgacgggccgagcgattacatcaccaaggcgctcaacacgttcgacgcgccggacgtgccgattccagccgatataacgaccaaagtcaaaggcgaccagcattgcgccaccgtcgccaccgcggcggtcatcgccaaagtgacccgagaccggctgatggtcgacctcgcgcaaagcaacccacgttacgccgcctacgaatgggctcataacaagggctatggttccgccgcacaccgtgccgccatcgccgaacacgggccgactccgctccatcgtgtctcatggcacctgacctgagccgcgtgcgacacgacagtgtgagcgctaacgcaaaactgttgtggacgcgctaaagtcagtattgattaaggtacaagcctggccgcgcatgggtgccggccgccagcggggaggttaggtagcatggtgaccagccgcaagccaagcaaacgtccgtccatgttcgaagtggccaagctcgccggagtcagccaccaaaccgtctcccgtgtgatcaatgactcgccggacgtttccgacgccacccgtgcgcgagtccaggccgccattgaccaactcggctaccgcccctccaactccgcgcgcgcactggcttcccgccgttcgcgcaccatagggctgatcgccggaggcctcaaattcttcggcccgatttcctccatctcatccatcgaatccatggcccgcgaacacggtctgttcatgagcgtgatgatggtccacgaggccttgtgcatgcagtccgaattcgacaacctgtgcgacaccttcaacgagcagaacgtcgacgccttcatcttcctgaccccgaccgacgtgatgttcgccgccgcctgccgtgcgcgagtcactcagccacgcgtcatcgtcaccgccacccacggccaaatgaccgtgcgtgagggattgggccttatctccaccgaaaacaagcgtcgcactgcactggtcggtatcgaccagtggggtgcaatggccaaagtggtggccttgctgggcgaatacgggcacaaatcggctctgtattttgccggtcccaacgaatggcgcgacgcccacacccgactggatgcgtggcgcaagctcgccgcctcccgatccatcgattcgcagatcgtgcgctgccatacgtgggatgcctctgaggcatatgcgcacatgaatcatctcattgatgagtatgggcgtcggggcacggcgttgcccaccgcggtcgtcgccgcgaacgacaatcaggccgtcggcgtcatgcgcgcgttgcatgagcatgggcttcggattccgcaagacatcagcgtggtcggattcgacgacatgtctggcgtggataacatgtacccaccgctgaccaccgtgcatcccgatttcgaggggctcggcgtggccgccatgcgcgagacgctgcgtttgctgggggagggcggcgagccgaccttcctgaccacccagcacggcgtggggctgattcccgccgaggtgcgtgctcggcggtccttggggccggctcctcggcggtaaattggcgctgttatcaaaccgttatgatgcgtgacacggtataagttgtgtcgaatgcaggttatcggtacaatgtttttgaaattgtgagcgctaacatcctccccaaggaaggggataacaacgccggcgctccaaggcaaaggaaagatatggcagcaaccgacaacgcggccgagcaggccgcccacatcgccgagaagattcgcgctggcaagaccacgctgggcatcgaattcggctccacccgcatcaaggccgtcctcatcgacgacaacttccagaccatcgcctccggcgactacagctgggcctcccacttggaggatggtctgtggagctacgccaccgaggagatctggggcggtttgcagtccgcttacgcctccatggccaacgacgtcgagaccgcctatggcgagaagctcacgcacgtcggccacatcggcttctccgccatgatgcacggttacctcgcattcgacgaggccggcgaactgctggtgccgttccgcacctggcagaacaccaacacctccgaagctcacaagaagctctccgagctgttccagtacaacatccccgagcgttggtccatcgctcacctgtaccaggccgtgctcaacaaggaagagcacgtctccgaggtggcttacttcaccacactcgccggttacgtgcactggaagctcaccggtgagaaggtcctcggtgtgggcgatgcctccggcatgttcccgattgacccgaccactcacacttacgaaaccgcattcatcgagaagttcgacgctctgcctgaggtcgcagcccagccgtggaagctggagaacctgcttcctgagccgctcgtggccggcactccggctggcgagctgaccgaggaaggcgccaagctgctcgatccgtccggtgccctgaatcccggcatcgtgctcgccccgcctgagggcgacgccggtactggcatggtagccaccaactccgtgcgcgtacgcactggtaacgtctccgccggcacctccatcttcgccatggtggttctggagcacaagctcaaggccctccaccctgaggttgacttggtcaccaccccggccggcgatctggccggtatgagccacgccaacaacttcacctccgacctcaacgcttgggtcggcctgttcggccagttcgccaaggccatcggccagtcggttgatgccggtatgctgtacggcaccttgttccgcgcggccatcgccgacgacgtggacgccaactgcggcggcctgctgaactatccgttccgttccggcgaattcctggccggtctgcctgaaggccgcccgctgttcgcccgcagccccgaagccaacatgaccctcggcaacttcatgcgcgcccagctgttctccgcgttctccccggtcaagatcggcatggacgtgatgaccaagcaggagcacgtgcaggtcgactctctcgtgggccacggcggcatcttcaccactccgaaggtggctcagaagattctcgccgctgccttcaacaccccgatcaaggtcatgtccaccgccgccgaaggtggtgcctggggtatggccgtgctcgccaactacctgtggaacaccaacgaggatcacagcaacctcgctgacttccttgatggtttcgtgttcaaggacgcccagtccaccactgagaagccggtggcttccgatgtggttggtttcgaggacttcttcgcccgcttcaccaagggcctgcccatcgagcacgctgccatcgaaaccatcaacctcgaagataagtaagcctttctgacctccctctattgagagaggtccttgagattttgaaaaaacgtccatccatcacagtggaaaggaaaaccaataatggcaactttggctgattacggccccgaggttcgcgccgaggtcaagcaggttcgtgaggtcgtctccaacctgcaccagcagctgatcaagtggaacctggtcgtgtggaccgcgggcaacgtttcccagcgtctgcacaccgccgacctgttcgtcatcaagccctccggcctgcgctacgagtacctgaccccgtcctccatggtcgtgtgcgaccttgacggcaacgtggtcgacggtgccgaagccccgtcctcggacaccgcttcccacgcctacatctaccgcaacatgcccgacgtctacggtgtcgtgcacacccattccacctacgccaccgcttgggctgccactggtcagaacatcccgtgcggcctgacgatgatgggcgacgagttcggcggcccggtgccggtcggcccgttccgtctgatcggctcggaggcgatcggcaagggtgtcgtcgagaccctcaagaagtacccgaagtccccggccgtcctcatgcagaaccatggccccttcaccatcggcaaggatgctgaaggcgccgtcaaggccgctgccatgaccgaggaagtcgctcacaccatgtgggccgcccgtcagctcggtgacatcatcgagatcgaccaggccgacatcgataagctcaacgaccgctaccagaacgtctacggccagcactgatttgatggagtgtccgccgcgttgcggaaggctcgacgtaccttcgtacgccttcgccttccgcgtcttgcgggcacacacatcaaatcagcgctgactccgccagcacggtggtgtcttggctcccctctctgaggggagcctcggtcggcgaatgaaacttaaacaaacccccataaacaaagaagtaaaggaagtaaccctatggttatggaaaaccccttcgagggcaaggaaatctggttcggcgttggttcgcaggacctgtacggcgaggaagccctgcgccaggtcgccattcactccgctgaaatggtcgactacctgaacaacaccggcaagattccggccaagatcgtcctcaagcccaccctgaagtcctccgacggtgtcaaggagttcatggtcgaggcttccgccaacccgaacgtcatcggcgtcatcacctggtgccacaccttctccccggccaagatgtggattcgcggcctcgaagtgctgaccaagccgctgctgcagctggccacccagcaccacaaggaaatcccgtgggagaccatcgacatggacttcatgaacctgaaccaggccgcccacggcgaccgtgagttcggttacatcgtctcccgcctcggcatcaagcgcaaggttgtcgtcggccactacaccgatcctgaggtcgtcgagaaggtcggcacctgggcccgcgcctgcgccggctgggatgcctccaacaacatgaaggtcatgcgctggggcgacaacatgcgtaacgtcgccgtcaccgagggcgacaagaccgaggccgagcgcgtgttcggcgcctccatcaacacttgggccgtcaacgagctcgtcgctgcgtacgacgccgtcaaggacgaccaggtcaaggagatcatcgaggactacaaggccaagtacgacgtcgacccggctctgctggacgtcaagtacgactccctgttcatcgccgccaaggaagaggccgcgatggtcaacatgatgcgcgccaacggctgcaccgccggcgtcgacaatttcgaggacctcggcgctctgccacagctgccgggcgttggcccacagcgcttcccgtccgagtacggctggggcttttccgctgaaggcgactggaagaccgccgtcctcgtgcgcatcggcgccgtcatgggctacggccttgagggtggcgcctccctcatggaggactactcctacaacttcaccgagggcgacgagctcgacatgggctcccacatgctcgaggtttccccgtccatcggcaccatcgccaagccgaagctggagatccacccgctgggcatcggcggcaaggccgacccggtccgcctggtcttctccggcaagcccaccaaggacgccgtcgtggtctccatgtccgacgttcgcgaacgcttccgcctgctcatggacgtcgtcgacgtcgttgagccgcagggctccctcaaggagcttccgtgcgcccgcgccgtctgggagccgaagccgagcctgaagaccgctgttgagtgctggatcaccgccggtggttctcaccacacctgcatgaccacctccgtcggtcgtgaggcttgggaagacttcgcacgcatcgccggtgttgagctcgccgtcatcgacgagaacaccaccgctcgccagttcgagaaggaactggagctgtccgagatgtaccaccgtctcaacaaccagcactgattggcggagcgtataccgcctttcctcaggttcgacgtaccttcgtacgcccctcgccttcggacggcggtctccgcacgcgccaatcagcgctggcaagccagcaccgatgactaaatcagtctgctgactgctaccgctaaaaggggctgttccggaaaaccggagcagccccttttgctgttatcggcaactctccacaaacgcatcaaaaatcgcctgcgagcgtggatctaccttgtagagaaactcgggatgccactgcacggcccacaggaagtggcttgccggccggtacagggcctcgatcacgccatcgggcgcgacggccatgacttcgagaccgggtgccacatccgaaccgcctgatggtgatagctattcaccgcaatctcagtctgccccgagaacaatgaagccaggggagtgccgggcaccaaggaaacgttatgtccgaacgcatcgtacggcggattcatatggtgttcgatatcgctcggatgctggcttggca

SEQ ID NO: 1551 - DNA, 5491 bp, Unknown
  R221_24m  MAG No. k141_14974
cgagtaagtgtgaccgcaaggaggaaacaatgggagtcggagagatcgctggcctgatcgcggccatcgcgttcgcagtattggccggtttcatgatctatccgctgatcaggctgggcaagatgtttgatcagatatcgcagacggtccgggagtccggcgaacacgccatccccgcgctggacgaaggcgtgaccaccgtcaagcaggtcaacaagtcgcttgaagacgtgaacaagatttccgccgcggcttccaccaccgccaacaacgttggtgcgttgactgatctgtatggctctttcctcggtaagcccatcatcaagatcgcttccaccttctacgcgctgaaaaccacgggtcagtccttccttgcgaagaacgccgcgaaaaccaccgtcaacgacaccgccgagaagggggagtgatgttcaaacgcatcttctgggtcggcgtcggcgtggccatcggaatcgttgccgtcaccaaggcacaggcctatgtcaaggccaatacgcctgatgcggcacgccagttcctgcttggccccgatcaggacaatgtgccgatgaaaacactcgaagggttggtcaacgagttcaatgccgcccgtcgagcccgcgaggctgagctcaaccgtcagtacatcgagcgcgccaactgacacgcgcatgccgccttgccatctagtcactgaaccagctagaacaaactagtcctcataatccagtctttttccaccaataccaggcgcaactgcgcccattacccaaacaaggagttcatccgctcatgcgcactgcggacatcgcaaagcgatacctcgattactttgccaaacatgatcatctcgtcatgccttcggcatccctgatttccccgaaccccaccacgctgttcaccatcgccggcatggtgccgttcattccctaccttcttggtgagcagaccccgccgaagcgccgcatgacatcgaaccagaagtgcgttcgtacgctggatatcgatgaggtcggcaagaccacccgccatggcaccttcttccagatgcttggcaacttctccatcggcgactacttcaaggaagaggccatccactacgcctgggagctgctgaccaccccgcagagcgagggcggttacggctttgacccggaaaagctgtgggtcaccacctttaccgacgatgaagaggcccgttccatctggaagaacgagggcttcgatcccgagcacatgcagattttcggcatggaagacaacttctggaccaccggtggccctggccctggtggcccctgctccgagatctacgtggaccgcggccccgaatacggtcgtgatggcggtcccgcggccgatgagacgcgcttcatcgagatctgggacctcgtgttcgagaactacgaggtcgacaacgtcaagtccaagaccgacctgcacatcgtcggcgagcttgcccagaagaacatcgataccggtgccggtctggaacgcttggcctacctgatgcagggcaagcagaacatctacgagaccgatgaggtcttcccggtcatcgaggccgccgagcgcttgtccggccgcaagtacggcgaggacgaggccgcggatgtcaagttccgtgtcgtggccgatcacgtgcgttccgcgctgatgattatgtccgatggcgtgcgcccgtccaacgtcggccgcggctacgtgctgcgtcgcctgctgcgtcgcaccgtgcaggccatgcgtgtactcggtgtgaccgatccggtgattcccgagctgctgcctgtctccaaggaggccatggtcgccagctacccggagcttaacgacaccttccacgatgtctccgaagcggcctacggcgaggaagacgcgttccgtcgtacgctggagaacggcatcgagattctcgacgtggctgtcaagaaggccaagaagaccgccgacccggtggtctccggctctgatgcgttcactctgcacgacacttacggcttcccgattgagctgaccctcgaaatggccgccgatcagggcgtgaaggtggacgaggccaagttccgcgaactcatggccgagcagaagtcccgcgcccgcgccgacgccctcaagaagcgtcacaacgtggacctgtcggtctatgacgacttcaagaagacgctcgccaagccgatcgacttcctcggctacacggacatgtccgcccgtgccaaggtcatcggcatcatgcaggaaggcaagggctccgtgcccgccgtcaccggcccggccaacgtcgaagtcattctcgaccgtaccccgttctatgcggaggccggcggccagcttgccgatcagggcgagatcctgtccgacgacggtgcagtgctcgaagtcgacgacgtgcagaagcccatcaaggacctcatcgtccaccagtgccgtctgaccgaaggcacgctggtcgtcggcgccgaagtcaacgccaacatcgacctggcccgccgtggcgccatcgcccgctcgcacaccgccacgcacatggtgcacaaggcgctgcgtgaggagctcggcccgcaggccacccagcgcggctccgaggacgccccgaaccgtctgcgcttcgacttccagtggtccaaggccccggccaagtccgtgatctccgcagtcgaggagcgcgtcaacgacaagctgcgcgacaacctcgccgtgaccaccaaggaaatgaagttcgacgacgccatcgccctcggtgccatgcacctgttcggcgagaagtacggcgacatcgtacgcgtggtctccatcggcgaagacggctggagccgcgagctgtgtggtggtacccacgtggaccacgtcggcaagatcggcatggtcaacatcctgtccgaagcctccatcggctccggcgtgcgtcgtgtcgacgccgtcgtgggccagggtgcctatgacttcaacgctcgtgagcacgcgttggtctcccagctgtccgacaagctcaacgctcgcccggacgagctcgccgagcgtgtgaacgccctgctcgccaagctcaaggaatccgatcgtcgcttggcctccatgtacgagtcccagctggccgcctcggttccggcgttggttgctgacaccaagaactccgcggccccggtcaaggtggccgtcaagaacgtgggccacttcggcgcggtcgacgccctgcgcaagaccgtactcgacgtgcgcgcccagctcggtgaagacgcccccgtggtggtggccctcgccggcgtgaacgaggatgacaagccgatggtcgccgtggccaccaacgaggccgcccgcaaggtcggcatcaaggccggtgatctggtgcgtggcgcagccaaggtcctcggcggcggtggcggcggcaagccggacttcgcccagggtggcggtgtcgatgcctccaagatcgacgaggccctcgaagcgctcgagcacgaggcgcagaaagcctgattccgccagtggtgtggttaggcgttgatttgggtaatgcccgggtcggactggcactgtccgacccggagcttacctttgcacaccctgctggcaacattcatgttgccggcgactatttctttgctattgacgaggtcctgaacgtcatcgaagacgaacatgtggaccatgtaatcgtcggactgcccctgcagatggacggtacagaaggcaaaagcgccaaaaaagcgcgcaggtgggcggccaatctggagaagaggctgcaagcagagagtgaagacagtgattctacggagtatcagattccgcaggtgtcattgatagatgagagattgacaacagtcagtgcgcatcgtcaactgttcgaggcccataaagcttcgaacaagcacaggccggtggttgaccagcagtcggcagtggtgattttgcagacggcactcgaccgtacccgggagcagtgaggtatcggttatgaccgatgattttaacgagttctttgatgacaacacgcattgggtcgaacaggggtcagaaccaatgcgcgggactgagccgccagaaccgccgaaatcccgcaaggagatgcgcaagcgacgtgcacagcgcaagcgcaagcgcgtcagtggcattatcatcgctatcgccatcgtcgccctgcttatcggcggcggctatttcggcgtaaccaagctcatcgcatggcgcgacagccggagcaaccagtcgacggccatcgcggactatcggggaccgggctatggcgaggtcgaattcaccgtgagcgagggccaaggcgcggcggagatcgccgataatctgctcaaggccgaagtcatcaagtctactgccgcgttcaccagcgtggtcaacgccaatagcgcgacactctatccgggaacgttcacattgaagaagcatatggccgcatccgatgtgatcgccgttctctccgacaccaaccaggcggcgggcttccttgaggttcatcccggtgaacgtgctaccgatgtgttcgccgacgccgcgaagctttccggcgttgcccaaagcgaattcgacacgattatcaagaacaagggtaaggatattctgcccaatgaagcgggcggtagctttgagggatggctggagccgggaacctacaacgtcaagagcatgaagagcgcttcggaaatcctcaaggccatggtcgataagcgtatcgccaagttggatgaattgggcgtgccgaccggcagtgaccgcgaacgggtgatgatcatcgcctctatcgccgaggccgaggtcaacaaagccgattactacggcaaagtgacgcgagtcatcgagaaccgtttggagcagggcatgtcgttgggcatggattccaccgtggcctatggcaataacgtcaagcccgcgcaggtgaccaccgagatgacccaggacgagtccaacccgtacaacacgtacaagatctccggcctgccgcctacgccgatcagcaatcccggcgatagcgccattcaagcggcactgcaccccgaaagcggcaattggctgtacttctgcacggtcaatctggacaccggcgaaaccaagttcgccgtaaccgccgatgaacatgaccagaatgtggccgaactacgcaagtggcaagccgaaaaccagtagtcgcctcattggctcccctcgccgaggggagctgtccgcaaagcggactgaggggagtgatacgggattaagccccaacaaccaccgccacaatcgcgcccaccaatatcaccggcacatacggcaccttgcccgcatgtgccggtgatgtgcgttgtgggtcgaatcgcgtccacaaggcaatccatgtgatgccggcaacgcccatcgccagccaccagaccaccacaggcaacaggccaagccgtccgacagacaatcccataggtatcaaggcggtcacatcgccgaatcccaatgaccgcggcaccagcaacgccaacgcgaactggatcaggcaacatagcacggtgaacaacag

SEQ ID NO: 1552 - DNA, 22069 bp, Unknown
  R221_24m  MAG No. k141_17347
aattaatcagtcattttcccgaatattgcaaaacaccggctgaaatcgtggcggcgctggaataaatgagcgtgtggctcccctcacggaggggagccaccaatgatgtgccggccaccgtagcctactgcgcctgtagacggaactgcttccagatgtcgctgagcttctgaccgttgcgcgtgcgcttccacacgtccagaccgccgccgcgacgtcctccggcggcggcacgggccgcggcggtcggagtcggatattcggagccgtcatccagacggagacgaccgttttcggtgaccgtggcgaaccagcgctcgcccttgcgcggccgctcccacaccagacgctcgcccggcaccagcagaccagcgtcaatcacctgccggatcgtgacgcgccgcgaactatgagacggccgtggagaggtcttcgacaactcatcgacattctgcttggtcagatcacgggcgtccttgtcataccggatgccccagtattccacgatgagtcggaccgactcttcctgccgcgcctccagcagggcaggtgtgcagtcagcgaaatccttcaactgattggtcagcgggaaacgacgcgaatccgcgcgcaacagcatgcggtcgcgacgtgccggatattcactcaacctgtccaactgatcctcagggccctgcaccagcgccatattgccgagtcggtacatccagaaatcatgctgatcctgcggccagtccgcaaacgatttcgaccgttcgatatccaacggcataatcggcagcgcactgaaccggcgtggtcgatccaactgcatgccggccttctgctcgttggcgcgaatcagcagcagacggaccaaatcgccgtcaccctgcatctcgccatgcaaacggaccaatgcgccttcacggtcgccgtccgagacatgcaacccgttcacgcgctggaccaaatagcccttgtcaagatcacggatggcggcgttcgcataaccgcgccgctccaacgctccagtgcgattcagcgtgcggatgccggtcacctgttccaatgcggtcagaatttccaacagccgacgctcgtcatgggcacccaacgattccagcgtggccgtggttctgtcggtacgcgaggcacgaaccacgaacggcgacaaatcggcgtcgcccagcccgcgatacgaattgaccaacgcccacatggccacgggcttccactcgtggctgaggtaatcgtccaatccctcaagccggctacgtacttcggcgggcaatatggtgtcgctggggcgcgcgatgatccgccacgccatcgcgtagggtgccagcacctggttgatgaacgtgggcaccgtgcctttgtcgatgtacggttgcagcacgtcggccaggaaatcctcgatgagcttgtcggtggccggcttgtgcgtgagtacgagatgcagataggcgaagaattcctcacagtcatgcggatcgtcgccgattgggtcaatgatgtcatcccaacgggctgcgtacacgtcaagttcggcggtcgacaggctggccgtggcgcgcgccttgaacacgtcggacggggtgagcggcaggccgcgcatgttcatcacgtcgaagatgcgatgcgcgccgtcgagatcgtcggtggtcacgatgacgagcgtcacctcgttgaccagatactgcgcgaattgctggcgttcggatgccgaccaattggagatctcgtcgtacgtcttgcggatgttggcgacgatgttgcgttgcgcagcggtcgccagatcgtcgtcgttcatgtcgaacacggattcgaggttgtcctcctgcacgtgttcgcggaagaacgccgcgtcgcgctcgcgcaacgtgaggcgaggctcggtgacgatgccgcgcagcttgtcgccgggctccaccagcagcgcgtcgagttggcacatgaggtccgggtctcgctccagatcgcgcaacacggcgatgatgatcgacagggataccagccgctgctgcccgtcgatcacgtcataacggttatcgccctcgcgcaccagaatcagcgagccgaggaaatacggggtaccgggtgacttgcaggcgtcatccaagtcgcttaccagttgcaggatgttctcggccttccatatgtaggcccgctggaatgaggggattgtgaaccggaaatccggggtgaacactttcccgagtggtagttccttcgcgctgattgccatgtcaatcccttcgtcgccggcctttggacggtatgccgacgtgccgactgtgcttaagcctaccagtgttcgcccggcggcgggcgcatcacgccggctcgggcaccgacccctcgtacaagtagaacgaagacgggttttctcccggcccggatgcgggcagtgactgctcgcacacctgcgtcaggccgcgatgtacatagaatccgacatcgcacgtggtatccgtgaataggaagtactgacgtatgccggctgcgcggaatgcgctcatcatcgtctcgaacatgcgccggcccagaccgtgaccgcgcgccgccggatcaagtacgaacagcaccacttcagccgaatactcatggccaatgttcgccgcctgcttacgcagttgcctatcgacatgaagagtcccgagaatctcgctcgcagctgccatgccgtcgtgggcaaacgccagttgcaatagcttgcgcaacgaatgacgccggtgcatgttcagcgggctgcgatggtcgagctcgtcgatacgccccacaatcaatgcgacgggtttatcttccagctccgcgacaaaggccgtggtcacacgtgccagacagttctcccaatcggcctcggctgccagcaagccggtccgctcatcatattcggcgtaccaagtgcggcgcaccagatcgatcagcgccggataatcgtctttacgtaacgttcgaataatcgcttcactcatgttctccattatgactgatatggctcgataacccgacgtgttacagtcgcgccggcaaatcggcccgctccaccagcctcgccatctgtacgcggcccatattgagcttgtccgccgcggaggagagatgcgccttggccgtacgctccgagataaacatacgggaggcgatttcggcggtgggctatgtgctgcaagacgattcgccgattacggtgtatgccactgcgttcctatcaacggatcaagacaccaaggtgacgcatgccttcacgttgcagtgaatcgcgcggcggtccaagctgcggtcgaatgccaatcgaatctcaagtgcatgccacgcgcatggtggaaacgcccgttacgctttgcgatgagcagaacgagccgatcgatcctattcatggaatgttcagttttgttcctctaagattggtactggaacaaacgctaaaggagcgattatgacattcggtcagcagccccagaacaacgggcaatacaacccgcaatacaacacgcctgattacaacgccgcccaacagtctggatatggccagcaatacgcacagtccggttacggccagaactactatgcccagtcgcagggcgcccccacctaccagtacgcgccgcaggatgcggccggtgccggcgcgggtgccgccaccatcaacacgacgatgacctacaactatgaggaggcccgccgcgtctccgtagccaaggtgtacggcgagatgaccatcggcatcctcgtcaccgccgtggtcgccgtgctcggccagatcaccggagcctactacagcttcctcatggccaccggcatggtgggcctcatcggcctgtgcgtggtgcagattgccctggccgtggtgctcggcatgcgcgtcaccaagatgaagtcggccactgcgcgcgtcatgttctatgtgtacgccgcattgatgggcttcaccttgagctcgatcttcatggtctacgacctcggctcgatcggcgtggcgctcggtgtcaccgcagcgttcttcttcgcgctgaccatgttcggcatgactaccaagttcgacatgctcaaggccggcccgatcctgatgatcggcctgatcgtgctcatcatctcgcagatcgtgctcgccttcgtgcaggtcgacggcatgaccaagatcgtctgcgccatcggcctgatcctgttcgccggcatggccatctacgacgcgcagtccacgcgcgcgctgctgaccgaatacgaggcccagggcccggaaatggtcaagaagatctccatcctgtgtgccctgaacctgtacctcgacttcgtgaacatgttcctgtacatcctgcagctgctcggcaacagggactagcctcgccagccgattggtgggcggcatgtagcctgctcgtcaaacgtcacagcccgaccacattgtggccgggctttttcatgtctgtcacattcgcacgttaggctgtctccccgtgaaaagacaagaactcgtaggcatgctgagcctgttgttgaccgcgctgatctggggttttgcgttcgtggcgcaggtccagggcatggatttgatgtcgccgatgttcttcaacgccacgcgcttcacgctgggagcactgtctttggtgccgattctgctgtggcagcgtggccgggggagcgcggataagggcgatacagccggggtcgatgtcgttgggaccgaggcccccagggccgtctccacagatgccgcatcgaacggcgcatccgacgtcgttaccatcaccggtgccaagctgaatgcgaacaagcccgattcggccgtggcgcgattgctcgccaacccggtggtcatttccgtgatctgcggcatcgtgctgttcaccgccagcaccctgcagcagtatggcattctgtacggcaaatcggccggccgcgcgggattcctgaccgccatgtacatcgtgatggtgccgttgctggcctgcgtgttcctgcgccggcgcatcggcatgctggtgttcgtggccgtggtgctgtccatcgccggcttctatctgctgtgcatcaccgatggtttcggttcgatcggcctggcggatatcctgctcgtgttcacggccgtgctgttcgccgtgcatattctggtgatcgatactttgggcggcaccgtggacgccatcaagctttcattcggccagttctgcaccaccgccgtgctgagctgggcgggttcgctgatcgaaggctcggtcgactgggccggcgctgctcattcctggattccgatcctgtacgccggcatcggctcggtgggcatcgcgtacaccttgcaggtggtcggccagcaatgggtgccaccgacgcgagccagcctgctgatgagcctcgaatcgttcttctcggcggtaggtggtgcgttgcttctcggtgaagtgatgaccccgcgcggctacctcggctgcgccctcatcttcctcggcaccctgctggcccaagcgccggccaggctgccgaagtggctgcaacggtgaatgaatcggacgcaggccgattccatagcacctcagtccgtggtcttaggcgcttcacccacttgcggcgcgccgttgatgtcgcggtggatgttctgcatttgcacttcgatgttctgcagcgaacgggcgcagtcgagcagtgtctgtgaatgctcgctgagcttgttgtccggcaaatcggtcttgtagcgcagcgcatgctccagcgacgcccaataatccatggcgatggtacggaactgcacctccaccggcgtgtaatgcgcgcccgaggagagaaacacgggcaccgcgtagattacgtgcaatgaacgatacccgttctgtttcgggttcttgatgtaatccttgacgcgcagcacctgaatatcggactgcgacgacagatagttggacacggaatacacgtcgtcgcggtaattacagatcacgcggatgccggccacatcgaacagattgtccttaatcgaattgacactgattggcagattcttgcgctccagcttgccaatgatcgaactcaccgacttcagacggcgttccatatgatgtatcgggtcatggctgaaccgcacctggaactcgtcgtcgagaatctccagcttggtgctgatctcgtacatcgcgccttcatacacctgcatgaggtcaacgaatttaacgacctgttcgggagtgaaggtgcctcccggaagatccaacgctttgagacgggcctgtagatcggaggttttgagtcggctatgtcggtcaagtatcacgtccaccaatatactcggcggattccagacaatctggatgttcgcggggaatctttccaagaacccatatttaagatcgtgacaaccaatggcatacgtgaccggagcatgacgaaccccgccgatagaatcggtcgttatgaatgaagacatgatgaccgaggcggagcgtgcctcgattgcagccgatggaaccgatagcttgctgggggagcgtggaaagggcgtattccatatccacacgctcggctgccagatgaacgtgcacgattccgagcgcatcgccggcgtgctggaggccaatggctacgtccctgcaaccgaggaccagatcaatgacaatgacctcgatttgctggtgctcaatacctgtgcggtacgcgagaacgcagccgaacgcatgtatggcaccatcggccgattcaatcgcgtcaaactggttcggccgaacctgcagatcgccgttggcggctgcatggcccagcttgaccgcaagaagatcgcggatactgcgccatgggtttccgcggtgttcggtaccaagaacatcgaagatctgcccaagctgttggatcagaatcgtgcgaccggcaaggcgcaggtccaggtcactgaacaattgcggcagttcccgagccagcttcccgccgcccgcgcctcccgcatcagctcgtgggtggcgatttccgtgggctgcaataacacctgcacgttctgtattgtgcccaccacgcgaggcaaggaaaaggaccgccgccccggtgacattcttgatgagatccgccaatgtgtggccgatggtgccaaggaggtcacgcttctcggccagaacgtgaactcgtttggttatggtattggcgatcgatacgctttcagcaagctgttgcgcgcctgcggaaccatcgacggtctcgaacgtgtgcgcttcacttcgccgcacccggccgccttcaccgatgatgtgattgcagccatggccgaaacgccgaatatcatgcatcaactgcacttcccgctgcagtccggttccgaccgcatcctgcgcgcgatgcgccgctcctacaggtccgccaagttcctcgatatcctcggtcgtatccgcgaggccatgcccgacgcccaaatttccaccgatatcatcgtcggattccccggcgaaaccgaggaggacttccagcagaccatggacgtggtgcgccaggcgcgcttctcctcggcgttcacgttcatctactcgccacgccccggcacgccggccgccgcaatggaacagattccgcgcgacgtggtgcaggaccggttcgaccgactggtggcgttgcaggagcagatcaccgaagagaacctcgccacattcgagggccgcgacgtcgaagtgatgatcaccggcaaactcggcaagaaggacaccgacacccaccgtgtcaccggccgcgagaaaaccggcgtgctggtgcacatcggcgtgcctgaaggcgaaccggtacctgaaatcggcgatttcgtcacggtcaccgtcacacacgccggccgccataatctgcttgccgaccccgatgtggccgctggacagacctattccgtgcgacactgagggggcgtatatgacgcaacgagtcgtctccatcgtcggtcccaccgcgtcaggcaagacggggttgggcatcgccatcgcccggcgtcttgccgaagcgggggagcgggccgaaatcgtgaacgcggacgcctaccagatgtaccgtggcatggatatcggcaccgccaaacccaccgccgaagaacaggcggccgtgccgcatcatctcatcgacatcatcgaccccgaagacacgatgagcgtggcccgattccagcagcttgcgcgcgagaccatcgccgacctgcaatcacgtggcatccggccgattctcgtcggcggctccggcttgtacgccagagcggccatcgatgacatcacctttcccggcaccgatcccgacgtgcgcacacgtcttgaggaacgcgagaaaaccgagggtgccggtgctttgttcgacgagctgcgggccaaagaccccgaagccgccgcgcgcatggacccacgcaacccacgccgcaccatccgtgcgctggaagtcatcgagcttaccggcaaaccgtattcggccagcctgccgcgctaccggtacgtgattccgtccgtacagatcggactcgacctggaccgcccggatttggaccatcgcatcgacctgcgcaccaagcagatgtatgacgatggattcatcgaagaagtcgaacggctgcgcccgcatctgggtgccaccgccgtacgcgcgctcggctatcagcagatcatcgacctgctggacggtatctgggatgtgaacgacgccttcgcggacatcgcacagaaaaccaagcgactcgcccgcaaacagatgggatggttcggccgtgacccgcgcatccactggctgcaggccctgaacccgaaactggtcgacaacgcgatggccattatcgcgcacgccgacgccggcgactacgacccgatcgacgcccgagccgacgaatacacccagcatcatctgggcgatatcacggcgtaggaatcagccgaaggccggtgcaatcacccgcaatcagtgtgcaggcccctgattccagccggcgatcaagaacacgcgcgtcggattcgccgggcgtagtatcgcgtcgaacatcgtctccagtgcagacgtgtcgccccgatatgccgagtgcttggcggagcgatactcctcgcgcgtcactgagccccagtcgagatcccagccggcgtcatgcgccaagcgtgaaccgaatatacgcagcaccatcgcattgccgccacggaacggatgcagataaccgagctcatcataaatagaagcgaacgcgtgaacgaacacgtcgcgatccaacgcatgcaggttgcgcttgtccgccaactccatcgcgatgttgtgcgcgccggtctcaatgagcccagccgggaagaacgcctccggattcgcggcccgagcccggtcgttcgtcacctcgcgtgtggtgtttgaggtacgcaacttgcccgcatcctcgaacacgccttcgaacagccccttatgaatggcggtcaactcgtccaagtcgccagacggattccaccgacgttccgccaacaatacggtacgtgcgaacaccgcatccgcgcgatccgtggcatgatcatccagactgccggcagccagacgatcctttccggcagggtcggcggcggcgcgcagacgcatggcggtctgctcgtccgccacgtcgatgagatgggtcacgggctccaagccacgttcgtaggcaaccgcggcgcgcatcgttgcctcgcccggcgtcatcgcttccagtgcgcagttcttgagtgcaaatgcgactgcgctcgcacgctctgcgggtgtcatgcaacccatgataaggcatattcgcgctccagcggggaatcgactcggacgaacctcgacgaaccgcggcgaatcggctgtcgggattcgtcaatcgaccatatcgtcacggtgtcgtcaccaaccatgcacccccgtactagtagaatcagacccgatatggcacgaacagcatcctccaacagcaccaaaccccgtaaatccaaagacaacgggtctacccatgatggcgaaaccaaggtccagcccgagcttgacctcgaacctgagccgttgtggaagaagatcctgctcgcgattccgcgcgcgttcggctccggcgtacgcgccgtcaccggcgtcggcgaatacgacccagcctaccgtcgtgacggtttgtgcttcctgctgctcgtgctcgccgtactgttctgcgcgtccgaatggttccgtgtcagcggtccattcggccagctgcttcacgccatcgcggccggtgtgcttggtctgatgagcgtcgtgctgccggtgttgctcgccgccgtggccttccgactcatgcgcaattccggtaaagggtccaataacccgcgtgtggtcaccggttgggtgctgctcatgtggtcgatttgttcgatcatcgacgtggcgatcgccgccgaccacaccggattcgacatcacgattctgcaatccgccggcggcctgttcggcttcttcctcggctcaccgctcgcctggggcctttccaacgtgttcgccatcatcattttcgtggtcgtcggcctgttctccttgctgatgattaccggcacccacgtcaccgatttgccggaggatgcgcgcaaaatcgcagctaaaatccaacgcaaaccgtatgtgccgatgggccaggaggccgacggaagcgccagccagttccccaacgaggtccgtgtgggagataccacactcgcctttgccgacggtgttccctcgcatgacggcaacgacgacggcaacgacaacgatcaggccggcgatgcacggcccagcctgttcgcacgactgttcggccgcaaatccaagaccgaagacgacaaaacccttgacaagtatgctgccgacgatccgttcgaccgtgccgccagccagcatggtgccaccgccgaaaccccggtggtcgatccgatgaccggcgagattaccggtgcgcgaaccattgcatcgtcttcgtacgacggtcgtccgcacctatccagccctgcgcctgctgccgatgcggatgatggcgacgcttcccgaacccgcgtcatcaccagtggccagaccatcgccatgcccggtgggggagcggtagacgatccgtgggcacccagtgccgcccaggccggtactgtcgcgctcgcaggggcagccggggcgatgggagcggccggggccgccggtgccgcggccgcggcagccgcgaccggagcctacgcaggcgccgatgcggatggcagcggagtcggccagggcgtgcccaatacggacggacagccgaatgccgccgccggcaacggtacagacgacgacgccaataggccgtatcagttgcccgacctgaacctgctgaccaaaggtcagccccatgcgatgcgcaccccggccaacgatcgcgtgatccgggcactgacttccaccttcgaacagttcaacgtggacgccaaagtcgtcggcttcctgcgtggcccttcggtcacccaatatgaggtcgagcttggccccggcgtcaaggtggagaaagtcaccaacctgcagcgcaacatcgcctacgcggtggccagttcggatgtgcgcatcctttcaccgattcccggcaagtccgccatcggcatcgaaatcccgaacgaggatcgcgaaatcgtgcacttgggcgacgtattgcgctccgacaaggccgtgggcgacccgaacccgatgctctccggcatcggcaaggacgtcgaaggccacttcgtgaccgctgacctgaccaagatgccgcacctgctggtggcaggtgccaccggttccggtaagtcgagttttatcaactcgatgctcacttcgatcatcatgcgtgccacgcctgaacaggtgcgtctgatcatggtggaccccaagcgcgtggaactgtccgcctacgcaggcatcccgcacctgctgaccccgatcatcaccgatccgaagaaagccgcacaggccctcgaatgggtggtcaaggagatggatgcacgctactccgacctcgaattcttcggattccgccacgtcaaggacttcaacgaggccgtgcgcgccggcaaggtgcatgcgcccgccggctcccagcgcaaggtggccccctatccgtacatcctcgtggtggtcgacgagatggccgaccttatgatggtggccaagaacgatgtggaaagctccatccagcgcatcacccagctggcacgagccgccggtgtgcatctggtgctcgccacccagcgtccgtccgtggacgtggtcaccggtctgatcaaggccaacattccatcccgactggcgttcgccacctcgtccgccaccgattcgcgagtcattctcgacacggtcggtgccgagaccctgattggtcagggcgatgcgctgttcctgccgatgggttccgccaagccgattcgtgtgcagggctcgtgggtgtccgaatccgagattcgcaaggccgtggagttcgtacgcacccagcgcaagccgaagtaccgcgaagacatcgaacagatggccaaggaagccgaaaagaaagacagcatggagcccgacgaggagatcggcgacgacatggacgtgctgctgcaggccgccgaactcgtggtcaccagccagttcggttccacctccatgctgcagcgcaagctcagggtcggcttcgccaaggccggccgactcatggacttgctcgaatcgcgcggcgtggtcgggccgtccgaaggctcgaaggcccgcgaggtgtttgttcagccgcaggacctgccgcaggtgctcgccttcatccgaggcgaaaccagctcgctcgaagccagcgccccgcaacaacccgaactcggcgaataattcacccatcgacctccctctgatgagggaggtgcccgaaggggcggagggagagaagcgcggacagcatcagcacgaaacctgattcccgaataatagcagtcaatatccagccaccactcactcaaggtaggagtatgggggtaacgtgaacactatggatgagaacacaatggacaagcagtcatcgcccaaatcatcgctgttcgacggatggaacgcgccgccgaacctggtcacctactcgcgcatcgtactcgtggtgattttcctgacactcgacattctcgccggttcctggggtgagaacaacctgatcatgcgttgggtcgccgcggtactgttcatcatcgccgcgtccaccgataaaatcgacggttggatggcccgcaaatacaatcaggtcaccgaaatgggcaagctcatggatccgatcgcggacaagctgctcacttgcggcgcaatgattgtatgctccgcgttcggcgagctcggctggtgggtgaccatcctgttcctgattcgcgaaatcggcatcaccgttatgcgcttcttcgtcatggagcgtccgggcggcaaggtcatcgccgccgcatggcccggcaagctcaagaccgtattccagtgcgtgggtctgtccatgctgctgctgccgttctggtcattgggtaacggacaggccacgccgttctggatgaccgcttactacttcctgacctacgccatcatctacgtggcattggtcctgtgcctctactcgggtgccgtgtacctgtacaacacgttcgtcgccccgaagcggaagtgacggatattccaatgcaggaattgtgcgacagtctcgcggccggcatcctcaagatctgcgaggcgaacaatacgaaaatctcctgcgctgaatccctgaccggtggcctgctcgccgatgcgttcgtgcgtattcccggtgcctccaacgtgttgctgggctccgctgtcacctacgacatcaatgccaaggcctcgatcctacacgtggacaaggccctattggatcgagaaggcgccgtacaccccgaagtcgcccggcagatggccatcggtgccgctcgcctatacagccagccggaatacggcgaccgaatcatcggcctttccaccaccggcgtggccggccccggtccggacggtgataagccggccggactggtgtatgtgggcctgcgcatccccgcaagcctcaccgcggaccatgtcgaagtgctcaaagccgtcgaactccatcttgatggcatgcgcgaagaggttcgtcgcctcaccgtattccacgttctgcaaaacttgagtctattcacagcaagttttaaggaataaaaccgcgggaccgtcgtgttgtacatagtggaaacactgaaccgaccttggaaggggcgatggcgatggaaacgatgacccgagtgaacgaacagatggatgtggccgccaagaagccgatggctgtgcagccgggtgtcgcccgtatgcgtgaactgactccggcccagcgccgtgcggtgatgttcgcccagcagcaggtgctcaaggcgcaggccgccaagaaggccaaggatcagcgtcaagccgttcgtgaacgtatgtgggatgaggattcgccgtcgtacaagccgactgccgccgccgagcccgtggtggttgaggaggagcctcgcgaggtttcgctgcgtggtgctatcggctacgtgctgcgcgaactgcgtacgcgcgatcgccgcacgttgcgtgaggtctccgagaaggcgggcgtttcgctgggctatctttccgaagtcgaacgtgggcagaaggaagccagctccgaactgctgagctccatcgccgatgcgctcggagtctccacttcgcgcatgctgcgcatggtggccgattatctcgacacagtcgagggctgatcggttggcggtgtgaagccgcatcccgtaatctgtgtctagctatgaacccgtatcgcttgtggcgatgcgggtttttgctgtcctgcgggtggtggcacactggcgtgtatgcgtgaacgggaattctgggaattacttgaagaggtgttcggtcggacctacggtcgttcgctgtcgcgtgatcaacggatgtccaaattggcgaatatgaccgtggtcgaggcgctggacgcgggggaggagccacgcgtggtctggaatgtgctctgtgaccaaatggaggttccggactccaagcgttggggccacgatcataacgcgccgcccatgcccgccgtctgacactgcgggattacggagtcgctgaatcgtgaaattggcgatttcggcgtgttgcacgccaaattcgaacaaatgttcgtgtgtgtggttatagttattcacagtgacaagaagccgcatacgtgtgcacagggtgcttgtcatccgccataagccttaccgcagtaggtcttagggaggtcagatggccgagctcgggcaagctggaaccacaatggttggtttggattgcctcacatggcatgtccgtcatacggtggaggcatccgattcgcgcacgacttcgacaaggagaagatcatggcacttgagaccaagccggccaaggacccggcagccgaggacaagcacgagctcgatcccaagcgcaaggcggcgctggacaccgcgctggcgcaggttgagaagagctttggcaaaggttccgcaatgcgactgggcgaccagcccgagcagaacgtcgaggtgattcccaccggttcgttggccctcgatatggcgctcggcatcggcggcctgcccaagggccgcatcgtggagatctacggccccgaatcatccggtaagaccacgctcgcattgcatgtggtggccaatgcccagaagaagggcggcgtggcggcctacatcgatgccgaacacgcgctcgacccggcctacgcccgcaagctcggcgtggacaccgactcactcatcgtctcccagccggataacggcgagcaggccctcgaaatcgccgacatgctgattcgctccggtgcacttgacgtcatcgtcatcgactcggtcgccgccctagtgccgaaggccgaaatcgaaggcgaaatgggagacagccatgttggtttgcaggcccggctcatgagtcaggcgctgcgcaagatgaccggcgcgttggctcaggccggcaccaccgccatcttcatcaaccagctgcgtgagaagatcggcgtgttcttcggcaaccccgaaaccaccaccggtggtaaagctctgaagttctacgcctccgtgcgtctcgacatccgccgcatccagaccttgaagaacggcgacgaagcggtgggcaaccgcacgcgcgtcaaggtggtcaagaacaagatggccccgcctttcaagtccgccgaattcgacatgctctacggtgaaggcatttcccgtgagggctcggtgatcgacatggcccagcaggtcggcgtggtcaagaagtccggttcgtggttcacctatgagggtgatcagctcggtcagggacgcgagaaggttcgtcagttccttaaggacaacccggccatcaccgaggagattgagaataaggtcaaggccgagttcggtctgatcggttccgccgaccagttcgcggaagatggcgaagccgcagcagcggccgctgtcagcgaggccgccgctgccgacgtggccaaggacagcaaggccgcagcggcgcctgctgccaaaacgacccgtgccaaggccggcgcagctaaggcctgaacatgattagtgccgaagcattcttgcggcgcaatcctgttgcgtcgcaagacatgcccattgccgagcagcgtgttcagtcgaaaccgtcgggacgtttttctcgacgggggagagacgctgccgttgtcgaagatcccaatgatttggacgcttgccgcgaggctgcattgcgtttgctggacgcggccccgcgtgcatccggcgcgttgcgcgaacgattgctcagcaaaggctatggcgaggcgattgtggacgaggtcatcgaacggctgattcgcgtgcaactgattgacgaccgcgcttatgccgaatcggccgtacgctattgtgccggtcgcatgatgggtcgtcgtggtgcggtcctggaacttgctcgcaaaggcgtggaccgcaaactggctgaacaggtgtgtggcgaagctgagcaaaatggcatctttgaagatgccgcatgggaattgggccgccaaatagcccgcaaaacccatggcctcgatcgtcaggtccgtcagcgtcggttttggtccgcaggcggccgcaaaggacacagccccgaaaccctccgccgagtcgccgccgaattgttggtgtagccaagaaaaaaatgagacctcttataccccgggttctgtcgtgccgtgcgcgaacgcacggcacggatggccatccatctcgacctgacgttgccgccaggctctagcagcctacccgatgacacgggcgagcagcccttaccgccatctgcttggccttgctcccgatgaggcttgccatgcgacctactgttaccagaggcccggtggtctcttacaccgccgtttcacccttacccgtcgaggacgggcggtctgttctctgttgcgctatctctcaggtcaccctgggcggacgttatccgccatcgtgctctatggagcccggaagttcctcagccgatcccaatgaagatcacggccgcggccatcaagaggtctcaagcctgcaattatacataaggtgcggaaaaggcggcatcccgccctgcggtgaggccatgacgttgcccagttatcctgttttctccatagttgggcgtagttgggcgattcgtgaacgacgcgccgaatatcggatggggcgtgtcgggcgtgttgtggcgtgtcgtatggagacgaatcaaatctgtaagagcttggtatgtgcgagaaagagcaagaaaacgttgcctatccattgcagtatttaccatgacgaacaaacgagccagcctgataaaccggtatcaaatcttcttataggagactgctgccaaaaccccagtatatacatcgtttcattgcagagaaaagcccgggaataaacatatattctctgggcgagtttccggccgttcacccattgttcgtctacaatgaaacatacccggtcggtgatgatgccgttcggaacacatatagcgggttacaccgcttgagttagaggaggtcaacatggaaatcgtcgttaccggacgccacacgcaggtcaagcaaaggttccgtgatgtggtcgagaccaagatgaatcgtgtgaccgctatcgccccggatgctcagcgcgcgcagatcgtgctgacccatgagggcaacccgcgtcaggccgataccgccaagcgcgtggaaatcaccgttatcgccggacgtaccgtggtgcgtgcggaggcttccagcaccgatgaattcagtgcgctggacatggcgctggataagttgacgctgcgtctgcgtcgtactcgtgaccgtcgcaaggatcaccgtcgtggttacgcaaacccggtcccggtggatctgggtgttatcgccccggagcccgagccggaggtgtcggaggaagagccgaacaacagcccgcaggctgcggtcgcctccgatcttggccctggcgaatccgtggaggtccaggttggggatacgccgattgtcatccgtcgcaagctgcacatcgccgagcctatgagcatcgacgaggcgctgtacgagatggaactgatcggacacgacttcttcctgttcgtgaacaaggagaccggacgcccgtccgtcgtctaccaccgtcacggttggagctacggcgtgttcgaaatcgacactccggagaatgtcaagaaagcctgagggtaagggctgctgacatgatcagctgataccgcatggaccgcttccaatatggaagcggtccattttttcgtaaaaaggtcgaaaaattcgattgctgacggtgcgaggcgctattctggtacgcggacaccaccacttatcagtcaagggagaacccagtggtcgatattgttgacaaagccctgcgaatgggtgaaggccaccagctcaagaagctggagaacgtggctaaggccgtgaacgccctggaggacgagatttccgccctctccgacgaggacctgaaggcccaaaccccgaagttcaagcaggaaatcgaaaacggcaagaatctggacgagatcatgcccgaggcgttcgccaccgtgcgcgaggtctccaagcgcaccctcggccagcgtcacttcgacgtgcagctcatgggcggtgccgccctacactggggcaacatcgccgaaatgaagaccggtgaaggcaagaccctggtcgccaccctgcctacctacctgaacgctctcgaaggcaagggcgtgcacgtggtcaccgtcaacgactacctcgccagctaccagagcgagctgatgggccgtatctaccgcttcctcggcatgaacgtcggctgcatcatcaccgagcagaagccgccggagcgccgcaagcagtacaacgccgacatcacctacggcaccaacaacgagttcggcttcgactacctgcgtgacaacatggcctgggagaaggccgacctcgtgcaacgcggccaccactacgccatcgtcgatgaggtcgactccatcctcatcgatgaggcccgtaccccgcttatcatctccggcccggccgaaggcgacgtgacccgctggtaccgtcagttcgccaagctggtgctgaagctcacccgcgacgaggactacgacgtcgacgagaagaagaaggtcgtcggcatcctggacccgggcatcaccaaggttgaggacttcctcggcatcgacaacctgtacgagccggccaacaccgccctgatcggctacctcaacaacgccatcaaggccaaggaactgttcctgcgtgacaaggactacgtcgtcacccagggcgaggtgctcatcgtcgacgagcacaccggtcgtatcctgccgggtcgccgctacaacgagggcctgcatcaggccatcgaagccaaggaaggcgtggaggtcaaggccgagaaccagaccttcgccaccatcaccctgcagaactacttccgtatgtacgacaagctcgcgggcatgaccggtacagccgaaaccgaggccgccgagttcatgaacacctacaagctgggcgtactgccgatcaagaccaacaagccgatgatccgcaaggaccaggacgacctcatctaccgcaccaagaaggagaagctggccgccatcgtcaaggatgtggccaagcgtcacgccaagggacagccggtgctgctcggtaccgcctccgtggaaagctccgaagtggtctccgccctgctcgacgtggcgaagatcccacaccaggtcctgaacgccaagcagcacgagaaggaagccgccgtggtcgccgtcgccggccgcaagggcgccgtcaccgtggccaccaacatggccggccgtggtaccgacatcatgctcggcggcaacgtcgagttccttgccgacgccaagctcaagtccgaaggttactctccggaagacaccccggaagagtacgagaagcgttggccgggcaccctgaacgagatcaaggcccaggtcaaggacgagcatgaggaggtcaaggagctgggcggcctgtatgtgctcggcaccgaacgccacgagtcccgtcgaatcgacaaccagttgcgcggtcgttccggccgtcagggcgatccgggcgagtcccgcttctatctgtcgctggaagatgacctgatgcgtctgttcaacacccagctggtggcccaggtcatggccaagggcatggaggaaggccagccgatagaggccaagtccgtcaccaagggcgtgcgcaccgcgcagaaggccgtcgaatcccgtaactatgagattcgcaagaacgtgttgaagtacgatgacgtgatgaacaagcagcgcaccgtcatctactccgagcgtcaggccgtgctcaagggcgaagacatccacaaggacatcctgcgtttcatttccgacaccgtcgagtcctacatcaagggtgccaacaagggatccgagaaaccgaaggactgggattgggagggcctgttcaaggcgctcaacaccgtgatccccaccaaggtcgacgaagacgaggtcaggaagatcgtcggcggcctcaagggtgcgaaggccgtcgaggccgtgcgcgacctgatcgtcgaggacgccaggcagcagtacggcgaaatggaggagaccatcggcgagaccggcttgcgcgatctcgaacgccgcgtggtgctcgccgtgctcgaccgcaagtggcgcgagcacctttacgagatggattacctcaaggacggcatcggcctgcgtggcatgggccagcgcgacccgctggtcgaataccagcgcgaaggctaccagatgtacaactccatgatcgaggccattaaggaggagaccgtccagctgctgttccacatcgacatcaagcaggtcgccaccaccgacgaggccgttgacgaggtcgaggagaccgccgaaagcgccgacaccatcgccgtggcctccggccccgacgagaacggcgaatccgtggtcgaggccgccgagggcgaagtcgaggaagaggacgaggatacggacgccaagcaggcgatcgccgaatccgcagccgcctccggggccggcgagtccacgctgcctgttgccggaccggctccgatcagccacgccgaaggcaaggtcccggtttccaagcgtccgaagagcgaagagctcaagacgccgtgggccgacggccgcaccttccctggcactggcaagaacgccccgtgcccgtgcggttccggccgcaagtacaagatgtgccacggccagaacgagaagtgacgcatcgctagttagtaactagctcatggctccccacacggggagccattttctatgcggttcatcagcatgtattcgtgcggtgccgtacgcgcgggacggcacgcgattttcgcggattttgacgtcgtatcccacactgttgcgggatggcacgagtgtcaatcgattgactagcgtggcgtcccgcagtacgaattacggaatcgttgaaattccgccattctcggtgttatggtgtcacggtccgcaaagggtgatgtgggacggcacggctcaaacggcgaaaatgagctgccgtcccgcagttttacgggatagcacaaaaaagaggcttctgctgttttcgtgggttggg

SEQ ID NO: 1553 - DNA, 19800 bp, Unknown
  R221_24m  MAG No. k141_17494
gctctcggacgatgaggcgttggccaatgcggtgctcgatgtgcgcgaagtgtacgaggacaccgtctatcaggtggcgcatgacgtgatcgccgtgctcaaggcttatgccgaagtcgacaaggccactggcggcaaggctgatctgccgatgctttcggtgttgcagtcgattcgcgaccatatcgccacgctcgtctaccccggattcatcgggcgtactcccccggatgcgctgaagtcgttgagccgatatttgagagccgatctgagccgactcaataaggcaaaaaccgataagaaccgtgacgtcaagtgggcctggcaggccgacgaagcccgtcaggtggtcgataaggcgttggcccgtgccaaggcggagccggccggcccgaagcatgaggcattgatgaagcaggccgaacaggcccgttggatgcttgaagagttctacgtgtccctatgggcgcaggagcttggcaccgccaagccggtgagcctgcagcgcatcaagaaggcactggcgtagcgatggcgacgacgcaacggcgcaagccggccaatccgcgcggcagggcgaacgtgattgtcgcggggcggggcgtgtcaggcggcaatcgcaaacgtcgcccgggcaaacgcccgcgcaatcgcaggtatccgctcagcccggcgcgctggtggaagcgggccgggttggcgcagcgcgtcgcggctgtgctggtcaccgtggtggcggccgcatgcgtggtcgcgctggtcgtgggcactgtgcgggtcgtccagtggcgtcgcgacgtgcaggaggccgaggcccgccagctgcagctgacgcagcaatacgacttcaatcccggcgacatcatctcggacggccagttcttcaacgccaatgcgatgagcgaggccgaggtccaggcgttcctcgacaagcagggcgcggcgtgcagcggttcccggtgcctgaaaaccatgaccttcgacaccgaagaccaggcggcgaacgagtattgcgcggcgtacgagggcgcgagaaaggagaccgcggccgcgatcatcgacaagtcggcgcgcgcgtgcggcatcagccagaaggtgctgctcaccgtgctgcagaaggagcagcacctggtcacggccgtcgatccgacggacttccagtacaaggccgccatggggctgagctgcccggacaacgcgaactgcgatccggcctatgccggcttcttcagacaggtgtacggggcggcgcaccgctaccaatactacgtggcgcatgaaagcgcctacggctatcacgccaacgcgctgaactacatccagtaccacccggatgccgggtgcggcggcaccaacgtgtacatcgagaacaaggcgaccgcgctgctctacatctacacgccctaccagccgaacgacgcctcgctggcggccgggttcggcgagggcgactcatgctccagctacggcaaccgcaacttcgccctcatatacaccaactggttcggtgccgcgcgccgataggggcgggacggcaaaaaaccgaaaccacggtaaggctaggtgtcatccgcgccgtcgccgccccgccgcacggccggagaaccggccggatgacgagcggcacggctcacaggtcgatcttcggggaggcgtcgagcagggtacgcgtgtactcggccttgggatggttgagcacgcggccggtctccccgctctccacgacgcgcccgtggcgcagcaccgtgatcacgtcggacatctcctgcacgatgcccaggtcatgggtgatgaacaggcatgcgaaaccgtgctcgcgctgcagccggcgcagcaggtcgagcaccttgcgctgcacggtcacgtccagcgacgacgtcggctcgtcggcgatgagcagcgacgggttgagcgccaaggcgcgcgcgatgccgacgcgctggcgttggccgcccgacagctggtgcgggaaccggccggccacatcggcgggcagctccacctgatcaagcaattcaaggacgcgcttgcgccggtccgtctcgctgagcccgccctgcacgagcatcggctcgccgatgctccatgccacggacttgcgcgggttgagcgccgatccgctgtcctggaacacatagcccatatgcttcagaatctcgcgcttgcgcctgccatgcgccttggcgagatcctccccctcgatgagcaccgtgcccgaggttggcgcgagctggccggagatcaccttggcgatcgtggtcttgccggctcccgattcgcccaccagcgcgcgggtcctgccggccaccagatcgaacgagatgtccttgacggcgaagctgccggccttgtacgacacggccacgtcgttcacctgcgtgatgcgcctgccgccgccgagcgcgtcactttccgtgatgcgttcgccgccggccgcatgttcgccgtctgccgcatgctcgtcgatgcgcaggcgcggcacggcgtcgagcagcatccgcgtgtagtcgtcggacgggtggcggaagacctgcgcgacgctcccctgctcgacgatcacgccgttgtgcatcacgtacacgtcctgcgcggcctgccacaccacgcccatgtcgtgggtgatgagcagcacggccagatcgaggtcgaccgccagcgaggagatcagggcgagaatcgccttctgcgtggtcacgtcgagcgcggtggtcggctcgtcggcgatgagtaccttgggtcggttgatgatcgccatggcgatcatcacgcgctgcagctggccgcccgacagctcatgcgggtacgacgaccacacgcgttcggcgtcgtcgagcccgacctcgcgcagctgttcgagcaccttggccttgcgctcggcggcgctgagctgcttctggtggtatttgagcgattccgcgacctgtacgccgagcgtgaacaccggattgaacgcggtggacggttcctggaacaccgtgccgatgtattcgccgcggatgcgttgcagcggcgcgtcggcggccagcagatcgatgccgcggccggcggcgtccttgccgtcgccgcccggaccggagtccggcccgtcatccacaagggcgtcgtcgaggtacgcgtggcccttcacgctggccaccgacggatcgagacggggcagcgccatcgccgtcaccgacttgccggagccggattcgccgaccagagcggtgatgcgccccgggaacagcctgaggctgacgccgtgggtcacctcccgctcgtcgaagctgacggccagaccgtccacggtcacgatcgcgcgtggttcactcattggaagctccttggatgcacaagcgttggaatgcgtccggcgcgcgcgccagcggaccatgccgccggcgcgcgccggatgcggatgccggctcagttcgcgctggcgagcgagacctgcgtgtagtccgggtacgccgggaagttgccgatgacgaagttggtcacgttcgatccgtggatgaacgtgttcttcgaatagatcagcggcacgaccggcacgtcggccatgatcgtcttgtcggcctcggcccagatcttgccggcctcggtctgatcgatggtctcggtggccttcttgatcagctcgtcgaccttcgggttcgcgtaacgggccaggttgtagttgccgtggccgatctgcgaggagtcgaacagcggggagatgttggcgtagggcgacgggaagtcgggctgccacgagctgatggccagatcgtagtcgcccttgtcgttggtcagcgtatcggaatacacatcgtcgttgagtgtctggatgtccaccttgacgccggcccgcttgaggctcgtctggatcgaggaggcggtttcggcctgagcggaggtggcgatgagcttgagggtcggggcctgctcgcccgactccttgatcagctgcttggccttgtccacgtcgccggtcggatcggccttgtacaggtcgtagtcctcgcggccctcgatgccgggcgtaatgagcgtggtggcgaagttgccggcgatctcgccgccggaagccgtctggtaggccttcttgtcgaccgcgtactgcagcgcttggcgaatcttcgcgttcttcacgtgttgggtgttgatggcgaggtattccagcgcgccgtcgccgctggtggtcagcagcttcttgtagttcgggttggcctgcgcctgcgcgagctgcgcggccggcacgaatccggacaggaacgagttcttgccttcaccggtgccctgcatgatcgactgggcggccacagaggtgtcctgtcccatcttgaacacgatcttgtcggggcccgcggtgcgcaccggatcggtcttcttgtcccagtaggtgttgcgcacgaagacggcctgcttgccggcctcgttcgactcgaccttgtacgggccggaggccaccggcagcttgccgtagccggacgccgggcccttgccgtcgggcacgggggtgaacgcggcgagcgagacgacccacggccagtcgccgaacggcgcgttgaggtggaagatgatggtcttgtcgttcggcgtctcgatggagctgagctcctggccgtcgaacgggccgtggtagtcctgcgcgccctcgagcagcgtcttgtggtagctcaggccgccggtcagcgagtcggcgaaggaacgctccagcccgtacttgacgtccttggaggtgatgggcgtgccgtcggagaacttgagcccgttcttgagcgtgtacgtccacgtcttgccgtcgtcgctcgacttgccggtgtcggtggccagatcgggcacgaccttcgtctcgcccttgtcggtgatcttccacgcggtcaggcggcggaagatgttgccgttcgtggtggtcggcagaccctggctcttggccgggtccagatccatctccgtgctggacagcagcacgttcagcgtgccgcccttgacggtggtgccgctcgccgagccggtggcggcgttgtcgttggacgcgccgcagccggacagcgccagtaccgcggcacaagcccccgccgcgaatacgcgccatgcgttgttcttcatgatggttttcctctctatcggtgccggtccgtggagcagaccggcaagtatcgcgtgttgcggccgcagccgcactacttcgtgccgagcgcgaccctggggtcgagcaggctgtagcagatgtccacgatcaggttggcgacgatgaccagcacggcggcgaacatcgtcgcgccgaccagcacctgcaggtcgaggttcgacacggaatcgagcagcagcgagccgagcccctgcatcgagaacaccttctcggtgagcaccgcgccgccgagcagcccgcccagatcgaggccgaacatggtcatcacgggcagcagcgcgttgcgcagcgcgtgcttgaagatgatcaccgattcgggcacgcccttggagcgggcggtgcggatgtagtcctggctcagctcgccgatcatctgcgtgcgggtgaccctggtgtagccggcggcgctgagcacggccagcaccagccacggcagcagcagatgcgtgaaccagccgacagggtcgtcgtggaagttcacgtacccgccgctggggaatatctgcagcaccagcgaaaaggcgatcaccgtcagcaggccgatcaggtatgacggtgccgaaacgcccacgatcgacagcccgagcagcgtgcggtcgatcagcgtatcgcgcttgagggccgcccacacgccggtcgccacgccgatgaccagccacagcacggccgcgccgaccgcgatcgacgcggtgatcgggaagcggtcgaggatcagctggctcaccgattcgttgagacggaacgaatacccgaggcacggtgccgagcagaccacggcgccgccgccgctgccgaaggtgcgcccgacgaagatgcccgccacgtaattgcccatctgctcgtaccacggcttatcggtgcccatgaaggcggagacccgctgcagctgctcgggcgtgcacggcttgccgcacgacagctgcgccggattggtcggcagcaggaagaagatcaggaacagcgccagcgtgatgagcaggatgacgacgatcgagctcgccacgcgcttgccgatgtattgcaggattctcatgcacgcacccccttgcgcgggtcgatggcgtcgctcaggccatcgccaagcaggttgaagccgaaggtcagcaggaacagggcggcgcccgggaagatcagatacatcgggtcgaccagggcccactgcacggcgtcggagatggaccggccccatgagggcgtcggcgggttcatgccgacgccgaggaacgacaggcccgcctcggcgccgatgcgcccgggaatcgacagcgtgatgttgacgatgagcagcggcatgaggttcggcaggatctgatgccacagcacatgggcaggcgaggcgcccatcaccttggacgcgacggcgaaattgcgcttgctcagcgtcagcgtctgcccccggacaagacgcgcgatgccgggccatccgaagaatccgagcactagcgtcagcagcaccggcctcgggaagccctgcggcaccaccgccgacagcgcgatcgcgaagatcaggaacgggaagccgaagaagacgtccatcgtgcgcgagatcagcgcatcgaccaacccggggaaatagccggccagcagcccgagcgccacgccgatgaccagcgagatgaccgacgagacgacgccgatgcccagcgagatccgtgagccgtacgccacgatggagaacaggtcgacgccgcgcagcggggtgacgccgaaccagtgccgggcactgatgccgccgccgaatccggccggcaccgacccggcacccaaggcctcgggatgctcggcgtacgggtcgttgccggtgatggccgacaacggcccggccagcggcgccagcagcacgaagaacagcacgatggcgccgccgaccactatcgatgagcgagcgccggaacggagaacgcgccgccgtctttccgccttcggcgcggctttcgcagtcgcatccgtcatattgtcatccccattttcacgctgaacatgccgataatcatcaatccgcgcaggtgggcgcccgtgagccgggtcccctgcagccggtgtcctaacattaaggtttcgcagcaggatgacatgctgtggccttatcggttatttggatagcaggttatcaatggacggcaatcggcggataaggcatgccgcggggacacgcgggaaaaacccttcgttcccgcgcgtcacgccacccgtcattccccgaccgggctgacgtacgggcgcagcagtgtcgtggtgccggctgccagcaacgcaaaaatcgcgccgaccgggccgagccaggtcaggccaaggaggtcgttgaccaggccgccgaccgcggagccgatggcgatgccgatgttgaacgacatggaattcagggaggcggccagattcaccgaaccggggtgggactggtacgccacgtccatgtacagcacctgggaggaggcgttctgcagatacatgagcatgccaagcgccaccagcagcagtgcgccgccggccggcaccagcgaggcgaaagccagcaggcacaggcagacggcctgcacgcaatagatcggtcgaatgtgggtcagcggctcgacccccctgccccgatcggccagcttgcctccgtacaggttgctccacaggcaggcacagccgtagaccaccaagccgacgctgatatagcgttcgggcacaccgatttcgtcgcgcatgatcggcgagagatacgtgtagaagacgtaggaggcggctgcgccaaagaccacatccgccacgccgagctggatgcggcggtcgaagaacagacggaattgcctcaggaaaccgatcttcgccggatgtgagttgcgtggcagagacactgccatcgatgccatcagcacggcggtgagcaccgaaaccaaggcaaaggtgacacgccagccgaaagtattggccacccaagtgccggccggtacgccgatcacagaggcgatggagaaacccgagaatacccaggcaatgaacttggtgcggtatttgtcggtggtcacgtcgggcgcgaaggtcatggagatggccaccagcgtgccggacaccgaggcgatgagcagtcgggcgatgagcagcaccggatagttcggcgcgaaggcgcacaggatattgccgacgaggaacacgcccatcaacgtcagataggtgagaaagcgcgggaatcgggcggataatgcggatccgagcggcgtgcagggcgcgtacacgaatgcgaagatggccaccagattacccacggtcacttcggagaccttaagtccggatgcgatgtccggcaggatgcccactaccacgaattcgctcatgcccagcatgaagctggcgaagatcaggatggtgaccggcagattgaagaagcggtcggtgcgcgcggtgttcgcaggtgtgttcgcaggtgtgttcgtcatgggtgctctcttgagtgctctcgctcgtactacaagctgattcgtcggttacgtcaatcgtttttcgtatcaactcagcgacaacactattcccacctctgcccgctacccaccaccacgacacgctatagaaaaccccgccgatgaccaatcatcgacggggttcggcacatgtgcaacgcttgcgattacagcttcggcagatacttcttcagctcgtaaggcgtgacttgctggttgtactcctcccattcctggtgcttgttgtccaggaagtagccgaaggcgtgttcgccgagcacgtcggccacgaagtcggatttctccatgatcttcagcgcctcgtccagcgagcgcggcagcggctgaatgcccatggcctgacgttcgccgtcggtgagctcccacacgtcatcactggtgggttcgcccagctgcatctgcttatcgatgccatcgagaccggcggccagcagcaccgagtaggcaaggtatgggttggacaccgggtcgagcgcacggaactccatgcgcgcggagttgcccttgcccggcttgtactgcgggatgcgcagtagcgcggaacggttgttgtggccccagcaaatgtagcttggtgcctcattgccgccccacaggcgcttgtacgagttgacgtactggtcggtgaccgcgcagatttcggccgcatggtacaggatgccggcggcgaactggcgggcggtcagggacatgttgaactcctgaccggcctcgtagaaggcgttggaatcgccttcgaacaggctcaggtgcgtgtgcatgccggaaccaggcgcgtcggccaggggcttgggcatgaagctggcgtgaatgccgcgctccaaggaaatctccttgaccactgtacggaatgtcatgatgttgtcggccatggtgagcgcgtccgcgtatcgcagatcgatctcgttctggcctggccccgcctcatggtgcgagtattccaccgagatgcccatttgctcgagcatgttcacggtggcgcggcggaagtccatgcctgggctgcgcggcacatggtcgaagtagccgccctcgtcgatcggggtcggggccttggaccagtcgtcctggctttcgaacaggtagaactcgatttccggatgcacgtagaacgtgaagcccttgtccttggccttggcgagcgtacgcttcaacacgtgacgtggatcgccgagcgaaggctcgccgtctggggtcagaatgtcgcagaacatgcgggcggtaccttgcgggccaccgcgccacggcaggatctggaacgtcgcgggatcgggctggacgatcatgtcgtcttcggacacgcgggtcatgccctcgatggcggaaccgtcgaagccgagaccctcctcaaacgcggcttccagttcggccggagcaatcgccacggacttcagtgttcccaacacgtccgtgaaccacagacgaataaagcgcacgtcgcgttcttcgaccgtgcgcagcgcaaactcctgctgtttatccatagtcgcctatcgttccataaccgtgttacgaggggcgttaacatctcactgtttgtcacctgcgagtcgcgagatttcatcaacatgccccggtccgcatgtcaggcatggttcgggcccatgccggcacggcactatggtagtgactatgagcgaagatcatctcaccccatccgccaatccgcccgagctggtgccgatcaatcagctggatgattacgccgacttggatgcgttgcaggcacgtatagacacgctgttcgagagctaccggcattccctgtacgacgatcgccgttgggtgttcgatcatttgcgctatcaggacgcggcccgcaaggtggtgggcgtgggctcggtgggccagcgcgcgtggacgtcggtgtggatcgcgcgtgatatcgacgatccgatgatgattcagatgaaggaggccacgtattccgtgctcgagcattactgcggcgcgtcgccgtacgccacgcacggtgggcgcgtggttcaggggcagaagctgattcagaatacggccgatgtgctgttgggttggtcgagctttatggccgaggatggccgaccgcgcgactattacgtgcgccagttgtggaatggcaagggttcgattgatatcgacaatctcaacgcttcgggattgagcgatctgtcgcgcatgtgcgcatggtcgttggcgcatgcccacgcccgcaccggcgattcgatcgcgatcgccaattacatgggtggcaccgacgaattcgatcaggccattgcctcgttcgccgtcagctacgccgaacagaatgatgaagactacaccgtcttcaaaaagctcctcaaatccggcgaccttccttgctgagccgttaagcggacagcccaatgggctgtccgtaggcgaggcctgagtgaagcgatagctgagcaaaggtagcttaacagtctcgctaaggcgagtcctttgcctacttcgcgactgcgagcgcttcctggagcgtgaacgcacgtgcgtataacgacttgccgaggatggcggaatcgacgccgatctcggccagttccttgatggcgcgcaaatcgtccagcttggagataccaccggaggccgtgaccttggcgtcggtgcgttcggcgacttcacgcagcagttgtatgttcgggccggacatcatgccgtccttggccacgtcggtgaccacgtaacgcgagcagcccacggagtcaaggaacttcatggtctcaaacaggtcgccgccttcgcgcgtccagccgcgcgccgccagtgtgtgaccgcgcacatccagaccaacagccacacggtcgccgtacttcttgatgaccgaagcggtccaatccgggttctccaaagcggcggtgccgatgttcactcgggcggcaccggcctcaagggccgcgtccaacgaagcgtcatcgcgcacgccgccggacagttcgatgttcacgcggtcgccaagctcatgaacgatttcacgcagctgatcgcgattgttgcccgtaccgaaagcggcatcaaggtcgaccaggtgaatccattcggcaccggcctcaacccaggtacgggcggcctcaaacggcgaaccgtaatcggtttcggaaccggattcgccttggcgcaggcgcacggccttgccatcgcgtacatcgacggcgggcagcagagtcaacgacataagaagagcctttcttcagttacttatacataatttgagctctctcgtcagaggggagcttcatgctttttacagcgtggcgatccagttcttgaggagctgggagccagcgtccccggacttttccgggtggaattgcgtggcggacagcgggccgtgttcgtaggcggccacgaaacgcgaccggccgtacgagcaccagctcacgcgttcgggcgcaccgctcagatcaatgtcgaagcgggacgtatccgccggcttcacttccatcgcggcgtaggagtgcacgaagtaaaaccgttcattctccacgccgttgagcagcaccgaatcgggggcggcctcgatcgtgtcccatcccatgtgaggcaccacgtcggcgtccagcaggttcaccgttccgccgatcagcccgatgcccgcggcatgggccccgtgctccagaccgtgttcgaacatgatctgctcgcccacgcacacgccaagcaccgggcggccggcgcggatgcgatcatagatcacacggtcgccgtcgaccttcttcagtccttccatgcatgcggcgaacgcgcccacgcccggcacgaccagaccgtcggcctccaacgactgccggtagtcggaggtgagggtggtgtcgacgccaagattggcgagcgcacgcaccatggaacgtacattgccgaaaccgtaatcgaaaacaaccgctgtggtcatattctctcctatcccctactggttggttggcgtctattcgatgcgggagccgcgtccgccacgcccacgcttggtatggttggcgagaatctgcatcgcctggtcatggtcgagtccagcggaatccaccacttcgaacccttgggtcttgagttggttcagggttacgatgccgagcatcaggtcctcgacgaagcgcggtgtggaggtgaacagcacgggcggcgcgaaactctgtccggcctctccctgcacgtacatggccacttcgagcttgtcggcacgattgactgcaagaatcacggccatgccggataccacggtggtcaggtccttggctgcggcttccgggccgtcgccgtccagattcttcagcaccgcgacggccccctgattggcaccgacgcatgcggcggagatgtccgacagctggcagaacgcggccaacagttcggcggaggcaagacgggtgacgatcagcgccaccttcgccttgttacccaacagtccagcgagttcgttgtcgaagccgagcgaggggtcgaccacgtcggccatggcctcattcaccgcatcagcgaccgacccggtgacgtcgtcggccataggctggccggaatcagcggaagccttatcagccgtatcatcattcgcgtcggaatcggacttcgctgaagcagcgtccgccgttttatcggcatcactggtatcactggcatcgccggatgccgaatcgtccgcgaattctttctcgaatccggcgagcgcggcctcaagctcctcgtcggagaagtgcgattcgtccggatcgaacttgtcgtcggccatcacagggctcccttggtgctgggcacgccgtctacacgcgggtcgatttccacggcgaagcgcagcgcacgggccagcgccttgaattcggcttcggcgatgtgatgcggatcacggccggcgagcacctgcatgtgcaggcagatgccggcgtggaaggcgatggattccatgacgtggcggaccagagagccggtgaagtggccgccgatcatgcagaattcgtagccttcgggctcgccgctgcacacgcagtacgggcggccggaaatgtcgaccacggccttggccagcgcctcgtcgagcggcacggtggcgtcggcgaagcggcggatgcctttcttgtcgccgagggcccgcttcagagcttcgccgaacacgatggccgtatcttccacggtgtggtgcacgtcgatgtcggtgtcgccgtgggcgtggatggtcaggtcgatcagcgaatgcttgccgagcgcggtcatcatatggttgtagaacggcacggatgtatcgatatcggttttgccggtgccgtcgaggttcagttcgaggtcgatgtgtgattcgctggtttcgcggacgatgtgcgcggttcttgccatcatgtctcctgtgtgattcgtcatattggattgcggcgggactcgaatcgcttcgggtctcgccgcaatcggaaagaaacgtcccttatgctgcttccactatacgaagcgcttcaacaagggcgttacggaaggtttccatctcctcgtcggtacccatgcacacgcgcagccaaccgtccggtccgaccacgcggatgagtacgccgcgcttcaggagctcgtcgaagatggcttcgcgcttgtcgaagtgcccgccgaacagcaggaagttcgagccggattcggccacttcaagcggctggtccttgtaggtctgttccttgagccatgcggcggtggcctcgcgggtttcgcgcagatgctcgacacggctcagctgttcatcggtgtgttcgaaggcggccagtgcggcggcctgggtcacggcggacaggtggtacggcatacgtacgatgcgcacgcagtcgatgatgcccttggatgcggctaggtagccgactcgcgcgccggcgaaggcaaaggccttgctcatggtgcggcttacggccaggttcgggtggtccttgatcaggctcacggcgctcggggtgccgggcttgcggaattccacgtacgcttcatcgatgacgagaatcgggtgcacgccctcacccgcgccggccacttcggcggtttcgcaggcggcgagaatacgctcgatatcctccatcggcaacggggtgccggtcgggttgttcggactggtgagcagcaccatcgagggcttgacctcggcgatggcctcaagcaccttgtcgacgttcaacgtgaagtcggcgttgcggtgggcgagcttccaaccggtgaaggtgtcgcgagcgtactccgggtacatggagtacgtcgggtcggcaccgagtgcggtgcggcccgggccgccgaaagcctggaacagctggagcatgatctcgttggagccgttcgcgccccacagctcgtccacgtccagacgggtaccggattcacgggccaggtaatcggagaatgcctgacgcaattcaatgtgctcacggtccgggtatcggttgagtgtgggggcgatttcacgcacacgcttggcgatggtgtcgcatacggccgggtccggcgcatacgggttctcgttgacgttcaggcacaccggcacgtccagctggggagcgccgtacggctcctcaccgatcaggtcgttgcgcagcggcaggttttcgggaatcgagctcatcgcagaccggctcccctctcctgctcgcgcagggtggccttgtcatacggatccttgacgaagcgggagagcacgcactcgccgtgggcgggcaggtcctcggacaccgcgaaggcgttgatgcgggcggcgagagccttgaggccttcctcgtcgtattcgatgacttcgaccggcttcatgaacgtgtgcacgccgaggcctgcggcgaagcgggcggtgccgccggtgggcagcacgtggttggaaccggacatgtagtcgcccagcggcaccggggagtacgggccgcggaagatggcaccggcgttcttgatacgcttgacgacagcatcggcatccttggtctgaatctcaaggtgttcggcggcgtaggcgttggccgcgtcgatggactggtcaagaccgtcggtcagcacgatggcagactgggtgccggacagcgacgtgtggacgcgctcggcgtgctcggtcttcggcacgcgatagttgaggttctcctgtaccttgtccgcgatgccggtggagtcggtgaacagcacggaaccggcgagctcatcatgctcggcctggccgatgaggtcggcggccaacaggctcgggttggcggtttcatcggcgatgatgccgatttcagtggggccggcgaccgcgtcgatgcccacgaatgcggagaccagtgacttggcggtggccacgaagatgttgcccgggccggtgatcttgtcaaccggatcgcacaggatgtcgccgtcctgcggctcgctgcccttggcgccgtatgcgaacatggcgatggcctgggcgccgccgaccgcgtatacctcgtcaacaccgaggatggcgcaggtggcgaggatggtcttgttcggcaggccttcctcattgtcgcgggcgggcggggtggcgatggccaacgattcgacgccggcggcctgggccggcacagcgttcatgatgacggagctcgggtagacggccttgccgccgggcacatacaggccgacgcgctgaatcggaatccagcgttcggccacgcgggcgccttcggcgaggtcggtgtagaagtccttcggcacctggttggcggccacggcgcgggcgcggcgcaccgattcctcgatggcggcgcgcacttcggagtcgagcgtggtcagggcgtccttgatcgcctcgaccggcacgcgcaggtttttcgggcgcacgtgatcgaacttctcctcgaagtcgcgcagggccgcggcaccgcgttccttgacatcgtccagaatcggacgcaccagatcggtggcttcggaagtgcccattgcagcacgcggcatcgcggcgagcagttcggcacgggacaggttctgaccacgcaggtcaatgattcgcatgatgttctcactcataacgccccatcgtaccaacgtgcggggcctaagcggcgaggaacgcccatgttcacccgtatcgtgagattatcgtgcgtgatgtggattcgtgatgcaggttattgacgcacgccaaatgcccgagcggtctcatcgataatcggcatgtcatgtacggcgacgtgactcacttcggaccatcgcggaccaatggctaattgctcaaccaaggcttgcactgcgtcgctactgccttgtgcttccagctcaaccgagccatcgcggcaattgcgcacccagccctgtacaccaagtcgacgtgcctgagtcaccgtaaaataacggaatcccacgccttgcaccagtccggtgaccgctatatgtttgcggaccaaattcgctgattgcctcatgatgctcagttcctaatccatcgttcgcagcatcgggtagaggctcaggaatcgccggtatgcgtcggcatatgtgcgtgcggtgtcaggattcggctggtatacagtgcattcgcatactgattgcagcaggtctggtacattgaataccaacgaggccattgccactgctggcagaatatcggcattggcgaacacttcgatgggatgctccaacacatcggccagaatctggcaccacgcattttctctggctccgccgccaatcagggaaatctcgctgggtttggcgtcaaaactttccataccttgacgaatggagaaggccacgccctcaagcgtggcacgcatcatgtctgccttggtggtgtctggatcgaggcctacataggccccgcgaatattcgggttcattacggggaaccgctcccccaccagatatggcaggcacatcacaccgttggagccgggtttggatgtttcgataagctgatgtgcttccgcgtaatcgccatcagcgaatacgccggtaacccatttatgcacgtcaccggcgttgaggaatggcacggcattcacgaagacttcttccacaccaaatgccagattcgcagcaccgggcttgccggtgaacggttcgggcgaaacggtggcgatccaacctgaggtgccgatattgatgttgtattgaccagggcggctgacaccgctggccagcgtggtggcacccgcatcgccaatgcccgcgtataccgcagttccggcggagaaaccggtgcgttgtgcagcggattccgtcactgtgccaatgttgtcttgcggattgtgcaggtgtggcaacatggccatgtcgattcctgcggcctcgcacaattcggcatcccattggccattacggatattcatggcaccggctgtggaacaagccgccacatcgcccacgcattcgccggtcaattgggcgatcaagtagtccttggaactgatcaatacatgacgaatgcgcgcgtacgtttccggctcgtgttcacgcagccacatcaacttgggcaacggcaagcagccttcgagccggttgccaacggtgttcaggaaacgttctactccaccctgatatgtcttggcgagttgcttggcctgttcctcggctcggccatccgaatacagaatggcattgcggacgggattgagctcgccgttcaaagcaataacatcctgcatctgaccgctgaaaatgatgccacgaatgcgagtcacattgaattctgactcggattgccgcgcctgctcaatcatgtgcctggaggccgagcagaaagcttgccaccattgatcggggctctgttcccgatagtcgccgttgataataaggttaagctcactactcgcactggctacgatacggccttgcctatcaaccaaggcacccttcaacgccgtggtccctgcatcgaatgcagccacatattcctctgccacgtgctctccccttcaatctgggttgtgattctactggttattatcgtagccgcttactcgttgcattcattaggtcgatttcacgttcattaggtcggtatgccgtaagacggctcttcaggaatggcgtaatgactgggttctgatgccgaagaccctgggcccattgacctaatgaatgcaataatgacctaatgaacgagaatcacgccatcattacgcaattctttgcccgcgaaacgcggctcattgcatcgtcttgtttctaaaataggaaattgaatgaacactacgaatagtgaggcattatggcaattcaatcgacaattatgctgaacaacggcactgtcatcccgcaggtgggcttgggcgtattccagacaccggatggtgatactacagtgaacgcggtgcagacggctctggagaatggctaccgccatatcgataccgcaatgatttaccgcaacgaagcctcagtaggtgaaggtattcgccgtgctggtgtgccgcgcagcgatttcttcttgaccaccaagctgtggaatgacgatgttcgcgcacgccacggcaaggatgcattccaagaaagcctcgaccgcttgggcgtggattatgtggatctgtatctgattcactggccggcagacggctggcagcaggcctgggatgacttgcaggagatttatgcctctggccgtgccaaggccattggcgtcagtaacttccaaaagcatcatattgatgagctgctgacccacagcgatatggtacctgccgtagaccagattgagtcttccccacaattcaccaatcaagagctcattggccagctgcgtgccaagggcatcgcaaccgaggcttggagtccgctcggcggtaccggcggcaacctgctgagcaacccagtattggccgagatcagtgccaagtacggcaagtcacctgcccaagtggtgattcgctggcacatccagcgcggtatcgtcgtgctgccgaaatccactcatgccgagcgtatcaagcagaacttcgaggtcttcgacttcaacctatcagtcgatgatatgaccgccatctccgccatcaacaccggcaagcgcaacggtgctgatcctgacaatttcaatttctagacctttatcggtccagatacgcaaagagggaactctccgtcattggagggttccctcttctatatgctttcgattcggccacaccctaggtgcgagagcctatgtcttgttggtttcggatataggggaagccccttggggcgtgtgctccgaggggcttcctgtacgtgtggtgcggcggcgtgctactctcccacaccctgtcgggtgcagtaccatcgccgtgccaggccttagcttccgggttcggaatggga

SEQ ID NO: 1554 - DNA, 18375 bp, Unknown
  R221_24m  MAG No. k141_18031
aagtcgatgtcggcgatatccatcgacaccagttcggcgacacggatgccggtggcatacagcagttcgagaatcgcggcgttgcgctgcgattcggcggtgactcgggcgttgtcgcgcttgtctgcacgggcgggtgcctcactgcggtttacggtatcggccgacttatcagctgccttgccgctgccggacgcggctgccgctcccccatcgtccttgtaatggtttgttgcaacggcatgttcagcgacatccaataattgctcggcctgggattcggtgagcaccgcgggcagcgtgctgggaatcgagggagtcatcagtgtggcggccgggtcggtggtggtcagcccatgctcataggcccacgcgaagaacccgcgcacggccacggttttgcgggccatgctgctgcgggcgtgatcgcgcgattccaccgccatccagctgcgcagatcatccagcgtgatctcgttcagatcggtcacgccgcgcagctcgaacagatgcaggcatgccgtgagatccgcgcgatacgctttgagcgtattcgctgacaggccgcggttggacttcagataggagacgaaggagtcgatatcgccgtcgaactgcgtagatgacactctcgttctcctccgaattctttatggccttgggttacggccggggtggcgtgttgcgccgctccggcacgggtttcaatgtggcaatctgttcctgatggatggtcacgttctgggccgggcgcgaaccattggcggcggcgtcacgcaccatctccaacgtgtatccatcccaggaaaccacatgccccacatagtcgcggaacttcatacggtggtcgaccgggtcaatgccgtcggtgatgcgcaccaccacgcgggcaccggccggaatctgccttggtaacgtcatacgtcatcatccccttaaccatccgccgcatcaacttctatgcgtttcccgaaaaacggtacagactaccttactcctttgggtctttcgaacagcggagccacacggtcttctcacgaaaacaagcgggaacttcatccccctcgcgcagccttcttcgtgacgggcggcgaggggaacctgcacacgggctgcatggcggggcgcagttacatggcggggcgcagttggacgatggcctgacgcggatggatgaaaccggtgatggcttctccccggcgtgcggagaacagcaaggtctgctgccagccggcttcggggacggcgagctcgcgttccgggaatccggcggcagttgtgccggcttgctgcgcggtggccgtaccagcttgtgcagcggtgatgccggctcgcgtcacggcggccttgtaccggcggaaggggtcgccttcggcgaagaatcccatcacatcctgctcgccgtcggcaccagcgtgcagttggtcggccatatcggtcagacgtgccgccatgcggcgcagcagcacttcgacgttcagcgagtcttcctcgaccatcgcgcgcgtgcggtccgggtcggtcagggacacgcgggtcatgtccctccagcagccggcagccagcgcggcggcgatgttgcggtccgggttggcgaccagttcgttgatcagcgcggtggacaccacatgcggcatgtgggagatcatcgccgcggccttgtcatgcgtctcgtcgtccacgacgatgacgcggttgccgacgtccttggtgatcatcgcggcgacgtcgaggaagcggcggtagtccgtggactcgtccacggtgatggcccatagggcaccgtcgtacagatgcgggtcggcggcctgccagccggacagttcgttgccggccatcggatgggcgccgacgtagcacttccccagcgcggcagccttgacctgatcgcggaccatgcccttgactgagcccacgtcggtgagcgtggtgttcggatggtcacccataagcggggctagggcggcgaggattgagggcatcgccttgagcggattgcacagcacgaccacatccggctcggcatccatgagttcggagagcgtgctcttgcagaaaatgccatcggcttcggcctgggcgtaggggtgcgagcgatggttccacgcgatgacgcgtacgccgcgctcggtcaggcggcgtgcgagcgagccgccaatcaatccgagtccgacgattccgactgtgtctaccacagcagttccttccttgctccctcggcgtactgccagccttccgacgcgcgattggtgatgtggacgccgccctcgggcagcatccaggcgtcgaccggcgggttcgggcgttcgcggcgtgggtagacggccaaggtttttgcccagtcgccgtgtccggcgatctcttccagtgcggtgcggaatcttggctcccaaggggcggcgtcaagggtggcgatgaagctgtaggttccgtcgtggcctttgatcgggcgcgagatgaagctggtcatgttcagccccgcatcacgcaggacgtccagcaggtcggcgagcacgccggggccggtgaccagcgggatgaaggtgatgatggtttcgaagtcgccggcgtcattgcggtgggcgcgggcgttgaattcctggaccacatcacgcggggcgatgacaaggaattcggtgtgcgcgccatcgaaatcctgcacatgttcggcgagggtgtcgagatcgtagagttcgccgcagatgctggggccgagcgccacgcggccgggcttcaggtcgcggcaggcggcggcgttggaggatgcgggttcgggctgcaaatggtgttcggcgatgaaccgggtgcattgggccaggccgtgcgggtgggcgctgacggggttgccggtgcagtcgcagatgctgtggccgcgcacggtgaaggcgttgaaggccacgtccacactgatccgggcgaagccggccgcgtcgggggcgtcgatcagcgcgtcgagattcgggaccacatagccttcgacgttgttttcccatgcgatgacgccccagccttggcgcgactgtacggcctgcatgatcgcgggcacgtcgggcagggcggtgaggtcgaagtcgccgagtgtggcgaactggtcggcggccgtcattgccgcctgatgggtgaaggtgccttccgggcccaagtaaaacagtttcatgcgtgccataaggttctatggtagcggccgtaatcccctacgcccgccgatacgcgacgcattcgcggaaatgtgccgccatatatagttacgcgcgcgattcagaatgagtgggaataacgaaccagcgggcgggaagaatgagcaggacgacttggaccagtatcaggccgtacagccagatgtagccggcatgctgggagaagaacggcatgtcgccttggaatccggcgacgatgaccgccttgccggatgtggtggtcagtgccatgccccatgcggtcagcgaggaggcgatgaggtgcagggccagtccgaccgcgcccatgcgcgaacgggcgcaccatgtcgataggccgatcagcagaaatgccagcaccagaccatacggaatactcagttctgcacccatacggtgggcgaacgtgcccacaaaggcggaagccacgcccgccgcaatcgtgatcaacgatttgaccagcgcgttctggcgatacgaccacggacgcagttcagtagtgctcttcacagtcatgcgtttcagtataggtggggatatgacttggcgaggaataaacttggctcccctcagagaggggagccagagagaatggtcggctacagtcgcaccagatcacttaccctgctgggcggcgttctggcggcgctgcttggcgcgccacttgtaccagtcctcacggccgaggatgatcttgcgcacgcggatggactccggggtgacttccacgcactcgtcctcgttggcgaagtccagggactcctcaaggctcatcttgatcggcggggtcagggtttcgagcacgtcagcggtggaggaacgcatgttggtcatgtgcttggccagcgtgatgttcacatccagctcgtcgggcttgttgttcacgcccacgacctgaccctcgtacaccggggactgcggttcgacgaagaagttgccacgggcctgcagacgctgcatggcatacggagtggccacaccctgacgatcggaaaccatggaaccgttctgacgaatggtgatggcaccagcccacggagcatagccagcggagatggaggaggaaatgccggtgccgcgagtggcggacagcagagccgtgcggaagccgatcagaccacgggacggcacggtgaactgcaggcggacccaaccggagccgtggttggtcatgccgtccatacggcccttacggtcggccatgagctgggtgacagtacccatgtactcttccggcacgtcgatggtggtattttccatcggctcgttgaccacaccgtcgatcttcttggtgaccacctgcgggcggccgacggtcagctcgtagccttcgcggcgcatctgctcggcgagcacggccagcgccagctcgccacggccctggacctcccaggcgtcggggcggtcggtgggcaacaccttgatggagacgttgccgatgagctcgcggtccagacggtccttgatcatgcgggcggtgagcttgtggtccttgccctcggtgccggccagcggggagtcgttggtgccgaaggtcatggagatggccggatcgtccacgtggatgagcggcagcggcttcgggtcgttggggtcgacgatggtctcgccgatcatgatgtcgttgacgccggcgacggccacgatgtcgccggggcccgcggactcgaccggggtgcgctcgaggccctgcgtgcgcagcagttcggagacgcggaagttctcgagggagccgtccacacgggacaggccgtaggtcttgcccttctcaagggtgccgttgtagatacggaccagaccgagtcggccgaggaagtcggaggagtcgatgttggccacgtgagcctgcagcggggcgccttcctcgtattcgggggccgggatggtggagatgatggcctcgaacagcggctcgaggttgtcgttgtccggcaggccaccgtcggcgggctggttcacggaggcgtagccggccttggcggcgcagtagatgaccggcatctccagcagctggtcgaggttcaggtcgatgccctcgtgctgcacgtcgtcggccaggccgagcagcaggtcggaggtttcgccgacgacctcttcgatacgggcgtcggggcggtcgaccttgttcacgcacaggatgaccggcagcttggcctccagggccttgcgcagcacgaatcgggtctgcggcagcgggccttcggaggcgtccacgagcagcacgacgccgtcgaccatggagataccgcgctcgacctcgccaccgaaatcggcgtggccgggggtgtcgatgatgttgagggtgatgccctccgggtggccgtacttggcggccagcggaccggtgtattccacggccgtgttcttggcgaggatggtgatgcccttctcgcgttccagatcgttggaatccatcacacgatccggcacttcctcacgctcggaaaacacgtgcgactgctgaagcatggcattgaccagggtggtcttgccgtgatcgacgtgagccacaatcgccacattacggatatctccacgaaccgccatcgaaacctctcttaatactgattttcttgcgtaatcgttcggtacttgcgttctcgagtacttgctcttggatatcaacctgtacctacacacaaaccgtcacgatgttactggcacaccttgacacacaacgggcccggctttctgagaattagtcacatgtcatctggcttgcgagactttttgtattccacactctcgactcccctccctgaggggagctgtcgccgtgggcaactgaggggcgccaagtgtatcccctgaatctcccctgaatcatccctgagtacagcaccgtcatgggtagttactgagtaacctgatatccaacgatagttactcagtaaccttcgcccaagacaaaccgtctatgcaaaggggatgcggtatggcaatcagagaagcgctattagcactgttggagcgaggcccggccagcgcctatcagcttaagaaggacttcgaccgcaccatcggtctgacttggccgctcaatatggggcaagtttccactacgctgcagcggttgaaccgcgacgggcttattgaagagaccgcgccgactactagcggatccaatgatgtcggcaccgcagcggccgcaccattatggcgattgaccaattccggcgcccaagagcttgaccgatggtggcgctcccctattaccccggaacaacgcggacgcgacgaactggtgatgaagctggccgtcgccgtggaaatacccggcctcgatgtttccgaactcatccaacaccaacgccacgctttgcagcaactgctgcacgacatcacccgactgcgccggcaaacaccgcccaccgaactcgccacacgtctagtactcgaccaccacattttcatcactgaagcggaattgcgctggctcgataccgtggatgagacccagctgcgagcacaactggcgcagcaccccgtttccgcacctctcacggcaagctcagccgcactcaccgccaccattcaatagtgcataggagcacatcatgacttctcccgttctttcttctctcccgcaatcttccccatgcgcgctggagttacacgacgtcactcgcgttcacggcaaagatgcacgtcgtgtcaccgcgctcagtcacgccaatctcacgcttcgcccgggtgaattcgtggccatcatgggccccagtggttccggcaaatccactttgctcaatcttgcgggcgggctcgatgtgcccacgcaggggcacgtgctggtcgaaggccgcgatctggccacactgtcagtggccgaacgcgcggccatccgccgcaaatcgataggttacgtgtttcaggatttcaatctgctgccttccctgagcgcagccgagaacgtgtcgttccccttggaattggatggctggaatccccgcaaggcacgtgaggccgcgatgcaatccctcaatgaagtgggagtagccgatatggctgatcgccgacctgaagacatgtccggcggccaggcgcaacgtgtggcgattgcccgcgcactggtcggcccacgccgtctactactggccgacgagccgaccggagctctggattccaatgccggcatgacgattctcgaagtgttgcgcacccgcgcagatcgcggcgcggccgtactgctggtcactcatgagcctcgcttcgccgcctgggccgaccgcacggtgtttttgaaggacggccgtatcatcgatgaaaccggctccagcaatatggatgatttgctcaaccttgaggaaaggggagcatgatggcacgcgcagccctcaataatcttgccaatgccaccgtcggtcgctctgcccaaattccccatgccgctaggccaagccttggcgcacgttgcaaccggtatcgggccgcgctgcgactcggctggcgcgacgcactacggcacaaggcccgcaccctactgtccttgctgctggtaatgctgccaatcgccgcaatggtggcctccatcggtatgaccaccaccataccgcccaccagatcgcgtgcgctggcgacaatcccggctgatacgcaggcgatcatcaccgccaccgccaggccccgcaccggccaaccgttccggcagtcacccgaaagcggcggcacgtggcaggacgatccctcccagcagccggcctcggccgccgagcttgcgaagattctgccgcaacaggatcggctgctcccgtattggcagtcgcccgaactcatcgccatcaccggcaccgcgttgcaacccggcgaacagaccaaggctgggatcgacgtgaaaagcgggaacgacattgatctgaacgcggcctccaccgcgaccatgaccgaggcttcacctgaggcattgcaacgaatgttgccgaagctggtcaagggttcggcgccgcagaataatacgcagattgtcatcagccgcacattggcggataatctcggcgcttctctcggtagcacggtgacgttcgtcgctccgccgttcgatggctggatgagcctggacgggcgcatcggcgaggcggtggccgacactcagcgtgcttggacagtcagcgggctgaccgatgaatccgaagccgcggcatggggcttggaaggctggatgtcagccatattggaatctgatggcgtcggcgtggatggccattatttggtggtcggtccagagccggtcacgtgggcgcacacccgcagcatgaacctgttgcaggccatcgtcatttcccgccatgtgctgactgacggctatccgcccgcatcgcagctctacccgatgcagatcgatgcggctaccatgttgaaccacatggtcactgtggtcatcaccatgctggtgggtatgttgctggtactgtttctggtcacgcccgcgtttacggtgtcggcagatcagtcacgtcgtgtgcttgggctcgcggccgcatccggtgctgcaccacgtgacctcagtcgaatcatttcctcgcaaggtctcgttatcggcgccatcggtggcgtgctgggctcggcattgggattcgcgcttaccttggcggccggccctgcgataggcgcattgcgtggatccacgccgctggagatcctgcacggattctcgtggggctcgctgccgatgggtattgtcacggcaatcatcattggatttgccgcgacgattgcgccggctcggcatgtggcgcgtatgcatccagtcgatgcgttgaaggatcgcccgacaagagaggaaatcggctacggtgaatccgcgaatggcgtggatacgaagcttcgccgtaatcctttgagactgctccgtgttgcggttggtccgattctggtcttggccgccatcgtatgcgccgcgctcagtctgacattgccattacccacgctggccgatcacaatccgggcgcggttccggccggaaccgaaacgcatatggctctgcttgttgccacgattttgttggctgtcatagggcttgcgttgtcgattcgcacttttgcacggtggtgcggcaaagcgggttcccaactgaacatcggcgcacgcctggcactcagggatgcagccgagcatcatcgacggttcgttccggcggcatgcgcggtgctgattaccatgtgcatcgcctcgtacacactggtaatcaccggctccatggtggcggaccagcgaaattccacgatgacgatgacgtatggaccgtcggggatggccattggggccgacgtgcatgtcagcaatgagttcgaccgtgctgtggtgtcggatgcgatacaccggcttggcaaagagacgccgatacgcgctcattacccggtgtacaccgaggatgtcaagcgatggtcaaagctcaatgatacgaccgaagtcgattccgacaagttgaacgccgaacacggctacatgtatgccgctgcattgctcccggccggtcacacttgtgataacccaacgatccaagagcaaccggacacgtccacatgggtgggccaggatgccgcttcggccctgtatccaaacgttccgatacgttgtgtgccgatagaccgatcccatcagccaacgtattcgaatatactgccgagtttccgcggcgtgaatctcattatggatggcaatgcgatgcgtttgtccggcttcccgaacgcggatgaggcggcacaggtgcttgatgcgggcggtgtggtggtcggcgatgccggcacaatcgacgcgggaggtatggtgcgtgtggccatttcgccgaatccggcaattgcaaacgaatctcaggccacacatatcgagaagcgcaaggccatctacgtgcgcggcgcgtacccgctggtgatgagcccggcaacagcacaggcgctcggcatcaaacaattgcagtatctgggtgagtatctagacttcgccggtggcaactcccccgttaccgtaaagaaggcctcagcttatgcaatcgaaaatctgccgctggcatccacgagcactgacgggaatcgcctgccgtggggtgacaatatggcattggtgcccattggcctgttggcattgctggcactgatggccacgctcgtttcactgctgctggcccgcacgcaggcccagcgcgacatggccacgatggtcgccgtgggcgcgccaccccgattcctcagacgttacggcctgacgcaggctgcggtgattctgctggccggcgcgccagtgggcgtggtatccggcgtggcgttgggatggctgcatgtggcatggaaccgcaggatcggtgtggacggtcattggctggaaaccgtgccgatctggggattgcaggcggcgctggcattcggcgtagtggtaaccggactgctggtggcgtggctggtcacaaaaccaccgcgcaatctcacccgtcgttccctcgattgatcagtgacatacggcaacccttgccgtgtcattcgggagctataagacaaaaagtggcccacacattggtgtgggccactttagtagcgaaggctgaagtgtaatcagtcttcgagattgaggcctttgcgctcgggcaagcagagggctgctatgcaggcgaggatgaaggcggcggcgaagatgatgaaggccacggccttgttgccgccggacagggtcaggaaccacggcatgaggagcggcgcgatgatggcggcgatgcggcccaccgcggcggcggcaccggcggccgcgccacgcaggcgggtcgggtagatttccggggtcacggcgtacaacacgccccacgcaccgaggttggaggcggacagcagcatgccgaacacgagcacgagggccgctgatccggcctgcgaaaacgcgaaggcggccacggcggagacggccaggaagatgctcagcgtcttgcggcggccccagacctccacgagccatgcggccaggaagtaaccgggcagctgggcgatggagatggcgagcgtgtagccgaatgacttggtcagggagccgaactggtcggcgagcagcgacggcatccatgtgaacgcgccgtagtaggagaagttcacgaagaaccacgtggcccagatggcgatggtgcgggccaggtacttggagccgaacagctcgcgcgtcttgatcttcggcagcggcttgcccttgggagaggttaccggggccactcccccggcttcctcgaagtagcgcacggccttttcggcttcgtcttcgcgacccttggcttcgaggaatcgcacggattctgggatgtgcacacgggtgacaatcgcgtagagcagtggcagcgcgccgatggccagcgcccagcgccagccccagtcaccggtgttcgggatcacgaagtagccgattatggcggcgatgatccagccgacggcccagaacgattccagcagcacggtcatgcggccgcgctgtttggtcggcgaaaactcggagaccagcgtggaggcgaccggtagttccgcgcccaagcccagtccgatgatcagtcgggcgccgagcagcatgccgagcgaccaggacagcgccatggcgccgttggcgatgccgaagatgatcagcgtggcggtgaacacggttttgcggcccacgcggtcggcgatgaagccgcccaccgccgcgccgatggccatgccgacgaagccgatggacagcacccacgacttttcggtcggggtgaggttgaagtgcgggtcggctgcgatggcggcgaccacgaaggaaacgaggccgacgtccatggcgtcgaatgcccagccgatgccggaggcgacgaggagtttacggtgcgccttgttgaagggcagccggtcgaggcgctcgttgcgggtgagctgcgcgggttgcgctggagtggtggtgctcacgtcgtttcctttctggtaagtggcgtcagatttagtgtcgggtcaggtcggtgtaggactcttcgatggccaagctgatgcgttcgacttgttcgcgggtcagcggcttgcggaaggtcatgcgtaatgccgatttggcgatggacggttcgaggcccatcgccagcaacgtggcaggaatctcgtggcgcccgatggcgcaggccgagccggatgaggcagcgatgccacgcgcgtccaggtcgacgagcagcgcttccccggtgacgccggggaagatgaaggaggcgtgaccgggcagacggcgcacggggtcgccggtcaggtcgacgcggggcacgacccggcgaaccgcatcgatgagcatgtctcgggacgcgaccaactcacggcactgcgcctgcatgcgcgcattcgattcgttgagtccgatggcaagcgccacggcgccggccacgttctgtgtgccggagcgcaggccgcgttcctgccctccgccggacagcaccggttcgatgggtgtgcggccgcgtaccagcagtgcgcccagtcctttgggcgtgccgaatttgtgtccggatacggacagggcgtccacatcccagtcacgaaaacgaatcggaatctggccggcggcctgtacggcgtccacatggatgggcacgccgtgcgcgtgggcgatgcggaccagttcctccacgggttccacggtgccgacctcgttgttggccagcatggtggagaccagcgtggtacgttcgccggcctcgccgtcaagctcgcgttcgagcgcgtcgagatcgagatgtgcttgcgcatccacgggaatgcgcacgacttcgaaaccgaaccattcgtgcagccatgccgccgattgggccacggccgggtgctcgatagcggaaatgataatgcgcgggcggctgcttgccagctgttcgccatcggtttcgtcgagtccgtagaccggccgcaagcccagcttgcgcatgcgcgccatggcgatgcctttgatggccagattgtccgattcggtgccgcctgaggtgaagatcacgtcatccggccgggcgcccaacgccgcggcgaatgatgcgcgggccgcgtccagcgcgcgggccgcggttttaccgggctggtgcacactggccggattggcgtaggcctcagtcaggaacggggtcatggcctcgatgactgccgggctcactggttcggtggcggcggcgtccaggtacagttcaccgggttcaccggatgcgttgggggtatcggccatgactagttccaatccaatccaaggtcgatgctgcgcaccgagtgggtgagcgcgcccacggagatcacgtccacgccggtggcggccacggctggcactcgctccaggctcatgttgccactggcttccacgatggccttgccgtcgatgagctccacgccgcgacgggtgtcgtcgagcgagaaattgtccagcatgatggtgtccgctccgccggcgagcacggcgggaatctggtcaaggcggtcgacttccacttcgatatgcgtggtgtggcccacctgttcgcgcacgtggcggatcgcgccggccaggtcgatgccgcgcgcggcgagcgccgccagatggttgtccttcatcatgaccgcgtcggacagtccgtagcgatggttgtggccaccgccacagaccacggcgtatttctcgaacgggcgcaggccgggcgtggttttgcgcgtatcgacgatgcgggtgcgctcatagcggcgtggccgggtgacgggtccgtcatagtcgtcgccgtagatggcgttcaccgcgtccacgaaggcggcggtcatggtggcgatgccgctcatgcgctgggtgaagttgagggcgatgcgctcggcggtgagcaggtcgcgtaccggaccttccacggtggcgagtacctggccacgctggaatcgttcgccgtccttgatggcggcggtgacggtgacggccgggttctgcgcggcgaaggctgcggcgaacacgtcgatgccgctcatcacgccgttttcgcgcgcggtgaggtgggccgaaccggtttcgtccgcggggatggtggtctcgcaggtgatgtcgccgtagggcgcgtcttcggcgagcgccgcttcgacggcggtgcggatgatgtgtgatgtgagcatgggtcagtccttgatgtaggcgacggagtgggcccagttgtcgactggctcgctgtagtcggtgcggacgtgggcgcctctcgactcggtgcgggcgagcgcggcggtggcggccacatagcctacggtgagcatgttgcggttctccaaagcctcaacgctacttgcagcgccatcggcgtttacatcagcctgggcgtttgcggcggcgaggccttggccgagttcggcgatggcggttttcagtccggcctcgtcgcgcagcacgccgacgccatgccacatggtgttctggatgcgggtacggtcccagaccttgtcggcggcggtatcgtcagcagcagccgtagtggcaggagcggccagcgcgatcggcgcatggtcgaacacggcaccggtggcggagttcaggaacggttcgggtgcccagaccgcgtcgtcaccgtccgcgacggcggcaagaccggcgcggcgtccgtagacaagtccttcgagcagcgagttggaggcaaggcggttggagcccatgacaccggtacgagcgcattcgccggccgcgtacaggccgggaatggaggtccgggcgtccagatcggtgcgaatgcctcccatgtagtagtgcgcggcgggcgccaccgggatcggctccttgctccagtcgaagccaagcgaacgcgtataggcatcgatggtcgggaatcggtgggccaggaagctggccaggtcggggttctcgcgggtcatcggcgagacgtcgagcatcacgggcttgccaccttgcgcctgcatcacgcggaagttctcgcgggccacgacgtcgcgcggtgcgagttcggcgcgcggatcgatgtccttcatataccggtggccgtgttcgtccagcagcaccgcgccttcgccgcgcacggcttcggagacgaggaagtgctcgcccacggccatggcggtgggatggaactggtagaactccagatcggcgacctgggcgcccgcacgccatgcggcggcgaggccgtccgcggtggcgaccggcggattggtggtgtacgggtacatacgacccgcgccaccggtggccaagatcacccggccggcggccaaatccttgtcctgcccgtcgatcagcaggcggacgccggcgatgtggccgtcccgcacgatgagatctttgaggaaggcgttctcgatgatgtggatgcgcgggttcttgcacaccatggcggagacgtccagttcaagcactttgccggtggcatctcccccggcatgcaccacgcgggcgcgcgaatgagccgcttccaggccgcgcagcatgcgtccctgcgcgtcgcggtcgaagtggacgccggccgcggcgaactcgcggacgcgctccgcaccctcacgggtgaggatgtccacggccttcgggtcgcacaggccgtggcccgcggccatggtgtcggcggcgtgcagcttcgggtcgtcgtcggagaagatggccgcggcgatgccgccctgcgcatgataggtgttcgattccaccagttcggccttggttaccaaggtcacgtcgtgtccggtgccggccacggccagtgccgcggacagtccggcgacgcctgcgcccacgacgacgatttcagtgttgctcattgtgttgctttcctctgtttttgcgtcatctgccccccctcagtcacctacggtgacagctcccctcagggaggggagctagaagcatgtcacgggtgaacgcgcagcatgcgctccagtgccaccttggcttcgcgggcggtgtcttcgtccacggtgatgcgattgaccacgttgccggcttcgaggttctccaaagcccaagccaggtaagccgggtggatgcggtacatcgtggagcaggggcagaccacagggtccaggcagaacacggtcttgtccgggtactgcgcggccagacggttcaccaggttgatttcggtgcccacggcgatggcggatccagcgggtgcgttggcgatctccttgacgatgtacgcggtggagccagtgccgtcggcggcgtcgaccacctgcatcgagcactcggggtgcacgatcaccttgacgcccgggtatgccttgcgggcgcgttcgacctgttcgacggtgaaacgctggtgcacggagcagaagcccttccacagaatcatcttggcgcgggcgtaatcggccggatcggcggcgccgccctgtgccttgaacggatcccacagcggcatctcgttcagcggaatgcccatcgcgcgggcggtattgcggcccagatgctggtccgggaagaacagcacgcgcttgccgcgggcgaacgcccattccagcacggcgtgcgcattggacgaggtgcatacgatgccgccgttgcgcccgcagaacgccttcagcgcggcggatgagttcatgtaggtgaccgggatgatctgctgcaagccatcggcgtccggctgggtgccgcagatctcgccgagctggtcccagcattcctggacctggtcgatgttggccatatcggccatcgagcagccggcggacaggttgggcagggtcacgctctgttcgggcgtggagaggatgtcggcggtttcggccatgaagtgcacgccgcagaacacgatgtggtcggcgtccgggcgttcggtggcgttcttggccagctggaaggagtcgcccacgaaatcggcgtgcttgatgatctcgtcacgctggtagaagtggcccagaatcaacagtttggagccgagacgctgcttggcgtcggtgatgcgctgctgcagctcctcgtcggaggccttgcggtattcgtccggcagcacctgctggcgcggcgcgttggcgggcagacggtcgagcatcgaggcacctggaccgtagctgggtgtggtggtgtcgaagtgccatgggtcctgggtcagtcctgcatcgcaggtgctttgcgcgcccagcttggcgatgatctcgtcaacggacggcgcagtggatagtgcggtcatagcggttcctttcctatatacgtctgtgatgccggcccgaagcgggtcggcgggaaaaatcagatgcgcgcggatggaatcagcgcgtcgagagcgtcttcacgctcgccttgtctggacagttccacgatgtcgtcgccatcggattcgtggggcgtaccgttctcgacaagtcgtttggggatgtagcggtagacggtggccggtcgttggcggccttcgcgcaccttctccccggtgtcttcaagatctcccgaggcaagcattttgcggcggaagttcgccaagtcgagggtttcgccgccaatcgcctcatagacgccgtgcagttggcgcagggtgaacgtggggccgagtagtcgggtggccacgtcggagtattcgattttggagcgcaggcggagcagcgcgtagtcgatgatctggcgatggtcgaacgccagctcgggcagttcgtcttcggggaaccatcgtacgttgtcaccatcctcgaagcccgcggcctcggtctggccgacgagcgcccagtacacgacggataccatgggcaatccgccatgagaccgggtcgggcctccaaaggtgtacagctgttcgaggtatcgcgggtgcaggtctgtggtcgattcgagggccgcgtaggcggactgttccaacgaccggtcggagcgcaggtcgccgccgggcaacgcccagcagcccaggaacggctgacggacgcgcttgaccaggggcagccagagacgggaatgggccgagttcgcggcgttgccggaatcggcggcactgtcgccggtatcgcctttcgggccgagtgccagaatcaccactgacacgccgacctgtggcggtgcgctgcggcgctcggacacattgccgaatcccatgccatgcctctttccataccggttgttctccccgcattgagagcatagcactacttatagtcacaatgaccataaatcacatattggatggtctagcgcacgaatattggtcaggtagcgggccccaatcgctacgaaatcacctccgtgtcttccgatttcgactgtgtcatttcggcgacggacgggaggaacggcgctagggagggtagttcgtcgagactcttcaggcccatttgg

SEQ ID NO: 1555 - DNA, 40583 bp, Unknown
  R221_24m  MAG No. k141_19072
ccagcgtcggcggccaaggcacgtcgaacggtgattacggcaacgcctatgccgccggcccgtgcacgtattgggcgtatgaacgccgtaagcagatgggcattggcacgccgtcctatctcggcaatggcggcgactggtggcgcaacgccccctcgtacggcttgcgcgtggaccacaaccctcaggtcggtgcggcgctctccttcctgcctggtcaggatggtgccgacggtacctatggccatgttgccgtagtcgaagccgtgtatggcgacggcacattccagatctccgaaatgaactggggtggtccgtggaacatgcacgaccgcaccttgaccaatttgggtcagtactggttcgtccactgaccggttggttcggccgatatatgcggttgaagggttcctcttgaagaggaacccttttcgtattcgaggccggtccgtgatatcgtcggatgttgcgttgctacccacgagttgctacccacgagttgctactcacgagttattgcccacgaaaggaggagacatgcccaaggaaaccggtgagaaactcatcgtccagaacaagaaggcccggcatgactatgccatcgaagacaagtacgaggcagggctggccctgaccggcaccgaggtcaagtcgttgcgcgaaggccgcgcatcgctgtccgaggcgttcatctccatcgaccgccgtggcgagatgtggctggagggcgcgaacatccccgaatacctgaacggcacatggaacaaccatgcgcccaagcgcaagcgcaagctgctgctgcaccgactgcagatcaccaagctcgcccgcggcatcgaggccaagggatacacgattgtgccgctgagcctgtacttcaaggacggtcgcgtcaaggcggagatcgcactggcccgaggcaagaaggaattcgacaagcgccaggccctgcgcgaagagcaggacaagcgcgaagccctacgcgccatgcgctacgccaacatgcgccactagtcccgtcccttggctcccctccggaggggagccaagggtaggatgtccgcgttgtgggtcatttcgcccacgattaacgcttccgtagcattgcactcctacgctctggaaccatctgggaaacatacccgcccagctgactatccggagagaggaaatccaatgtctctaagcaagggaatacaatccgctgcggccgccgccctgagcgcggccatgctgatcgccgtggcggcctgtggcacgactgacggcaccgacaccgcatccaagagcggcgattcatccaaggactcgtccagcacttcgattcaaggcttcgacaccagcagcatccagaaggacgacgagattgccgcactgctgcccgattccgtggccggcgacggcacgctgaccgtcggcgccgatacttcctatgccccggccgagttcctggccgaggacggcaagaccccggtcggctttgatgtcgacctgtccaaggcgctggccgcagtgttcggactgaaggaaaacaccgtctcctccacgttcgattcgattatcccgtccgtcggctccaagtacgacatcggcatctcctccttcaccgtgaccaaggaacgcatggaggctgtggacttcgtgacctacttcaaggccggttccacgttcgtggtgcagaagggcaacccgaacaaggtcgactcctcgaacctgtgcggcgtgaaggtggctgtgcagaccggtaccacccaggaagaggaagtcaacaaggataacgagcagtgcaaggcggacggtaaggatgccatcgacatccagtcctccaagctgcagaccgatgtgactaccgccgtggcttccggtaaggctgatatcttctacgccgatacgccggttgccggctacgccatcaagcagaccggtgatacgctcgaggccctcggcgaggacgttggtgtgacccctgaggccgtggccgtcaagaagggcgattccaagaccgccgaggccgtacagaaggccatccagaagctgatggatgatggcacgtacaagaagatcctcgacacgtggggcgtctcttccggcgccgtcgacaaggccgagatcaacccgtccgtcgagtagtttcggttactatgaggactcccgttgccctgcggcgggagtctttttgtatatgtatgcactgtagtgtataaatatgcttaaccgttgatcgttgccgttgaagcggcgtaagagagaagaagaaacgattatgcagtccaccaaactgaagtccattatggccattgcactgagctcggccatgctgttcgccaccgccgcttgcggcacctccgacaaggccgatgccggtacggattccgccaagggctccgatgtcgccaccatcaccagctacgatgtcagctccgtggagaaggatgacaccatcgccgcactgctgcctgaatccgtgaccaaggacggcaagctcaccatcggcaccaacccctcctacgccccggccgaattcctcgacgccgacggcaagacccagatcggctacgacatggatctcgcccgcgccatgggcaacatcttcggtctcgagaccgaaatcgtctcctccaacttcgatacgatcattccggccatcggctccaagtacgatctgggcatcgccgccttcaccatcaccaaggagcgcatggaatccgtagacttcgtctcctacttcaccgcaggcatgggctatgcagtggccacaggcaaccccaagaacgtcgatgagaacgacctgtgcggtctgaacgttgccgtcgagaccggcaccgtcgaggaagaggccatcaacaagaccgccaagcagtgcaaggcggacggcaagaaagacatcaccatccagtcctccaagcagcagaccgacgccaccaccgctgtggtgaccggcaaggccgacgtcttcttcgccgattccccggttgtcggctacgccatcgcccagaccgatggtcagctggaacagctcggcaaggacttcgatgaagtgccgaacgccatcgccatcaagaagggcgattcccagaccaccgaagccgtgcagaaggccatgcaaaagctcatggacgacggcacctacactaagattctccagcactggggcgtcgaatccggtgcactggacaaggccgaaatcaacccggccgtcgaatagtcgacaagctgtcgcgaaaattcgaatggggcgcactgtttgtaacacagtcgccccattcgtgcactaaggttcaacgctagttgcaacttgcagttcaggctgcctaacacatccaaggaaccagattatggcgaagaaagaagtcgacggtgaggggctgaacatccccaaccgcatcaaggcgttgccggtcaagcgccccggcccgattgtggccgcagtgatcgtggtactgctcgccgcgatgctcattcaaggcttgattaccaatccgcgactggattggcccaccgtctggaagtacctgttcaacgagaacgtgcttgaaggcattcgctataccttggagcttaccgtgatctccatggtcgtggcgatcatcctgtcggtgattcttgccatcatgcgcaaatccatcaatccggtgctgcgcggcgtcagctggttcttcatctggttcttccgcggcacgcctgtgtacacgcagctcattttctggggtctgttcgccgtgctgattcctaagatcagcctcggcattccgttcacctcggtggagttctggagcatcgactccaacgtggtggtcaccgcattcaacgccgcatggattggtctggccctgaacgaggccgcctacctgtccgaaatcgtgcgtgccggccttgaagccgtggaccccggccagaccgaggcggccaaggcattgggcatgaaccgcacgctcatcatgcgccgcatcgtgctgccgcaggccatgcgcatcatcatcccgcccaccggcaacgagaccatcggcatgctgaagaccacctcgctggtcaccgccgtgccgttcaccctcgagttgcagtttgccaccaacgccatcgccaaccgtatctacaagccgattccgctgcttctcgtggcctgcttctggtacctgctgatcacctccattctgatggttgtgcagtcccgcctcgaggcgcacttcggcaagggcttcgatgcccgaccggtgggcaccaagggcaagcagacgccattgccgggtaagaccgacggtgaaccgaaggatgacgtggacaagctcaaccagaccacatttgtcggattgaatgcataaggcgggagcgcgattatgactacgaatgacatcagcaactccgctccggtcgtgcgcaaggcggctgacggttccgtgattcctgccgtcgaggccgtgcaggtgcacaaggcgtttgggccgctgcatgtgctcaagggcatcgatctaaccgttatgcccggtactgtgaccgtgattctggggccctccggttccggcaagtccacgttcctgcgtctgatcaaccagctggaaaccctgaccggcggttccatcgaggtgtacggcgaactcatcggctacaagcacgtgaccaaaaacggccaggacatgctgcagaccttggacgataaggagatcgccgcacagcgctctcgcctcggcatggtgttccagcgcttcaacctgttcccacacatgaccgcgctggagaacgtgatggaagccccgatccacgtgcagcaccagtccaagaaagccgcctgtgacctggccgtggccgagcttcagcgcgtcggtctgggcgatcgcatggactattacccctcccagctgtcgggtggtcagcagcagcgcgtggccattgcccgtgctctggccatgaagccggagatcatgctcttcgatgagccgacctccgcccttgaccccgaactggtgggcgaagtgctcaacgtcatgcgttccttggccaaggaaggcatgaccatggtgtgcgtgacccacgaaatcggcttcgcccgcgaagtcgccgaccagatcgtgttcatggacggcggcgtagtcgtagaaaagggcggccccgacatcatcgaccaccccaccgagcctaggtttaaggacttcctacagcatgtgctgtaggaaggctgttatattacctcagcactgtcgtgcttcggcgtcgcctacggggagcccactgggctccccgctttacggctccgcctacagcatgtgctgtaggaaggctgttatattacctcagcactgtcgtgcttcggcgtcgcctacggggagcccactgggctccccgctttacggctccgcctacagcacgtgctgtaggaaggctcgttgttgcagctccaaaagcgtacgctgatgaactcagcgtacgcttttcacgaaggggcatgttccaatcctgcaaaggcggcgggttggattcgctttgcgcaataatcgtccgctaggctggtgagccatgtgtggaatcgttggatacgcgggaaatattgaaacggcatgcggcaagcctttggaggtctgcctgcaaggcctggaacgtctggaataccgaggctatgactcggccggtgtggcgctgaccgcgcccggcatggataaggtggtcgtgcgcaagaaggccggccgtttgaagaacctggtcgaagacatcgagcgcaagccgatgccgctcgccacggtgggcatcggccacacgcgctgggccaccaatggcgagccgagtgacgtgaatgcccacccgcacaccagcatggacggcaaggtggccatcatccataacggcatcatcgaaaacgcctctcagctgcgtttcgacctgcaagccgaaggctaccgattcgcctccgccaccgacactgaggtggccgctaagctgctcggcaagatcgtggacaagattatcgcggacgaaggcaagccagacttgttcaaggctgtgcgccgtatggcccgcatgcttgaaggcgcgttcaccattctggccaccgactgccgccagccggacatcgtggtcggagcccgccatgattcgccactggtcgtgggccttggcgagggggagaacttcctcggttccgacgtcgccgcattcgtggcctacaccaagcgcgccatggaagtcgaccaggatcaggccgtatgcgtgtccgccgacaaggtcatcgtcgccgatttcaacggcaacgtggtcgaaaacccgaagacctacaccgtggattgggatgcttcggccgccgaaaagggcggctgggattcctttatggacaaggagattcacgaagaccctgccgcagtgcagcgcaccctgcttggccgcttcgacacgaatggcgacatcacccttgatgaagtgcgtatcgacgaacacgacttcaaggccatcgacaaaatcatcgtcgtggcctgtggcaccgccagctacgccggccaggtagccaaatacgccatcgaacactgggtgcgtatccccgtggaaatcgaactcgcgcacgaattccgttaccgtgacccgattctgaccccgcgtacgctcgtggtggccatttctcagtccggcgaaaccatggatacgctgatggccctgcgccacgcgcgcgaacaggggtccaaggtgctggccatctgcaacacgcagggtgcctccattccgcgcgaatccgacgccgtgctctacacacacgccggcccggaagttgccgtggcatccaccaaggcgttcgtggcgcagattaccgccgcctacctgctgggcctgtatctggcgcaggtcaagggcgcgatgttccgcgatgagattcatcagatgctcgactccctgaaagacatgccgcgcaagattcagtgggtgctcgacacccagcccaagaccatccaggcggccgccgagcgcatggtgaacgccaactccttcttgttcctcggccgccacgtgggctacccggtggcgcttgagggcgcgttgaagctcaaggaaatcgcctacacgttcaccgagggcttcgcggccggcgagctcaagcatggaccgatcgcgctggtggacgagggtgagcccgtggtgttcatcgtgccgccgcagcgcggccgcaatgtgttgcacgccaaggtgatctctggtatcgaggaggtcaaggctcgtggcgcgtacatcatcgccgtggccgagcagggcgacccggatgtggaacggtacgctgacgtggtgttctggcgccccgcctgcccaacgctgatgagcccgctggttgacgtggtaccgctgcagctgttcgccatggacatggcaaagctcaagggctacgacgtggacaagccccgcaacctcgccaagtccgtgaccgttgagtaagccacatcggtatgtgattgacgagcctcatattccgtttgagatggacgtgctgtatgaggacgagcggatcatcgtggtggacaagccgcattttctggccaccatgccacgcggcatgtggtatcggcagaccgcgctgatccgattgcgtgagcggctgggggagccggacatcacgccagcgcaccgattggaccgcatgaccgccggcgtattggtgttcgtgcgggattcggcctgccgcggcgcgtatcagatgctgttccagaaccggcaggccgtcaagatctatgaatgcctggcaccctgccggccgatcagcggcccgcgattcggcacgatcatgcaggtcgaaccgccacgcccgttcccattgctgcgccgatcgcacatcaccaaggaacacggcacgatggccgcattcgaggaaccgggtttggccaacgccgaaaccctcatcgagcgcggcgacctctgtttccctcccgctggcgggaggtggcgcgaagcgccggagggtggtccccatccgggaaatcaccccatctgccgctacacactccacccgcgcaccggcaaaacccaccaattgcgcgtccacatgaattcgctcggcctgcccatcgtgggcgacgacttctacccgcgcatccagacacgcccctacgacgatttcagccagccgctgcaattagtggcgcgtgtgctacgattcaccgatccaataacaggcgagaagcgcgaattcgtttcccgtgtgccgcttaagatctgatttcttagggggatggcgagaccaatccccgcccgtccgaatcactgtccctttcgactggccatccagctcattgcatcgtcgtacaccatcatgatgcgcttgcgatagctatcgatgaattcctgcgcaccaatgctcgcgataacgtcgtgagcgggttgcacggtgctgtcgaatgcctccggcagcctatccaccaaggtgtggaatcgtaaaatcacggattcctcatctaatcccatccgctgtgcgaatcgttccagatgtttgcggcgtaattgaagaagatctcggcgtccgccgatgttcatcgccaaagtggcatttatgatctgcttgccatgccccaaataagggaacaccgaagcaaggtcatagagcggggcaagccgcacggacgcgccatcgagcaatagcgagtagttcttggcgtggctgtctgttgccccgacgagataactggcgaggatgccgtcggtgaaggctcggatattgctttcggcctgaccgggcagaccgtgcttgcgcaacatttccgcatatgcattggacgttgggccgttgtgttcctcgtatttcagcgatgagggaatgcccagcgcttgggtaaagtcttcttggtgcagggccgtcaccgtaccatcggcggacactatacggtcataccgctcgctgatgatggctgggaccccatcaaagatgtgaaaagaggtgtgggccacgggtattcccatcgcctccacaatgcgcatggtgatgtgttcgttgaatgcttggtgtggaagggtcggtatgccgggcttgatgatatgagtcgtccgcgcgattccagtggtggagaaccatgatccattgcggttcctcagtgcgatcttgccctgctgtcccgcgaccgaccaatgctcgtctacgcttgcggactggatgcctgtgggggcggctgcgcgtagtcgattcgcgatctgcgaatcgctgattggaataagcgaatcgtcatctatgggcaagtgcgggtcggcggacagccgtaatgcgccggtggcatcgaatccgatggcttgcaacagatcaaatgcgcttgtcgatcgggcatgatgcaatcgcatggcttcatctcgggcctgaggggattccgggaccagggcctcaaggaaattacgcgggatgtcgcctgaatattcggctgcggtaatgggcatggaaagcgatattggtgtgggtgattgcgaccaacgataggaatcgtgatattggaaaataatgctgccatcgtttgttcttcgaaactggccgatgggtgtttcgccgagaaatgcattgagagtgttttcgctcatggtgtcaccattcatagagttcggcgggctgcggggttttgcggacatccagcgacaagccaagctcagtcagagcgctgagaatggtggagaatccgggattggggactcgggcgtgttcaaattcgatcagccagcgacgtgacacgcccagccgttgggccatgtcggtctgactgatgccctggcgttgcctttcatccttgataagccgcgcgtattcggcgatatccatgacaatcatgtgcaaaatatatcacagtatagtaaagtgtgcaatattctgcacatagttggaaatgtgcagaatattgcacaaccgagtcgattggtcggtgcggaattgcctatggatcactggcaggtggatcactggcaggtgaatcactgacaggtaccagtggatgccagcacatgccgctcgtcagctgatgtcgcgcacggaaccgcgttcgatcagttccggcgggattacggttttgacgccgaccggtatcttctcgccttcgcattgacggcggaccatggagaaggcggtggcgccaatgtcgtcaaagcgcagcttcatggtcgtcaggttcaagcgcggaaccatatctgccagcgaatcatcgacgcccacgatgctgacatcctcgggcacgcgcttgcccgctgactgcaacccgagcattgcgccgtatgccatttgatcgttggcggcgtagatggccgtgcagtcggggtcgtgggccaacgccacgccggcctggtagcctgaatccgcgcaccaatcgccgatgtacatgctcggtacgcgtgctcccatttgttccagcgcttctcgccaaccgcgggcgcggctttcggcggcgcgcgaggtggacggtccggcaatgtggtagacggtcttgtgccccttgctcatcaggtaatcgacgatagcggtcgagcagccatactggtcggcgtcaacggtggggcagtggtcggcggcggattcgcagatgagcacgactggaagttctcgcggaggcttgtatccgacgaaatcggagatgcgttcctccagcactacgatgacaccatccaccggctgacgctgcatgcgatcgatggcggcggaaagcgtgcgttccgcaccgtggcgcatggtctggatggtgactgaataatcgtcatcggccgcgttggccacaatagaatcaaggatgcgggcgttgccgaacgcggtggtgttgaacatcaccacgccgatatcctggaagcggccgtgctttagggctcgggccgcataattcggacgatacccaaggcgtttcattgcatcttcgacacgctggcgtgtttcgggtttcaccgcatcgctgccattcgccacgcgggacactgtctgtggcgaaacgccggcggctttcgctatgtcttgcatggacacctgtgttggcctcgacatttcaccctcgcttgactcattaatgtcggtgtttcgtttacaacgcttatcttagggacgcttacggtaacgataacatcgttgtcttcgtgaccattgtagcagagtgactgagaaacccttaattcaacacggtactcaacacgattggacaatgttacaaatggtgttatgatgataacgcaaacattttggtcaaccttcgaaggagaggggttgggaatggcttcagccgatatcgcagctgcgcccgtgcattcgggcaaggctcgtgtgaataagcacaaggccgattggcgtggatggaaattcatgtggccttttgcggtggtgttcgtgttcgtgttcatcgtgccgatcgtgtacgccgtttatatttcgttcttcaagaagcagatgatcggcggcaccaagttcgtcggcttcgagaactacgcgcgcctgttgggtgatggccagttctggagcagtgttggtcgtgtggccctgttcacgtgcgtgcaggtgccgatcatgctgtgcctgtcggctttgatggccctggcgttggattcgatgaagctgcatggcacgaggttcttccgtatctcgacgttcctgccctacgcggtgccggcggtggtgtcgacgttgatctggggtttcgtgtatggcgcgaagtacggcctggtgggttcgttgaacgatttcctgggcacggacatcgacgtgctcgcccccagcgtgttgttggccagtatcgggaacatcgtgacgtgggagttcacgggctacaacatgctcatcttctacagctcgctgtcgaccatcccgcattccctgtacgaggcggccagcatcgacggcgcgtcggagtggcagatcgtgaagagcatcaagcttcccgaattgcgcggcagcctggcgatcacggtgatcttcagcatcatcggctcgttccagctgttcaacgagccgagcattttgcagaacatggttcctggtaatgcgatcacgacgtattacacgccgaacatgtacgcgtacaacctgagcttctccggcaaccagtcgaactacgcggccgcgttggcgatcgtgatggccgtgatcaccatggccatcgcctacatcgtccagctcaacagcctcaaggagcagatgaagtgacgacgactactgctgttcgtgttgaggaatcgatgatgatcgtgaaggagcgtatgtgatgagtgcagcaacgacttcggccgccggtcgcctgaccgacggcgagctcaaggcccgggagaaggccgccaggaaggcggagaaggcccgccagaagaggatcgccgccgacgaggccgccgaacgcaggcgcagcgcgaaggcggggttcgcgaacgtgaacaacccgaggcgttccacgttgttgaccgtcctgtgcgcggtcttcgccgtgtactgcctgttcccgttcgtctaccttttgatcaacgcgacgaagacgcaggccgacttcaccagtacgttcggcctgggcttcggcaagacgttcgccctgttcgacaacatcgcgacggtgttctcctatcaggacggtatcttcgcgcgctggctgttcaacacgatcctgtacgtggtggtcggcgccggcggcgcgaccctgttggcgatcatgggcggctacgctctggccaagttccgcttcccggggcgcaaagcggtgttcgtggtcatcatcggcgcgatcagcgtgccgggcatcgctttggcggttccccagttcctcctgttcgccaaattgggcctgacgaacaccccgtgggccatgatcatcccgtcgctgatcagcccgttcggtttgtacctgatgtggatcttcagcgagcaggccgtgccccaggagctgctggaggcggcgcgcgtggacggcgcgtccgagttccgcacgttctggcagatttccttgcccctgttggctccgggcatcgtgacgacggcgttgttcacgatcgtggcgacgtggaacaactacttcctgccgttgatcatgctcaaggacgcggactggtacccgctgaccatcggcctgaaccagtggaaggaccaggcctcgaccgcgggcggccaggcgatccagaacctggtgatcacgggctccctgatcacgatcatccccctggtgatcgcgttcctgtgcctgcagaagtactggcagtccggactcgccgcaggcgccgtcaaggagtgatggagtcggctccgccgacgcggtgtcttcaccgcctcgcggcggggtctctccctccgtcccggctccgccgagacaaccttcctcatcagagggaggtaatagtgccaagccccccctctgacgagctgagccgttaggcaaacagccctgtgggctgtttattcccgcggacgcagattatcgataaaattcaataaaggagctgaatcatcatggaacgtaaagagttcaagtggccgcagccgcttgcgggcaacaagccccgcatctggtacggcggcgattacaaccccgaccaatggcctgaggaagtgtgggacgaagatgtagccctcatgcagcaggccggcgtcaacctcgtctccgtagccatcttctcctgggccaagcttgagcccgaagaaggcgtgtacgacttcgattggctcgaccgcgtcatcgacaagcttggtaaggccggcatcgccgtcgatctcgcctccggcaccgcatccccgccgatgtggatgacccaggcccacccggagatcctctgggtcgactaccgcggcgacgtctgccagcccggtgcccgccagcactggcgcgccaccagcccggtcttccttgactacgcgctcagcttgtgccgcaagatggccgagcactacaaggacaacccctatgtggtctcttggcatgtgagcaacgagtacggctgccacaaccgcttcgactattccgaagacgccgagcgcgccttccagaagtggtgcgagaagaagtacggcaccatcgacgccgtcaacgacgcttggggcaccgcattctgggcgcagcgcatgaacaatttttccgagatcatcccgccgcgcttcatcggcgacggcaacttcatgaacccgggcaagctgcttgactggaagcgcttcagctccgacgccctgctcgacttttacaaggccgagcgcgacgccctgctcgagatcgcccccaagccgcagaccaccaacttcatggtctccgccggcggtgccggcatcgattacgacaagtggggttacgacgtggacttcgtgtccaacgatcactacttcacgcctggcgaagctcacttcgacgagctggcttactcggcctccctatgtgacggcatcgcccgcaagaatccgtggttcctcatggagcactccagctccgccgtcaattggcgcccgatcaactatcgcgtcgagcccggcgaattggtgcgcgactccctggcccacttggccatgggctccgacgccatctgctacttccagtggcgccagtccaaggccggtgccgagaagtggcactcttcgatggttcctcacgcgggccccgactcccagatcttccgcgatgtgtgcgagctgggtgccgacctcaacaagcttgctgacgagggcctgctgagcaccaagctggtcaagtccaaggtcgccgtcgtcttcgattacgagtcccagtgggctacggaacacaccgccacgcctactcaggaggtacgccattggaccgagccgctcgcgtggttccgcgcgctggcggacaacggtctgaccgcagacgtggtgccggttcgcggcccttgggacgagtacgaagccgtcgtgctgccgagcctgaccatcctgtccgaagagaccacgcgccgcgtgcgcgagtatgtggcgaacggcggcaagctgttcgtgacctactacaccggtctggtggacgacaaggatcacgtctggctgggtggctaccccggttccatccgtgacgtggtgggtgtgcgcgttgaggaattcgccccgatgggcaacgacttccccggtgccatggaccaccttgacttggacaacggaaccgtggcgcacgatttcgccgacgtgatcacctccgtggccgataccgctcacgtggtcgcctccttcaaggcggataagtggaccggtttcgacggcgctcccgccatcaccgtcaacgacttcggcgacggcaaggccgcatacgtcggtgcccgtctcggccgtgagggtttggccaagagcctgcccgtgctgctggaggaactcggcatcgagacttcggctgaggacgatcgcggtgaagtgctgcgcgtcgagcgtgcggacgaaactggcgagaaccacttcgtgttcctgttcaaccgcacccacgatgttgcggtcgtggacgtggaaggcgaaccgctggtcgcctcgctggcccaggtcaacgagtccgagcacacggccgccatccagcccaacggcgtactcgtcgtcaagctgtaaaaccgcgcatagcgcctaattacccaacggctcccttgctgctcatcgtagcaggggagtcgttttcgtatctccagcaaagtcgggtagggtggtcaccgtgcgaggcaaaaacagagtgacgatggcggacgtggcccatgaggccggtgtttcggtagcctcggtgtctaattttctgaacaaacagccatatatgagcgaggcgatggccgcgcgtattgcggaagccatcgacaggctcggatacaaagtcaactcgtcggccagaaacctgcgttccgggcgtacccggttgctcaagctggttattcccgatctgcggcaggtgtacttctccgaactcgccgaggatattctggccgaggcccggcaacatggctacggcgtcatcgtggaatccaccactaacaatcgtgcccgcgagctggaaagcatcgcatcgatgggcacgcacagcgcggacgggctcatcttaagccctctgatgatgacggttgacgatatcgcggctttggatggcgattacccgctcgtactgttgggtgaacgtttgttcggcgtcaacgcgccgcacgtagtgattcgcaatcgcgaaggggccgccgccgcgacttatcacctgcttgatgccggttgccgccgcatcgccgtagtcggtgccgtgccccaccccgagcacgatttctcgtcgggctccatccgcacccacggatatcgtgaggcgctggccgcgcgcggcatcccctgtgatgacagtctgcttatcgaaacccaaggctgggggagcgccgacggtttggtcgcggtggacaccatgctggagagtggcctgcaattcgatgccgtgttcgctttgaatgacttgctggcgtggggcgtgctgcgtgaactgcgcgaacgcggcgttgccgtgccggatgatgttcgcgttatcggcttcgatgacgtggaggaatcggcctacatggtgccgtctctctccaccgttaaccccggcagggaagccatcgcccgactggccgtcgaatccatcatccaacaggtcgaatccggcagccgtgcccccgcccaaaccatcgaggccccctatagcctctccctgcgcgagtcctcaccggcgttggcgcgcgcctgatgaatccgtggttcgaaatatccgaagtgaatgacaaggcccgtcaatcgtatggtgattgacgggccctggtcgtattggacttgactgtacttggtacgggcgtgactctccgtcttttagccgtggaattccacgctgatccaggagatggcgggaagcgttgccgtgcaggtgccggtggcgttcattgcaatgtcgagcggttgcggcgtgacggcttcgggcgcttcggcggtgttggtgcggtacggatcgtcctcatgcaacagttgcgccttgctgagcgcgagcgtgccgagaccgggcaggccgggcagcccggaaaggtcgatggtgagcgtgtgcggggtgttggcgtcgcggttgacggcaagcagcagaccggtgcgggcctgttcatcccacgtgactaccgcgtcgatggccggcacgtcgccatatgcctcggtatggatggtgggggagctgatggccggagcgtaggcctggccgcgcgcgtgaagggcggcttcggcgaacgggtagaacgtggtctgccgccatgccgggccgtgttcctcggccatgatgggggcgatgacgttgaccagctgggcgcgcgaggcggaacgcacgcgatcgcagtgcttgagcagggtgatcatcagggaaccttcgaccaccgcgtcggccgcggtgtagatgtcttccagcaaatgcggagacttaggccatggctcgtggtgcaaaccctgcgcggcctccgccttccactggtcttcctgctcgttccacttgtccgaataccatacgccccattcgtcgaaggacagggcgatgtctttggtgccgttgttggcttctcgcgcctgatcggccgcgtccgagacggtggcgatgaacttggtcatgtcttcggaagaggccaggaagtcctgcatggaggcggcggtccgggttttatggccgcggtcgaagtagtaggcatggcaggagacgaagtcgagattctcgtaagccttggtgagcacggtcttctcccacgtgccgaaggtcggcatataggcacccgaggaaccgcaggccacgagttcgagaccggactcggcgagcttcatggcgtgggccaccttatccaccgcgccggcatattcttccgggctcatgtggcccacctgccacgggccgtccatttcgttgccgatgcaccacatcttgatatccatcggctcctcgatgccgttggccacgcgctgatccgcccaagcggtgccgggcgcgccgttgacatactcgagctcgtcgagcgcggctttcagcccccgggtgcccatgttgacggcaagcatgatttcggtgccggctttctggctccagcggtagaagtcgtcgatgcccatctcgttggtttcggtgcaatgccaggccaggtcgcggcgcacggggcgattctcgcgtggaccgatgccgtcttcccagttgtagttggatacgaaattgccgccggggtagcgcacgcaggtgacgcccagctccttgaccaggtcaagcacgtcttggcggaagccgttttcgtcggcggtgggatggctgggctcgtagatgccgccgtagacgcagcggcccagatgttctacgaatgagccgaacagacgcgggggaacgtcggctaccggagtggcgtcggcgttgagggcgatgctggcgtccggcgtggcgttgccagttgtggagacgttactggccgtggtgccggcggcggtcggcgccgggctgctttcctgcttgtcgggatgggtggtttcggcggaatactggctgttgtgagtggtcatgagcgggatgcatctccttcggtttgcggttagtcaccatggtgcgacatgtcgtgtttgcgtaaacataaaacatgtggtaccgtttcttaaaacgatacaagacttggaacaaaacgccaagtcccgtcgtttcccataacaaggaaggaaagaacgatgaagttcggcaagaagacaattgccttgattggtgctgtggccatgctctcctctgtagctgcctgcggttccacctctgccggggatagcggaagcaccggctcctctgataagaagatcgagctgaccgtgtggtcctgggattccacactgcctcgtacggtcaagggattcgaggccaagaacccgaacattaaggtgaaggtgaccaatgccggcaccaacaaggacgagtacaacgcactgtccaacgccatcgaggccggctccggtgctccggacatcgcccagatcgaatactacgcactgcccgaatacgtgattcgcggccacctcgagaacctctccgatctcggcgcctccgatttcaaggacttctacaccccgggcacgtggtcctcggtgagcatcaatgacggcgtctacgccctgccgatggattccggcccgatggcctggttctacaacaaggacgtcttcgacaaggccggcgtcgatccgacccaggtgcgcacgtgggacgacttctacgaggctgccaagaagattcgcgccgtggactcctacatcacctccgattccggtgacgccggtttcttcgactccatgacctggctggccggcgcgaccccgttcgagacctccaaggacggcgagaccgtgaccatcaacctgaccggtgacaagaacgtcaagaccttcaccgacttctggcagaagatgatcgacgaagacctcatcgacaccaagaccgtcggctggaccgacgattggaacaagggtctggatgacggctccatcgcatccctgctgaccggcgcttggatgccgtacaacctgctttccggcgctccgaacggtgacggcaagtggcgcatcgcccagatgccgaccgcagacggctccgagaccaactccgagaacggtggttcctcgctggccatcgtgaagtccgacgacaaggccaaggtcgccgccgcctacaagttcatggaatacgcctgccacgacgccgagggcattaagacccgtgttgacggcggtgccttcccggccgacaacgacaccctcaagtccaacgacttcctcaacatgacctccctgaccgactccgacggcaaggcccacgagtacttcggcggtcagaagttcaacgaggagctggccaaggccgcagccaatgtgtccaccggctacaagttcctgcccttcgaggtctacgctcgcggcaagttcggcgactacgccggcgatgcctacaccggcaagaccacgctctccgatgccgtggcttcctggcagaaggacctgcaggattacgccaagcagcagggctaccaggtgaagtaacggcaatcacagcagacttcctcctgtggtttctgtagcgggaggttgcgataacaggatcgggcactcttcggagcgcccgattttcttatgccatgggagcagtggcgcgcggattgcgataccaagatggcgtgttgccgaagaatgtgtataataaaagatgttatcgcaaccatagctacaaagtggcgaaacaaagccgttttgtgactactgaaccatagagtgatggttcacgatagcatgacgacgaggagagttgccatgctgttgtggtgacaatcactgcagaccgccgaaaggcgatccaaggaaggagaacagaacgatgaagttcaccgttgctaagaaggccattgcacttaccggtgcggttgccatgctgggttccgttgccgcctgcggttccgacaccgccagtggcaagccggctcaagataaggacgttaccgaaatcaccgtgtgggcttgggagcccacgctgacccaggttgccaaggacttcaccaagaagaccggcatcaaggtcgatctcaagaacgtcggcaccaacaccaaggaatacacccagcttgataacgccatcgaggctggctccggtgctccggacgtcgctcaggttgagtactacgccatcccgcagtacgccatcaagggcaacctgctggacatcaccgacaagacctccggctactccgacttctacaccccgggcccgtgggcttccgtgcagttcgccggcaaggtctacggcctgccgatggattccggcccaatggccttcttctacaacaaggaggtcttcgacaaggccggtgttgacgccgagcagatcaagacctgggatcagtactacgacgccgccaagaagattcacgctctgggcgacaactactacatcacctccgacaccggtgacgccggcttcttcgactccatgacctggctggccggtgcaaagccgttccagacctcttccgatggttccgaagtcaccgtcaacctgaccgaggacaagggcgtcaagaccttcaccgacttctggcagaagctgctggacgagggcctgctcgacaccaagaccgctggctggtctgaggactggttcaagggcatggtcgacggcaccatcgcctccctgttcactggcgcttggatgcctgccaacctggccaactccgctgctgacggcgctggcaagtggcgtgtgacccagatgccgaccgctgacggctccaccaccaactccgagaacggtggttcttcgctggctgtgctcgcctccaccaagaaggctgacgctgcttaccagttcatcgagtacgccaaccacggcgacggcgtggccacccgtgtggccggcggtgcattcccggctgacaaggcctccatggagtccgactccttcaagaacaccaccactgtgaagaacgccgatggcgaggacgttgactacttcggtggtcagaagtacaacgaggttctggctcaggctgctgagaacgtgtcctccgactaccagttcctgccctacgaggtcaaggcccgcaccatcttcggcgactaccttggcaagtcctacaccggcgaccagaagctgactgacggtatcgccgcttggcagaaggcactgcaggattacggcaaggatcagggcttcaccgtgaagtaagccttgaaccctcgctgagactgcctagctaatctcacctgatacacaaagccccgtgacgaatcccgtcacggggcttttaccgttttaagtcccgcctagtacactcgtcaccatgcgagtgatcggacagcgaatcaaaagaatggcaaccatagcagtgactgccatcctttccgtatccctggcctcgtgcgggcaggccacggacgacaaccgtacggagatcagcgtatggagctgggaaccgagcatgggggaggtcatccgccgtttcgaaaaagccaatccggacatccgcgtgaaatggaccaatatctccggctacggcaatcttaataccgccattcaagacggttacggcacgccggacgtggctcaaatcgaatactatgcactgttgcagtacgcggtctccggccaattgcttgatctgaccgacaaaatcggctcggattattccaacttctttaccctcggcacatggtcgtccgtgcagctcgccggccgtacctatggactgcccatggattcgggcccgatgggcttcttctacaacgaagacgtgttccgccaagccggcgtggacgccaccaagatcaagacttgggatgactattacgaggccgccgaaaagctcaaggagatcggcgcgtatatcgccgccgactcgggcgacggcagtttctatgacgcgatggtctggctcgccggtggtcagccgttccacacgtcggccgacggcaaaaccgtgaccatcgatttggatgaggatgccggcacccaacggttcaccgaattctggcagaaaatgatcgatgaggggcttgttgacactacctccgccacatggtcggatcggtggaaaagcagagtgggcaccggcaccatcgcctccgtgttctctggggcttggatgccgtcgttgctgctgtccaatgtgccgggcgcggccggtctgtggcgcgtggctcccatgcccacctatggtgggcagcctgccaacgccgaaaatggcggctcggcgctgaccgtgttgcaactgacccgtaagccggatgcggcctatcgtttcgtggactttgtggcgcatgacgcccaaggcattagcgcgcgtgtagacggcggtgccttcccggccgattacgccaccctgaattccgctgattttctggataaaaccacgattaccaatgaccgtggcattgaaatcccgtatttcggcgggcagaagttcaaccgggtactgtcggaggccgccgaggatgtgtcggtcggataccagtatctgccattcgaagtgtatgcgcgcagtgacttcaaatcgacggtgggccaggcatacgagtggtccggcagtttccacgcctatcagcagcgacaggaagccattgagatgggcatgaaggacgaggaaggcaacccgctcgaaccattggagaagcccggcaagaaagtcagtctctccgacggcctggcccaatggcagaaagacctccgagaatacggcctcaatcagggctttacgattaagtagggttttgagtaggtttttcggggagggacggaatcgactgcgctatgcgcggccgatgcctgcacaccgcgttacttcacattgcgcgagtagatgtatgccatgcctttgaagatcaggtctgaatcgtagacgtcgatcatgtcggtgtcgttcttgaaaatgcggctgagccctcccgtggctaccacttggaacggctcatcgatttccttgcggaactgctgaatcgtgcgctcaatgccaccgaggaacgtgtaatacagtccggcctgcatagcagtgcgcgtattggtggccagaatcgactgcggttgcgtgatctccacttccggcagctgggcggtctgcccccacaacgcctcggccccggtgcggatgcccgtggtgatgaagccggagcgaatcgtgccggaaccgtccacatagttgaacgtggtggcggtgccgaagtcggccaccagcaccgggccgccataggtgtggtaggcgccggcgcagtcggcgatgcagtcagagcccaaggttttggggtcgtcgagacgaatgttcatgccggtcttgacgccagggcccaccaccatcggttccaatccgaggaatttgatcagcgaggcgcggaaggaatacatcaccttcggcaccaccgagcagacgatcacatcgtccacatcgtcggccgtgtaatcgctcaaagccaggaactgcgtgatcatcagaccgtattcgtctgaggtgtgcgtcgccttggtggtgatgcggtaggagccgacgatgcggtcgccctccagaaaaccgatcacgatattcgtattgccgatatcgaccgccatcagcatgggtcaggcctccttgttctcgtcatcgacattgctcgcgccgccggaacgcaacgctgcgagccgcagcaacagtcgttgcgcaagcacggttttgtccatcttgtcccaatgctcgatcttcggggtgccggcatcctccgctccggacgtgagcacggtgacaacgttggtgtcggtgccgaacccggcaccggcgtcgcgcagattgttggccaccagcatgtcgcaatgcttggacgtcagcttcttctccgcattacgaatcagatgctcggtctccatcgcgaatccgcacaggatctgcgagccgtcgtcgcgcttgcgttcgccggcccacgccagaatatccgggttggaaaccagctccacggtgatgctgctgcggccggccttcttgattttctccggcgcaatctcggccacgcggaaatcgcccacggcggcggccataatcgtgatatccgccgccgggaaggcgtcggccaccgcatcgaacatatcctgcgcggtcgtgacgcgcaccacatccaccgcatcgggcgcggtcaaggcgactggaccggagaccagcgttacgtcggcaccaaattcggctgcggccgaggcaatcgcataccccatcttgccggtggaatggttcgtcagatagcggaccgggtctagcggctcctgcgttggcccggcagtgaccagcacgcgcagccccttgagcggggaagatgagggagcctggtcatcctgcgcatccgccagcagccgagcggccacttcctcgatgcgcgccggctcttccatacggcctcgtcccacgtcgccgcaagccagattgccttcctccggctccacaatctgccagcccaattcggcgcaggttttcagattgcgctgcgtggccggattgttgtacatatgcacgttcatcgccgggcataggatcttcggcccctcataggccagaatggtggacgtcagcgtatcgttcgccaatccacaggcgatgcgggcgatgacgtcggcgctcgccggggccaccaccagcagattggcccaggccgcatcggccacatgattgatggtcgttggcacggtcggattggccgtcacgtcgccgtgcgcggccggataagcggggaacatcgtggtacgggtggactgatgggtcagcgcggtgaatgtcaggggagtgacgaaaccttcggccgctgtggtttcgataacccgcacctcgtggccggccttggtccaatcggatgccagatgacaggccttgaacgcggcgatgctgccggtgacgcccagaagaatatgtgccatagctgcctcccggccttatgccaaggccgcacgtgtgcccacgccagcgcttcccgcgtcgttgcccgacgatgcgccgcgtgttgtggtcgccgcggaccctccgtcggcgccgcaatccagtatagccattgcctccggcgtgtccggggatatagtagaacgtggtgatcgacccgaatgggcggtcaaccacgcaagataacaacgaaaccatattcgggcgtaagcatgcccgaatgcatcagggagtatccatgtcccagaacaatggtgtgcacggcgagtccggcgcaaccgaagacaggaacatcgacggcgcgaatcaagctgccagcaccgacgcgagcctgaacgcgcgcgcgaaatcatcaaacaggaacaacggcggcccgaaatggtggctgtggacgctgatcgcggtcgtcgtggccgcggcgctcatcgtgggcgtcaccgtcttcggcgggaaaggcaagggcaaggacgcgaacgcctccgtctcggccagccgatccgacaccgtggccgtcggcctcaaactcgccccggtcaatcttgacatccgccaccagtcaggttcggcccttgagcagatcctcatcggcaacgtgtacgagggcctcgtctcgcgcggctcggacaacaaggtccaccccggtctggccaagagctgggagatctccaaggatggcctgacctacacgttccacctcaacgagaagatgaacttctccaacggcgacaagctcgacgccgaggatgtggcgtggtccatcaacgagctcaaggcccagaagtactacgactgcgagcaggtcaagagcctggacaaggccgaggccgtggacgccaacacggtcaggctcaccctctccgcgcccaactcgaacatgctgtggtacctcaccagccgtcccggcctggtctacgacaaggacgccacctgggatcagaagaacggcgcgttgggctcgggtccgtacaccgtggtctccttcgacccgaacgacaagatcgtgctcaaggcgaaccccaagtattggggcaccgagcacaaggcgaggaccgagaacgtgatcgtccggttcctgccggacgagaacgccagcatcaacgccctcaagagcggcgacgtgcaggtgctttcgtccatcattcctgcgacccttgccgagccgttccgcaaggatccgaactatgtggtcaaagttggtggcggttccgacaagttcgtgctcgccttcaacatggccaacgacaagctctccgacaagcgcgtccgccaggccatccgatacgccatcgaccataagcagatcatcgcctcgcgcggcggcgtggacgcccccctcggcggtccgatccccgagatggatcccggttacgaggatctgagcggcctgtacccgcatgacgtggccaaggccaagaagctcatggaacaggccggatactccgagtcgaagccgctggacctgaccctcacctacgccaacgtgtatggcaccgagctcggcgaccagctcaagagccagctcaagcccatcggcatcgacctgaagatcaactacgtggagttctccacttggctgcaggacgtgcacgccaacggcaactacgatctttcgctcgtggaccatgccgaaagccacgacttctacggatggaccacgccgagctactacttccactacgacaacaaggacgtgcaggccctgtacgccaaggcgctggaggccacctccgacgacgaggcctcgaagtatctggccaaggccgcgaagatcgtctccgaggacgcgccggccgactggctgttcagtttgaaggtcaccatcgcctacgccaagggcgtgaatggtgtaccgcaggacttcatccagaccgtgctgcccctctggcggatcacctacaccaagtagtcccggaacccatcggtcgggcgcggcgcgggagtgattccgtggcacgcccgaccgtggacggcccatccggccggtgacgccacgggcggtggcgagggaatcgataagggaggcgttatgcggttcttgatgcaacgcttgctgctgttcgcggcggcgctgttcggcatctcggtgctggtgttcgcgatgctgcgcatcctgccgggcgacgtggcggtcgtgatggccggcatgaacgcatcgccggcgcgtgtggcggccctgcgcgccgaattcggccttgaccggccgtatgtcgtgcagtatctcgactgggccggagggctgctgcacggcgaccttggcgtgtcggcgctgaccggtcgggcggtgacctcccaggtcggccaacgtgcgacgatcacgttcccgctgatcgtgatgagtctggtcatcgcgctcaccctcggcttgtccatgggcgccgccgccgtgatctcccggtcgccggccgtgcgcggtttcctgcgcgtgctgtccatcgtgggcggcgccgtgccggccctgtggagcggcctgctgctcatcctcctgttcgcacggggcgtgggccttgtcggtctgctgccctcgcaggggttccccgccgctgggtggggcgctcccgggcgggcggtctcgtccctgatactgccggcgctggccaccggattcgtgtccggtgcgggcatcatgcgttacacgcgctccattctggaaggcatcgccgatgagggagggccgatcgatatggccatgtcctgcggcatgacccgcacccaggcgttggtgcgcgtgggattgcgattggcggctccgcagctcgtctcggtggtgggactggcgttcgcctcgatgatcaccggcgtgatggtggtggagaacctgttcgccctgcccggtctgggcgccctgttggtgggcgatgtcggcaaccgcgatctggtggccgtgcaaagcgagctgttcctgctcgccgcgttcttcctgctgatcggcctggcggtggatctgctgcacgcgctgcttgacccgcgtctggccgccggaaaggaggaatgatggttgatcgcaatggtcgatggcgtcgttcgggcgtggttctgggcaccatctggtcccgtggcaccggccgctactcgctgatcgtgctggggttgtggatggtcgtcgccctggtgtcgttgttctggaccccgcagtcgctgctggccaccgacggctaccacgtgtgggataagccgtcgtccgcgcattggctgggcaccgacggcaccggcgcggatgtgctgagctggctgatggccggatcgcgcacgaaccttgccatcgccctgctcaccgttgtctgctcggctgccatcggcatcctactggtcgggctgatggtcgcccgttcttcggcgctcgcttcggcgtcggtcgccgtggtcgacgcgctgatttccatccccaccgtgctcatcgccctgctgctcgccgtgccgttcggcgcatccgcggccgtggtgatcggcgcatgctccatcggctacgggctgcatctggcgcgcgtcgcccgcccggccgccctgctcgccgcccgctcgggatacgtgcagtcggcccgggcgaacggtgccagcgggttcggcgtactggtcagacacatcgtgccgaacatcacgccggtgctgatggtgcaatcgtcgatgtcggcgggcacctcggtgctggccgaggcgggcctgacctatctgggcgtgggcgtcggcgcgggggtgccgagctggggccattcgctggccacctcggtcaaactcatcaacgtgtttccgttgacggtggtgtggcccggtctgatcgtcaccctggtggtggtcgcgctgaacctgttcggcgacgcgttgcgcgacgccaccgacccggtggctaatcccgcgttgcggcagatgactgtgcccggtgcggttgtgccggtggctaggggagccggtgacactgcggcgcagtccgcagtggcagcgccgaaggagacggatgatgagcgttgaaattcacgggctgaatattgctatcggcggcaaaccgattgtcacggatgtcgatctgtccatcgcggacggcgaacgggtcggcctgatcggttcctccggctccggcaaatcgatgatcgccaagtcattgctcggcctgttgccgcgcgaggccgtgctgtccggcaccatcacgatgggagaaaccgccatcctgtccggagaaaccgccgagtcgcggcatgggcaggaagatgactcaggatctgacgaagaacgcggcgcggcagataggcaccatgttgccggtgaacgcagggttgccacctcgggccacgattccgctgcgtacgccgacgagcatacgcttgccgatctgcgcggccggtatgtgggtacggtattccagaatccggcccatgcgctgaacccggtgatgaccgtggcgcagcagattgcgttgccgttgagactgcactacgatctgaccaaggccgaacgtgctgagcgagtgaataccatgctggacaaggtcggactggaccgtgacgtggccggcacatacccgcacgaactgtccggcggccaacagcagcgcgtgggcatcgccacggcgctgatcacctcaccgcgattcatcattgcggacgaacccaccaccgcgctcgactccatcacgcaacgtcagatcgtggacctgctgacctcgttggtggacgacgccggcgcatccatgctgttcatcacccatgatttctccgtactcgcgcgtgccaccacccgctgctacgtgctggacgccggccgcatcgtcgaatccggacccaccgccgacctgcttgctgcaccgaccacgccgcaagcccaacgcttggtcgccgccgcccaaaccctcaccctccacacccccaaggaggattcgcatgagtaacagcagtgtgccactcctctccgcccactccatcaccaaatccttcggaccgcgcaccgcacgccaccaagtcctcttcgacgtctccgccgacgtccacgccggcgaatgtctggccgtgatcggcggctccggatccggcaaatccacgctgacccgcattatgctgggcttggaatccgcggactccggcagcgtggaatacgagagccaatccattgtcggcggccgaaaatcgccgggattcgcgaccctgcgccgcgaatcgggactggtgttccaggacccgttctcatcactcgacccgcgttggcaagtcgccaaatcggtggctgaaccgctgagtctgcagcgacgtgatctgaacaacaccgatatcgacgagcgggtggtcgcggctctgaccatggcgggtcttgaaccggcggacttcctgaaccggtacccaatcgacctgtctggtggccaggcgcagcgcgtggtcatcgcccgcgccatcatcaacgagcccaaggtaatcctcgccgacgaaccaatgagcgccatcgacgtggccgcgcgcatccagatcctcgacgccttcgccgctatccgtgaggcccggccgagcaccgccatcatcatggtctcccacgatctcggcgtggtgcagcacatcgccaaccgcatcctcgtgcttcacgacgggcgcgtcgaagagacgggtcccaccgccgaagtgctcggcaacccccaatccgattacacccgtcagctcatcgaggcagcctcgttatagacctttttggctcccctccctgaggggagccggccgccggcgacacgcgcttgtcgcgggttgtgctatggtgtgaggcatgcagattatctcatgttgttgtcgctaaccgacgcccctgggcgagcggtcagtgacgcataacttgagatggagcattcgaatcgcggcgaatctgccgcatacttttcatgtatccgatggcacaagcgtaatcgtgtaatgcgcgagccgtggttaacatgaaaaaccggttcacttttcggattcaccgtacagtgagcgggaatactcgattttcaaaccaaagccacagtccattcgtctgggaacgtcggttcacgaacgcaacgcagcaaaacccccacaaccccagcaacgaaggacttcacatgaccatccacaacagcctcgcagaactcatcggcaacaccccgctcgtcaagctcaaccacatcccgcaggcggccggcgtcaaagccaccatcgccgtcaaagtcgaatacttcaaccccggcggctcctccaaggaccgcatcgccgagcgcatcatcgacgccgccgaacagtccggccagctgaagcccggcggcgtgatcgtcgagcccacctcgggcaacaccggcgtcggcctggccctggtcgcccagcagcgcggctaccgcacgattttcaccctgccggacaaggtttccgaatccaagcgcgcggtgctgcgcgcctacggtgccgaagtcatcgtcacaccgaccgacgccggcccggacgacccgcgctcctactaccaggtcgccgaacgactggccaacacgattcccggcggcttccgcccgaaccagtacgacaacccgaacggcccgctgagccactactacaccaccggccccgagatctgggaggctacggaccacaaggtcacgcacttcgtggccggcattggcaccggcggcaccatctccggcaccggcaagtacctcaaggaagcctccaacggcgcggtcaaggtcatcggctccgacccggaaggctccatctactccgcttcctcacgcgacgaagtccaccagtacgacatcgagggcgtgggggaggacttctaccccaaggctttcgaccggaacatcaccgacgacatcgtgcgcgtatccgacgccgaagcctttgaaatgacccgccgtctggccggcgaggaggcgttgctggtcggcggctcgtccggcatggccgtggccagcgccatcaagtacgcgcttgccaatgatttggacgagaaccagattgtggtggtgctcgcccctgattccggccgcagttatctggagaagatcttcaatgacgactggatgcgtgccaacggctacggcgacatcgtggaacgcaccagcaagccctccctcgccgagcagtaccttaacggaactccctctgatgagggagctgcggatggactccataactagctatcaaaagaatcaatactaactaaccgcacctgttttaccttcgaatacggaacaatcccgaaaggaacccaatatcatgtccgctgaatacaacgccaagttcgccaacaccgacatcgccactcgcgccatccacgccggccaggagcccgacccgaccaccggtgcggtcgtcacgccgatcttcgccacctccactttcaagcaggatggcgtgttgggcctcaggggaggccacgactactctcgctccatcaaccccactcgcaccagcttcgacgagcagctcgccgccgtggaaggcggcaagtacgcgctgagcttctcctcgggcttggccgccatcgacgtgctgctgcgctccaccatcaagcccggcgacaacatcctgctcggcaacgatgtgtacggtggcacctaccgcctgctctccaaggtgttcgtgccgtggggtgtgggcctcgacgtggtggacatcaccgatctgaaagccgtggaaaccgcattggcctccaagcactaccagtatgtgtgggtcgagaccccgtccaacccgctgctcaacatcaccgacatcgcggccaccgccgaagttgcccacaagtacggcaccaaggtcgcggtcgacaacaccttcgcctcgcccgcccttcagcacccgctggccgatggcgccgatgtggtggtctactccaccaccaagtacatcggcggccactccgacgtggtcggcggtgccgtggtggtcaacgacgaggagacccgtgagaaggtcgccttcctgcagaacgccgccggcgcagtgccctccccgttcgactcctggctggacatccgcggcctgaagaccctggatctgcgcgtcaagcgccacagtgccaacgccctgaaggtggccgaatggctcgaatcccagccctctgatgtgattgagcgcgtctggtacccgggcctcgagtcccacccgggtcatgaaatcgccgcccgccagatgcacggcggcttcggcggcatcgtctctgtgcagctcgcggccggtgccgaggcggccaagcacttcgtggaccacacgcagatcttcacactggccgaatcgctcggcggtgtggaaagcctcatcgaggtgcccgccgccatgacccacgcctccgtggccggcaccaccctgcaggtgcccgccaatctggtgcgtatttcggtcggtatcgagaacgccgacgaccttatcgccgatctcaagcaggcgttggatcgtatctgaccgtactgacggtactggtggcaccgtattgacggtgccaccacgcttatcggcggactcgctatcgattggtacctacaaaaaatccccggcccacaagggtcggggattttccgttatcgattaaacatggatcgaatcagctggcgttgccgccctgccatccggtggcatccgcaccagccgggcgcaacgcctgaccggaagtcggtgtggtgccatcaacgaccacacgagtgccgatggtggcaaagtcgtacatccacttggcgtcggccacctgcatgttgatgcagccgtgcgagcctgggataccctgctgcacatagatggggtgctcgccccacatgtatgcaggaacaccgtgcagagcctcgccgccgttatagtaggaaacccacggcgtgcctggctggttgtagccttcgccaaccatggtctgcgattcgtacttgagatacacgtagaacgtgccggtatcggacagcatggaaccatcggcggtgggcttgccagaagcgatgttgaacttcttgaccaccgtggtgccctgatatgcagtggcagtctggttcgtcagatcaacatgaacccacttatcgccatttgccgtatcgaagttatgaggcacctcgacctgcttgacatcatatgggctgtctttcacagccacagtggaatcagtggactggttctgctcgatggcggtagccagacgttcgggggcgtccccggcaccagtcacttcaataccatccacaccgagtgtcttatcggcaccaatttccacgccgccttcgtctttcggcgtgatgtagacctcgcgtgtcaccttgggaacggtcagttctttggttacgctgtcactggtgacgtacttggtgatggcatcgcggtcgactaccagactcatggtgccacccgccttattcaccgtgggcttgaggaatgaggcaatggtatcggccgggatggtgacgctcttgttcacgccgttgtccacggtcagtttgaggccaagcttggcattggcgtcaaactgtgtttgctgtgcgctcgcgtcatcaatcggattctttgcagtctgtagcttgaccggcaccgtcgcattttcgcccggggtcgcgacggcctccttgactgcagcattgacaacattgatatccgggcccttgccatcctgacccgcggtgtaatcgaactgcttggtgctcttgttgtagacaacggtggcaatctgcgctcggtcggcctcatcgaccaggccggcggtgacgaattgttcggcagtctctttgtctctggtggcggtcagagcgatatgcggctgatcgaaaatattgagcttggccacgtcgccggtcttcgcgttcaacagcgcatctacggttttatccgtgtcgacggtgacgccaaggtccttcagcgaggctttgacgctgttgccttcggcggtgaacgtcactgtggtgttattcagctgctgcttcacagtattcgcaagttcttcgcgggtctggcccatgacagagacattgcccaaatgaacaccgggcgcagccttgtcttggaagtaccaacgtccgacgaagaaataggctattaatgcggcaagcaacactgcaaatatggttatgatggcaatccgtgcggccttgccatgtgatttagcggtggtagatgccatgacatgttcacccacataggctgtattgtcggcatggttattggtgccattgtcgctttgctgtggcgtggcggtacctgtggccgcggctgcgaacagcccatcggcggccacaggctgcagcaccgccgtctcctgatcgtcaggcgaggagaaggaaaatgtatcgttggccataaaatgccccgtcttagttctctcaaagcggcatatcgtgtgatatgccgggaataacgtttcttgacgcataataatacggaagggctacgtacatcgttacgaggtattccgttatacgatgaaatccatccgcggtcggcctacactggtcgtttatgacagcacatcaggcggcgctggaggcgctcacacgatacttcggctatgactcgtttaggcccggacagcaaggaattgtcgaggctttgcttgccggacacgatgtcttgggcgtgatgcccaccggcgcaggcaagtccgtgtgctaccagattcccgccgcgctcagcccgggtgtgactctggtcgtatctcccttgatttccctgatgcgcgaccaggtcgatgcgctgaacgacctcggtctgccggccgcgttcatcaacaccactcaaactcccgacgagcaggcgatggtgttcgcccaagccgccgccgggcagatcaaactgctgtacgtggccccggaacgcttggaaaccgggcgattccgcgactttgccgcccgtacgccgatctcgctgatcgccgtggacgaagcccactgcgtctcccagtggggtcaggacttccgctcgtcgtacttaggtatcggcgatttcatcgccgggctgccgcagcgtccaccggtgggtgcgttcaccgccaccgccaccgaacgggtgcgtcgggacatcgtgggactgctgggattgcggaatccggccgtcaccgtcaccggattcgaccggccgaacttgtattttgatgtggtcaaactggagaccaaatacaaggccgcatgggtggcgcggtatgtggccgaccatccggacgaatccggcatcgtctactgcgccacccgcaagaccaccgaagcgctcgccgacacgctgaaccagatggggcatccggccgtcgcctaccatggcggcatgtcgccggacgcgcgtgaggtggcccagcgcgacttcatcaccgacaaggtgccggtggtcgtagccaccaacgccttcggcatgggcatcgataagtccaacgtgcgttacgtcatccaccacaatctacccgaatccattgaagcctactatcaggaggccggccgcgcgggccgtgacggcgagcccagccgatgcacgctgctgtggaatgagtcagacatcgtcacccggcgtcggttgctggataacgattatgagaacgagcgattgactcccgaagagcaggagatcgttcgccagtccaagcgccggctgctggacggtatggtcggctactgccgcaccaccgactgcctgcaccggtatatgacccggtatttcggtcaggaattgtcgccgaatgctggttccgcggcgggtgaagacattgcggcggactcttcgcagtccggcagatgcggtgcctgctcgaactgcgaaagcacgttcgagaccatcgacgtgacccgcgtggcgcaggcgatcagccgttgcgtgcatgacgtggggcagcgcgtcggttccggcaagatcgtcaagatcctgcgcggttcgcgggcacaggatctggcatggctgaacccggagcggatgcccaccttcggcatgctcaaggacgtgaacgaggctcgcgtgcgcgacgtgttgagccagatggccacggacgggtacctgtcaatcgccgaagggcgtatgccaatcgtcatgttcggtgcgcgggcggccgaaaccgccgctcccgacttccactatgagatcaaacaggtggaacgcaagtcggcggcggccggttccggtcggagcgggggagtggctgatactgccgattccgccaatgttcccggcgatgcgctgggctcgtatatcccggacgatgacgaggaatcgctgttccagaagctacgcgaactgcgacgcaccatcgcccaggaaatcggcaagccgccgtacatcgtgttctccgacaagaccttgcgcgacatggcccgcatcaagccggttaccaacgcgcaatttctggcggtcaacggcgtcggtcaacacaagctcgatctctacggccagcgcttcatgcaaaccatcgcctcgttcaatgccgggagtgcgtcataacaatctcctatagcgaaccgcggagtatttgcgggcgttcttgggctggcgcgactacgatgactgttcgatacttcatgaccgaacactcagcaagtagaaaggcaacagcatggcagaagacaaggccgaaaagcccgtcgtcgaatcattccagcttgatcacaccaaggtcaaggcgccgtacgtgcgttacatcgacaccgaaacgggccctcacggcgacgtgatctccaattacgatctgcgcctgacccagccgaacgagcaggccatccccaccggcggcctgcacaccatcgaacacaccatcgccgtgctgctgcgtgaacgcattcccggctacatcgactgctcgccgttcggctgccgcaccggcttccacctgctgacctggggcacccactccaccgaggatgtggccaaggcgttgaaggaatcgttggagttcatcgcatacaaggccacatgggatgacgtgcccgccaccaccgagaagagctgcggcaactatcgcgaccacagcctgttcaccgccaaggaatgggccaagcagatccttgaggaaggcatcagctccgacccgttcgagcgcaaggtcgtctgattcgtctgattcgattcaattctgattcggctcccgctggcgggagccgggggcgaagccgactgagggtggctgtcctcaactcggctggactgtccggctcctgcggacgggagtcattgtttattagtgtccgtcatgcaacgcgggcgggatttcttgtgcctacggcatggtaggttggccgtcagttagtcgccggtcaccgtgccggcaacccggcatgtcggagaggtgagaagtgactcagtcgaacgctgcaaacaaggcgacaggccgccgtttccgccacgccaccatgcgcgatctgccgcagatgcagaaaatctacgcacgcgcacgcgcgttgatggccgccaacggcaaccccacccagtggggcaacgaatttccgcgtgaatcggtgattgaagacgacatcgccaaccagcgtacgatgctgctggtcgacacctgcaatggccacgaacgcattctggcccagttcgccctgtgcccgggcaaggatccgacctacgccaaaatcgacggcgcctggctggacaacgacacctatgtgaccatccaccgcatcgccgcatccggtctggtgcgccacgcggcccgcgactgcatcaggtgggccctgaagcactacggcaacgtgcgcgccgacacccaccccaataacaaggccatgcagcacgtgctcgaaagctccggcttcgcccgttgcggcctgatccagctgctcgaccggccggtcgacaccaccagaatcgcctatcagcgccacgagtggtgagtgtggctgccggctgatgtgctcgtttctgcaccgtcatcggtttctgacggtagaatcagtgtgtgagaagaacacgttgggtcgggggcgtcgtggcggtgcttgcggctgtcatgctgtcgtcgtgcggcggcgtccagtcgaatcccggggtaacacaccgttgccaatccattcaccgcgcaggtgaatggagaagacatggcgatgcctgtcggccgatggagccccatcggccgacaggcatcgaggaagtcaccgtggccggcggaacgcgcggtcgccgattggggcgaatggcttgtgtggttcgctttggtaccagtaggcgaccgtggccacgtcgtcctgtcgttcgaagttgccggcttcctcggtgccgatctgctgccattcgacgcgcaggtctcgctcgaagtagatcgggtcggggatgtgccaacggtataggccgcgggtcacgggggtggcagtgtcccagtaggcgctttcgcgtccggcgaggttctgcgagtagaacgggaagccgaggtatgggccggtgaaggtgcgctcgtacatgcggccgtgttcgtcgaattcggcgaagctccaggcgccgccgaagtagtcctcggcgccggtgctgcaccaggtggggtatttgccgtcgccgtcgatgtagaacttgaattcgccttcgccccaccagcggctttcgagcgcggtgagcgccaggtaggtgccgacgtaggtgccgtgtccttcgacgccatcgagcaccacgtagtcgtgggcgagttcggtgacgcgttggcggcgccactgcgcgtggaagcgcatcgtgtcggccggcagccggtcgtattcggtgtagtcgatttggtagaagaacgcgggcacgtcctcgttgtggtcgttgcgcagcacgatgcgcgcgtgttcgaacggcatggcgaagtagcagttgaagccccggttcgggttgaccatgacgggaattgagttgatggtgcaggactgggcgtgtccgcagcagaagaagtcgccgatcgggcattgcaccgagggggagtcctcgccgtcccagtagaattccaggatcaggttgcgtagcacgtcggggccggtgggggaggtgcggtcggttaccgtcatccagatgtgacgaatcacgccggggccctcgacgtccatcaatgtcaccgattccccggacctcaccgtgctgatgcaggggcttcccttgcgggaggggcccaacgcgctggccgccatggccgcgcggcccttgccgccgtccgggttttcggcgttgatgcagcgggtgcggccgggggtcctcatggccacggcatccaaggcgccttgtccgagccccggcgcggggttcgctgtggtgaatgcgtcgagcatgatgcttacttcctttcctgtcgcaggcccgtcccgccacggcgttttgtctggggtgagccgggctggaaagtgtagatgccgtacggggagaacggctgccagttggacggcttgacatacc

SEQ ID NO: 1556 - DNA, 24200 bp, Unknown
  R221_24m  MAG No. k141_20500
gcgggagccgctttcttgggctcgaagaacggccacttgtgcaaagcccaggcgtgcagcgcgggaatcttggcaacggcgaagccgatgaccagaccgattaccatggcccaggtctccagatcatggcctgcgaccagcaagccgatgaacactatggcaacgatgaagctcaccatctgcgaggcctttgactgcttggcggtcaccagatcggccttcatgggaacgagccccagaaacaggccgcaaggcgcgcatatgacgcccagcaccacgctgatcacggttgacacggttgttacttccataatgttcctttgctgaagtgggatgattcgcttgattcgggcgaacgataacgatggttactggcgattagtggttggcggtgcatcggcatccgtggttgcgacgtcggtttcgacatcgtcatcggtgtcgtcctcggatccctcggcatctgcggtgtcggtatcggtaccgtcaggcgtatccgcggcgtcatcgttctccgcatcctccttgctgggttgacgccaccacaatatcaatgcgttggcggcgcagtagacggcggcaatgccgatgcataccaaaaagatgatgtttgaggtgctgatcatcgtgccatcggccattgcttctttggcggattgccatatccaaatcacgcatgcgacggcggtcagggcgtacagcatcatacgggagcggtcgttcatagaagaatctccagacttgttcaaacgacttgattatagccgtatttgtggattgcgtgggaaacgaaaaatgccgccatgtgtgcttcagcgaggagcgcggtataacagcggctcttcgcgatgcttgccatggcggcattcatcaggaatcgttattcagttgttatctcatggattgtgctggcagcgtatcagccgcgcgccttggcgtatgcctcgtacacggcttcggtgggctcgccagtctccacgccctcgatggtgagttgccaggtcagcggttcggcctcgccggacagcacccaggcggcctgacgggcggcgccgatggccacatattcgtcggtggccggacgggtcacgtccatgccgaggattgagggggccagcgtgcggatggccacggacttcgcgccaccgccaatgagcaggatgcggttgatctcggcacccagcgaacgaatcagctcgaggcagtcgcgctgggaacacagcaggccttcgacgaacgcacgagccagattctccttggtggtgttgtgcagggtcaggccagtcagcgaggcggtggcgtccggacggttcggcgtacgctcgccgtcgaagtacggcaccagggtgatgccgccggcacccggctcggccttaaaggccagttcggccagctcgtcgtagtccacgccaagggcggcgcgaccggcgtccagaatgcgcgaaccgttgatggtgcaggcaagcggcagataatgaccggtgcagtcggcaaagccagaaatcgctccggtcaggtcgtacaccgggttttcagcgatggccgcggccacgccggaggttccgagcgatacggacacatcgcccacggccatgccgaggcccagcgaggccatggcattgtctccgccgccggggccgatgatgcagccgccttcaacgtccttgccggcaatggcggggtcggccttgacggcggctgcctcacgcgggcccagcacggtgggcagcacaatggcgtcggcgtgggccttggcggcttcctcgccctcggcgggggtcagcaccatggcgatgagatcgcggcggtactcgtcatgcgcggcatcgtagtaaatggtgccggaagcgtcggaacggtcggtgaacagggcttcgagatgagcgtcctcgccctcggccaccgggccatagccggcgatacgccagctcagccaatcgtgcggcagacagacggcggcaatcttcttggcgttctcaggctcgttctcggccacccacgccaccttggtcagcgtgtaggaagcgacgggggaggatccgacggccttgacccagcgctgcttgccgcgggcggtcacgtcgtccggttcgtcgccctcggccggagttgcaccgagcttgtcgatcagggcggcggcctgcggggcggaactggtgtcattccagagcatcgcatcgcgaatcacgttgccctgcttgtcgagaatgaccatgccatgctgctggccgccaaccgcgagggccgcgacatcgtcaagcccgccggcctgctcggcggccttggtgaaggcctcccaccagaattccgggttgaccgaggtgccatccgggtgcttggcctgcccgaaccgaacctgttcgccggtggcggcgtccgtaatgcggacctttgttgattgagttgacgtatctacgccggcaaccagtactctcgtcatgcattcctcctcgatgagggtcgcgcttgcaagtctcggcgcgccacaaccaataagttagacgattaaactatactgtattgcagtgtatgattgcaaacggaaacacgcgagggtgcgtatctggttcaatcgtttgacgcacaatatcattgtgcgatagacggatgtgagcgcctgtgcggcgttcgagactaggggtgcaaggaggtaggagcctatggcaagtctacgcaggatcaatcaggaggatctgcgcaaccataatttgtcggtggttctcgacactttgttgcgcgcggagaaacccatgagcagggccgacttggccaaggaaacgggcctgaccaaggccacgctttcgctgttggcctcgatgctgatcgatagtggcgtggtgcaggaaggcgagccggtcgtctccaccacatatgggcggcccagcacgccgctggagattcatggcgggtccatcgccggcatcggcctgcagatcaacaccgatggctacggttgcctggcactcgatctgaacggcgacactctcggtcaggagtgggtgagtgaggatatgaccggcactgacccgtacgagatcttcgccaagctcgatgcgatgaccttcccgttggaaagccgactcaaacgacgtggctgcaaagtggtgggagccgggcttgcgctgccgggcatcgtcaccgacgacatgtggctgttggtggcccgcaatctgggttgggaaaacgtcaacctcacccggttcaacgtggtacgccggctggatgtggtggccggtaacgaagcgaagatggccgccatcgctcagattccggggtatgccaccgaacgtgcgtccttcctgaatgtggtggatcgcacggattcctttatttacctgtctaccgatatcggcatcggcggcgcggtggtgcgtgacggcgaagtggtgatgggctcgcacggattcgccggcgagatcggccatctgtccgtggcgatggatgggccgttgtgcagctgcgggcgccacgggtgccttgaggcgtttgcgggccgtcgcgccttggtcgaggctgccggcattgccgaggatggggatgccaccagcagcgaggccatcgatacattcctccagcgttggcgtgcgggggatccagacgtggccaaagtggtcgatcaggccgctgatgcgctggtttccgccatcgcttccgccgtgaatctggtggatgtcgatacggtgctgttgggcggactgtggacgcacttcggcgacgagctggccaccgtgcttgaaggccggctgcgttcggaaattctgggatacccgaatgtgaagatccgcgtgttcgtgccgccggtggcgctgcatccctcgctatatggcgcggccgaaatgggcttgcgacggttcatcgagaacccgttggggtacatgggggagaagtagcgccgggagatgccgcttgttgtgctggcgggtgcatggcatgggcgcatggcgcgtgtgccggcgttggtgggttcatgctacactttgcaagttggctgttttacgcagcgaacgtggggccgtagctcagtcggttagagcatgcgactcataatcgcccggtccagggttcaagcccctgcggccccactcttttgcgtcgcctcctgcggcggcacagcgcgtcttcacgtccagataggcgcgtacaatcccttaggttccggttcacgtcctgccataggggcatgacgacccgggtcccccgaatccataggagacgtaaaatgcagcagggtatccatcctgattaccaccccgttgaggtgacgtgctcgtgcggcaacaccttcgtgacccgcaccgctggcaaggaagatcacatgttcgttgacgtgtgctctcagtgccacccgttctacaccggcaagcagaagattcttgacaccggtggccgcgttgctcgcttcgagaagcgctacggcaagaagagcaagtagcatacttcacgccagtccgattcgattcggcatgctccggcatacccgatcgaggactggcgtttttgtattctttgacatttttttgacctgcacaaccgaatagacaccaccgtacgaaagaaagcgtgttatggcagacgaacagttcccggcggcggcaaccgcgcttgaggagtaccagtccatcgaagaacagatggcgagccccgaagtcgtgtccaacccggacaagctgcgcaagctgggccgtcgtcacgccgaactgggtgccatcgtgggcgcctacaaaacctggttgcaggtgaaggacgatctggcagccgctcaggagatggccggcgaggacgccgacttcgccgaggaagccaagcgtcttgaagccgaactgcccgacgccgaggagaagttgcgtaccgcgctgatcccgcgtgaccaggatgatgcacgcgacaccatcatggaaatcaaggctggcaccggcggcgaagaagccgcactgttcgccggtgacctgctgcgcatgtacacccgttacgccgagaagcgtggctggagcgtgaacgtacagtccgagaacaccaccgagctcggcggcgtcaaggacgtacagattgccatccgcgccaagggcacgcccgctcccgaagacggcgtgtgggcttcgatgaagtacgagggcggcgtacaccgtgtgcagcgcatccccgtcaccgaatcgcagggccgtatccagacttccgccgccggcgtcattgtgttccccgaagccgacgaggatgacgacgagatcgagatcgatccgaaagacctgaaaatcgacatcttcatgagctccggccccggcggccagtccgtgaacaccacgtattccgccgtgcgcatgacccacctgcccaccggcatcacagtgaacatgcaggatgagaagtcgcagatccagaaccgcgccgccgcgctgcgtgtgctgaagtctcgcctgctggccatgaaacatgagcaagaggccgccgaagccgccgacatgcgtcactcgcaggtgcgttcgcttgaccgctccgaacgtattcgcacatacaacttcccggaaaaccgtatcgtcgatcatcgcacgaattacaaggcctacaaccttgacgccgtgctcgatggcgacctgcaggccgtcatcgattccgacatccaagccgacgaagccgaccgtctggccaatcagcagtgatagccgacctgattcgtcaagccgccgcgcagttgcgcgaagccggcatcgagacgcccgaacatgatgccaaactgttgctggccgaggccgtggacaccgagctacgcgatatcgacaaggccatgctgatgggggagggcctcgattcgctggcccccgccggcgggggctgtcgcgcagcgactgggggtggtcaggccgaccccgtcaccaatatccttgccgccttctacgccatgctttcccgacgcgccaaacgcgagccgctccaatacatcaccggccacacgcctttccgctacctcgacctgcaggtgggccccggcgtctttatcccgcgcccggaaaccgaaaccgtagtccaggccggtcttgactggctgacccggcacagcatgatccacccgcgcatggtcgacctgtgcgccggttccggtgccatcggcctgtcgatagtcagcgaagtgcccggcagccaagtatgggccgtcgaattatccccgcgtaccgccgaatggacccggcgcaatctggcggtaaccgcgaaacgatacccctccatcgcctccaattaccaactggaagtcgccgacgccacgtcactggccacgctggcgcaactcgacggcaccatcgacatcgtcatcaccaacccgccctacgtgccacaaaccgacatccccgaacaaccagaagtacgcgactgggacccggaactggcgctatacggcggttcggcagacggcacgctcatccctgaacgcattattgagcgcgcctggcgcctgctcaagcccggcggcgtattggttatggagcatgatctcacccaaggcgagcgattagtggcctatgccaaggccacaggtttcgccaccgcctccaccggcaaagattggaccggccgagaccgctatctcttcgccgagaagtagccacaggcgcggggccgccgctgctactgcgcgtaatactgcagggcggaggcgtccgcgtccgtgatttcgcgaatcggacgggccggattgcccacggccacggtgtgcggcggaatatcgcgcgtcaccaccgagccggcaccgatcacgcaaccctcgccaatcgtcaccgggcaacaatccagcacagtgaagttgaagttggcgaacacgcgctcgctggcgcgcggcatacgcagttcgacgggaggcatggtggtggattcagcattgattccgctcattgaacactcctgtaatttcgcgaaagagcatggatgaactcattgtatctacggtctgtgcgtatggggcgaatcggaaaacagcagtacggcaaacgagcgatgatgaactatgcaagtcggggcgcaatggtgcaatggtagattgtgaatacacaggcgaacggaggtgtcgtgagcgtggagggcggaacaacgctgaaagtcacggatgaatcgctggcacaagcggcgcgtgtcatccgggatggtggattggtcgtcattccaacggatacggtatatggagtggcgtgcgatccgcgtaataaggccgccatcgaccgtatctaccggctcaagcgtcgcccacgctataaggcgttgcaggtactgctcgcatccaccgaccagcttgatgaactcggtctcgacctgccgtctccactgaatcgtttgtcggcggcgttcttgcccggcgcgttctcgccgattgccgtagcccggcccgactgcacgttggagactttggccgacaccgccgatggtcgccccggcacgcagggcatccgcatccccaattcggcgctgtgcctcgcgattctcaaggccactggtccgctggccgcgtccagcgccaaccgttccggcgacgaaagcgcacagactgtccaggaggcggttgacgcgttcggcaacgaagtcgacctgtatctggacggcggtcccacccaaggccatgtctccagcaccgtcgtcaaagccgatccgtacgcgcgcgacggcatcgagatcctgcgtgaaggcgtcatcgcccaaaacgtgattcgcaaggccctccacctcaacggcgggggactcggcgcatgagaatctacctactgattgccgccatcgccggtggcgtcacctggctggtgactccgctgattcgccacgtcgccatcgaaatcggtgcggttggcgaggtgcgtgcccgagacgtgcacaccattcccacgccgcgcatgggcggccttggcatgctgatcggttttgccgtggctaccgtattcgccagtcggctgccttttctctcgggattgttcaacggcaattaccagatgtgggtgattcttgccggcggcatcatgatcagtctgctgggcatggccgacgacctgtgggatctcgattggatgctgaaactcgccggccagctgctgatttccgtattcgtggcttggggcggattgcagatcatctcactgcctttgggtggttcgctgattaccgcctcgccgagtctgtccatggcgatcaccgcattcctgatcgtcgcctcgatcaacgcggtcaatttcgttgatggcctcgatggtctggcggccggtatcgtggcgattggtggcatagcgttcgccgcctattcgtatatcatcgcccggtcttccccgagttatgcttcgttggccacgctgatcgacgtgatgatggtgggtatctgcgtgggcttcctgctgcataattggcatcccgccaaactgttcatgggtgattccggttcgatgctgcttggctatctcatcacctgcgcttcgattgtgatgaccggacgtcttgacccggcctcgattcatgccagcatctatctgccggtgttcatgccgattctgctgccggttctggtgttgttcctgcctgtgctcgacatgtgtctggcgattgtgcggcgtttggccaaaggccagtcgcccatgcatccggaccgtatgcacctgcaccatcgcatgctgaagatcgggcattcggtgcgtggcgccgtgctgatcctgtggggatgggccgcgttgatcgcattcggttcgctgacgattctgttcttcaaagcgcagcacgtggccgtgggcatggccatcgctgtggtggtgctgaccatagccacgatgtacccctatctgcggcatcgtattcccgagatccaagccgagaacctgacgttcgaatccgcacgtaaaaacgcgcagcatacagtgcctaaatcgcagtctgcagtaggggagagccgggattcgattggctctcaggcagcggattcgatgactgattcgcctgcaaattcgcgggactcgcaggtgggtgaggtgcaggacccggcagcggataagtgagcgctcacaagcgtgtgtcgtgaaggtcagcgcattttcatatagtgtttacatggctacaaaccttgatgaattaaacgcccagtcggcgtatgctccccttcccccgattttcgccaagctcggccttgcctatgacgatgtgttgctgttgccgaacgagacggatgtcattccctccgaagtggacaccagcactcatctgactcgcaagatcgtgatgaaggccccggtcctctccgctgccatggataccgtgaccgagtccgagatggccatcgccatggctcgtaacggtggcatcggtgtgttgcaccgcaatctgtccatcgacgaccaggccgctcaggtcgatgtggtcaagcgttccgagtccggtatgatcaccgacccgctgaccgtcaaccccgaggtcacgctggccgacctcgacaagctgtgcggcaagttccacatctccggtctgccggttgtggacaaggacaacaagctcgtcggcatcatcaccaaccgtgatatgcgcttcatcgcctccgaggattacgacaccctgaaggttaaggatgtcatgaccaaggagaacctggtcactggcccgtccaacatctccaaggacgacgctcaccgtctactcgctcagcacaaggttgagaagctgccgctcgttgacgaggaaggccacctgaccggcctgatcaccgtcaaggacttcgtcaagaccgagcagtacccggacgccaccaaggatgagcagggtcgtctgcgcgtggccgccggcgtcggcttcctcggcgacgcctggcagcgtgcctccgctctgatggaggctggcgtggacgtgctcgtggtcgacaccgccaacggtgaggctcgtctggcactcgacatgatttcccgcctgaagcacgactccgccttcgacggcgtgcagatcatcggcggcaacgtcggcacccgctccggtgctcaggccatgattgaggctggcgcggacgccgtcaaggtcggtattggccccggctccatctgcaccacccgtatcgttgccggtgtcggtgtcccgcagctcaccgccgtgtacgaggccgcccaggcctgccgtgccgctggcgtgccctgcatcgccgacggtggcatccactactccggtgacatcgccaaggccctcgtggccggcgcctcctccgtgatgctcggcggcacgctcgccggctgtgaggaagccccgggcgagaaggtgctcctgcacggcaagcagtacaagctgtaccgtggcatgggctccctcggcgccatggccccgcgcggcaagaagtcctactccaaggaccgctacttccaggccgacgtgacctccagcgataaggtcgtgccggaaggcgtggaaggcgaagtgccgtatcgcggcccgctgaacgccgtgctctaccagatgctcggtggcctgcaccagtccatgttctacatcggcgcccacaacatcgccgagatgccggagcgtggcaagttcatccgcatcaccgacgccggtctgcgcgaatcgcacccgcacgatatcgtgatgaccgccgaagccccgaactactccggtttccacaacaactgatcggttgatgcccgctagcttgcgctagttaggggttgattccttgtgaaaagggtctgcttatgcaggcccttttcgcgtatgtggctcgagatagcttgtatgcgctggggtatagtctgaactgttctgcataagcgatgaccagcgaagaaaagaggcacaccatggtcgacagccatgacgcggaaacgtacagcgcgaaggactcgcgcctgatttggatcgattgcgagatgaccggacttgacatcttcggcggcgacgaactcgtcgaggtgtctgtggttcccaccgactttgacctgaatgtgctggacgagggcgtggattacgtcatcaagccgtccgagaaggctgtgaaccacatgaacgatttcgtgcgccagatgcacacccgttccggcctgatcaacgagtgggagaatggcctgagcctggccgaggccgagcagaaggtcaccgaatacgtgctgcgcttcacgccggaaggcgtgcgcccgctgctggccggcaacaccatcggctccgacaagaagttcctcgaccactacatgccgggcctcatgagccacctgcattaccgcagcgtggacgtgagcaccttgaaggagctcgcccgccgctggtacccggccgtctacgagaaccgtccgccgaagaacggcggccaccgtgccctcgccgacatcatcgagtccttggacgagttgcgctactaccgtaaggccttcatggcccccgtccccggcccggatgatgccgcctccaaggccatcgccgccgacatcgtggccaccagcattctcaataagtagtccgccgtacttggctcccctccctgaggggagtctagagaggttgatatgcgccaaaccgaagccctagccattctgaacgccggcgcgaacgtgtttctgaccggtgcgcccggtgccggtaagacctatgtcttgaacgagttcatccgccaggctcgggccgacggcgccagcgtggcagtcaccgcgtccacaggcatcgcctccacgcatatcaacggccaaaccatccattcgtggagcggcgtcggcgtggccaccgccctgagcccgagtctgctcaaactcatcaaatcccggcgcaaacgcaagattcaggctacggacatcctcgtcatcgacgaggtctccatgctgcacgcatggctgttcgacatggtcgaccaagtctgccgcgaagtgcgtcgcgacccacgcccgttcggaggcatccaggtcgtgctgtccggcgacttcttccaactgccgccggtttcggtgtccgggcgcaaccgcgacctcatcgcccccacccccgaattcatcgccagtcgcgaacggtatgcccgtgccggcttgaaccccgaaggcttcatcaccgaatcgctggtatggcccgaactcaacccggtaatctgctatctgaccgaacagcaccgtcaggacaccggcgaactgctgaccgtgctcaccgacattcgcgaaggcgacgtgacccagtccgaccgtgacgtgctcgtcacccgtctgggcaaactgcccgagcccggccaggtcgccgtccacctattcccggtgaaccggcaggccgacaatctcaacgacatgcgcctgaaccagatcatgcttgagccgcacgagttccacgccgagacagcaggccctgccaacctggtcgaccgactcaagaagaacatgttggcccccgagcgactggtactcaaggaaggcgcggctgtcatggccctgcgcaacgacaccgatcgccagtacgtcaacggctcgctcggcaccgtgcgcggcttcgcgcaggagaacaagggcggctggccgatcgtggaattcgaaaacggcaacatcgtcaccatgaaacaggccacatgggaaatgatggacggcgacaccgtgctcgcctccgtctctcaagtgccactgcgttgcgcgtggggcatcaccatccacaaatcgcaaggcatgacgctcgaccgtgcggtcatggatctgaagcgcaccttcgcgccgggcatgggatatgtggcgttgtcccgcgtcgaatcgctgggcggactgtatttggctggcgtcaacgaacgcatgttcctcgtctcgcccgatgccgtggtgctcgacggcgacctgcgcgaagcctcggcctcggcttccgaccagttggccgatgaaggtgcaagcgcgttcaaacccgccgagccggacgaattcggtgccaatcccgatgatgacttcgcccaggacgcgttattctgacggtcgatatatcgaacgaccgctaatttgagtgtttctgcacttcgaggggcggattttgagttttcgggacatctacttccgtttcaaggggctgatgtccaagtagacagcgcttaaaaacggcggaatgacgttggtatgaagccgtttctatgtgcgattgagcggatgaccagcccctcgaaacgcaagtagatgtctccaagaggcggaatcggccccttgaagccgaagaagacactgcgaacttgtcttcattgaggaactgaacggctaccatggaataagaggtggtagttatggtgctatccgagatatttcgtggaaacaatgaggttcgcgaggccgcccgggccggtgtgcaaatcgatacggttagtgtggctagtgcgtcagatgcagcaagcgcggcagacggcagcggcaaaatcactggcgcaatacgtccgccagcggtggctggttcgttctaccccgctgaccgcacaacgctcaagcaactcattacccatcaattggattacagtcgagaggttctgcaacagttggagcccacgcttccagcgggagtgccaaaggctgtaatcgtgccgcatgccggttatgtgtattccggcacggcggccgcgcttgcctatgctttgctcgaacgagggcgggggagtgtgactcgcgcggtaatcgtgggaccgactcaccgtgtggccgtgcgaggcgtcgcctgttccacggcagcggcgtttgaaacgccgctgggcactgtgccggtagacattgcagccgagcgtaaggctctgggcctgtctgtcaatgagccattgcgctccggtacacatgcccgtccgggcgcgtcggctcccgcaatgatcgtcaatggcccaacccacgcacaagaacatgcggtagaagtgcagattccgttcctgcaaaccgtgctcggcccagacctcactattgtgccgttgaacgcgggcgatgccacgccacaagaggcgggtgatgtgttgcgtgctttgtggggtggcccggaaaccgtcatcgtgattagttcggatctctcgcactatcatccgcacgaagtcgcccgcgcgttggatgaccagaccattgcggacattgcggctttgcatctgccgattcaccctcgccgggcctgtggcgcatacccgatcaacggccttctggatgtgttaaaaggccgcaaggacatgaagctcttcgagctcggctgttccacttccggcgacgacggcgtggtggcgcttgccggccaacctcgccccgcaatgcgagacgccgacgagccggtagtgggatatgtctcgtttgccgcgtgggaatccaaaccagaagcagatgctccagccggtgcagatgacttaggcgaatcgggaacagcccatggtgatgtgctgctgaaactcgcccgtgccgctatccgggaacggttgcatatcgagcatccaacagccgccgattcgaccgcgtccattcttgccgcaaacccatggctgaacgagtccggtgcctgtttcgttaccctgaccgagggtggccggctacgcgggtgcatcggttcgctggccgcccaccgctcgctcggcaaggacgtgaccgagcacgcagtggatgccgccacccgcgacccacgtttcaacccggtcaccgccgcggaatacccgttgctcaacgtggaggtatccgtcttgggcgcgcccgagccgattaccgtgaactcctgtgacgccgatttgtgcggtaccggctcgaagaccgcgactctggcatcgctgcaatccggacctcagaccgacgccgtcaaacgggacggcagcaacgtcgaacgcccggtacgttcgcgcactgaacttgaggaagtattacgccccggcaaagacggtctgattctcgccgaccgtcgtggccgcagcgctacattcctgccacaagtgtgggatgagctgcccaatccgcacgatttcgtcgctcacctgctcgccaaagccggtatccgcccgtcctacgactggaacgatggcgaaatcgactgtcaacgctacgaggtgaccgcctatgccgagcactaacgcagcaaccatgtcccctcccgctggcgggaggtggcgcgaagcgacggagggtggtcaccgagaatcagagggtggccaccgggaatcgtgcggtcatacggcgtcagtcacagatgttcgtaaccccgccatagcccgctggcaaacgcaattccacgacggtaccaaccgcgctcgctgcgaactatgcccgcgtcgctgcgtcctcaagcccggccaacgcggcttttgcttcgtccgctcaaaccacgacggactcatcgtctccgacacctacggccgcagctccggcttcgccgtggacccagtggaaaagaagccgctcaaccacttccaccccggttccagcgtgctgagttttggcacggctggctgcaattccggttgccgattctgccagaattgggatattgccaaagcccgcagtttcgaccggctcggcgtggaagccagtccggagaaaatcgcgcaggtcgcggccgaccggggcatcgattcggtggcgttcacctataacgatccgatcgtgttcgccgaatatgccatcgacacggccgaagcctgccgagcgctcggcattcatcccatcgccgtgactgccggatacatgagcgccgaagcccggcccgacttctacgccgccatggacgccgccaacatcgatctcaaaggcttcaccgaagaattttattggaaagtgaccggcacgcatctggccgatgtgctcgaaaccatcgactatgcggtcaacgaggcacgcacaccagaaggcgaacacgtgtgggtggagctcaccacgctactcatccctggactcaacgatgacgacgcccagctgcatgctgaatgtacatggatacgcgagcacttgggcccggacgtgccgctgcacttttccgcattccactccagttaccgcatgatggacgtaacgcccaccccgcacgagactctgacccgcgcccgaggcatcgccctcgaagagggactcaattatgtgtacaccggcaacgtgcatgatcgtgaaggcgataccacatattgcccaaaccctgaatgcagggccaagctcgtggaacgcgattggtatcgaatcattgccaaccgtttatctgccggatacagtggcaatgggcactgccccgtatgcaggactgctatcgccggacgttggtaatctgcctcaggtcgcccgcgcgatttagcgcagatcgccaatacgcgcggcgatcgtcctcatcgatttgaggctcgcctcatagcgcgcggctgccacaatcagaatgatgccgcccaaagcaagccacacccaccggtagtggcgggagaattcggcccgccatggccacagcacagtcaccgtgctgacgataagaatcaccgtgccgtagatcaacggtgcttgcagcaaacgcacacccacaatcagcgcggccgctccggacaggccgattgttccgggaccgacataggcgattgcgcaaatggtggcatggccattggctgttgcgataccggttgtcgcggaactgccgttgggaattgcggggttgcagcagaaaattgcggggcccatgctgggccggttgatacaccggttgctccgcgggttccggctgattcccctgttgctcggtcggctgcgtcatcgtgccctcctacccttctagccatcattgttgtacgaatgagtccgaatgccaagatgaaggccggaatagtgcgaatagcaggcgggcttgtcggttcacgcgaatatcttggaacacatgacttccaatacccttcgtatgtcaaccatgttcctgcgcaccctgcgcgaggaccccgctgatgccgatgtcgattcggccaagctgctgcagcgcgccggctatatccgcaaggccgcacccggtatctggacctggctgccgctcggtctgcgcgtgctgaacaagatcgaggccatcatccgcgaggagatcaacggcatcggcgcccaggaagtgcacttcccggccctgctgccgcgcgaaccctacgaggccacccatcgctgggaggagtacggcgacaacatcttccgtttgaaggatcgccacgaggccgattacctgctggcccccacccacgaggagatgttcacccttctggtcaaggacatgtactcctcttacaaagacctgcccgtcaccctgtaccagatccagaccaagtaccgcgacgagttccgtccgcgtgccggcctgatccgtggtcgtgaattcatcatgaaggacgcctactccttcaccatcgatgaagaaggcatgcgcaaggcctactatgacgagcgcggcgcctacgagcgcatcttccagcgtctcgacctgaagtacgtacctgtgttcgccatgtccggcccgatgggcggctccgcatccgaggaattcctggctccgatgccgatcggcgaagataccttcgcactggcaccttccggcaaggcatggaatgtggaggccctgagcactccggagctgccggaaatcgatgcttccgccactcccgccgcttccaaggaagccaccccggatgccaagaccatcgataacatgattgagcgtgccaacgccgaccacccgcgtactgatggccgtgaatggcaggcttccgacatcctcaagaacgtggtgattaccgtcaagcaccctgaggatgaagagcatgacgagccgtggcgtgaagtgattgtcgtcggcgtgcccggcgaccgtacggtggatatgaagcgactggaagcccagttcgctcccgccgagcttgaggaggccactgaagaagacctgaagcagcaccccgaactggtgccaggctacatcggaccgatggtgcttggcccgcaggccgaggctgctggcgtgaagaacccggttcgctacctggtcgacgcgcacgtggtcaagggttccgcttggttcactggtgccgatgagaacgaggtcgactactacaacctggtgtacggccgtgacttcaaggccgacggcgtggtggaagccgttgaggttcgccacggcgacatgagcccggacggttccggtccgttgagcttcgagcgtggtgtggaaatcggccaggtgttccagctgggtctcaagtactccaaggcactggacctgaaggtgctcgaccagaacggcaaggccgtgccggtgtggatgggctgctatggcatcggtgtttcccgcgtgctggcctgcatcgccgaaacacaccacgacgaagccggcttggcttggccgtccgtgattgccccggctgccgtgcacgtggtggccaccggcaaggacgccgtggcgtttgaaggtgccgagaagctggtcgccgagcttgaggccaagggccttgaggttatttacgatgaccgcaagaaggtgtctccgggcgtcaagttcaaggatgccgagctgatcggcgtgccgctggtcgccgtggtcggccgcgattacgtcaacgacggcaccatcgaactgcgcgaccgcaacggcgaaaacaaggtcgccgtgcccgccgccgaagccgccgacgcgctcgccgagcgcttcgccgccctcagctgagtcccacttactcagcctcggcgttaatcgcatcaagcgccattctgctcagtcgcagaatggcgctttgttgtggataaccgaaatttatccacattcttaaaatttcaactgcgtcacagtatccacatttgccagttgcccttgtgcgcttcaaacgtcatgcctcacagtggaggtaccgctggggcgtgcaagccggcaatgaagccggagacaggctccggcggtccacatccaaacaacaggccagcaggccgaggaaaggaccgatcatggcaaatcaacaagcagcagtgaccgtcaccggctttgtggccggtgatccgacactaggcggaactgagagtttccgcgtgctgacattccgtatgggcagcacccgcagtcgactcaacccgactaccagacaatgggaggattacggaaccgcatgggtgggcgtcaaagcgttccgtgctttggccgtgaacgccgccagttcggttcgccgcggtgaccgcatcattgtggtcggctcactcatcaccgagcagtggaccaatgagcaaggcgaaccgcgcagcagaaccgttctcgaagccaccaacattgggcatgacctgaccttcggcaccacgtcgctgatcaagccacagcgtgccggtaatgggaacggaggcaatggtggcaacggtaacggcaatgccaacggtgccgccgaaggcatggatggcggaaacgggcaacgagcatcgtcaccgtacgttaggccaatgcaatatggcgcgggcggtgccgcatccggtgtgggtatggacccgtatgcgacctcgtcggaatctggccccgtcgaatttggggtcacctccgattccggccaatcaccgtcgccatcaaccgagtcagcggctgcgtccatggccgatgccgtcatgtcgcaaccggacgctggcgctaatcagccacagtccgcagcccaacaaacctacgtcgacggtttcgccgaatcttccgatcccagcgaatccgaattctgagtgccaaccatacatcatgaaaaaccgctgtgttcgcctgtaatcgaggcaagcacagcggttttctcttacataacggggattaccaaatgctcacacggtccttgggcgcgagccacatggcgtcgccttcggtcacgccaaaggcatcgtagaagaggtccacgttgctggcgatgccgttggtgcggaattcggccggagaatgcgggtcgatctgcaggtactgttcggccagctcgtcgcggttcttggtgcgccagatggaggcgtagctcaggaagaagcgctgcaggccggtgaatccgtccatttcgggggcggtatcgagcagtgccttgatggcggcgggggagccgtcttcttcggcgtcgggcttacctgccgccttgccgagcgcgaatgcatacgccttgagcgcgatgttcacgccgcccaaatcgccgatgttctcgccgatggtcagcgcgccgttcacgtgcggcgccttatcaggttcgtcagcgtacttctcggccagctgcagcggcacaaagctgttgtactgggcgatcaatgcgccggtgcgggcctcgaagttcttgcgatcctcgtcggtccaccagttgttgagcttgccgtcgccgtcgtactgcgaaccctgatcgtcgaagccatggccgatctcgtgtccgatcactgcgccgatgccgccataattcgccgcatcctcggccttcgggtcgaagaacgggggctgcagaatcgcggccgggaacacgatgacgttcatgcttggctcgtagtaggcgttcaccgtctgcggattcatcagccattcgtccttgtcgaccgccttgccgaccttggccagctggtagccggtctcgtacaggttcgcggccttggcgttctcggcgggcagcgcatccgcggagacactcagcgccgaataatcgcgccagtggttggtgtagccgatctttggcgtgaacttggagatcttctccagagccttggccttggtgtcttcgcccagccaatcggaattggtgatggacacgcggtaggcgtcaatcagattggcgaccagctcttccatgcggcgcttcgagctttcggggaagtgcaggcgcacatactcgcggcccacatcttcaccgcagacgccgttgaccaggctcaccgcgcgcttccaacgatcgcgctgcttcttggcaccggagagcaccttgccgtagaagtcaaagttggtggtgtcgaagtcgcgagacagggaggaggcgaagcccagaatcatgtgaacacgggcccacagcttaaggtcggccagatcggcctcggcccagaacgcatcaagaccagtgaggaagctcggctcgtgcacaatgacgcgcgcgaacacagacttgaaatcgatcggctgagccttggcggcctcggtggcgtcataggcggtctgccaggcgtcgatccaggaaccgagatcgaagttcttcagcgtggcggccaaatcggcgtaatcggtggggttgtaggtcttcaccgaatcgcgcgtggccacattgtcccaatgattggcggcgatcttggtttccacggcaaggaagtgtcgggccatatcaagtgcggcttcgctgggaaccgtggtgggagcattgctctcgtcatcgccggtgttggccggcagttcatcgccaccgttggattcggcggcgggcgcgtacccggcgttcaccagctgggtggcgaccatcgccacgtatgcttcgcgcacggggacgtagtggtcctcacgatagtaggcttcgtccggcaggcaaaggccggcctgctcaaggtgggcgatattgcggtccgggtcgccggggtcgccgtaaacggccaagccgaacaggtcggggccgccggctgggttgatggtgccgagcacgcgcgtgagagcggccttgtcgatggcggaatcgatgaggtcaagctcatcgcggatcgggtcaaggccggcggcctcgatggcgtcggtgttcaggaacgaatgatacagagcctgcgatttggtggccgggcagtcgtcggcgtcgaggatgtcgcgcacttggttttcggcgtcttcggcgagcttgtcgaaggagccgtagcgcgaacgatcgtcgggtaggcggtaggtgtcgatccatggaccattcacgtagcggaacaggtcattggtcggcttgatgacggaggagaacgatgccgggtcgatgcccgacgtcagcgtttcggtttcgttggtcatggccctaagcctaatcgcggcgggggagaagcgttggtgatgcagatattgcgttatgggtattgcgctgtcagtgaactagacggattgcctaactgtagtgatggttcaaattaggtaacttgcctaacatggtatgtggaacctgaatatggaccttgagttaaggagttacgatgagcaatccaaacgagggtcagtggaatggccagacgggccagcccaaccagagccagccgagccagccgaatccggcgggccaaccgggccaaccgcagtatggcgcgtatgacagcaatcatggcggccaatatcctccgcaatgtgcgcagggagcgcaagacactcagaatcagcaggcgcagaacggccagccacaaggcggaccgaaccagaacccgtactacggcccgtacgcctacaatccgaactacggcccgaacggccagccggcatggggcccggacggtcggcggtatcaggcggacggccaatcgaatagccaagcggacgggcagccgaatggttcatggggcgatcaaagtcaacccggctggcagcagaccaactggtatgtcggcaatttcagtccattccgcctgatcgaggaatggctgccggaaaaggccaagaccaagattcgcatcatttacggcgtggtgggcgtggccgccatcgccttgggcgctgcgctgttgctggtgccgaacaagacgctggctttggccgcattgttgctcggcgtgtatttcgtgatttccggcgtggtgcgcatcgtcagcgctctcgtggagccgggtctgccgggcggctggcgtgtgctggacgtgttcgtcggcattctgctgaccttcggaggcgtcgtagtcgtacgaaactacggtatgaccggtcagaccttggcattactcatcaccctgatggtcggtttcggttggattatggaaggcgtgatggctctagtcgaatcatggcgcatcccgcgctccggctgggccatcgcctatgccatcatctcgattatcgccggcttcgtggtgctgatgagcccgctgagctccgccgtattcatgattatcttcggcggatacgccatggtggtgatggggattgcttcagtgattcgcgcgttcactttcggcaagcgtcgcaagtaatctcgcgctccagacaatcaatctccggacaatcaatccaaagcgcccgtgcaggttatgtatctgccgggcgctttttctcggccttggccgttgataggctactagcggaccctaggcagaccacgggtgatgctctggcggttgaccccgggctgggctagagttgagaacaagtctcaacaaggtagaaagaacctcatgatcgaattgaagacccctcgtgaaatcgaggagatgaagccggccggccgtttcgtcggcggcattctgaaggaactgcaggagaccaccaaggtgggcaccaatctgctcgaaatcgacgagttcgtccacaagaagatcgtggaccgcaagggcgccgaatcctgctatgttgactacgctcctgacttcggcaccggcccgttcgcccactacatctgcacctccgtcaacgacgccgtgctgcacggtgtgccgtacgattacagcctgaaggacggcgacctcgtctccctcgatctcgccatctccgtggatggctgggtggccgattccgccgtcagcttcgtggtcggcaaagacccggaccccgaagacctgcgcatcatcaagtgcactgaggaagcgctcgccgccgccatcgacgtggccaagcccggcaaccgtctcggcgacatctccaacaccatcggcgacgtcgcgcgcgaatacggctacccgatcaacctcgagttcggcggtcacggcgtgggccacatcatgcacggcgacccgcacgtaccgaacgacggccgcgcccaccacggctacaagctgcgcgaaggcctggtcatcgccatcgaaccatggttcctcaagaccaccgacgagatcttccaggatccgaaggacggctggaccctgcgtgcctccgacggctcgcgcggtgcccactccgagcacaccatcgccatcaccgagaacggcccgatcatcttcaccgatcgcaccaacctctgattggcgtttggcgtatggcgggtgtctgattggcctgtgatgggcgatcggtatctcatcaaccgtctatatgttcgcggttttcccgtgaattcgagacgtaacaagccgaagtgcgtttgctttgatagcatgagcgcacttcggctttcgtgtatcgaccggtgtctgccggcggtaacacagaagacataaagtaccgaacac

SEQ ID NO: 1557 - DNA, 41644 bp, Unknown
  R221_24m  MAG No. k141_21379
aactggcaatcattgactataaagaagtagtacaaacacgctcttgagttctcaaaccaccaccacaccagcaagacaggaaaccaaccagaagaaggaacccgccgcgctgagcggcaacaggtgaataacttacacgcatgtttggattcgcgcaaatcgaggcgcgcaaaagcctcaggaatcgttgcaatcacacggttccttcggcgtgtcgcaaacagcctatttgcgctgttctgataccagaataatccgttttgcattgccgatgcgtaacaaattcatgcgttcaccggcgtgttgcaagaattcgattgcgtgaccatccaggttcaccttctcgcaaccggtcatcgcatatgcaaaaagggacttccctttacgggaagtccctttcagtagctattgaagctcgctagcctcaggccagggtgttcgggtcaaccggaacgcccgggttcatcgtggaggtgatggtcgccttggtcaggtaacggcccttcacggtggacggcttcagacgcttgacttcgtcggccacagccttgaagttctcgtccagagcggactcatcgaagctcatcttaccgatgaggaagctcaggttgccgttcttgtcgacacggaactcgatcttgccgcccttgatgtccttgacagccttggtgacatccatggtcacggtgccggtcttggggttcggcatcaggccacgcggaccgagcacacggcccagacggccgaccttgcccatcatgtccggagtagcaaccacggcgtcgaagtcgaggaagccgccctgaacctttgcgatcaggtcgtcatcaccgacgatgtcggcgccagcctcggtggcctcggtggccttcgggccacgggcgaacacgaggaccttggcggtcttaccagtgccgtgaggcaggttgacggtaccgcgcacgagctggtcggccttacgcgggtcgacgctcagacggaacacggcctcgacggtctggtcgaagttgtaggcaggcatgctcttgagcagagcgatggcctcgttggcggtgtagaggttgttgcgatcgacgcgctcagcggcttcgcggtacttcttggaacgctttaccatctgtccttctccttatcagtccgtaaccgtgatgcccatcgagcgagcggtgccctcgatgatcttcatgccggcctcgatatcgcgagcagacagatcttccatcttggtctcagcgatttcgcgaacctgcgccttggtgacagagccgaccttgtgggtcagcgggttctcggtacccttctcaatgccagcagccttcttcagcagagctgcagccggcggggtcttgagaacgaaggtgaaggaacgatcttcgtaaacggtgatctcgacagggatgacctgacccatcttgtcctgcgtctgggcattgtatgccttgcagaagtccatgatgttcacgccatgcgaacccagagccgggcccagcggcggggccgggttggccttgccagcctggatctggagcttgatcagcgccgagactttcttcttgggagccatattatggttcttctttctataacgcggttcgaatggtcgccgtcctcagatccgcttgcctgctatcacgctcggtcttgactcgttatttatccgtgcatgctgtaggcaatcggcctgtggtcggtctcctcccgcaacttatattgctgtgctgtgctagcgggtcttccctccagacacaagctttcccattatgcaaatccacccggacaacgcaaaaagcccgaccacgatggtcgggctctgcaaagtttggggttaatccagcttctgaacctggtggaagccaagctccaccggcgtatcacggccgaagatggacacgagcacggtgagcttttgggtggtgggctccacgtcggaaacaacggcggccatggtggcgaaaggcccatcggtgacggtgacctgatcaccaacggcgtaggagacttcgaccttgcgcttcttggcggcggcaggcttgtcgccagcggccttgagtgcctcggaagcgatcatcggagccatcattgccacgacttccttgcgggagagcggggctggatccttggtcgggccgacgaagccggtcacgccttcggtttcgcgaacgatacggcgagcgttctcatccggccacatacgaatcagcacatagccaggaacacgtacgcgggtgatgatcttcttacccttttcggtgtgcttctcgacttcttccatcggcacctcgacctggaagatctgatcttccatgccgaaggaggcgacgcgggactcgatgttggtcttcacgcgcttctcatagccagagtaggtgtgcagcacataccacttgccatcaagggaacgcagggacttggagaattcgtcaacggcctgctgaccggcatcggtttcctcggcctgctcggattcgttgacttcttcctcgtcctcatccagagaaacggtctcggtctgagtggaagcaacgggagcggattcagtcgcggccggagcggcggactcaacatctgcattgtcgacggatgcgtcagattctgcggaaaggtcagcaaccggttcagccggggcagctgcctcatcggcagcagcttcggaagcctcgacaacaggctcctcagccggcacggcgtcgagattctcgagattcagttcatcactcatgcgttgttattcaccttaggttgtgcggatcagccgaacacccacagcacgagcttgcccagaccgaagtccatgcccgtgacgagggccatcagcagcagcacgaagataaacacagccagagaccagaagaacagttccttggcagtaggggttacgaccttgcgaagctcgtcgatgatctgcttgataaacagaccgatacgcatgaagacattcggcttgactaccttttcgctgttgttcgtcttagccattctgtacctcgcgtcagctgcttgattattgaaaacttggcagggaaggcgggactcgaacccacaacctacggttttggagaccgttgcgctaccaattgcgccacttccctaggtgaaaatccacctcggcgtgcattccgtagagaacgcttcgccacggcgaaaccgccaagttgttatagtaacggctccggtggattatcgcaaatcgcgtgtcgcgcgcgtggcatgtgcgcggcacacgactcttctcagttagcccattccttgaatcgacgcatgccttcggctaggtcttcgtcggccagtgcgtaggagaaacgcaggtaaccgggagcaccgaaggcctcaccagggacggcggccacgtgggcctcatccaacagtgcggcggcaaaatcagcggacgtatcggacacagtgccgttgggccccagcggcttgccaagcaaagcggtgatgtccgcaaaagcgtagaacgcaccggtcggagtcgggcagttaacgccctcaatatcgttcagagcagccacgatcgcgcggcgacgtgcatcgaacgccttgcgcatctcatgcacctcgtccagcgggccagccacggcggccagagccgcacgctgggagatgttggccacattggaggtcatatgcccctgcagcttggtggcggccttggccacctcaagcggcgcgaccatccagcccacgcgccagccaggcatcgcataggtcttggccacgccgttcagcaccagcagctgcccgcggcattccggcacggcggcaccaatgtaggtggtgcgcgcgtcgtcgtagttcaggtgctcgtagatctcgtcggagataacccagatgtggtgctcgacggcccaacgaccgatcgcttccacggtttccggcttccagacggctccggtcgggttgttcggggagttgacgatgattgccttcgtacgctcggtacgggccgcttccagcgcctcaagcgagggctcgaagttcacgtcggcaccggcgaatacttcgaccggcacgccacccgccaatttgacggcttcaggatagctggtccagtacggagcggggatgatgacctcatcgccatcgttgagcaagatctggaaggattcatacacggcctgcttgccaccgttggtcaccacaacctggtcggcggacacctcgtagccggaatcgcgcagcaccttagccgcaatcgcttcgcgcagctcgggcaggcccggcgtaggcgtgtacttgtaattctttgggtcaaggcaggcatctgccgcagccttgaccacgtttgcgggggtcgggaaattcggttcacctgcgccgaagccgataacgtcaagtccggcggccttcatggccttggccttggaatcgacggcgagcgtagcgctcggtgccacagtgttgatacggtcggaaagagtctgccattgcgccatagtcatggcttccatgctaaacctacagcacgaaaaatcgccagagccgcactatggtgatgggatctgtcgtgtgacagatcccatcagtcacacaagtacaagattgtcgcgatgaaccagtgggtgggcgtactgggggccgaggaaacgcttgagttgggcggtgttacgcccgagcatctgcggaatttcttcggaatcgaagccggcgaggcctcgggccaggtgttcgccgctttcggcatcgatccagaccggatcgccggcggaaaaatcgccatgcacttcgagcgcgccggccgccagcagcgaggcacgcccgccgcgaatcgcctggccggcacccgcatcgaccacaatagtgccgcgcgggtcggcggcgaagccaatccacagacgacgcgacgaaccgcgggccttaaccggtgcgaacacggtgcccaccggatcgcccatcatcgcagggcccgcgttcgaggcgcaagtgagcaccgtggggatgccggagacggccgccacgcgcgcggcctcaagcttggtgaccatgccaccggtgccgaccttggagccggagccggaaacctggatgtcgccaaatgcatcgataacgttgggcacatattccacacggcgggagccgggctgggaaggcggtgccgtgtatagcgcgtccacgtcggtaagcaataccaaagcttccgcgcgaactaggttcgcaaccaatgcggacagacggtcgttatcgccgaatcgaatctcgttggacgccagcgaatcgttttcgttgataatggggaccacaccaaggtccagcaatcggtccagcgtgcgttccacattgcggtactgggtggcacgaatcgtatcttcggcagtgatcagaatctggccgacgcgaataccgaaacggccaaaagcagtctcgtagcgagccataagcaaaccttggccgaccgctgcggtggcctgctgagtagccacgtcggccgggcgttcgtcaaagcccagcgggccgaagccggccgcaatagcaccagaggaaaccagtactacacgcccgcccatcagtcgtatttgggcaagggcggcggccagagcgtcgagcttgtccgggtcgaggtgaccgctcggctgggtcagcgagctggagccgactttcacgacaatggttccggctgctgcgaccatgcgccgcacctcggcctgactcggagtgctcatttattcctcggtttcaccatcttcgctggactcaccgtggccgaacagactggtttcgtcatggcgatcgtcgtcaacggtcgggtcggcccagtggccggccttgcgttcggccatcatcgcatcgcgcacggcggcacgggcgtccatcatctcgtggtattgggcacgacgttcggcgttggagcggcggtgcgtgcgcgggtcctgttcctcaagacgcagatccttgcctcgggcaccgaggttggagccatcgagcatttcggcaccggcggagatggtcggatcccaatcgaattcgaccatacgggcaccgcgaccgatgcgcacctcgtcaccagggtgggcacccttgcggcgcagctcgtcttccacgcccagcttggccaagcggtcggccagatagcccacggcctcgtcgttgtcgaagttggtctgcatgacccagcgctccggcttgacgccacgcacctcgaagaacacttcgccattgccgagttcgcggcgctcgaccgtgaactcaagcgcactgccgccctcgtcagcgcgacgcggacggcggcccttggtctccaatggcttgatgaccacgcgcgtctcctcttcggcctgctcgcggttggccacttcctcacgcatctcatgcaccagcgcagacaacgcgaagttgagctccttcagcccctcatgagaggcggtggagatctcaaagaccttcagcccgagtttctcgaactccggacgcacgaactcggccaattccttggcctcgggcacatcgatcttgttcagaatcacgatgcgcgggcgttcgggaatcgggatggcgcccaatggcagttcgagcttgtcggcgtagagtgccaactcgttttccagcgcgtggtagtcggacatcgggtcgcggtccggttcaagcgtggcgcaatcaatcacgtgggcgatgatttcggtacgttcgatgtggcgcaggaactccagtcccaggcccttgccttcagaggcgccaggaatcaggcccggcacgtcggcgatggtgtatcgagagtcgccggcgatgacgacgccgagattcggcaccagcgtggtgaatgggtagtcggcgatcttcggcttggcggaactcatcgccgcaatcagggacgactttccggccgaggggaaaccgaccaacgccacgtcggcgatggacttcagttccagaatcacgtcgcgttcctcgccgagttcgccgagcagggcgaagccgggggcgcgtcgggtcttgttggccagggcgatgttgccgaggccgccggcaccgccctgggcgacgacgcagcggtcgccctcgtggcgcaagtcggcgagctgtgcgccgggatgcttggatttgccctgttcgccgcgcgcctcaaagacgacggtgccgcagggcacgggcagaatcaggtcctcgcccttggagccgtccttattgtcgcccaaacccatggtgccgctgccggcgacacgatgcggcatgaaacgatagtcgagcaggctggtggcgttacggtcggccacgaacaccacggaaccaccgtcgccgccattgccgccgttcggaccggccaacggcttgtatttctcacgacggatgccggccgaaccgttgcccccatcgccgcccttgacatggacggttactcgatccacaaaatcactcatattgattaccttacaaaaaagccgcgtccttacgggcgcggcttgaaaaagcttgacgctatatcgctcaggcgatgacgtcgacaaccttgcggtcgcgacgcacaccgaacttcacggagccatcggtgagggcgaacagcgtgtggtccttgcccatgccgacgttgtggcccgggtggaagttggtgccacgctggcgaacgatgatgttgccggccacgacggcttcgccgccgaacttcttcacgccgaggtattgcgggttagaatcgcgaccgttgcgagagctggacgcacccttcttatgtgccatgattcatggtcctttctataactcaggcaatcgccgtgatcttgacgatagtcagcttctggcgatgacccttacggcgagcaacaccagtcttgttcttgtacttctggatgtcaatcttcgggcccttggcttcatcgttcacaacctcagccttgacggacaccttggccagatcggcggcggcgagggtgaccttgtcaccatcgacaacgagggagaccgggaattccacggtatcgcccttcttggcgtcgagacggttcacgaggatgacgtcgccaacctcgaccttttcctgatggccaccggccttcacaatcgcgtacattatcgttccttttatgttttggaaagctaccttgcctaacacgcaccgagcctgcggtcagacaccgagtttcaaatctacaccaccatgcggactaaatcaaatgatttttgcccgcgtgtcaagcacgacacacctgttactcttccgccgtattgttggcggcgacggcagcggcggcaatctgagccagtttggctttgacgtcggcgctggaaccagccggttcgggagcgggagcggtgccgcgaccgtgcttgttggttttgacgaacgggtcgccaccgcgaagcgcgtagggatcgtcgtagtcggccgaaacggtcggctgatcatgcaggatgaaaccacggcccttgcaggtcgggcattcctcggagaacgcctcgaccagaccctggccgatgcgcttgcgggtcatctgcaccaaaccgagcgaggtgacttcggccacctgatgcttggtgcggtcgcgtgccaggcattcgaccaagcggcgcagcaccagatcgcggttggcgggcatgaccatatccacatagtcgatcatcaccatgccgccgatatcgcgcaggcgcagctggcgggcgatctcttcagacgcctccaagttgcagcgcgtcaccgtttcttccaaggacttgcccttgccgataaagcggccggtgttcacgtcgatggtggtcatggcctcggtgcgatcgatgacaatcgagccgccggacggcaggtagacctgacgttccatgcccttacgcagctgggagtcgatggaccatttgtcgaacacgtccttgccttcgtgctcggccgggtcccacttctccagcttgtccttcaggtcgggggccatggtgtcaaggtattcctcgatacggtcgtagaccttgtcaccttccacgatgagcttgctaaagtcgtcgttgaagatgtcgcgcaccacgcggatggccacgtcgggctcgccctgcaggagtttcgggcgcttgccgtgccagaattcctcgcgcttggcgttgatgcgctcccactggcggaccagtgattcgagatccttgacgatggcgtcttcggatgcgccttcggccgcggtgcggataatcacgcccatgtctttcggggcgatcttggagacgatgttcttcagacggctgcgttcgcgctccgaaagcttgcggctcacgccggtcatgccaccggagggcacgagcaccaggaagcggccggcaagcgtgacctgagaggtcaggcgggcacccttgtggccgatcgggtccttagtgacctgcacgagcaccgggtcgccggacttgaacgccagctcgatgcggcgcggctgaccttcgagacgagcggcatcccagttgacctcgccggcgtagagcacaccgttgcgggactggccgatatccacgaatgcggcctccatgctgggcagcacgttctgcacgcggccaagatagatgttgccgacggtctgtacttcctgaatgtcggagacgtaatgctcgaccagaacattgtcttccaccacggaaatctgggtgtggtgttccttctcgcgcaccaccatcaggcggtccacgttctcgcggcgtgcaaggaagtcctgttccataagctggctctggcggctgcgctcacggcggttgtcacggcggcgctgcttcttggcctcgagacgagtggagccttccacatcggtgatttcgtcgatgtactgctgcttgcgggagcggcggaccagcggctgttcgctgttctgactctggtcgtcggtgccctcgccgttcttgccgccacgacggcggcggcgacggcgagtgacggtctgctcctcatcgtcctcatcgcgatcacggtcatgatcatcgcgatcgtcacgacggcgggaacgcgtatcctcggcatcgttctcggcggtatcgtgctcgccgttggcaccggtttcgccgcgtgagccacgacggcggcgacggcgcgaacgggtgcgggtgacgtcggattcctcgtcgccctcctcctcggcaatcggcgagtaggcgatatcgtccagctcgaggtcttcctcaatctgctcgacttcggcggctgcacggcgctcctgggcgttcagacggcgggagcggcgcggacggcgggagtccgaggtgtcgtcggcgtcgaaatcgtcgtgatcggcgttggtatcgccggacgcggcgtcacgggaagcgtcacggtcggcggaggcgcggccgcggtcgtcgcgatcgtcgcggcgacggctgcgcggctgggcatcgtcatcgtcgtggctgcgcgagcggcgggagcgacgagacgggcgttcgtcggcgtcaacatcgtcatcacgagtgtcagcggtatcgtgcgcatccacggcggcgggcagcaccggttcctggaacagcagggacgtcatcggtttgccacggcgcacggtctcgtggccagagggcagggattcgaccgcgtcgaacaggcgctcatccggggtgtcctcgtgcgtatccgcaactgcacggcgagagcgggagcgaaccgtccgatcctcgtcatcatcatccatatccatagatgcacggcgagagcggcggcgaaccgggcggtcctcgtcgtaatcgttatcgtccacaaccgaacggcggcgggaacgtggggcgtcatcgtcatcgaaatcatcgacactgacagtgcggcgcgaacgacgaggacgatcatcctcgctatacgagtcgaccactgtggaagcggcgcggcgcgtacggcggcgggttggacgttcggcggaatccttggaatcgctggattcatcggaatcgctggaatcggatgacttggaatcggccgcggtgctggcattgggaagcgcgggggcttcgaacagcggggtgcgttcctgcacttgcagttccagggaggcgccggcagcaccggtgccgcggaccacgcggcggccgccacgacgacggcgaacaggttcgacgggctgggaggcggcggcaggcgcagcgttcacggctgcagccgaatcggcattggatacggttgaattatcggttccgtcgttgacgaaaccttcacggttgtcagtgggcacaatgctcctcgcggcgcgctgcatcacgacgcctatttccaggcctatacgcttgactcacaccacgctctcaccgtggccgcgcgaaaacgcgccgcgtaaaggcaacttcgtctcaagtctgtcctgcgggtggcggacaccggcgcttgcgttgtctcattctcgagagccgcaaggggatcgacgccatctcgcacgctgatggttatgcagaaccaccatcctttagtatgccacatattttgtgcgggcgtggcccggcgaggctgacgttctctcggctcccctccctgcggtgacagctcccctcagagaggggagctagagaggtgtcagaccagccagtcggtaagaattgcggtcatggcggccaggtcggattcgggcacctgctcgtcgtgcttgtgcgccagcagcgggtcgccggcaccgaggttgacggccgggatgccgagctgggagaagcgtgccacgtcggtccagccgagcttggccaacgggtcgcggccggtgcgctccttgaccagtcggaccagatcttgggcgagcggggcgttcaggcccgggcgcgcggaggggctttcgtccttcatttcgatgccgtagccctcgaacacgccgccagtggccacatgctcgccattgccgagttcggcaccggcatccgcgcccatcatcagagccttggcctcggccagcgacttgtccggggcgaagcggtagttgacgtgtacgcggcattcatccggaatgacgttcgtgcctttgccgccggagatcagcgtggcgttgaggccctcgcgatagtcgagcccgtccacgttcacggtggccggctcgtaagcgttgagtcggctcaggatgtcggccgccttgtggatggcgttctcccccatccacgcgcgggcggagtgcgctgccacgccgtgggtcacgacgtcgaaacgaatcgtgccgttgcaaccgccctcgatgccgctgttggtgggctcgccgatgatggcgaaatcgccggtgatccaatcgggatgggcctcgacgactttgcgaaggccgttcttttcggcgacgacttcctcatggtcgtagaagacgtaggtgaggtcgactttcggggtggtttccggcgtgcggccgtcgagcgtggcggcgaggtagagcatcaccgcgtcggaggccttcatatcggtggcaccgcggccccacagcacgcggtcttcgggatgagcgtgggcgatttcttcgcgaatcagcgaatcgccgggctccagccacttcggtgggaaattgtcgatgaccggcacagtatcgaggtgcccggccaagatcacacggttcggctcgccgaagtcggtgctggccaccactgtgtcgccgtgacggcggacggtcaggtgctcttgctcgttaaggaaggcctcgacctcgtcggtgagggggccctcgtggtcggacacggagaagttctccatgatctgggtgagcaggctgttcagctgctcggcagtggatgcggtgcggttcaattcaagcgtcatgtgaacagcgtaccgcgtgggcggcgggcccagcacacccactacatgagattttgcggccgaatacatttttatgtgccacactggggtggcgaaagggaggattatgtcaggtctaatcagcgccatgcaaggtttctgcgttatcggcatcgtgattgcggtgggatatgtcgccgcacgaatgcgaatcggcgggccgtccgctcagatagtgctcaaccggttctccttcttcgtatcgagcccgtgcctgatgttcgccatcctctccaaggaaccgatcttcgacatcttccatccctcgattatcgtggcgttcttctccgccgtgctggtaggcgtggtgttcctggtgctcaaccgcatgttcttccacctgaacgccccggacgccaccatcggcgccctgaattcgctgtacctcaattccaataacatcggcctgccaatcgccacctacattctgggcaatccggctctggtggcaccgattctggtcatgcagcaggccatcttcacaccggtgggcctgacagtgctggacgtgaccaccaagggcaaggtctccatcaaggaaatcgccaagcagccactgcatcaaccgctgcttatcggttcgctgctgggcattgtggtctctgcgatttccgctaaaagcggctggttcccagtgccgaaattcattttcgacccgatcgacatgatcggcgattcagcggtgccaatgatcctgatggcgttcggcatgtccctacacggcaccaagccgctgcagcagaagggcgatcgcccggccatcttcacggtcgcggtcctcaagaacatcatcatgccaatcatcgcgttcctgctcgcctatttcgtgatgggcttccgcggctccgagctgtacgcctgcgtggtactcgccgctctgcccaccggccagaacgtgtacaactacgcggcccgctacaacgtgggcctcaccttcgcgcgcgacggcattctgatgagcaccatgaccagcccggtgtttatcgcgatcatcgcggcgctgctgagctgagccggcaactgtaatcaccgtaaaaaaacttccgcgaaatccaccgtaggattccgcggaagcctgagatatacactacttgagaatcgccttaatcgcctcatactgctgagcagtgagttgcaccgctggctcacggatcagggtggaaatgttcagtcccttggccttgaccgcacccttgatggcggagatgaacaggtcggtctgatcgtacagcgccatcaggtggctgatgcgttcggcggcctcaattgcggtgccatagtcgccggcctcatatgcacggtgcagcgtaacgaaggtctccggctccacattggtcatgccgcagatcacgccatcaccgccggagacgcggttgacgagatagtactcgtcgaaaccggagaacaccgcaaaccgtggattcacggccttgaccgcgcgaatcaccttgcgggtgtggctgattgtgtcgaccgtgtccttgatgccgacgatgttcgggtgcgcggcggcaagctcggccacaagctccggggtcaagtcgctgccggtgcgcggtgggaaattatagaggatcaccggaagattcgtcgcttcagcgaccgcgccgaagtacgccttcgcgcctcccgcagtagggccgaagtaatacggcgaaacgaccacgagcgcatccactccacttgcttcgactgcccgcgcgaagtcgatcacattgttcaagttggtatcgcccacgcccgcgaacaccttgatgcgcccggcgacatgcttggccacgaagtcgaccgcctgcttcttgacgtccagagggaaggcatagaactcgccgatgctgccaaacaccagcacgccgttgataccggcctcgatcagatgatcgagatgctgcccccaacgttcatagtcgatgtcaccgtcgtccttggtgatggtgatggatgggcagatgatgcctgagaattcggcgctgcttgtcatgattgttcctttcgtcacggaataggggtgccgcacaagcggcaccgggtttgcggcctctcccccagtcgtcctgcggacgatagccccctcatcagagggggcttgggtttagtcgatgttgtaagcgcggcgggcgttgttttcgaagaagtcctcgtcctcgccgaacgtgtccagcatgagttggaagtgcgtggcaaaggtcgagttgagttccacgaccggccagttggagctgtacagcaccttcttcgggccgaatgtgtcccgcacgtatttcacgatgtccgggtccaccgggttgtcgccggaaaccttgatatacgaattcggcagttcggccaacgctgcgagtgcggcgcacgattcctcatcaagcccgggcacgttgccgagatgatcgatgatgaccgtcacttcgggaacctgcgagaacgccttggccatgtcgcccagttccgggccacggttgcacagctcgaatggcaatcccttggcggccatcgcgcgtagaccggcgatgaattcgggttcgagcgcacggccccgcggctcggaatccacatgcagcggttccctgatgccatcggcgttgatcgggacacgcatccaagggcttacccgtccttgcaacatgcgcttcaagatcagaggacttgcattctcgtacagcagccggtcctcgagctcatggtcggccgcgtcgacctccacgtatacgccgccgaggaaattcacgccaaacttggcgtactgtgcggctaggtcttcaatcgtgtacttgtgttgcagcgagggcaatcctgccagccatggcagatcctgcgcatccggatcccagatatggaagtgggaatcgattacgttgagtgtcatgtcaggcctccttcagaccgatcttggaaccccagaatgcgtaccatgccacgaacaggaagcccgggaccatcaccaggatggcgatctcgatgcctgccgcatcctgaatcacaccgagcagcagcggaatcaacgcggcgcccacaatgctcatcaccaaagccgaggaaccggtcttcgccgcggaacccttgatacctttcagcgtcagggagaatatggtcgggtatccgatggaaatgaacagatacgccaccatgaacgcgatgacggagaccttgcccaggccaaggaataccacgaacatcagcacggctgaaatggtcatgtatacgccaagaatcttcgagggatcgaatttggccatcaatggggtggtggcgaagcgtccgatggtgaacagcagggaaagcacggaaagcatcatcgccgcggtgccggctgtgatgcccgcgccccagtgcttgagcgcgtaggcggagaagaccgccatgccggccacttgcaggccgatgaaaatgaactcggcaagcacgcccaatgcgaagtgcgggcgcttgagcaggccgaagaaggagctgttctcggaggaggcgccgcccgcggcctcctcttcgtctcccggaggcgtgggcagcttgaacagcgcgaacacggcgagcaccacgaccagcacaacgccgatcacaatgtatatcgtgcgggtatcattcaggaactgcgccttagcggcgtcgaagccggactcgcctgatgcgacggtggtgccgagaatctggccaagaatcagcgggccaacgatgttgccgacgccgttgaaactctgcgccatgttgatacggaacgattcgcccttttcatcacccagcttggtgatatacggattgcagttggtctccagcgatgccgcgccgagcgcgataacgaacatggcgaacaggaacaggccgtagctggccatgttggtggcagggatcaccatgaacgcgcccagagcgaacaggaacagaccggagatgacgccgcccttataaccgaaacgcttggcgatcaagccggctggaatggccatgacgaagtatgcgccgtaataggccacctgcagtaatgacgcttcggcgctgctgagttctatgtagtttgcgaacggcgagttcaacgcgttcacgaggttcatggtcaaaccccagataaagaacagtgaggtcaccagcacaatggcgatggtcgccttggaaccggttgtgtttttggatgtcatcattgactccttagtgatacgagtttccccgatattgcctagcgagaagtggaccaccctgggccatgttggtaaacggatgacccagggcgcgggtgatacgggcggcatacgcggatacggcgtacggatggagcaatgatcaaagctccggaattgccgcgcgaatattcgggaaagggctgcttgtcagctcagcgcacggtcaaggtggacatagccgccatcgacgtacacccactgaccggtggtgtggctggagcggtcggagagcaggaatgccgcttcattaccgatctcttcggtggtggtcatacgatgttccagcggaatcttgtcggtgatcaccgacaggcgcgcctgctgggccgcttcatcgccaaaggtcttgatccaatcggcatagagcggggtccagcactcggagacgactatggcgttgacacgcacgctatcgtgcaccaatgcggcggcccattcacgggtcaggcccaggatcgcgcccttggcggccgcataggcgctggtcttgccttggccggtaagcgcggtcttggacgagatgttcacgatggatccgcggctttccttgagatacggcacggccgcgtggaccagctcgtaatagtgagtcaggttgccgtgaagcgattcctcgaactcacgccaagtagtggtctcgagatccttgttgtcgttctttccggcgttattcacaatgccatcgatatggccgtacttcttgtatgttgcttcgacgacgccggcgatcttgtcggtgtcgttgaggtcaagcaagtgcacatcataggtggtggtgtactgctcgatatccttcttgaactcgtcgagagcgctgtcgggtcgattaatcaccaccgggatggccccctcctgggccagttgcagcgtgatgcctttgccgatgcctttgaaaccgccggtgatgatgatgactttgccttcgagatgcagatccatgggaactccttcgtccatccttattctgcgtttcatgggtgttccatgtcacgcccggccggggcttcggcaccccagccggagtggttgtgtgttgttgtgttgagttgtgttgttcagttatgaattttcagttgcggtcagccgcgatacaggtacttctcggccgtctccagcgtcatttcggtaccgttgcccggagcggtcggagcgacgtagttgccgtccttgatctcggtcgggtggacgaaatgttcgtgctggttatcgacgtattcgatcatgcggccgtccatcgtgccggacacggccacgtaatcgaacatcgcgaagtggcatacggcctcgcacaggcccacgccgccggcgtgcgggcagacgggcttgttgaacttcttcgcgagcaggtattcgagcacgatctcctgcggaccggccacgcgggtggcgtcgatctgcatgatgccgaaggcgttggcctgcaggtactgcttgtacagaatgcggctctgcatctgttcgccggtggcgaccttgatggggttgatggcgcgggcgatggtggcgtggccgatcacgtcgtcggggctggtcggctcctccacccaagccagatcgaagtcgtggaacttgttgatccagtcgatggcggtgggaacatcccacacctggttggcgtccacggcaagacgcacgtcggggccgatggcttcgcgggccttggccaggcgacgcagatcgtcgtcgatgttctggccgaccttgagcttgatctgcttgaatcccttgacctgggtctcctccttggcgagggccaccatcttctcatccgagtagccgagccaaccgggagcggttgaatagccggggtaaccgacctccagcagatgcttgatacgctcggccttgcccttctgaccctctttgagaatcgcaacggcttcctcagggcgcagggcgtcggtcatgtagcggaaatcgagcgtggagaccagctcctccggctccatctcgcccagcagcagccacaacggcttgcccgcacgcttggccttgatatcccacaacgcggagagcaccgcgccgatggccatatgctccacgcccttttcagggccaagccaacgcagctgggaatcatgcacgaacaggtcccatgcaatgcgcatgttgtcgagcagttcctcggtgttgcgcccaatcagcacctgcgacatcgattcgatggccttgcaaaccacgtcgttgccacggccgatggtgaacacgaatcccacacccgtgatgccgtcgtcggcgctggtggaaatctccacgtacgcagaggaataatccggatcggggttcattgcatccgagccggaaagcgtcgttgaagtggggaatcggaagtcatacgtcttgactttggtgatggtactcatgtgttcgggctccttcgcctggtgtgaaccaacggctatatcgtacgtccgaataaagaaatttgcaagcctatttgcgaaaatttttattcaaggccggacaaagggcaagaaaacacggaattgttacggcacaatgcgtcataatggtgggaacaacgacgaaatcgtctcagtaattgaacggcgaatatccaagagggaagcaccgatggttaacgatacatccacccacaagctcaaggtcggcgagctcgcaaaaatcgccggcgtatccgcatccactgtttccaaagtcatcaatggcaggtcaggcatttccgacgagacgcggagacaagtcgagcaaatcctcaaagatcacggttactcaaggcctctggtcaacaccaaactctcccccaccatagagctcgtcgtcgaatacattgagcacaacggcacgatggaactcatcaaatacgcctcatactgggcgcagcaggcgggcctcgccatcacggtcacccagaccaaccatggcgatgccacggaagactgtttccgcggcatcatcgatagaaatccccaaggtgtgattatgcagcagatgggcggtctgaccactcaagcgaagtctttgttgaaatcgcgcagtattcccgtggtcatcatcgacccaatcgataccgtcgattcggatgtgatgagcgtgtccatcgataactggaccgcaggataccaggccggcaaacacctgctgtcgctcggccatcgacgcatcgccgttatccgggggccggcgaacctacagaccagcatcgcgcgctatagcggattcaccgccgctctgcaacaggccggggtggatctgccggagtcctatatcgaacagggcgactacttccccgccgaaacaagctatgaagcagcctgccggctgctggaactcaccgaccgacccaccgcgattttttgctgcaacgacttatctgcagtaagcacgtatcgtgccgcacgagagcataagatcgcgttgccaaagcaattgtccgtcatggggttcgacgacattttccccgccggccaactcatgccctccctgaccagcgtgcatcagccgttcagcgaaatagcccaacgcgccgtgcagatgatcatcgacagccgcaagggcaatcagggtgatatgcacgtcatcctccccaccagtgtcgtcacccgggaaagtaccgtaccgcctcagtcatcggcccgataatcggccagattcaagctggcggccacccgattggacgcgaacgcacccaccgaaaccagcgcatagcacagcacaagcccgccgaagaagctggccagcgtggccggttcggtcatcgaagcggcgaacagaggggccataagcagcatggaacagccgccggccacgatcaccacgatgttgagcggggtgagtacctcgatgaatcgcgcacggttcaaggtcttgacatcagtgccctccaacaccagcatgcgatattcgccggcctgatcgtacacgctgccggcctgcatcacaccggagctgaccgcggcaagcacagcggcgaacactagcgtcaggatgccgccggtgccgatgtcgcgaatgaacacggtggacgggtcgttggcgtcaccgaccacggcggccgagccaaagaatccgcagatcgaggtgatgccggcgatgaacacggccagtgcaatgccggacacattgcgccaggcgcgcttcggattgtcgagaatacggcgcatggcaatcatcgtggccgcgtccttgggccgtttggccttggctttggcgcgggcggtgaccacccaggagcccacgaggttcaccagcgcgaagcacagcagcatgaaaccgatgatcacgccgtacatcactacttcaccggcctgagccagcaccatcggattcttgaacagaagaacggcaatcaccatgatgacggcgaacaccaccacacgccagccggacggcagcgtagtcgcaacgcgtgaagtgacgccgagtggcgtgatggccacgcgccgaagcgtgaccagcgaagagatcagcgccaacacggtcacgccaacaagcgtaatgatcaaggcaatcggccccacccacagttgctcgaacgtaaacgtctgattctggaaatgcagcaacatgattagggggatcaacacgcagtaccccgcgatgccaatcagcgcccccaccaaggcctgcccagccgcatcaagcgccgtaaggcgaataacttgccccgtggtcgcgcctgccaagcgcagggatgcgagccgagcgtcacgacgggacgcagccaatcgcgcggcggaaccggcaagcgccacgaacggcacaatcagcagcaggcaggcaaagaacgccagcacgacgtatgccgtggcgtattgatccaggctgtggggattggcgatacgctgcttccagatttccgctgttccgggtttgcaagcgtcgagattgattgcgcatccaatggtgtggtcggcggaggcgcgccacatgaacccatgcacgccgcccaaaacggtgagaaagatagtggtggctgcggcaaaagcaatgatggccaacaccgaagtatgacccgcactgccacgcgagccggggcgatggaacaatcgccacaatgcgaaagcgctcatcgtacgcctcccagctggccgtcctgcatggtcacggtgcgcgagcagaacgaagcgacgttggggtcgtgggtgacgacgaccacggcggaaccgttgtcccgcgcggcggccatgagaatgcccatgacctcgcggccggtggcttggtcaagtgcgccggtcggctcgtcggcgaagaccacggcaggtttgacggcgagcgcacgggcgatggcgatgcgctgcatctggccgccgctcatctcccccggtcggtgcatggcgagtgcgcgcaaacccatacgttccagccacagaatcgccgtgtccgtggcggtgcggtagggcacgccgtcgagcatcattggcagggcgatgttttcgacggccggaagttcgggcagcagttggccggattggaagacgaatccgaagacattacgacgcagtttggtgcggtcggcgtcgctcatatggctcaggtcagtgccacggaagacgaccgtgccggcagtcggcttgataatgccggccaacgcgtgaagcaaagtggatttgccggagccggacgggcccatcacggctactgtttcaccctcccggagcgtgaagttcacgtggttcagggcgagcgtgtgcatggtcggcatggcgaagccgggctgggctggctgggatggctggccggcctgaatggcacccggtccggccgcagcgggattcgccgacgcataaccggctcccgtgccggctggcatcacgccggtgacgccgtgccctgcctgtgcgcgggccatgctggcggtgtagtccatgaccaggtcgtgcgcctcgatgaccggggcccactgctgggtgtgcgatgccggctgctggaactgttggggttgctgagactgctgaggctgagccgccggtcccgacgccggctgaggctgctgcaattgcgatgctgctgtgttcatactcccgagcgtacggagcgaacgcccagccgaccatcgggctgcggtatgaacctttctggatcaccggcccgctcctcatccgcaaggattagagatacgcagtcgacgcgacaatccatatatcagatgttcattgctcgagaagacgaggaacagtggaagaccggttcggaagctggaaccacaacagaccaagcaaaggagcccacatggccatcgcaatcgacatcccgcacacaccaatcgtgtccgtacaaaagtcgtacaacaggagtacgactacagagaataacaagaacagtcgttttgaaatgagactcacctaagagcaacgttccagaatcgaccaagcggccgagtccaaaggcatgacttcgttgcaatgggcattatcgaatctgctcgccgccgcagatcgggacatccatgaagctcatatcattcggcccaacagtaaagcgtggaatgatttcaccgcagcattaaacgaacctatgggcctacgtctgaatgaattgttggagcgtgatcccatatggacgtgaccaacttcactgagcctcggcacctgactgcgagcgaggatatttctggtttcgactgcggcctgccattggtcaatgattggctggtttccacacactaagtgcatacagcattgagcattcggaagctcccggttggctgaggcgaaatagtccgaaccccattcccgtaattttgctaggcatgatgggcgtggatatcagatttcaaaccatgcacgtcgacagtcagttactccgagatgcggtatttcattctctgaacgatatgattttcggcatatccctgaatcatctagaatgtttactccgctcaatgtccacaatcaccaatgattaatggctggagaccgctatttgacgccgaccattgtctgaatcgcattcagacacaacactcctcattgcgcgcagaccagcgagttccgccgagtcggcgatgtgtctcttcggcggttgattttaggattttccgcatgcgacagctgaccacaccgctaaaaatgccattttcgcactgacttggggcggaggtcgtggcgaaacgcacgagggaacgtgtgtcatccgatatggtcatgcccgccagacattgaagcgtcctgtctatgcgcggttgatgtcccggtggcggggtcaatcgatcgacatacgaaccgggacagattcggctgtcccggttcgggatttcggcctcttttggcgaaccgggacaggcccttccatgaacacccgatatatgcaaatccaaaaccccggaattccgccattccccgacggcgaccatcgcacgatagggcgtcaggtgaatgagattctgtcccggttgcccaaaaagaggcaaaatgacgaaccgggacagcgaaatctgtcccggttgtcccaaaagagacgaaatgacgaaccgggacagcagaatccgtcccggtccacacgcggttcacacgcattacccaagtaaactcatcggcaaaacattggcccagccaacaccactaccgatgtccagcacaggccagctcgtccaggcgggcggcgaagcggggccagtcggtcttcatggcggtgaggagcttgcggttgggcacgtcgtcaatcgggacccagcagatttccatgctttcgtcgtcgtttgccttgggctcgacggtgtggccgggcttttcaaaggcaaacacggtggtgtaggcccacgggccgtggtcctcgcggtaggagccgaccacctcgatgtcttcgggggtgatgttggcttcctcatagctttcgcgcagcgcgccttcgatggacgattcgccgtccgcagtggcaccgccggggataccccacgtgccaccttcggcgctccacgcggcacggtgctgcatgaccacgtgagtcaccttgccgctcgccgggtcgcggcgagccagcagaatgccggacgcaccgttggtgccccaatgcttgcggccgcaggcgcagtccacccagccatcgccgggctgatgcacgttttcgaccggcggcagaatgccagcgtgctggttgcctgaggccttgctttccggctccagttcgccacggccgacattccacaggtcggtccacgtgatgcccagttcgccggccagatgccgggccaacggcaggctgaggccgatgatgccgtgcggatcgccctcgatgctgtcgatgaacgcgccgccgaagccttccagcgtgaacgatccggcgacttccagcggctcgccggtgacgatgtaccgttcgatgtcgtcatcggtgaattcgccgaaatggactttggcgtggcttgcgccgcgcacggtacgtccggtcgcgaaatcgatcaggcagtggccggtccacagttcgccggtcgcgccgctcatgcgcttcagtcgttctcgggccacggattcgctgtgcggcttgccgtagcattcgccgtccaggaggaacatcgaatcacagccgagaatcagcgggccgaccgtcgcctcggtcagtcccggctgtccggcaatagcggtggcgatgggttcggtgatggtcggcatgtcgatgccggagaagtcgcgcgtggtggcgatttccgccttggaatagtcgatgggcttgccggcggcggctttgcgcaggtcttcgacggcagcttcgcgttccgaatccttgatctccttggccttgagcgggtaggcgatcacgcggtcaccggtcgcggcggcggcagtatcggccacatcacgatacgcacggtgaacggcctcggccttggccacggccagaatcatcacgcgctgcttgatgctcagatcatcgacggtgacgccttcctcacgggcggccgcttccagcgcagcaggctcatccacgtgcgagacgcgaattgtggggcagatacccgccgaatacagcacgtcacggcgaggcttggacttggaagcaagaattagcggaatggacatgacttaagtccttatgctcccgctggcgggagctgtcgaacgaagtgagactgagggtggtctctgccggtatggcggaccactctcagaccgcctgcggcggccagctcccgccagcgggagccttctcctcgacttagcgacgctcgatttcgacgccggcggtgttgatgggcaggtgaagcacacgccagtggacggaagcaagctgctccgatgcgatctggtcgatggcttcgcgggcgttgccgtagtgcagcacgagcacgcaggggccggcaccggagacggcggcggcatagcccttggagcggaagagcgcaatgagctcggtggacggcggcatcagggtaccgcgatacggctggtgcaacttgtcctgcgtggcggtgaacagtagcgcgttggactgggcctgagcggccgcaagctcgtcagcgaacggcgattcacgggttccgccagcgcaagcgcacgtatcggcatcctgagccggggcagcggcgacgccggacttgccctgctgggcggcctgggccagcaccatgggattcatcgcagcgggcagcagacccacgcgagacacgttgtagacggcgtccttgtatggcagttccctaggcagcgcctgacgggccttctcagtggacagctcatagtcgggcacgaacacggcggcggtgatggacgggtccaccgggtagttgacggcgtggaatccgccgtgcagcggttcaccaccaggaacggcgaccgagccgacgccttccgcggtttcgaagtcccaagagacggtcaggccaccgaacacagccggggccacattgtccgggtggccttcgatctgggcggccatatcgaagatggccggacggttgaggtcaccggtctgggcgaaggccgcggcggcggcgatgccggccacgatggcctcggcggaagagcccatgccacgagcctgagggatgttgttggtcgcttccagcgtgaagccgagtcggccgaggccgaacgtggcacaggcacggcggaaggtggagaccacgaggtgggtttcgtcgcgtgggagggtgtcggcaccctcgccgtggatgatcacgtgggcaatgccgtcgttcgggtcgtcgttgagcgtgaaagtgagctcgtcatggtagtcgagcgccagacccacggtatcgaagccggagccgaggttggcggacgtggcgggcacgcgcacgtgaacgctattgcagattgggttcatggttgttccttaaaaaggagctccccttgtcaggggagcttgggtattcagctttcaactcacgggcagccgttcgaccgcctcatcagagggagcctagacggtgtcagtccagcacgcgcaggatggacgggtcaccggtgacgaagtcgagcgcctgcacggccttgacggtgttacgcagggtttcctcgtcggtcaggtgggtcacgatgcgcaactgctgaatctcgccgtcgtagccggggtcggtcatggtgggcttcagatcctggttcacaccgttgatggagacaccgttcttggcgaactcggcggcgatggcggccagcacgcccggcttgtcgtggatcaggaagcgcacggcgaatgcagccttggaggcggtaatcggagccttcggcagattcttgtacagcgggatggacgggccggtgcagccagcagcaatgtggcgggcttcggtcaccacgtcgcccacgacggcggaggcggtcggagcgccgccggcgccacggccgtagaacatgaggtcgtcggcggcctcggccttgacgaacacggcgttgaaggagccgtgcacggaggccagcgggtggttctcgtcgatcagggccgggtagacgcgggcggagacgccggcctcgccgttctcgaccacggcgagcagcttgatgaccttgtgctcggcggtggcggcggcgatgtcgtcggcggtgatcttggtgatgccttcgacggacacgtcgtcgatggtcacggaggtgtggaagccgagggtggccatgatggcggccttgttggcagcatcgtagccttcgatgtcgccggtcgggtcggcttcggcgtagcccttggcctgggcgtccttgagcacgtcgtcgaactggagacccttggtggtcatctcgtcgagaatgtagttggtggtgccgttgacgatgccgagcatgctggtcaccttgtcgccgaccagggactcgcgcagcgggcgcaggaacggaatcgcaccacctacagcggcctcgaagtagatgtcgacgcccctggcctcggcggcggagtagatctccgggccgtacttggccagcagcgccttgttggcggtgaccacggaagcaccggattcgatggcggcaagcacgaacttgcgggccacggtggtgccgccgatgagctcgatgacgatgtccgagttggtggccacgctcaaagtatcggtggtgacgatggactggtcgatccacgggaacttctcggtttccttcgggtcgaggcaggcgacgccggtcagttcgatcgggcggccgatacgagcggacagttcgtccttctgctcgacaatcaggcgggcggtctgggagccgacggtgccggcaccaagcaggcctacgcgaatcggggtttcgctgttgtgagccaattcagggtccttccaaaaagttttctatatcccacgcctattttacggattatttccgacagcagaccgaaagtactcatcaagctgacggcccttttcgtattatgacggttttggccgcacattacagactgtcaggcgctcacctctgcacgctgattactcgctgacgtcgaggttgagtaggtcgtctacggtctggcggcggagcatgacgtgcgcgccggactcgctgacagcaaccaccgccggaatcagcgcctggttgtagttgctggccatggtgcggccgtatgcgccggtaaccggcacggcgagaatgtcaccgcgcttcaaatcggcgggcaactgcacctcgtgaaccacaatgtcgccggattcgcagtgcatgccacacacacgggcaagcatcgtttcagcggaaccggtgcgattcgccagacgcgcggtgtagtcggcaccgtagagtgccgggcgaatgttgtcggacatgccgccatccacagacacatacacgcgctcggcaatcgggttgccggcactgtctttggcatcggacaagtgcacgtgcttgatggtgcccacgcggtacagggttacgccggcgggtgccacgatgtaacggcccggctcgaagctgatggctggcgcgggcatgccgagcgcacggttggtgctgttgaccgcatccgccaagcgagtgagttccacgtcaatgtccattgaatcttcgccatcggtgtaggccacggagtagccgccgccgaggtcgatttcgggcaggatgtaggcgtcggtggcccacagggtcttgcgcagcagcatcatgcgcttggccgcgtgaatgaaggcgtccgcatcgtggatgttggagccgatgtgcgagtgggctccgaccagttcgagtacgtcctggtcggcgaggatggtcttgagcacggcgatggatggaccgtccgcaatggcttccatcgcggcggccagcgccttgtctgtgtcggagacttcctcgtggctcaggtcgtacgggtacttgacgtcgtagtgcagctcgcgctctgatttctcggtcttttccgcgccattttccggggaatgcgtcgcagagatacgcgcgttggtagcggcaggcgtcacgtctttgagggcgttcagcacgtcgagcacggcggcgtcggccccggcggccagcagcggcacgccgaacttctggtcctcgtgagcagtggagatgtactcgtggccgccggcgtggacaccgacagtgacgcgcagcatcacacgggcgcgtttgccgagcttgcgggcgatggcggcgacgcgctccggctcgtcgggctcgtcgataacgattttggcgaagccctgttcgatggccagcgcgatttcctcatcggacttgttgttgccgtgcagtaccagacgacgtccgggaacgccagcggcgagggcgattttcatctcgcccatcgtgcaggtgtccacgaacatgccggcctcggtgaccaatcgcacgatttctttggacaggaacgccttgccggcaaagctcacgtgcgtagtggatgtgttgaatgcttcggcggcagcgcgcacgaagtgcctggcacgtgcgactacttcatcagtgtcgatgagatagagcggcgagccgaactcgtcaagcagcgattcggcggtacgaccgtggaatgtaatggcaccgtcggcattcacagccgtagcggccggccaaattggagaaataggcataatcacatcttctcgggggcggtgacgccgaggaggtcgaggccgttggcgatgacctgctggacggcgtcattgagcttcaggcgggcggcggcacgggccggctccggattcttggcgatctccaaggccttgcgagcctcatcgtcgccacgggtttccggatcggtcagggccatcggcaccacgcgctctacgttgtaccacttgtgataggtggcggccagctcttcgagataacgggccaccttgtgcggctggcggtcgtcggccgcagtggcgagcacgctcgggaactgggcgagggcggcaagtacctcgccgtcggcctcggtgtcgagcagggccaggtcggcaccctcgtagctgatgccggcggcggctgcgttgcggtccacgttcttggagcgggcgtgcgcgtactgcacgtagtacaccgggttgtcgttggtgtgcgaggcgagcagggccaggtcgatgtcgaagttctggttgtagtcggagcgggccagcgagtagcgggcggcgtccacgccgaccacggagaccagatcgtcgatggtcacgacgttgccggcgcgcttggacatgcgcacgggcttgccgtccttcatcacgttgaccagctggccgatgagaatctgcatgttcttgccgggctcgtcgccgaaggccgcgcacatggccatcatgcggccgatgtagccgtggtggtcggcgccaagcatgtagatggccacgtcagccgggttttcggcgcgatggcgcttgtcccagtagtaggcgatgtcggcggcgaagtaggcgaactcaccattggacttgatgatcacacggtccttgtcgtcgccgtgcttggtggattcaaaccaagtggcgccgtccttgtcgaagatgtcgccgcgggacttgagctcttcgatggcggcgtcgaccttgccgtcggcgtacaggctgttctcatggaaccagacgtcgaagttcacgcggaagtccttcatggacttctgaatctcgtcgaacatcatcggcacagcgcgcttgcggaattcctcgcgcacttcggtgtcggcctcgccgagcggttcaccgtcgtcgttgaggccttgatcctggtgggccagtgcggtcaggtccacgccgtcggactcggcttcggcctgaacacgggcggcgatctcgttgatgtaggcacccttgtagccgtcgcacggggtttcggtctggtagccggcgtcgcccaagttattggcctcagcccaagcggcgaccagcgacttggcgaagcggttgatctgctcgccgtggtcgttgaagtagtattcgcgcaccaccttggcgccgttggcctcaagcacgcgggccatggcgtcgcccaccgcggcccaacgggtgccgccgatgtgaatcggaccagtggggttggcggaaacgaactcgaggttcagggtctggccgcccagatgggcattacggccgtattcgttgaccttgttgaggtgcttgtcgccatcaactgctggggctgcggcaagcacggcatccaccacggctgcagccgaggcggaatcaagggtgatgttgatgaagccggggccggccacctcgaccgtggcgatgccgtcggcttcagcgagcgcggcggcgaacggctcagccagatcacgcggcttcatgccggccttcttggccagctgcatggcgatgttggaggcccagtcgccatgcgcgcggtccttcgggcgcatcacggcgagcttgtcgacgggcggaatcagctcgtcggtcagcgtaccggcctggccggcggcgacgaggttgtgggcaatgctggaaatcagttcacttaaggcttcagggctcattcttctaaggataccgagaacggcgacacttgcggctcggtatgcctatatgccgtcaatcgaaagatatcgagaaaattcggcaaaccgaaatcgctggaaacattaagtttgctgaaatggcgcgaacgtcatgtaatggttctgtcttatagtgacagaaccactagttcatactgaactgtcactacacttttgtaccaaataagaatgggtcaaccgttctggcataatacagtgaagtcggaaacaggatggtatacgttcacgaggtcgcccggatccgactcggcgacgaagcgaggtacgggaactgtggtggggatgcgcgatgtcgccaaaaaggctggagtatcgctaagtacagtctcactggtgattaataacggtgagcatgtgtccgacgacgtgcgttcacgcgtggaatgggccatggacgcattaaattatgttcccaacgaactagcgcgcaatctctcaaaaaatcgcaccaatatggtcggcgtaatcatgccgacacttcggcatccgttttttgcgacattgtttgcttcattgcagactgcgcttgaggagcgcggcatgctcgctctgccatgttcgactagcgacatgaagcgtggcgaggaagaatatatcgatatgctccgacgccgcatgatggacggcattattatgggcgcacatacgtctcattcttccgactattggacgagtatcggtcggcccatcgtcgctttcgatcgatatcttggaccaggaataccaatgatcggctcagaccatggacttggcgcaaagctagccgccgatataataatccagtcgggagcgaagcatgtagtcaatttgtccggccccttatctcagtttcatgatttaccccgcgcagtggtggatttcggcggattgacagggctcaacacatctttcccttcgcttgaatattatgccgaaatcgacgaattgcttagggaagcaggaattcgttggaattacatggaagccggcgaagttgatgactttgcagcgcacgaacgcgcagcgcacgaagtttttgaacaatttcctgacgtggatgccatcgtatcgtccgatatagtggcttcactttgtatgcaggaagccctccgccgaaatatcaacatcccccatgatttgcagatcatcgcttatgacggcacattcgttgcgaaaatcgccggaatgcgaatgaccgccattcgtcaggattttgatgccattgcttcgacactgtcccgctatttgcttgatgagattcaggggaaacccactagcgaattggaagattcatacgcccaagtgctacctatgaccgtccaacttggggataccactcgctgatatcgcctttatactcatcccgcgtatttattcacatttgatccctgaatgcacgacacgccgtcgaaccggttcgagttaagccatttcaaccattcaaggacttattcaacttgcattcgaaccggttcgaatttatcatgtaatcacctgctcaagtgatcaggggatggcgactccgctaatcgccagtaaaacacacggaagtgtttgcaaaggagataatgatgagaaccaagaaaatcatagcgttcctcggatcgatggtaatgctcgccggcgtctcggcatgtggcacaaatgcccccactgcgagcaccacctctgatggcaagacaattatcaagatccagacattcaacaactacggctacggtaaatccacggcagagcgccccggcgcaaatttgtgggccgaatacgaaaagcagaatccgaacgtgaaaattgaggaaacggtggcctccagtagcgatgaagctcgcacggccttcaataccgcaatctcctccggctcgaatgcatacgatatctacggcgtcgacatctcttggatgccctctatccgagccatggcggacaagttcacggatctgagtagctacacaaaaaacaacagctggccggattgggtccgtcagggcggcgaatccacagatggcaagctaatcggagctggaacggatatcggcccaaccgctctatgctaccgcagcgatctctttgagaaagctggcctgccaacggatcgcgaacaggtgaaagaactcttcggcggagacgacgccacatgggacaaattcttcgaaatcggtcaatcatacacagaaaagaccggtaagcctttcattgattcattgtctgatatctcctacgttatgaaagctcagatggaggaagtatacgtatctaaggatgataaagtcattgccgcggatacggacatgaagaacatgtacgacatgctcgccaagaatgtgaacatctccgctggtttgtccacctggtctgatgattggaatgccgcgttcaaggccgacgatggcttcgccgtgctgacctgccccgcttgggaattgaacaacgtgaagggtaactccggagaggactttaccggctgggatgttgcagacgtaacacccggtggtgctggtgccaatcagggcgaatcctggttggtggttcccgaatcgtctccggtgaaaggcgaggccgctaagctcgttgcctggttgaccgcacccgaacagcaggccaaagtattcgccgctgcctccaacttcccaagctcggccgacgctcagaaactcgacaaggttagtggcaaattggatgaatacttcaacaacgcgcccgtcggcgaaatctttgccaaccgcgcagccgccattaagcatgtgccgtacatgaatggccagtattacgacatcgacactaagttcgctgacgctctcaatcgtctcgatgtgacgaaggagcagagtgcttcccagtcttggaaacaatatgaggatgatgtgaaggctctgtcctgagcgcctaaatccacataactaagagcgtcggtatgacattcgtctgaaatgccataccgacgctcatcgataatccgtagttcattgatcctttcgaggaatcggagccaatcatgagtcttatatcgcgtaaagcctctcgcgggggaagtaccaaattcgcgaatcttgcctataaaagcaccccctatatgtatatcgcaccattcttcatcgtgtttgcggcagttggtctgttcccgctgctctataccatgtgggtggctacaaggaattacaacaccatcaccggagacgccggctgggccgtatgcggctccacatgcggtagcagcgatgcaacttggctaggcaacttccaatgggtgcttcaacaacgcgacttttgggttgcgcttcgcaacacattctcgatcttcttcattagtactattcctcagctaattgccgcgatattcatcgcctgggtgcttaatgcgaaccttaaggcaaaaacattctggcgcatgggcgttttgctcccatatgtcgtggctccttctgcagccggcatcattttctcccagatcttctccgacaagatgggcgccttcaacgtgctgattcaagccattggcatgcagccaattgcttggcacgctaacactctagcctcacacatcgctattgctaccatagtcaatttccgctggaccggatataactcgctaatcatccttgccgccatgcaggctattcccaatgatgtcatggaggccgccgtagtggatggtgccggtaaattaagaaccttcttttccgtgacactaccaatgctgcgacccacactgatatttgtcgtcataaactccactatcggtggcttgcagatattcgacgaagtccagatgttccataatggcacatctgggtacggtggaccgaaccggcaatatctcactgtttcgctctatctatgggacttgggtttcaacaaagtgaccatcggccaaccaaatcttggccgcgcggcagctgttgcatggctactattccttgtaatcgtattcgtcgcaatgatcaatttcatgttgaccagattgctggcaaccggagactcttccgcaaagtctcgcaagcccaagcgttcgtgattacaccagccttcgcctatatgtgaaaggagcatcctatgtctttgatgtcgaataaacgcaacagtggcgaaatgagcgttgccgctatcgaccaaatctacggcaaatccgttgctagagccgctcgcaaaaagcgcggttcactaagcatgtcaggtggcgaacgccatccaggatggggaagttacgtagtactggtggtattcattctgtttttcctgttccccttctattacgcgatatccatcgcctcccaagacagccctagcaagcagtacggcgtacaagcattgattcctggcggcgccttattcgagaatgtagctactgcattcagagaaatcaatttctggcaggctctaggcggcacgctattcgtggccaccatcacctcattctccacggttctgttcagcactcttgccggctttgctttcgctaaactccgcttccgcggccgcaatggactgctgactgcagtaatcgcaactatgacgattcctcaacagcttagcgttgttcccctgtatcttttggccaccaaggccggtctctacggctctttgtgggcagtggcaatccctgcgctggtcagcgcattcggagtgttctggatgacccaatatctgcaagacgcactgccatacgaactcgttgaggcagccagagtggatggagcttcgatgattcgcacattctggtcgattgcactgccagcagcccgaccggctgccgcgatgttgttcctcttcactttcatcggacaatggactaactacttctggccgatgctgattttgggaccaaacaagaacagcatgctcacagtggcgtcttccgcactcaagggagcacattttaccgactatacattggtgatgtcaggcgttctgctgaccactgcaccgctactcgtcctattcgtcattgcaggcaagcagctggtatccggcatcatggccggtgccgtgaaaggctgatattagttggtgctgtgctcgctgacgaacgcagcaccaaccgattgtcatcgtagacagaaaatacaaggaacattatgacgacttcattgacttatatgccactaaatgcacattggacattgcacgcaatcgattgccgcaaggcacccaaatcattgcgagacgttcttcagcatggtattccagccgaggtacccggcgaagccacgttagacttgctacgcgccggcataatcgatgatccattcgacggcgacaatgagagcaagcagcagtggatcggcgatatggattggtgctttacctgccggttcaactggcataacgatggctcccaacgtcatgaccttgtggctcttggccttgatacatgcgcacatcttgtgctgaacggagtgccaattgcgttcacaaacaatgcgtttcgttcataccgttgggacgtgcgcgaacaacttcgcgaaggcgaaaatgaattaaccatcacttttctctctccagtgcgagaatctgagcgtagacaagcccagctgggagcttatccacacgcctatccgcacgctttcaaccaaattcgaaaacccgccagttctttcggatgggattggggcatcgatgtggccaacgctggcatcatccacaatatcggcattgaatcatggtcgggcgctcgcgttgcgtccgtccgcccgatagtagacgtgaaggctgatggcactggcgtactgactacatatgtcgacatcgaacgcgccgacacaagcaatgccaatgcgataaacatgacggtgagcctgaacgggttcgaaaccgccgaacaatcaacaacgctgattgacgaacacactacacgtggcattatctccactacagtacgtaatgcgcatctgtggtggccaatcggatatggaaaacagccgttatatgaagcaacagttgtcattgattcttcctccgatcagggacatgaagcatacgacatgtggaacggacgcattggattccgatcagttcgactgaataccgaagctgatgaaatcggccgcgcttgcgaaatcatcgtcaatgacgttccaattcatgcacgcggttataactggattccggacgacgctttcatgtcgcggctcgaccacaagacttatgagcgttcgattcaggatttggttgactcccattccaatatggtgcgagtatggggcggcggaacatacgaaacggaagacttctacgaactttgcgataagtatggcatcatggtttggcaagatatgatgtttgcctgcgccatgtatccagagaatccaggtaccaaagccgaagtcgaagctgaaatccgtgagcagatcatcaggctgtctccccatcccagtttggtgatgtggaatggttcaaacgaaaactacatggcctacgtagattggccgtggttcaaaccagggttgcgggatgatacggaatgccccgatcagtatggacgctccgaaaaaggctggggtgactactattactccgagctgttcccaacgctgatgaaagaattggatcccactcgtatttacactcccagcgcgccaatgagtttcacggaccataaatcgccaaacacagatcgtgatggcacgacacatatctgggatgtgtggaatgacgaagattacttccgatacgccgattacatccctcgctttgccgacgaattcggctaccaggcaccgcccgcatggagtacgttgactcgtgctgttcacgatgcgcctttagagccattcggtaagcaaatgctcgtacatcaaaaggccgaattcggcaatgaaaaacttgcaaagggcatgcgttcacatctgacaccgggaactttcgacgatgactacatcgacgctcaaggtaatcatagttggctgataccctccgataaatgggagaacatcgaggattggcattgggcttgccaactgcaacaagcgcaggcgattcgattcggcgtggcacacatgcgatcgctggaaccaataaatgccggaattctcatttggcagttaaacgatgattggcctgtaatctcatggtctgccgtagattatgacgggcatcgtaagcccttatggtacatttcgcgtgagtgctttgctccacggttcgccagtatccaacgcagcgtatccaatgcggctcgcacctcccgtcaatgggcagccaaacgattgccatatgactgcttggcactgcatatcgcgaacgacactcgcgattcgtggagcggaacatgggtcgtacaacgagttactttgaatggccaacaacttgcagaatgccaatatccggtagatatcgcggctgggggtcatgtacgcatcgaattagacgcagctctcgcggcattcagctccctctcagatgagattctgatcgcgaggacaacagacgggagcttcgctcgaatcatttacaatcccgccgaagtgatcgatcaaaatcttgcctcagacccttttaccgcaacggcaattcccgtcgaggaaggatacctgctgacggtagaggctcataactatgtacgcgacctattctgcatggtggataaagtcgattccaaggccagagtgaatggtggcatggccagcctgctaccgggcgaaacactgcaatggctaatccattccgatcacaacgttccccctgaagcatggacgaatcatcgcacactaaggtcggccaacgatctccatgaagctcaaattcatagagaactgaccgatatcgccggcatgaccgtcaaataatcagacgaatatttcaaggagatgagacaatgacgatatcattcccgcagaattttatatggggagtagcgacctccgcataccaggtggaaggtgcgacgagtgaggatggacgaggagagtcaatctgggatcggttctgtacgaaacctggtgccatcagcgacggatcttcgggcgcagtggcatgcgacagctaccacagatatgccgaagacatcacgattgcacagcagttgggtgtaaaagcctatcggttgtcgatagcttggccacgcatcgtgcctcagagagacggcaagattaatcaagcgggtatcgattattaccgccgtctactcgatgctttacgagaggctggaatcgccccctttgtaacattatatcactgggatttacctcaatatttggaagacaacggaggctggtctaatcgcgaaaccgctctgtgctatgcggattatgtcaaaaccatggctgaggcacttggcgaccgcattgcagtatggacaaccctgaatgaaccttggtgtacggcatatctgggttatggcaacggcattcacgctcccggaattcaggattacggcaaagctctagcggctgtacatcatctgaatctagcccatgggctgggcgtccaggccattcgatcagttataggagacaccgcacgtaccaatgtggtgctgaatttggctaccaatgtcatagatgaagatacggaagaaaaccggattgccaagcatcgcgcggacttaatcgccaatgaggtattccttggaccgatgttcgaggggtgttacgattccgagattttcaaagtgaccgaaaacgactcagattggtcattcatcgctgacaatgatttgagcacaatccatcagccggtagaatcactcggcatcaattactactccagcgcacacgtacgtcatgccggtctttcgagtactcgagtcagtacacgaaacccgttgccggcacaggacatagtcgaaattttgccgcctactggggaattaaccgccatgggctggaaccaagaaccacaagttctgactgctgaattgctggggttgagtcgtcgcttcgaaaatctcaaactggtggtgacggagaatggctcagcatggaatgatgttgtgagcgctgatcccgcgatgccgaatgggaaaatcatacatgacacacagcgagtgaattatctgaatcagcatatcgcagctgtcgccgaggcaatggaccaaggagcgaacgtcaccggctatttcgcttggtcgttgcttgacaacttcgaatggtcattaggctatgagaaacgtttcggcattattggcatcgattacgccactcaagagcgcatatggaaagattcagctttgcgttatcgtgagataatagccgctaatgccgtgtgacagatgaatggaacgtactatcacgcctacacctatcaccacgacataagcttcactttcacaagcaaataaatatcgcaacgagctctgtagattgacggcatagtgccgtacatgcaaagcatggctgtgttaccgcgggggcagtggattgtgtgcaatccaccgcccattaccatgtttggtaggccccgatggtcggggccgggtcgccggttccggtatgactttcctgccctgtcgtcgatgatccggggggtgttgtcgccgggaacggggacgcccgatgaccgctgataggaacca

SEQ ID NO: 1558 - DNA, 12948 bp, Unknown
  R221_24m  MAG No. k141_21528
aactggcaatcattgactataaagaagtagtacaaacacgctcttgagttctcaaaccaccaccacaccagcaagacaggaaaccaaccagaagaaggaacccgccgcgctgagcggcaacaggtgaataacttacacgcaaccacgccacaacgcaaatcaaagcgcacaagaacccaaggaatcggcataacagcgcggttccttcggcgtgtcgtacagagcccaatttgctctgatagggctagcgtaacccctcgaatgtttccggaaaacatcgaatccattattcggctggcgtgtcgcacgagttttcggactgtcagctccatgttcatcgttcggcaaccacaccaccggcgcacaatcaatgcatggcaacaacgctccatcatcggatttcgttcatgaatcacgggtatacctgtagttatgaccaagaagattgctgtattaaccggggcgggcatttccacgtccgctggcatccctgatttccgcggtccagacggtgtgtggaccaagcatcctgaccaaatgagcgtttacgacatcgatctgttcctgcgcaacaaagaggaccgcgagtactcctggcgctggcaaaaggaatcgccagtatggaatgcgcagcccggcactgcgcataaggcgctggtcaagctggaacaagccggcatgctgacgctgctggccacgcagaacttcgatgcgctgcatgagaaggccggcaacagcgacagcgtcatcgtgaacctgcacggcaccatcggcacctcgcattgcatgaagtgccatcaggaatatgccacggcggacatcatggcccgtttggatgaagaacccgatccacattgccatcgcaaactgaagtatcgcggcgatatgccatgcaatggcattatcaaaaccgatgtggtgtatttcggtgaggcactgccggacggagcgatggagaagtcgtacagcttggccaccaaagccgacgaactatgggtaatcggatcgacccttgaggtgtacccggcagcgagcattgtgccggtggccgcgcaggcgggcgtgcccatcaccatcatgaatatgggtcacacgcaatatgaccatcttgcgagccgcttgattcatgaggatatcgccgtcgcgctgccgaagttggtggacgagacgattgcggagaacaagtagtcctcagcataacgaaagcgccggtgggtggttaagcaactgatgattgttggttaaccacccaccggcgctttcgcgccacctcccgctagcgggaggtattggagcacacttctgcgcggcctcccgccagcggtattggaatcagtagatgcgcttgggctggaatccagcttccctgagtgccacgaggatgcggtcgatgtgctcggggccgttggtctcgaccgtgacgccgagagacaccgcgttggtgtagtggccggatgccttgaactggtcgtggtcaagctgaatgacgttggcacgctgctcggcaagcagggtggccaccttgacgagctggcccggagtatccggcagctcgacctcgaagttcatgatgcgaccgcgggcgatcatacctttctgaatcaccgcacccatggtcacggtgtcgatattgccgccggacataatcggcaccaccacgtgcgggccggtggcggcggcgaacttgcgcgaacgcaggttcaggtgttccagcgcggccagcgagacggcgccggccgcctcgaccaccagcttgtgcttctcgagcatgagcagaatcatttcgttgatgtcgcgctcggtgacggtgaccagatcgtccaggaactcgttgatcagcgcaaacggcagatcgccgggatgcttgaccgcgacgccctcggcggaggtgaccacatggtcagccggagacacacgacccgcggccagcgagtccttccaggccggggagccctccggaatcgcaccgattacgcgcacttcaggcttgaacgtcttgatggcgagcgccacaccggcacccaagccaccaccaccgagcggcacgaccacgtcagtgacgttcggcacgtcttcgaggatctccagaccgatggtgccttggccgcagatgacttcgtaatcgtcgaacggcggcacgtaaatcatgccttccttgtcggcgagctcagcagcgtgggcggcggattcgtcgaacacatcgccgtacagcaccacatcggcgccgtaggccttggtggcatcgaccttcagcggcggggtgatctgcggcatgcagatggtggccttcgcaccacgctcacgggccgcataggccacgccctgggcatggttgcctgcggatgcggtgacgatgccacgggcgatctgctcttcggtgagcgatgcgatcttgttgtacgcgccgcgaatcttgaaggaaccggtgacctgcaggttttccggcttcaggagaatctcatgaccggtcatctcgctcaataccggcgaagggataatttccgtatgacgggcagtccctttgagtcgtccggcggccaacttcagttcggctgcatgatcacgctgcagcgccttcaaaacatccttttgttccatagcttttaattgtatggcgcggggacaccgaaaacagtggcttatctcgctaacgagcgctcatttacggtaattcccgttcgtaatcagctttcgaggggctgatttggcttcgcggggaggtctatctcctcttcgaggggctgcccgatcgtgcaatgcgtgagtatgacacatcatttgcagcggtattatgcggttttcggagcccggctattcaggcaccaaccccttgaaacggagatagacctccccgcgaagccaaatcagccccttgaaatggagataccgcctagcaacacttataggctgacgacgacgccctcccatggtgcaagctcacggccggcaagagcggccacagcgtgcgcggcgtcatacgtgctgatcaccacgttcgactcggcaaggccatcggccactgccaacagttcggcggtttcgcgcggtagatcaacggttcggccggacatgttgaccacgaccagcagcttctcatcgccgagggtgcgggtgaaggcgtagacatgcgcgtcatccgcatcgagcagatgccagtcgccggccgccacgacaggcatgtcgtggcgcagcgcgatgagctgcttgtagaaggcatacaccgaatccggatcgtcgaattcgccggccgcgttgatcgccgcatggttgggattgacggagatccatggctccttagcggcatccggcgcagtgaaaccggcatagacagagccgtcccattgcatcggggtacgcgaattatcacgaccgcgcgcggcgatacccgccaacatcgattcgggcgactgcactttggcttcctcaaccctttgacggtaagcgttcagggactcgaggtcacggtactggtctaggcgcgtgaagtgggcgtcggtcatgcctagctcttcgccctgatatatgtacggggtgccgcgatgcatgtgcagcatcaggccaagtgccttggccgaacgcacacgagattcctccgaggagtcatcaccccaacgagaaacgacgcgaggctggtcgtggttaccagtaaacaggcttgcccagcctgcattcttcacggccgcttgataaccggccataatgctcttgagcttcggcaggtcaagtggcagtggcttccatttgacgccttcgcagtcaaaatcaacgtgctcgaataggaagagcatgtccagctcgccgttggcggggtcggtgatgtattcgttgcgctgtgcggtaacgccgggagcctcgcccacggtgaggaagccctcacggccttcgaacacttcacggcgcatttcggccaggaattcgtcttggcgagggccgtccgcgcagaacggattcgggttggaatagccttcctcacccacgggcagatcgtccagctcggaaccgtactcgccgggcagcttgccagacaggtccgtgcgcttggaaatcagcgtaatcacatccatgcggaagccgtcaacgccgcggtcaagccaccagttcatcatgtcgtataccgcgcggcgcacagccggattttcccagttgaggtccggctgcttcttcgagaactgatgcaggtagtattcgccacgctcagggcaatactcccatgcagaaccgccaaagtaggagccccactggttgggctcggcaccgggctcgccggcagtggtgccgggacgggcgggacgccaccaataccagtcggcgtgctcatcatccttgtttttggacgcttcaaaccaggcgtgttcatcggaagtgtgattgacaacaagatccatcacgatcttgagcccgcgcttgtgggcctcggccagcagctcatccatatcgtcgagtgtgccgaacagaggatcaatgtcctgatagtcggaaatatcgtagccattgtcgtcttgcggagacttgtataccggggatagccacagcacatccacgccgaggtcggccagatagtcgagccgtgacgtaatgcccttgagatcgccgaggccgtcgccgttggtgtcttggaaggaacgcgggtaaatctggtaaacgaccgcattggaccaccacggatttggggtggcaccgttggtgcggatggaatctggaattactgtgcgttgtgaagtggtcatcgttggctcctccattatttatggtctacattgcctgttgctcatagtctaaaaagcgctgaattacatttccattggggaactgcgttggtgtgccggaaacaaaaaccgcaaagagccggaaggcactgctacggctcaattctcataagctgcacatgctatttagcaacatatgggccctttcgctgtttgtggtgggtgactgtgccgtggggtgatgttggtcgggtaggttggaggcatggatgcctctcacctgttcaccgccgcgcttcggctgcggtcgccttggagggtcgggtccgcggacttccgtgacgccgacggcgacgggcgggagccgcacatcacgatcggcttcgagcccggcagagggttcatgctcctgttcgaggcgtgggtgtggctatatcgcctgtgctcgtggatgatgcactcgaggctcgaacctatgaaggagctcgcccgcttgttccgccgccataatctacctgacctgcggcagctcacatattaacggttcttctgattgcgacgcgcaagagcaacttcgagcgcgcttggattgcctgcttgaacccactggtgcggggatagatgatttagttgacacgcctgcgggaatctggtggggatttcgctggcacaccggatttcaagcaaaccccgcctcgggaaccgctccggacttcggcgttggcccggttcgtatgtcaatcgattgccgtctgaaccgggacagaatccgctgtcccggttcgcgatttttgtccttttttacaaacagggacaagccaatctccgcagttcatatgctccgtaatacaaaatcggcggaatagagccgatcccggaatcaacatgttgtcccggttttcacataaaacgattgacattcataccgggacaatgaaaattgtcccggttcgtgaaaatcgcccgaaaccgcgaaccgggacagcggattctgtcccggttcgcgcgtcaaacggttgatatgtggaccgggacaagccagtggcacggcgacacagcagatgcgctcaattgcaccgtaagccgtacggtttcgtcactttttcattcgcacaacgagcaaaaccacatgacctttgtgcgccaccgccacatcaaccgaccgtcgcctttattgtggcggtttccagtatggcaacaggacagaagagcctcctccggtgagagccggaggaggcttgggtggaagcggacctttacttcacagagtcctgcaattcaggactggcctacggccagacccaacatgacctcgcgagtacgcgacctatccggccgcccgggccgggaaacagcccacggggctgtttccttaatcggctcgtctcgctcgacgcggtgaagtaaagcagcgcctgcgctgttttacttgaccgcccccctcatcacaccaccgacgacccacttttgggcgaagatgtagacgatgaggatcggggccatggccatcaggtagctggagaaggccatcgggtagttggtggcgaactgcgagctgaagacgtactgggcgagcgggatggtctggttcgactggtcggtcaggatgatcaacggcaggaggaagtcgttccaggcccacagtgcggtcaggatggcgatggtggcgttaatcgggctcatcagcgggaagatgatggtccagaaaatgcgccacgtggatgcgccatcgattcgggccgcctcttccagcgaaactggaatcgaacggatgaagccagtggcgatgaacaggttcgtgcccaggccgagcaccgtgtacaggatgatcaggccgacctggttgtccaggtgcagggagcccatctgcttcgcaatcggcagcatgacgaccgggaacggcacgaacatggcggcgatgaagaagtagtacaggaagcggaagaagcgcttatccatgttgcgggccacagcgtaggccacgaaggtgttggtcagcaaggtgagcaccacggcggccaccgtgatgatcgcggagttgagcgcggccttcgggtagttgaccttggcggaggcgtcggcgaagttgtgccactgccacgaggtgggcagggcgaaggtgccggcttcggccggagtcttcagcgcggtgacgatggtgaagtagagcgggatcagaatggtcaggctcagcacggccacggcggcggtcagccaccagttgatcttgtggtccctgcggaacttggcgggcttgccggacttggacggggtaactgttgcagtagtcatttcttatcctcccctaaatcagatctgttcctggctgcgggagatgcgcagctgtacgaaggcgatgatcgccagcacgatgaagaagagcacggcgtttgcggtctggtaggcgtactcgccaccggtcaggccacccttccagatgaggtaggtgacggtttcggtggaggagttcggaccgccctcggtcaaggcgacgacctgatcgaaggtgccgagcgcgttcttcatggacagcacgaggttgatggtgaagaacggtccgatcagcgggaatgtgatcttccagaacttctgccaggcgttgacgccgtcgatggcggcggcctcgtagatttcgtcgtcgatggtctgcaggccggcgaggtagatgagtaccgagtaggcgatgccctgccagacggcgaggaagacgattgggatccagctgagttgctcattggtcaacagcgaggtggacagccacttgatgcccagcgccttgccgagctcgggcagcgggttcatgaagatgtacttgaacacgtagccgatgaccagcacggagagggtgtaggggatgaagaagacggctcggaagccattcttgaaggcgatcttcgagttcagcagcaccgacaggaacagggcgatcacattaatcagcaccgtgatgagaatggcgatgaggaacgtgaacaggtaggcgtggcccacgcggttgtcttggaagagggcgatgtagttcttcaggccgatgaacttgtaatcgccgtagccctgcgagttggtgaaggaatactttacgccgtcaagaaatggcaggtacaggaagaaggcgaaaatgatagccgccggaaccaccatccagtagtaggcggggtccaccttgcgggtggagaaggcggagaccttcttcttggccggtttcttggcagcggtcttggttgcggttgcgtgtgacatgatgttctcctctcctaccgatcactcgaaggtcctggcttggaccttgtcccattcggtctgcatctggttcaggaagcggtcggtgttgccggaggtcaccatggtctgcaggtagccgccgatgttgatggacgaaggaatgtagtggtcgcagaagtcggccagtcggttttcctcgaagaacgggcgcacggtttccagcgcatcgttgccgaagtaggtgtccttcagcggcgtgatggcggactgggcgtcggcgtaggcgtcaagctgatccttctgcatgaggaactcgacgagcttcatcgcttccttggggtgcttggtgttcgcaccgatggtgagcatcacgtcgtcgccggcggtgaggatctgctcgctggcgtcatcggtggccggcatctgggcgaaaccaagttcgatatcggggttgatcagcaggatctgcgggatggcgtaggtgccgagcgggatgatcgcggccttgccttgggcgaagttctgcgtgccctgctggtaggtgacgccggtgtccgcagtggagtaggtgaagagctcggattccttctcgactgcggtcttccacagttcctggaacgtggtcttgccttgcttgagctcggtgtacttcgattcgggaaccagcgtgccggccagggaggcgagcggtgcctgggtggtccaggcgtcggccacggaaccctgcagcgggttgatgccggcgtccttgaaggtgttgagcatatcggtgaactcgctccaggtggtcggcggattctccgggtcaaggccaaccttgcggaacagagccttgttgtagatgtagccggaggcgttacccgcgaagggcaggccatacaggcgcttcttggaggaatcggtggtctgcaccagattcttggcgatctgcaccatgccggggttgagggtgtccacaatgggttcatcggtgaagtcgtagaacacaccggaggcggcgaagttgccgaagctgatgtcgccgttgaaggtgatcacgtccggcacacgattcttgacgaaacgggtgcgcagatcggtctgggcgttggcggagttgttgatgttgaccttgatggtcgggttctgcttctcaaagtcggcgaccatggacttgaactggtcggcggcctcggacttgaactggaagaaatccagcgtgacggtgcctgcggtgctggagccgcagcctgccaggccgaacccgacggcgatcgcgcacatcacggcggcggtgcgcacggccagacgcttcagtctaggcgttgcatgtggggaatcggacagcataattgttgactcctttatctttcttttcctccggcttcggtgccggcggttcttccactttccaaggtaacggttcggccatttcattcccagcgccagcgagcccacttgcgcaagcaacaaaaagcgcggtattttgtgattaacgcaataaatacagcgaaggggcttgcatgtctgatgtcaacgcgattccacagtggttttccggatccgagcatacgcatcgcgtggcggcggcaattgcccaatacgggccgatagcccgcactacgttggcacagatgctgggactgagccaaggggccttgtcccgcatcaccagcgatctgatctacgccggggtgatcgaggagcttccggccgaggccggcccgtcaggcaagctgcccgagcgattcacgccaagggaaagttcggatcgtcgcggacgcccgcagacttcgctggtgttgtgttcgaacgcacgcaccttcattggtgtcaaggttcatgggatgtcgattgtggccgctgcggtgaacgcgcatggcgaggtggtgtccggccggcacgaggtgccgatcggggcggatcagtcggctgagtatgtggtgtcggccatcacgcggctggtgcgcgaatgttccgccgatatcgcctcttccggactgccctcccccactgcggtgggcgttgcggtaggtgggcatgtggtcgacgattcgattgtgacgttcgcgccgttcctgcattgggacggggccacggacttggggacgatggtcacagaggcgaccggcctgccgtgcggggtgttcaatgatatcgattctctgctggtggatgcctcctggttcgggccgggtgtcggcgtggatatgttcgccgtggtgaccatcggcgtgggtgttggttattcgctggccgtgaacggcaagccagtgcagtacccggataagagctatggtctggtgggccacgtgcttatcgatccggaggggccgcgctgcaccagcggacatatcggctgttcacaatgcttgactgacgattcgatcgccgaacagtactctgcgattgtgggtcgcgcggtcagttttgaggactttgcgcgcgatgccaagggacgcgtgccgcaggccacgcagttggtgaaccggacgtgtttccggttgggttcgctggtggctacggtggcgaacatcgcgatgcccggacatgtgatgattgccggggagtccgcgtttttggccaagctcggcaccgattcgctgcgcgatggcattcgtttctaccgtcacagccagacccagccggtcaagttcacgattatggaccacgactggcagctctgggccaaagccgccgccagtcgcgtaatcgtgaagcatattgggtaggccgttcttggctcccctcagagagggaagccaagaacgttgcttcgccacagttactccgccacgaccagcaattacggacttgcctatcggcaaggctcaatcccaccttcgctcagctgtcgcttcgctcaggccgtggctactgacagcctactaggctgtcagcttaacgccacagccttgagcaatactgcctgctgggggtggagggacgggggacggatgccgtaacgctgcagggcttcgccggtcaggactacgccttcctcgttccaccagccgagagtgctctggccgttggccagaccggtcaaatccaagctcgggtcgagcgggctgacgcggtaggtgcgctcggggtcaagtccgggcaggtgcacgggcgcggccggataggtctgactggtggtcagctgggtgaagcggtagatggcggcgtcgcggttcggcatcaccatgccatccaagcgcacggccggatcgttggagtcggcgtgcacgcaggtgtcgatggcgaaccagtcgcggtgcttcttgaattcggccacccacacggccagcttggcgagcgcctcgtccggctccttcaacaggttccattcgatgcccatgtggccgaagaacgccatggccatgcgcagttcctggctggtggcacgctgggtggagtgcgcgggactggcacccacgtgctcgcccatcatcgccggcggcaccagcagcgaggtgtagcgctggatgtccgcgcgctcgaccgggtccacgcagtcggagacccagatacggtcagcgtgctctaggatgccgaggtccacgcggccaccgccggaggagcagctttcgatctcaaggcccggatgtgcggtcttgaggcccttgaagatgttgtagacggcgagggtctgcgcgtgcacggccgggcggccggagcggcgggaaccgggctcggtgacgaacttgttgtggtcccacttgatgtagtcgataccaagctcgccgacaagctggtccatgcagccgtagatgtagtcgaacgcatccggattggtcagatcgagcacctgctgagtgcggccctgcagcggcagtcggccagcggtgggcgagagaatccaatcggggtggttacgggccacatcggaatcgtagttgaccatttccggctcgaaccacaagccgaattccatacccttggcgtgcacgtagtcggcgagcgccttcagggacttcgggccatcgggccagacgtcctgcgcaatctgccagtcgccaaggccggaggtgtcgtcgcggcgggaaccgaaccagccgtcgtccaccacgaatcgttccacgccggagtcggcggccttgtcggcgagcgccttcagcgtatcgaagttgtggtcgaagtacacggcttcccaggtgttgaggatcaccggacggccgtgcgagaacaggcgcggatgcagggagcgcacgtaggagtggaagcgggcggcgatctcattgaggccatcgccataggagccgaacagccacggggtgtcgtaggagttctggccttcgccggggccggcgagcgtcacttcgccgccgaacaggagttcgccgccgccgattacgccggtcgtgtagggcagacgttcggcggacagtacggagttgccgctccagcccacgtgcaccgaataggcgtcgccatgctcgaagccgaaaccgggcacgccggcggtcaggagcagggatgcgtcgaagtcagggcggccggcgagctgcggcttttcgaaacggccgacggtcagcggctggcgctgcgggctgcgttcacgtagatggtgaccggtggtggtgaggatttcgccggcggattcgggcagcgggaagccgagctcgatcttgccgatctcgagcggggctccggcgtctgcaccgaacaggttggttacggtggccttctgacgggccaggccgccggggagcagttcgaggtgccactcgacttccacgccctgctcctcatcgcgcgcggtgactatgacgccgggcacgcggaccggaccggtggcacgggcatggccggccacatcggtgtagctttcgccggacacggcatcgagggtggcttccagcacgccgccggcctcgatattggtcacagtgaacttggggaagagctcgacgccggcgcggcgcagcaccacgcgctgctcgccgatccagctttcggcctgggtgggcaggatagacggccaggcggtgtcgtcgagcgcgccggacacgcgctgcggcttcagggcgtcataggcggccagcagggtgtc

SEQ ID NO: 1559 - DNA, 3550 bp, Unknown
  R221_24m  MAG No. k141_21974
cgccctgggtcaggcccaacgacttcagaatgaagtagatcactaccacggacatgatgcccgggaacatgcccagcaccagcacaatgttcatgaacgacttgcggaaacggaagcgcatgcggctcatgcagaacgccacgcacagtacgaagaacacgctgatcagacacaccacgatggaaatcaccagcgtatgcatgaacatgcgcgggaagttcaggatgtgggtgtcggtgaatagcttggtgtaattctccaacgtgtattcggtggggaaaaaggtctcgttgtaggggccgggattcttgttgaagctctccagcaccacccacacaatcggaatcacccagatcaccgcaagcacggcgagcaacagatggcttaggacatcgcccacgatgcggcgcttgcgctggtcatgccagaacggattgctggcggacttaggggttgcgatgtcggtacgaggggtcgcggtctgcgcgttgctgctcatcggaatcctccttcattcttgtaggaagcgctgctgcggtaggtaatcagggagaccactgccaaggtgacgaacgtgaagatgccgatgacggcacccaggttgtagtctccacggtccaccgtgagcttgtacagccaggtgataagcaggtcggtcttgccggccgtatcgcccaccggggtcggattgccgccggacagcaggtagatgacgttgaagttgttcacattgccggtgaacgtggtaatcaggtacggggtgagcacgaagaccaggtagggcatcgtgatgcgggtgaaggtctgccaccagttcgcgccgtcgatggtggcggcttcgtactgttcggcggggatgttctgcaggatgccggtgatctgcatgatggtgaacgggatgccgatccacaggttgacgacgatcacggtcacgcgggcccacatggtgtcggtgaagaacggcagcgggctgtcgacccacccccaagacatcagcaggcggttgatggcaccttccggctggagcatctggttaatgaccagcagcgagacgaactgcggcacggcgatcgacagcgagaacgccgcacgccagaagcccttgagtcgggtagtacgacgattgatgatcatcgcgaggaacaggcctaggaagaagttcaggaacgtcgcgaagaacgcccaaatcagggtccaggccaacacactgccaaactgggcggcattaatctcgccggtgacgctgaacagctgggtgaagttcttgaagccgacccagtcgaacagcagcacgtgaccgggatcgtagttggtgaacgcgatgcacatcataatcagcgtcggcaggacggtgaatacaaggatgccggccaccggcaacgccatgaacatgacctgcgcgttgcgatcggtgatgttcttcaggtcttcgatgaaggtcggcgccttgccggtctctcgggcgagcacctgtgccttgtacgcgctgcgcacggcatacgaccagaacacaaggaacagtacggtgatgaacacggcggccacaccatagaccatcagcagcaccgaattgtcaccggcatcgtaatgccaataaccatcgatcttctgtttggtctgggtgcgggagccgagcgagcccagcattgcgagcgccggcccgccagccgtcaccatgtaggcgatatacgccacttcgatggccaggaacaccagtcccttggccacctgcttacgggccaggttgcctgcgcccaataccaggaacgacagtcgggtcagggcatcgccttgggtggccgccgcgcgcaacgtgtagtgcgacggaggaatgtagtccgccttgcggcggcgtggtgcgcgtttcgctgcgcgcggcatggctgtggtttccatgattggtctttcttctcgcgttctacaggaggctctggtatgaggccatccactgctcggtgagtttggccgagttggcgtgggtgacttccttgttgtagatggaattgccgaagttctcgcacggtacccagaagttgttcatctcggcgatggacggctgcaccacggacgtctcggcgatggtgtccatctgggcctgggccacggcgtctttctcgatggccggatcggaggcaagctcgctgtccgagggaatcaccgaacgcatcttatagtgcttgcgctgtgattcggtgccggacaggaatgcggcgaactggtcggcggccaccggatgcttggtgtacgggttccagccgtagatggtggagccggcgaaggccttcatctgcacttgcttgccgttgagcgtgaagctgggcagcttggccacgccccagtcgtcgccgagattctcacggaccgtggcggcgtcccagttgccggtgaagaccacgtcgaccttgccgcttttcagcccggccaggccggagccgttcttgtcgttgacgaagttcgggttgttgcgcaagtcgacgaggtaatcggtgacggcggcgccgattgcaccgccgaactgcacgcccgacttggcgtcggtgccgtctttgccgaacagtgtgccgccggcaccgatatagaaggcgggcagataccaggagttggtcagcgggaatgagaccttgcctttggcgagcatggcgtccagcgaggtgatgtcttgctcggtgaacttgcttttgcggtagtacatgaaccaggtgttgccggccagcggcacaccgtagacgttgccgtcctcgccggtgacggtctgtagcatcgtggcattgcctttggtctgcttggcgagctgtttcatcgtcgggtcgctcacttggccgacggcgccggcatcgagcagggtgcccagctggtcgctggcgaacgtgtaaacatctgcggctacggtcggatcctgcttggctatgccggcggcgtctgccgaggccacgttctggtttttccacgtgatgctgtattcggggtgctgctgttcgaatgcggcctccatggtctgcagccacgaatccgtgttggcttggtcctcttgggaggcccacaccacaagcgtgatatgctccgcgtctccgcccgcgcttgcggacccgcaggcggacaggcccgtgacgaacagcgcacaggcggaaatcgccgctagggctttcttccatcgtgccatcatcgttgattttcctttcttcggacgccgactccagtatcggctcctgccacgcacacccttgggtactacgtttccgttttcggcctgatacaggggaatcgcggaagattggggggtacgtcgttgttgcttgagttcagtgtaactgaaattgcgaacgtatgcaagccaattgcaatcagccataattgcagagtcttaaatccttgatatttcaacgtttatcccgcgtttctctagattgacagcgttcgcaatcatgcagtatcattaagcaacatcccgcaagaatctgtaaaaacaaccgttattcggacccggcagagaagccagatccatcacacctgaaggaaggaccacgatgacgcaacagccccagacttaccc

SEQ ID NO: 1560 - DNA, 11708 bp, Unknown
  R221_24m  MAG No. k141_23421
caaggtgacgctgaccatcgtgcgcgacggcaagaccatggatgtggacgtgacgctcgatcaggaggagtcgtcggtgaacggttcgtccagctccgattccaacggtaacagccagaataagcagaacaaccagaacggaaacggccggaatggttacggcaatggcaacggcaacaacgatggcggcaccggtgatggcggcggcttctccgacccattcggcctgtggtaaagccgactcgacaacgtcacacggcgttgagcggtaaccgttgaacaccgtgtcagacaagcaaaggcccgtggcagtgagcaaactcctgccacgggcttttcgtatgcgctattgtgccctgcgcccatgccgccaacgtagtttcgatatccggcatgtcgcgcagcgctcgctgatagggtaggccaagcactgagttcgggcgacgttccgaacacagcgcatatttcaatacaaaactgaatacatttctttacgccgtgtatcggaaggtcgcgcgggagccgagcaaagcgaagccccaggcaaagccgccggtgggttaacaaggcgtgaccgcagcgccgattgcgcgggccacgcttgccgtaccgcaatcgactccgtatacaagcgtaaggagcaatgatgagcagactcatcagattcttcaccaaaattctcgacatctgcaagcttgtgccgatgcttccggtcgtcgtcatcgccgcagttccgctggctttactaggcgattggcgtccgtggggcaatgcgatggcgattccggtacttggcaatccgggcttcggccagtggctggttatcgcactggtgctgattatcgtgattgacactgtgcgcggcatgattgacgatttgcgccacgggcaggtcggagtcgatgtgctggccgtggtcgcgatcctctccaccgtggccgtcgccgaatactgggcaagttgggcggtgacgctgatgatcacgtccggcgaggccattgaggaatacgctcaagccaaggccgagcgcagtctgaccgcgcttatggaagccgcgccgcagaccgcgcacgtcgtcaacctgcctggtgtggggcgtgggtttgctgccgataaaggcgattcgtccgatggcttccggcgtgtgggcttggcgtcgactgccgccgccgcgcaccgcttcgacacggtgccggtcgagcaggtgcagctgggcgacgtacttatggtgctgccgggcgaaaccgtgccggtggacggcgagctgctgtccggcacggccacgctcgacctgagcaatatcaatggcgagccggtgccgcgtgaagtgttcgccggcgcccgcgtgatgtccggcgcggtgaacggctcgaccgcattgaccatgcgtgccacccaagtggccgccgattcgcagtaccagcgcatcctcgagctcgtggcctccgcgcaggaatcgcggccagccgtggtgaaaaccgcagaccgcttggccgtgccctttaccgtgctctcgctggtgatcgccggcatcgcatgggcgatgtccggcattcccacgcgattcgcccaggtgctggtgctggccacgccctgcccactgctcatcgccgcaccggttgcgtacatcgccggaacaggacgcctcgccgcagccggcgtgcttatcaaagcgcaggacgtgctggaaaaccttggccgcgtcacgcaggtgttcttcgacaagaccggtacgctcaccgtcaagcagccgcaggtcgtgcgcgtcgagatgctgcccggtgccgcaacccgtctcaacgaagaccatgtgctgatgatggccggcgtggtggaaagctactcggtgcacatcctgtccaaaggcatcgccaaggccggaacggaggcgatggcccgattgcgccagcggttcgaggatggtcagcggctctgccccgagccggaggccagctggcccggccatggacgggagtatccggtcatcaagaatatcaatgaagatgccggcaaaggcgtttccggcgaggtgaacggacatgcggtgcgcgttggccggctgtctttcgcggccgccggggaggaaggattcttggcggtcgatcggaccgcccccagtcggtctgaggatgacctgcgcacacgatttgggctgcttcagccggacgaaatggcgtcgtatgtgtctgttgatggtcagctgatcgcgcgcatcgtgctgcgcgatgtgccgcgcgccaacgccaaggcagcgctcgccaaactgcatgagttgggcgtcaccaagctcgccatgcttaccggtgacaagcgggcttccgccaatatcattgccagcgaagtcggcattgacgaggttcacgccgaactgttcccggaggataaggtagccgcagtcaaggccgctacaggagccggcaaaaccgtcacgatgatggtcggtgatggtgtgaacgatgccccggtgctcgccgtcgccgatatcggtgtggccatgaccgacggcacatccaccgccgcttccgaaagcgctcaggtggtcattatgaatgacaatatcgccgccgtgccgcgcgccatcgccattgcacgccgcaccaagcgcgtgatgcttcaagccgtaatcgcgggccttgtgcttgccaccatcggcatgattgccgccgcgttcgatctcattccggtcgtcgtcggcgcattcctccaggaggccatcgacgtggtgagcatcctctgggctctcactgctttgattgatcgggactgattaagataaaccggaattgattggagccgcatccggattatgtgcaatataacaatttgatatcaatattttgtgtgtgcttaccggatgcgggtgccgtaggtggcagtctattagactaaaggctgtttgcagcatcatttaggggcattgaggcctttgccagaggagtcgatatgtcagagggtgaggaagagctcaatgtgggcgcagtccgtttggaggaagtggcatcggcggctaatgtatcgctgtccactgcgtccaaggccttgcgtggaaagcctcacgtcagcgagaaaacccgtattcgagtgattgatgctgcgcggaggttgggttatagcgccgcagaagctatggcatcgatggcaaggttaagcgtcagggattctcacggcatgcaggattttcgcgttggcatcattggcgttgatatgaaaggcgtcttttctccgaccattcttattggagcggagaatgcgtttcaagcgcgctcagccgcagcgctactgttcaatgcgtcaggcaatgaggcattgttccacagtggtattgaacgaatgttggtgcaaggagtgtcgggactgttgattatcagcaggtgtacggatccggtgccatactacgtggattctccggtacctgtggtctacgcctatggcccgtcccgtgatcccgatgattgttccgtggcacaagacaatgtggaatcagggtgtttggccgttcgccaccttctttcctgcgggcgcactcgtattgcgattattgctggcgactccgagtactcggttacacatgaacggatgcggggtgcgctcaaggccttgcatgatgctggattacagttggctggcgaagcgcggttcggtccatgggaagcggaatgggggcgcgccgctgcccgtctgctgctcaatgacggtgctgcattcgacgcagtgatatgccaaaacgatgtgctggctcgtggctgcatcgaggaattggaacgtaacggatgtcgcgtgccgcaagacgtagcggttatcgggcacgacaacagtccggattatgtgtcgtacgcgcatccgttgcttacttctattgatgacaacaacgaaatgctggggcgtcaagctgccctatgcctactggatgcgattgcggggcatcctcaccatggtgtggagcgtgtgccggtgaagctaatccaacgcgagtcaacgttgccgttggattgataacgtcaccggataggcggcagcagccggttcacatcttgcgtggcatcatccagacctttgcgaatatcattgatgccggaatcctgtacaaggccgtgaacgtcgatgttgctttgttcgctcaacgcttggccgcgtacgcgcatgctatggataaatcgtccgaccttgcgtgcgtagtcgggcagcttgtcggggcctaccagcactaaagcgatgacaagaatcaccatgagttccgtgcccgaaatgccgaacaacatattattctccttctgcagttattgttgcaggggcttcctgtttgccggtgcgcttggctttgcgcgccgcgcgaaatggtaacgcggcgcgcattttatgtaaaagtttgagaagtttgggttcttcgcccgccgcgcgcatgactttccatagctggatgtgctcgtatactgcgcatacggctatggctgcgaaatagattgcgatgatgggcaaagcgagtgcgcataatgttcctgggtcgccggttggcgtggccacggccgcgaagataaacgctatgaccgttgcgagacgccactgcttcaaccatgttcgtgtttcgaccgcattcatcatcgtcaatgccgccataactacgggtagcaggaatgagaggccgaaagcgactgtcatgcgcagaatgaaatcaaaatagacgtcggcgctgagcaatgtggcggtgtttgcgggggcaaagccggtaaggatcgccaccgcttggggcagcagataccatgccagtccggctccggtgaggaacagcggcactgaggctccgatgaatgtaaccgcggtccagcgctctttgcgcttcaaccctggattaatgaatgcccacacttggtatgaccaccacgggcaggaggccgtcagaccaaggaagaacgcaatctccagctttacgttgaatgcggagaccacgccattgaatgtgatgctcatcagtccctgttgctgcccggccgccgtcaggaacggttgttgcaggatacgaaacacctgatcgctgaacatccatcccactatcgacatgatgatgatgccggcaatggcccgaacaaagcgtttgcgaaattcgacaagatgatcggccagaggcatcaccgcatcggggttgcggggcttgcgcgttttggacttgcgccctacaccccgcttccaccggcgtgtagggtgttgcgcacccgcgctggcctgctgcgtggcctcgtgtgagtgatcgatgagatcgtcgaggtcaagatgtgtatcccgatcgccgggatgcatcgccggtgcaaggggtgccggaagcgcggggtttccgggaaccgtgctcatcgctgttcggctccggttgctgtagtcggggcggcggtggcgttcatcgtgacggcttggggtacggcgggagcgggagccggtgctgccgccggagctggggcaggggcgtcgctgactgtattgacggtttgttgtgttgccgggtcatcggtcttggtctcggcacggaaaatcttcatcgattggccaatgcttttggctagctcagggagcttcttcgcgccaaacagcagcacgatgataagtagaatgataatgagctcggtggggcgaagattaggcatgatagtatgtccttccaatttctgtgttgtgacaggggaagggtatacctcattaacgcaccaatttatcagtatagcgaggaatggtgtgttgttcaagttgaagtgcggtgttgcgtttgagctgcttgtgagagttgctcgggaacatgttaatttgaatgcatttactgtgttattggtgagcatatgtgtttgggttcgttggttttcgcaagaggaaaacaaaaggaaaattacgaaaatagcatggttggaaatgctgataaagactgattttcattggtattgtgcgctacgaaaaccagagaaaaaatgagtgagtcgctttctttgacgcatggtgagaatcgtctgtttgagttattgtgaacgcgcacaacgaagacaagcggcatggagggcgcgcaaaaactcgaataatcgcatatggtaactgtttgctttaccgtcatctctcccatacatacatgacgacggggacgcaccacaatgatgtgatggtaaaacgggcagtaccagacgattccgagtatgtgtgtgccatccactgacgcatcttacctgcgtcgtcgggccattgaatggattaagtgcattgaatggttgcgaatgcggcagagtgtcttcgtccgtcatgcctcgcaatgaacgcgcggcagtccaacgaaggagcaagatgagttcaacggaagcaacaaacggcatctctcgccgtgctgtgctcgcaggcgcggccgccatcggcggcaccatcgccgtggcgagtgcattgggtacaggagtgacaacggtgcaggcagcgccatccgtcgctggcacggcaggtgcaacgggcgcgaacggcgcgggcggcgtggccgttcccgcagcgcagcgcaccacgaaaagcgcgaagaccattaccgacgcgcccgctctgccgggctggaaggtagctccgttccctctgcggaacgtcgccatcacctcgaacagcgtgttcgatcgtgccaaggaagggatgctcgactatgcacgcaactatccggtagaccgctggctgggagaacttccccagcggctcgctagacaaggctgttgaacagcaatggggcgatgccgaatacacgcgtggccagaacaagaacggtgctgatggtctgttgcgcggccactttgccggacatgcattgcacatgctctcccaagcgtatgccgaaacgggggaggaagcgattctcaacaagatcaacgagttcgtctccggcctgaaggaatgccgagattccctgcgcgagatgaagtataacggcaaagcccgctacagccaccccggcttccttgccgcctatggcgagtggcagttcaaggcattggaggaatatgctccctatggcgagatttgggcaccgtggtacacggagcacaagattcttgccggtctgattgccgcttacgagtttgccggtaatgccgacgcgctcgacctggctgaaggcatcggacattggacctatgcgcgtctgagcaaatgcaccaaaacccagctgcagaagatgtgggacatctacatcggtggtgaatacggcggcatgaatgattcgctggtggatttgtacaacgtctccaaggacaaggaccgtagcgaatttcttaaggcctccgcatttttcgacactgacaagctcattgacaactgtggtgctggtgtcgatatcctcaacaacttgcacgccaaccagcacattccacagttcgtcggttacgccaaagacgcggccatgggcgacgcggatatcgatgctgatgctcgtgcgcgttatctcaaggccgttgaggggtactggggcatgattgtgcccggccgtatgtatgctcacggtggtactggcgaaggcgagatgtgggggccggcacatactgtggccggcgatatcggcaagcgcaacgcggaatcctgcgcggcatacaacatgctcaaggtggctcgctatctgttctttatcgaacaaaaacctgcctacatggactattatgagcgcacgattctcaaccatattctcggaggtaagtcccgtgacctcgattccggcacggccctcacgccgggcaactgctacatgtacccagtgaatccggctacgcagaaggaatatggtgatggcaacatcggcacttgctgtggcggcaccgctttggaaagccactcgaagtaccaggattccatctacttccactcgacggacaacaaggaactgtacgtcaatctgttcacagcttccacactcgactggaccgacaccggcctgaagctcgcacaggaaaccaactatccggaggaggagacctcgacgatttccattacggccgcgccgaagagcgccgtcaccttccgcatccgcatccccgcgtggagcaaaggtgcgaagatcgaggtgaacggcaaggctatagatggcgtcaccgctggcgaatacgccaccgtggccggcagctggaaggtcggggacaagatcgtcgtcaccatcccgctgcagctgcgcaccgagtcgactgatgaccgcaaggacatccagacgctgttctacggtcccacggtgctcaacgcgctcaacccatccaccaagttcatccaacgcggcttctacgagcgcaacggcttggatggcaccatcaaactgggcgtacagaagaaggaaggcacgaagaactacttcatcattgacggcgacgagttcgagcccgcctacaacggcgacaacaccccgtaccacatgtacttccagcgcaaggacgagtatgtgggcttcgcaggcaagctcaccgatgtgctgaacccgaagcgcccggctgcacaggaccgtagcgagagcacgctgatggatgacatctgggcgggcgcgccgttcaaggaccgtgccgccttcatcaagaaggtgcaggaggtcacgaagacctatcaagacgaggggctgctttccagtcgtgatcgtcaggtggttctgcttgcctccgctcgcgccaagatgagctgacgttttcctgcgaccaaaccgtctcccgtagtgcacgacacggcgggagatgagtgatacaaaccataacgcctaacagaaagaatattatgaccatcgaaagcactacttcggccgtgaagggcggtgtggcgaaacgattcgccgcactgttcgtagctgcggccacgctgctggctggcggtgtcttctccgtatcggccgcgccgagtgcactggcggacgacgctgaaacgaatgttgcgctcaatgcagaaaaaggcaacgacaatgcaccagacgttcaggtcagctatgtcactggctggaacagcactgctgccatcaatgacgatagcttggacggcaacgccagctatggcggttggggcacttggggcaacaccagtgccagcgaaactgccacttacacatggaatcgcgccgtgaccacgtccaagtctgtgggctactactggacgaacgtcaagaccggtgatggtggcgtgccgctgcccaaggatgtctcgattgagtatctcaatgctgattccggccagtacgagaccgtgccgaacctgaaggtggacaagacattccccgccgacgacgagctcgacgccaccaacccggtgtatggtccgtatacctacaccttcgaccaggtcaccaccaagtccatgaagcttgtggtgaacaagaaggccaatgacaacaagggtattaccgtcactgagtggcaggtgtttggtaccagcgctgcactaccagtggatccgggcgacccaggtgctttcttagacgtgcagcaagttgccgtgcgcaccacgccgggcgtggacccgacctcgaagttgcctgcagaagtgtgggcgacacctcaagatggtcccagcattaaggttccagtgacttgggaaaccgttccggccgacgcttatgctacagctggtactaccgccgaagtcaagggcactactgctgccggtacctatgacaacatcaaagttgcggccggtcaggcgacggccactattggtgtctacgaccagctcaacaccgaggtgaccgacgcggagtacgtctccaccatcaccgctcccggtgtcaagccggtattgcaggataccgtggcgctgacctacgctgacggctcggtcgagtcgggtcacaaagtgacttgggacagtatcccggccgccgagtatgctgaagccgaacaggtcggcttcgtggaaggctctatcgagggtgtcggcaatatcaaggcggaaggcacgttcttcgtcgtcgcgccttccgacccgaaagcccagccgattgttgctatcgatttcgactccgcggcccccggctccggctggtacaccactgccccgaagttcaccatcaccgcgcagcgcggcgtctccaccgtgccgataaagacgatcgagtacaagatcggcaagggcgagtggaccagtggcaagggcccgatcagcgtgaccgcgcagggttccgtgaccatttccgcccgtgccaccgatgaaaacgacaacagccgcgaggtctcccagaccatcaaggtcgacaccaacgtgccggtggtcaccgctaagcaggagagcaagaacggcaacgatgtggtcgtctctctcaccgctgatgacggtgccgcaggctccggcgtgacccgtgtgctgtactccaccggcccgtccagcaacccgaagtccaacgagaacacgatgtggggcacctacaccgacgaggacaaggtgaaggtgcagctctccgctgaccacgacacttacgtgcacttctatgcgcaggatgccgccggaaatgagtccgactacgccaacatcaatctcggcaagggcgaagccgtgaccccgaccccgactccgtctgtggattccgttgccgtctccggtgatggtgtcaaggatggcaagctggcgctggtcgctggtgatactgcccagttgtcggccgaggtgaaggtgaccggtgatgcggccaagaccgtggcctggaagtcctccgacgcgaaggtcgctactgtggacaaggatggcaaggtgaccgccgttgccgaaggtacggcgaccatcaccgccacctccacggttgacgagaacaagtccgcgtccgtcgaagtcacggtaactaagcccgaggctccggttccgcctgccaccgatgaggagcgcaagcctcttgccgacaagatcgccgctgttgagagtgagaagctcaaccagaacgactacacggctgattcgtggaaggcatatgcggatgcacttgctgccgcaaagcaggtagtcaaggatccggccgcaaccgcaccgcaggtgaccgctgcgctcaacaaactcactgccgcacacgatggtctcgccaagaaggatagcggcgaaaagcctgaaccgcagaagcccggtcagcagaagcctgggcaaaaccagaagcctgaccagcagcagaagaacgctactaccactgcccccacgggtagtgcggtggctgccgttgctgcggccgtagttgtgctcggcgcggctggcgccggtctggttatctggcgcaagcgccgtgcctgacgtgaggctattgcccctaggctaataacaacccaataattgaatacaggtcttatacctgaagttgatctgcgtcgcactggcttgaacccgaatcgatgttcgggctaagcctgtgcggcgcatttcgttgcggctgtgttgctcataatccggtatcggagttattcattaggtcggtttgacgtttattaggtcggtccttggtcggagcggcccttgaaaccccgccgttccaagggatggcttcagcaccctccgacctaatgaacgaagaaatgacctaatgaatgcaatcgaggtcgtaaagagccgttggaggtgacatcttcagtgtcatcaaggcccgaattcaatttgtaagtgcaacacccgtctttgggtggcttgtcttcgagagtaccttgccgagctcgcggtaccaaacctcgttgggcgtttcccggtccaggaccttcatgggggtgtcgttgatctcgtccatgatggcc

SEQ ID NO: 1561 - DNA, 3364 bp, Unknown
  R221_24m  MAG No. k141_23767
cgttgtgaaaacaataagagaggaaagaccaatgacagccgtaacgtatttcacacggcatcgtcgaccgggaatcgcaatgctatgttcgatttttgccgttctctcgatgcttttcgtactccctcccgccattgcgtccgcagccggcaccgctcaagccgtggatgaatgcaatccgacatccgacaacggttgcgtcaacggcattctgcaggatgccggcaaacagccgatcgccggcgccaccgtcaagttatccggcaaggctacggcggagaccacaaccgcagccgatggcaagtgggcgttttccgttgccgatgatggcgactacaccgtcacgattgacgatgccgttgcgaaagagcatggcctgaagtcgagcagtgcgacggtcaccatcaagaaagccagcttcgacaagcagcgcggcgtcatccgcttcgatcaggccgacgataccgctggcaacggcgcggccgaatcggcggacagcaagcaggggacggcggatgcagccggatcggcggacgccgcagcatcgtcagccaaaaaaggtggctccaatatcggcaaacgtatctggcagcaactgtattctggcattatcttcggtctgatgctgggcctgatgtccgtgggtatgaacctcgtgtatggcactaccggactgcagtccttctcccatggagaacaggtcacgctcggcggcctgatggccttcgtgggcacgcagatgctgcacatgccgctcgtggcttccgccatcttcgccgtgatcatcggcgcgctgaccggcttcatccaaaacgagatcgtatggggtccgctgcgccgccgccacgtcggcaccatgcaacagatgatcgtgaccatcggcctgtccatggcgttgcagtacacgttccagttcttcttcggcggtgacattaagggtatcgtcaaatccgtgccgaacagcttccaaatcggcccgatcaccaccgacatgccaacgctgctttccgcggcaatcgccattatcgtaatcgtgggcgtcacactgttcctctacaagacgcggctcggccgcgccacgcgagccgtttccgacaacgcggcactggccgcagcgtccggcatcaacgtggatcaggtggtccgcgtggtatggattctctcgtgcgccatggccgccctatccggcgtgctcctcggcgtatacctcaacggcatctcttggaacaccggcgcgaccctgatcctgctgatgttcgccgcggtgacgcttggcggcctcggcaccgccaacggcgctcttatcggctcgttggtcatcggcatcgtggcggatatgagctcgctcgtcatccccaacgacatgcgttacgccagcgcgctggcaatcctcatcatcgttctgctggtgcgcccgcagggcatcttcggcaagcagcaaagggtgggctgattcatggatatcatgacaatcatctccaacgcggcgggcgagctgatcgcccccaccacggcggcatatgtactggccgccatcggtttgaacattcacttcggcatgaccggcctgatgaacatgggccaggcgggcttcatgctcctcggcacctacggattcgccatcacgcagtcgatgggctgcaacctgttcgcctcggtctgtgcggcgctcgcgctcgccgtcatctacgcgctgctgctcggcattccgacgctgaagcttgggcccgactatctggccatggtcacgttggcggccgcggaaatcatccgcatcgtcggccgttccacagccatgacgaacttcaccggcggttccgcgggcatctcgccgcaggatttcactgaaaagttcgaagcgctttccccactgcccgacggctcgaccacgttcctgctgtggacgtacagcaacaacatcgcgaattcctggtggctgcgtatcgtggcttggattttggttgcgatcgctgcgttcctgtgctggcgatggttccactcgccgtggggccgtatgcttaagggcattcgtgaggatgagaatgcgattcgttcgcttggcaagccggttacgaaatacaagatggaatcgttgattttgggcggattgttcggtgcgatggccggcatcatcttcgttctgccgcgctccgtacagcccgattcgctcggccgtacagttacgttctacgtgtggacgattctgctgctgggcggcgcggccacgattctcggtcctgtgctcggctcctgcgtgctgtgggtgctgctcaccttcgtcaaggaggttatgcgcaacaccgttcccgaaaccctgatctcctccaatcagatcgaagccctcggctgggtgatcgtcggcgtggcgctgatgtgtctggtgatattcagaccccaaggcctgttgggcgaccgaaaggagttggctttccatgcctgatacaacgaataccccgaccaccggcgcgcagcagccatctggcgtgcagccgggagcgccgttccatgacctgaccaaatgggccaccaaagcgccggaaggcgagaccctcatttccacggcctatcgtgacaaagtcaccgaggatttgaaatttgtggagaacaagccgggtgtgcacaagcccgatccgattctgatcgccgatgacgtgacccgcaagttcggcggcatgaccgccgtggacgtgagccatttcgaaatcgaaaggcatggcatcactgcgttgatcggaccgaacggcgccggcaaaaccacgttcttcaatctgatgactggtttcgatatgccgaacaccggcacttggcagttcgacggcaaggacatggcccacgtgcagcctgaaaaagtggcgcgcatgggcatggtccgcaccttccagttgaccaaggtgatgagccggttgaccgtgcttgacaacatgctgctcggcgctcccgtgcagcctggtgaaggtatgttccgcgcgctgttccccggcatgtggaagaagcaggagaaagcgaatattgagaaggcggaagcattgctggaacgttttctgctgatcaaaaagaaggatgattatgcgggtgcgctttctggtggtcagcgcaagttattggaaatggcgcgtgcgttgatgtccgacccgcagttggtcatgttggatgagccgatggcgggtgtgaatcctgcgctgaagcagtcattgctcgaccacattatggcgttgcgtgaagagggcaccacggtgctgtttgtggagcatgacatcaacagggtgcgtcatatcgccgattgggtgactgttatggctgaaggcaagatcgtggccgaaggccagccgaagagcgtgatgaacgatccggccgtgatcgacgc

SEQ ID NO: 1562 - DNA, 45077 bp, Unknown
  R221_24m  MAG No. k141_23823
ccgctgcaagtctgcatgctgttacggagcagttgattaatgaggacatgcgtgataccagcgggaagaagcggtatcccgacgcgttgcccgccatcgtcagcttcgaagacagcttcatctgcgaagcggcatttccctctattacgtccgtgtatcgtgatgccagcgagtacggagccaaagtggccaaattgctgttgaaaatactggatggcaatcaggtgagcggcaaccgtcgtattctcaccccaaagctggtggtcaggaacagtacggccatgtccgtggcatagtcaattgccgacatttacgtaaattgacctcccattatgcggaaggccaatttacgttatattcgctgcgcttggggaatttattgccgcctattcagcgttcttcacggccgtcgcaatggacacggccgggtccaagaacggaatcagcgtggactggaaggcgtggtacaggtcggacttgcccggccagaccgtgccgatcacgtggttgttcttgtcaagctgatggaaccaggaaccgccctcgtggtcgatgacatgctcatcgacatactgggcgaatgtggcgtaccagttggcgtacatctcctcgccggtggccgcatacagcgtggcggaagtgttcaacgattcggccagcgtccaatgcatgcgatcggtgaccacgggcttgccgttccagtcggtcgtgtaggcgagtcccacggtgccgtcggcgttccatgcgtcggccacggcacgcgcgaacagatgctcggcggcgtcgacgtacggctgtgcgccgtcaaggttggcgaaggagcttaacgcccactgcgtgatcaagcgggcccattcgatgccgtgacccggcgtggcgccgtacggcttgaactgatcatccttcttgtcgacgttgcattcgaggtccagcgaccaatcggacttgaaatgttcggggatgcgccactcgttgtgtgccgcccattcgatgacgtggtcgatgatgcggccggcgcggacgcgataggtgttgttcccggtggcgtcggccacggccaggaatgcctcggtggtgtgcatgttggcgttgagaccacggtacgggtcgagctcggtgaattcggtattccaggtatcgacggccaaaccgatctcgtcgtcccagaaatgcttgtcatacgtggcgagcgcctcgtcaagcagttccttggcacccggacgtccggccagcagggcggaggacgcggcgagaatcacgaaggcatgcgcatagcagaccttgcccggcgcatgggtgccgtccgcgaacacctgcggataccagccgccgtgctcgtcgtcatgcagaatgccggtcaatcccttgagcgccgcgtcggccagctcgcccgcacccgggtatccgagcatggcaccaatcgaatacacatgggccatacggctggtgatccacgtttcgacgccgtgggaggggtcgagggtgccgtcggcgttcagccagccggaaccgccatccggcgctgggaagcccttgccgaacttcagcagctcgtaggtttcggaagccatgaaaatgcggttggcttcggtgccgagcgtataccgtgggttattggtcataatgattgttcctttccttaacgagaacatgcggtgggtgcgcaatgagcattcagcgggcacgtcttagtgcttcacacgaatgccgaaatagtccatgaccagttcgcagaacatcatattcgaccagctgaaccattcgcgcgtgtacttggtcggatcatccacgtcgacgccttcgtgcatgagatgtgtaccggcgtcggtggctacaagacggtcgaggatatgcgccttgaagtccttgctgtcgctggtcatcgcctcgatagacagcgcgatcggccacacatagcgcggcggggtgtgcggtgagccgatgcccttgagatactcgccctcgtaatagtacgggttttcgtcgctgagcagcgtgcgtcgggtcgccagatacgtcggatcgtccggtgcgcagtaccccaagtaaggggccgccatcaaggagggcacattgctgtcgtccatgatattgacgtgacccaggccgtcggtctcgaacgcgtaaatcgtctcgccattgcggttcgtcgttttggcgtgggcttcgatgccttcggtgatggtgcggcgcagctcgccggcacgggcggcgatatcggcgtcatccagaatctcaccgccgaagatgcgttccagatagcccatcaccacggcggcgaacatgttcgagggtaccagatagtggtaggtgcaggcgtcgtcgctggggcggaagccggaccaggtcatgccggtgtacgccaccggcgaccccttgccgtcattgctcagcgattcggtggggatgtccgtgtcgcggatgaagaaatacggggagcgttcatgatgctgctcggtctcgaagacgtcaagaatcttcttgacgccggcaatgaattcggcatcgaagtgatcggcgttgccggtgttcgcatacagcatccaagccaactggatggggtagcacagcgaatccacctcgtacttgcgctcccaaagccaagggctggagaaatcggaccggtcgtccttgtcccaggaggcgccgttcggttcctcgttgaaggcattcgcatacgggtcgatgatgatgtagcggaactgttgccgtatcagaccggcgatcaggttcgcaatatcgctgtcttcggcggcaagggccagatacgggcgcaattgcgcggtcgaatcacgcagccacatggccgggatatcgccggtaagcaggaatgtggtgccgtcgtcatgccgtttgaccgtggtggtcagggtgtcggcaaagcaggcattgaagttctcggcccaggcggcgtgttcggtgccacacaggtccgtgatgtgctgcatgaaatccgagaccgacttcggtatcgcggtggtcgtcataaattcaacttctttgtttgagggatatacatatcaagggaacagcattattctaaaccgctttagttcatgacacgcgaaaggatgtgaagagcatgagtgtgagcgcaccatatgaaaaaccggtgagatttcctgttcggagaatctcaccggttgcgatcagtcgattcgtgaagtcgcacgaatggcggataaggggatgggtggattacttgccgatttcagccagatagtcgggcatctcggccgggtactgcggccaggcaccggcctgggtgcagacgtaggcggcggtgttgacggccttgcggtgggcttctgccagcgtgtcgcccagcaggatgcgggcggtgaaggtgccggagaaggagtcacccgcacccacggtgtcgttcacctcgacgtgcggagtgtccagcgtggagacctcgcccttgcgggagatgatggtggagtaggcggagccggcggtcagaatcacgtagtcaaggccgaattcctcgatgaaccagcgggaggcgtcttcgccggaggtgccgcggatgtcgaacatgtcgcgcagcagcaggagttcctcgtcgttgatcttgaagacggtggccgccttgaggagttcctcgatgaggtccttggagtagtggtcgccacgcaggttgatgtcgaagaacttcatcgcgcccggcttggtgtgcttgagcagctccgtgatggtggcgtgcgattcgggggagcgcagggccagggtgccgaagcagacggcgtcagccttggagaccacgtcgatgagctggcgggtgtagaggatgtggtcccaagccacgcccttgacgatggtgtactccgggatgccgttcttcagcgcgacctcgacggtggaggtcggccaggcgttgcgctggatgacggtgttgatgccggcctcgttggccttggcaatcagttcgtcgccgagctcatcctcgccgaccgcgctgatagcccagccttcggtgccgttcttcatcgcgtggtaggcgaagttgacgggggcgccgccggctcgcttgccgctcggcagcatatcccacagcagttcaccgaggctcagaacgatcggggtagtcatggttggtttcctttcctttgtttcttttaccgggtgtttcgtatggaacatcttgtgatgtcggcgcttggtttaggagacgtcgaagaacaccgaggggtgttcgaggaattgggtcaccgccactgctgcggcaccggagaccgccgcgtcggcggacagggtggataggctgatggaagtggaggcattgatttcggggatggcccgttcggccaccgtggcgcgcacctcatcgagcagtatcgggccggcttcggacacgatgtcgccgatgatgatgtgctcaggattgtatccattgaagatggtgacgcatccgtagccgacgtatcgggcgacttcgcggacaatggcgattgacgcttcgtcgccgtcgccggctttggcgaacagggcgcgggcggcttcggtgtgggtcatatcggccgcgccgggaaccacggtgccatcggcgatgagcatgtcgtgaatggcgggggtggagcagtagcgttcaaggcagccgacgttgccgcaatcgcaggggcggccgttgacgtcgatggagatgtgtccgatttcggtggcggcaccgaggaagccgttgatgagacgaccgttgtcgatgacgccgaggcccacgccttcgccgaccagataataggcgaggttgccgtcggcgtgcaccgacgggtcgaagagataatgtgcgagggctccggcgcgggcgtcctgttcgatgaacacaggcacgcggaaagcggtggcgaattcgtcgatgaagttgattttgcgccagccctgcatgctggacaccacggcggtgcggcctacgttacgcaggtaggggccgggcaccgccatgccgatggccacaatggacgggtcgttgtcaagcagttgttcgacgcgctggtggatggtgacgatggtgtcgttgatggtgttgtcgtacaccgtgggcaggttttcaaagctcagggtgttgccacacaggtcgaacacgccgatctgcaccagcgagcgggcgaatttgatgccgatgatgcggaaccgcgtggtgtcgagtttgagaccgatggaacggcggttcttggaaccttccaaatcgccggtctcttcaatcatgccggcctcgataaggcgtgcggtgattttggtgatggccgcgggggtgagttccagtgccttggcgatttgcgcgcgggagctgatgccgttgtgatacaggtgcttgacgatgcgggagcggttggattcggagacactggcttgggaagtggcatgggtggtgtttgttgccatcggtcttaagtcctccttgtctgcaccgttgcgagttgttccgctcgtctttgaatctgaacttgattaagatattaacgctgttaattgattgacgcaatcaatatgtcattcggtgtgtcgtgcatgtgagtgtcgtcttgggggaatttgttaagatggttgtcaatagtcggatgcacactgatatcaagcgaaacgttcgatgaagaacaggggaggactgatgtctgaaaacactatgaacaatctcaaaatcggtgttgacgtgggcggaacaaaaatcgaagctgtgctggtcgacgcaatgggcacggtattggattccgcccgtattcccgccaggcatggcaacgatgccgtgatcgaagacatcgtcgctgtggcacatcaggcagcgggtgagcgttttgacgaggtgagggccatcggtgtcggtaccccgggcacggtggattcggccagcgggcatgtgggcaatatcgtgaatctcgacgtggtctcgctggatatggggccgttggtctcgcagcgttcgggcgtgccggcccatgtggaaaacgacgtcaatgccgccgccgtcggcgcggccaccgtattgggcggtgcggacggcatggccggtaccattgcgttcctgaacttcggcaccggactggctgcgggcatcgtcgaaaacggcgtgctgatgcatggctatagcggcgcggccggcgaaatcggccatatcccagtcgaacctcatcgcctcaagtgcccttgcgggcaatacggatgcttggaaacagtctgctcgggcgcatccgtggggcgtctgtggcccaacgccgacccgccgatgcccgacctgattcgtcgcgcgaaaaagcgggaggccaaggccgtcgatgtgctggacatggtagtgcgcgccatcggcgacaccatacaaatcctggctcagtccgttgatccgcgactcatcatcttgggtggtggcatggccaaaaccggcgaaccattggtcgaggtgatcacggctgagctgcgccggcgcgaatcgcaatgccgattcctcgaaacgctggacctgtcggcccggctgcgtctggcacctgtcggccaaccagtcggagccatcggtgccgccatggcggcgtagcctggcatagtgccggggcatgggagatggggcctcagatttgtctccgaggccccatctcccacgcagtcctatatcgctttatgtcgtgctgtgccgcgcttggtcttgcgcgtttcgttgccggggtgaccggcttttatttggccaagtgttggaagaccacggcgatggcctcgccctgcacggtgatgtcaggtccgcattcgcagcgccgaatcaccgtgtgtttgtggaaggacgaggatgtggcggcatccagatattgctgggccgctccgatgaacgtcgcgttgatgatgttcggctggccatagacgcatacgtctgccatatccaaaaggcccacaggcatggccagggcttggccaagatagcggcccgcccgagcaaggataccctgatgctgctccacgtctgccgcgctgagttgcttcttcaatgcggttccggaaatcatcgtctccaagcaaccgtgcttgccgcaagggcacagcggcccgtcaagatcgatggaaatatggccgagctcgccagccgcgtgcagttcgccgattaccggcgtgtccgagagcagaatcgccgaaccgatgcctctttcgatgcgcacgaaaagcatattcggcccgccttggccaaagaaacgttcggtgagcatggctgcggtggcgtcgttgctgacgtttacttcaagtccgaaatgttcggcgattggcgtggacaggtcgagattgttccagccgcgcatcgtggaggagcggaccacgccgttgtctaccacgccgggggaggcgactccgatgccgatgacctcgccatcggacatgcccagcatcttctcaatgagctcgatgatcacatccacggaaacgaatgagccggtgttcagggtgacttcggcgtgacgcagcggctggccgagcagattggtgactgcgccgtgcagcaggtgctcctgcgtcaggtcgatgctgatgatgcgcagtcgatcgatatcgatgctcagcagtgtgcctcgtttgcctttgccgccgctgggtgcctgaccggtctcgcgcagcaatccttcctccagcatccgaccgaccacatcggaaacggccacgcggctcaatccggtgcgccggccgagctcggcgcgcgaatactggttggtggggaacaacaacctgaagataagttggcggttcttgcggcgcacatcggcgggggaagccttggccgcatggtcgtcggtcgttgtgttgagaccgagatatgacatgtttcctcctacctgatggtgagcgagtggacggcgattgttgttccatacacagcttagacggtgaagcgcaatttcgtcgttgaaactgttatgaaacttcactaataaattccagtgtacctgtgtgaagcgtcaggaaacaccgtgagtgttcatgaggtccaaaattgttactatcattaacaaatagcgaatcaccaatcggcgctacgccgaacggtggttggaacgccgcgcggcacccggacgtgacaaggatgttgccattatccgcaagacgggcggcggtacagcgactcgcatcgggcgggccgcacggaactggaggaaaccgatgccggaaatcatcattgtcaagaacgaagccgaggccggcgagatctacggccgttgcgtggcggacctgatcaaagcaaagccggacgccgtgctgggcctggccactggctccagcccgctggccgcctatcaggcgctcgccaagatcgtcaaggacgaggccattgacgtttcgggcgtgcgtggtttcgcgcttgacgaatacatcgggctgccgctgacccatcccgagtcctatcatgcgaccatccatcgcaccgtggtcgaaccgcttggcctggacccggccaaggtccatgtgcccggcgacgtactcaacggcactccgctcgaagacggcgacaaagtcgcgctggccggcccggcctatgatcgtgccatcgaagccgctggcggcatcgacgtgcagatcctcggcatcggcaccgacggccacgtcggcttcaacgagcccggttcctcgttggcctccggcactcgcgtcaagaccttggccgaacagacccgcatcgacaacgcgcgcttcttcgacaacgacatcaaccaggtgcccacccactgcatcacgcagggtattggcacgatcatgaaggcccgtcacctcgtgctgctggcgttcggtgccggcaaggccgaagccatcgaggagacggtggaaggcggcttgtccgcgttctgcccggcttccgcgctgcagatgcacccgcacgccacgattatcgtggatgaggaggccgcctctcgtctgcgccacaaggactactatcgctacgcctacacccacaagccggcctggcagggcatctgagttatcgtgtgctggcttccctctttgtgtgaggggagctgtcgaatgtaatgagactgagggtggttatcggcggcggcatatgtgtattgcttcccgattggaccaccctcagtctcgtttcgcgagccagctcccgttggcgggagcgcatgagcggtaaggagaacaacatgtctgataggaacgagatagtctcgcgcgtgaccgcggcactggagggcaagccggctccggtggcgattcgcaacgcgcgcaaggtggatgcgtgcggcgaacggcgcggatattgggtcgtctccgatgccgccggcgtcatcgtggcggccggcacgggggaggaggccttcgagcactactgccgcacggtggggctcgacccggccgatcgcaacgcggtcatcgacgccgaaggccgtattctgacccccggctacgtggacatccacgcgcacggcgcatgggtgaagagcttcgacgacgggtcggatggcatcgatgtggcgcgggccggccacgccgtgcacggcaccacgcgccaggtgctctcgctgatcaccaatcccgtggacgtgatctgccggaacatccgcaccgtccgcgccaagatggagtccggccgccccgacatcctaggctgtcatctggaaggtccgttcctggctctggcccgcaagggcgcacatgacccggaatgtctcaaggatccggtacccgacatcgtcgacgacatgcttgaggcttcaggcgcggcgaacggcaagattggctgcatccgccagatcaccatcgcccccgaactaccccacggcatctccgccatccgccagttcgccgctgcaggcgtggtgccggccgtgggccactgcgacgccgactacgagaccgccaaagccggcttcgacgcgggcgcgggcatcatgacccacatgttcaacgcgatgaacggcctgcaccaccgcgagcccggtccgattccggccgcggtggaggatccgcgcgtcaccatcgagctcatcaacgacggatttcacgtgcaggatccgatggtgagcctctccttccggttcgcgcctcatcgtacggccttcgtaaccgatgcaatggccgcgaccgactgcccggacggtgcctacaagttgggtgcactggacgtgaacgtggtcgacgggcatgcgcgtttggtctccaacggcgccatcgccggctccactctgctgctggaggtcgccgtgcgccgtgcggtgtgcgaactgggcttgagcccggtggacgcggtcgaggccgccacattgacgccggccaaggcgttcggcttcgaccggccgaacccggtcaccggggtgcctatcggcctcatcgcccccggcttcgccgccgatttcaaccttgccgatccgaccgattggacggtcgaacaggtgtggtgcgcgggccgcaagctcaagtagcagtaggccgaccggttgacgaatggaaagcattcgtctacaagcatgttcaaatggtgacatgatagcatgttcatctcaccatttgaacgttattcacgtcgtaatacaagaatccgtaatactgctcgataccgcataaaaccggccatggtcgccacaagcgaaacataagtcgatggctgtggaaacgcaggagtaacacatcctcaccatagtcaggcggtaatccacgcccgcagtgatggcgtggaaacaagttatgagagaggattcctgttgaattccaagaagattctggccgccgccgtctccgtggccgccatcgcatccctgaccgcctgcggcggtgtgaaggatgacaccaccgcaggcgccgattccggcaacgccatcaccatcggcaccaccgataagatcaccagcctggaccccgccggctcctacgacaacggctcctacgccgtgcagatccaggtgttcccgttcctgtatgcccaggactacaacacctccgagctgagcccggacatcgccgccgatgacggtacctggaacgatgacggcaccgaattcaccgtcaagctcaaggacggcctgaagtttgccaacggcaacgacctgaccgcttccgacgtcaagttctcctacgatcgcatcaagaagatcaacgacccgaacggcccgagctccctgctcgccaacgtcgaatccgtgaccgctaaggacgacaccaccgtggtgttcaaggattccgtgcctttcgacgtgactttgaagcaggtcatgtccagccccgccggcccgatcgtcgatgaggataccttcgacgccgacaagctcaccgacgccgacaccatcgtctccaagaaggccttcgccggcccgtacacgctgaccgccttcaagatcaacgagtccgccgcctacgctaagaacgactcctacaagggcctgaccccggccaagaactccgccgtgcaggtcaagtacttcgccgacgcctccaacctgaagatggccgtccagcagggccaggtcgacgtggcctaccgctccctgagcccgaccgacatcgaggacctctccaaggactccaaggtcaaggtcgtcaagggcccgggcggtgaggagcgcttcatcgccttcaacttcaagattcagccctacggtgaatcccagcccgacgccgacgctaacaaggccaaggccgtgcgccaggccgtcgccaacctcatcgaccgcgaagagctctccaccaaggtctacaagggcacctacaccccgatgtactccttcatcccggacggcctggccggtcacgatgacacgctgaagtccgcctacggcgacggcaacggcaagccgagcaccgagaaggccaagaaggtcctcgccgatgccggcgtcaccaccccggtcgacctcaagctccagtacaacagcgaccactatggctccgcctccgccgacgagtacgcggccttgaagtcccagcttgaggaaggcggcctgttcaaggtcgacctgcagtccaccgaatggacccagtactccaaggaccgcgtggtcaccgacgattccgacggtgtgtacccggtctaccagctcggctggttcccggactactccgacccggacaactacctgtccccgttcttccgcgacggcaacttcgtgaacaacggctactccaacaaggaagtcaacgacctgatcgtcaagcaggccggcgagaaggatgcctccgcccgtgaggacatcctcaagcaggtccagaaactcgagaccgaagacctctccaccatcccgctgctgcagggtgcccaggtcgccgtcaccggcacctccgtgaagggtgtcaccctcgacgcttccttccgcttccgctacgcctccgtcaccaagggctgatccagcatgagctcccctctttgaggggggagctgtctggcgacggcagactgaggggagcccaactcgtatgactcccctcagtcggcttcgccgccagctcccctcggagaggggagcctttattgctttatataccgattaccaacaccaaggagcatcgcgtgtcagacagcgccacagcgacctccagcaccactccggcgaaagccaagacgaagaagaaccgactgtcaggtagtttcttccgcttcgtgctgacgaggttcctcctcattatccccaccgttttcattctggtcaccatcgtgttcttcgtgatgcgcgccaccggcgacccgatttccgccgccctgggcggccgcctgacacccgccgaactccagcagcgcatccacgcggccggctatgaccgcccgctgatcgtgcaatacgtcgactatcttggcggcctgctgcacggcgacctcggcacgacgctgaccgataaccagccggtgatcagcatccttacgcactacggcgccgccacattcgaactggccttcctcgccctgatcgtggcgctgatcgtcggcatcggcctgggccgactcgccgcccgcaaacgcgaccgtgccgccgacgccggcatccgcatcttcgccatcctgtgctacgccaccccggtgttcttcctcggcctcgtgctgaagctcatcttcgccgtctggctcaacatcctgccagcctccggccgctccgacctgaactccgaaatgcagttcacccgtctggtatcgccgaccggcttctacatcatcgacgccatccagctcggcgacatgaacgtgctcgtcgacgtgctgcgccacgccgtgctgccggccgtcgccctaggcctgctgaccgccggcgtgttcatccgtctggtgcgcaccaacgtcatctccacctacaattccggctacgtcgaggccgcccgctcgcgcggcgtctccgaaaagcgcctgctcaacaagcacgcctggcggccggccttgatcccgatcatcaccgtcatgggcatgcagatcgccctgatgctcgccggtgcggtcctgaccgaaaccaccttcgaatggaagggcctgggcttcatgctgtcccagtacctgaaggcccgtgacttcgtggccgtgcagggcatcgtgatccttatcgccatcatcgtggccgtcgtcaacttcctcgtcgacgtcatcgccgcgcttatcgacccgagagtgaggtactgagatgaccaccgcatcctccgacaagatcaccgtccccggtgacgaccgcctcaccaagctcaacgtcagcaccaagacgccgttctggaccaagattccaatcatcaaggaactgcgcgtggcggtcggctggcagaagggcatgctgatcaccggtctcgcgatcaccgcgttcttcctgctcgtggccctcttcgccccgctgatcgccccctacggccacgcccagatcaaggccgccgacggcacgtccttcccggcgcaggccgcgccctccgccgaacacatctggggcaccaccgccgccggattcgatgtgttctcccgtgtggtgtggggtgcccgcaccgccgtcatcgccatcgtcgtggccgtgctgctctccatcttcgccggcgtgctgcttggtctggtgtccggctactacggtggctgggtggaccgcatcctggtgatgatcgccgacgccgtctactccttcccctcgctgctgctcgccattctgatggccatcatgatctcccacggccagtccggcctgtggagcggcatcctggcctccggcatctccatcaccgtggtgtacatcccgcagtatttccgcacaattcgcgccgaagtgatccgcatcaaggaatccgcgtatgtcgagtccgcgcgcgtggtcggcgcctccacctggcgcatcatgaccaagcacctgttcaagaactccacccgcacgctgccggtgatcctgacgctgaactcgtccgaagccatcctgaccctcgccggcctgggcttcctcggcttcggcatcgagccgaccgccgccgccgaatggggctacgacctgaaccgttcggtttccgacgtgaccgccggcatctggtggaccgccgtgttcccgggcatcgccatcgtgcttatcgtgctcggcatcacgctcgtgggcgaatcgctcaacgatctggccgacccgcgtctgcgcgcccgcaagtccgccggcgaagtggtcggatcgatcgaagacacgtccgtcgacccaaacgagaagccgtccgcacgcaacgaggtgatcgccgaactcgacgcgaacgtcgacccgccggccaccgtcaccgaccatgacccgaccatcgtcgcctccgaatggaccggcgaaggcaagccggaaggcaaggagtgagagatgagcgaagacaacaagaatctcgccgatatcaaggacctgtccgtctccttcatgaccgacgccggttccatcaaggccgtcgaggacgtgaacttcaccattccgcgcaagaccgtggtcggcgtggtcggcgaatccggttccggcaagtccgtgaccgcgcgctccatcatcaagctgctgccggagacggccaccacctccggtgccgtctacctgtccaagcgcgatggctccgattcgctggacgtgctctccctgagcggcgaacagctgcgcgaagtgcgtggttccgaggccgcgatggtgttccaggagcccaattcggtgctgaacccggtgtacaccatcggctggcagattgaagagggcctgtgcgcccacggcatgaaggacaagaaggaactgcgcgccaaggccatcgacatcctgaagaaggtcggcatcccggatgccgaaacccgcgtggactactacccgcaccagttctccggcggccagaagcagcgcatcgtcatcgccatggcgttggtgctgaaccccggcctgattctggccgacgagcccaccaccgccctcgacgtgaccgtgcaggccgaaattctcgacctgctgcgcctcgcccgtgacgagttcgacgcctccgtgctcatcatcacccacaacatgggcgtgatcgcggacatcgccgaccaggtggtcgtcatgtaccgcggccacgtggtcgagcagggcgacgtggagcagatcttctaccatccgaaggacgactacaccaagcgactgctgggtgccgtgccgcgcatcggtcagaagctggtcgtgcgcgactgcgagggcaagccgatcgagcgcaaggccgattggcgcgaacagccgatcgccgttgaggccaagaacctgaccatcacgtacccgggccatctcatgcagcccgacttcaaggccgtggacggcgcgaacttcaccatccaccgctccgaagtgctgggcctggtgggcgagtccggttccggcaagtccaccaccggccgtgccatcgccggcctgcagaaggtgtccggcggctccctgaacgtgcttggcatcgagatgaacggcgtcaaggagcgtgacttcaagcccaagcgcgcggacattggtttcgtgttccaggatccgggctcctcgttcaacccgctgatgaccatcgcggagaatgtggccgagccgctgctcgtgcaccacaagtacggttccgtggccgaggccaagaactatgtgggcgacctgctggagatggtccagctgccgcgcgcctacatgaaccgtttcccgcatgagctgtccggcggccagcgccagagggcgtctttggcgcgtggtttggcgttgaagccgtcgctgctgatcgccgatgagccgacttctgcattggacgtgtcggtgcaggccaaggtgttggagctgttcaagcgactgcaggcggaaatcggcttcgcgtgcctgttcatcacccatgatttggcggtggtcgatatgctcgccgaccgcatcatggtgatgcataagggccagatcgtggagcacggcgatgccgaccagattatgcagcacccggagaacccgtacaccaagaagctgctggcctccctgcccgtgcccgacccgcgcgaacagcagcagcaccgcgcccacctccacgagctcctagcccaagaggcgtaatcgcatagcattggagctccctcgtcagagggagctaactttatatccgctagtactgctgcccatcgaactggaacagggcgtgggcgtcgccgtgctttttgttctcgatgtaagtatggaacagctccagccgctcgctcgtgctggccgccaggggagtgggcaggtcatccagatcgaaccagccgacgctgaggctttcctcgtcgcccacgaacggctcggcattgccgccgggcttcagggcgcacaggaacgaatgatccatgtacatggtgttgtcgccattggcgtaggtcagcaccttgtttgacgaggtgacggccaccaaatcggtgacgatggcatcgatgcccgtctcctccttgatttcgcgcaccaccgtgtccgccggctgttcgcccggctcgttgatgccgtagaccatcgcccattctcccgtgtccgaacgacggcccaacagcagttgaccatgttcgttcagtacacaaccggtcacgccattgagccatagcagatcatggccgatcttcttacgcaattccaacacaaattccggagtaggcacattgcctccttagtagaaaaaaggagctccctctgatgagggagcttaagggttacttggcttgggcagcctgcttaatatggtgcgcttcgcgcatgatttcattttcctcgcgcttgtcagcgttcggcgtcgcctacaatcagtccaccggactgattgctttacggctccgcatccacgcttcgacgtcgtcgatctgcttcgggatgccggcggaaatccattcggggccgttctcggtcatgagcacgtcgtcctcgatacggatgccgatgccgcggtattccggcggaatcagcagatcatcctcgcggaagtacagaccgggctcgatggtgaagatcatgccgggcgtgatcttcgcgccctgataggactcatagcgggcctgcgcgcaatcatgcacatcaagacctaggtggtgggccacgccgcaggcgagccaacggcggtgctgctggccttgcggggacagtgactcctcgacgctcaccggcagcagaccccaatcgtgcagacgctcggcgatcacacgcatgcaggcgtggtggatgtcggaataggtggcacccggcttggcggcttcgaaaccggcctgctgcgagtccagcacggcctggtacagacgcttctggaagtcggtgaacttgccgttggtcgggaaggtgcgggtgatgtcggccgtgtacagggaatcgacctcaacgccggcatccaccagcagcatgtcgccggtcttcaccacaccggtattgcgcatccagtgcagaatcggggcgtgggggccggaggccacgatggagtcgtaaccgatggcgttgcccagctcacgggacacggcgttgaacgcgccttcgaggatacgctcggaacgcggcttgtcgagcgcggccggcagtgcggagagcagacggtcgaagccgtgcttggtggcgtccacggccttgcgcatctcgttgatttcgtagccgtctttgaccatgcgtgcctcggcggcgaactcgtgcagcttgtcgtcggatgcggagttcttgtccggatcggcgaaaccgttggcctcgcggatggactcgaccatcgaggtgatttcgggatcggtctcgctgaccacgcgcacacgcacggcgccggcctcggcacccacgtccttggacagggcgtcggccagctgggcgatgtcgtgggtctcgatgccggtcatcgcctgcatctccttgaggccagcacgcgggccaacccagtattcgccgtagtgggcggacatgaagaagtcctcggtggagttgtcggcgcgaggtgccacgaacagttccggagtgtgcgtcttgccggcggcggcttcgggggagtcggggtcgaccgggttcaggaccagcacggcgccggcctcgtaatcggaacccagaccggtgtagtaggcgaacgtggtgtccgggcggaacatgtaatcgcaatcattgttgcgcaccttcggctggccggccggaatgaccagacgctcgcccgggaaggctttgcccagcgcctcaaggcgggctggcgtgaacttggaggattcgagaggcttgatctccggatcatcgtcggcccagccggacttcataaactccttgaatgcagccgactgcgggcgcagcgagcggttgttcacacggtcgctcatcgactggttcgcgcccggcgccgtagcgcgctcctcggcctcatattccttgtccttggcggtgatcacttcacccattgccactctcctgtatgtagttgttgtcgaatcatcgattcccacctcatactagtcggctttatgcgatgtgccacgattgacggctgacggtaaaaccaagtacggaatttggacggtcttccggacatgcccatatggcgagtgcatcgggctggaatgcgggcccgtttattgttctcggtagggaaggaggggcatgggctggagcttgccgattgatattggcatattttgcgggctgaatccatgtgaacccatgcgatgaaggttcatcgcatcacgggacccgctgctctgcggatgcctccatctggggcactctggctttgagcagttttacccgcagcggagtgcgttcgatgacgtcggcgtatgtgaaatggacgatttcggtggcaccggctcgtttcagtccctcgtcgcgtgctcgttccttggccaccacctcctgaatgctgcggttatcggtcatggctgggtccacgtatttttgtgtgccgtcgtattcggccactatcacgcgcccgtcatcgagcttccatacgaaatcaacgcggtgctcggtattcgtctgcgggtcggtcaccgttacctgaatacgcggcgtgaggaagcgatcctcgatgatggtgcctcgcgcgagggattctccaccattctcgctcctttcgtttgcatagcgcagcaggcggaatactcgggcataatcgattctccattgaacgcagtcggcggctatctcttccttggttattcccttggcaagggccgagtcaaagatcggcaacgcaaaccgaaaatcaaggtctatagcggcctcgaccaaggttctagccggtgatatcagggataggccggaggcctcgtaatgtgtcttcggattgttcatatcgggcatatagacatgtcgtaagcgctgatggcattgacgagatccatgatcggaagtcacgatggttatgcagccatcatgcaaatgccattgatgttcgaatccataagcacttactgccaccaagccgccaaaaacccactgaggatgctcttgcgcaagagcgcgggccatatgcaacgttcgctccggcggcgtcaaaccatcccagtatgcggtatttgcataaagactgggaatgccgtcatacactttcaacaactcgccactctgggcacggcggcgtagagcggtctgttccgcttcatttcttgaatagacgcatctcagctcattctgcgcggctgatatgagcgaggccactgctttgtgtgtcttcatgacgtcgagcgtagccggaacgaagcagcgtaagtatgaatttcagccattgtggttctagcctcggagcttggctgtcttggagtgagatattcccgataatttcaaggtattaggccactaattcggaatagtggataacatacaaaacttatccaccatcagtaatgtcattcgaacaacgtgccttggggattcgaacaagatatcatcggcgaagacggatgtagctggtagagggcggcgaattgacggttaacggtgcttatgctttgtacgccgtcggtgctggttcagatattggctggcttctgtctgagtgtggaatctagcgtcggcgtgagtccaatggttgtatcgtggccgacgatttgctgcaatttattggcggcatagatccagggcttggacggctgccgacggtgagagcagtcataacagtgaatgagcctctgcgagttcaaaagatgatgtagcggacgtttgtgagagtcgtttccggggcaagacatggtcgattgacgacgttgaaatttctcaacgacggcagaatggcatgccttggcgaggagacgacactgagaggcgatggagtcgggattaatccaggttttggccagctaccgactcgcaagagcatcatagcgtcggtgtaccgccagaagctggcactgtaccgacgctgaatagcatcagcgtcgccggacatacaagttttggattgcagccgactaagaatgggatgccgacggcaagagccgcattgcaactatatgagatggcttcactgtgcgcgctgcaggaaaaggccgcccgcgcggcggcgacatatgagacggtttcactgtgcgcgcacgataaaccaccccggcggctaggatagagggaattgagggagtgcggctccacgcgtgaaggcaagaatcccgaaccatgcagggcaaacctgtgcgaggggagcttcctgcgcatgcggaagcggaatatacgcgggcatgcgtagacatgacgagaatggcacgaacacgtaagtggcatacgcactccgaacggttcaacagcaacacgagcagaggtcagaagaggatatgtcattcgagcatccgaatcggaacaacgagagcatgcgggacgtcgaactggacatcatgagccgcccgccggagcataacaccaccaatctggatctcgaccggatgaacctgatgctcgacatcctgggccacccggagcagtcgttccgcgtgattcatatcaccggcaccaacggcaaaggctccaccgcacgcatggccgaggccatctgccgcgcctacggtatgcgcaccggcctgtacacttcgccgcatctggagaagatcaacgagcgtatcgccatcgacggccagcagctgtccgacgacgatttcatcgacatctgggaccagaccaaggatctcgtggccctggtggacgccaagatggaggagcaaggcaagccgaagatgagcttcttcgaggtgctcaccgccatggccatctggaagttcgccgacacgcccgtggacgtggccatcgtcgaggtcggcatgggaggcctgtgggacgccaccaacgtgctcaacgcggatgcggccatcatcggcccggtggacatggaccacatgcagtggctgggcgacaccgtcgaacagatcgccaccgagaaggccggcatcatcaagccgaactgcaccgccatcatcgggcctcagccgcatgaggaagccgtcatgccgattctcaccgaagccgccgaacgcaaccacgccatgctcgtgcgcgacggctacgaaatgaccgtgtccgaccgtatggccgcagtcggcggccaggtcgccaccctgaccacgcccaacggcacttacgagggcgtgccgatcgccaagttcggcgagcatcaggcccacaacgcgcttgccgcgcttgccgcctctgaagtggtgattccggtcaatggcccgctggacggcgacttggtgggcgaggcgttgagctcggtcaagattcccggacgcatcgaacagatccgcacctcaccgaccatcattctggatggcggacacaacgtgaatgccgccgaagccctacgcaaggccatagaggaaagctacgacttcaagcagctggtcggcgtggtcgccatgatgcgcgacaagcaggtcgaggaatatctgggtgttctggagccgatcctgagctccgtggtggtcaccgagaactcgtggcgcgagcgtgtgatgccggccgatgagcttgagaagattgccgtggacgtgttcggccgtgaccgtgtgatcaaggaagcgaacctgcccgacgcgattcaggctgccgtcaacatggtcgatgccgaagacgagttgggcgtgggctacggccacggcgtgcttatctgcggcagcttcgtcaccgccggcgacgcacgcctgatgcttgaggagcatgccagccccacgatgaggcaggccatggccgtccatcagccggcggtcgacccggacgattcggatcggctggcagacaaggccgaggatgaggccgccgacaacctcgaggattcggtgagcccggacgacttcgacgtgttcgacgtcctcggcctcggcaaggaacaggccagtgacgccggtaacgccggcaccggcacggccagcgccgacacaggcgccgtcaccgacgattccgccgacgtccggtaacccgcatccaaggcacatcggatacccggacgcccgacatacggaaaacagtctcacgccatgtatctcaaggaactcaccctccgcggattcaaatccttcgcctccgccaccacgctgcgcttcgagcccggcatcacggcggtcgtcggccccaacggttcgggcaagtcgaacatcgtcgacgccctgacctgggtgatgggtgagcagggcgccaaaaacctgcgcggcacttcgatggaggacgtgattttcgcgggcacgtcctcccgcccgccattgggccgtgcacaggtgagcctgaccatcgataattccgatcacacgctcgatatcgattacacggaagtcaccatatcccgcaccatcttccgcaacggaggctccgaatacgcgatcaacggctcgcaatgccgtctgctcgacattcaggaactcctctccgataccggtcttggccagcagatgcacgtgattgtgggtcagggacgattggatgcgattctgaaggccgacccgtccggtcaccgcgcgttcatcgaagaggccgccggcatcctgaagcaccgcaagcgcaaggaacgcgcgttgcgcaagttggccaataccgaaacgaacctgagtcgacttgacgatttgctgggggagattcaccgccagcttggccccctcggacgccaggcacgtatctcccggcgcgccgacgcgattcagatatccgtacgcgacgcccaagcacgcctgtatgccgaagacgcccaacgctcgatgagccgccgcgacacggtacgtcaagagcttggcgatgtgcgtaaccagctggccgtcgcccagcgtgaactcgcccaagtcaaagtacgcatcgaacaggtcgaggcgttgagctctgaatccagtccgaccatcgccaaggccaaccaatactggcatgaattctcacagacccgtgaacgactgaacgcgctcgcccagttggccgaagagcgcagccggtcactcaccggccagatcgtcaccaacttcggtgaggatcccggcatgctcgtcaaacgagccgaggaactggagtctcaggccgcggcacaaaccaaggccgtggccgatgcacgcatcgcactcgacaaggccaccgaggaacgcgccgacgacgagaagaagcttgcctcagtccgccagacattgactgaactgcgcaaaaccgcacaggagcgcgatgcgcagatcgcccgactgcgcgaactcatcgcccgcgaggaatccgccgtacaactggcgaccagccgcgccaaggattatgactcccaacgcgacttgctgacttcccagcgcgacgatgcccggcaacagctggacgcattgcgcagcgaagcggactccattgccgacgatgacggtgccgcattggacgccgcgcgtgcgacactcgccgaatgccgcgaacgactgaacgaactcgccgataagcagcgcgagatacagtccaagatcatctcgctcaaatccaaggccgatgcgcttgccgacacgctaggcagccgcaatgcctccggatcattggaacgcgacacggacgtggcctcgcttggccgactcaccggcttcatccatgtggccgaaggctgggaagatgccgtggcccacgcgctcgaccagtatgccagcgccatcgtggtacccgaggcaggcaacatgttgcacgccctcgaacgcgctcgggaagataagctcggcaaagccgtggtgctgaccgcgagcattgccggcgatcccgccacagagccgggcacggagtcggaggagagtagcgccgagaacacggcggccgccccgcgatcgggcagcgcgctggcagcactcgtcaccgcgaacccggatgccgagaaccaagcgcaggctgaagcggtcgtgcacaccgtgcgtctcctgctggctgatgtaacagtggccggcaccgccgacgaagcccagcagattgtggcatccggcgaagccatgcgggccgtcaccaagaacggcgagaccttcacacacggcgtggcggcggtcggcggctcttccatctctcaatcggacctgtctctggccgcccgtcgagacaaggcattggcacaggtcaaacagttggccgcccaagacggcggaatggctgagcaagtggccgaggccaaagccaaacgcgatgaagcggcccgactcgtcgaccaggaatccgccaaacgcaccgaagcccggctcaaagcccaacaggcggagaaatctctgaaatccgccacagaccgcgtcgcatcgttcacccgtcagcttgagcagctggataggaaaatcaccgagacccaagagaatcgcaacgagcatcagctcaagctcgacgatctcaatcgcgctttggcatcggcccggcaatccacagcggaacatgccgatttcgacgaacttgatgaacgcgaacgtacgctggagcgcggactgaacctgactcgcgagcatgaggtcgccgcgaaaatcgcgtggaccgaagcaagccgcaaaggggagtcactgagccgacaggccgggctgctgcgggacaacgccagagaagccgccgaacgccgcgcccgcatcgaggcgttgaacgatcgcagatgcgagcaggccgcacacctgcaaggtgtggccgatgacgcgcgagcagtggccgccatggtagagcatacgctgcatgacgtggccgccaaacgagacgagctgcaggccgccgcctccagccatgacgaggaactcaaggccctgcgcgcgcagcgcaaccagatcgagcccaaggtcaccgatctgaccgggcgcgaacatgccttggatgtaaaccgcgaacggttggccgccgaatccgggcagctcatgcagaaagtgtccgacgaactcggtctcactttggaggaattggttagtgattacggccccgaacagccggtgcccgtgctggatgatgagggcaaccctgtgccgttggatgagacggaagctgaggctgggaccgaagagggagaaaccgggggagagaccggcaccaacggcgattccgcccgctttaagaccgtgccgtataaccgtcaggagcagaagaagcgtctcgataaggctcgccgcgatctggccgcactcggtaagatcaaccctttggccaccgaggaattcgaagcgcttgaggagcggaacaagtatctcaatgatcagcgcaacgatgtggtcaaatcacgtgacgatttgatgcagctcatcaaggatctcgattccacgatggtccaggtgttcaaatccgcgttcgacgataccgccgaggcattcgagcagatgttcgccacgctgttcccaggcggcaccggacgactgcgcctggaaaacccggaagacatgctcaccaccggcgtactggtcgaggccagcccggccggcaagcgcgtcaaacagctgagcctcctgtccggcggcgaacgttcgctgaccgcgctggcgctgctgttcgcgattttcaccgcccgccccagcccgttctatgtgatggacgaggtcgaggccgcgttggacgacgtgaacctgacccgtttgattaatgcgttcaatgagctacgcgcccatgcgcagctcatcatcattacgcaccagcaacgcaccatgtcgattgccgacgcgctttacggcgtaaccatgagagccgacggcgtaacagccgtggtgagtcaaaaactcgaacgataaacgaatggttcccgctggcaggaactggtaccacaggtgacagagggcggtccatatcgaaagaccgccctcagtctcgcttcgttcgacagctcccgccagcgggagcggggcggtattagcgcaatgccttgcgcacgccctgtacagtctgcagcgtcttgtagaagaccttcttgatgggtacgtcgcgggcgggggccaccggggtgatttcctcggtgaacttgcacttgaactcgttaaggcccttgagagacggcgcgaaatcggagccaatgcccatgagatcgtattcagtaataccctgcgagcctaggatgcagcattcggaatacagcagcttgtcggtcacatgcagacgcataacctcgttgcgcatgccggcatagtagcgcaccgcatgcgtgccgttcacggtgacaatcgaccatgccaccacacggtcttcaatacgtgcggcgaacacacggcaatgatcggcacccaacgcgccgatcatatcggagtagtcgctcatcggagcaggcgtgaatccatcgcgctggccggtctcgaccatcacatcgtaatattcggagaaatcggccagcgccttatccgtctcatcggcaacctcggccgggcactcgcgcagagacttgcgcacgtcacggcgtccacgacgcttcatccgagccagaatctcatcatcgccaccggtgacgtcgatgaccacggtctggtcgtacggcactgtggagagcaccttctccgtaccatcggcgaaccaggtgtcgatacgcaggaacgcgatgttcttgtcggccttcttgacggtgtccacgatggcgtcgacgacctcgcgctcctcagcttcggtgggcttggcagcccacgccggcccatgcatcgagcgcagataatgataaccgtgcgtctcaaaatcgataaaggagatcacggcgaccaattcaccatcacgcttgatcagataatcgccccatggcgtgcgtccgtcgatatccgcctgaaaaccagaccaaaccttggtctgttcgataggcaacgtgatgccggccttctcggcttcggcttccagtgtggctccgtcaactttctccaacgtgatcattacgattcagctatcctttttcgttcgtatccgtatgtcgtgtttctggtttggtcgtattgcgcgtgatctgatgtgggccaatcgggatccgatcaggatctgattggccggaatcccgtcacaagccaaacatgcgttcgacgacgtgatcgtcgccgtcgaacggcacatgcttgtgatggtccttgatccaacgctcgttgcccttgccgatgatcagcaggatgttgaatcggtcggcgtgcgcacgggcatcgtaaatggcgttggtgatggccgtcggacggtcggaaatcaccgtggaggccacatccttgttcgtgatgtagccttgcatttccatgcagatgtcgatgaacggctcggtgtccgtatcttcggcggtgaaaatgaagttcgcgatacggttctcggcagcctcgacgatttccttacgacgatcgtaggccttgttgccggccgatccggtcaccagcgtgatacgcgggttttcctcgccccaacgctcgtagacgaagtcaagcagcgcggtgacggatgcgtagttgtgcgcataatcgacgatggcgagcgtgttcgactgcggatcgcggaactgttccatacggccggcgatacgtacggattcgatggcgtgcagtgcgccggcgtcatcgagcgatacgccagccgcatgggcgatggcgatggccgccgccgcattgaggtagttgaagtcgccatcgatggacagatggtagtcgccaagggcctgatctccgtcggcgatgtggaaggaggcgtgctccgggtcggcgggccaggcgacgacgtccgcattggtgccggcattatccgcgtcatgcagggcgaaggtggtcacgccgatgccggctgccgccgcgtcctcccgcaacagatcggcgtgcagactgtccgcgccgagtaccagcgacttcgcgttggcgatgatctggcgcttgcaatacaggtaatcctcgaacgtggggtgttcgatcgggctgatgtggtcgggggagatgttgaggaacgcggccacatcgaaagtcagtccgtagacgcggtccaccttgtacgcctgggaggagacctccatcaccagatacttcatgccgttatcggccgcctcgcgcatcatgcggaaggcgtccatcgattcgggcgtggtcagatcggattcgacgtaggtgtggccgtcaaggcaattatcgaccgaggagaacaatgcggccttgccgccggagacggcgttgataagcgcctgcgtgaagtacgaggtggtcgtcttgcccttggtgccggtgacgccgatgaccgtgagcgcgttctgcggatatccgtagaacgcggcggacagcaggctcatcgccttgcgtgcgtcgttgacgatcaggccgggggtggcggttgcggctgagtactcggtttcggccacgtatgcggccaggccggcttcgtcgatgccgttcagatactcggccttgaatcggcccttgcagcacagcagggtgccctgcgtgaccttgcgggtgtcgtaggtgatgccggcgaacggttcatccgccgaagcgatacgggccgggtcgtcggtccagacatccccttggatgatttcacgcagcagatggtgttccttgagcaggtcagcggccgaagccaaagtcaaagccataattgttactccctattatctagccgatacgccattctacaggtggggtgtagcgtgttgtggctcacacgtcatcaaccacgatatgggcacatgatttgattagaatggtgaaccgtgacgacaagcgaagcaactatgcaatccgggcagtcagccggatcgggcgagtccatggcagccaagcgcgccagattcgagcagctcgccatgcccgccgtcaatgcactgtaccggcaggcgatgaggctgaccaacaatcccgatgacgcgcaggatctggtccaggacaccttcgaacgcgggttcaaggccttcgactcattccagccgggctccaacttcgaggcgtggatgaccaccatcgagcgcaatgcctacttcaaccagtatgccaaggccaagcggcgcccgcagcgtgccaacgactccaccggcgaatacgacgattgggacatttacgatgccgccgaacatacgtcggacgggctcaagtccgctgaagaggaatatttggacgccttcgcgcccgaggaaatcatggccgcgctcgccaaactctcgccggaacgccggcaggtgttcatcgacgccgccatcgacggcaagtcctaccaacaggtggccgatgagcagggcgtgaaaatcggcacggtgatgagccgcctgaatcgcgcccgcacgcaactcaagcgtgagctcgcctcgtatgcgaaagagcgcgggtatgcgactggttcgtcggctggttcaccatccgcgaagttgggcgaaaacgttggtcgaatcgccgattccggccataatgaaagtagtgaacgaactgttggcagcaatggcgacacgcaagccgtagtgagacatagtcatgcgactcacgcccacacgccacaacggtcaagcaagctttcgggaaaggagatctgatgaacgatcagccggtagagcgtactcgccatatctccataacccgtacggcggccgatggcacggtaagccagaccgaagtgcatatcacggcggtgcatcatcgttcagtagataccggctcggccgctgcgtcggtccagacagacgtgcatatcgttacggagggcgactgttttgacccccgtacctgctgcgacgagcgtgaacaggcgttgattgccgcgttgcgtgcctacttgcgcccggatgtggcgcccgaatgtctgatggcccggctcaaggccacgcttgatcactgctgcggcgaagataagtaacgacatatacaacaaggcccgtctgatgtatcatcagacgggccttgagcgttctataagaaacgcgaagaatcaggcgttaggacgcttgccgtggttggcggccttcttacgacgatccttgcgcttacgtccgcgcatgcccatgatggactcctttgctgcagtaaaaaaataagccttcggaattatgccacataagtacgacgtgatgcaacacgggtgtccatgtggcgatgatcgtcaggcttggttattcggtttttcagatttgttcggcgtggaaggtgaccacggtggtgtagtcatcgcccggctcgagcacaaccagatccttgccggtgcggaaggcgtcggcgtaggcggtcatcggttcgacggccacgccggcctgacgagccttcccgccgatttcgttgccggtgcacacctgccaggagttgatggtcttgtcgccggtcagcgtgaccttgatgccgtcggggcgggtgaacacggcggaagtgctgccatcttcgccgcggttggtgatatcggtccaggcatcgtcgaagccacgtccctccagcgtggggttatcgcgcaggtcgaagatgccggaaaccggctcttcgccggtgggcagcaggtgttcgtctacggtcacgtgggtatcgcagtgcagctcaagacggcaggactcgttgtcggcggtaatggcctgaccggtggcgtgcttgccgttggccagccacgggtggatgccaaatgcccatggggccttcacgctgtcgttgttgtgcacggtgaaggtttccgtgagaccgttctcgtcaagtgcataagtggcggtgatggtgatatcaaacgggtagccggcgatgtcgggggaacgccaggagagcgtcacatgtgattcctgcaaatcaacgagctcccacatgtagcggtaggcgtagccgtgcagggaggattggcggtcgaactcgtcgatcggcatctggtagtcttcgccatcgaaagaatactgaccattggtcacgcggttcgggtacggtgccagcacccagccgttgcagcaggggatgaccttgttcgggtcgaaggggacgatgaggtcttcgccgcgccacttcagctcgcgcaggctggcacccagttcggtgacgacggcactccattcgccggacgagatgacatattggttaccagtgcgaggcttcaaagccatagtgcacactcctttgtgaaacagattgttaccgctcacaatcgtatcgcacaagtcccaagacgcggcggcacataaggataaaaaattggctcccctctggaggggagccagcgtaacggaactacttctggactacttcgtagcggaccacagtggtgtagtcgccattgggggcgagcgtcaccaagtggtcaccagtgcggaaggcattggccggggcggtcatcggttcgacggcgataccatacggatgctcggcgaacggcgcgccagtggcggtgtagcactgccaagcattgatcgtctcatcgccaatgagcttcacttcaataccgtccgggcgggtgaatgtggtggtggtcgtaccatcggcggcacgctccacgtcgacccaggcatcatcaaaggcgcggccttcgagcgtcgggccatcgttcaggtcgtagatgccggtaaccggttcggtgccggtgggaatcagcgcctcgttcaccgtcacatgactggcggccttgatctgcaggtggcaggcggcggagtcggcgtcacgttcggcgacagtcgcgccctgcttgccgttggccagccacggatgcaggccgagagcccacggtgccggctcgtcgccatcattgcgggcattgacggtcacggtcatgccgttgtcgccgagttcgtatgtgacggtcacggtcacatcgaacgggtatccgtccaggttggggaagcgcagtgaaagcgtcacggcgctatcggtcaacgattcaagcttccacatgtagtggtaggcgtatccgtggttcgcgttgttgcgcggtgcgggatgatattcgttgaccggcgcgcagtaatgcttgccattgaaatcgtattcgccgttttcgatgcggttcggccacggggccagcacatagccgttacaggtgggggtcaggtcgttgacgccgaacgggcagaaaatttccttgccttgataatcgaatcggcgaatcttggcgccgagttcgcagatgacggcggaataatcgccatagtgaatcgaatactgatttccggtgcgtggtgttttactcgtcatggaatcactcccgtagtgaggttggtgggccggtagctcctgctatcgctggccccagtctagcgcgtctcctctatcgaggcggggattggcgatagccggcatataataaacaattcgtacagacacggtagcaatacgtggagtgacgagtctcacaccatcatgcgagaagcacgtggattccttggaaaccggtgattcgtgggagacgcggaaaagttgtgacggcagattcctgtaatccctgctttacactggaaaaacactattgacgttcaggaggttccgatgaccaaaagcgttgtgctcgctgatccgcgaggcttctgcgcgggtgtggaccgtgcgattcttaccgtacagaccattctcaaagccgcggaggcttccggaaagcggacgcgcgaggatgggctgcccccggtatatgtgcgccggcagatcgtgcacaacaagcatgtggtcgaggatttggccgggcaaggcgcggtgttcgtccaggaattggcggagattccggatgctgctgcccaagcgggtattccggtggtgttttccgcccatggcgtatctccggtagtgaaggcggaagccgaacgtcgtggcatgcatgtggtggatgccacctgccctctggtgggtaaggtgcaccgtgaggtgctgcgtttcgtgcgcgaggggtatgaaatcgtctatatcgggcacaagggccacgatgaagcggtcggcgtggtgggggagaaccccgaacatgtgcacttgatcgagcatgaatcggatgtcgattcgttggattttgcgcccgacaccaagctggtgctgctctcgcagaccacgttgagcgtggatgagaccgccggcaccattgccgcgctgaaggccaagttcccgtggattcaagagccgccgagttcggatatctgctatgccacatcgaatcgtcaggctgcggtcaaactggtggcccagcagtccgattgcgtggtgattgtcggatcggccaactcctcgaattccgtgcgactgatggaggtggcgcaggagggcttggggaagcgcggcaaagcgtatcgcgtggatgatgccagcgagcttgatccggcgtggttcgtcggactggagtccgtgggggtctcctcaggtgcctccgtgccggacgaactggtgtccggtgtgattgacgctctgcaaaacttgggtttcaccggtatgaagtccgtcgaaaccatcaaggaaaacatgcacttcgtgctgccggcggagttgcgcaggaagaagtagtcatccttggctcccctcacagaggggagccaaggatgactaccacgtgccgattggtgcggcaacggcgttcaagaccttgagcaggtcctgtggattcacgcctacggacaggcctcgcttgccgccggagaccagaatctggtcgaattgcatggcgctttcatccaacacagtcttatgacgtgtcttctggcccaacggcgagatgccacctaccacatagccggattcgcgcattgccaccttgggatcggccatagaggccttcttggcacctacagccgcagccagggccttcaaatccatatgtccgctgaccggtaccacgcccaccacacgctccgaaccggtgtccgccatcaacgtcttgaacacctgatgctcgtcgaagccgagcttggtggccgcctccacgccgtagccgtcatccatatggtcgttggagtgctcgtattcgtatacgtggaattccacgcccgccttctccagttggactgtcgccggagtggaacccgcgcccttatcatgcttgtttttctttgccatgattaccgttctactacgaagagacccccgcacaaggcgggggtctcacagcttagttctcaaacgaaccgtagcggcctagaccgcagtggttcactcggagatctcagcgaagtacagcagggtacggatcatgttggaggtgaagccgtactcgttgtcgtagaaggacacggtgcgagccagggtcacgccgtcaatggtgttgacgtcggtctgggtcgggtcgaacacgccaccgtgggtgtcgccgaggatgtcggaggagacgatgccctcatcgttgtagccgtagtaatcggtgtcggagaaggcagccttgaaggcttcgttgatctcgtcggcggtggtctcggtgttcagaacggtggtcagctcggtgacggagccgtccggaacctggacgcgctgggcgtggccctgcagcttgccgttcacggacggaacgaccttgccgatggccttggcagcgccggtggagtgggcgatggtgttgatggcggcggcgcgcaggttgcggccggtcttggtgccacgcgggccatcgagcagcatctgggtgccggtgtaggcgtggatggtggtcatgaagccggccttgatgccgaacttctcgtccagcagcttgaccatggcggccatggagttggtggtgcaggaaccggcggagacgatcacgtcggaagccttgaggatgtcgtggttcacgccgaacacaacggtcggggtggtgtcatccttggccggggcggagatcaggaccttcttggcgccagcgttgatgtgagcctgggacttctcggcggaggtgtagaagccggtgcactcgagcacgtactcgacaccgtcgttcttgacccacggaatgttgttggcgtccttctcggcgtagaccttgtattccttgccgtcgacgatgatggagtcttcggtggccttgacgtcaaccggagtgccatcgtcatgacggaaggtgccgtgggtgctgtcgtacttcagcaggtaagccagggtcgccggggtggtcagatcgttgatggcggcaacttcaatgtcaccagcctggccgccgcgagcctgcagctcgaagatgcgacggaaggcgagacgaccaatgcgaccgaagccgttgataccaatcttaactgtcatgtaattctcccttgtagggtggccttggcgcgctttggcacaccgggccattgtttaccaacagttgctactgtaatgccgactctgtacacatggcaacgtttcagcgtgcgttttgggtaaaaatgccgtattttttgtgagcgctcacaatttggattgcccgcaaccgacatgtgattttcctctcctttggagaaatgtctcgaatcatcacgagcaagcgcgcggcatgcaagtcagcgaaccagcagcttggacacttcggtgtccagctcgccgatatcgccgccgaattcatggaatctgctcacctgtggcaacgccacttcgatggggaaggtgacgatcagtgtgccgcgtttcacgctgatggccgcgtccacgccgtcgcggaactcgttgctgaccccctgcaccaccgtattggtcagcgtgccgtctttaagctcatatttcagccccggttcgttcacgccaagcgaaacatcggagtgggagaacgccgacaccatgcggccgtcctcgggcaccggatgcgcggggaacgaaagcctgccatcggtgatggccgtgacgatgagcccgtcgccatacagatacccgcttgccccgtgtcgggccagcagcgccatcagttgaatgccggaaatcgtatggtcaatacggccgccaagcccgccgtacacgtgaaactcgcggcaacccgccgaccagccgaccttcagcgcggaaagcatgtccgggtcgtccttcaacgcgggcagcgcgatggtgcgcacatcggtgcggggcggccggccttccagcgaatcgaagtcgcccaccaccacatcgggcacgatgcccaactcgcgcgtatggtcgagtccgccatcggccgcaatcacatacgcaccggtgggaaccacgggcgtgcccgcatagtattcgcccgcaccaaaaatcacgcatacctgagtcattatgcctactgtagccggtatccacccatcgacacacggtccgcgaatgtccgggcatgtggtaaacttcctatttggcttgaggaatcaagaaagcggggcaaccccacctggaagcctttcaaggcctcgggttcaaggcaaacagcctagcgattgcgatatacaacgcgcagtcgggaatgacgcaaagaactgatatgcgtctgcagaagctgagcgcatattggcgctggttttggcttgccatgaacccaaagcattgaacaggactccagcaaaggccccgccacggaattgaagtagaggattggagtcatcatcagcgacgaaccacgtattaacgacgagattcgcgtcccgcaggtacgcctgatcggcccgaagggcgagcaggtgggcgtcatcgcgacttccgtcgcgctgaacctggccaaggaggcaaacctcgatctcgtcgaggtggccccgaacgcgaagcctccggtcgccaagctcattgattacggcaagttcaagtacaacgagaagatcaaggctcgtgaagctcgccgcaaccagagcaccgcggaaatcaaggagattcgtttccgcctgaagatcgacgaccacgatttcgacgtgaagaagggccatgtgacccgcttccttaacggaggcgacaaggtcaaggtcaccatcatgttgcgcggtcgtgagatctcccgcccgattggtggcgtggaactgctgcagcgtctggccgacgatgtcgaggaatacggcaccgtcgagtccaagccgaagcaggagggccgcaacatcatcatgacccttgcgccgaagggcaagaaggtccacacccagtccgagcagcgtcgtcgtggcgccgagtcccgcgccgagcgtcaggctcgccaggcggctcgtctcgcggccaagcaggagtctcaggctcaggccgcggccgacgcgcagtccgcgatttctcagaagacttccgacaagaagcaaaccagcaaggagggcagcaatgccgaagatgaaaactaattccgccgcttccaagcgcgccaagatcaccggcaccggcaaggtgaagcatgtcggttccgccatgcgtcacaacctcgagcacaagtccgctcgcaagcgtcgtgaactgtccgccgacgatgtgctgcgcggcggccaggccaagaagctgcaccagcttctgcagaagtgagcatagggcttacccggaaataataagactttagaaagctgaggaatagattatggcacgtgtcaagcgcgcagtgaacgcccacaagaagcgtcgcgttgttctcgagagggcttccggctaccgtggccagcgctcccgcctgtaccgcaaggccaaggaacagctgctgcactcctttaactacaacttccgcgaccgcaaggctcgcaagggcgatttccgcaagctgtggatccagcgcatcaacgctgccgtccgcgctgagggcatcacctacaaccgcttcatccagggtctgcgtctcgccggcatcgagctggatcgtcgcgctctggctgagatcgccgtctccgacccggacaccttcaagaccatcgtggccgccgccaaggccgccctgcctgaggacgtcaacgctccggttgaggcctgattgcttgaagtcgtgacttcacactagaaaccccgcttccgagcggggtttcctattattagccccctctggcgaggggggctcccgcgcagcgggtggggaagagaacaaacacatgaccaacggattcaccaaactcaccgagcagttcctcgtccacatcggcgtggagcgaggactcgccacggccaccgtcaccgcctacgaatccgacatcgccaaatacattgattggctcgaaacccgcggcatccacgaaccggacgccataaccaaacaagacgtcgaagactacatcgccgcccttgaccaggcgggggagtccgcccgctccaaagcccgaagactggcctcgatccatgaattccatcgcttcgcgctcggccagcacgcggtgactgccgacgtttctgccgcagtcaaggcacccaaaggtgccagcaccctgcctgacgtactcaccgtggacgaggtaacccgtctgctcgacgcggcggcagccggcggctcaaccgatccggtggtattgcgggacaaggccctgctcgaattcatgtacgccaccggctgccgcgtctcggaagccaccggtgtgaatctggacgacatcgacctggacgagcacatcgcgcgactcatgggcaagggctccaagcagcggcttgtgccattgggcagctacgcatgccgggccatcaccgcatacctcaatgcggggcgtggcgagctggaacggcgctccagcgccaagattcccgagagacgcgcactgtttctcaacaaacgcggcaagcgcatctcgcggcaatcggtatgggaaatcgtcaaagcaaccggggagcgggccggcatcaccaaaccactccatccgcacaccttgcgccattccttcgccacgcacctgatccaaggcggcgcggacgtgcgcaccgtgcaggaactgcttgggcacgccagcgtgaccaccacgcagatctacacacacgtaagccccgaaaccctgatcgaaacgtatctgacctcacaccctagagcgcggtgagacacaccattttgcgacgcgtccgcccatagcggaatcgcggcggggggggagcaccaaagtcggccggaaattcaaggcgtgacaatacagtacataacagcgaaccgtcagccaggaagaggtattcatgctgcagatcaaatcgatctcgaagcgctataaaaccggtgatttcgttcaacaggcgcttgacaaagtcagcctgaacctacgcgacagcgaattcgtcgcgattctgggtccctcgggttccggcaagaccaccttgctcaacatcatcggcggcctcgaccggtatgacgacggcgatttggtgatcaacggcatctcgacgcgccaatacaaggatcgcgattgggattcgtaccgcaaccacaccatcggcttcgtgttccagagctacaatctgattcctcatcagacgattctgtcgaacgtcgaactcgcgctgacgatttccggcatcggcaaggccgaccgtcgcgaacgtgcgcgcaaggcgctggagaaggtcggactcggcgaacacatcaataaaaagccgaaccagctgtccggcggccagatgcagcgcgtggcgatcgcccgcgcactggtcaacgacccggacatcgtcctggccgacgagccgaccggcgcgctcgattcggacacgtccgtgcagatcatgaacctgctcaaggacgtggccaaggaccgcctcgtggtcatggtcacccacaaccccgaacttgcggaacaatatgccacgcgcatcgtcaacctgcgcgacggcgtgattcgctccgactccgacccgtttgtcgtggatgagacggccgaacagccggccgtgcacaagacgatgggccgcgcgtcgatgtcgttcgtcacgtcgctggcgttgagcttcaacaatctgaaaaccaagaaggcgcgtaccctgctgacctcgttcgccggctcaatcggcatcatcggcattgcgctgattctatcggtgtcgactggcgtgaacgcatacatcagcgacatccagcgtgacacgatgaccgcctacccgatcaccatcgactcccagaccttcgacctgagcagcatgatgggcggccagatgggcggcgatgacggatacggcggcaagacgcacagaaccgacggcatctacccggacgaccgcagcgtcaagcaggcatccagcctgaccagttcgattaccgaaaacaacctgacccgcttcaagaaatacctggataattccaagagcgagattcaccagtatgtgggttccgccggtatccagtacacgtatgacgtgaaattctccgtgttcgaccacgaccccgatggcacgctggtcaatgcggacggcgtgacgatcggtgccagcgactccacttcaatggcctcgcagatggcgtccacaagctcgtccggcatggccggcacctcgtcgatcacctcgcagcagatgtcgatgctgaccggcaaaaccgatgagaacgccgcgcccgactcgttcaatgagatcatgcctggagcggacgacagcaagctcgtaggcaaggtcatcaccgacaactaccaagtggtcaacggttcatggccgaagtccaaggacgaggtggtgctggtgctcgacgacaacaacagcgtgccgctgaccacgctgtacgagctcggcctgctgcccgcctccgactaccacgagatgatgtccaagctcaacgccggcgacaaggtcagcactccacaagacaagatcgactatgctaaggcgctcgaccagacgctgtacatgattccggcatccgaccagtacgtcaagggcgatgacggccactaccgattcatcggcaacgacaaggatgtaatcgaacagcgcctcgaaacggccaccaaactcaaggtggtgggcgtcgtcaaggcgaagaaggatgcttcggccacaccgttggccgctggcgtgggatacacgcgcgctctgaccaatgatctgatcgaccgtgcggcctccagcgccatcgtcaccgatcagaaggccaacccgaacacgaacgtgctcaacggcatgacgttctcgccctcggacgacgccaccaaggcggccgacgcgcgcacctacgtggtttcactgggcgtgacgcagaaggcgaacatggccaagtcgatgatgagtgccgggcagcggtccggtacgggcgcatcggatgccgctggtgctggtgctggtgctggtgctggcgctggcgcggcgggtgccggcgatcaggccgacgcgatggccgcgatgagcgaacagcagctcgccgacagtttcgactcgtatatcgccacggcttcgaacgacgtgcttgtcgcgatctacgaccagtacgtgtcgaccggcacctacgacgacaacctcgccgcattcggtgtggtgagtcgtgacgcgcccagctcgatcaacgtctacgccgacagcttcgaagacaaggaccacatcgccgacgcgattaccgactacaacaacaccgtctcgaagaaagacaagatcacctacacggattatgtggggctcatgatgagctcggtgaccaccatcgtcaacgtgatttcctacgtgcttatcgcgttcgtgtccgtctcgttgattgtttcctcaatcatgatcggcatcatcacctacatttcggtgctggagcgcaccaaggaaatcggcatcctacgcgcaatgggtgcctcgaagcacaacgtgtcccaggtgttcaatgcggagaccggcatcatcggcctatgctccggcctgttgggcgtgggcttgaccgtgctgctcgatattccgatcaacgccgtgttgcatcacttcatcggcaatgcggacgtcaatgccgccctgccggtgaccggcggcgtggtgctggtgatcctaagcgtggtgctcacgctgatcggcggcctgattccctcgcgcaaggcagccaagcaagacccggccaccgcactgcgcaccgagtaagcgcatcgacatagtacgagacgagatccataaacctcggaacactggaatgcccgctgcaaaacggtgttccgaggcgagcccggcgagtacattaggataggcgagcaggtattcccggcaaagggggcgagggcaacgatggacgactggcgagacatccgcgataaagacagcgcattccgtcaaggaacgctgcctatggcgggaacgtatgtcgttgcacccccagcgaacccggatattgataaggtagacagtatgcctaccgatttgcttggacgtgaatacgaaaccttccccgcacccgaaccgctgcaacagcacggtccggcgcgcgtcattgccatgtgcaaccagaagggcggcgtaggtaagaccaccagctccatcaatatcgccggtgcgttggcccagtatggccgccgcgtgcttatcgtcgatttcgatccgcagggcgccgccactgtgggactgggcgtcaacgcgaataccgtggagaacacgatttacaccgcgctgttcgatatttccgtggacccacatgatgtggtgcagcacaccgcattcgagaacatcgatgtgattccggcgaacatcgatttgtccgccgccgaggtccaactggtcacagaagtgggccgggagcagatcctgaacagtgtgctgcgcaagctcaagtcggaatacgatctcatcatcgtcgactgccagccatcgctcggcctgctcaccgtgaacgcgcttgccgcagctgatggcgtgatcattcccgtggccgccgaattcttcgccttgcgtggcgtggccctacttatgcagtccatcgaaaaagtgcagtcccgcatcaatcccgcattggaagtggacggcgtgctcatcaccatgtacaccaagacactgcactgcgaagaggtctgccagcgcatttacgaggcgttcagcgaaaaggtgttccacacgttcatctcccgctccatcaaactgcccgattccacggttgccgccgcgcccgtggtggtctatgcgcctgagcacaagacatcaaaggaataccgtgaggtggcacgtgagctcattgctcgcggcatcgtggcgtaacgattgtttcgataaacgatgaatgagacttccctttctcggctcccctctctgagggaagctgactcgcgtagcgagactgaggggagctccgcggaagccgaaatcagcacggaggaatccgccacttccggcttccgggtcaacctcgaggtctattccggtccgttcgatgccttgctcggcatgatcgccaacaacaaactcgagctgaccgaagtttccctctcctcgatcaccgaggaattcctgacatacgtgcgcgggctcgacttcacgaaaaacatggatgaggccagcgcctttctcgacatcgcctctattttggtcgaggccaaaagtgtggcgattctgcccggcggcgaagacaaccagtacgacgagcaaagtctcgaggcgctgcgcgaacgcgatttgctgttcgcccgactcctccaataccgcgcctacaagcaggccgccggtgatttccgggcgcgtatcgccgccaatgccggccgattcccgcatccggcggccatggacgagggcattgccgccatgttgcctgagctggtatggacgctgaccccgctcgaactcgcccaactggccgcccaggtcatcgccaacgcgcccgcctccgaagtatcgatccaccagctgcacgtgccgctggtcgatctgcgggcccaatcgctggtggtgcgcgaccggctgattgcagcactggaatccaagggcgaccagtcgatgtcgttcagcgaattgacccgggactgcacttctcgtattgaggtggtggctcggttcatggccgtgctcgtgttcttcaaacaaggtgtgctgcagtatcagcaagatggtccgtttgccgaactgcacctgaggtgggtatccggcgtagacgaaacgatgaacgacgtgaacatttccgaaggcgattttgcgtaaggacggcgactggtgactgaacggattgacgcaacgaatgcaaccgagcacatggcggatgccgaatcgacggctgaatccgcaaaggccgaggtgaggggagtggaggagacgcgccccgaatacgtggatttcacggtagacgattttcccggcgggctgcccgcatgtctggaagcgattctgatggtcgccgaccagccgcagaccgccaccgagctggcccgcattttggcattggaccgcaacacagtcgaagaggcattgcaagccctgcacgatgactatgagggcgatgaatcccgtggcatccgcccgcgcggcttcgaactacgccgcaccgctcgtggctggcagttcgccagtcgcgccgcgttcgagccggtcgtctcatcattcgtcaccgacggccagactgcgagactaagtcaggccgcactggaggcgcttgccatcgtggcctatcgccagcccgtcacccgagcccaagtggccgcgatccgcggtgtcaactccgatggcgtgattcgctcgctcacggtacgcggccttatcaaggaagacggcgtggaccccgaatcccgcgcagcccttttggtcacctccg

SEQ ID NO: 1563 - DNA, 17153 bp, Unknown
  R221_24m  MAG No. k141_24546
atgacggacgagaaagacacccggagaatctgtccacgcacgacatggaacgcctcgtatccgaagcgttcgccatcgccgccaacctcaacagcgcggcggacgacgacgaataccgggcagcgatgcgcgagggcctgcacgcgttcgacatgctgcgcgaacgctacgggcttacgcaggacggcgtgtggataacggccacggacatgaacgaaagccagaggacgttgattcattgtccataatgggcgagctgtctcctcagacgattgagccgtgaagcagtcagtccagtggactgtttgtaggcgaaggtgagacggcagtcgcgtaatgggaatgttggacgtcgagccgtccgtcgttacaggacgctggcacgcggagcggcctagagggggtggctcgtagcgtgtctcttgctcgtgcgcccactgtcgggaactgttgcgatgaatgcgcggaagataatcggtggttgctggatcacctctcggcttgtgcagcggtcgccgatttccatctctatttacgctgacagcggagagaagggcgtgaaataaagccaatgcgttgacgtgactgtggtgccgtagtagtgtttttgaacatcgttcaattaatgtgcgggacagggagcttggatgcttaagtacgacaaacgcaaagagcagatgattgacatagcttcacgcatgcttttggagaaagggtatgaaggcctgtccatccggagcatcattcaggaggctgacgcgtcgggccccggcctgttctattactatttcgcgtcaaagcaggatatctacgaagcggccatgcagcacatcgtcaagcagcagttagaccagcgatggagcatcgtacgcgacgaaacactcgatcccaaacggaagattgaccgtctcatcgaatcagtggaatgcgacttcaacaggtatcgcaatcttctggaccatggtgataacaagcagattctagataccatcagcatgaccatgatgacggaagagattcctatggcggaacacatcattaacgaattgctggaaaggaaaggcgtcgcgtcgcgtgaggccgcggtggatgtgcatgagctgtcatgcttcatcgtatacgggcttaacggcatactgcgtgagaaatttgcgaatcccgacaccataccggatacgccgaccttccagtccatcaagcgactgctagtcgggatcctaaagcttatgcaaggagaaacaccatgtcgttcattgacgtcatcaatctgactaaacaatacaacagcaatgacgtgcagactatggccttggatcatgtcagcttctccctcgacgagggtgatttctgtgtggtccttgggcagagcggcgcgggaaagtccacgctgctcaacatgttgggcggcatggactcacccacatcaggttccatcacagtcgatggcactgatatatccgacatgagggaacgcgccttgacacagtatcgccgcaactccatcggctttgtgttccaattctataacatcatccccaacctcaccattctagaaaatgtggaaatggtcgcacgcttcggcggaaagaatttcgatccgcaagccgtcctctccgacgttggtctcggcgagaaaatccatgccttcccacaagaattgtccggcggccagctccaacgtgtggccattgcgcgagccctgtgcaagaacccgcagctgctgctgtgcgacgaacctacaggcgcgttggattccaaaaccggacagtcggtcctaaaacttctgatgcggatgtctcgccaataccgcaaaaccgtgattgtggtaacgcataattcatcgattgcgcgaatcgccgatgtggtcgtcaccatcaaagacggcaaaaccgaatccgtgcagcgaaacaacaatccggaatccattacccaaatccagtggtaggcgtcttctatgctcaagaaaatactgagggattgcagaaccaacgcaatgtccctaagcgccatagcagtgctcgtgttccttaccctattcgttttctcaggactgttgtctgcggcccacggcatgagctacgaattcgaacgatggtccatgcaaaccaacttggccgatgcgtgggtgagcgtgcgatccgcaggtgcgacgctcaccgatgaagtcaacaatgccaagcacgtgtcgcatgccgacggatcgctgatcgtcaccgcctcgatgaaacgtagcggagcgaacaagctgctcaccgtcaacctcaaagactccaacgaagtgtcccgcccactcgtcaatgacggcgaacaattcgacactaagaaaaagaactccatctggattgacaagaacttcgccgacgccaatcacatcagcaccggggatacagtcaccatcaatgtaaacaagtccccgatcgcattgactgtacggggcctcatcgccagtccggagtacatcggctacaccagcccaatgaacgacatggtggcgaatcacgaccgctacgggtacgcatacactaatcgtgcatcgctgcccgtgactttggaccgcatcaacagcatagcggtcaaagccgaacctggctgcgataccggctgcatcgcccgttccgttcgagacacgctaggcaacgcagccgtcagcgtgcaaggccgcgacgccaaaaccgagatttcgaagttccaagccaaaaccgcgagcatgtatcgcatgtcgtacatgttctccacgttgatgattgtattggtgacgctgaccaccatcaccactatcagccgactggtcaacagccagcgcagctcattgggactgatgagagcgctgggcatatctcgcagcgccctgatcctcggatatcagatatatgcgattatcgcaacgcttcccagcgccctcctcggcctgttcctcggacctgcgcttctgggacggctgtttctggacaaacaacggttcctgttcaatcttccccattggcaggtccgcatcgacaacgccagctggctcatgatgctaggcatcatcatcgtcagcagcatcgcctccatcattccagcattccgcatcacccgcctgacgcccgccatgatcctagacacgaacaccatgcgcggcgtcggcaccatgcgatcaacaccgcgcaacccgcgccgcgacagccaacaacactggcaatggcactggatcatgcgggataaatcacgttccatggtcaaagaaggcatctccgtcgtggcgattatcggcgcgaccgttctggtgatggcaagcttcggtgtgcgtctctcgctcaccgccaccaacgatatgacatatggcgacgtattccgctacggtcggcaaatccagcttgccaacggatataccgacacagattacgacacaatcatgagcggcttgccggataacgcgcaaagcctcgaacaactgcccatcactgttacaacggcgcatcacgaacagtcatccgtcatgtccatcgccacacccggcatattcctcacggcacgtgacgacaagcgcgaatctatgccaatcactacgcaaaccgatggtgcgtacatttctgaaggactgtcgaaagctctcggagtcaccagtggcgacactattagcgtcgactcggccagcatgtcagaaccggtcatcatgaccgttatcgacatcgtgcgcgtcagcagcccgcaaggcatatacctcagttcagcatattggaagaacctcggcgaaacgttccaccccaccagcatcatggtcaatggccgcgtgcccagttccattgataaccatccggcggtgcagcgggtggactccctcgcatgggacaaggcgcaggccaacaaagtgctggacaccttccaaagcatcctgacattgctgatggttttcgcggtactgctggaatggttcatcctgtacagcatcggcacactgaactacaccgaacgataccgggaatacgcaaccatgcgagtgctcggcttccacatcaaggaaatccggtccatcatgctcaaagacagcttcgtcacttggattctgggcacaaccctcggcatccccctgggcataggcttcctgaacgcatatgtgtccgtcgccgattccaaggacgcgcaatttttcgcgtatcttcccacaccatacatcgcgttgtcggccctgttcgtgttatgcaacatgctgattatcgaactcgtcatcgcgaaacgaatcgccaacatcgatctctcgtccgcgctgaaaagcgtcgaatagtaagaaaagaggaatctatgactataggaatcagctctgcaggaatctccgtgccaatccgaagattgccggtgatcgacaccgtatcacagtggaataacacatcggctgatctaatcgtcaaacaattcggaacggaatgccgaacttctttaggaagcgacgaagacaccctgacgttggcacatgaagcctctcataattgcatggataacgcaagagctgacccgtcagatgtcgatgcagtgttcttcggcactgttacggctccggaactgtatagggggtgtgccaacgccctgatggacatgctcaccgcatccaatgcgtacacatcccaagacgtgtccgccgccgagcgttctggcatcatggctttgaccaatgcctatgcgtatatatctagtggactggcgcatcaggccttggctgtgggatccgaattccggtgagtcacagcccgcgtttgacgagcccgtcgaggatggcgtcggaggactccccaagcctcaggcctatgacgtcgacgcggcgcagcagatctcgggttttcagggtgtccatgctcatttcgccggtgtagacggctgcaagccccgattcgtaggcgcgccgcacgcgggcggattccttgctggcctcgaggcagtatcggcgcatgtcggcgccttccgcggtcatggcgagttccagatcgtgcagggcgacgttcacgtgggtcaacgcgacattggcgtgttcgccggcatgtcctttccaaagatggatctcgcgtatgaaatcgcgggtgttgtcgagcacgtcgtcgatggatcgggagaaacggaacaaatcctcacggtccaacggcgtggtccaggccttggccaacgcgtgaacgaccttggaacggacctcgtccccctcgtgctcgatatcgttgacgctctttctggattcatcgacgctcagatgcccctcgacggcgtccaacgcgatggacactcctttgcgggtcgtcgtcacctgttcccggagcagccccatgacgggatcctctgcgagcgcgttcttgacgctgaaccacggcattgtggcaccttctttcgttcgttgtcgcggcgaaggcagcggcctctgcgtttccggaccagcccagaacgggcgccgtttcaggctggtccggaaacgcagaggagccgctgaggggaaatcgcggagaaccgccggaatcaggcgatgacccggcgatactcgtcgagtttctcgggccagtcggtctggatgacgtcggcgccgagggcgaggagggcgccccagcctgcctgggggccttcgaggatggaacgggtgtcgtccatgcccttgaggccgcagtatccgttgcccaggtcgagggcgttgacgaacgtgtacaggccgagttcgttgatcctgttgaagatcgcggggtcggcgagcggggtgtcctcggtggtggcgacgagttccacgccgacggtgttgatctgctcgtcgtcgacgaacagatcgagttcgtctgggttctggatcatgcccatgaacatgtatttgacgtcgtggtcgtggagggcctgctggaagcctccggtgacggggcatttgaggatgagcttgctttccaggtggaactggtcgagccagtcgaggaatccgctgccccagtagcgccaggagcggtcgatgttgatgaggatgtcgggcgcgttggacaggatgtgcgcgacccgttcgacgttgccgtagtaggctccggggtattcggtgtagcgcagttcgtcgagttcggcggcagtcttggacaggatgtcgtcggtgatgcgtagacgggccatttcagtgccgtcgtggaacgcgaagtattcgccgtcggtggagcggattacgtcgatctcggcgatgtctgcgttgacttgcttggtggcgaggacgctgttgagcgtgttctcgcgaatgtcgccgcgcggggtgccgcggtgggcggcgatgacgaacggcgagcgggcgcatgcctggttgagattggcgttgatctgcgcgtattgttcgcgtccgaatcgaatgggggtggctgcggtgttcatgtcggctcctttgctgctgccgggaggctatgggtgatacgggccttcccgctccgggagagaagaccggggcgggaaggccgattgggttgcgggtatcgcgggtgtttacttgcctgcggccttgttgtaggtggcgatgtccttagcggactgggtctgggcctcctgcatggcggtcttgaggtccttggagccgctgacgacctcgttgaaggaggccatcacgtccttgcggatggacgggtaggcgccggtgcgggcacccagggacacgctggtggacgggttggcctcgagctgctcgtagaagaccttgacgttcgggtcggccagggcctccttgccttcggtctcgtcggcggccttggtgttggcgaacaggttgccggaggccttggcgaacacggcctgggcgtgcggggccatcatatacttgccgaattcccaggtggccttctgctcggcctcggagtgctcggcggccacgatccacagggagttgccgccgatcggggtgccggccttcttgttcgaggcgtcatgcgggaactgggcgacggtcacgttcgaggtggagtcgccgggcagcagggacgtgtaggaggcggaggaggtcaggaccaggccgagcttgtcggaggtgaacgcggtcatcatggagctagagtcggtgccggggttcagggcggtgccgtccttgaacatgtcaacgatcttctggaacatgtcgagctgagtcttggaggtcatgttcacaccggtgacgtccttgccgccgcggccgttgtccggggtggcgatgagctcgccgtggctggcggagagcatctccagaatccacgagtcgaccatgttcatcgagaagccgtacgcgccggtcttctcgtggatggtgttggcccagtccacgacctcgtcgaacgtggtcggcgggttggacacgtccaggccggcctcctgggcgagcttgttgttgatgtaggtcacgggctggctgatggcgaacggcagggacagcaggccgttgtcgtcgctgtagtacttgagggccacgggctgcaggtcggcggtgtcgaaatcggagtcgcccttggcgagcttgtagaccggggtggtcatcttgctgtcgatcatgtagccggtggacgtgtcgttcatctgcaggatcgacggggtggacttggcctggacggcggcggagaacttctgctgcacgtcagaataggagccctggtaggaggcctcgaccttgatcttgcccttgtgggcgtcgttgaactcggagacgagctggttgatggcgtccacggccggaccggagttcgagtaccagaacgtgacggtctgctcgccgcccttggcgtcggcgttggtgtccgacgtggatccgcatgcggacagggcgagcatgggcaggaccgcgacggcgaccgccttcagcagggttgacttcctcatgataggtttcctttctcgttgcgccggacggccttcgacggccgccggccggaaaaaatggttttgttggtttttcttgtgtcgtacagatggggatcggcccacgatccgcggccgtcgcgtggacggccgcggccaggggttacttgatgctgcccgcgacgctcatgccgcgcagggacttgttgaacatgagcgtgagaatcatggccgggatgaccgcgatggccgctccggcgaggaccacgccgatgttggagccgtcggtgccgctcagctgggtgatgccgacctggatggtgcggtgctcgggcttgttggtcacgagcaggggccagaagtagccgttccaggcggcgaccatggcgttgatggtcgcggcgatgatggtgggcttgacgatgggcaggagcacgtcgaccatgaacctcaggtggccggcgccgtcaatcagggaggcctcgcgcagctccttggggaaggagcggaacgcctggcggaacaggaacacggtgaagccctgcaccaggaacggcaggaaaatcgccgggatcgtgtccatgagtccccagttggcgatgttcaggtagttcgacagcagggtggtctcgccaggcaccatcatgctcatgaggaagaccatcatccacattccgggccgcctcagattgcagaacacgatggcgtaggcggcgaggaacgcggtcacgatctggcccgcggtctggcagacggtcacaacgatgctgttgcccagctgctgggtcaggggcatctgggacatggcgcgcatgaaattgcccagggtgaagcccttgaacaggccgttggcgtcgaagaagaacgcgccgacgtagatgtacagaaccggcagcatgaccagcacggtcacgatcagggccagcacggcccacaggccctggctcacgggggaggtcttgcggatcatcagtagttcaccttgccttccaggaagcggaactgcagcaatgtcaggacgaacacgaacaggaacagcacgatgcccagtgcggacgcgatgccgaaattcgcgctgcccgcgttgaacgcggtggtgtagatgttgtaggtgatggtcgtggtcgcctggcctggtccgcccttggtcaggatgttgatctgggcgaacgcctgcagggcctcgatgcatgtggtcacggcgatgtagaacagcgtcggtgtgatcagcggcagcacgatggaccactggatgcgggcttcgttcgcgccgtcgatgcgcgcggcctccaggatctcctggtccacaccgtcgatcgcggcgcacaacaggatcagcgcgaatccgagaccggtccagatggtcaccaaggtgaccgtgaagaacgcccacttcgcgtcggtgaggaacccgaccggccggatgcccagtttctcgatgatcgaattgatcacgccgctcgaaccgaacaacgccaggaagcccagcgatgcggccgccaccgagacgctgacgatcgaggtcatggccacacgcagtatcttgatgcccatgatgtgcctcgtcagcagaatcgccagcagcacgcccaaggcgatgcgccccgccacgaccagcacggcgtagaggaacgtctggataagcaccttgacaaacgccgggtccgtgaagaccgtcctgtagttctccagcccgatgaagcctgagggcgaaccgaagatgtccgtgccctgcatgctcatcatcaccacgcgcaccagcgggccgaacacgaccacgaccagcaatgccaatgccggaaccagcatgaccgcaccggtcaggcgattcttcgcaacgagaacgttcgccgtgcgtccgccgtgcgtcttggcgccgtgcggggattgcgacaaatgggttgatgacgccatctcgcgcttcctttctttctccggctccggcattgccttgccgagagccatgggtaatacccttttacgtcttttggttgtgagccgcagccgttccgatgacggacgcggcgtatcgagttgctgatttgctgctatctatatccgttgttgtatggggggtcactccatcttcggagcgctcccagtgattcatagtatatcatttcgacataataaagtctaatcgacgatatacagccatttcaggctaaagatgaacgttcgctgaattcagtgctaatatttataaactcaataattacagtattgggagcgttctcagcaaggagggtgagatacgtgggttattcccatgttggcattggtgttctgcctgcttggaggaaggaacgacgggtctcccctggtggccatcaacctcaaggccgcgcgccgcgtcacggcggcccccttcctgatgctggcgacggcggtggccttgctgccggccgccaacagccgagtcggaggaaccatcgtcgccatggtctcctccgaaggatccggcggacaaagtccgctcctgctggcgacggtgctcgtcgccgcatcggccaccctgctggcgctcaacggaggcggcgtgcccacctcgatcacgctcgccctggtcggagcatcctccggagccggcttcgccggcggacatccccaatggcatctggtgctgcgcgtcctcgggatagcgatactttcgcctctggtggcgttcgccgtctcccgcaccatctacctgctgttccaatccagaaccccgcagtcctcgaccaccatggtcttcctcggattcctgctcacctgcatcgcctatggcagcaatgacgggcagaagatgatcgtcctgttcggcaccgccatgggagtcgatttgggaactgccacgcacagcgccgccatcaccgcaatcgtcgccgcgacgttcctggccggcgtgctcaccggcatgcccaagggagcagccgcattgcagcgcggcaccatcgtgccggattcccggcagatctgggtcaccctgtgggcggcctccgccgccgtgctcgtcagctcggcgctgggaagcccggtcagcatgacccagtccatatcgggcgcgctcatcggcacctgccagacgaacgactggcgcaaggtccgctggggcgaggcgcgcaggatcctcatcgcatgggcggcaaccctgcccatggcctggatcctgggctatgccgcagccaacgggctcgatctgctgccactgtgatgcatcctcgggcgacgggtgctatcgctccgtcgccaccacgcgcgggtgcatgggattgcggcgcgggatgcggcttccgttccgcctattgcccgtctatcgcccgtctttccaacgtggcagcgccacggtgcgcccgtggatgaattccccctttactggcagcgcctccacggcgtggtccccgccatccagacgctcgagcaccagatccacagcgcgggaaccgatctcctccaaaggctgccgatatgtggtaaatccaaggtacggcgacgcgagcgggccaaacccgtcatagccggtgacggacacatcctgcggcacggaaacgtcgcgccggcgcaactcgtccatcacattgagcatgaccacgtcggacggacacatatacgcggtgatcctgggatggcacagcacctcgtccaccagcgttccaacctcttcggcccctttcatatccatcaccttcacgcggatgccgagctgcccgagcagctcgatcatggccatgccgcggccgtactggctgaccgagtattccctgggcaccagaaacaccgccacctcccggtgcccgaagtcgtggacgtattgcgcgagcctgcggccgccgtcctcctcatcgcaaaacaccgaggacacggtgcacgtcgtgtcctcgtgcccggccatcacgaacgggatccggtcgatgaacggcatgaaatcctccaccgcaagcatggcggagcatacgatcagcccctcgacgcgcagggcgatcaaatcgcgcagcgcctggcgcgcatcatccgcggacagttcctccacgccgctgatggacaccatctgatagccgcgctcacgcgcccgcttctgcatggcgccctgaaggaacccatagaaaggcagcttcgcgttcctgaccaccactcccagcgttttcgtgcgcttcgaggcgagcccgctggccatggcgctcggcacgtatccaagcttcttcgccgcggcgagcacacggtccaccttctcctgacgcacgcccccttcgccgcgcatcacgcgggaaaccatggacttggagacgccggcctccgcagcgacatcgaaaatcgtcggctgcctgctctctgcggcctccatgctgccctcctcatcgtcacaatatgtaacaccgcaagcgacggggcctcagcccaaatccgcaacgctgcccgttgccccgccatctcgacacaatggccttttcttagagattaccgcacttcacgccggagcatcggcgcggtttcgttggacggtcacggttcgagatctccgtctgcggcgagaaattccataatgtgtgaatcgccgggcttgcgtcgagcgggtagagcagtccgtagtgcatgatgaccggttcgggccagtccacggccacgttgacgagctgcgggtgaatgccggcccacatcggtttggagatgagcaggtcgccggattcgacgcagtcgttgaacgtgtcgaggtcgtaatggtcgatgtcgatcagatcgatggccggatattgttccagcaggtcccgggccgtgtcgttggcgccgcgatggcgtttgaggatgcggatgcgtgtgccttcgaggtctttcaatgtgagccgtgcgcgtctcgccaatgcgtgattgcgcggcaccgccacgcacagcggctcggaatcgagggcgagggtgttgccggtgtcgtcccaatagccggtgtcgaaggccgtggatatcagatcgacgtcttcgccgagatgggtgacgatgtcgttgatcgcttcggagtcatcgggcatcgacaccagttccaggcggatgtcggtgtgtttgccggcgtcgcgctgccataggtcgaggatgcggcggccggggtgcaggatggaaacgccaaggcggacggtggcgatgccgtcggtgctgcgccgttgtgcacgacgtagaatctcctcgcattggcgcacgatcatctgcgcgtcctcgacgaactccttgccggctttggtgagttgcactccactgcgcgatcggtcgaacagcgtcagaccgtattctttttcgaacgtattgatctgtttggccaccgccggtgtggaaatatgcaggcgatggccggccttggcgaagctgccggtctgcgcggcggcgcgatcggcgtggccgtattcggtgtggtcgccaccttcacgccctcgcttgacggctccctgtgtgtcgtgttcgttgcggccgaagtcggtgcggaatggcgcgttcaaccggaacgtggggtcaacaggatggctcaccagttcctcgaaaagctcatgggtgcgttccggcgtgtgatacccggcgttgagctccgccttgatcggcgtattgcccgaaccagttcagcagcagattgtgtacgggcgtgcgcaccgggaacagcagcggcacatccttgagattctgcggggtcaacgattcgcgttccgccaacgggtggtttccgggaaccatcgctgaccagtgctttgtaatgccggtgcgcaggaactcgtattgacttggtctgcgcacactcgcgcagcatccggccttcctcggtgagcgtgatggtgtgactgccgcgttcgaacagcgtgacgcccagttcctcttccaattgtttgagctgacgggagagcgtcggctgggaaatacgcagcaactgcgcggcccatgtgatattgccttcctcggcaaccgccagaaaatatcgcaggacgcgcagttccatcctcggggctccttcggtgtggatggacttctattgccattatgcccgccgcccgtgaactcattatgctaaacgcggatagtttcggtaatgacgcggcgaactgcatgcgagaggcggtgctcaatagcgaaagcctctcggctgccgtcgttggtcgtgatgatactggagaccatgaagctcgtgcggcggcggtctagggcgaggtcgagaaagaggtaacggcgtgacgcttgataataggtcagacagtagggtggcggcggagcagtgccgagcatgagcaacgatcagcggccgcagacgatcgaagtgcgcggggcgcgcgtgcataacctgaagaacatcgacatcgacattccgctgggcgaactggtgggcgtggccggcgtctccggttcgggaaagagctcgctggcgcttggcgtgctgtatgcggaaggttcgcggcgttacctggaagcgctgtccacgtacacgcgccgtcgcctgacccaggccagccgcgcccaagtggacgaagtgctgcatgtgccggccgcgctggccctgcaccagcggcccaccgtgcctggcatccgctcgacgttcggcacgatgaccgaactgctcaacagtctgcggctcctgttctcccgcgtcgcctcgcacgtgtgcccgcattgcggggcgcacaacgaaccgacgctgaacgtggcggccggactgcccattacttgcgtcagctgtggcaaggaattccacgcgctcggcgccgaatcgctcgccttcaactcggccggcgcctgcccgacctgctccggaaccggcattgtgcgcgaagtgaaccgtgcggccctggtgccggatgagtcgaaaagtatcgacgacggtgcggtgctgccatggggttcgctcatgtgggacctcatgaagcaggtgtgcggcgcgatgggcgtgcgcaccaatgtgccgttcagcgagctcacgcccgaagagcgtgacattgtattcaacgggccggccgtcaaaaagcatattctttacaagccgaagaaaggcgacgatttcgccgaactcgacttcacctacttcaacgccgtatacacggtggagaacgcgctcgccaaagccaaggacgagaaaggcctaaagcgcgtggcccggttcctcaaggaaggcccatgcaccgactgcggcggcacacgactgagcgtcgccgcccgggccccgcatgtgcgcgggctgaaccttgccgaagccagcgcgatgaccttggatgcggcggtggattgggtgcgcggcgtgccggaatccctgcgccccgacatgcggccgatggccaccaacatctgcgaatcattcctggacgtggcccgccgactgttggatttgggcctcggctatctggcgcttgaccgcgccggtgccacgctttcgaccggtgaacgccagcgtgtgcagctcgcccgtgccgtgcgcaaccgcaccactggcgtgctgtatgtgcttgacgagccatccatcgggctgcacccctcgaatgtggacggactgctcggcgtgatgcgcgatctagtggcggacggcaattccgtggtggtcgtggaccatgacgtgcgcgtgctcaaagccgccggccatctcattgaaatgggaccggttgccggcgctgaaggcgggcatgtgatcgcgcaaggcacggtggacgaagtggcggcgaatccaagtagtcgtattgcgccgttcttggccgataatgtgagcgcgcgcatccgtgagcgcgtggcggaaccgcaggtgttcgaccttggccgtatccgcatgacaaccagccagttgcatacggtcaagccgctggacgttgatattccgcgcggccggctcgtggcggtgacaggcgtctccggctccggtaaaaccacgatggtgctcgaatcgctgattcccgcactcaaagcgcaggcggcgggggagcggttgccggaacacgtgctcgagcttaaagccgagggcatcaatcgcgcgaatctcatcgacgccacgccgattggcgcaaatgtgcgttccaccgtggccacctatgccgatattcacgacgaattgcgccgcgccttcgcccgcgcggacgacgccaaagcgggcggctggaaggctggcgatttctcgtacaacactggcagactgcgttgccccacatgcgacggcaccggttcaatctcgctcgatgtgcagttcctgccggacgtgaccatcgaatgcccggattgcggcggatcccggtatgcgcccgaagccggcgcgattcggcgtgcggttaagggagaatcgcacctttcgttgagtctgccgcagctgatggcaatgagcgtggaccaggcgctggccgtgaccggcgacctcaagaaggttcacgcacgtctgaccaccctgcacgacttgggcctcggctacttgacgctcggcgaaccgacgccggcgctttcgggcggcgaagcccagcggctgaaactcgccagcgaaatgggcaaggcccagttgaacgcggtattcgtgttcgatgagccgaccatcggtctgcacccgctcgacgtgcgcgtgctgctgggcgtgttcgaccggcttgtggcgagcggcgcaacagtcgtggtcatcgaacatgaccttgacgtgatcgccaatgcggactggatcatcgacatgggtccgggcggcggcgaaagcggcggacacatcgtcgccaccggaacgccggaacaaatcgcggccaatccgaacagcatcaccgggcggtatctgcgctgactcgtatggcggtaacgcgcctttgcataggaccctgcgcgagtaggatagccgtccatggtgcagattcatggcattagacgcgcaagcgcggacgcgaaatatcggcagatgaccgggcagccggtcaagccgctgattctcaaactgtgtttgccggccgtcatctccaacttggtgaccaccgcctacaacctcacggatacgttctttattggtcagctcggcaccgcgcagtccggtgccatcggcatcgcgttctccatcatgaccgtgatgcaggcgctcggcttcttcttcggcaacggcgcgggcaactcgatgagtcgcgaactcggcaagcagaacaatgatcgcgcctcccgactactggccgtgggctttgcgggcgcggtgatctccggtttggtgattgccgcaatcgggctgctgaccctgcggccacttgtcgtcatgctgggctcgacctcgacgattgccccatacgccgtgcaatatctgacgccgttgctggtcgccgcaccctgcgtgtgcggttcgttcgccctcaacggactgctgcgataccaagggcaatcgacgttcggcatgatcgggctggtttccggcgcattgctgaatttcctgcttg

SEQ ID NO: 1564 - DNA, 2970 bp, Unknown
  R221_24m  MAG No. k141_25438
aacaccaccgccagaaccaccgaggtcaacggcttgaccgccacgtcatgcacgttcacggccaactggtaaagcgccggattccacgtctccggcccctgcgacagcatgccagtggctatcgaaccggcgccaccgcccccgatcatgttgagcatcgcaacgatgaaatcctccatgccgggatccccgatgcctcaaaccggctcagcccaacgccacggcgctgaaggtctgcgccgccgcgataatcatgccgccgcccacgatctgccacaggcccgactgcgtctgcggcccgttatgatccttcaaaccaccaccgaatgtcaccgcgccccacaccagccacaagccaccgccaatcgtcgcgaacttcacgaacaactccagcacctggttcatcaaatccacagccgcactcctccgcacaggaacggcacggcccaccgccatgcctacgcatacggccatcctcgtgcagtcccgtggaatcagcggcggacaaattcacacagcattcgttcagcatacttacagaaataggtaaatcaagacgctatagtattcgccaaaagatgcccgggaaaggggaaagaatgcaaaataacgaccagcagcagaatgatctttggattaagcaatctctcggcgctgcttcaaactgggaagaactagacgaagccgatcgagtctcccttcggaaagcagcagcatggtacgcaatcatcgccatcggattagctattggtgcggggattctctcattcaccattctgcaagacggcgcaaaggctacactcgtgacttcgtcgctcgccatcattggcgcggtctttcctgcgatagaaaaagtcgtgtcgggatcgatggaatactttgaatcaacaaacgagaaacttcatgttgcaaaacttaaattgatgcgcagttatttcaacctatatgcattgattctggtcggtgctgcgcttctcgatttcattgccgcagcattcctcggcctgtggcaataacgtttggagatgacgtgaaatggcagatgacatttgccgaatctgcggtaaagaagggccgctgagctttgaacacatccctcctcaatctgtgggtaatgatcacacggtgaagctctattcaggcgttgacgccgtgaagagcagcttgaccgggcaggatgacatggaaggcctgaagtatcggcaattgcaaagaggacaaggattcaagacgatttgcagctcatgcaatagttatcttggtcaaaactacgtcaagccattcagtgagttctatcgtgcaactggacagcaaatccttgtctctgactttcaggaaggggataaatccattcatttcaagacagataggctcatgcctcttgcatttgtgaagcaggtgatgtcgaacttctgtgtatcagctggtgatatgcatgactgtaaggactatctcttggatagggagagcactgttttcccccagcgatacagactccatatgtttatagtcgataacctgcgtgaacaaaagctgttcaccggatggatggttcccatatttgcggattacacgtgctgcaaaatggcatgtatcaggataccgccattcgctttcactttgtttgatctcagttctagtaataaggtgcctgaatggccaggcaacataaccgatttagctagagtgccgtggggagagaaacctggcatcgagtttcacttgccagtgcttaaagcagcgaatcatagtccgctgtcatgggggaacgttggctaaagccgatggggaacagacgaaataggcccgcaggactacgcctgcgggcctagtatgcactgccccgttttgccgggacagttgcatggtatcaccgtctaactgccaactggaatacgaaagttggctctaagcagcagatgggtggttgttattagttcatgggcggctccttggaattgatagtggtgacgagttgggcgaagtccggctcggggccatctccattgggactgccatcacggccagcgccatcatcattcgcgtcgttctcgtgcccggtgtggcggccgttggcgcgggtgaggcggatcgcggcggttgcaccggtgccgaggagcgcgaggacgaggatgacggcgatgaggccggcgatgttggtgccggtggtcgccagattgtccttgggctggtagccgttccagtcgtcggtgttgctggtcacggtggtgtccgcgcacagggttcgcccgtcgatctccaccgcgtcctcgggcagtttctcctcgtctttgccgtcgaaggggtcggggtcggagacgacgcattggacgagcggcacaccggtgacgatggcgcggtcggtgtgatgctcgctcacgccactgagggtggccttgacctccgcgctgtctccgggcttgaggatcagcgtctgccagtcgtcgggatactcgaactcgccgatctggccgtcgccggcgacgagctggtcggtgaggctcagctcgctcgccttgaaccaagggccgtctccggtgtcagggtcggtgggcgatgcgttggtgatggtgaacacgatgcgagtgtcgctcccgttcatgttcagcgcctcgtcaacggtgtcacggtcgccgtcgggccagccggattgctcgtcccatttctcgatggtgagccggggcgtcatgtcgggcgtgtgcgtggtgacggtgttcgagggccgttcgaccccgttgatggtctcggtgaactggttggccacgggaccgcccacggcgatgcgctggcattggatgaacgcggtccacgcctgctcatgctcggtgtcggccgacacgagtccaagcatcagctccgtggcacgcacggtgaccacgccgcgctcgtcggtggcgagctcgaagagttctccgccgaaacggctggcgtcgaagtcggagccggcgatgcgttcgccccgctcggcca

SEQ ID NO: 1565 - DNA, 29214 bp, Unknown
  R221_24m  MAG No. k141_25461
agtcggtggccgcggacctgatgagccgggtgctggccagtgttgacaagacattggggcagtgacggtggctcggcataccaagcatagtagcgacacgcgtgcaacaggcagcgtcgtgggattgatcctgatcgccgccctgatcgccgctttggtaatcggcgtcggtggatggatgtacgcgcataacggtctcggcgcatcgcacgccaaaacatcgcccgtcgcctcggcatcggactcaccggcaacagcgtcggcatcgtcgtcaacggcgtcatcgaaacacgaacaacgccctgtgcatgacaccttggagcgcaaggcggcacctgctcccgacctgaccacggtggcggaagaggagcggatgtcagatgtgtcctcggcggtcacggcagctgtggccggcaatggaggcacctggtcggtgtatgtcgaggatctggccacgggcaaaaccgtgagcgtcggcggccagcccatggtggcggcttcggatatcaaactgtacgtgatgcttgccgtgtacgataagcaacatgccggcaccttggccgcgggcgggcaagataccacctcgctgatcaaccagatgatcaccgtcagctcgaacgctgccaccaatcagctggtattgatggtcggcgatggcgacatggccacaggcatgcaacgggtgactggtacggccgcccgatacggcttcagctcatccaagcagttgcgggtgttgtccgatgccggcacagacgggaccggcaccgagaactggacgtcggcttccgattgcggcagattcctcgctgcattgtaccgaggcaaactggtttccgccgaagccagccgctccatgcttgacgtattgctcgggcagacgcgacgcgccaaaatacccgccggagtaccgtctggcattcaggtggccaataaaaccggtgaactggccggcgtggaaaatgatgccgccgtggtgtggggcaaggccgcggacggaacagaacgggattatgtgatggtggttatgacctcgggagtggtctcgggaaccgcgcagcagcagatcgccgcattgtcctctcaggtgtatgaggcgatgaccgcctgaacggcgggcagccgtgcaacgcgattggtgcggtattgaagatgcgatgtcgtaatagtcgtcatacttgcccgtgtggcttgccgcaatggcggcgacgtgtctgcgtatgataggggcatggctgatttttcacacatccttgcaacgcgccccgacttcgacgacgaggaccgcgagtggctgcatcatctcgttgccgattggcaggtgatcgccgatctgagctttgccgacctgctgctgctggtacagaacggtgacggcaaatacgtggtggccgaacaatgccgcccatccaccgtgatgacgctacgggcggaagacgtggtgggaaacgtcatgccggatgacatggtcggcgaattggacgccgccatgctctccagcgtggtgttccgctccacggtattgagaaccgtgggcaaggcgaccgtctgcaacgtgtacgcgccggttcggcacaatggcaagaccttgggcttggtcgtgcgtgagaccaatatggccacacgagaatccaacggtcgatatgagtcggaaagcattaacgcgggcaaacagctgtacgagatgattccacgaggccagttcccctacaaggattcggtgatgagccagcgccatatcgctcgcgtggcggacggcttcatcatcctgaccatggacggcgtggttcgatacgcagccccgaacgccatcagctgctttaggcgtctcggcctgctgaccaccatgcctggccattacctcagcgaactcggcacacagctgttgaaggagaacgaccccgttccggaaaccctgccgttggtgctggcgggcaaagccgcggtcgactccgaactcaacgccaaccgttccgccgtctcgatacgctcgctgcccttatatgacaacaacggtcgtatcggagcgattctgctatgccgtgacgtcaccgagctgcgccgtcgtgagcaggagctgcagaccaaggacgctacgatttccgagattcaccatcgtgtcaagaacaacctgcaggccgtctccgcattgctgaggcttcaggctcgtaagaccaagtcggatgaggtcaagaaggaattgcaggaggcgcaacgccgcgtgcagaccattgccatggtgcatgagggattgagccagaccgccgacgaggtcgtcgacttcgacaaggtgattgccaacctgctgcgcatggccgtggacctagccacgatgaaagaccagcacatcgatatcaactacatgggcaagttcggcatgatgcccgctcaggatgccacgccgctgtccctcgtgctgaccgagctcatcaccaattcggtggagcatgggttcgaaggccgcaaggatggccatatcacgatttccgtgggccgctccggcccgaacctcaatgtggtggtcgaggatgacggttccggtctcggctccgaagaacagggaggattggctcgttcttccggttctggtttgggcacgcagatcatcaacacctttgtgaccaatgatttcggtggttccgtgcattgggagccgcgccgcggaggcggcacccgcgtggtgcttgatatgaagctcagggccgctcaggatgagtgatgcgaagcccaaaaataaggaaaccctcccaagtgggagggtttcctagtatgacgaagcgataatcaaaacatcagatttgcatctgcatggcctgagaacggcgggcgcgcatggcgcggcgcttcagcgcacgacgctcatcttcgctcaagccgccccacacgccgtaatcctgattggtgtccagagcgcacttcaggcatgcatcaatcaccttgcaggtgcggcacacggccttggcctcctcaatctgctgataggctgcaccggtgttgcccaccgggaagaagagttccggatccttgtcacgacatgcggccttggctcgccaatcaaaagcgctgctcattgcttgcctcccttaaaagccccgtggctggtgttgttccttaagtccagtaccaaggtaaccacgaaccgtggtgattttcaagaggtttcgccgagaaaaaaccgaagttttcacgaagcgcactgcaccagacatgccgatgtgccctcgatgagcacggcccggcccgcgttgtcggcatcgatatgactcatcgtatccaataggcgagcggggactccggccataaggtcagacgttcgttccccgcacgggaacacgattctggtattgcaatgctctggtatacgtatcgggcgaatcgtgctgacggcgaataccacgctgacggactcatcggccaacgcatgtgtgaaagacagcgcctgctcgtcggtgcggaatgggtcgaacaactcatcggcgtcgtcgacgaaccacacgatatgcggaggcggtggtgcatccgagctggcatacggcgtgcagcggccgttgcgaagccattgcgatccccatacccggcgatgcggggaactgacacgtaccgccaagccatcagccatgctggcgtgtcgagccaatgttttcagcaacgtggttttgccgcgcccctgcgggccgatgacaccgatattgccaccggtgagggataccgtcgcttctcgcaggttgatgccatcgtcggcaagtccaaatcgaatgcgttgcggtgcgtgattggccacagtccggtcttttacgtgccggggaagtggcgcggtaaacagggacggctgcggcgggctcccgacgaaccgcgatgcgaacgcgatctggcggcataccgcatcgatatcgcgcgccgttgcacagcggaatgccgtcacctgttcggaatcgttgcagaacgccgcaccgggcattgccggactgaggtcggcggcacgaccatcaccaagcagctcgcatgattgcagacggtcccgaacccgtaaacaaatgctgacggacatattcgccttcatatcggcactgacctgacccatcggattctgcgtacaggcgatcagatacatgcccagtgacctgccgagcgaggcaatacgcaccagacgattcacataatccgggagctggtccttcagggcatggaattcgtcaatgaccacgatcaggcgcggtggcggattgaccatatcacggatatcggaagcatggacagcggcggacagctgttcacggcgtgtcagttcggcttccagcgcacgcaacgcgcgtacggcatgcgccagatccagatcgcatacgctgcccacggtatgcggcaaccgttcgagtttgcggaacgcggaaccgcctttgaaatccaaaaacacgaaattcagatgctcaggcccgttcatcgaggcgagcgccagacaccagctttgcagcaacacggatttgccggaaccagtggtgccggccaccagagcatgcggcccctgacggttcagatcgagcctcagcggctcgcttccggtcatgccgatcggcaccgcaaggtcaaggggttcaagccaatggcccacaatggtgcgccatggcaggcgtgcgaagtgcagcagcgattctatcggctgcgacggcgcatgacggaggtctgcggcgcgggcatcggcatcgtccgtgataccgatatcgatcgttgcctgttgcggggcgggggtcttctccgggcccggaggtggggggagcgtcagcagcagggacacgagacaggcgaatatgcctggcgtgatcatggcggcgaacagccattgcccgtgcaacagcagtatgaccatcatcagtgcctgcgcgatcatcgggcacgccgcggcaagcatggtcaggcgggcgcgcaatggcggcgcgcccaaacggtgcttcgcccgggatacggcggatgccgtatgggcggaatgtcgcttcgaatcgttctgctgtgatgtcatgcttccagcgtgggggagcgcatgccgaaagcgcaagccgaatcaaggtatgtggttctagcttgccgagttatccacatgacattttgcccgtgcatgattggctgcgtgggcaacggcggcgatcatgcgccgacgatgaagccgatgggctccgggaaagcgtcggtcagccttccgccagattgcccacggcgccggccttatgcgtgccgtcggcaagctgattgaacagttcggtgttcctggcgtcatcgagcagcaccgaggagccaacgccatcaacgtaataatctgggtcggaccagtacacgctgccggagatgccattcgagccggtggcgcttttgaacgccaacgccatggtgagcaacgtgtaagggttggttttttcatccacggtgagtgcgctcatcgcggcattggacactgccacgactttggacggattggtcagggtcccactgctggaagcctttttgacgatggccgagatgacctgccgctggcgttcgttgcgtccgaagtctcctcgcgcgtcggcgtatcgcatacgagagaaggacaatgcagtggaaccatccgtcgtatggcatcccgccttccagttcagtccggaataggaatcctgaacatcctcgtcatagcacagttcgataccgcccaaggcgttcaccacgttctgcagaccgccgaacttgatctgcgccacatggtcgattttctggccggtaatctgctcgacgttgcttaccaaggctttcttgccggcaatctgcgccaccgcattgattttcatgtactggtcatcgacgttcataagcgaatcgcggggaatggaaatcagcgaactcggcccgcttttaggcttgatcagcaccagaatcgtatcggttctgaagcctgagatattgtccacgccgccgtaatcggtggaaccgtctcgctcgtcggagccaagaatcagccaggtcgaggccggcgtgttgggggtgtcggtcagccagtcgctccggttcagtttgctgtccacccattgccaggcaccgaaaacagaaagaatcaacgccgccaccagtaccgcaatcgcgcataagatgatgcgcaaggcgcgcggccggtgtgccgttaccgttttcgccgttgccgccgccggccggccaagatggctgaacttcgtggacacgtttgctgctggcgatgagggccgggaaaccgacatatccgacggattgcgcacggcgttgcgggatgagccggaagacatccgcgctcgcgacggcggaatgctgcgcggtgcggcggcatccggagccgtgctgcgggtggcacgtccggttttcggagaaaaactgggcggagtccgcctgccgttgtccgtgacgttggcgcttgccgtgacgttggcgcttgccgtgacgttggcgctcgccgtggcgttggcgttcggttgaggctcttcgatgtcatttcccgtgacggacggacgggccgatggagcctgacctgactgacgtgaggcgcgggcaggggcgaaggagcgtggcacctgcccggaaggtcgggtgcgtcgatttcccgcaggaatgaagcttggcgggttgatatgcggatccgccccacctgattcctgcgtcataacccctcctgaaactgtcgattgtctgaatgacactttgacacagcatccgccgggtgttcctgcgctatggtgttcctgcgcaggaacggcacaatatcatgtgcaacggcatcagggcatcgtgtccgcgccatagcacacagttccataaaaatgatgtaatgacacgagaaagaatttgacaaaaacgaaattgcatgtgtgtaatttagtccgtatgaaaagctcaataggcaaggagaatcgcatgtggggtgtggtcgacgattcagccgaagagccatggcatgaattgtggggactattccgacctgatggcgatgtatcttggcagcacaaggcgttgtgcgcgcaaaccgatccggaggcgttcttcccggaaaagggaggctcgacccgtgatgccaagcgtgtgtgcgccaaatgcgaagtgcgtgaacaatgcctgaaatgggccatcgaccatgatgagcgattcggtatttggggcggcatgagcgagcgcgaacgccgtcgatataagcgagagcaccgggagcaggcgtagttccacacacacccccttcaagtctggtgcgtacactgggagtttatgagtccgacaggtaatagcgatattcatgaggcgttggccgacgccatgtcttctcgaccgtatacgcataggcaggatgtggataccggcattacggctgtgatcaccgttgaggaggatatgcgtttcctccggtctacattgcgttcggtattgacgcagaatgttcttccgggagtcgtcatcatcgccgacgcgaccgggcgcgccggttcgaggataaccacttcgttcgaggtcattccctcgccatcggggccggtagtggaggtgccgcagtccaagcatgtgaccattcacatcgtttcggccaagggcgcgcgttccttcggcgatgcggtcagccgggcgttggatcgggccgatttggatgacgctccccgcgcattgtggttgctccatgatgattcccgcccctcggatgcctcatgccttgaacgattgcttgaggcgtggcgcaatacgccgggtgccagcgtgctcgggtgcaaacagtgtgattgggaaggatcccacctgcatgatgtcggtatgtatgcaggccgacacgccgtgcattccctggtggtcgatggagaacccgatcaggagcagtatgacgggcgacaggatgtgttcgcggtgtcgctggcgggcgcgctggtgtccatgtcgcaattcacgcgactgcggggcatcaatgcctggctgaccacctacagcgaatcggtcgatttctgccgccgtgtctgcctgagcggcggacgcgtggtggtagtcccgcaagcggagatatcacatcgtcgcgcacggtatgagggcattcgtacgcgaggcggggagccgcttaaggaagatcacacggtcaatcatgcgatgacggtgcatcgctcccaacagcgctatctgtacactgacctggccatgtcgtcctggattatcgtctggctgtggaggctgattcgcagttttggcatggccatagccatgatgttcggcaagaagccgtatgaagcatgggtgcaattgtgcctgccatggttggctttggccgatatcgcgggaaacatgaaatcgcgcaggctggtggccagacagtcgaaggtcgccgcatcgtccctgcaggttttgttcgccgacagtcggcagatcaagcagttccatgatcgtcgggatgcattccaatcccagcagggcagagtgctgctcagtccgctggaacgtgcccatctgcggacacgcaccatatatcgctggagcgcagccgtggtgatggcgctggtgtgctttgcggccatcgtggtgatgtattggccggtgttccgttcgatattctccggtggatcgttgtattccgatgtgttgctttccaccggtgccagcttcactcaactggtgcagtccgccaccacgccatgggtgtttggcagcggcaccggcattcctgcgccgcccacgccgtggctgctggtgctgatgctggcctcgctggtcacgctcggccatgtgaccgccgctctggcgatgatactgtttgtggccgcgccgctgagcgcattgtcgttctgggcgctggcgggcgtattcacccgctcggacgtggttcgtgtgctgggaggactgttgtgggcatccaccggcattatgttcggctggtatgcgcaggccaatatgccgatgctcaccgtaatggtgttcctgccggccgcgttcgcattcgtgttccgtgccgtgggcatgtaccataccgaagacccgctcaagccgcgcacatccgttcaggccgcggccatcgccgcactgtgcttcatccctgtggtggccgccgaaccgcagctgctgttcgcgctgatcgtcgtgttcctgatgttcctgctgttcgtgcgtcgcaagcgcgccatgctgttgcttattccggttcctgccgcctttgcggtggctcctacgctcgtcaatgcggtgcgttacgccggtttgggcatgtggcgtcaactgttcggcgacatcacggtgccaacgtcatccgccaacgggtcgccggcgtcgctgagtctgcttgaggccgtacagcgtgcgctgggatggcgaatggggtcgaccgattatgccgatttggcggtcactgtgctgttcggcgtcatcacgctgctcgctcttgcttcgctggtgctgccgttcgcgttgcggacctcgcggctgatgtgggtggtaatcgtctgcggaggcgcgctcgccctgatttccagccgtgtggccatagccgtggatgccgatggtgtcgtggccggttccgcgcagcctggcatcgcgatgatgatattgggcttccttgcctgcgtgtgtctcgtcgccggtggggcggtgaagcgattccaaccgttgcatgcgtccggcagcgatcccgcaccgaaaagggaccgtctgcatgcgctcatcgtgtctggccgtgtggtgcttgctctgatactggtgtgctgcatcggcatccaatgcatgtatggcatcgaacgtcataaggatgcgggactgggcgtgtccgaaaacggcctgcccatggtcaccaccgattatctggaagccagtgccgatcatcgtgtgcttgccgtgagtgcggagacccgcaacatcgtcaactatgcggtgatgcgcaccccgcgcggcgatctgatcgacagttccccggtccagcgggcgcgcctgctgtccggcaagcatgatgcggttgacgaacaactggcccaggcctgtgcctcgctgctgtccaatcccgacgaagaggccatcgcggccatcagcgcgcttggattcggcggcatctacgtggttcccgagaccggcgattcctcgaacgacatgccgtatgaacagttgagcgcgaatatcgccgcatcgaacggcacccagtccctggtctccacggatagcggcagctactatcgtctgacgctgcgtagcagcacctcacagcaggtggatacctcatggcagcaacgtgcacagcatagtgtctggaggcacgcctggctgatatgcctaggtgtgatcacggcgttgtactgcttggtcgccatgcctcgcagacgaccgtcctacggattggaggagcaggcatgagcaacacaacttctggtttcaaacgtgcgatcggcatcgtgctcggtgtgatcaccatgctggtgttgattgcgctgttcgtcgttctcgtcatggcccccatccccaatatctgggtggacaaggtggccgcttccgataatgccatcgaccagacagttagtccgacccagtccgaaacctactgcccggcacctataggattggccgataccggcacgtacggcgacagcgccttccaggccactgtcggcaatctgagcacacaggcgcgctatgcggcgttcggctccgtctacagcgccactgtctcggcgatcgggcaaaagtccagttcagatgacgtgactttgaaagacgccgatccgaccgacgattcctcggtgaaaaccggtgctcagaagatcgatcagggagctcgcctgatcaatacccgtatgttgcaggccgcagctggcaccggcaccgtcggcaccatcgcatcatgggccgatgacggcgatgtgagaggcgtatcggcggcatcctgcgtatcgacctcgctcagccagtcgttcctgctctccggcggcacgaccggtaccacacagcagctcatcgtctcgaatccctccaccaagccgaccaccgtcgacattgccgtctggggttccgagacagccgggaaaatggcattgtccacacaatccacgctgtctgtgccggccgagggggagtcctcgatggaactgtccgccgcggtcgatgggcagcatggtctgttcgtgaccgtttccagcaaggagactcctatcgcgtccgtggtacgtacggtgaccatggatggtctgacaccgaagggttctgatttcgcgctgccgctgccgaccgcctccaatgcgtcggtggcgccgtccatcactgccggcgatgcggtcaccgcttatctgttcgccaaggcagacaccagcaccgggctgtcatggattaccgacaaaggattggttcccgccaaagatgccaccgtcactgccgataaggtgacggcgatcgacttgggagaggctcctgatggggcgttgggcgtgatgtccaccgcagaggatgccgtgtcgttctccgtcaaggccacacgctccggtgactccggccaagccgatttcgcattggtcaatgccggcgagccatccgaattctcggggttggcccttcccgacggagtaaaggcctccatcacgctggccaatacgtccaatgcgcgcaggacggtcaccttgcacgcctacgatgatgccggtgcttcggtgacctccgaggaaatcacgctggatgcgaacgcggcgcaaacgattgagaccggcaaactttccggcgatcatggcaccgcggtcgtgctgatgttggaggactcatccaagaaagtgagctggggagcgcgtttcagtcacgattcgttgcaagacaaggacatcgccggattgtccgccatcgacgcttcaacgctgatgcccgccacggtccatgtctgggctcggaacgattcctccatcgtcaagtagagcgcgctcgccgaagcatcggtctgatgatgtttcggcgccgatatagctgcgggggccgtgccactgtcttacttgaagtggcacggcctccgcaatactgtcacaggccccaatcggggtcgatttcctcgggcctgcgcccatacaattccgctatgcgggccaccagctcatccctgacggccaactgcaattcgagcttggtaggtgcctcggtctgcaacggcatacggtagagcacgactcgtgcgggaatgccgtggctggcggggaagcactgggacgtcatattcggctcggtctgccaaggcgtcggatccgaaggcggcacatcctccaccgcgaactggagcggacgtatcagttccggccacgcttggccgagcctgcgaacctgggccgccaccatatcgtcgaacatgccggtgcgagtgcggtaacggggcagacgggtgccgaacatcggggttcgtgtgccgcgaccgtggcggttgcggtagattcgtgcgttccaaggtggctgaagcatggttcccaccataggacatggcggaggcaacatgcgttaggattggttcattggctgtgaacattcgtcaacgagggaggcgcgacaaatggtggtacgttcgtggtccgaacttgatttcgataatgtctgctccaacgccaaggtgttcggtttcgatttggacaacacgctggccagctcaaaacagccgatgaggcccgcgatgatcgaacggttctgtgcgctgctcgaccatacggtggtggccctgatctcagggggcggcatggcggtggtcacctcacaggtgctggatgtactcaccccgaatgccaggcgcggcaatctgcatgtcatgcctgcctccggctcccggtattaccggtgggatggcacgcaatgggccttggtgtatgcgcatgatctgtccgaagccaccgtggccgctgtctcggaaagtcttgagcgacatgcccgggaactgggattgtgggaacagcaggtatgggggcctcgaatcgagaacaggggcagccagatcaccttctccgctctgggacagttcgcacccgtagcggccaaacaggcatgggatcgcgataacacgaagaaacaggcgctggtcgaagcggtcaaggccgatctgccgcacatgcgggtcagggccggcggctacaccagtgtggatgtcagcgaatgcggcatcgataaggcctatgccgtgcgcaagctgacgcagacacttggcatacaggccgatgaaatggtgttcgtgggcgatcgcatgacgcctacgggtaatgactatcctgcggttgaggccggtgcgatcggtgttcgtgtggagaatccgcaagacacggtacaactgctggatgcactgcttgcgcgattcgatactccagcttgatggtgacgcgttatggacgggccgagcgtatacaagtggtggcatgcgatgtgggcacaggcctgcaatctgctgtttccacgcggctgcgctgggtgtgacgcgccggatgaggtattgtgtgcggcatgtcgggccttgttcgcacaatgccgggagcgggatacagacggtggtggcggagcccgtatatggtccgcatcgatttaccagggagcggcgcgtcgtgccattctcgactggaaggaccacgacgataccgagcttgacggccctttcggccgcatcatggtgtcgctgctgaacaagacgccaatatcatcatcatgcttggggcatcgcgtattggtggttccggtgccgtcatcgcgggcgtcaatgcgccgaagagggcgtgcccatacggcaccgttggccaaatcggtggcaggggcattgcgtgggtacggtgtcaatgcgcgaccatgcaatgccctgagctcctccaccaaggcacgctccgtgcagcagacctcttcggtacagcgtgcccgtcgtatcaccggtcatgtcagggtgaagcgtgatctcataggccatggcgacgcggtgcttctcattgatgacatcgtcaccacaggtgccaccgtgcggcaatgcgttcagacatttcagcaggccggtactaaagtggtgggcgtgctggtattggcggatgccgtggcgcgacggtccgatgacgatatcaacgggtgaatgacatcggtgacgatgccccagatagcaggcgaagcgccgttgctcggcatgtaatcgggatatcgaggattctcggcgtgcaatatggtgatgccggcccgtgaaaccagccgcttgatggcgatttcatcgtccatgacagccgcaaccacatctccggggactggtgccaacgaacgatcgacaatcagcagatcgccgttatgaatacccgcattgatcatggaatcgccggccatctgcatgacaaacagcgtggtgtcgcgcggcatggttcgtgactcggattgctgtgtcatgcggtgcctcccaccctgtattcgaacatctgttcgaatacagtatacggtaggacggcggacaatatcagcgttcggcgacgtgatatttaggcaggatgatttcgaaatcggcgcctcgcgtgtcatcgaccactttgacggtgccgccgtgcaattgggccgcccaacgtgcgatggacaggccaaggccggtgccgcccgactcggtgccgggacccgtcttgcctttgacaaagcgccggaagatatccgaacggtcggacggtgcaatctgggagccgaaattcaccacattggtcacgatggtgccttggctgtcatcctcatgggcatcgaccagcacggtggtgccgtcggccgaatgcttcagcgcgttggcgatgatgttggtgaacagctggcgcaggcggtcctgatcaccttccatcgagatgtcggccggcacggtgacatggatgtcgtgggcgtggccgccatcggcgatttccaacggctcgatggtctcgtcaagaaagtcggcgaaattgaacttctcgatattcagactcgccgcaccggcctccatacggctcaaatccaacaggaaggcgatgaggtcggagagacgctgcgtttgggtgaggatgctctccagattggcgggagtgggctcggtgacgccgtcggccatgttctcgaccatcgcctgcaaagcggaaacgggcgtacgtagctcatggctcacattggcgatcatatcgcggcgcattttatcggcatgttcgagttcgccggccatctcgttgaacgagcgagccagctggccgacctcgtcatgacgatcctgatcgatatccacgcggaccgtgtaatcgccatccgccatggcttcggccacatcgcgcatctggcgtaagggagcggtgatgccgcgggagaagaaataggtgatgcccaaggccaccaccaaagtcagcggcatggcgatccaaccggaccagccgaatttcaggaggaaccagcacatggcaaacgcgatggcagtggcgataacgatcagtacgctgagttccagcttcagagaggagaacaaatcaaccggcttgacgcgaggtttcatcgcatcaagccgggattgctgttgttttttggatgccatcacgcggtcggcggctcgaaagcgtagcctacgccgtgcacggtgcggatggtatcggcgccgagcttatggcgcagcgccttgacatggctgtcgacggtgcgggtgccggatgcgtcgacccagtcccagacctcttcgagcagcttttcgcgggtgagcaccgacttcgggcggcgggccagcgtggccagcagatcgaactcggtgggggtcagatgcacctgctcgccgttcacggtgacgatgcgctgggccgggtctatgaccatcgaaccgaagtcgagcagcttctcgttctccgaattcttggcgatgaccttcgcacgctccacgcggcgcagcagcgccttgcagcgggcgatgagctcgcgcatggagaacggtttggtcatgtaatcatcggcgcccgctcccagaccgatgaccttgtcggcctcgtcatcacgtgcggtgaggatcagcaccggcaccggacgttcggcgacgatgcgtttggtggcctcaagaccatccatgaccggcagcatgatgtccatgattaccagatcggggcgtagctgggacgcggcctggacggcggaagcgccgtccccggccacgcgagcggtccatccttcagcggtgatgcgctgggcaatggccgtggcgagtgtgggctcgtcctcgaccaccagcaccgtgcgcggtgtcgtattctgacgcgctgtggtattgagcataaataaaccggttacctttcagcctgttgaccagttcagtcttccggcttcaagaatacaactcccagagccggaacggtgatcttcgccgagaacggacgcgaatgatattcgccctcgaccgcttcgaaggtgccgttgtggatgtcggagccgccgtacttggcgtcatcggtggtgaacacttcggtccacttgccgccggtgggcagcgccacctggtaatcgggccaggcttcaccggagaagttgaccaccacggccaaggtctcgcccttggtgccgatgcgcaggaagctcagcgtgttgtggtcggcatcgtcgctggtcagccactggaagccggccggatcgaagtcctggctccatagtgccggatgcgccttgtagaaggcgttgaggtcggcgaccatggtctggacctgacggtgctcctgccagttcaggcaatcccaatcgatggaggcgtcgtgatcccactcgccccactgggccagctcgttgcccatgaaggagagcttcttgcccgggtgagcccactgataggcgaacatcgaacgcacgccggctagcttctgccagccatcgcccggcatcttgccgtacagggagcccttgccgtacacgacttcgtcgtggctgatgggcaatacgtagtgttcggagtaggcgtacaccatggagaaggtgatttcgttgtggtgccacttgcggttgatgggctcctcgtgcagatactcgagggtgtcgtgcatccatcccatgttccacttcataccgaagccgatgccgccggcggaggtgggggcggtgatgcccggccatgcggtggactcctcggcgatcatcatgacgccggggttgttcttgtacgcggtggcggtggcttccttgaggaagtcgatggcctccaggttttcgcgtccgccgtagatgttcggacgccaatggccgggttcgcggctgtagtcgaggtagagcatggagctgacggcatccacgcgcagcgcatcgacatgcaggtcctcgagccagaacagggcgttggccaccaggaagttgcgtacttcgcggcgtccgaagttgaacacataggtgccccattcggggtgttcgccgcgcagcgggtccgggtcctcgtacagcggggtgccgtcgaagcggccgagtgcgaaggcatccttcgggaagtgggcgggcacccagtccatgatcacgccgatgccggcctgatggaaccgatcgaccaggtaacggaagtcgtcgggggagccgaggcgggaatccaccgcatagtagccggtgacctgatagccccaggagccggagaacgggtgctgtgccagtggcatgaactccacgtgggtgaagccttcctgcttgacatagtccacgagctgcttggccaggtcgcggtaggtcagtccctgcttccagctgccggcgtgaacctcatagatggagaccgggccatcatgcgggttggtggtgcggcggtgctgcatccaggcgtcatcgttccactcgtaggtggattcggtgacgatggaggcggtgtgcggcggaacctcgtgctgacgctccatcgggtcagccttcatctcccacgtgtaattggcgttcaggatctggaacttgtaggtctcgcccgcgccgatgccgggaatgaagatctcccacacgccggaggagccgagctcgcgcatggcatgacgacggccatcccaggcgttgaagttaccgaccacgcgcacggcatgggcgttcggggcccacacggagaacgcggtgcctaccacctgctcgccaggcgtgccgtctgcgccgcccatcggatcgtcatagcgcagcacgtgcgcgccaagcgcctcccagagcttctcgtgacggccctcgccgaacagataggtgtccatgtcgccgactgtgggcatataacggtatgggtcgtcctcaatgagcactgcgccgctttcccactcggtcctgatgcggtagtcgggaatcgtgggctgcttcttggtgccggaggccggcacggtagccacgaacacgccgttgtattcgtgggtcatcgggtattcgccatcctgggtgaggatggtcacggacttggcaagcggacgcagcacacggattgtggcggtgtcggcatgcttgccgatgccgagatgcccgccgagaactccgtgggggttgtagaattcagcattgctcaccgcatcgaggtcaccttgggcgacaggcacggtgacggtatcttccttgatcttcgtttctttagccatgacccaaagtctacgtgcgttggagtcgaaaacgctacattggcgcgtcgaaaatggcgaattcttgcccttttcggtgtgtctccgtggttgtgagcgctctcataggggcggtccaggccgcatggcataattattcgagtttttgtgtgtaagccgtcagttctcggagggtacatgtcttacaaagtcggcgatatggtcgtctatccgcgtcatggtgcagcgaaggtggaggccattaccgagcggacggtcaagggagtgacgcgcgaatatctgcagctgtccgtactctcttccgatggtttggtcatcaacgttcccgtggacaatgccaggaaggtcggcgtgcgtgacatcgtctccgcatccgaagtggccaaggtgttcggcatcctgcggaccccgatcatcgagaaagagatgaactggtctcgccgttacaagctgaacgtcgaaaagatcgccaccggtgacgtcaacaagatcgccgaagtggttcgcgatctcgcccagcgcgatgtcgacgagcacggcctgtccgcaggcgagaagcgtatgctcaccaaggcccgcgccattctgacttctgagatcgccttgtccgagaagatcgacgaggcggaagcccagcgtctgctcgacgtgaacctgggctacgagcccgctcaacccggtgacgacaagcatcacaccgccgagcccgaagaggccgcggccgatactttggctcgtgtcgaagccgagaagaagtccaagaagaagtgatttgattgttgaggccccggtcgtgtccttatgcgatacgccggggcttcgtgattcataatcgtttgctgccgttcatctgggcaatgccatcgaagggaactgcatggggtctgcaggagtgttgatagggcagggttttgacgctcaccgttttgcgcctgtcggctcaggccgtgaactgtggattgccgggctttactggccggcgtctgattcatgcagcgaggccgatgccgccaaatacgagggtatcgaaggcgattccgatggcgatgtggccgcgcacgccctgattgacgcgttgcttgccgccgcccgattgggagacattggttcactgttcggtgtcggtgcggacgcgcatggtgccggaaggcatggcatcgatatgctgcaagaagttgtggcgcatctggcatccaacgggtatacgccggcatcggcctcagtggcgatcatcggcaaccgcccgaaaatcggcacacgccgtgctgaagccgaagccgccctgtctgcggcggttggttgcccggtatcggttaccgccaccaccaccgaccatatgggattcactggccgcggcgaaggcatcgccgccatcgccaatgccttggtggagaagatataacaaagcccccgctgtgaatttgccagcgggggcaagaaaaatgaatgagattacttccgcactgtctccacggccttggcgatagcccagaacagggtggaaagcgtcacgataatgaagctcgggggggcggggaacatcgccgacagcacgagtccggcccaaatcgacaccaggcacagcacgctggcgatcaccatcgccttgaatggggagccggccagaatattggcggtggccgcaggcgtgatcaccagcgcgaaaatcagcaaggtgcccactgccggcacggcaatggtgattacaccggccataatcgccataaacgccacgttcatcagcccgatcggcacacccttggcctgtgccacctgctcatccaacgagctgaacagcagcgggcggtagatgatggccaacaatgccagcagcaatacgtcgaacacggcgaagccgatgatctggccggtggtgatggtcaggatcgagccgaagaggatcgactgcatctgctgggaggcggaactcgacaatcgcgcgaagaacagacccaagccggtggcgaaggccagtacggtgccggttgcgatttcacgctcggaaacgcgcttgcccaaagcaccgatcaccagtgcgccgcccagtgcgaacacgcccatgcccagtgatacgggcaggccgagcaacaccgcgccggtcgcgcccggcagaccgatatgggccagcgcatgggccgcgaaggtggaacgacgggcgatggtgaagtatcccatgacaccggcggccagggcaatgcacaggccggcgatgaaggcgttggtcatgaatggagcggacagtgtgtccagccattcgggatcatacgaaaagttgatggtgctcatgtccctgtattttctccatgcctgagctgcagcccgttgacgggctgtggatcggctagcttgatgttatcgattctcggcgctgttggcggcactgccattggtggcgttgccgtgctcgtgatggtgcaattgcgccacttcggctgccgtgtgcatatcctgcggctggtcctggggctcatccggcgtcggggtcacgaacatgtcaccctgcggagtggtgaccacctgcacctgtgtgccgtagaggtgggtgagtaggtcggagtcgagcactttgtgcatatcggcgtagtgcgggtgcccgtcgagcaagtagacggcaccggtcagaatcggcaagagcatattgagatcgtgcgcaaccacctggatggtcatgttcagttcacggttcagcttggccagcacgtgtacggtggcgcgttgactggccagatcgaggttggccaacggctcgtcaagcatcagcagttgtggatcgcacaccaacgcctgggcgatggccacacgctggcgcaaaccgccggacagttcggacagacggtactgcgccttgtcggcgatgccggtgaactccatcgcctcgagcgctttggctttctgggccttggtgatggggtggatgccgaatcgggtgccggtcaggcccagcaacacggattgttcggcggtgagattggaatcgacattcgccacatagctctgcggcacatatccgatgcgtttgttcatttcgcctgcgggcttgcccagtacggtcaggctgccatggcaaagcggcaaaagtcccagctcggccctcatcatcgtggttttgccggtgccgttggtgccgacgatggccgtgaccgaaccggtgggaatggcaaaggtgccatgctgccagatgatatggtcaccacgcttgatggcggcatcgctgaacacgatgcaatcggaagtttcactcataacgcccgattgtggcaaacgatgctgacaatcgttctcaatatcgtgtacggatggtgacaaccaaagaaaagggttgtgcggccatctcgacaatggtcgcacaacccttctcgtgcaaggcgtctatcggcattgcatgaatccgatgccgttgtcctttgcttctaactatttgccggagtcggtctggtcgttgccggaggcatcgccggaatcgccattggaggcatcggcctttgccgaatcctgagacgaatcactggatgtggccgccttgcactgacggatgtacttgggctccgtgctggaaccggtgctggccttggaatcttgcgcattggcatcatccgtggcggcgccgtcggcgctggaatcatcggaattcgcgttgccgtccgtggcgtcttcgcagtcatagctcggatccaccgcgtcgatgatggtgttgatgagctggttgatccaggcgttcagcgtgtcggtgtccttgggcatttgttcggagacgtcgactaccggcacatcggcacgaccggcagcgccagtgatcatattggtcgcgtcactggcttcctgcgtgttgttgaccagcacatccacgcccttgtcttcgatgagtttctggaaagactgcaggtccgcgggtgccggttcgccgccggaagcggtcgattgcgtatatcccttgggcgtctgattcttgaacccgagatcggccatcagataatagaccacgggttcggtggctgcataggtgaggtcggagtgggatctggtgaactcggacgcccatgtttccagcgatttctcatccgcctgccatgccttgagccgcttctggaaggccttcttcttgctggggagtgcctttacatatgcatcggtgatggccgtggccatgctggatcgagcgtctttggagaaccacagatgcgggttatcgccttccatggcacccatgacggaagcggcggatacgatattcgtggtcttggtcatcgatttggtggcccaggaatcgtaacccgcgccgttggccacgatgatctgggccttggacagcttggcgacgtccgaggtctttggctcgaaatcgtgggcatccacattggtggagttcacgatggacgtgacttccacatcatcgccgcccagctcggcggccagcgagccccattgattgagggaggccaccacattgatcggcccggtcggtgcgggaacgctggtcttgttgtccggctcggtttcatcgggggagaaggttgcgcatgcggcggtcgcgaacaacagaacggcgctcaggccggctgcggcgagtcgcgtaagtcgtgtgatttgagtccccatggcacgccttcttcgtaagagcgaacgatatataatcctgacttgttccaacgatagcctatcgtttcgatagaaagcatcgaaaccacaggggagggcgttgatgtccacaataatcgacggcaaacgaatcgcggccgggatcaagaccgaccttgccgaacgggtgagcaggctcaaggcccggggcatccagccggggcttggcacgttgctggtggggtcggatcccgggtcgatgaagtacgtggccggcaagcacgccgattgccaggaagtgggcattacctcagtcaagaaggaactgccggcggacgccagcttcgacgacatcgccgctgccgtacgcgaactcaacgaagatccggcctgcaccgggttcatcgtccagttgccgttgcccaagggcatcaacgagaacgcgatcatcgacatgatcgacccggccaaggatgccgacggcatgcacccgtacaacctcggcgaactggtgctgcatgtgcgcggcgacatttcgacaccgctgccttgcactccgcgcggggtgctcgagctgctcgacgcctatgacattgatctgaacggcaaggaagtgtgcgtgcttggccgcggcatcaccattggccgcacgattggcctgatgctcacgcgcaacgccgtcaacgccaccgtcaccttgtgccacaccggtacccgggatgtggccgaccacatgcgccgcgccgacgtgatcgtcgccgcaatgggttcggccggattcgtgacgcccgacaagatcaaggacggcgccgtgctggtcgacgtgggcgtcagccgcgtctacgacgaagaagccggtcgctaccgcatcaagggcgacgtggacaaggcctgctacgacaaggcctccgcctacacccccaaccccggaggcgtgggccccatgacccgagccatgctcctggccaacgtcgtggaaatggccgaacgacacgcctagagtttcctaggaaatttgggcagagttgcttgtattgtgaatatctgtatgcctgtaagggtgtgcgtataactgaatatcgagaaattatccatccactattagaaaccatatatttacatggcagagaacaacactgaagtcgccaaggttgccatcaacgacatcggcaccgaagaggacttcatcaaggcagtcgattccaccatcaagaacttcgatgatggtgatctggttgagggcaccgtcgtcaagatcgatcacgacgaagtcctcctggacatcggctacaagaccgagggtgtcatcccctcccgcgagctttccatcaagaaggacgttgatcctgacgaagtcgtcgaggtcggcgacaccatcgaggcccttgtcgtcaccaaggaagacaaggaaggccgtctgattctgtccaagaagcgtgcccagtacgagcgcgcctggggcgacatcgagaagatcaaggaagctgacggcgtcgttgagggcaccgtcatcgaagccgtcaagggcggcctcatcgtcgacatcggcctgcgtggcttcctgcctgcctccctcgtcgagatgcgtcgcgtccgcgacctctccccgtacatcggtcagaagatcaaggccaagatccttgagctcgacaagaaccgcaacaacgtggtcctgtcccgccgccagtacctcgaggagacccagtccgaggtccgcgagaccttcctgtcccagctcaagaagggccagatccgtgagggcgtggtgtcctccatcgtcaacttcggcgctttcgtcgatctgggcggtgttgacggcctgatccacgtttccgagctgtcctggaagcacatcgaccacccgtccgaggtcgtcaaggtcggcgacaaggtcaccgtcgaggtgctcgacgtcgatctcgaccgtgagcgtatctccctgtccctgaaggcgactcaggaggatccgtggcagcgcttcgctcgcacccacgttcccggccagatcgtcaagggcaaggtcaccaagatcgtccagttcggtgtcttcatttccgtcgaggacggcatcgagggcctggtgcacatctccgagctcgccaaccgtcacgtcgagaacccggagaccgtggtcaagccgggcgaggccgtgttcgtcaaggtgatcgacgtcgacctcgatcgtcgccgcatctccctgtccctcaagcaggccaacgactccgtcgacccggcttccgaggacttcgatccggccatctacggcatgccggccgagtacgacgagcagggcaactacaagtaccccgaaggcttcgacccgaacaccaacgagtggatcgccggttacgagaagcagcgcgaggagtgggagtcccagtacgccgccgcccacgagctgtgggaggagcacaaggagttcgtggccaaggagctggagaacgctgccgaatccgcagccgccgacggccagggcccgaaggaagagaagccggtcgaggagacctccaactactcttccgccgctccggctaccggtaccctcgccgactccgatcagctcgccgccctgcgcgaccagctgctcggcaagtgagttcgccatcgggcgactgacgcctgacgtatagtcaaaacccggtctcgcttcggcgggccgggttttgccgttgtgtgcatgaacctcgaaacatggcatgatggggggagcatgattcgaataggattgaccggtggtattgcggcgggcaaaagcacggtgtccacaagactgcgggagctcggcgcggcgcttatcgactatgacgagctcgcgcgccgagtggtggaaccgggcggcgtcggtcttcgtcgtatagcggaatgtttcggccccgacgcgctgaccgatcaggggcggctcaaccggcgatggatcgccgagcacgtgttcgccgggcccgactcggaacggatgcggaggaaactggacgatatcgagcatccgttgatctatgatcttgcgctgtcgcgggagcggcaggcggtcgcggacaatccggatgccatggtcgtgcatgatgttccgctgttggcggaagtcctggacgccatgcccatgcgattcgaccatatcgtcaccgtcgaagcgcccgaacaagtacgggtcgacagaatggtgtcgacccgcggcatgacgcgagatgatgcgcttgcgcgcattcgccaccagtccagcctggaacaacgccgtgtcatagccgacgcggtgatcgattccacgcagccgatgggtcgaatgctcgaagccgtcgatgcgctgtacgaacagtggctggcggaatcataatgcgatgatgcggtcggcgagggccgcggtctcctcgttgtgcgtcgtgtagatcacgatcgctccgttgtcggcgaaatcacgcaggtgacgcatgaccatggcgcggttgtcggcatcgagggccgctgttggctcgtccgccagtatgacgcgcagcgattgacggatgagaagcctcgcgattgcgactcgttgttgttcgcctccactgagtgtgtagataggtctattgccgtagcccgtcagattcacggcccgcaatgcgcgtctgatgagccgacttctatctgccgatggtattccgacgctgcgcagagccagaatcagatttctgttcaccgtccattgctccaccagggcgtaattctggaacatgaatcccatgacgttgcggtgcatgagccgtcggccctttctggaggcaattgtttgcccatcataggtaattgttcctgaacttggctcttccaaaagacctaggacattcaacaaagtggttttgccacatccgctttctccggtcagggcaaccatgtcaccgggactgaacgtcaggttcagtccttcccataaggtgcggtcgtcgattcgatatgtcagattatgcgtgatcaataaggcgctcatgattgatgttccttacgtggtaagcggttgctgatacaggtttgtggatggcgatcagggatgtttgatactgtcggcgcgcagccgcgaatcgtaaagcactgtggttgccagagaaacgacgatgaatagtaaggaaaccgaggtcgtggaaacggcgttgtaacctcctatgagcaactggatcggaagagatgcactgcataacgccgctgctaggaacagtatcgattgaaaacggagatatgacggcgctccatgcatatattccacgaacataatttgacgtcggagtgtgcatagtgtcaaagccaccatgattgcgccgcccagcagacatgttatggatatgcaagctgtgatggaaaaatagttcatttcctgagttgttcgtgccaaacgagtttgtatctcgtcgtgccgattgacgaccgaagccaccaaagagtccacgcccttttcccgtaggatttcgagcagctgatggcgggagctgtaatcgaaggtcatgccgccggtggacaccatcgatgtagtggtatcgccagagagcagtgacgggtcaatgacaacaacaggaacagaggaaaggccatcggtgttggaaggggtgtcaaatgccgataagacagcatctcttggtctggattcaatggagatgctcgtgcgattgatggcgggcagactctttccctcttctgccgccaaactttgctcgaatgagtatgcgcgaagcacattgttcgtaatggattcgctgttccattgttcattctcgggcataatcacactgattcgtgcaagtgtcgtgttgtttcgtataagatgatgaagccttgccgtacgggaatccatgaggatgcagggctgtgggtcttgcgagctatccacccacgtgcatcctagccggaatgaggcgaatcgcgtatgttctgattgggaagtttgttcgacgaagtcgttccatgagggcatggaacgggctcggttttgatcgctgctataccacagttgcaattggaatccgtcgttggatgacaattgatgctccaatgttgttttcagtgtttgggattgccgccatttgaagttcgtaacgttcaaactggcagagctgagagcgagaacgatgattgccatgatgcagccggaagccatgagaaaacgtaaagggcgctttccttggattaatttgagtgcgttcggcaccagaacccttactagagcaatcgacaatgacaaggcaaccaatgccatgcacgttgtggcgatgatgatggagaggaatacctgaccggcgaatcctaagggagaagcgaaaggccagaagatcgcaccaatggaaatccaagtcatccatccgatgcagacgcagatgatgaaaaagaacgcatgccgcaggaattgcctcataataatgccggttgttctcatgccatgcaaggcttgtatcgcgcaaacgcgtgaagctgtcgacacggaaagcgcgccggacacaaatactacagcaagtccggcgaatatgacttgggcgatggaattggagaagaattgtttggtgatttgtgtgatgccgatgggggttgctctgttaagttcgaatccttggcgccgtatggatttggctactgaagcggtatcccgtggtgatccatagagaagccatcttcccaatgggtcggtgaatctgtctccgcgttgcacacgtgtgcgcggcccgaacccataatccgggtatggcgaattcgcatgcatgccgttgccgtctaatgcgccgaaaatagaaattacgcgtctgttggtaccgtgaccgtccggctcataggagactctcgcgagtacgacatgatgggtcgctgcgagaccggtcaatgtcgatagaggctgcccgtgcgcgtcggaaattccaatatcgtagctagggccggagggataggtttcttcgttattctgcgcatagaatcctgctgcgagagtgatgagagccacggccaatatactggcgattttataagtccagtgcatgatacaccttattcccggtaacaatgtgtttgtgcggcggacgataggaagttcgctcgccgcacattcaataaatggtgtggatgctgcgaaatgattcaagcatcaaatccatagaaagcttgatccactttgccgcataccgcgtaagtccttgcggaggcc

SEQ ID NO: 1566 - DNA, 2764 bp, Unknown
  R221_24m  MAG No. k141_25615
cagtaggccttgccgtccggcttgacctcgcagatcaccgtatcgatgccgacttcgcgggcgatgcgcccggctacctcggccttgtcgcccgatagcatcaccgtgcggatgccgcgtgcgcgcaacgccgcgatggcctcgcgcgagccttccttgactgtgtcctgctcgtagctcggcttgtcccagtcggcggccgcgtccaccacgccgcgcgtgatggtgccggtcttgtcgaacaccacggtgccgatgcgacgcgcctgttccagcgccttggcgctggtgaccagcacgccgttggtggcacccaggcccagtgagaccgtcaccgacagcggcgtggccagtcccagcgcgcacgggcaggcgatgatcagcacgctgaccgcggtgaccagcgcatgcgccagttgcggcaccgggcccagtgacacccagatggcgaacgtccagatggcgatgatcatcaccgccggcacgaaataccgggcgatcttatcggccagctgctgcaccggcgccttggtcgcctgggcgcgggccaccatcgccgcgatctgcgagagtaccgtgtccgcgccgacttgggtggcgcgcatcacgcagtcgcccttgagcagcacggtggccccggttaccggatcgccgacggttttggaaaccggcttggattcgccggtgatcatcgattcgtcgatatgcgcctcgccggccacgatgatgccgtctgtgggcacgcgctcgccgttcttgacgaccagcaggtcgccggtggcgatggcgtcgatgtcggtgtccgtgaaatacgccggattgcgccattcgatgccgtccacattgtctgcggaagtggcgttgagtttgtgcgcggtgcgcgggcgcagtttgatgagcgactgcaccgccttgccggtgccttcgcgggccttggtttccagaaggcggccgaccagcaccaaggtgatgaccacgccaaccgattcgaaatacggttcgcgcgagccttccgggaacacccacggggcgatgcaggtcaccagcgaatacaggtaggcggccgaagtgcccagtgagaccagcgagttcatgtcgggggagtgatgcgccaacgcggggaagccgaccgtgtggatcggacgcccgcagtagaacatcaccggcgtgatcaggatggcctgcaaccacgggttcaccatccaatgcggcaccagcgtgggattggccatatgcagcatggtgacggcgaatgccggcaacgtcagtaccgcggccacaatcaccagcttcgtcagcgccttgatctcattggcgcgttcagccgcctcccggcgctccccctccgccgcatccacggcggtaggtgccgtatacgaagcatcaggatgaggaaggggcgtgttctcatccgagccgtcctctccctcaaccttcaacatcccatgcaccatattcatgccgcacgcaaacggatactcgcccggcggcaacgccggcagttccacgtcggtggtggcgttgcccggcagcatggcgtcaagtcccagatcagcaaacaccacatgcgaggtgcattcgccggtctcctgccggtcgaaggctagtgtgatcggcgtacccgcacgcatgctcaccacggcgggggagtacccgcccttgacggtgatcgtcgcggattggcgttcgccggaagcgtccatggccccggccgttgccttctgcgttccgaagaagaaccgcaggaccagccatgtcaatgcggccgccactatcagcgccgcgacggtcgagaagatgctgaactccataactgttccttcccattcctaatgcactgaacaacagtgtataccctatacccctagagggtatataatggggtgtgttcagctgacggataagtatcaggggggttgcgatgcatggttatgacgaagacaaggccaaggtcatcgcacgattacgccgtatcgaagggcaggtgcgcgccatcacgcagatggtggaggatgacaaatactgcatcgatattctgacacagatttcggcgtcgaactcggcgctgaaatccgtggcgttattgctgctggacgatcatctcaaccattgcgtgcggcaggcgtcggtccagggcggcgaggtggccgatgaaaaacttgcggaggcttccgcggccatcgcacgtctcgtcaaatcgtgacgagttctgccgcatgatgacgcgcgctggcaaatcatgaaaggccgtctgacgctcggatgcgacacagcataataacggttgatgctcgactgtgataaggccaagcgtccaatgtgggctgctgagcgtccgtttaacggcttgaaatcgtcgagttcggtaaaaatttaccgtcattcaccatcgatgacatactgggtaccatgtttgagcaaataggaaccgtgattatcgtcatcgtcgtgctagtggttggtgcagggcttggcctcttcgccggcttcgtgctggggcgccataagggtcaggagatggctcgaggcgtcaaaagcgaggagctggaggaggccaagacctcgctggagaatgcgcgattcgagaatgctgagctcagtgctcgcaatgctgccgcacaggctcagattgaaggcgtgaaccagcaattggctttcgccaagtcacaacttgcccaggcgcagcaggctgagcagattcgcattcagcaggaacgtgagcgtgcggctgcggaggcggaacggaagcgtcaggcggatgctc

SEQ ID NO: 1567 - DNA, 4177 bp, Unknown
  R221_24m  MAG No. k141_25634
ggcgaaaagcagggggcggcgttcatgacttccgaaacccaacagaacaggcttgaagggcctaaggctccaaaagggcgggtcgtgctccagcagccgcctgaacttgagcccagcgacggcgtcaatacgctgctgacctcgctggtaccgttgctgggtaccgccagcgccatggtgatgatgctcatgaccaattccggcctgaccggcatgctcaccggtggcatgttcatggtctcctcgctgggattcgtggtggtcaacggcttccgtcaacgctcccagcgcatggcgaacctcacctcgtcacgccgcgaataccttacctacttgtcgggcttgcgtaaaacagtgcgcacagccgggcgcaaacagcgtaacgcggcgttgtggaatgctccggcaccgcaatcgcttaccgccatcgcgcaggaacccgcacgccgatgggagcgtatccaatccgatggggacttcatgcaactgcgcttcggcgtgcatgatgagcctctgtgcatcacgctcgaagcgcctgagctgccgccattggcacaactagacccagtttcggcatcggccgctcaccggttcatgctggcgcacgaatcgttgcgcaatatgccatacgttgtcaacatgcggcagttcaaacgagtggagctgctgggcgatcttgagcgtacggaggcgcttgcgcgcgcggtgttgtgccaagcggctacctggcatgccccggattgcctgcgtatcgtcgtattggcttccgaggctcgcatcggccagtgggattgggtgcggttgctgccccaagcggcgggattgaacgacgaactcgcccaagaaccggcggaggcacttgcctccacagtggggcatgggcgttatatggtcacctcgaacatacacgcggttgacctgctcgtgggatcgcaggcgcttgaccgtaaccggtataccggtagcgactatgaaatcgtgccacatgtgctggtggtcaacgacgggtttgaccgggagcaactcgccaaggaaactcagctattcgcttcggatggtcttgacggcgtcaccgtgatcgacctgcccgacgaatggggcgaccttgaagaagacaatgtactgcgtgtgctgttctctcagacaacggttgaagagggcctcaatgtgctcgaaacccatgaggaaggcaccgtggagctgttctccacgaccatcaagccattcgacatcaagccggatgcgcttacggtgcgagaagccctcgccatcgctcagcggctcgccagcgccccggacgaagtggaggatgcggaatccgcacaggccgcttcgtctgccgggcacaagaaatccaacgaattgccggcattgctgggtattgacgatattcgtcatattgaccttgccaaactgtgggcctaccgtacgggcaaggaacgtcttcgtgtgcctatcggactgcacgacgacaccagcaccgcatatctcgacatcaaggaaatgggccagcacggcatgggcccgcacggtgtgctcgtcggcgccacgggctcgggcaaatccgaggtgttgcgcacattggtgctgtctttggcgctcagccattcgcccgaccagctcaacttcgtgctcatcgacttcaagggtggtgccacattcgcgggcatgggcggcatgccgcacatctcgtccatcatcaccaaccttggagacgaggcctccctcgtggatcgtatggaagatgcgctggacggcgaaatcaaccggcgtcaggaactgctgcgcgacgccggtaatctggcgaacatcaccgaatacgaggatgcgcgcgtcaacggcgggcgcacggacctcgatccactgccgtcgctgctggtagtggtcgacgagttctccgaactccttaaggcaaaacccgacatcgtacagtccttcgtgcgtatcggtgctgttggacgttcgctcggcgtacacctgctcatcgcttctcagagactcgaacagggcaagttgcgcggccttgacgaacatttgtcgtatcgtgttggcctcaaaacgttctccgcgtccgaatcccgcgcagtgctgggtatccccgacgcatacgaactgccaagcctgccgggtatcggttacctcaaaacaccggccggaaccatcaccagattccgtgctgcgtacgtgtccggcgtacccaagggcttggatggagacaccacgacgttccagtacgccgtcgaccagatgcgaggcaagggcaggccggcgcacgtggtgtggctgccgcctctggtcgtgccgaacaccttggacgagttcatgccggacctcaccgtcactgcgcaatatggcctgatttcgccatcgtggcgtaagcgcggcgcgctgatggcaccttgtgcgttggaagacaagccgcgtgaacagaagcgcgacgtcatggcgcttgacctgtccggcgctggcggccatgttgcggtcgtcggcggcccgctcagcggtaagagcatgatgctgcgatccatcgtcacctcgttgtcgttgtctcacacgccattggaggtgcagttcttcgtcatcgactgcggcggtggtacgttcaccacgctggaaggactcgaccatgtcagcggtgttgccgcgggcaatgaggaagagaaagtacgccgtacgctcgccgaggtttccggcattatcgacgctcgcgagcggttcttcaaagaacagcgcatcgacggcatggatacttatcgcaggcgcagggcagccggccaagtggatgatggttacggcgatgtgttcctggtgattgacggatggggtgtgttccgcggcgattacgatgagctggaaccaaaggtgcagcaaatcgtggcgcgaggcctgactttcggcgttcacgtaattcttagcgccaaccgttggatggaaatccgagccaacatcggcgacctcatcggcaccaagctcgaactgcgtctcggcgatcccggcgattcccaaatcgaccgcaggatcgcgacgaccgtgcctaagggcgcgccaggccgtggactcagcccggcgaaactgcatacgcttgccgttttgccgcgtattgacagcaatcacgaggcagccaccgtgtcggatggcattgccgatcttgtcaacaaggtgcatgccgcgtggaagggcaagcccggtccaaagctgcgcttgctacccacgaagcttccttacgaaccgatgatttccgcggttatgaagcaaccgaaggccgccgaattgctgaccagaggaagggtcgtcctcggtattaatgagaacgcgctggcaccggtcgtgctcgatctgcagaaagagccgcacttctacgcattcggtgacgccaaatccggcaaatcctcactgttgcgacttctcgtgcacgagattgtgcgaggctacccggatggtaaggcgaagatcttcatggtcgattaccgccgagccaatctcgcacagataccggactcgcatctcggggcgtacatcaccaatgacgacactgccacggaacagttcctcgacctcgcggattacctcaagacccgcatgccggggccggacttgaccccggaacagctgcgcaaccgttcatggtggaccggatcggaagtgtacgtactcgtcgacgactacgatttggtcgccaccagtcgcggcaatccgctgaagccgttggcaccatatttggcgcaagcgtcggatttgggcctgcacgtcgtgattacccggcgtaccggtggtgccagccgagccatgtatgatcctctgctgcaatcgttccaggatttgggcatgaccggtattttgctgtccggcgatcccaacgaggggcagcttatcggcaaggtcaagccgaagcgtgccgttcccggccgtgcgcaaatcgtcacgagagatgatgggctgttcgtggcacagctggcatacactgcacccgtggagtgattcaaggccgacgcgcctgattcgctgattcgtccgattgggtagggttcggtgtggctcgggaatgccattgtctggtcctagagcagattccgtggcgttttttgccgagtcgggtcctagggtggagcacaacgactacgatggtgcgggtaacgcgatacaaggagtggaacttcatatgccgaagatgtttgga

SEQ ID NO: 1568 - DNA, 35923 bp, Unknown
  R221_24m  MAG No. k141_25999
aaaactggacagcatggccaatacatccagaatgacgtcgtatcagcggcgcgagcagctcatcgaaatcggtcgttcgctgttcgcgtcgaagggttttgaagcagtgagcgtggaggagatcgccgccaccgcaaaagtatcgaaacccatcgtatatgagcatttcggcggcaaagagggcctgtacgccgtcattgtggaccgtgagatgcgcgcgttgaccagtgtgctcaccgccgcgcttgacgatccgaccgtgcacccacgccagatcgtggaacgcaccgcactcgcactgctcacctatatcgaagaggacgccgagggattccaggtgctggcgcgcgactcgcccagcaccgaaccgtccggctcgttcagctcactgctgggagacatcgccgtgcgcgtcgaagacatcctttccgaaacgttcaaacggcagaaactctccaccaaaggcgtgccgtactatgcgcagatgctggtgggcatgaccgtgttcaccggccagtactgggccgaccggcccaaggtgagcaaggagcagctggccgcgtacatcgtggacctggcatggcatggcctgagccggctcgattccaagccgcagctgttgtttgaaggcgtcaaggcccggaaggaggccgagcgccgggccaagcgcgggatcgatgccgaaacaccggccccggacggcaaggcatcatcgcccttagagcagacggacctcgaccacacgctcagggaagattcagggttgcagaatgtgagttcaggggcacaggttgcgcaacactctgccgagtcgggagacgaagtgctacggtttgaacaggaaactgaacagaacgactaaatatgtgaggacgtaagactttcatggccagcacggcaaagacgctcacctttgtgatccccgcatacaatatggagtcctatctcgaccgttgcgtgaactcgctgctttcggcaagcgacaccagcgacctcgaggtactgattgtggacgacggttcgaaagacggcacgctggagtacgcgcgcaaactggaacgcaccaatccaggtgtcgtgcgcgcgattcaccaggagaacaaaggccacggcggcgcggtgaacaccggtatcacggcggcgaccggcatgtatgtcaaggtggtggatgcggatgattgggtcgacccgcaggccatcgacacggttctggccacgttgcgcgtgcaacgtgaggccagcgagccgatcgacatgctggtgaccaactatgtgtatgacaaagtgaccaagcgccacaagatcgtggtgaacttccgtcatgtgatggaggccggccgcgtgctcggctgggatgacctgggcaagttcggtctggcgcagtacatcatcatgcatgcgctcactttccgcacgcaggtggtgcgcgattccgggctgaagctgccggagcatacgttctacgtcgatttctattactcgtaccagccgttcccgtgggtgaagcgcatccagtatctcgacgtgccgttctaccactacttcatcgggcgcgagggtcagagcgtgcagaccgacgtgatgattaagcgtgtggatcagctgcggctcgtcaatcggctgatgaccgaggccacgcccgaacgtggtacggtgccggaggggctgtaccggtacatgattcacttcctgacgatcgaatcatgcgttacctcggcgttcctgattctctcgcgcgatccggccaactacgttaagaaaaccgagctgtgggatgcgattgacgcctattctccggccatcggcaaggatgtgcgctcgaagctgatgtcccgcgcgctcaatctgcctggtaaaaccggccgctggatcgtgcgcaacggctatctcatcgccgaacgcatcgtcggcttcaactgattcggattacggctttgccctgctgacgcgttatcagcagggcatccctattacctccccagccgaggttttgctactcggcccaacggtcggacattgcgaagctgttgtgcatcaggttgctggaggtgtatagcacgtcgttcagcagcttggttgtatgctcgcgcaggtagtcggccatctcgtcgttggccgcttcgagcacatccgccacgccctgcacatccttctcatcgccgtggccgccatcgagcggccatgcattcgtacccgtcgattcggcatcgcttcgagcaagcaactgctcatccgtgcgctcgatgagccggtgcccgaacgcgcgcacgccttccgcatagccctcgatgaaccggttcgtctcataccaatgcgcgtcggccacgacggcgatcaggcggttcgtccaatacaggttgccggtggagacttcgggcgtggtgtcgcgcaggtaggcaggcgtgtcgttgacgttcgcgtagaacggcgcggcggcggtgaacggaccggagccgaacgatacccacatcaccgtgcgattggccgccggcacatacgggcggacctgaatcgccaccatatggccggtgcggttcacgccgatcggacggtaacggtggcgcgattccgccgtgccggtcgtgccgtacgggtcgtacggcgtgccttcgaagtgcgaggacagcaggaaatcaacgtcttcgaggctcaccttgtcttccggcatgcggcaccacgggatgtcgtcggattcgggcgtgtagcgggcggccggcgaatcccagtcctcgctggggttgaggcggcgttgcatgtaccaggcacgcggcgtgttgtagatatggtccttcggcgtcgcggtgccgaaggccttgcgcgggttgaagcgggtgggaagggcaacggttgttccgaatccggcgctatgcacgtgacggccgttggaagagaccgacgttcccattgtgcggtcaaggtgatgcgtggccatgaactcgcgcaggtcggcgctgcataggtattcgcgctgctcgccgaacgcatcggcgaggtcgaagtcgtcgatgccgagctggttggggatcgtggcatagcagtcgtcgggcactcggcgggcgatccaatgatggccgccgatggtctcgacgtaccagatctcgtccgcatccgaaataatcacgccgttcgattcgtaggtgccgtaggtttcgagcagttcgcccaaccgcgcgacgccctcgcgcgcggtggtgacgtacggcagcacaagggtgatgatgtcttcctcaccgataccgccgggctgctcggcctgataatcggtgctgtccggcccgccgacagccggccgcaactcgaccatcgggtccgcaccgagcacgcgctcgttgacagcgatggtttcggtggcgctcatcgccacgttgtgttcgttggcaccggcttcggccagaatgccacgattattcagcacgttcggtgcgatggtgtaccggcaaggattgtccggtagttcgatttcgacatggctcagcacgctgcggtagtggcgcggctggtcgtcgggggcgacggcgacgaagcgcttgggatcgtaacggcccgagcccgaatcgtcatcgcgggcgatgatggtggaaccgtcgtaactggcatttttgccgacaagaatcgtggtgcatgacatggggcaccactctaggagccaggctggtcgaaacaaaaaatccttggaaccattgcgattccaaggatttgttgtgccccctgtgggattcgaacccacaacccacgacttaaaaggacgctgctctaaccgttgagctaaaggggcaactcttctaaaatacacaccgttttgggatatttcaactacggcgttgcgtacacgtttgcgtacgcgattggcccaacgcacggcacagcacacgcaatgtggcccaaatcgcagcccaaatcgcatatcgcctctagcgatagatagccgccggcggctacccttgtacattatgagtgaatcccccaattggagcaatcccctgcgcgactcgcgcgacctcagactgccccgtatcgccggcccgtgcagcctcgtcattttcggtgtcacgggcgatctggcacaaaagaaactgctgccggccgtctacgacctggcgaaccgtggcctactgccgccgagcttcggcctgaccggcttcgcccgccgagactggacacaggagcggttcatcgaattcgtcaaggccgccgtccgggcgcattgccgtacgccgttcaaggagtcgacttggcgcaatctggccgccggcatccgcttcgtgcagggtacgttcgacgatccggaggccttcgagcgtctgagcgccaccgtgcaggagcttgaccgcgaccgcggcacgcagggtaaccatgccttctacatgtcggtgccgccgcgcgccttcccgcaggttgccaagcagttggccgcctccggcctgtcgcgctcgtccgagggcgcatggcgccgcgtgatcatcgagaagccgttcggccatgatctggccagcgccaaggaactcgacagcgtggtatccgaagtgttcgacccgagctccgtgttccgcatcgaccactacctcggcaaggaaaccgtgcagaacctgctggccctgcgtttcgccaacgccatgtacgagccgatctggaacgccaactatgtggaccacgtgcagatcacgatggccgaggacatcggcatcggcggccgcgccggctattacgacggcatcggcgccgcacgcgacgtcatccagaaccacctgcttcagctcatggctctgaccgccatggaggagccggtgagcttcaccgccaaggacctgaccgccgaaaagaccaaggtgctttccgccgtgcgcctgcccaaggacctcgccgccaacaccgcgcgcggtcagtacgccaagggctggcagggctcgcacgaagtggtcggctacttggaagaaaaaggcatcgaccccaagagcaccactgaaacgtacgccgccatccgcctcgatatcgacacccgccgctgggctggcgtgccgttctacctgcgttgcggcaagcgcctcggcaagcgtgtaaccgaaatcgccgtggcgttcaagcgcgccccgcatctgccgttcgagcagaccgccgtgcgcgaactcggcaagaacgccatcgtgattcgcgtgcagcccgacgagggcgttaccatgcgcttcggagccaaggtgccgggcggctccaccatggaggtccgtgacgtgaacatggacttcagctacggccgctccttcaccgagaactcgccggaagcctatgagcgactgattctggacgtgctgctcggtgatccgccgttgttcccgaccaccgaagaggtgaacctcagctgggagatcctcgatccgattgaacaattctggtccacgcttggccagccgcaggcctaccgcgccggtacgtggggtccggcacaggccgacgaaatgctggcgcgcgacggccgccactggaggatgccatgatcatcgatatgccgaacacccgcacccgcgagattgcgcacaaaatcgaacagctgcacgaggagcgcggcgaatcggcgaccggccgcgtgctgacgctactcatcgccaccgaggacgcggacctagagcatgcgctggaaatcgcgaactcggccagccgtgagcacccgtgccgcgtgattgccgtagtaccggataccaatcctgccgatcagtccggcgaaggcgaaccgaacgagaccgaagtggccgccgaggtgagcgcgaatcgcgataatccggccgtcgatttgaccgacggcccgaacgatccgaacgattccaacctgaacgcccaagtgcgattcggcgcggacgccggtgccggtgagattatcatcttgcgtccgcgcggtggccttatcaaccacccggatacgctggttatcccgctgcttgtgccggatgcgcctgtagtggcgtggtggccgaccacaccgccgtcgaacccggccaaggatctgatgggtgcgatggcccgcagtcgcatcaccgacgcgctgcactccaataatccggaggccacgatcgagcgtttgcgccgcaattggacaccggaagacatcgacttgtcctggacacgactgaccgtctggcgcgcaatgctcgcctcgatgctcgatcagccgccgcacctgcccatcaccgccgtgaaggtgaccggcaaggccgacttcctgcctctggaaatgctgtgcgcatggctgcgtctgaaactcggtgtaccagtcgaaactgagttcgtgcccgacgcgcaggccgtgaccggcgtgtacctgacccgtgaggacggtgtgatctcactggaacgcccgtatgaggaccaagcgctgatctcgctgcccggccagactccgcaggaagtgtccgtgccgatgcgcaccatcgaggactgtctgaccgaggaactgcgccgcatcgatcccgatgagatctacgccgaggtcatcaacgaaggctgggatctgattcgtcactgaagtcggtagaaccgttgccacagcggcgttggcatgagttcggcaattgtggtcgagccatgccaacgccgttgctcatcgtttcctacctcatgcgatgccgaaactcatgaccgcggagtaataaagtgacatatgcgatgtcgcacaatgtacattgtgttgtcaactgacaacacatttcattgctgcaaatggctggattcccggcatgccacccgtattatgcgttgtcaactgacaacacaatccacattgcaaagtacgacacataccccatataaggaccatacatggcaactcgaaaactcattgtgtatccgaataaagatctgatgattcaggctggcgcgcaacgttttgtcttggcgctactcgatttgctcgccgaacgattgcctgatggcacgcatcgcacacgtgtggatgtggcgctgtctggcggttcggccgcacagccgttgggtttggcgctgaacgatccactggctgatgcggttgattggtcgcgcgtgcatttctggtggagcgacgaacgttttgtgccggcttacgacaccgatcgcaatgctctggaggcccgtcgcctgctgcttgaccagctggtggcggatggcaagctgcctgaatcgaatattcatgagatggcggccgatacccgttcagccgatgacatcgccgatgtgatggatcaggccgatagtgatgacgcttccgttcgcgccgccgccgatgccgcgaatgatgcgctgctggacgatgccgcgagcgactatgagcgcgagttggtgaatgaattggggccggaaccggtcatcgatctgatgattctcggcatgggaccggacggtcactatgcatcgctgttcccgggtcatgatgaggtcaaggttaccgataggctcaccgtgggtgtgaaccactcccccaagatgccgccgttgcgcgtctcgttgaccgcgccgctgattgcccgctcgcgccgtacatggttcttcgccgccggtgccggcaaagccgaatcgctggcccatgtcttcgagcggcccaacaacccggattacccgtcctcctacgccaacggagtggacgagttcacctggttctccaccgaagaaaccgtcaccgagttgtgatggcgcctcctgtgggccggaccctgaatgaggggcccggcccacagattgtcgcagacgctcaagcctgctgttcctcgggctggccttcctgcgcccagagggtgtggaacacgccgggcttgtcgacgcggccgtaggtgtgggcaccgaagaagtcacgctgggactgggtcagggcggtgggcagacgcttggagcgcagaccatcgtagtacgccagggagctggagaacaccggggtcgggataccggcctccacggcacgcacgattacacgacgccatgcatcctgcgattcgccgatgatcttctcgaagtacggatcaaacaacagggaagccggcaaattatcgcccttgaaggcctcggtgatgcggtcgagcaggaactgggcgcgaataatgcagccgccacgccaaatgcgggccacttcggacaggttgatatcccagccgtattccttagcaccgtcctgaatctcgttcaggccctgagcataggccacgaccttggaagcgaacagggccttgcgcacgtcctcgacgaacgcggccttgtcttctccggccagatcgatggtcttgttcgggccagccagaccttctttctgagcgtcttcacgcagctcaccgtgcgaagacagtgcacgagtgaacacggcttcaccgatagcagccacaggagaaccaaattccagaccagcctgcacggtccaagtaccagtacccttcatgccggcatgatccacgaccacgtccacgaacggcttgccggtctcggcatccttgtggtgcagaatctcagcggtgatctcgatcaggtaggagtcaaggtcgcccttgttccattcagcgaacacgtcgccaatctcctcggtatccatgccgagtccacggcgcagaatgtcatacgcctcaccaatcacctgcatatcggcatactcgatgccgttgtgcaccatcttgacaaagtgaccggcaccatcggtgccgatgtgggtcacgcacggttcgccgttcaccttggcggcgatggactgaagaatcgggcccaaggtcttccaggattccgcagtgccaccaggcatcagagacgggccgttgagcgcgccttcctcaccaccggacacgccgcaacccacgaagtggaagcccttggcacgtacttccttctcacgcttgatggtgtccttgaagaaggagttgccaccgtcgacgatgatgtcgcccggttcgaacacctcttccagctgcgcgatagttgcgtcggtcggagcaccggccttgaccatgatgatggcggtacgcggacgcttcagggacgcggcgaattcctcgagcgtttcggccggcacgaagttgccttcggcgccatgctcgttcatgagcttctcggtacgcgagtagtgacggttgaacaacgccaccgtgttgccatggtgcgccagattacgcgccagattggagcccatcgtggccagtccaatcacaccaatgtttgctgtagcttcggccatgtgccttgcctttcgtttgattgtcccatcgtcatcacgcgcgtcacaaaacagcgcatcagcggagggaatcattccttcaacgctcgaaagtgtatcccacttaccacccacacgcgaaggctgtcttaggttctacgcaccttctgcccgcgaagcgtaattacttgccagccattcacatacgcccggccttggaagggtcgatatgcatggtctggaagcgattggccatgtaagcgtcgctgtagcgttcgctgaaccacatcgcgaccggtgaatcctgcggctggccggccatgcgcccataccagcaatccaaggccatcagcgtgaaggcaatgtcgatcaccatcagcaccgtgcataccgcagtcagcgaataccgtactttccatggaatgcgattaatcagagccagcagtcgcggcaacagccacttgacccacaccacaccaatcagtccccagaagaacatgaattggcccgaagtacgtccgtcgatggacagccaacggccggtgtaatcccacgcggtaataccgaacgccacttccatgaaccagctggtgcagtattcgaacgcgccgccgatcaccgccgaagcgcagaagatcaagaacggattcgccttccacaggcgattcaggcacacggttaccaataccgcaccacagccgtaaatcggcgagaacgggccccacagcaaacccgcgcggtcctgaagttcaccgttatacagcgccatatggtagatcgtctccataatcaggccacccaccgaagcgatggtaaacagccagaagatattgaagaagtccagtgcaatatagcccttgccggattggtcgcggcccagcatgccggccgccaccgccgattcataatcatcgcgatcgtccatgcgtttgagcgcgcgctgcaaacggcgttcctcgctcagggagggatcggcggtcaccgaaatcacgacgagaataatcatctgaatcagcggcagcagcaggttgaagccaaggccggtcagggccagcgacagcatgccgtcggccaacgtcaacggcatcagcacgtaggtccagcgcgcggcataccggcgatgattgcgcagcagcatcacgccgaacacaatcaggcatgcggcactgactaccagcaccaccgcatgaatcgcggacaggatgaaagtcaggctcatcgcatcgacgtgcacatgaccatccagaatctcgcgcacggcatagaggatggaaatcaccataatcggcaatgtggcgagtccgtccagcagcacgaccgcgccatagatgcgcgccagaatcggtaatcgcttggcgttcgggttcaagccggcgtcgtccagttcgacggccaccagatcagccacgactgcggactcggcgtcacggttctcccgcggcttgccaggggtagtggccgtgccatcgtccttgaattcaaccatggtttcctccccacatagcgtccccttacactatcacccgattgcagttttgccgaacttgatggatagccggtacatgtctgtctacattgccggacaccgagcccgctcgctttcaggaaacatccaaaaaccatccagaaatcttgtcaataagttccagaacgcctttcgctccagccaaggcactgatggccagtccggcaccggcagcagctccggcacaggttctgatacttccggtaactccaactccgaccagtcatccagccagaacgagcagtcggccattgatggccaatccggcaccatcgaaagctgatacaacggtttacccatggggcggtagctctctcatgaggcggtaattaccccatggggcggttagcccaaaaccgcattccgcggaataaagccattttaagccaccgccccatgggaattttaccgccccatgggccacttaccacccaatgaaggttttaccgccccatggagggcagcctcacaccaacacacacagcacacccggccacacagcaccccagccacaaaaaattaggcacactgcccagagacacacgataagccgctgggcagcggcgttattccgccaaaaccatcatcaatcaccccaataatctccggcagccgtattacgctactacaaccgtagcgctacgattaacgtatcgctacggaaaacgtagcaatcaagcaacaccaagctccggaggtatcagtgggcaatatcttcaaggtcctcaaacgcgacttcctgcgcctgttcaaggtgccggccgcatgggtgatcctgttcggcatggtgtttatcccgccactgtattcgtggtacaacatcgtcggcttctgggacccgtacggcaataccaaaggcatcaccgtcgccatcgccaacaatgacgacggcaccgacaacgcgctcatcggcaagcaaaacctcggcgatcaaatcgtcaagcagctgaaaagcaacgaccagctcggctggaccttcgtcaccgaagccgaggccatggaccaggtggaatccggcaaggcatacgcagccatcatcatccccaaagacttttccgacgatctcgccggcgtggtgaccggcggcaagagtcggcccactctggagtattacgtcaacgaaaaagccagcgccatcgcccccaaagtcaccgacgtaggcgcgtccactgtggaccgcacggtcaattccacattcgtctccaccgtatccgaagtacttaccgaagtcatcaatacggttggcggcaaagccatcagcaccgaagacaccaccaaagccaaggccctcacggcccttgccgaggcctccggcgacgtgcagcacacacgcagcaccatcgccaagctcaccaccaaactcaccgataccccggagcagacacgcaccgcgcgtcaggcgctggacgacgcgcgcgcacttggcatcgacaccgcggaaggcctggccggcgtctccaccctgatcggcactacccagaccaacctgaacggcttcgtcacctccacgtccgaagcgcttgaccaaggctcaagcctgctgagccaggccgcagcacaggccaaccaaagcgtgggcacggtagccggaaccatcagcgccgccaatcagcaggtagacggactgatcaatacggcggaagacatcaaccaagcgaacgccgacatcatcgaccaactcaaagggctgccgaacgccgatcgagaaccgctgcaatccgccattgccacactggaaagccacaatagcgagcttgccggcgcactgggcaacctcgatagcctgaacaccactatcggcaacgcctccacagacaccgccggattggcgcagcatctcaataccgccacccaaaccacggtgcgcgaggccaataccgctcgcggcaccatcatctccggcgccattcctcagctcaacaccggcctcaacaccctcagctcgaccgccaacactctgtcgaccggcatcacgtcgcaaggctcactcatcgatcagtcgaagagcaccctcgatcaactcgacaaagccgcctccaccacggtgaccgccctgcacgacaccgataaggcgctggccggcatgcaaaccaagctcgaaacgctgaccaccgacatcaaagccctgagcatctccagttcactcagttccctgatcggcaccgacggcaaactggatgccgccacaatcgccgacttcatgctctcccccactgttatcagcgaacgggccgtctacccggtcgcctcctatggttccggcatggcaccgctgttcaccaccctgtctttgtgggtgggcgcgttcgtgctcgtggtcattcccaaactcgaaaccgacgacgagggcatcgacgatctcacgccaacccaaggctatctcggccgtttcctgctgctggccacgctggccgccgtccaaggcctggtcacggccatcggcgatcttgtcatcggcattcaatgcgcgagcgccccggtgtttctgctcacctgcgtcatcacctcactggtgtatatgtcggtgattttcgccctctccaccacgttcatgcacgtgggcaaaggcgtgtgcgtggcgctggtcattctgcaggtgccgggcgcctccggcctgtacccgattgaaatgatgcccgcattcttccgcgccatctatccgctgctgccgttcacctattcgattgacgcaatgcgtgaaaccatcggcggcttctacgacggcctctggttcgcctatatcggcaaattgctggttttcgcggttctggcctttgcgcttggcctcggcgcccggccgaaactggccaatctcaaccgcctgttcgcgcgggaaatcaaggaaagcgacatgattatcggcgagccggtgcacctgcctggcagcgaataccgtgtcactcaggccattgcggcactggccgaccgcgacgaataccgtcatgccatcgaacgtcgggccgccaaattcgcctaccgttatccccggctgctgctgggtgcgcttatcgccggattcgtggtgccggccgcgctcattatcgtgtttgtgctgaccaccagcgagaaaatcgtggtcatgggcacatggctggcatgggtgctcatcatcatgggcttcctgatggtcgtggaattcatgcgcgattccatccgccgccaaaccgagctcggcaacctctccgacgagtcgatccgcgccatgctgtacgggcataaggccaagcgtcgcgacacctccgccgaacgccacgaagaagcggacccgagcgccgccgttaccgcaatcatccccactattccgccgaccaaggaaggcaggcacgcacgatgaacaccatgtggaaactatttaccggcgacatcaaacgtctgaccagcaacgtggtctccatcatcatcgtgatcggcttggtgatgattcccggcctgttcacctggttcaacgtggccgcatgctgggacccgttctcgaatatgaagaacctgaaattcgcggtggcgaatgtggatgaggggtatcgttccgacctgatcccggtgaaagtcacggtcggcgatcaggtggtgaacgcgctgcgcgccaacagtcagctcgattggacgatcacgtccaaagccgatgccgtcgagggcgcacgatccggcaaatactacgcggccatcgtaattccgaagtcgttcagcaaagacatgatgaccttcttctccgacgatgtgcagcatgccgaactgacctattaccgcaacgagaagaagaacgcgctggcaccgaatctgctcaacgagggcacggacgaggtggcggcggaaatcaacaccacgttcgccaagaccatcacttcggcagggctggaaatcgcgtcttcgctggccgatcagctgtccaagcccgaagccaaagagcaactgaataccttcaacgccaatatcgccgatttcgccacacggcttgacgatacggcggatttgcttggcacatacagcgcattgaccgatacggccggcgccttgcttgacacctcgaactcgctgatcacgcaggtttcctctgccgccaaacaaggaggcaaggatctcgccagcgccaagcagggagtcaccgacgtggtcggagccctgggcaccaccgctgacgcgatgagcagctcactggacgcgagcgcctccagtttcggcgcggtgtccgattccatagacaagctgtattccgacgcgaatgatggtgccaccacggccgccgacgaattggaccgtcaagccacggccattggcaagcagacggagaaatacactgaaattcgcaacacgttggccggcatactgggcaacgactcatccatcatcacggcgattgaccgttcaatcgcacggcagaacaggctgcggcaagcgctgaatacggcggcgaccgatattcgccaaggtaatcaggacgcgcaggatcagcatgcgcaggtcaaggatctggccgatcaagcgcagaacagtatcgccaatatcaagtcggatttcacggccacggtgaaaccgcaaatcgactccctgtcgtccaccgtctctgacgcctccggcatactgagttccggcgccacccagttggactccacgctcggcgacctgaaaaggacttccgacgacgccagcgatatgctcagcgacgctcgcaccaccttgggcaaggtgtccggcaaactgcgttccgccggtgccgaactggcttcgttcaacagcacactgagcgacgcactaaacagtggcgatatgagcatggtcaaagaggtgctgggcaatgatcccgaaacgctggccagtacgttggccgcgccggtgcagctcaggcgcaaggccgtattcccggtggcgaatttcggttcgtcgatggcgccgttctacacgctgctgccgttgtgggtgggcgcgctgctgatggtggtgacgctgaaaaccaccgtgtctcgccggacacgcaaagcattgggcgagccgcggccgcatcggctcttccttgggcattacggggtgttcgcgctgattgcgctgctgcaatccacggtgtcgctcggtggcgatctgctgttcctgcgcgtgcaggccgtgcatccgctgctgtttatgttgtccggatggctggcctcgctggtgttctcgttcttcacctatacgatggtggtgagtttcggcaatgtgggtaaggcaatcggcgtgcttatgctcatcgtgcagatttcgggtgcgaacgccgcctacccggtgcagatgttgcccgacttcatcgccaaagtcagtccgttcttgccgctcacccatgcggtgacgatgatgcgtgcggccatcgccggcatctacgacatggattactggcgggccgccggaatgctgctggcgttcgtgccgccgctgctgttgcttgggctgttgctcaggaagccactggtgcggttcaaccagtggtatgtggccaaagtcgagagcactaaagtgctgggctagtaggtattatccgggggttgcctacaaacggcatagacttaccaccctcagtctggctttgccagccagctcccgccaacgggagcgtacgggagcatatttcggagagaagagatgacggagatgacaggtacgacggcgacaccgcgcggtgagcgcacgcgcgaggcgacggatcgcaagctcatgcgagccacgctgcagattgcggtggaccgcggcatcagcggcgtgaccatcgaggaggtggcccggcgctccggcgtggccaaaaccacgatttaccgccgataccataatgccgacgagctgctgcgcgagatcagcgcgatgtatctggccatcccggattccgacccagtgcccagccccacgcgtgagcatttcacgcaactattgcagcgattggtcgattgggtgcgcgacaacgacatcgacgtcaagcgcgtgggcattgtattgtccagcgaggccgagttcttccagcacatcgtcgaccaggtggtgaccccgtggctggagcatgtgggggcgttcctcaagcagggagtcgcgcagggcgtgtttcgcgaggacgttgacgagaagttgctgttgtccacgattatcgggtctttggtggcgtatgaggccatcgagggcaaagcgatggacgacgacaccgcctgggcctcgcgcatggccgatctgctgtggccagcattgctgaagtagcggtcttactcctgaatcgaagcctcctggcgggcgacttcgagggctttgttgaaggcgtcggaggtccagctggcaccggcgaccttgtccactttgagtcccttcaggggcttgccgtccactacgccgttgatggctttggcgaagtcgtcctgatggttcttggaaatcgtggtgaacgggtgcccaatgattttgacggtctcgacgttgccgtccttgatggtcagatggacgtcgatggaatcctcgccgaccgggccgtactggccgttgatcgagtagttgccgtccttgtagttgccggtgtccttcttgtcggacgtggtggtggacgggtcgttgtgcgatgagccggaatcggagccgtcggagctatcggagccgttcgactgggattgcgactgctcttcctgcgacttctcggtctcgcccgagttgccggcgtacgcatcgtccatcggcgtggccttggattcgccgcacccggccagcagcgcgccagccacgaccagtccggccgccgccaatgtcgcggatttcttcaacgtattcttttcggtcatattcacgctccttaagccccctctgacgagggggctgtcagcgaagctgactgggggagagaccatcagcttgccatgtattcctcacatactgctcgatgcccctgacggccctactcctcgccgccggttttcgcggccttggtggggtcagcgaaaccaatggcggtctcgccgttctgcgcgccctcgacctgcgcgcccgtggaggcgggcttgccgccggccgcctcgtaggccttgcgcgcatcctcgtcattccacttctcaccgacgagcacgccatggttgagcatgatctcgcgctgcgcgcagctggcgacaagcgcatcgtgggtgaccacgataatcgtggtgccctgctcgtgcagcttgcggaacaggtcgagcacgattttctcgttcttctcgtcgaggttgccggtgggctcatcggccagaatcagcttcgggtcgttgatcagcgcgcgggccacgcacacgcgctgctgctcgccgccggagagctggccgggcaggtggtgggcgcggtccttcaggccgaccttttccagcgcctccatggcctgcttctcatcgaccaccgaatggtagtactgggccaccatcacgttttccacggcggtcaggtgcggcaccagatagaacttctggaacaccagtccgatgaggttcttgcgcacgtcggccagctgcgtggcgttcaggtcctccagcttgcggccttccagcttcacggagcccttggagggcgtgtccatgcagccgatcatgttcatcagcgtggtcttgcctgagccggaggagccgacgatggcgagccattcgccttccggcacggtcaaattgaggtcgtccacggcatgcaggtcgccgtagatcttcgagatgtggtcgagttcaagtagcatgacgtttctctttctttattcttcgcgaagcacgacggcggggtcgatgcgggtggcgcggtggacgggcgggatggaggcgacgatggcgaccagcgcgctgaacagcacggagatcagcgccagccaccagttgaatccgatggagcgttcgaacaccgccacgcacagccaactggcgagtccgtagccgattgcggtgccgataagaccgccgatcaggccgtagagcgatgattcgatgtagaactcggtgccgatggcacgcgagctggcaccgagggccttgcgcaggccgatttcgttgcgtcgctgcgagacgatcgagctgattgtggtgccgacgccgacgagcgtcagcaccagcaccaccaacgagacgatccagaacagcgtctgcagcatggtgatgatgcgggtgtcggaggcggtgatcttggtgacctgctgcgccttgacgtgcatggaggtcatgtcgttgatgctggacaccaggcctgcgaggtcactggagccggccgaatactcgatgacgtccacgccgcgcgtgatgccggtgagcttgttgacgtcggcgttggtggcgtagatgatcgagtcttcgctgccgccggtgtccacgatgccggccacgcggaattcggtgccggaggtgtccatgatgtcgctggaaacgcggccgtctttggtttgctggtcgatcgaggagttcgacgaagtgccgttggtgctggcgttatcggatgcacggtagccgatggtgatggcggagccgattctcagaccgatggcgtcggcgatgtcacgtccgaccagcaccttgccgtcggtcggccacgagccgtcgaccacccagtgatggttgaggttcttgacctgcgccgcattcacgccggccatcacgtacggcgaggcgttgacgcgcacgttctcgtagcggtaagtggcgtatttcgcggaacccctggccttgaccatttcagtggtgtgctgcaccatcgccttgtcgatgccggccttgccgtcggcattggtcgattcggtgggtgtgacaatcaggttcgcgccgtacgcacgcatctcctcgttcatctgctgcggcacggcgaggcagatcatcgccaggcagaacagtgtggccgcgccgaccagcgacgccaccacggccatcaccgcgcgcgaacgccggcggaacacggcgctgaacagcattctgaagaacataccggtgttggtcatcggcttcctccttccacacctacgtagataaactcagcggccatggagcacctccgcgggcttgagattcagaatcgaacgaatcgaggaggcggacgccagcagcacggtgacagccagcagcacgaacaccagcacgaacaccatcggccgcatcgtgatgccggaaccgaataccacccggcctatcagctgggccacgccggaaccaagcaacgcgcccacaatcgcgcccagcagcgagattgccgccgtttcggccagcatcaggcgggataccgcggcatcggtggcaccgagcgccttgagcagcgccagctcgccagaccgttcgccgatcgaggcgaccatcaggttggccacggccacggctgcggcgatcaggctcagcacggtcatcagaatcatcacggcctgcgtcttctgcagcacattgccctgcaacgcggcgacctgacgcacctgcttggccaccgcgcccggaatcacctcttcgatctggtaggcgatcgagctcgggtaggcggtgcagtaccaggtctcccattcctcctggctcagcgcggccgggttcgcggcggccttacgggccaggtcgttctccggcgtggtcagggccttgacctcgatcttgtcgaccgaatcgggcaggtcggcgagcacctgggccgtggaggaggcgatgtagagcgagccgttgtcctcgtcgccggaatcgtagacgccggtgagcttgattttctgctcgttcttcttgcccgaggcggtggtcttgttgagggtgatggtgtcgccggtggtcacaccgagttcggaggccagcgtcttgccgatcacgccctggtcggaatcgtccttgggccacttgccgtccagctgccaccacgagcgcatgccttccacgcccacgacggtggtctcgccggtggagatcttgaggtccttgttgaaccacgtgccgacgaccggcacgttggtgccgttcaccatggcgtggatgttgagctgcggcgcgaagttggtgatgttgaacgaccagaagatcgtcttgatcttggccgcgtccgactccttcagaaaggcggtcgggtcgctggtggacgccgcaccgcccgactcggtgttgtacaggtcggaaacgaccgcgtccgccttgggctgcacggtgatgttcgaaccgtaggtggacagctcggcgttgagcttgtcgcccacgtcgaacacgacgcccagcatcgatacggacacggtcgccgacaggcatacggtcagcgcgataagcaggcgccggcgcagctgtcgggtgaacgagcgagtaatcatacgcagaaagaacatgattcttgtctcctgcctgactcactggaagtgggcgctcagcgcgtccagatccgtagtctgaatggtgatcttgccgtggccggtcttgtacgggaatggtatcgggttgcagccacccttgaagccgatggtcgccaggttgatggccacctcgcacttcttgcagatgatcttgccgtccttctcgtagtagccggcgtcaccgcagttctcgcaggcgtccaggccgatgccgtacgcgccaccgttctttcggatgatgatgaagcgcatgacggtgccgtccttggccttgtattcgaaacggtgcaggtggccgtcctcgacctggctgaagggaatggtggccacgccgtccttgagcgagtaggcttccggcggcgaaagagtgatggtctgatgggtcgcggcgacgccgacggtgagggtcagcgtgacaccgatcatggccacgaggctccagacggcggaggccacggcgcggcggcggaacgccttgtgcttgcggccgatggcttcgttcgcgccggtcagcggcatgcggaagccggccaccacggaggcgacggccggaatcaggaacacgaacgcctgggccatgatcatccagtcgttgtggttgatcgaccaggcgagggccacgaatcccgtgtggcccatcgggaaaccgcgtgcctgcaggatctgcatgacaccggtcaggtgccggacgaacagaatcaccagcaccgcgagaacggcggcggtgaacgaggcacgcaccgcggtcgaacgcatcgtgcggaagatcacggccacgatgatcgacatggccaggcccagcgcgaagccgagcgcgcgcagcaacatgtcggacgtgaagatcgggtcgccgggctccacccagatggtcagctgcaggatcacgtccggcagcgcgtagaacagggtgagtgcgatgtcgatggcggccacggcgttcgcaatgtgcatgaacaccttgtgctgctgccaattggtggtgatgcggcgtgcgaacaccaccacgacgatggtcaggatgtcggcaatgatcgcgcaccacagcaccggatagttgacgaacgtgcgctggttgatcacggccgaggcgcgcaggccggcgaatgtgatagcggcgatcaggccgacggtcaggccgatgagacgccaatgcgagcttatcggcttatctcgcccctcgccgaccgtgagcatcacgctcaggctcatcaccagcaatgcgggggccaaggtgcccggcatcactgccacgaattgttcaagcattcgcgtcctttctctgttcatcttaggctcccctccctgaggggagctgtccgcaaagcggactgaggggagtttttagaccgtcctaagaattatctccctaaagcggcgtaaagccccctctgacgagggggctgtctgcttagtcaatcaccactgacgcggggtgtagtcccagttgtcgaaggtgacctcgatgggctcggtccagaacttgtggttcttgacaccggtctccgggtcaacgtggagcatccagccgttcttctcaggggactcgatggagagcttgagttggtaggtgccggccttgtcgagcttgacgttggcgccgtagtgcgggccgtcggaggcgttcatctgcatgaaggtaccggaggtggcctggccgccctcgacttccttgccggtggacttgtcgatgatggtgtagttcacagtaaggtcagggacgaagtcgcccttgccgtagccgtagtcggtgccttcctgggaggcgtggatgtcggcttccaggtggaaggaagcgtcagcagccttcagacccatggaagcagggtacatgtcgatgggctggaagtagacggcacccacggtcagcggaccagcggccttgtcctgctccttggcggtgccggaggggccgaccgggacctcttcgaagccggaggtctcagtcggggcgtcggccttcttggagtcgtctttcttggcggtgtcggaggagctggtcgaggacttggtatcggaagcgttgttggtggaaccgcaagcagccatcgaaacagccatggagccggcgagcagcacgccgagcagagcggcaagcttcttgttcttcatcatttctcttattccttctgttgtggtgaatggattattcacgacttatctgtttttagttgtggcggcgtgggctggaatcgcttccattgccatgtcgcaagttgtgttgcgcgagatggtcgcaccgggcgttgtgctacgcctgcgcgctctcctcgtcagccttcgcgtccgacttgctcgcaccggccgcaagccgggccttggccttacgctgtttggcaaagccgaccacgaacagcgcgatgacggcgatggctgccagtacctgggcgatgatgcattcggcgtacgggtagaatccgagccagtcgttggtgggaacgcccggcaggtagttggcgggcagcaggtcgccctcgatgagcgcgtgcacgccgccgccggcgaagacaaccaccagcacggacatgaggatcgaggtgaccaggaagaacgggccaatcggaatctttacggaggtgaagcgaatcaccaggaagatgatcacgagcaccacggcggcggcgagtgcgccgaccaccatgccatgcgtatcctggctcatcgtgtagatggactggtagaagatcacggtttcggcgccctcacggaacacggcgaggaagctcagcatggcgagcgaaatcaccgtgcgggaagccaccttctcgccggattcgacctgcgaggagacagaggccaccgcggcttcggtcttttccctgatgtagcggttccacgcttccaccgaggacttgttgagcatccagttgctggtccacagcagcatgcacatggcgacgagcgcgcacacgccttccatgatctcctgcagcgggccggagccgccgaacgcgagcatgaagatgaccgccacgatgcctgcgccggccagaccggcgagcacgcccacgtagatccacttggtgaagcgcttgttgccggacttgacgaggtaggccaccacagcggcgaccacgagcagggcctcgagaccctcgcggatcagaatcaggaacgcctggccgaccgagctggtgatgaacttgaggaagccaccctcctcatcggccgcgccgccgtcgagcttggcggcatcggtggccagcatgttcttcaggtcgtcgatgtacttcttgacttcggaagcaggcttgccggtgttcatcgaggagcggcacagcttgaactggtattccacctgggagacgcggttgccgctgatggcgctcagcacggtcttctcgaagccgagcttctcgtagtgctggtagtaggcgtcgttcacgagcgtggcgcccttggcggcgtcgccaccctcataggccttgtaggcgttgtccaggatcggaagcatcgcatccgcgacttccttccaagtcttggccgtttcctcggtgcgcttcttcttggcgtcgagctccttgcgctccttggcgatctgcttctggaggtcttcggagtactgcttcgggttggcgaggctggtgttggcgtcgagctgctgggccgtggcgtcgaggtcggcggtcaggtcgttgaccttctgggtaagctgatcggcctggtctgacgtgaacacctggctttgcaggtcctggaaggcctgctgctgcgcggtctgcttgtctgcgccgatggtgtcgctcaccactttgttgaagttggacgtcacgtagacggtggtgtatgcagccccgaaatcggacttggcacccattgggttgccgtccttgtattccttaaggccttcctgcaactgcgcttcgacggccttggcaacgtcggcccaggtcgcgtaatcgacgctggtggtgtcgtcgctcttgacggtggcagcagtggcagtggttgccggcgtcacggcgaacgcggactgcggaatgatggcggaggggaggaaggtcgcggcgatcatcgcaaacagaaaaacgatgaccgcaaatgcacgagccgagaccgtggccgactgcagacgaccggtgctgcccgacttcgcgcgcacgcgagaaacggcaacgcgcgtatcacgttcccgcatcgtgttcatttcagcggactgcgcgcaggcgcgacgaaccatgctgaattcctctcacttcaagtactcgaatggtccaaaaacaactatgaactctatagaaaaaaattcttgaacaacagtcttgattttttgacgggtgcgaggtaatagaaggcgttttagtgcttttcaaccccgcaattatttcactatctgagataactatgctcagagaggatggctttcccggaatgtgaacggcaacaccacaaaaagcggcaacgtgaggaataccggaatcggataccaaaatagtgccacgggtgaggcatacagcgacagcaccgtgaatgccagcaagccgtaagcggccagtgcggggccgtagcgtcgtcgcgcaggccgcaccgccagcgcaagaccagcagccagcggaatccacgtgacgtacagggccatcgaagtcagcggattgcctttgcgaataccgacatgaccatccgaacgcacccaccgatgaatcgcccgcaatatgtttttctgccattgcggcttgtcggaggtacccctcagcggcgcaaggtcatgttcgatggcggcaagccgtccggccgccacggtatcggcatcgccgtcggaagtatgcttccaagcaccttcagtcaggaaagacgcccattgcctgagatagctaggcgtgaacaggtagtcggaatcagtggggtacgcgaaattgacgcgcgggtcccaccatccgcgagtcaccccggcataggccgtggcatattcaaccggatgcgcgaggccgagctgcacccagacctgcagggccgcgagttgttgcgccgcggttggcctagggtgctcgcgcagagtgcggaaggtctcatcggtgcggtgcgggttgatgccggcggcggcccagtcgagatccatgatcgcgttcagtcgccgccgctgaaccttgtctatcgcactgggatcatcgtgcgcgagccgggccacgggctgggtgaccaggccccacacctcacgtccgggcgatcgattcgcatgcgtggcggccgcgcttaatggcgtccacacgccctgcgccacaacgatggcaaccgcaagacacgcgaacgcacgacgccgcgcgcctttgggcgtgcagacggcgagcaaacagcagccggcgcatagcacgattatgagcgccgtccgcttggagacgatggtggcgaacaacaggatgacgaacgcgaatgccaccgggcggcgtgccagtaccgagccgcgcgtcagacaagcctccacgaacagcacggccaacggcagatagaacacggcgtgcaacgagtccttgcccatcgtggtgattgcgccgaccaccacatagttggcggcaagatagacgaggccgagaccgatgagccagcgcggcgagccgattttgcggatgtagcacagcagaagcgcgcacccggcggcgagtagaaccgcttgggtcacggtgtacagggcctgcccgatcagaggggagccgagtgcgctgccgatatgccagaacaggccgaacgtgagagtatcaaacagcggatgctgggtgtagtagtggtgcagaccggacgattgcagatattgggcaagcgtatcgtcgcgcatcgagcccggccaggtgagtatgagccacggcagccaggcgatagcgagcgtgagcaggtaagggaggaatcgcgcgcgcagcgatgtggataacgtggtcgggcggcgggccgtgagccaactaaggatcgcggatacgctgcggtacgtctttgagtgtttcttcgattggcgcgaccggccgccatgtgctgcggttacgtcggtcgctgtcccctcgttcatgactcaacagcctaggcgcgattgcgggcgcgcgccgggcgaacatcgaaaattcacccggatacggtgatttctttaccgggggttgtgtaggtgcgcgcgggtgtgtgggccctgcacaagcatgcggtccttgtgcgggtgttgcgcgggactttccagtgagtctttcactcgcagtgatcattcttcacatccgcgtcgcgacacgcgccacgccgaagcgtgcacttatccgaaacctgtggtaacttattcgagttgcctgcggaacacagttcaactgcgcgctgcaaagcatggaggattcgcctagtggtctatggcgcacgcttggaaagcgtgttggtgtaacagcctcacgagttcgaatctcgtatcctccgcccggattggaaccccggaaaccgttgaaaacattcggtttccggggttttgctttggttccttccgattgtcggttccctccaggttccctccgtttcgacacctttggccccgacctgccgcgcgtgtcacatatcggaaccgacgattccgaaaacgccttcgagccttcgcctgccgtgcgttcgtcatcgaagtccgactgcgccccatgtgtcccgtcagtgggccgattcgagtcccttcatgttttccgcgcagtttttttcgttttggttcgcaacaatcccagcctccgtatcgcaagcgcatcgcagcgaataccggtcggcccagcgcgaaggttccccctgaccccctccgatgaacgccacacgaacgcatacctgaacctaggaaccttacccacaccacttcctaggttcctaggtaccttcctaagtaccgaagcgacttcccaagttcggacgatgcccagcacaaagcacccatacaggcacatctgccagcacatcactttcgcccggtaaagccaccgatcgtatagcgcgcccccttgccacggccaatgaccctcagcttcccacccttaacgagcttggacagctggtagtacgcctggttcgcatcgacatgcagcagttccatgacatccgcccgcgtggcatcattctgctctgcaaccaatttcataatgagctccggccatcgcacccggtcgatgcccgtctgacgtacgtactcgatggtcttgccggtgcgccggtagaccgtagaccccaaagtgtatgtccgccgagaaccgttgccagaacctttgatcatgccggattccgtaagctgccccagcatagcgcgcagacgctgctcactcatatcgagtttcttgttcatggtctcgaacgtgcagcgccgttcgttcctgagcatattcagaatcagcagaccgttgaccggcatagtcttaccggtgcgctcctgttcctcggcaagcatccgcacgaattcgacgtcgggtgcgctgcgctgcaggtacacggacacgttacgctcattcgacgccgtgtaatcgggcaggggacgtccatagtgcagcgacccttcgcagatgcgatcgatgccgcgccccgtacgttcggcgagaccggttcgcttcaacgcatccatcaggcagggattgcgaccatgcggttcggcggtaagcagattatggatgttgatgccctccacgaacccgccgggattggcgatggtaagccccgcatcatccaactgcacgcgcacacgtcccagcagggtgtagtcacgatggccgaaggtgttcaccagcgcctctcggaacgcccgatggtcgaattccggcaccatcattgagaacagaccgacggatagctcgacgcttggattccaaggagagaacatgtcgttgatttgctcgatggtcttcagcaacggtccggcatagtcttggttgactttgatatccgtaccaaacatgacttggaaagacgcccgatgagtcggaacgaagcgtttcaaagactcccccttgcccagcagcagcaaaccggtcagcgtcggcatggtcttgccatcgacggtcaccgtcaattgcagggatttctccagctcctcatcggtcagttccaacaaattacggtcactggattggtaggtgccgataatccggcgcagacggtcgcgttcaaggggatcgaaatcatcacgggtcgcatccggcaccggctgcgcggaaaagtccaaacgtcccaaatcggacaggcgcgtggcgatctcgtacgggtacatcggcacgctctccggcgtaccatccaccttcatacggcgtcgcaacaccttgcccgacttggtcgagaccacgctgcgggatttcggcacatcgatctgcatcaccggcgtcttctccgtcccgacgatctgcgcacgagcggaaaccggaggaaccgtacgggagtagagagtagagtggcggcgtcgaccgacgcacgttctcgccataatttcaatcccgaaaaggagcctcgtcgcaaccatgacatcacatcttgccgaagcaggacgcacgttggttccccgcaaggaagacagatacggtctgctctcccccgccttggtggtgctgacgttcgtcgccgggctggtggacgcgctgagctacctgtcgctggggcatgtgttcgtggccaacgtgaccggcaacatcgtgtttcttgggttttcgatcgcccatgcccaaggcttcgtctggtggacgtcggcgctgacgctcgtctccttcatggtcggcgcgcttatcggcgggcgcatcatccggcgattcgaggagaaccgggccaagcatctgttggtttctacctgcgtgcaggcgtcgttcgtactcgccgcgctaatcggcgtctatcttttgaaccagctcatcaccggccccgcagacgatgcgtccggcgtctcctcgattgcacggcttgcacagaccacccaggcctcacaggcctcacagccgagcctgaacttccccaccgcacggcacatcgacctgcacatcatcctgctgatcgtgctgctcgccccggcaatgggcatccagaactccaccgcccgcaagctgtcggtgccggacctgcccaccaccgtgctcacgatgacgctgaccggcgtcgtcgcagacgcttcggcacacggccaccagcagtcgaagctcgggcggcgtgcggtcgtaatgctggcgctggcgtctggcgcgctgaccggcgcgcttctgcgggcgcacggacacgagaacatcatcttgatggtgatgctcgggtgtctgctggcggtcatcgcgatgatgattccgcacgtccattcggatgcgccgtgggtcaccggccggcaatagcctctggcgcatactttcgccatatgagacaaaaacggccacgccacagcgcaaccagtaggaaacgcccggcaatctcggctctcctcgatatgttggatacccgttgtttgaaacaggccctccgcaagatacaaacaggggcagtgagaagtagaggtaaatatgactgacgcacagcaggcgaacggcaaccagccagaatcccagaaccaagcagaagcgacggcacagccgcacaacaagcgagtgacgaagtgggtcgctatagtgattgccatcgtggcggtggcgattatcgccgcggtcgcggtgttcggcgcccgcgcatacagcgcgtctcagtacgatagcgcagtggccgcctgcgccgccgcctcggaagacgtacgtaacaccaccaacgactacaacaacttggtcaatggcgatgctgcagaagccgccgctctgaccaaggcagacgtctcggacgcctccgctctcgacgcgctgtccaaggaactgaccgtggaactgccgacgtacgaaggctgcgtggccgacgacaccaagggctaccaggccgcgaccaagaaactcgaacagcaggtcacgtggtaccacgagcacaccacgtcgctgcagaaggctgttgacgccgtcaacgcggtcaagaagtaagacgaggtcggtctccctcacgttttcaggatcggacagcgctcaagtcgcggcaacgcgcgatgtcggccggtcctgcacggcccgaaacggcagaaatcccgcgtcccttacgttcggacgcgggatttctgccgtttttgagtcacggattgggactatagcccagtctttgccccagagttgtctattcaggattaccctctcggccgtatctcatgagcaggacgtgtaaaaacaaaaaaccctcgctaatccgcgagggttattggctggggtgcctggactcgaaccaagaatggctgaaccagaatcagctgtgttgccaattacaccacaccccaatttggcttggcgcagcaactccgaagagttgttcgtcgtacccccaaccggatttgaaccggtgttggcgccgtgagagggcgtagtcctagaccgctagacgatgggggcatattcagtttttcaaccagctgcgaggcgaaccgcgcaacaggtagatatattacgcgctaccctgctctcacgcaaatcccggcgtgtcgcgccattttccgccgttctgcgggaacaccccatgcaacgcgaaagcgggcatccgtatgtacggatgcccgccatgcgtcacgctcccatcatccgccggcgtgcggtggacgacgcatcacagatgcgcccgcaggcccttgagacgggcgacggtgatcggcttgccgacgatctccatcgattcgaacaacggcggggagacacggcgtccggacatggccacgcgcaccgggccgaaagcgaggcgcggcttgtagccgccctcctcaaccagagccttgttcagggtctcgtgcaggttgtcggtcttccaatcggcctcctccacgccctcgagggcggcgatggcggcatccagcacttcgccggcggaatccttcagctgcttcttggcgtcgtccgcaggctccagatactcctcggtggacagcagggagccgaccatgccggcgacctcgcccagcaggcgcacgcgcggctggaccagcggggcggcggcggtcagcacctcacgctcacggtcggtcagggcatcccagttgtcggcggaaaccacaccatcgcggtgcaggtacggcaccgagcggcgcaggaagtcctcgggctcgagcatacggatgtgctcggcgttgatggagatggccttgtcgatgtcgaagcgggccgggttggccttgacgtcgcgcacgtcgaacttctcgatcatctcgtccatggagaacacgtcgcggtccggtgcaatggaccagccgagcagggccaggtagttgagcaggccctcgcggatgaagccgttgtcgcggtggttgaacaggttggactccgggtcgcgcttggagagcttcttgttgccctggcccatcacgtacggcatgtggccgaacaacggcatctccttggcgatgcccagctccatgaggtaacggtagagcacgatctggcgcggggtggagctcaggaggtcctcgccacgcagcacgacgttgacttccatcatcgcgtcgtcgaccgggttggtcagcgtgtacagcgggtcgccgttcgggcgcacgatcacgtagtccggcacggagccggccttgaactcgatggtgccacgaatcagatcgtcgaaggcgatgtcttcatcaggcatcttgatacgtagcgcaggcttgcggccctcggcgcggaaggcggccttctgctcatcggtcaggttgcggtcgtagccatcgtagccgaactcggccggacggccggcggcaaggttgcgctccttgatttcctcgggagtggagaaggactcgtaggcgtagccggcttcgagcagcttggcggcaacatccttgtagatggcggtacgctcggactggcggtacgggccgtgagggccacccacatcgatgccctcgtcccagtcgatacccagccaacgcagggattcgagaatctggttgtagctttcttcggagtcgcgcacggcgtcggtgtcttcgatacggaagatcagcgtgccgccggtggcgcgagcttccgcccagttgaacagggcggtacgaatcatgccgacatgcggggttccggtcggcgacgggcagaagcgaacacgaacgttcttgggcagttcgggtttggtgttttcagcatcagtcataatcccctattgtgccgcgcgcgccggacgcggagagcagcgctcctcgctcttttgcttcgttattgacatttcgggccaacaccatcccaaaacggccattttccaacgaaatctcttttgcctgtctttggtagtgcccgatatcttgatgcctgtcttcacacctgttttgacgcctactttggcgccatccacacgcccgcacgcaaggcttcgacaccatttggcgcaattgttgagttttttacccaaacgatggaagaataggagtcgacgcaatcgtcttatgaaaggggaatcaatgaccgatcccaacaacgtgccgttgccgcagatgcccgcgcccaacggtaccccggcccagcagaatcccagcacgccgcaatacggcgcacctgctccggcccccgcacagccagattatgggcaattcaacgctccggcccccgcacagccggcctacggccagcccgcatacgggcagcccgctcccgattcttccgcacccggcgcagcgcccggtgcaactcccgcctatggtcagcccgccgccgacccgtacgcggcgaatgcggctccgcaattccccgctcccggcgcggctcctacctacggccagcccggaccggacgccaacgcttacggtcaggtgccacccgcatacaaccagtacgccgctcccactgccacagcagccgtgccgttgaacaagccgtattacgactgccccttccctgaggcattcctccgtttctggaagaagtatgtggtcttcaagggacgtgcctcccgcagcgagttctggtggtggacgttggcctctgtcggcatcagcgtcctgctgagcctcctcagcagtgccacggacgacaagctcgggttcctttccagcatttggagtctggccatcctgattcccagtctggcgctcgccgttcgccgtctgcatgacacggacaagcccggctggtgggtcgccatcttctatggcgcgatggccctcggcatgatcatcatggttgccggcggtggcgcagcactgtatggcgccttcggcagccttagcaactccagctatggagccatggcaaccggcggcctcggtgccatggccattggcggactgattacgctcgctggttcaatcgtctacatcgtgttcatggctatgcccagcaagccggaaggcgcacgtttcgacgatgacgcagtagctgccccgatgcctcagggcgcttacggcgcaccgtacggcgctcccgcaaccccggacttcaaccaggccgctccgaacttcgccgctccgaacgcacccgctcctgacttcaaccagccagccccggcctatggtcagccgaccgcaccggctcctgactacggccagcccgctgtgcctacgcccgattacggtcaggtaccggttccgcagtacggccagccggagaccccggttccgcagtacggccagccggagaccccggccccgcagtacggccagcccgacgctcaggccccacagtacggccaggttccgccgattcccgaaaacgttgatgatgggtccaccgtgctgtctccgcacacggctcccaccgatgacaacgcacagaaaccctggcaaggccagtgactgacgccggcgaagttcgcttaagaagttcgcctcatcactcatgaagcccaacaatgaggccccactcatcaagcggcggtagtattccccgccgttcagtaagccaatgccctgtgtactggatcattccagcacacagggcattgtgcgttcttgcggcccctctcttcgcgcaacattccccggaatgcgttacggtggaggatggacgctgcgccgagctactcctacaagctgcctacggagagcgtttgggagatcacatgggattctcccgggcccagcgtcacgatgcggtcgcggcataccgccgcttcaaccgccacgaaaccgcgccattcgcccggcttggtgtagctcatattgtcgccgtccgctcccggattccacaccacggtttgcggcgacccggtacggctgatatgaatcgcacgccccaacatgtcatcgcgcagttccagacgcgcatccgagtaatacacacgattcaccggctgctcgccaaacgtcaccacttgcgcgtcctgtgttttcggcggaaacccttcttcggtggcatccagatacgtcgctccctgcaatccgaccagctgagcaccggacacatcgccgacatgcagataggaatgcaacgcggcctcgtacgacataggcgccgtgccggtgttggtcacggtcaggctcatggtcagcgcattgcccgtttgcacgtcatacacggcatgaaactgagcacccggctcgtcatcgaaccaaggcacttcattgtcgttcagctgctgcgaatccaacacataccgtatgtggctgtcgtcgaatgaaccctcgtccaacgcccaccgacgcagacgtgcaaaaccgtgggatggattgagtgccagctgcttgccatgcgcaaaacccgggccgaaccacgggaagcagatcggcactcccccgccgagcgacttaccggcctcgatatgccacgtactcggcgtccacaccacatccgcctgcccggccggggcccagcgcaacagatgcgctccgtaatcgctgattaccacgctgccgccattgttggcgagcatacgcaaatcgacaccattgcccataagtttcccattcccattgtgcgaacgatacttttcactaaataggatacttccttaacaaaaaagaatcgcaaagtatggccgcaggatgcacaaaggccgt

SEQ ID NO: 1569 - DNA, 5361 bp, Unknown
  R221_24m  MAG No. k141_26191
gtctggtccagctacgccaacaacgaaggcagcccgctgaccgccgccatcaacatcgtcaagaagatccaatccgagctgcccgaaggcgcatggatcgcacgctcctgcgccaccggatacggcgaaggcctcatcaccaccggcctgcacttggacgagggcgtggtggagaccatggcccactatcgtggtgccgaaatggtcagccccggcgtcactgccgtcatcgacatcggcggccaggatatgaaatatctggccatcactgacggcgtcatcgactcgatcgccgtcaacgaagcctgctcgtccggctgcggctcgttcctgcagaccttcgccatgtccatgggcctgacgattcaggaattcacccaaaaggctctggcttccacccatccggtggacctcggttcgcgctgcaccgtgttcatgaactcctcggtcaagcaggcgcagaaggaaggcgcctccatcgaggacatcgctgccggcctatgctactccgtggtgcgcaacgccctgtacaaggtcatcaagttgcgtgattccggcgaactcggcgacactgtggtggtccagggcggtacgttcctcaacgacgccgtgctgcgcgccttcgagctgctcaccgaacgtcaggtcacccgcccgaacatcgccggcctcatgggcgcgtttggcgccgccctgaccgcccgcatgcactatcaggatgaggccgaccacttggacgtggtggttaaggccgatgggtccgaggaacagtccaaggccgagcccgcacccaagtccgagcccaaggccgcagccttcaagaagaccgagccggccaagcccgaagcccatgtcgttgtcgtggacggtgtgacccacaccgccagctccattctgaccggcgaagcgctcgacaacatgagcatgaccgccgagcgtgacgtgtgcaagctgtgccagaaccactgcaagctcaccatcaccacattctccgacggctcgcgcttcgtgaccggcaaccgctgcgaacgcggcggcgacgccaagaagaagcgttccgaccgcccgaacctgtacgactacaagtacaagcgttgcttcgcctaccgccgtttgaccgacaagaaggccactcgtggcgagatcggcattccgcgcgccctcaatatgtacgagaactacccgttctggttcacgctgctcaccacgctgggcttcaaggtgatgatctccggccgcagctcccacgagctgttcgagaccggcatcgaatccatcgcctccgaaaacatctgctatccggccaagctggtgcatggccatatcaagtggctgatcaacaagggcatcaagaccatcttctacccgtgcgtgagctacgaggagaacctcgtgcccaacacggacaatcattacaactgcccggttgtggccaactatccgctcgtcgtcggcgccaacgttcctgagctgcgtgaggacggcgtgcgctacatgcacccgtacttcaacctcgccaaccatgagctcatggttggccgcatcgtcgaagagtttgcgtgggccaacgtgacccgcgaagaggccgaaaccgcggtcaaggccgcctatgccgaagacaaggtcttcaagcacgacgtgcagcaggaaggtttgaccgcgctcgcctacatgaaggagcacaactgccgcggcatcgtgctcgccggccgcccctaccacatcgaccccgaaatcaaccacggcatccccgaaaccatctgctcgctcggcatggtggtgctctccgaggattccatctgcgaactgcagccgggggagaagctcaacctcaccgaattcctctcggaaggcgaagccgacccgcgctccaagaacgccgccggattccgccacgtgggagaccgcacagtcaccaagatgccgttgcgcgtcaccaaccagtgggcctaccactcccgtctgtacgcggccgcacacttcgtggcctcctacccgggcctcgaactcgtgcagctcaattccttcggctgtggccttgacgccatcaccaccgatcaggtggccgaaatcctggcagacaaggcggacgtgtacacgctgctgaagattgacgaggtctccaacctgggtgccgccaagattcgactgcgctcgctcaaggccgccgtcgaggaacgcgaagccaacaaggcccgcgaagccgccgcggccaaggccgtgcaaggccccaagtccaccggattccgcaagaccggctccaccgcgccaacccccggccgccagattctgcttgacagcaccatggccgccaacccgaagctcaccaaggccatgcgcgccgcctccaagcgtgccgccgaacgcgacctgcaggccgcagtcgccagcaagaacggcacttcggacggcaccaccggcgtgacgaacgccaagaacgccaagaagtccggccacaacaacgccaccatgtcccgatacgcgcatcgcgagaagttcgttaaggacatgaagaagaactatacgattgttggccctcagatgagcccgatccacatgtccttggtcgaagcggtgattcgttccggtgggtacaagttcgacatcctgaagcacgcgagccgtggcgatgtggaaaccggcctcaaatacgtgaacaacgacgcctgctacccggccatcatggtcgtcggccagctcatcgacgcgattctggaaggcaaatacgatcccgaccatgtagcgctcgccatcacccagaccggcggcatgtgccgtgcgaccaactacttcggcctgatccgcaaggctttggtcgatgccggctatccgcagattccggtcatcgccatttctacccaggggctcgaagataaccccggcttcaaggccaccctgcccctgctgcaccgtgccatcaaggcgctgattctgggcgacttgctcatgaagtgcctctaccgcgtgcgcccgtatgaggtggagaaaggttcggccaacaagctgtacgagctgtgggacaccatcgtgcgtgagaccatcgagcatcacggctattccaagaccgcagccaaggcgccgagcatcaagaagggctatctgccgtataacgtgctggccaaggagatcgtgaaatcctttgatgcattgccgctgcgcgacatcccgcgcaaggtgcgtgtcggcgtggtcggcgagattcttgtcaagtaccagccggacgcgaacaaccacgtggtcgacgtcatcgaatcccaggattgcgaggccgtggtgcccggcatcatggaattcatgaccacccgcccctacatcaccgactggaacgagaagaacctcggcatgggcggcaacaagacggtttacgccctgatgcgcaagggcctcgacctgtacaacgcgccgatcaaggccgcgctggccacatcgaacggcaagttcaagcaggacgagccgatgcccgaactggtcaagaaggctgctgaagtcacctccatcggcgtgcaggccggtgaaggctggctgctgacggccgagattctggaactcatcgaacagggttgcccgaacgtgatctgcgcgcagccgttcgcctgcctgcccaaccatgtgaccggccgcggcatgttcggcaagatccgccgcctgcatccggaagccaacatcgtctccatcgattacgatccgggtgcctccgaggcgaaccagctcaatcgtatcaagctgatgatcgccgccgccaagaaggctcacaacgccaagttcgccgaggccggcgagccgcagggcttcacctccgcggactgatttatgctctggctcgtccgcaattaaggacgagcttcgctcgcgacatgctggttcgcctatcggctcaccctcgcctacggacagtccactgggctgtccgctttacggctcggcctctgtgaggggagctgtcgcgcagcgactgaggggagtctctagagcgagaaaccgggccggagcctgctatcggtttttcgtatagcgtattacgggctttcgggcacgcgcaccggccggctcgaatacgatacaaagcatggttactccccgaatcagttacgcgcacctgctcgccaagccgaaccccaagcacgtcgaaagcctgctcaagttctttgagaatggacgctcccagcggggcgccggcggcttcggcgtggagatcgagcacctgcccgtgcacaacagcgacgacaccgccgtgacctactacgagccgaatggcatcgaggcattgctcaaacgcttggctccgtactacgacgaggagaaggaatactgggagaacggccatctggtgggtctcggccgttccggcgtcgccgtttctctcgagcccggcggacaggtggaaacctcaatcggcattctgaagaagccgagcgacctgaatacggtgtattccaagttccgtcgcgagctcgacccgattcttgacgatctcgacttccgcttggtcaactatggttaccagcccaaatccagctttgcggatgtgccggtcaaccccaaggatcgctacgatgcaatgaccgactacctcggccgcgtgggtcagttcggcccatgcatgatgcgttgctccgcctccacccaggtcagcatcgactacgtggacgagcgcgattccatcgaaaaactgcggttgggcaccgtcatcggtccgattctggcgtacttcttccgcaacaccccgtatttcgaaggtgagacgaacccatggccgttgctgcgccagcgcatgtgggattatctcgacttccagcgcacgaatgtgctgccgagcctgttcgacccgcgctatgggtgggaggattacgccatcgacgtgctgtccacgccgctcatgttcgctgacctgacccatacccctgaagctgtggcttctggagcaagtcccaaggaactgcatcgcccggccttccgcgagaacgcgggggaggtgtacccggaccgcgaactcaacccgtacgagatcaaccacatcatctccacgcacttcaatgacgtacgcctgaagaacttcatcgagcttcgccactgggattccttgccgatcgagcgtgccgaacgtctgacggagattgtgtcctctctgttctacgtgcccgagcatcgcgaccgcttggaaagctacttcgagggcatcagcgaggaagaggtgttcgaggccaaggccaacattcaggcccacggccgcgaagccacgccgtacggccagccgctcgacttctggaaggaattcctgggattggagggcctcttgtccgacattcccggcgatctgaagcaccccgacgtgttccaggagtaagcgaagaagcatataca

SEQ ID NO: 1570 - DNA, 14644 bp, Unknown
  R221_24m  MAG No. k141_26408
ctgtgtctttgaggtagtttttgccggcggtgatgtcgtattggatgagcttgtagtcggcaagcaactgcttggtttccttgtcgaagtcatcggtggacatcgggttgccgttttgatcgagatagatgttctggccttcgggaatacgatcccagccttggaccttgttgaccacaggcggttccatagcggcaatcttggaatgcatttcggtcaggaacgccagatacgggctgaccttggcgttcatgtgatcggcggcctgtgccacgaagaagttcggcgaagagtaggctgcatcgcttgccttattgccttgggagctggaagccttattcgaccagatgaagtaatcggtcaggtgcagggccaaggagttgttgccatcctcgctggcggacgagtagatgcccggcaagtgatcgccgtagaacactacggtgacgggcttatccagcgcatccagttcgttcaggaactcctgagtggcctgatcggtaatctccacacccttttgataggtctcaatcgactgctgttcatcatcacccagcggcgtacccgtggtggattcagcggtgtagtcgttgttctcataccactcgtggtagggcatgtggttctgcatggtgatgatctgaatgaacttgttcgtcttgccggacctgatgccttccagcgcagaatcataggaagacttatcagagacgtacggcgactcgtcaatcttgtcctgatacttgatcacgtccggaccggtcagcgtgtagaagtgcgagaacccgaacttcttgtagttcgtagcgcgcgagtacatgctggactcgtacggatggtagccgagcgagttggcgggcgcaccccacatctggttgatggtgggggtccaatgctggctcgggaccagctgctggtacgggctggacagggaggaatcgaaattggccatgctcagaccggaaagtcccatgtattcgaggttggccgtaccgccgccgtagccggaggagagcatcaggccggaggtggtgcccgacttgatcttgcggatgttgggcatcgaatccttattggtcttcagtcccggcacgcggctcgggtcggagaaggattcggacagcacgtacaccactgtcgaatcagtgaggttgttggtgcgggaggcgttgattgtctccgcttccttctggtagcgagcggcgaccttcttcatggtctcctcggagtagttgctcggcttgtccatgatcttcgggttgagctgacgggtaaaggccacgagcggaccgttgcgctgcgcgtcatacacggaatcccacatggatggcgtgtcccccaaggcgcgggagaacttgttggccagcgaatcggtggtgctcacatgaatgcagtacaacgcgaacaccagaatcggcagcagcagcagaatcagacgggaggtgaggttcaggctcaggttgtccgtacggatcatgcgacctttgcgcccgtcgaagtggcgcagcaccagaatcagggcgagcagcgcggcgaacgcgccaagtgccacgaggatggtcacgtgcgcgccggccggaatgaaggtgagcatattgccggtgttcgagccaaggaagccgaggtcggcgggcagaatggcctcgtaacggatctcgaccttgaaatgttcgatggcggccacgatgattccgaccgcaagaatcacgatgcttgccgtccagaatctgttgaacagcatcagcaacatgaggtacagcaacgcgacaagtatcacgttgagtacgaatacgaaattgccgtcggtccacatcttgctcacgaagccgaatccgacggtcggactggacagttgcacacgggtggagctggacgaaacgcccacttcgagcgccgtcacaacaataatgtcgaagataacgaagagcacgccgtacgcccagccggggaagggcttgtgggggtgctggggcgtgacttcattggcttcggcctttttgacccaaagcttgaaatggggtttcactgtggtgatactactagtgttttcgctcattcgcctgtttccgtatgggacttttcaagggcatattgttgccgctgaaccttggaaaatccatagttccactatttttcttaccgtttcctaactattcaccctaacgcaaagggtgcctcgggacatccccgaagcaccctgatatataaggagccttccctgatagcgaagcgttctgttctcccctaggcaacgcctcgctatctgacttgattattccccttattgctgttgcggattgccggctaccgccgcattacttcacggcggcggcgaactggtcgaccagtgcgctcatccagtcgagcaggttggtgtactgcttcggcatctgctcggtgagctccacgatcggcacgttgacgtccttggcggcaccggtgatctggtcggtggtggagttggcttcctggctgttgaagacgagcatcctgatggagccgcccttcagggtgtcctggaagtccttgatgtcggccggggtcggctcgctctcgttggcggaagcctgggcgtagcccttcggggtggcgtcggtcatcttgaggtcgtcggccaagtgccaggccacggattcggtggcggcgtacggcaggttctcggtcttggcggaagtctccttgatcttggactcaagctggtcttccttggcgtgccattctttgttgagcttggcgtagtcgtccttgtgactcgggtcggccttctggtaggcggcggtgatggcgtcggcagcgttggaacgcaccttggcggagaaccagacgtgcgggttgtcgccttccttgatgccggcggtttcggcggcggtgaccagcgtggccttggtcgactgggcggccttggtggcccacgggtcgtaatcggcgccgttgaccacggccaccttggcagtgccgaacttggcaacatcctggctggtgggctcgtaatcgtgcgcctcaacgttggtcttggtcatgatgttggtgacttcgacgttgctgccgccgaggtcttcggccacggaaccccactggttgatggaggcgacgacctcgatcttgccggaagacgcggcgctgctggaatcggacttgttgccggcggcattgctggaaccgcaggcggccatcgagaacagggtcgccgcggcggccgcgatggcgagcgcgcgcttggcgttggacatgatggacatgattggattttcctctctaattcggctgtttggccgggcgatgctgctgttgctgcatcatcgcccgccccccaacacgacagaataacatgtattgagaattattatcatttgcatttacgtcggtgtgttgcacgcgcacacccgcgctgccggcggaaatcccgcgccccgacgatgacaacgcgggatcccgccgttttcggcagacgaaacggcagtatccccgcgtccgaacgatacccgcgcgggggttctgccatttaaggcctcggaaacgacagaaatcccgcgccaccttcgttcggacgcgggggttctgccgtttgccgcacatgtcacaacggcatcgcggcacagaccgacgcctgcaccaggtcgacgagccccacggtgtgggcatcctcacagaccagcgcatcacgcaaggcgattgcacggatgatgtcgcggcaggcgcactccccgtctgtatccaaatggcgtgccaggcaaccggcaccaacgaccggcaattcgagcacgcacgaggcctcacggatcaggcgggagaccactacgccggtcgaacgctcgtcatagacgccgttctcctcgcccatgtcgcacaggcacaaacggtcgtcgtcaaagaatcgctcttcgaattcgtcaaggcctacggcattggccaccgcacccacgaacatcgactcaccccactcgttgagacggaaggaatcggccagatactgcgcgaccggcgtggcctcaaggcccacaggcagcgagaccagaaacgcgccggcccgcccttgcagcgatccgagcgtccgttcaaggtcatgtttgaccgtgcagctcatgcagcacccctcgagcccgaacgaatcggactcgccgaacaccaccccgcttgcctggggcttcgcgacgttgcgcacgatatcgagaccggattccacggcttcgttcaggcgcacgtcataagcaatcgagcatacggacgggaaggaatcgaccaacgagaacgccacggagtccaggctcaggcggtcggcgccggtgagcagcaccacgggcgtgcgcccctccgcgtttccctgtgattgcaatgccggatgaatcatgacagcctttcttatttgataatggttatcattatgatatagttgcaggcatgtccaaaacatgtcaaattctgggaacacgcgccggggtcggcaaccgcgtctcccactcgcacaggaaaacacgccgaaccttcgccccgaacctgcagtccaagcggtactgggtgccgtccttgcagcggcacgtcacgcttaccgtgagcgccaagggcatcaagaccatcgaccgcatcggcatcgaggcggcgatcgcccgcatccgccgcgatcagaacgtcaactgaaccggccacggcatcacccccatgctcgggcagtcagtaggcccgccactgtgccggcgcgtaaccgcgcaacaaaccgcgctaacgagctgcatcacccacatggcaccgcgacgtacgcgacatacgtgacataacagcgtgacacccacacatagaaagcaccactcatggcaagcaaatcctccgcaatccgcccggtcatcaccctgaagtccacggccggcaccggattcacctacaccaccaccaagaatcgtcgtaatacgccggaccgtcttgagctcaccaagttcgatccggtagtccgcaaacgggtgctcttccgagagacccgctaatccatctgttcgttcattggacaccagtcgcgaggcgaggaagaggcttaagcacccgccgaaatcgtttccttgttggcattccggcggtttcctctatcaccatttcatgaactcatcttccgaaccttgcggcatgcgcccaatgaacgaatgcactcgtcccagctccggccggcgcgattcccgcgccccggagccttatcaaggagccggacatggccaaaaccagtaagatcaaccgacaattgcagcgcgaacgcatggtcgccaagtatgccgaacgccgcgccgaatacaagcgcgacagcgtcaaccctcatctgaccgccgaagaacgcgccgaggcgatgcgcaagctgcaggccctcccccgcgacgccagccccacccgtctgcgcaaccgcgattccatcgacggccgcccgcgcgcctacaaccgcaagttcggcctgtcacgtatcaatctgcgtgagaaggcacacaagggcaaactgcccggcgtggtgaaatccagctggtgatcgggccggcacaaccggccgtcaggccgtctcaggccatctcaattcaccggattccacccgtgcgtccgacgccattctcatccatatcaccacacaacaccacacaaccaaaggtccataaccatgcaagagggcatccaccccgaatacggccccgtggtcttctatgaccgctccgccgacaagtacttcctcaccaagtccacactggtggccaaggccgtaaacctgccgaccatcgactgggaggacggcaacacctacccgctcgtcaatgtggaggtgtccagctacagccacccgttctacaccggcaagaatgtggtgatcgacgccgccggtcaggtgcagaagttcaacgctcgttacgggcgcaagtgattcgccgcacattccgcaaagaccgtaagacaagaagaaaggaacggacatgaaggtcaaggcatcggtccgctcattggcccgcaaggatggctcctatgtcgtccgccggcgcggccatctgtatgtaatcaacaagaagaacccccactggaaggcgaggcaaggctgatggcactgcccaagtacaaggcgtcccgagcaaacacgcattcgcgccgagccaactggaaggccaaggtgcctcagctggccacggtcagaacgcctgaaggcgaagtggttcaggttccgcagaatctggccgcagctgtacgaaaggggtatatgaagccataaccaacatcgtggattccgcaatccatcaagtctcgtaacaacaactcgacggtccgctccacaggccggcggcgtacgttctttcccccatttccttccgtatgccgtcacctgccggggcgaaccgccgttttatgaggccaccgcatccgatctggccaagctcgccaaggcagacatcgtggtgttcaacggcgccggctacgacggctgggcggaaaaggcgcagcttgacaagaaacgccagaccatcgtgaacgtgggcgacctcatggacgtcaccgccaccgacgagcacgagcattcccacgaccacgccgagggcgaagaaggccgccatcaccaccatggtgctacgaacccgcacctgtggttcagcccggaagccgtgctgaaggccgccgaagccatcaacgccgtctacgcggacaaggccggggccggttctgccaccgccgccaccgtgcaacgtcacttcaacgacaggaagaaaccctcaaggaaatggacaactggcccacgtattacccggcatccatgagcaaggaggaagtggccaccgagatgctggcccaccgattcgccatcggcccaggcaaccatgtgcaaagttccccgcatatcgatgtgtaccatcggtatgcggggaactcgcatattatctcgaccactatcatgcgtacggtgctaatatgacggcgatatggcaggtgatattcgcatgaaagaacctcgcacgcagcgcacggaacaggtgaacaccgcgcaacaggaccattcggcgaactatctgtttctgattatcggcacgccgctggtggcgttcctgattgcggcttccgcgatgctcgagtcgcgtgggtttccggttccgctggtgcgtatcggcaccggtgccgcggggcttatcctgcaggcgattccgttcatgctgctgggcgcgatgatgtcggccgtggtcagcacgttcgtcagcaccgattctctggcccgccacataccgaaatcgttggccggcggactggccgcggcattggcggccggcctgtgcctaccggtgtgcgattgcatggtggtgcccacgttcgcgaatctgatgcgcaaacgcctgccgctgccgtgtgcggtgacgtttctgtgcgcggtgccggtgatgaacccgatggcgatatggtccacatggttcgcattcaccgacaaaccatggatggtggcggcccgcatggggttgggcatggtagtggcgatagtcgcgggggtgtcgttcgcggtgtggccgctccgctcccctgcggtgcgtgagaggccgctgacgattgggcggtcgttgatttgcgaggattgtgcaggggcaacgggtgattcgcctgagagccacccccagtcggctttgccgacagcccccgccggcgggggcacggggcgcggattggagcggttcacgcatttcattcggcatacgcatgacgactttatgcggatgatgccgattctgctgttcggcacgatcattgcctccatcatgcgcaccgcattgtcgtcgttgaccaacggttcaagcacgctcgatgacgccggtgccatcgtactgattctggcggcgatgggactggcgttcctgtgttcgctgtgctctacgtccgatgcggtgatcgccgccagcatgattggcgcgctgccggtctccgccatgcttgccttcctggtcttcggcccgatgctcgacctcaagaacacgctgatgctggccacggaatgccggccacggttcatcatccggttcatcgcgaccgtggcggcggcctgcttcctcgccgcgattgccgcccatctggtgatgggagcgtagccatgaagcgcaaagtcacactccccgaccgcgtggaggcgctgtgtttcgcggcgctgggcgcggccatcgcctatgcagcggtgggcggatcatacaccacgctgaccacgccgcgttcgctgccgtatctcatcatcggtgcggcactgctgttcgtgctggcgaccgcagcatggctcggactgttccacgccacggagcgttcggttttgcggttcctgatcgccttgattattccggcgctgctgatcgtcgtgccgttccagcccagcagcggcagcggcggcttcgacgagtacgccggcggccgcgctatcgccattccccgcagctcgcacaagcctgatggctcctcgcagctgcacggactcgacacggcgaacaagaccctgaccatcagcgacgacgaattcggctcatggttcgagcagatcgaccataatccgcagcgttacgtcggttaccatgtgcaggtcaccgggtttgtgagcaagtcgcgtacgttcggcgcggacgagttcgagctgtcccgccagttcatgtcctgctgcattctcgacatgaccccattcgggttcatagccagctccggcaaggccggcaccccgcacaatcacgactgggtcaccgtcgacgccgtcatcaagcagggcgtctacggctccgccggccacgagcgccaaggccttatactgcaggtccggtcggtcagcaaagccgcagccgccccgaccggctacttctactggcagtaaatgacgcgtctcccgaaatggaaagcactgcgctgcgccatgactcgccccatatcggcagaaatcccgcgttacaacgaaaggtacgcgggggctctgcctttatagggctcaaaactggcagaaatcccgcgcaggcctcgttgaaacgcgggatttctgccagttgattcaaatcatgtgacaacttgccgggcatctgatttgctttaataacgataatgaatatcatttgttaacagaaaggggcagaacgtcatgagcatcgagcaaaccgcgaccactcggcgcgtgacgcgaccccgactcctcatcacccaggtcctggcggaactatcccgattcgccacggcccaggaaatcaccgacatcctgcgcgagcgcggcacgcgcatcggcacggccaccgcctaccgcaatgtgcagatgatggcctcccaaggcgagctcgacgtaatccacgtcaacggcgaggccctctaccgcgagtgctcggaccagcatcaccaccatcacatcgtatgccacgaatgcgggcggaccatcgaaatcgagattcccggacttgagcagtggatcgacaaagccaccaagcagttgaagtaccagaccatcgcccacgaactggagattttcgacctgtgccccaagtgtgcggcgaagcatgccatcgaaccgcctctcagcgtcggcacctcaccaaaggatggaccactgacgacgccagacgatactggccgtcggcgctcgaccaaataatggcgcagtcccgacgctactggccttcagcatcggtgcccttccaatccttggcgcaatagcgacgatataagctccactcgcatcgttagattgccaacgcttggcgcagcaccgacgccagacacgctcatcgtcgtcgttccaccaatatttggattggtaccgccaccacctataccaggcgtcgacactcggccaacaatcggcccgttaccgacacaaaactgcatgaggtctcattgctcttaatagcagcgatgggcctgataatcactttcacccactttcgccgctgccgtctgccgccctacagtcgcagacgaacaaacgctgaaaggaacaacaatgactatcaagaccatcgatgagcatgcttacgagatcgttaccgaagagggcaccttcgccgtctgcaaggacacgctggccaagttcgacgccaccaagcacgagcacggcgtggccgcctgtggccgctgcggctgctgcttcaccggcgactgctgcgacgacaccggctgcgagcacaaccacaccgaagagtgcgggggcaaggcttgcctgcacgcttgccacgagaaccgcgaaggccacgagtgcgccttctgccaccttgccttcgacaccaacgagaagtgccacgatgagatcctggccgacctcaaggaactcaaggccgagctggctgtctgagttttaggtttccgatttctcctgcggattgactcctctcagggaggggagccagattccgacacgaaccaccgcgcttaccgtatgatgtctacgggcgcggtggttttgtttttctcgatgatggcgcagatttgctcgggcgcctccttgcagccgcgccggacccatagccagataatcgatgagacggcggagaccagaatttccagcgcataggcgcgcggaatgccgccgtagctcagctcggcacccacacgggccgcctgcccaagcagcatctgcttcaacacatccttgacccggtcatacatctgcatatcgttgcccgaacgggacagtgcgtcgaagaacgcatactcacgcttgacatagcgcaacgcctcggcttcgtgttccagttctacaatctggtggccaacctcacggccaaggagaacgtggagctcgcctccaaaatcatgaaagacgcgcaggaaccgactcaagcgcttatcgacgtggggcttcaggaccgtatcaacaacttccccgcgcagctttcgggcggcggacagcggcgcgcggccatcgcccgagcggtggccacgaacccgaagattctgctgtgcgacgagccgactggcgctctggactacaacaccggcaagcaggtgctgcagattctgcaggatcagagccgtaagaagggtgcgaccgtggtcattgtgacgcacaattccgccatcgcgccgattgccgaccgtgtgatccacatgcatgacgcgcgcgtcaaatcgatcgaagtgaacgagcacccgatggatatcaaggatctggagtggtaagcagtatgaccgatctcaatgatttcaccgaaacgaccaaccttacgcccgcgaccgactccgcagccgattccgccgcaaattcagcaaacgactcctataccgcgcccggcagaacgccccacgcgcacaaggccaagcgcaaccgccgacgcaacgggtcattccatagcgcatgctatggaaagacacccgcgtcaccatggccaaatccaagggtcgattcgtctccatcgtgagcctgatgacgcttggctcctttgcgctcgtaggcctgttcgtcaccggcccggacatgcaaataaccggcaccgacttctttaatcagaacaatctcgctgacataaccgtcatcagcgattatggcctgaccaaagctgacgaaaacattattcgcagcgcgccgaagtggccaaggcgatgaggggcggggccgtctccgagtccgcgccgatctactacgaggagatgtcgaaagtggccggcaaggagaacgacaaacagtcgattaccctgatcgccactgatgacgcctacaatttcggcgactacatcaccctgcgttcgcgcaccgggcacaagccgcaggtgctcaccgaccgtggtgcgatcatctccgaacgtatggcggggatgatggacgccaaggtaggcgacacgattaccgtcaccgattcgagcggtaccgagcgcaaggtgcgcgtggacggcatcaccgaaatgcatatcgggcatttcatgttcatgacttcgggtggctgtaagcacgtgttcggcgaacagtaccagtcgaacgcctatatggtgaggctcaagaaccatgagacctccaatgtggagtcgcgtagcgccaagctcataaagttggacggcgcgaagggcattgtgcagaacacgacttcgaagaaacaggtggccacaatcgtcgacttgccggatcagatcatggaagtgctgattctcgcggctgagctgctggccgtggtgatcctctacaatctgacgaatctcaacgtctccgaacgtatccgcgaactgccgaccatcaaggtgctcggcggactcggcgtgctggtctaccggcggttgaagacggtcgacatgctcggctccctgaagtcggtggaatagcagcggaatagcaaatgggatcggctttgaagccgatcccattcaattattcgctcactgctttctgagccttctgcgatttctgctccttttggcaatcagggcatagtccgaaaacctccagggtgtgggattcgacggtgaagccgtggccgtcggccactttgcgcagccaagcctcgctgggcgggtcgatttccacggttttgccgcaccgcttgcacaccaagtggtggtgatgtccgtcgtcgccgcataggcggaacagctgctggccgtccaggcggatcgtgtcggcggcaccggcatcggccaaggcgttgagctggcggtacacggtggccaagccgattttcgagccttcgtcctccagcctgcggtgcaggtcctgagcggagatgaactcctcacagtcggccaaggcggcgcgaatcgcgtccttctgcttggtctggcgttcgatatgttcaaccatcgataaggtcacgccttctttttcaggtcgtcccagcagccggtggcctcaaggtcagcaaccgtggcatcagggttgtcggtgagcacggtgatgtggcccatcttgcggtcgtgacgcacttcggccttgccgtagtcgtgcacattccactccgggtgggtggcgatcagcgcgcgcgtcggctccacatgctggccgagtacgttgaccatcacggccggcgagagcagcttgggcttgggcatgggccagccggcgatgccgcggatgtgggcgtcgaactggtccatcgagcaggcctcgatggtgtagtggccggagttgtgcgggcgcggggcgagctcgttgacgatgacctgatcgtccttggtgatgaacagttcgatggccagcgtgccagccagttcgaagcccttggccaagcgaatcgccagttcatgcgcttcgcgagccacatgttcggacacttcggcgggggcgatggtcatgtgcaggatgttgttgcggtgctcgttacgcacgatggggaaggtgacgaagtccttgccgttgccggagaccaggatcgaagcctcgaatgcgaagtcgacgaagccttccaggatgctcggcgggaagccgccaccacggtcggaacgggagcggatcttctccaagtcggcgtcggaacgcagcacgagctgaccgtggccgtcgtagccgccggacacggtcttcagcacggccggataatgaatatcatccaatgcggcgtcaagctcatcgaagttgttgacggcgcgccacggtgcggtggcggtgccgtggtcgttgatgaaccgcttctcgtgcacgcggtgctgggtcacgcgcagcaggtcggtgccctgcggggtggcggtgatgccgcgcacctcgtcgatggcatcggcgtccacgttctcgaactcgtaggtgagcacgtcggactgcacggccagatcatggatggcggttttgtcatcgtattcggcggtgatctggaagtcggccacctgaccggtcgggcagttcggcgtcgggtcaagcacgccgacgcggaagcccatgtagcgggcggacaaagccatcatgcggccgagctggccgccgccgatgatgccgatggtcgatcccggcatcagcatcgaaacacgaccgcctgtttcctcagacaagctgggcattggattcagccaccttttctttcagttcgttacggtaatcctcaagcttgtcggccagttcgggctcgaaggcggagagcatctgcacggcgagcaggccggcgttggtggcaccggagttgccgacggcggtggtggccaccggaatgccgccgggcatctgcacgatggacagcagcgaatcccagccggacagggcgtgggagcgcacgggcacgccgattacgggcagtgtggtctgcgcggcgatcatgcccggcaggtgggcggcaccgccggcaccggcgataatgaccttcaggccattggcgcgggcgttgtgcgcgaactcggccatgagctcgggcgtgcggtgcgcggagatgacctgcttgtggtaggcgacgccgaactggtcgagaatatcgcaggcgcgcttcatggtctcccagtcgctggccgatcccatgaccactgcgacttcgggcttggattcatttgccattatcatttactccctagttattgagaataaggcccactgtactcctgatagcggagttaagccacgcagcgaatcgttctcaatacataattctgtgaggcttacagctcaataacgatcttgccgaacatgtcgccggcgatcattctggcgaacgcctcgggggcggcgtccaacccgctgaccacggaatcgatcaccggatgcaggtcggcgtgctccacgaagcgcagcaatcgtgcgaaatcctcgcgc

SEQ ID NO: 1571 - DNA, 20295 bp, Unknown
  R221_24m  MAG No. k141_27376
atcgtcagtctccgtggccgctaccgatatgacggatgaagaggtgtcttgtggcgtcacagtaatggtgccgccaatcttgagtccgctatcgttcaggaattgctgcgtaaccgccacttcgccggccttgttcggcagtttgccctgccgtatgtacggctgatcaagcccttcggtaccgatttcctgcatggtcacggttttcttggtgccgtccaccaacgtggtcaccgtctgagaacgttcgggctgcacggtttgcacaccgtcgattcggcgcagtgccgttgcatcatcatcggtcaggccgtatgtggatagcacctgcaggtcatgcagtccctgctgatcgtaaaaacgaccggccgccagaaaagcatcgcggcatccggcgtagatgccggtcagcacggccacgccaagcagcgtgatgacggcgatcgagacgaacctcttccagctgcgcagccagcaacgcaacgtatctttggcaaataccgcagaaacgcccgctcctcgaccgccgctatcgtcgaggttccgccgtttcacagaatgtttcacaggttgtttcacaaatcgcctcgcttgtttcacggggcgtttcacagagtgtcttgcagtgagcatcgccaatcacctaccattcgatatcggcgatgggccgcggcgttgcgttgacctcctcgctggtcaccttgccggagcggaagcgaatcactttgtgagccatcggtgcaagcgcggaattatgcgtgatgatcattacggtcatgccttgtgtttggcaaatatcctgcagcaactgcagcacttccttgccggtctcgtaatcgagcgcaccggtcggctcatcgcacaacaacagcttcggctttttggcaatcgcgcgggcgatggatacacgctgttgttcgccgccggacagttgcgcggggaagttgtccatcctctcccccagtccgactttgcgcagcgtttcctctggatcgaaatggtcagggcagatttgcgaggcgagctccacgttttcgagcgcggtaaggttaggcaccagattgtagaactggaagacgaagccgatatcgttgcgccgataggtcaccagttcctttttccgcagacccgtaatatcgcgtccgccgaccactacgcggccggttgtggcggtatccatgccgcccagaatgttcaatgccgtggttttgccggcaccggactgccccagaatcacgcttaattcgccttgttcggcggtgaagctggcctcgtcgagcgcgcgaatcacactgctgccagaaggatattccttgaccacatggtcgaattcgatatacgccatcgcacacctccaacgcgctcgtggcagccacctagtcccataggccccgccagaacttcctgctatactcaagtaaaacaacactgtgtcggttctgcaaccaacagttggattgtgggttgtcggaacttggggagaaggccatgaccaaagaattgacggaaagccgccgcacccgctacacgagacgtgccatgcaggacgcgcttatcgagttgctgcgcgatcagccgctcggctccatcaccgttaaagcgttgtgcgagcgggccgatgtgaatcgttccacgttttacgcgcattatgcgagcatcgaggaactgctgcacgacattgaagacgaaaccatggcctgggtcaccaccgcactcgaacagctactcgcccagccagatcctgccggcatcgagcatgttattgagcgcatctgccagtacattgccgacaatcgcaatcatctccaagtgctgatgagcccgaaagcggatatcggtttccagcagcagctgctgggattgatttacagccagcgcggtgtaggcgaacagttgcaatcttcggcgggttacccagccgaggcgcagatgcgtatgcgattcgccgtgtccggcagcattgggcttttgcaatattggctcgccaacgatctcgcggcctctcccgaatcggtgtcccacaccatcttcaccatgtgtatgcctgccacgcagtgagcacagtgaattcagtgaactcagtgaactcagtgaagcgtgcggtttcataagcatcgctcgctatagcttcgcctgctcaccggccgcgcccacgcccgcgcttgcaatagcgcacaaatagacgattgaccatttctgagacgatacggcggcatagaataacgaacgttgcgcatcacggcaagccccgcgtgcgccaaacccaagaaatgtgagagaagagcacaatgagtactactgatgcgcctaagaagccgcgcgaaaccgacgacgtgccggtgccggccacgctgcgcaagtcattgaaaaaccgccacatccagctgattgcgctgggcggcgccatcggaaccggcctgttctatggttccagtgaatccatcgcgctggccggaccctcgattctgctcgcctacttggttggcggcctcgcgattttcgcgattgtgcgtgcactgtctgaaatgtccgttgaggatccgaaggcgggcgcgttcagctactatgccacccgctactggtccaagcgcgccggctttatttccggctggaactactggttcaactacatcctcgtctcgatggtggagctatcagtggtgggttcgtttgtgaactactggttcccggcgattccgacatgggtgtcggcggccgtgttcttggtgatcatctgcgccgccaacctgctgggcgtctctaaattcggtgagttcgagttctggttcgccatcatcaagattgtggccgtgatcgccatgattatcggcggcctggccgtcatcatctttgtcctgcccaccgcatccggcgtgcgcgcaagcttcgcgaactggttcaccgtgggtaacggcttcttcccgaacggcctgatggggcagaattccgacggttcctggaccggcctgctgatggcactggttgtggtgatgttcagcttcggcggcaccgagctcatcggcatcaccgccggcgaaaccgaggatccgaagaccacgattccgcgcgccaccaatgatattatttggcgaatcctcgtgttctacatcggcgctctgggtgtgatcatggccgtagtgccgtggaacaccatcgatggcaagtccagcccattcgtgcagatcttcgattccgtgggcattcacgcggctgccggtattttgaacttcgtgtgcctgaccgctgtgatgagcgtctacaactccggcctgtacgccaactcccgcatgttgtactcgctggccaagcagggcaatgcgcccgcttacttgggcaagctcaactcgcgcggcgtgccagtggccggcgtgctgacgtccgccgcgatcaccgccatcgccgtggtcgtggtgttcgtgtggcctgagttcgcgttcaactacctgatgtcgattgccaccattgccggcatcatcaactggacgatgatcatgctcaccgaaatgaagttccgtaaggtggtcgccgcgggcggcgctcccgaggattccgagctggccggtctgagcggccaggaggcactggacgcgattcacttcaaactgccgtttgccaaggtgaccccgtgggtggtgctggcgttcctggcgctggtcgtggtgctgatgtgcttctccaccagctaccgcatcgccgtcatcgccggcgtgatctggctggccatcctcttcgccgcctaccagctcactcaggcgaagaagtaaggctccatttgcgaatagctctcactgatgagcactcagtgagagctattcgcaaatgggatttattcatgaaacagctcatcgatgccgacgagctgaacgtcggattgagacgccgcagcatcgtcgaccagtgattgatcgaaaccgccgagcgaaaacagcaggtatgttcgctggccgataccggttcgcgcagcacggtctcgcagtagattcagcacggaacggtccaccggcgcattgcggaatttgcactcgcccacaatggcagcatcagacgcattgtcaacggccatcacgtctatctcatcctgacgatcccaccaacggccaaccgcacgcgcacggaagggcaaccgtccagcagcactctcacgccacatccattcacggcacagaccctcgaacggtttgccggcaaaatcatgtaataccggcttgatatgacgctcgtatacgccttccacatcgccccgctccaattccgaacgatacggaaagacaaacgaataccagaatcggaagaaattgtcgctcagctgatacagcccacgcgaacctttcgcccgctccttaggctttgccgtgactgggaactcacgttccacaatccccagttccataagattggcgagatacgacgatactgttgcgtttgccatcatcgtgtgtgtcgcgatctcattcagcgaagttgcgccgagcgcgatcgcccgtatcacgctgttatatttcgcagtttcccgcagttcttcgtgcaacaaaaattcaacctcgctgtatagcggagcaatgcgtctcagaatatgccgcttgacatttgcgtctatggtctcatctgggtcaaattcctctaggtaacgcgggataccgcccagtattgcgtaggccagcgccttatcctcgctactatagttggggaagaattgcgctgcatcccaatatggcatcggcagcatcttcaggatgccggtcgcacgaccatatagcggcgatttttctcccaacagctccttttcgatgaagctcatggcactgccgcaaatcacaatcatcagatttgcatgacgcaacgtgtggtcccaaagattctgtagcactgacggcaatgacggatcagatttgaccagataaggaaactcatcgaatatcacaagcctgcggccgccatcgctcggctctggcagccgggttaactcggttaacgccctttcccaagaaggatattgactcagataatccttgcccggggcacccgcctcgaacatgagacgggagaacgatgccagctgttcatctttagtggcattctgcgccgcgaagaataaggtttccttgtcttttgcgagttgaataagcgtctctgtttttcccacgcgcctgcggccgtagacgaacacaagctgtgccctacgctcagtgaaacattcctgcagttgcttgaggtcatcgtctcgtccgatgaatgccatgctgcccgcctcctttatgccatacgccggcgtatttctatcgcatcacgatttattgtatcacgattagtataatcgtgattatacaagctgtgacgaggtgcgggtacgggccaatcggcatcgacgagaccagccgcaggggctacaattacatcaccgtggtcgccgatctcgtggagcacgatgtcatcaacgtgacgccgggcaaggactcgaccacggtcgaacggttctcgcgtgatttcatggaccacaacggggtcccggaatatgtgcgtctggtcgcctgcgacatgagcctgggcttccggaagggcatccgtgagcatctgccccatgcgcggcggatcgtcgacaggttccacgtggccaggcacgccaacgaggccgtcgacaaggtcaggaagacggaaggccgctccaacccgctgctcaaacggaccaagtacctgtggctgtgcaacgaggaaagcctgaccgaactgcaggtggagaccaagcgcaacctgacgaggcaacggttgaagaccggccgcgcctgccggatgcgcgaggtcctgcaggacatccacacggacagccgcaccccgtccgaggcatgggtgcgcctgcaccgcctgtgctcgtggatgatgcactcgaggctcgagcccatgaaggacttcgcccgcatgatccgacgccacttcgccgagatcgtcgcctacttcgagcacccgtacaccaacgccgtgctcgagggcgccgacagcgtcatccagaacgtcaaacgacgggcgagaggcttccgcgacatggactacttcgccaccatgatctacctgacctgcggcagactcgacctcaaagccgtcaccaccacttgaccatcacccaccacaaacagcgaatagcctcaatttgttatctttaccgcgcttgcgtggacagagaacgctcagacctcgaagatcgccgcatattcgcgagagaacccgcctagtcaatgagatatggattgaaaacacgctcggtgacggggatatggagcatcagcatggtgccgtaaccaagaatcaccagcaggaacagtccaccgggcatgtagaaccagctggccaccagcagcgccacgaacacggcatccacgatgaccagggccacggtcatcgcgatgtgggagatgccgaagatgaaggcgttcttcaaggtgccggccacggtgttctcgaagcgtgcctgaagcgcgaacacccattcgaagccgataagccagaggatggtcagcgcgaatttgatgatgagcagcggcgtgatctgcaggacgatccatgaccagaccagtgcaatcagcaccaccaagaacggcagccacagcagtgtggctttgatgaagttggctttgaatgacttgaagtagttggcggttacgcctttgccctcgccctcgatggagcggcggcaagcatcatggccggcggtcagggccgcaccgatggtgatgagcggaatcgaagtgaccagcatcagaatgttgatccatacgccgtcaacaagattgctccacgcgcgcatgaatttcgagtccggtgccagccagttcatcaactactccttgtgtcgcctgtggctcccctctctgaggggagctgtcatcgcagatgactgaggggagacttgatggagctcaggatactcccctcagtcggcttccgccgacggctcccctcaaagaggggagccggattggtggagctcagcccttgaccgctccgccttcggccctgcaattacggactcgcctacgacgaggctcatcattagcttcgccgctgtcgcggctcagcctggagcctgctggaagcccactgggcttccagccatgggctgacgacgcgagtcgtcagcccttgacggctcccgccatgacaccagagactatatacttctggcataccaagtagaagacgatgatggggatgatggccagcaccaggcaggccatcatggcgcccatatccacggaaccgtagccgcccttgaggtattgcacggcgaccgagatggtcttgtacttgccgaggtcgagcgtcaggtacggcagcaggtaatcgttccagatccacatggcttcgaggatggacaccgagacgatcgacggcttcatgatcggcaccacgatctggaagaagatgcgcggcactgacgcgccgtcgatcatggcggactcctcaagctcctgcgggatgcccttgatcacgccggtgaagatgaacacggccagaccggccccgaaaccgaggtacacgatgcacaggccccacggggtattgagcttcagcatgtcggcgatcttggagagggtgaacatcaccatctggaacggcacgatcatgttgaacaggaacagggtgtagagcagcttcgcagcccagttgttcacgcgcacgatccaccatgcgcacatcgaggtgcacaccagaatcagcaccaccgagccgacggtgataagcaacgtccagccgaaggaggcgaagaactgcgtggtctcgatgccgcgcacatagttctcaagtcccacgaacgccttgccggcaggcagggagaaggcgttcttggagatgtacgccttctgcttgaaggagttgatcagcaccaggacgatcgggaaaacccagaacagggagacgacggcaaacagcacggtccataatgcgccatgcttcacaggcttgttctcgttcatcaggctgccacctccttgctcgtggtgagcttgttctgaatcagggcgatgaccgcgaccaggatgaagaacagcacggccttcgcctggccgacgccttcccagcccatacggccgtagaaggtgcgggtgatgttcagcgccagaccttcagacatgttgctcggcgcaccgttggtcaatgcgaggttctgatcgtagagcttgaaaccgttggtcacggtcaggaaggagcacacggtgatggacggcatcatcagcgggatgatgatgcggaacatggtctgccgtccgttggcgccgtccacggccgcggcctccagcacatcggcgggcagggcttgcaggccggcgatgtagatgatcatcatgtagccgatctgctgccagcacaccaggatgaccaagccccagaacccgtaggacgccttataggtcagggcgcggccccagtgggctagtacgccgttcaggagcagcagccagatgtagcccaggatgatgccgccgataaggttcggcatgaagaataccgagcggaacagcgtggagcccttgatcgccttggtcagcatgtaggcgatggcgaaggcgatcacgttgatcacgatggtggtcacgatggtaaacgcggtggagaagccgagcgcgtgcaggaattccttgtctttcaacgctttgccatagttcttaagccccacccattcaccgtcggtaacggtggtgaattcgcaaaagcttaagtagacgcccatgatgaagggcaccaggaacccgatgatgaatgcggcgaatgtggggagcgcgaacagcgcccaccatctgcgtatcgccttgccagccatgctgatcatgacttttcctcctccttgagtccgctgcgttgcgacactgcatcgtgcgccggctgcggagttcaactcaatgcgagcctgccgatcgagaaccgcatgcacggcctgttctcgttcaagcctatgttcatagtagacgtcgaatcattatatgtcaaacgttgtcattttcagcgtttcaatctcgagcatactccagctccagcaatcttctttcaactaagataatggctatataaagccaatatgacgccgtcatagacactttgcaaacgtttgtaatacaatcgttgtcatcgccgcaaatcaatcaatcagcatgtacactgtagtcagttgtgcatgtgtattgcgattttccattcaacgcaagggggctgcaatggctacgagcattcaggatgtcgcccgcgaggccggcgtctccatctccaccgtctcacgttccttcaccagaccggatctggtgtcggccaagacccgcgagcgcgtgctcgccatcgccgacaaactcaatttctcactctcccgctcggctgcggccctgaaatccggccgcgccctgcgcatcgcagtactgatgagcggccatatccgcctgtggttcaccgcctcggtcatcgaggggctcaacgaggtgctgcacacgcagggctacgatatttcggtattccagatttccagcatcgaggagcgcaaggaattcttcgagatgttgccggtacgccgtaacgccgatgccgtgattgtggcgtctttcgatatcgacaacaacgaaatcgcacaactggcttcggtcggcgtgccgatcgtcggcatcaattcagtcgagcccgaagcccgcggctttaccgccgccgtcaatatcgacgatgtgcagggctccacgctggccgcccgccatcttatcaatctcggacatcgccgcatcacctatatcagcaccaatcgcgaggtgtcgctgagcttctccgtgcaaagccgattcgactcattcaccgcctgctgccgcagggaaggcattgagccgcaggtcatcgtctgcaaggtcgatgacgatggacgttatgaaatcagcgacgtggtcgaccaactcatgagccaagacgagatgcccaccgccatcgcatgccaggaggatggcatcgctttgccgcttatgttccagctggagcgcaatggattctccgtgcccggcgacgtctcgctggtcggctacgacgatagtttctacaccggcgatatcggcctgaccaccatccgccaggatccggtggaaatggcccgcgtggcagcccgcatgacgctcgatctcattgacgagaagccgattgagcaaccctacatcgtgttcccggcccagctgaaggtccgctcctccacctcccgcgttaagtaggcccacacaacaaagcccaccatagaaaaagtgtgaggcaaccgcacaataacgctcaatcgcacattgtgggaaatggcgaaaaatcgccgattcatggccccacagcgtgcgattgagcgggtgcgtgcctcacacttttctgcggcggacgattttgtgcgagactcagcaatacaaagcggcgcccctggagaaggaaaggcaggggcgccgcggattgttgcttatcggctatgggactctatgagactcagtgcgaggcctcgtattcggaagcccaaccgtccacgaaggcggtcttgacggcatcccacttgccggtgccctgcgcgtactcgagcagcgcctggccgaccttgttcttccattcctcggacggcatcatggtgaagttccaagaaacctgggtcttgccggactcctggtcttccacggcggcctcggtcagcgggttgtcgcttttgacgtcatcgaaggtcttgaacggggtggtgaagcccatgtcctgagagagggccttcttgccggtatcagaggtgatcacccacttgaggaagtcctcggtggccttcttgtcggcgtcggaggccttgtcattgatacaccagtagttctcggaaccggtggtcagaccctgcttctcctcgcccttgacgccgatgtagatcggcatcatgcctacctgagcggcggtcatgccggccttctgcaggtcggtccaggcccaggtgccgttctggtagaaggcggcctcgccgagcgcgaactcggagttcgcatcatctccggtcttggcgctcagctgggtgggttcggtggtggagtcggtgatgtacaggtcgaagatcttcttgtagttcggcaggtaggtgcccttgatcttggccggctgctcggtgacgttgtcgtccttgaactcgtagtaaagcggcagattggccaggtgggtcttgaagcgccagtcggagctggagtcgaagccggcggaggtgaacgcgcccttgatgccgagctcgtccttgcgggcctgcatgtcgtcggccacggccttcagggtgtcgaagttgtcgatttcgtccatggacgtggccttggcgccatccagcgcgaagtacttgttgaggatgtccttgttgtagatcaggccgtaggtttccatcacgtacggcacgccgaccaccttgtcgccatccttcagggccacatcctggttggtgagctccttgtacacatccgtattggacatgtcggcggtgtacttcttccagttctggtagccgaccgggccgttgacctggaacaaggtcggggcttcggttttggcgatttcggacttcagggtctgctcgtaggtaccggaggccgcggtctgcaccttgacctcaacgcccttttccttggtgtattccttggccagagcggtccactgatcagccgcttccggcttgaaattcaggtagtagaccttgcccttggcgtcatcgccggaggtcgagcttccgcaggccgccaaagcgccgagggacatcgcagcgacagccgccatcgcgactgctgacttgactgtacgattcatcatcgaacctttctctttcatcgtcgacccggccgtccccggtcgggacaggtacgctagcacgcacctttacgactatcgacatgcactattgtgcaacggtttgcttctttttgcaaacgatagcaatatcggcgcgtcataaatcatcattttcaggccattgtcaacaaatatcccattaattcagtcatttttgcctcattatcgcaatgcaagcgttcgcaatcatgagagcgctaacatatctttcatggcaatcgattgccacttatacccatcaaaaaacaacacgccgacgctatcgtttgcaaatcatttatcgacataccgcaattcccgccacaaacaataaaggcccgcccgcagtagcgggcaggccagcgcaatcgcagcgcaaccggggctaggcgttccaccgttcgatgacgttatctcccttatagacgctgagcaccgagtagtgcgccgtatccaaacgcagcaaccgtgcgaaatgcgggtccacgcccagccattgcgaggtgaggatgcgcaggatgtgcgcatgagccaccaacagcacattatggccgtctttcagcagcggcgtaatctcgtcgatggcgctcttggcgcgtgccgccgcttcttccagcgtctcgccaggcccggcatggaccggcacctgttcgcccgaaggcaaggtctcgacccagtcgccctccagcgtgggcgtcagcgagcgcggcccgtcacgccacacatcccattcaaaaccgctggcctcactcacctgctggcgcgtacgaccctcggctcggccgtaatcccattcagcgatgccgtccaacacaccgtggtccgcaaaaccagccaattcagcggtttggcacgcccgcttcagcggactggaaaacacacagccctggctgaatccttcggggaaagcctcgcgcaggcgccttccggcatccgctgcctgctgctcgccgaccgcggtcaacgggatgtccgtgcgcccggtatgctgcccggattcgctccacacggtctggccgtggcgcagcaacaccaaaaatccattgccgccacgagagttctcgacggcaacggtgccgttcacgttctgttcgctcatgcctccactctagtctgcgctcgttcatgactccaccattaacgcccatcttttgcgctgagatgattgagatgctattagactgagagtcatgagcgacgaaacgaacaccgacttcccctccagcgccgaccgcgcggtcgacagcctgcaccgcatcgacgagaaggtcaacaggctgcgcgaggaccggctcaacgaccctgattctctgggcgacaagctcatcaagtcggcagtcccagcgctggcaggcttggttgccggcaaagcattccagatgatatgggacaagggcacaagcaaacgcaatctgcgcaagggactggcggcagacgcgccgcaaagtctggcaatgagtctggcattcgccgccgtttcggccgcactcggcgcagtggtttcgcagctgtcggatcggggctccaaggcgttcgtcgaccaccgccatcgcaagcccagccgctaatcccccggttggatgatggtttctgttggctgactgatgactcatcgctggaatttcgtcaaggaaccatcagtcaatcgacaggaaccatcagtccagcacagttccgccacacaatatcggcatttcactgtgaggtaatccaccgtggcgtccggcgtctgccgtgcgacaataaagccatagttaccaacgcaacaatcgaagctcttctgggccgccgctccatccgtaagttcaaggacgaggccatcgacgacgatacccgcgccacgctcgaaaccgtcgcccaacatgccgcgtccagccagttccttaacgactggtccgccatccgtatcaccgacccggccaccaaagccaagctcgccgaattcggccatcagccgtatatcgccaccgcgccgttgctgtacgtgttcgtcatcgacgagcaccgcaacgcacgcatcgccgaacgcaagggcatcgatcccgcttccgacgaattccatctcaagtacagctatcgcttcacccaagctcagaacgacgcagtgctggccctgcacgccatggagaccgccgcctattcgctgggactgggctgcgtgattctcggctctctgctcaacaatatccccggccttatcgacgtgctgaatctgccggaatacacgtatccggtgctgggtctggccatcggcaagcccgatcagaacccgaccgtcaagccgcgcatgccgcgcacgatgcagttcttcgagaacacctacccggctgacgccgatggcgtactcgaccagctgcccgccttcgacgaggaagttcaccggtactacgatctgcgccaagccgaccgtccggtggacgctttcagcgatcaggtcgccacgatcagtcggcaggatgtcagccatcagacactgctcgacaaggccgccgctcagggcttccgtctggatcagtgagaccagaaccaacgagatagcctcggataggctcgtcactgagtcgtctcggtctcagcactgcgacgactcagttccaacacctcaacatttcatcaccggataccggcaaaattgcacaaccatcccgccggtgtcgcaccatcaacaaacgttcacatatcagtcccattatgcggacaaccaacggccagttttgcaagaaaacccgccaaaccagcagtatccgcaccagtggtgggaatagactgcatgtggccgcaatgactacgaaccggaaaagagggactggatgcggacggtttggcaagtctttctacgcgattgcagacgtatcttacgcaatcccgttgccgttgtggtgacgctcggcgtagcaatgctgccctcgctgtacgcatggttcaacattctcgccaactgggatccctattcagccaccggcaatctgcaagtggccgtagccaatgaagaccaaggcaccaccaacgatctggtcggccatctcgatgcgggccggcaggtcgtcaagaaactcaagcagaacgacgaactcggctggcgcttcgtagacaatgaggaacaggccgtccacggcgtggagaccggcggatactatgcagccatcgtgctgcccaaggatttcagcgccagcttggtcgaatcggtgaccggaacctccaaacagccgaaaatcaagtattacgtcaacgagaagaagaacgcgatcgcgccgaaaatcaccgacaccggcgccaccaccatcgatgagcagatcaactccgccttcgtcaccacggtagccaccaccgttgcctcggccatttccgaaaccggagacgatctcggccaagccactggcaaagtccagcacgatacgatcgatgatctcaatacggtgatgtccacgctgaacaccgttcaggattcactcaccgacttacaggacacgctggcccaatcagacacgattctcgccgacgccaaacagaccaccgcctcactcaagcagaccgtcgcggccgcgcagaatgcctcccgccagtccggcacactgttggcggaaacacaggccgggtcacaagccttctccaccacactggtcggcgcgctcgacagcagttcagcacaactctccggactggccgtccacgtcaacaacgccgccggcagcatcaccggctccttcaacagcgcgcagaactccgtcgacaccatcaccaacacactttcggccccactgaacgccacccaaacgtcaatcagcgatctgaaagacgcgctgaccaaagccggcatcggcaaagacaccaccgacccggtcggccagaacatctggaaacaaatcgatgcgctcgactcattgatcagcaaacagcagacacagctcaacaccttccataccgacaccacacagttcatcagctccggcaaagacgccaccacgaacctttccggagccatgaccaacaccaccaccggcggcatcgcggcgctgaataccgcgcgcggctcgctgaccggcaccgtaatgccgtcgctcacctcatcattgaacagtttcgccgccctgaacggcacgctggatggcacgttgacttcgttgtccggcaccttggatcaggccgacgggctgttcgaccagcttgtcgataccctgaaccaaacgaaaaccaccatcagcagcacgcaggattcgctgcgccaggcggccagcgatgtcgccaccgtacgcaccgatatcgccacgctcgatagttccgccgcttaccagaaaatccgggatacgctgcatctggatgacaagggattcggcgagttcatgggcaatcccgtcaccctgaccacgaaagtcgtgtacgccaccgacaattacgggtccgcagtcaccccgttctacacgaatctggcactgtgggtaggcggtttcgtgctgattgccatctacaagcttgaggtcgaccgcaaaggcattcgccgtatcaccgctacgcaagcatatcttggccgctggctgctgctggtcaccatcggattcctgcaagccatcatcgccaccattggcgatctggtgctcggcatccaatgcgagcatccgctgctgttcatcttggccggaatcttctgttcgttcgtctacatcaacattatttacgcgctggccgtggcgttccgccatatcggcaaagccatcgccgtaattctggtcattgtgcagatacccggtgcctccggcctgtatccgattgaaatgatgccgaacttcttccgcgaactgcacccatggctgccctttacctacggcatcaacgcgatgcgcggcccgatcgccggcctgtacgcgaaccattactggctcgacatgctgcacctgttctggtatctgccggcggcgcttttcgtgggacttgtcgtacgccggtatgcgatgaacctgaacgcgctgttcgaccatcgtttgggagataccgacctgatgatcaccgagcacaacagcatggtgaacgaacaggtgagcttgaactccgtattccgcacggtgtccgacagcaaggaactgcgcgatatcatcgctcatcgcgcgcaccggttcttcgcgcggtacccaaagatgatcgttgccggtctgacattgctgaccgtactcccgttcgtattcctggtactgctgttcgtcacccaagagaagatcgccatgctgacctcctggattctgtcgattattcttatcgacgcctatctcattgtggttgaatacgcacgcgaaacctacgccatgcagcttggcgtcagtgccatgagtgccgacgagttccgcaatgtgatgctcaacggatatgtgtggcggcgtttccacggccacggacgtcacgaagcggcgatgggcagcaatccggatatcggcgaaaccactgaacgactcacactgttcggcgatcaggccgccgagccgactgcgcacaccgcacagttcgagcagtccggtcagtctgggcagtctgggcagtctgggcaaggaggcgcacgatgaagcttatctggaaaatattcgtacgtgacgtgcgccaagccacccgcaatgtgatcgccgtaatcgtggctatgggattggtgattgtgccggcactgtacgcctggtacaacatcgccgccagctgggacccgtacggcaacaccaaggccttgaaggtcgccgtggcaaacgtggataagggctataagtccgatctgatgccgatcaccatcaacgtcggcgaaaccgtgaccaatacgctcagggccaatcatgaccttgactggcagtttgtggatcgtgctaaggccatcgatggcgtgaactcaggcgaatactatgccgcgctgattattccaaagagcttcagctccgatatgatgacgctgttttcaccgaagatcaagcacgccaagctcgaatactatctcaatgagaaaatcaatccgatcgctccgcatatcaccgaccagggtgctaccaccgtggccacgaccatcgaccagacatttgtgaagaccttggcgagcgtggcgctggatttggtttccaacgtggccgattacgcgcaaagcccgcaaatggagcagtacgtcaacaacgcctccagtcatattgccaccatgtcgtctcgtttgaccggcactgcgtcgcagatggattcctatgccaatctgctcggggccgccaacagcatcattgattccaccgataagctgctgggatcaacaggctcagctgcggccacaaccaaaaaggcgttgaaacagacccgcaacggcgtctccagcctcgacaaggcattgtccggagccaccgatggcgtcggtacggcattgcagcaggccggttcatcctacgacaccattgccaagcagatcgatgccgcttttgccgatgtgggctcacaatcctcgcagatatcaaacaagctgaccgatatgcaatccaaagtggaggctcaggccgacagctttggaaagtatgccgccgctttacgagatctcgccaaacaagcggcttcactgcccgtgggcggagataccgttgccgctcaactgaacgcggctgcagaccaagccacaaagacgcagcagagcatgcagcaagccgccaccgcgttgggcgatgcggccacgcacatagcaaatggtactgccgatgccgatacagcgcgtcgagatctgaaatcacaaatcgccgccgccaaacaatcgattactcaggcttcagacacgtacaagagcacgctgaaaccgcaactgaacaatctgacctcgtccatggacgaagtggccacgcaggcaagttccgtaatcgacgggcttgcgtcgaccgtcagcagcgtgtcaggtctttctggcggcgtttcagacagcctgacggatatccagtcggccttgactgacgcagctagcgctttgacccgttcggcgaagaaactcgacaacttgtcttcccaactcgcctctatcaccagtggcggcaccaacgacctgtctgtgatttcctctgcgaagcccgatgccattgcttccatgctggcggcacccgtagcggtcgaccgcatcgcgctctatcccgttgccaactatggttccgcgatggctccgttctacacgattctgtctatctgggtcggtgcgatcattctggtcgccatgttgaaagtatcgatttccgaccatgagaaggcccgtatcttagggttgggcaatgatctgccgctcggttcgggagtgggtcttcgcgaggccatgattgccgggcggattgccggaccggccgccgcgttggatgtgctgaagaagccgcgtgccgagtcttccggcaatgcgcggcagttcggtttacgcttgcaccacgaatatttcggccgatacatgattttcggtttccttgctttgctgcaaggtacgctggtgtgcctgggcgatatgttctatctcggcgtgcagtgtgagcatccgattcagtttttgatggtcgggtggttgtctgcactggtgttctcgaatattgtgtatacgctggccctatcgttcggtgatatcggcaaagccattgccgtggtactgctggttatgcaggtagccggttccggcggcacattccccattgaaacactgccgacgttcttccaggtcgtttctaaatggctactgttcccctatgcggtggatgcgatgcattcggccatggcgggctcattcggcatggaatactgggtttccatgggcaaactggcactgttccttgttccctcattgctgttgggacttatgttgcgcaagccggtaattcgcttcaacgattgggttatccgcaaccttgaaagcaccaaggtgatgtgagtgttggacggagtgtgtccgagcgccctgaacgcttagcagcctacgacctggcgtgtttggaccgtaacctgcctcagatacggcgttggcgaggcctgtggagcttctgacgctaacgtctacgtggcttgtagccctttttacgactgtgtggcttgagttgctggttcagcggtacatgccggtaactggattgtggatcgcgatgtgtgaggtgccagcatccgcaatattcgcaacggtacacccatagctcggctccacgctcgatcaggctttgatcagcggcacgctgagcctgcgccttatcgtggtacatgattttattcgacgtggcgcaacgtttaggggtgaagtaatgcatagcagaagccagtgtagagcgaccccataaccaagccagtttctggctcccctctggaggggagctgtctgcgcggcggaccggggggcctgggcgtcgggctcccacggtcgcggacgcgccgcgccgttcggcatcgccgtcggggctggccgggaatggtcccgggcgtgggtctcatgggtatgcggggaggtcccggtgcccgtgcgggttcgggccg

SEQ ID NO: 1572 - DNA, 5095 bp, Unknown
  R221_24m  MAG No. k141_28637
cctcggcacccctacataaaacccgttagtccaattcaactatatctgtttttcgccagctacaggagagaatcgactataactgatttccatgcgcttcttcagagaagacaagtctgttggacactttgatggactaaaggccagaacacaatggcgctagatgggacaaaaggtacattggtcctatggctaagcgcaaacatatcggcaccgtaattctcacgatactggtcgcggctctgctggcggtgggcgtttccggctggctgttctggcagtcggtacaacgggtgatcggcgaggcgcagcaggcgggcgaatatgcggccgaggcgcagcaatccgtcgggcagggcgacttcaagcaggcgcttgagcagatggacagcgctggcagtcacatcgtcgcggcgcgagacgaaacccagggcatgccatggcaggccgccgaatacgtgccgtattacggttcggacgtgaaggcggtgcgcggcatgctggatgcggccgccgacgccgcgaccaacgccctgcccaaaatcgacagtgccgcgcagggcacgttggtggacttcaatatcgaagagctgctgtccggcatgaacttctccgacggcacgctttccattcccaaaatcgcttccatcaagcaggacctgtccgacgccggtgcggtcttgaagcgcgtcaagacgtcgatttatgcgctgccgcaaccccgcacggaacagatcaccgaaatggtcaaccagggcaagcaggtagtggaccaaatcgatgagactttcgacaccttgaacaccatcgtcgaaaagattccgggctgacgttggttcgttcttgtcgtatattggcgtaacctccgcataaggctagtccatacaaatttatgtttaaatttgggataggaggtgccaatatgccgacacgcacaccaatcccggtcagtcgggcgatgcgtcagatatccgccaacctcgatttggcgcgcagacaacagcgcattcccgtagccttgctggccgagcgggctggattatccatgccaacggtcaccaaaatgctgcgtacgggtaatggcagctttgagaacttcctccgcattgctcgtctacttggactgctggacggcgtacagcaagcgacggaccctcttaacacagatatcggcaaattacgcgccgacgaagacactccgaaacgtattcgatagtacagcaggaggcgcaacacatcatggaagcaatcgtcaccctgcagttcaacggcacagacgtcaccgtcgggaaattattcaccagtatcaggcgcggcatcgaatcggcacatttcacatacgatacggcctatatgcgctcttcaaacgcagtatccctctgtccagagatgcccctctcccccggaacgttcccggccgagcataatgcgatgcatcgcatctttcaagactgcatgccggatcgttggggcaggaacctcatgcttcgtgcagaacatcaagatgctcgttcggagcatcgcacagcacgcacactatttgagggagatctcttgctatccgtcaacgatgagacccaacaaggcgcattgcgcttctggaacaacgacggtgacgcgctagctcccagtgagaccggcggtccaagagaagtgaccattcagtcccgcatccatagcaatgatgagcagctgctttgaatccggcattgcgcggcttcgcgaagcaaacgcacaatgacttcacattcccgccttgcaccagctggctgcaatctgcgtatggtcatgtatctgtaggccggcacgaatgcggctgatgggtgcggcgaatcgtgacattgcttattacccattcgccccttcaggcgtaccattcgggccggcgcagtttcaggaatggtcgctgtttgcgcgctgctgcggtttgtgtgagatcgatgtcggtgataatcaactgttcatggtcatcagtctcgctgacgacgttgccgtacgggtccaccaccactgattggccggcgaacgccacatcgccctccttgccgacccggttgcacatggcgatggccacctggttctgcatgacctggacgcgaatctcccacaggaacggcttcgacggttcggcgtcagtgttcggaaccgatgctcgccgtcggcacgatgatcaggcggcgccgcgcaacgcgcatgtgcggatgccttcacggggttcactcaaatagcgtcatccagtcgggatcgcggtgggccgcaaaacacatggcgatttgttccgcggtgtttcttgtttccgaaagccgcggcaaccggtcttcctcgaagtagcggatttccgtcgtttcgatgttggccgagaaccaaccgccggcgcggctgcacaatacgaagaacttgagcaccccgtacggataggtcagcgcgttgtgattggcgcagtcctgcaccgcgatgagtcgctcgcccctcacatcgagcccagtctcctccttgacctccttgacggcgttggaccgaatggactggttctcgtcgacccagcctccgggcagtgaccattccccgctgttctcatgcgtcatgaggatcctgccttcttcatcgaagatggccgcacgagtgtcgagtttcggcgtcggatatccggcgctgagcagtcgactcacctgtccggccggcgcatcaacctgcgtggagagcatgtcgaccgccatcgcgcggatacgctcgtagcgctcccggtcgaaggggtccttgcagtacatcagtccggtctgggccagcgcctgcaattctcgggcctgttccagtaacgtgcggttcgtggccatcatcgttcatcctgtcatcgtaaggtcttggatccgtttgcgctcaggcatcgcagcgtagtgcaagcagtatagcacttcgaaccgttccggggacgagggtctcagcgcatcccccgtaacctctcccatgtgccatcaacgcttggcgagctgcacgttcttgcgctgtctgcgattgcggctggcgaccgacttttcacgctcgcggcgcacgtgggcctcctcacgcgcggccgccgcgcgctcttcttccaaagacggcaatccggaggcggcgcggtgccggttctcccgctcatggtcgcgttcggccttgcgctccccgcctcggatccgggcgccggaaaccatcgcagttggcagagcgtctggccgaagttccacaggttattggtcagccagtacagcagcacgccgaacggcaaggtgccgcccgacaccacgtagatggccgggaacacaaacgcggtcagcttctgcgtgcggaactgcggtgaatccatggcgtccttcggcgtattgcgatggatgagcagccactgcatcgcgaacaacatcagacacatcaacgccacggccacgccgatgacgacgtgcgactgcggcgagacgaccgtgccgaacgagtcggcgatgcgcacgccgaatatggacgatgattcgatgtcgcccgccatgacgcggtcgatgccgctcaacggttccgcattcccggcggcgcttgcgggcagggattgcagcgtgtagaacagcgagcacagaatcggcgcctgaatcagcgaaagcaggcatgaaccgagcggattggcgttatgccgctgctgcaaagccataatttcacgttgcatggcttctctggaacgcagatccttacgcgcggcgtacttgcgttggatacgttggatttgcggttggagcacctgcatacgctgcgtcgcgcgcatttgggagaagaagagaggcaatagacagatacggatgatgagcacgaggcacataatcgcgatgcctaagctgtgcggcaccgactccttctacggctgcggcatggtcaccggccagcccatcggcaccatgatcggctctcgcatgatcaacaatgcgcaagccggcttcatcatcggcgccgtgatcatgggcttccggattcgtggcgcttgacatctgacctcgcgaggaatcctcaaaggacatggaacgcaccaagatgacgctcaaggatctcgctgtctccttccacttcccgaagttctccacctcgcgtgacttctacaaggcgttcggctgccgagtgtgcatgttgctcagctaccagatgatctccgtgtaccaactctacatcgtcgaggattacgtgcaccagaccaagaccgaggctgccggcaccatcgccaccatgtccatcatcaccatggtcgtttccctgaccgcttcgctgatctccggcccgatctccgacaagatgcacacgcacaaggtaccagtcatcatcgcctcgctgctgttcgcgattggcaccgcgatgccgtggatcatgccgagtgtcacgggcatgtacctgtacgcgggcatcgccggcttcggctatggcgtgtactcggccatcgaccaggcactcaacgtcgacgtgttgccgaacaaggaagaggccgacaaggacctcggcatcctcagcttggccaccacgctcggccaagcagtcggtcccaccatcacctccgtggtcaagaccacgaccggcacctacacgccggcgttcgccatctccatcgtcatggccgtgtgcgctgccgtgttcgtgctgcgtatccagaaggtgaagtagccgctgcgagtgcctatctccgtttcaaggggctgattttgactttgcggaacatctacttccgtttcaaggggctgatgccaaagtagccactggttaaaaacggcggaatagtgatagaacaatgccatttctatctgcgttccgccagttgaacagccccttgaaacggaagtagacctccggcaaacgccaaatcagccccttgaagctgattttgactcagcatcatgcagcgcagctatatcctcagtgcgggtatactattccgggccgtcacgacgacgcctatggaacgcacgcatggcaaagagagaaacatgagtcagcccgacaccgacacggcggcacagtcgccgtcctcgcagcaggaaccgcagattcagacggatggccgtcaaaaccagccggaacaggtgaaccaaccagcgca

SEQ ID NO: 1573 - DNA, 29319 bp, Unknown
  R221_24m  MAG No. k141_29303
gcaggcccgcggctacgagtccggcgaagtgggccatgtcgacccagaatttggcgccgacctcgtcggcgatttccttcatggccttgaagtcctcgatgcgcgggtaggcggaccagccgccgatgatcatggccgggtgggtttcgagcgcgcgctggcggatgatttccggatcgatgcggaaggtcacggggttcacgccgtacgcctcggcgtggtagaaacggccagagaagttgattttcatgccgtgggtcaggtggccgccgtggtcgagggccaggccgagcacggtgtcgccgggcttgacgagcgcctggtagacggcggcgttggcctgggcgccggagtgcggctggacgttggcgtattcggcgccgaacagggccttggcgcgttcgcgggcgatggtttcgacttggtccacgtattcgcagccgccatagtagcggcggccggggtagccttcggcgtatttgttggtcagcacggagccctggcattgcagtaccgctcgcggcacgaagttctcagaggcgatcatctcaaggccattgcgctggcggcccagttcgaagtccagcagttcggcgatctcaggatcggtttcgcagatcggcgcgttgaaagcatcggtcgctttctgcgcaaggggtgaagcggtcatgggtgctcctttggtatgggcgacaattgattcgccgttgccgccttactgtatggccggtttgtagccggcctgtttcatgatatggccggtccccgttcgatggcaatggtgattttcgccggtttgaccggtcggctacgcgagacggacggcccttctgcccacggcccacgctaaactggtgtggattcatcatccctttcaggcagaaggattcatcgtgacaaccaccttccattccacccgtagcaccaccgattcgctgaccgccaagcaggcgattcgtaagggcatcgccgatgacggcggcctgttcgtttcggacgcgttgggcaagaccaaggtggacgtggcctccctgccgggcaagtcgtaccagcagatcgccgccgaggtgctgggcgcgctgctgccggacttcacggccgaggagctgggccagtgcatcgccgacgcctacggcgaacagtggtccgatgagcgcatcaccccactcaagcccctgggtgacgattacgtgctcgaactgttcaacggtccgacttccgcgttcaaggacgtggcgctgcagatcctgccgcgcttcatggcgcacaccacgccggccgatggcgacgcggacgagaagatcatgatcctcaccgccacctccggcgacaccggcaaggccgcgctggccggcttcgcggacgccccgggcaccgcgatcaccgtcttctacccggaaggcaaggtctcccaggtccaggaactgcagatgaccacgcaggccggctccaacgtgcaggtggccgccgtggaaggcaacttcgacgacgcccagtccgcggtcaagcgcatcttcggcgaccgtgccctggccgagcgtctcgccggcaattcgcacgtggtgctttcctccgccaactccatcaacgtgggccgtctggtgccgcaggtcgtctactacttctccgcttacgcccagctgctcgccgaccaggtgatcaacgtcggcgatgaggtcgagttcgtggtcccgaccggcaacttcggcgatatcctcgccggctactatgccaagctgctcggtctgccggtcaagcacctcgtggtggcttccgacaagaacaacgtgctgttcgacttcctgaccaccggtacctacaaccgccagcgcccgttcttccagaccatctccccctcgatggacatcctcatctcctccaacctggagcgcatgctgtactacttgtccgagggcgacacccgtctgatctccatgctgatgaacgacctcaacaagtggggcacgtacgagatcccggaagaactgctggccaagattcgtcagatcttcggcaccggttgggccgatgaggatcaggtacgcgagtccatcaagcactgctgggacgagaaccactacgtgatcgacccgcacaccgcctgcggctactacctgcttgagcagatgccgcgagacccgctgaccccgcgcgtgctgctctccaccgccagcccctacaagttcccgcgcgtggtgaacgaggcattgggcttcgacgccaccggcaccgacttcgagtgcatggatgtgctggcccacgagaccggcaccaccgccccggccgccctgcgtggtcttgagaccgccgacgtgcggttcaaggacgtcgtggccatcgacggcatggaggactacgtggagaaggccgcccaggcgctgtaaaacataccagcacattggctcccctcagagcggggagccattttttacatcagaattgcgtttacatcagtatcgcggcgactggcagtcctatggcgattgccaacagcacgatagtgccgatgatcacgctggggcgtgcgaggttgacggtccagccgacgccgaaacgtttggggatcatgatggcaggatcgtcacggttgatgtagatgatgccgccaatccagtgcaggtcatcgtcatacggcatggcattatcgtccgaaatgtcaccgccgtcactgtgccgaacaccggcatagacgcgcgccccgttctgcccgtaatacacgccgatcatcagcgcgccgaccagagccgccacggcgatgaacatgccgatgatgccgattagattgatatccagcacgccaatggtgacaagctgaacgcctaggcccaatccaccggctgccagcagtccgatgaccagcacgtagatgctccagacccgcgagaacacaccataggcatacccggtggcggcggggtggtcgggatcaatcgggtgcttggcgtagatgatcgcggcatggctggccaccatcaccgctgccagcaccacctgcgcgagcacggcgtaccaaatcaccatcggactcttctcggcccaaccgttcacattgccggcgatatccgcatgaatcggcacccgctccggcatccggtcatagcccagcaacccgacagcaatggtgacagcgagacaaacgacttgcagcaattcccacttcaagctcatcgggtcgggattgtcccgctcacctatcaatgctgcacggcgggcactggacgcctcccatccctgatcgactttgatggatagtactttgcggcgaaacatctgctgcagcacgaaaccacatatcgcaatcgccaccgctgcgatggacacagtccagaacgccgcgtcgactccgcagagttgccaaacggccagcgagaccagtatggcgcatacgccaagcgccaccgtaattcccgaaaacgcgactttaaatccgcgaatgcgcgtattgacatgggcggcggccggcactgtgacaccgaacacctcatgccggtcggtaacccatggaacccctgccaggccggcggtcactatcaccggcaacagtaaaaacgcacacaacgcgatgttcatcgacacgactgtattattcatcgttatctcccctgatttccttttgttgcaccgtcagtaacgctctgcgaggagcgcacgccgtatgcccgttcgcattgccgtttggtggcatcgaggaatgcggccgaatcaccgccgcgcgccctgtaggccaaggcaaggcgatagagttcctcgcccatccgctcatcctgtgcttcggcagttcggttcggtgcttctcccccgccgtcatgctcggcgacggttgcaccggcaccacgacgcataacgatgcatccctcgtcacgcaacagcgcataggccttgttcaccgtgtgcaggttgatgccaaggtccacggccagcgagcgcacggacggtaacgagtcacctggcgacagctcatcgcccgcgatggctgcgatgagctgcctgtgcagctgctcgtaaatcggcacgtcactgcgctgatcgatttccacaatcacggtcaattccacccctctcaagaactgttctatttgttctacatcaaatataacagttttgccgtatgagtcaagatatgcgaatctcggttgaacatccggcaatgggccaacggcgtgttgcttgaattttctaggaaggcgggaatcgccatgctgccggcgaatgggaaaatccatgtggcttgtcagattctgttcctgcaactgaatagtcccatgagggagtagacagcattgcggcgaagggctcggcccaaaccgcaataaagcgtgccgagcgccaaagccgccaacaccggtatgacgccgctgcaggagaagctcgcgaagctggacgaacttcatgggcggcaccgccgaacagcagtcgaccattctgttcacgctgttcgtagtattccagctgttcaacgccttcaacagccgcgagctgggcaacgccagcctgttcgccaatctgctacgcaataaggtgatgatcggcgtgttcgcgctgatgttcgcacttcaggtgctggtggtgcagttcggcggagcgatgttccgcaccgtgccgctgccgatcgacatgtggctgaagatcatcgcggtcggacagatgcgcggttagagttctttggctcggtagatgcggatggctataagcatggagccaaaatatgcgagcagacacaacacggcgagaacaagcgccgtatgccaccagatcgtcaggaaatcggcaatattcagcaatagccattgccagtcaacaggcaatcgggccagcagcgcaatgactgcatacaagccgacaatgaccgcgccagaggccatcatcatcttgcgggaggtgaaccggtatgcacaggccagcagcaccgacccaagaatgatagccaaagcgaagatggaagcacctgctgccaaggtaccaatccaccccatatctgctatatcgccaaagacaatgaagacgccgccgcatatcaccacgtccaaagcccagagcaggccaaccaccaacagaaaaaggtaccgacctacaacttgtgcagtgcgtgaaacaggaatcagccctcgcatggcactgtgccctgcagattcctcggatgacgcaggccccaatgcactcatacatgccatcaccgatgccagacctccgagtccgcccatcagaccactggcaacgtgttcatcgacgtgggtcgatatcatcaccagcgataccacgatagacagcaccgggaaaaccagcagaaataccatattcgccacgctgaacagacccgtcccgacacaatcgaatcggcattgctttactacggatttccagctcatcgtcaccattcccttgaagcaaatatgcgagaggcaattacatacgagactccatatgccacaaccgtcgttgccaataccgcaataaccagccacaatcgttgcgcgatgatggcattcgcggcatgggccaatcctttggtcaccgaagcaggcaaaatagatagcagtatgaatccagccaatacaacgacataaatcaccatcatcgtgacttgaagaccgcctagtttggtccacagataacccgtgggcacgataagcgcgaccatcagcgcggtgcagaaacctcccaacggagccgcccacagattgcccgcgaatgaccaatccggattgaccagcacttgcaacccgtcaatcagaacaatcatcgctatcgacaatacggaaatcaccaatccaaccacatatcgcgcggccacctgactcttcctcgaagccggaataatgccacgaagtcgatatccgttctgtaagtcagcaaccgccatggttagcacccacatggcgcaggtgaataccgtcatgatgacacccatgcgatagccgaagccatcaccataagcttcaccttgaaagatgacggagaacaacggtgccaacaacaacgagaacacagtccgttcgccgacgcacaggtaggccatatcgacgcgcaatgcagtggccaatgcatgttgccgagaccgcgacaccctcagtattgcctccatggccgctcacctcccgctcaagtcacgattggaatcatgggcattggtcagtcgaatgatgtcatcaatggaagccgattcaacgacaagccccgaaaccaccgacgcaacagcatcaagcctgtctgaccggaccagcgcatcgaatccggtggcatacgtatgtgagcccagcaccacgtccgcaggcagttgtgccagttcgtctggaccgcccttaatcaggcggaacgattcctcaaactcgtctttcggaccggtgtagtagagacggccatcggtgatgtaggtaatgaagtcagcagcacgttcgaggtcggcagtgatatgggtgctgaacagtaccgaatgttcgccatcctcaatgtaggcatgcaggatatccatgagttcgtcgcgggcaagcacatcgagtccgctggtcggctcgtcgagaatcagcagcttggcatcatgactcaatgcgatggccagcatcagcttcatctgcatgccgcgggaaagatccttgatatgtttcttgccgttctgtgcgtcaccaagaccgaaagtatccagatacttgcgatagcatccaccgtcccatgatggatacagtggcgcgacgatacgttcaatgttcttgacttgccactgttcatgcatgtagctgaagtcgaacaccacgccgagttgttctttgacgggctcctcgttggcgatgttgtcgaggccgagtacgtgaatcgaaccggcgtcgcggtggatcatgttgaggatgagtttgatgagggtggatttgccggcgccgttcgggccgatcagtcccatgatgtagcccttgggcaggtcgaaggtcacgtcgtccagcgtgaagccggaatcatagtgtttggtgacgtcggtgacctgcaacgccatcgcgtcggattcggatatggcggtcatggccatggtcctttcttgaggttatttcttgcggtattcctcttcgagcatgcggtccaatgcgtccagcggaatgccggcggctttggcgccccggcttgcctcggccaggctttcgcgaatctgggttttgagctgacgttgcatcagttcgttgcccttgtccatcacgaaagtgcctttgccttggatgttctgcaccacgccctcatcggccagttcgttgtacgccctggtgacggtgagtacggagatgcgcagctccttggcgagtttcctcaaggaaggcagggcctcgcccgccttcaactcgccactgagcaccgccgaatggatttgggttttgatttgctcgtagatgggttcaccggacacggatgagatgatcagtttcacctatgcccctttcgattgtggttgactagcaccccagctgtttagctgttatacaacacagtataactgttctgcttaactgtcaaggtgtgttacataacagctaaacagtgaacaaacaccttgccaacatacagtgtcgaaacatgggccgcgcctacaatggcctcgggaaggggcacctatgccaaacaacgccgttacgccgacagccccgccagcgggggtgtaatttttttatcacagcacgcgcggagcgtcgtggaagtcgaagaggacgccgtcggccaggtggcagatttcgggccaatcggaggcggaggagtcgtcgtgcatggcccagaccttcatgccgaccgatttggccgacttcatgccgaccagcaggtcttcgaacaccgtgcagtcgaccggcgcggcgcctaggcgcttggcggcaagcaggtagacgtcgggctggtccttgccgacgtcgttcgcgtcatcgacggagacgatatcgttgaacagatcgaacatgccgacgtggcgtagcgccggctcacgcagatgcgggggcagcgaggtggcgacacccagtttgacaccggaggctttcagatcgcgcagatagtcaagcgcgccgggtttggcttcgaccgtggtggaataggcgacgctggccatgtcgtcccattcctgcatgagctcttcgggcgtgtctgtaaggccgaagcgtgcgatggtgtattcggcgatctggcggaattgcatggcggagactttggtcatgtagtcgggcggcacttcgattccgcgcttgttcaggaagtcgatgtcgacttggtcccagactcccatggagtctaggagggtgccatcgaggtcgaatatggcggctttggtcataggacactttccttcaacagttctcgggcgtggtctagggaggcttcggattcgctgccggagagcatgcgggcgatttcgtggacgcgggtttcgccgttgacttcggcgatggtggtgaccacgcccaaatcgtcgtcatcggcatccggcggctccttggtgaccacgaactgcgcgtccgcccacgaggcgacctgcgccaagtgggtgacgacgatgacctgcgcgctgcgggccagccgtgccagacgtttgcccagttcgaccgcggccttgccacccacgccggcgtcaacctcgtcgaagatgaaggtctggtcggcaccgccgcgcgtgtcggcggccaccagctccaaggccaacatcagtcggctcagttcaccgcccgaagcgcttttgcccatcggcaactgcggcgacccctcgaacggcgtaaacaggaacgcgatatcgtcgcgaccatacgggccgagcggatcatcggccttgtctcgcggcgtgacgcgcacttccaaggaggcgcccagcatggcgagcgagccgagttcttcagtgacgcgcgcgcccaagtcggcagcggcagccacgcgcgcggcgctcagcacgtcggcggcggcgagggccgcatcgtacagcgtctgccgttcggattcgagttcggcgaccttttccggcgaggcgtccagatcctccaaatcgaacgccgccttgtcccgccaagcgagcacgtcggccaaggtggggccccaccgacgggtgaggtcgccaagctcgtggatacggccgttgatctggtccagatcctccacgctgccttcgtcgcccagctcctggctcagggcgaacaccacgtcgcccaaatcggcattgatggattcaagccgatcggcctgctcggcgaacgtgccgccgacgcgaatcgcgcgcaacgaggtcaccgcatgattgatgagttccacggccgaagcgccgtcggcggcgtccacatccacctgcgaggcatccagcgcgcccagcgccgaacccacgccttgggcgatgtcagccgcgttttcgatgcgttcgcggcgcgccttcagctcctcgtcctcccccggctgcgggtcggttcggttgatgcggtcgatggattcgcgcaggtagtcggcctgttggcgggcagaggattcctgcgagcgcaggcgttccagccgctcatccatggcggccagcgcatcccacgccttgcggtaggcggccagttcggcttcgtctccggccacccggtccagaaactcgcgttgccgtgcggcggccgcgattttcagctgatcggtctggccatgaatgatgaccagttcgccggcgatggcccccagcaccgaacgcggtacggacttgccgccgagcacggcccgcgaacgtccggaagcgcgtacggtgcgggaaaggaacagttcgccgtcttcggggtcgacgcccgcgtcgtgggctttggccacggccacggcagcaccggtgagcccgctgtcagaatcgtcagaaccggcatcgtcaccggcatcgttggtgtcgccggaatgttcagatacgacggcatcatccgagagcgcgaaaatcgcctgggcccaagcctcgtccgccccggccgagacgcgcgaggattcggcggccccaccggagaccagtcggatcgcggagagcagcatggatttgccggcgccggtctcaccggtgatggcggtcatgcctgcggccggcgcaatggcggcttctcgaatcggccccagattgcggatatcgagttcttcgagcatcaggctcctgccttgccgtcgcgttcgcccggcttgtcgggctcggtaccagcgacaccagcgtcaccggcaacgccagccgcatacacggccgccgggaacgtgtgcccgtgatgcagcggctggctcgaggcctcgttgcgcgcgtgctcgcgccaaccgaccacgggcagatcgaacttggagaccagacggttggtgaacggcacgccggagagtcgggcgaggcgcaaggtatcgcgcgattcgcgcaccatgacgcgcgtaccctgcggcagggcgcgctgacggcgtccatcgcagcaaatccagccttcggacatggaatcgtccagaatatcgatggtgaaggtcgagccggagccgatgatcagcggcctggcgaacagggcatgcgcggccaacggaatcaactgcagggccttgacgttcggccacatgaccggaccgcccgcggagaaggcgtaggcggtggaaccggtgggcgtggagacgatgacgccgtccgcgccgaacgagttcatctccacatcgtccacgcggatggacagttcgaccatcttgccccggtcggcgcgttccagcgtgatgtcgttcagcgcccaatcctcgatgggcttggtggcatcgggcagccagacgtccacatgggcgatcatgcgttcgtcgatcgaatagtcgtgggtggcgacccggcggatcgcctcgtcgatctggaagctttcgaattcggccaggaagccgacatgccccatgttcacgccgagaatcggcacctgggtgcagtggacgagttcggcggcgcgcagtatcgtgccgtcgccgcccaggaccacgacgatttcggtgtcgtccgacacgcacggcggctgcacgccgaaatcgggggcctcggtgttgtcgatgatggtgacttcgaaaccggccactcgcagctggctcaccgcctcggccactacggttccggtctgcctgagcctggtatgcgtcaccaccaccgcgttgcgcttggccatggcatcctcctgtcgattcggtcgcactgctcattattctagccgcagacaccgtcatcactcgtacaggtgttcgaaaaatgccgcttcgtggcgcgtcgccgacaacgttccgcagagtcgattaacgtaaggcttcggcatacaatggcatacagccgcgcgatcaccgtacgcgtgccgtgcgcagcgcgatagcatgccgtatgaccatacagcagtatcagttgaggagcttgaggacccatggccaatgacttcgacgaatcctccgccaatgaggaggcctcgaagggcctgtcatggtggtattcggccgatgtactgagccgagacaaaagcgataaaaccgccaagcgcattcgccgcatcagcatcaccgaccgtctgctcaggcacccgggccgtctgtccatggtgtatttcggcgcactgatcatcatcgtcaccggcttgctgctgctgccgatctccacatcggacatcatcttcaccaacttcccggtcgcgttcttcaccgccgtctcggccctgtccacctgcggcattccggtggtgaacaccggcgaatactggtcgacgttcggccaagttgtcatcctattctccatccagttcggcggcctgggcgtcatgaccttcgcctcgatggtggctcttggcgcttcccgcagactcaaggtctcccagcgcatgcttaccgcgaacgaactgggcaccacgaagctttccgaggtcaaaggcgtactcaccgtggtattgggcacctccatcatcgccgaggtgcttaccttcgtgctgctgctgcccgacctgttccgcgtgaaccacggcaatatgggacgtacattgtggcaggcgctgttctacgcagtatcggcctacaacaacaccggtttcacgcctgacgccaccggcctgcatgtgaaccgttggggcgtgggactgccgattctcatcagcgcattcataggaacgctcggcttccccgtggtgctgaatctggtgcagtgcgcacgccgacatctcagcccgaaacgttggacgttgcacaccaaactcactttggtgaccaccgctgtgctggtggccacctcactggcttggttcctgctggtcgagtggggcaataccggcctgttccccgcagacggtcccggcatgaagatgcgccgtgcgatgagcgccgccgtcatgccccgctccgccggtttcgatatttcctgggtgcccgaagtcacgaatgagaccaaggtgttcatgagcatactcatgttcatcggcgcaggctcctcatccaccgccggcggcatccgtgtcaccacgttcgcggtgattctcttgatttgccgcgccgcattcaccggccatcgcgatgtcaccgtgttccgccgccgtatcccccgccgcatccagatgaccgccgtgtccgtgaccacggcctgctttgcgctggttatggtcggtgcgatgatgctgatgttcaccaccggctgcgcgttcgtggacgccgtgttcgaggcctgctcggccttctcgttgggcggttattcggtgggcgtggcaagcgccggcaatccggccagcctgtttattctgtccgccgagatgattgtcggacgacttggcccgttgaccatcgcctactccatcagcagaccgatggctcccgaacctattcgttatccgcaggaaaacattatcgttggctgatcggccattcaatcggcacacagaaatccggcatagagaggaccatcatcatggcagcaaaaccgagcggcaacaaaagcgtgctggtcatcggcctaggccgtttcggcgggtccgtggccgccaccctcgaccagatgggtcaggatgtgctcgccgtggataagaacccggagcttgtggcccgttggtccgcgcatctgcccaccattcaggccgacatgaccgatgtgctggccatcgagcagatcgacgcctcccagttcgacacggccgtcgtggccatcggcgacagcatcgaggcttcggtgatcatcaccggcaacctgctggatgccggcgtttccgatctgtgggccaagtccgtgtcccaggagcatgcgcgcattctgcagcgcatcggcgcccgtcacatcatcaatgcggagaccgatgccggcaagcgcgtgggtcatctggtggccggcaattatctggattacatcgaaatcgacggcccgtacaccgtcgtcaagatccacacgcccctatacgcggtgggtcgcagcatcgaggacgtgcaggtgcacgacaaatacggcgtgaccgtggtgggcctcaaggccccaggcaaggagttccagtacggctccaaggaactggtcatgcatcgcaacgacgaactcatcctcatgggcaagcaggatcagatcgaccacttcatccaaggctaaccccccctaactgcgctcgctataccccctatctgctcacatcgtgaccgatataacccccctcaacatggatgcgctcattattggggcaataagccataaagctgtacgtccatattgagggggctttatcatcatgggcaagcatacgcagaattgcacgttgataggcaaaggagtctacggcaccataggagtggaccaacgttcccgtcttgccgatggcgcgcattttcacaccatgattgtgaccagcaccctcgaggcctcagttatagaaggggacaaactggtcatcaagagtggcattgtgcggtgtgatggtgatattcgcgtatccagcatcagcggcagcggcgacatcgaagtcggcggcgacattatttgcgatgaaataacctttaccggcaaactgcgatgcaacagcgatatcgtttgttccggaaatctgtccgtcaatggctccctaggcacccgtcatattagcggtcagacagtccgcttgaacggcgtgttgaagggtcatgacgtcaacagcagggctctggaagttcatccactgcgcagtacgatgttttctcgttttgatatggatgggtatgaggatggcagcatggttcgccatatcacagccgtcacggttgaagccaaccatctgcaatgccggactttgacggcggactccgccatgctacgcaacggcagtgcggtggaaagcgccacgtgtgccagcgcaataggcatcgaccgtacctccagcgtgctgctggtgaacggagactgccgacgcattcatctcaagacagcgtaaagcaggtattcctcattaccgtgggtgccgatgatgggactatcggcagtggccaccacgtcaagtccgtgctgttcagcacaggcgaccacgtcgtgcaatgcccgctcccgcaatgccggatcttccacgatgccgtttttgccgagtcctgcccgcccgacctcgaactgcggtttgaccagtaacacaatctgcgcaccgggagccgcgatgcgcgcgattaccggaatcacataggtcagggaaataaaggagacgtcggagacgatcatcgccggccggtaaggcaggtcgtcggcctctacttcgcgaatgttgacgccgctcatttcgatgacgtgctcgtcattggcgatgcgcgggtcgagctggccgtggccgacgtcgagcgccacgactttggccgctcccccacgcaacagtacgtcggtgaagccaccggtggaggcaccgatgtccagacattccaagccttccggcccggtaaggccattgccggcaaaggtctcgaacgcgcccaagagtttgtaagcgcctcgggagacgtagtcgtcgcccttatccacggcgagttcgctgtgcccggctttgaccatgaacgatggcttggtgatggtctcgccgtccacgcgcacatgcccggctttgatgagtcgctgcgctttggcccgcgattcgaccagtcccgaagccacgagcatcatgtcgaggcgatcaagtggggtcgcgggatcgatatgttgctcggtcatataccttcctttcgacccaccatccaccaacggggtggctcggcatggacccaccatccagcacttcacgtcatcttccgctggcgggagaatgaatctcctctgctagctgcggctgttatcaagctcgtgttgtaacgattccagcacgttgcgataggtctcaagcttgcggtcgttgtcttgttcatcaatatccgcaagttcggggtatcgctcggtgaccggcgcgtgttcgctatccgtaggcataggactatgcctcgatggcgaacaccggtaccgtggcctcgctgagctgtgcgccttggtcggcggcttcccatgcggcgcatacggcggcacgcaggccgtccatactggtggggtcgctgacgtgtacctggccgttttcaaaccaagcgctagccttgcggcattcccaagtaccgctctcgtcgcggaccggctccggttgggcttcgccgagttcacgcagatcaagggcgatgaatgtgggcctcaggtgtgccggagccagcatcagttcggtcgggttggtgacaccggtcagcaccgccagcgaatcatagtcaccgcggttaccggcctcgatatcagtgtcgagtcggtcgccaatggcgatggacgcctccttgggcaccagatcgtggccttcggcggcgttcagttcgcgggcctcatcgtacatgtacgcttccggcttgccagcggaggcgaccggttcgacgccagtggccgtgatcacggcgcgaatcatcgatccgcaaccgggggcgatgcccagttcacgaggaatcgtcaggtcgcggttggtcacgaaatacgtggctccggcctcgaccgcgaacgcggcatcggccatcatctgccaagtcatatccggataccagccctgaataacggcctgcgggcggtcctgaggaccgtccacgatggtcaggccgttgcgggtaacctcatcgcgcaaatgctcggcgcccaatacctgtacgcgcgcgccggcgggcaacgccttggccaccacacgggcggccaccaccgaagaggtgatgacctgccacggctccacgtccaagccgaagcccttgagctggtcggccaccacgtgctggaagcgcgaggagttgttcgtggtgtattcgatggtcatgccggcggcttcggccgcacgaatggaatcggctgcgtattcgaccggattcttgccgcgatacaccacgccgtcgaggtccagcagcgcaagctgataggcctcggcgagcgggcgatcggtgcctttgaggaaacgggtcattacgccgctcactcctcggtttcggtctcggtctcgtcggactcagccggttcaacggcaccgtcagcggactcggaagactcctcggcttcagattcctcagattcttccgatgcatcctcggactcagcattttcgacatcggcctcatcagactcggcatcgccgtcttcagcctcgtcgtcctcatcgccgtattcctgctccggatccggggcgtactgcgcctcgtccggatcgatgccgagcttctcgagcacgtcggagtcgtcggtgatgtcttcgagatcgtggtcaatcaccacgtcgtcgctgttttcgtcaatctcctcgtcggcatactgatcctcaagacggtccagcaggtcattaagctgctcggcttccttgctgcggccggcctcttcaaggaagtactgctcggcctgcacggcacgcatacggtactcacccggaagaccctgagagcggccgacggtatgaaccacttcaatggccttgtcccacatctccaaatcgccaagggcaccggcatacaccaggaacatctcgaccttgggagcgccatgcagctgcttgccctcatcggacagcgccagttccacggccttcttcggttcaccgacaccacgctcgcagtcagcgatgaacggcaggtagtcgaggaagccgttcatacggtaggcggtacggaactcacgcagggacagcttgtagtcgccctgacggtaggccacgaacgcgagcgtctcgcgggcaaagtcgatgcgggaggcctgacgggccacccacttggcgtgctccaaggcaagttcgggatcgctctcctccagcgcgaaagcggcgaggatgtgcagaccgatgttctccgcatgctccttggacaggccgcgcagacgttcgcgctcatccttggacagcatcgaccattccatgcccttgggcatcttgggctcgtcgggacgacggtcggtgtacgggttctgcgaggggaagctcatcgtgccgtcggagttacggcgcggacgcctcatgtattcagagcgcttctcctcacggtactggcgcttctcttcctgcgaaaactcgcggaattcgccgtcacgacggttgttgtcgcggcggtcggccctgcggaagttgcggcgatcgccatcacgatggaaatcacggcgatcgttatcccttcggtcatcgcggcggaagtcacgacgatcattgtcacgacggaagtcacgacgctcaccatcgcggtggaagtcacggcgatcatcgcgacggaaatcacgacgatcgttgtcacggtgctggtagcgcgggttctcgccgttctcgccttcgtgggaacggtagccgccttcgcggcgcggcttgaaaccttcaccgtcacggcgcggaccactgccgcggtaaccacccttgtggaagccaccggacttgccgtacgacttgcggtagccgccgtggccctcgccatcaccatcacggcgcggcgcgtaaccctcaccatcctcacggcggcgcggcttgaagccctcgccatcgcggtcgcggtgcggacggaagccgtcgccatcgcggcgcggaccgttgccgcgatagccgcccttgccaccgaaaccagagcgtccgcccttgtggaagtcgccacccttgccgtacgacttgcggtagccgccgtggccctcaccgtcaccatcacggcgcggcgcgtagccttcgccatcctcacgacggcgcggcttgaaaccttcaccgtcatgacgcggcttgaaaccgcccttgccgcgcggcttgaaacccttgccgccgcggttgcccggtcggcgatcgccataccccttatggccgccgccgtaggacttgccggaacgctcgttaccttctgccattacttgttttccttaattcgttgttgattaacggttttccacggcgccgagcgccttcttgccacgacggatgagcgcgaagcggcctgccaggaagtcggcttcggccagcacctgctcctcatcctcgatacggttgttgttgagatacacgccaccggacttgatggcgcggcgtgcctcggaagcggacttgaacagtccggcagcctgggcggcgtcgattacgcgatcgcccggcttggagacggggaagacgtgctcgccgttctcgtcaaccaccttgaagccgtcgagcacggattccagcgtttcctcgtcgatgtcttcgaggttgccaccgcgtccgaacagcgcaccggaagcgtcgatggcggcctgggtagcggcctcgccatgcacgaagctggtgacctcccaggcgagggtcttctgggcctcgcgcttgccggggttggtcttggattcctcgaccagtcgttcgatttcggccttgggcaggaaggtgaacgccttcagcaggctttccatctccacgtccgggcggttgatccagaactggtagaacttgtacgggctgagcatcgtggcgtcgagccagacggcgttgccctcggacttgccgaacttcttgccggaagcatcagtgatgatcgggctggtgaacacgttgacgtccacaccgcgcaccttgtggatcaggtccaggccggaggtgaggttgccccactggtcggagccgccgagttccagcgtgcagtggtattcgtcaaacaggtggaggaagtcgttgccctgcagcacctggtagctgaactcggtgaaggagatgccttcctcagagttcaggcggcgggcgaccgtgtccttggcgagcatggtgcccagacggaagttcttgccgacgtcacgcaggaagtcgatgacggtcatcgaggcggtccaatcgtaattggacacgaaacgtacggcgttcgcgccttcggtgtccagaatgccgccgatctggttcttcagacgatcggcccagccggccaccacgtccttcgggttgagcgtgcgttcgccggactggcgcgggtcgccgatgagtccggtggcgccgccgaccagagcaatcggatgatggcccgcaagctgcaggtgacgcatgttgatgagctgcacgaggttgccgatatgcaacgatgcagcggtggggtcgaagccgcaataataggtgatgggctcgccgttcagtgcttctgcgagtcgatcccggtccgtggactgggaaatcaacccgcgccattccagttcctcaagcagggtgttgaaacccgcttccttgaagtcggtgacgtgagccatagcttgtcgcttctccctatcgaattgtgaatgagactgcccaattgggcacagtcaagtttcgcagaacatggcgacagtgccgaacaccagccgagccgcgcgattcagtaaaacgccttattctagcggcgcgggcccataagttcgcgcaaagagtcgatgatgtcctgacgatccggcacctggaacttcgggaaggacttgagcatacgcttctgctgtgcgttgatgacgccattgatggcccagcgcagacgctcaaccgtatcctgcgaaagctcacgcatcctgtcggataccgcactggagccccgctgccacgtgccaccggcgcgtgccgccacatcctgcaccacctgagagacggaatcgagcacctgctcgaatccgagcatgcccgcaaccgtgaccgccaagtcgatgatggtgatcagagccagtaccgtgaccagcgtatgcagcatcggcagcggaatcatatccgtgacccgctcgacatatggctgcgaaccaagtaccacgcccacgccgccgagaccgaaaatcaacgcgcccagcaggcagacgcggccttggaggttgaagcggaaattcgagtaatcccaccagcgggcgtggaacagctgctccatgacccacgaggttgtgtattcgagtatcgtggcgcccaccatcgaaatcaggaagatgatgatcgggttatgtacgttgccgagaatggcgacgccgagtatcgcgccggtgccgtagatcgggcacagcgggccgttgaggaaccctcggttgaccaagcggtgctgttggcaggagacgagaatggactcgtacgtccagccgacgaaactgtagaacagaaaccagaggaaataatgttcgagtgtgatgatcatcgacgggcttcgatctcggcgtagggcttcgcggcgggcaacgcgcgcttgttgaaccggtcgaacgagaaggtctcggcggtggcggagcatttgtccgccaaggtgaccagatagccttcgatatagcgcggcggcaccagggtcatcgggaacatgtggttctcgatgctgttgcgttcgatatcgttgagcttgaagtccttcagggcattgaccagggcggcgtggccatgggtgaagccatgccactggtgttcgccgttatcccagtcgtgccagtcgtacaggaagtaatcgtgcaggagggccgcgcgaatcagggatttgaggtcgacgcggtaccacaggtgcgcgcggtcggccatccacacagccaggcaggcgacacgcacggaatgttcgaacgtggtgacgttgccgtgctggtagcagcagcgttcgatctgcatgtggcgatgctcgatgacctcacggccgtgcttggcgaccaggcgttgaatctgcgttcgggtgagcagatgtcccacggtttcgaccctccgttcgggttggttcagtgcaatcccttgttgtgaattacgattacccgacgatattcaagaatccatcgagtaataccgtgaccgattgtagggcacacgtatgtccgtgcacactcatccaaaagaacgacaacgggaaccgttaatcgtggtgggtttcaagatagtcgagataaccctgaaaaccgccatcgaggcttgctacatcgtaaccgcgatcggcaaggatttcagctacttcctcgctccaccatccttgagcacaatagactacgacagttcgatctgtgggcacggttttgagcacatgggccagagggtcgagtggtgcattgatggcaccttcgaccgggtgggcggcgaagtcggctggttccctcaagtcgagcagcgtgaccgtattcgggtcgagcttggcaaattccgccggcgtgatgcggcggtacgatgcttcactgctctcatcgtcatcgaccgcattacgcaaagcaataggcatgttcttcccctctcgttccgatcttggctcccctcaaggaggggtgccacatagctctaaatcgcgcaggccggctgaatatagttggccggatcaatagcagtaatggtcggctgctcaccgcacaccgggcagtcgggcacatggttcggcaacggcacacggcggatgttcatggtcagggcatccacagtgagcatacgagccacgagcggctcccccacgccggcaatcagcttgacggcctcagtcgcctccagactgccgatcacaccgaccaccgcgcccagcacgccggcctccttgcaggtcggaatttcacctgcggcgggcatatcgcggaagatgcagcggtagcaggggccttcgcctgggatgacggtcatcacctggccggagaacccgaccacgcccgcatggatatacggcttgccggccagtacacatgcgtcattgatgaggaattttgcggcgaagttgtcggtggcatcgatcaccagatcgtacggttcgatgaggccggcgatgttgctggcatcgacgagctcgtagtaggtgtcgaccgtcacatctgggttgagcgcgcggatggccgtggccgcggatttcactttgggcgctccgacacgtgcagtggtatggatgatctgacgttgcagattgctcatatccaccacatcgccgtccaccagtccgatatggccgacgccggccgccgccagatacagggcggccggagagccaagcccgcccgctccgatgatgagcacgctggaggccaacaaccgcttctgccctttgacgcccagccccttcaaaatcagatggcgcgcgtaccgctccacctgttcatcagtcaatgccatgttttctccatgtttccagctcccctcagtccgctacgcggccagctcccctcagagaggggagctaataaaagtgtcagtgcaaatatcccgtagtcggactggacggcacggcctgtccctcggtcaccttgcccagaccggacagatacgccgcacgaccagcatcgatggcgtgcttgaacgcctcagccatcagcgggatattgccagcagaggcaacggccgtgtacgccatcaccgcatccgcacccatctccatggcgtcgcatgcctgactcgggcgtccgatgccggcatcgatgatgaccggcacatgcgcattggcgatgatgatctcgatgaagtcacgcatgcgcaggcccatgttggagccgatcagcgaaccgagcggcataacggcggcggcaccggcctcctccagctggcgtgcggcaatcgggtccgggaacatgtagggcatgaccacgaagccttccttggccagcatttcggtggctcggatggtttcggcgttgtccggcaggaggtacttggtctcgtgttcgatttcgaccttgacgaagtcggtgtggcacacttcgcgtgccagtcgggcgatacgcacggcttcctcggcgttgcgcgcaccggaggtgttgggcagcaacgtgatgccttcgggaatgtagtcgagcacgctgttctcggtggtctgcgcgcggcgcagtgccatggtgacgatttgcgtgcctgcatgttcgaccgtggccttgatgaggttcaggtcgtagcggccggagcccagaatgaatcgcgactggaactcgtgaccgcccagggtcagcggcttgtcttccactggcagaatcggcgcggcggtgccgaccggattggtgacggcgggctgcggcggcagcggagtcgcctcaacagatgcttcagtaaccggattaatattgctcatagcttttcctttcatccaccctgtacaaactgcacaatttccatgacgcactggtcgtcgagcatggcgtcggcacgcttatcgcgcgggataatctcaccattgagttcgatggccacacgctcagcgcggaatccgtgcgcttcgagataatcggcgacgctgaccggcgtctcgagcgtgacctgctctccgttgacctgcataatatcctttcagatagtaaaaaagggtgcacgaaacgaaccgtaccttaagtggtgcgcccattcatgaacccaatcatgcgaccgttcgaccgctgtgatgtattggctccatcacgaccgtctcacggctgaattatgcaaacggaatgaaagctgtatcggagaacccggcaaatctgcaacaacgattccttacggcggcatgacccgcgtcaagttccccggtcgaagtctggcgacttcctctcagcctcacggctcccgttcgttacgatttctcagtgtatgccgttgcagtgacaacagcaaaatagagctccctctgacgagggagctctattgggactagaacgtgccgggggctttgtaggcggagccatccgacgtggatgcggggaagagcttgagttcttcgacctcggccttggcgtcggcgatctgctcgcgcacgcgaccgtaagcggtgccgcccttgccgttgcgggagtcgaccgaaccgtggctggagagcacttcgcgtactcccggagccttgtcggccggcaggaacgcggcgaaggtctcgatgaagtcattgtcggtcagatcccacagttcctggccgcggccttcggcgagcttgacgcaggcaccagagagctcgtgcgcatggcggaacggcacaccgttcttgacaagccattcggcgatgtcggtggccagcgcgaagccggtcggggcttcctcttcaagccgctcgctgtcgaagtgcatggtcttgaccatgccggtgaaggcgggcagcagcacttcgagcgtatcgacctggtcgaacacggcctccttgtcctcctgcaggtcgcgagcgtaggcggtgggcaggcccttcagggtggccagcagaccggtcagatcgccgatgagtcggccggacttgccgcgggcgagctcggcgatatccgggttcttcttctgcggcatgatggaggagccggtggaatagccgtcgtcgagcttgacgaaggcgaactcctgggtgttccagatgatgatctcctcggacaggcgggagatgtccacgccggtcatggcggccacgaacgcgaattcggccacgagatcacgtgcggcggtgccgtcgatggagttgtcggtcacgcgggagaagccgagctcacgcgccacggcctccgggtcgaggccgagcgtgttgccggccagtgcgccggagccgtacggagaggcgttgatgcgcttgtcccagtcgatcagtcgctgcacgtcgcgaatcagcggccaagcgtgggccatgagctggtgcgcgagcagcacgggctgggcgtgctgcatgtgggtgcggcccggcatcacggtgcggccggccttttcgctctgctcgatcagggcgttgacgaggtcaagcaggagtccggcaatcgcacgggagtggcggcgcagccacatacgaatcaggcaggcgatctggtcgttgcgggagcgtccggcacgcagtttgccgccgagttcgtcgccggcaatgtcaatcagtccgcgttcgagggcggtggcctcgtcctcatcgtcttcgatgggggcgaaggagccgtcatccacatgacgctggagcgtgtcgagcgcatcctccatgcgctgcagctcgtcggcggtcaaaagtcccgcacggccgagagcacgggcgtgggcgcgggaaccggcgatgtcgtcgtcggccaagcgccagtcgaactgcgtggacttggacagtcgggccagttccggcgacggaccggacgtaaagcgaccaccccacagggccagatgttcgttgttctcagtcatgaaggctccttgaaaagtgaaaatagctgtgtttaagcgtagcaatgtgttcaaacatacagttgcccccgctggcgagggctgtcacatggagtgtgactgaggacagtcctttcaaagaccactcccagtcagctatgccgacagcctcacagcgggggcgactgagtaagaatcactcgacggtgttcttcgggacctcgatgccgttgccgaacttgacgtcgcgggctgcggccacgcgggacggcaggccatagatgtcgatgaagccgttggaggacctctggtcgaaggtatcgccggaatcgtaggtggcgagcttgtagtcgtacagcgaggagtcggaacgacggccggtcacgacggcgcgaccgccatgcaggaccatgcgaatctcaccggacacgtacttctgggtgtcctcgatgaacgcgttgagcgactgggttgccggggagaaccactgcgcatcgtagaccagctcgccccagcgcttgtcgatgtcgcgcttgatgcggtgctgttcgcgttcgaggcagcagttttcgagttcctggtgagcggtgatcagagccacggcacccggagcctcgtacagctcgcgggacttgatgccgaccaggcggtcctcgatgaggtcgatgcggccgatgccctgggctccggcgcggcggttcatctcttcgatggcctgcagcggggtgacgtcacgtccgtcgatcttgaccggcacgccttccttgaactcgatgacgacttcatcttcgaccggcgggaaggccgggtcgtcggtgtaggagtagcagtccttggtcgggccgttccacggatcctcaaggaagccggtctcaatggcgcggccccatacgttctggtcgatggagtacggggacttctcggtctgggtgatcggcagcttgtgctccttggcgaacgcgatctcgacgtcgcgggtcagggacaggtcgcgaatcgggctgatggccttcagcgtcgggtcgatggaggcgatggagacctcgaaacgaacctgatcgttacccttgccggtgcaaccgtgggagatggtgtcggcgccgaactggtgggcggcgcgcacgaggtgcttggagatcagcggacgggagatggcggagaccagcggatagacgccttcgtacatggcgttggccttgagggccttcatgcaatattcgttggcgaactcgtcacgggcgtcgaccacgtaggattcgacggctccgcaggcgagggcgcgctgcttgatggtctcgaggctttcgccgccctggccgacgtcgagggacacggccacgacgtccttgccggtgcgctccttcaggtacgagatggcgacggaggtgtcaagaccgccggagtaggccagaacaatgcgcttgttatctgccattggttccctttcattcaaggtctgaaaaacaaactgatgcaagtatatacagaggactgtatatttatgcacggcgtgttggttatttggaggcgaggcttagtagccagtcggagcgggagacggcggtgtcgtcattggtgcaaatcaccatgacggtgtcgtctccggcgatggtgcccagcacgccttcgatcggctgcctgtcaatcaccgaggccacgtattgtgcggcaccggaaggcgtgtgcaccacaaccagatttccggcggcggccaccgaggtgaccagtccgttcagcacgcgggacatctgtgcctcaccgcgctcccctacatcctcaccttccgaagcaacgacgctgcgacccaccgtgtaggccaccgtgccgtccttcagccgggtcttcaccgcatgcatctcatcaagatcgcggctcagggtcgcctgagtcaccgcaatgccctcgtcgataaggattttggacagctgtgattgcgaggtgatgatatgcgtggcgagcgcctgttctatggcactcagccgcgccgccctggtggcagggcgttgcagggacggaccggtttcactcatgcgagcagactttcatctccacgggccttgccggtcaaccaagtcagcaacgctttctgtgcgtgcagacggttctcggcctcgtcccacaccacggactgcgggccgtcgatcacttcagcggtgacttccttgccgcggtaggcgggcaggcagtgctggaagagcgcatccggcttggccaatgccataagttcggtgttgacctggtaatcccagaacggtttggagcggatggcgtattcggcctcctcgcccatggagacccaggtgtcagtgaacacgcagtcggcgtcctgcaccgcttccttggcatcggtggtgaccaggatggagccgccggtctcggccgcgacgcgcttggcgtcggccacgatgtccgggcggggcaggtagccgtgggggccggccacgcgcacgtccatgccggccacggcaccgccgagcaggtaggagttagccatgttgttggccgcgtcaccgaggtaggcgatggtctggttcttcaggttgtcgacgccgcctcggtgctcagcgatggtctggaagtcggcgagaatctggcagggatggaagtcatcggtcagggcgttgaccaccggatgggtggagtacttggccatttcttcgacgcggtcctggccgaaggtgcgccacaccacgccgtaagccatgcggtcgagcacacgagcggtatcggccacgggctcgccacggcccagctgggagccggacttgtcgatgaccagtgggtagccgccaagctcggcaacgccgatggagaagctggaacgggtgcgggtggatggcttgtcgaacagtacggcgacggcctgcggaccggcgaacggctgcttgtagaagcggtcgtggtggaacttgatggcaagttcgagcacctgcttctgttcctcatggttgaggtcgtcgtcacgcagcatgtggcgaagttctggggtcatgatgatctccttggatcggtgggtcggcagtgacggcgagaaatcagtcgtcgggcaggtccgtaggcacatccttgaggatggcaagtgcctgatccacgtcttgagcggttacaatcagcggcggtgcgaaacgcagcgcattgggagccaccgcgttgacgatgagcccgtgttcgaggcagtagttcatcaccgcgtgggagcagggatgcttgagctcgacggcgtccagcaaaccacggccgcgtacggaaacgaacagcggattaccggtggccataatgccatcgcgcagctgttcgccgcgagcttcggcgttggccaccagattctcgtcttcaatcacgtcaagagtggcgagtcccgcagccgcacccagcggattgccggcaaaggtggagccgtgggaaccaggagtgaacagagccgcaagtttctcgccaaaagcgatcatgccgcccatcgggaatccgcctgccacacccttggcgaaagtcaccatatccggcgtcacgccgccggacagatcgtcacgctggaatgcgaaccacttgccggtacgtccgataccggtctgtacttcatcgatgatgagcagcgcgtggttgatatcgcacagttcacgcacgaacttgacgtaatcggcgcccaacggctgcacgccggcttcgccttggataagttccagaatcacagcagccaccggacccttgccatagcgaccgagaccggtctgtgcaaaagcgtcgtgcagggcgaccttgtcgccggcgcgcacgaattcgatgttcggcaccagcggatcatacggcttgcggataccgggtttccatgtggcggacagcgcacccatcgtacggccatggaagccgtgagtcattgcgagaatgcgtgcgggcttgccgccgatggaaggcagggcaccaggca

SEQ ID NO: 1574 - DNA, 11971 bp, Unknown
  R221_24m  MAG No. k141_29384
ccggccaatccacgaatgcgatatctccatagatgattgcgttctgtgcgttacgcagtactagggaaatcttgatttgctgtccatcagatggcttgaatccatctgccacggcgcggacctcgccattgaacgtcgtgccgccgtccctgttgtctattttggatattccactgatggggaaggcggcggttccctgagccttggcgacgttgtatgtatccggattgagcacagtaaaatcaaccgtttctggggcggtgccttcgcctgcttgaccggcgtcatatacagtctgattcgggaatgccatattcagtgcttgcgtctgcgagaacacgatggaaccgtctttggcccgccccgtaatggtaatctgcggatactgcacctgctgggtcttgctggtgttacgcagggcgaaagcgtagtggacatacccttgctggtccgccgaccagccggattccactattttcagaggattgtcggtgacggtgtcttgattgtctccatcagcgccgtcagtgccgcctactccgcccgtgccattggcattgtcggttcctgacccgttcgaggagtgcccgccatcggccttatcggttgattggctgctggattgtgtcgaggaatcgggtgatgttgccgacccgataatgccaagttggcctgccaacacaatgcctcccgcaatggcggcgattatcagtgccgctccggcaatggaccacagcacgatggcgcgtttgctcaagtgcagacgccggaatagtcgagacgccgacgcgctgccgttcgttgttctcgttgatggcggatttgccgatgatgcgttcggtatgggcggattggactgggagaacagcgcctggcgaaactcttggacgctctgtggccgtttgctgggctcgaatgcgcacgcatagccgatgacggcgcgtagtcgagccggtactgcggcatcatcggcaagtcgctgctcgtagtcgctggcatcgggatatacgccggtcagcatgaatccgagtagccggcccagcgagaatacgtcggaacgcgcgtcggttttggcaaagccatattgctcaggcgaggcgaatccgtaggtgccaagcgccgtggtatcccgtgaacggttgcttgcctctgaccggatgcgcgcgatgccgaaatcgatgagatgcgcgccatcctgggccacgatgacgttggccggcgtgatgtcgcggtggataacgccgtgctggtgaagctcctgcacggcttcgcaaatttggtcgataagctgcacggccacattcggtgcaagccgcccgttttcctccgcaatttgcgcaagcgtgctgcccggcacgtaatcgtagacgatgacgaaccggtcgggcagctcgtacgtcgcttccacgcgcggcagacgattactctggcaggcgctgagcgccgcccacacattgcgttgcgctaggggagagggaatcttcttgcgtacgaacgggccgttgccgtcaatgctcaccagttcggtgacgccggaaggtccgcgagcgagcgtacgctcgacatggtacgcatcgtcgatgctcatcgcatgcatcgcctgcttatcgtccatgtctctccttgatgccctcttacttgcgtctcactggtgagtgttgttggtccgaatgtcgtcaatcggccggtagcaacgtcgtctctcccatacgatacaactcgtcgtccgtggcgatgcggtcgaatccattgcgtatacaccagatgataatcgcgtcgcgtcgctgtttgcaccacagttcggaaacgcctgcaagacgaagtagccgttgggtttcacgtaatgtgcacttgagaccaaaagccagcataatggcgtgatctcggccggggcggcttttgccggagaaaatgtcataaaccactgtggcgttgaggccggatgcccgcaccacgtcggctcgtctcaggtcatgggcttccatacggtcgaacagatagtcggtcagcgtgcgtgcgctgacgagtccctcatcgagatactgctcaatgctggcgctggcgagcagccgatccaacagttcctcggtcaaatgttcttcggggatgtctgccattgcccatgctccttgtcgctgtgttgcgggtgctgtgctgcgccatcgtacgcggttgctcgattcccagcgtacaggacgccgacttttcggaaacacgccgaaaaattcagttgtcagctgatgtatggcccgcgcgtgtcgccgacaatggtcgatgccatccgtgtaggtgcggtggcggaaaggatgttcatgcgcggtatcaagcatcgacaataaagctaacatgcatacaaaatgctaatttgcgtacataataacaacgccatacactggtttcgatgtatcgcagagcaaagcgagcaataagaagggacgcaatgatgagcgaacgataccggcttgccatggcagtcggattgaccgtaacggttgccgggcttgcctcttctgtgctggtaatgctgctgcttaaggaaagaagggcatcatgacaacgccatttgatcaacaacctcagccggttccaccgtccgaaggcacgaatgacgcaccggaagatcgcgcgaatgcgcctaccgtgccgaatactgtaccggctggccaaccgaacgtagcgtctgatggtgctaccaccactccgatgactccggctacggcatcgcagcggcccgccggcgcgccatttgatcgtgtatatgcggtcagtccgcaacagctgttccaagttattcacgaccagctgactactggcgccacgtttaccttggataacgaaaacacccagaccggagcgttttccttccactcctatgatggggtgaactgcacgctaaccgtagtcccgcagggtgcggcaggggccgccattcgtctggaggcgactggaaacgaaagcgccaagcgcgttgatgagttcctcgccgctctggacaagcgtattggtgtggctcctgcacccgccacacatggtgccggtgctgccactggttttgctggtgccgctgcgcctgccgtgattgatccgaatgcacaaggggtgaagaagacttccaagctggctgtgttcgccattatttggggagtgttgttcgtactcgcccaatttgtggatgtttctggccgatcctggggcggactgctgttcgccacggtgattccggcactgctctcaggcttcgccgtatacgtgacccgcccgagtggcaaggtgcaaggccgagtgctggcctgggtggcagtcggtatcaccgttgtgggtctggtaatcggtggcgtgttcgtaattcgtgacgatgcgaaggccaaggctgatcgggcggaattggaagcatcgctcgccaccaagtgcgaagcatattcatggccggagtcggatatcgcggcgctgctgccgcagccgaaatccacaaagggtgaaattagaagtgagtcttcggactacttccacatcgaggtgtgcgataccgacgccaagcagtatgccgactacgtcaagtccgtgcaagacaacggtttcaccgtggactatagcaagtccgctgacagtttcaatgccaagaacgccgatggatacagtgtgagcgtttctcgtaacactgacgacgagaccatcatgtccatcactatccaggttccggaaaagaaggaagatacgtctacggacggcgacgccgcgaagcaggatgataagagcactgatacgggcactgattccagcgatgccaacaagcagagcgaccagtcttcggatcagaaggcgcagcagaacaccaatgacagtgctgacttcaaggccacgatggacagctacgaggcctttatcgatgagtatgttgccttcatgaacaaatatcagaaatccgacaacgtggtcagcatggctaccgactatgccagcatgatgaagcgttactctgagttctcccagaaggtagacgccattgacgaaaactccctcagcagtgaggattcggcctactacaccgaggtcatgactcgatgcacgcagaagctcgcatcggtgggccagtgatcagactggcgtatcgaggtaacggttttccaagaaaggaacgatgacggtatatgggtatacgcggcagacagtatacgccaatggatgagccggtcttcaacaaggccatccccggaacggaggctctggccgggaccctgaaagacacttttggcgcattccgtagtgggcttgggattaccgaacccgtggtttcggtgaattgcgaaggttgtggcgctccgctttccggtcatcgcaaagaagtcgttcgatgcgaatactgcgatcgcgaaacgcagctataaccaacatgccagcataacggccggtcttgcgattgcatagtcgcaagatcggccatatgcatgagatatcgaggaaaaaacagatggcagttattaaggcgttcgccggcgcgctcggcggtacattcgcggacctgtggcgtgatatcatcaccgctggtccgttcacggaacacaccgtcgttgtgccgggcattccccgcggaagcaacaacgatcgcggttcgaatgaatacggttccgagggaataatcaccaatggttcgcgtatctatgtgccagagaatactgcggcgttcattttctctgaaacaggtatcgaaaacgtcatcaccgagtcgggcggttatgaatatcgcaacggggagcagagtgtgctcgccggagacggcatcggatcgttcttcaatcaggttgccgatcgattcaccttcggaggccagcctggccgcaccaaatatgtggccttcgtcaacctgcgtgagattcgtggcatcaaattcggcacttctgcgccgctggtgtataacgaccggttctatggcgtcgatttggaaattcgcgcacgcggatccatgtcgctaaaggtcactgatccagttcgattcgttcgtaactttgtgcctgccactaccgtgtcgtattcattcgatgatgaagggccacgtaggcagattctgtctgaattcgtacagtcgtttattgtggccatcaattcgttgtccaatgaatatcgtatttcgcaattgcccggcaagacgaatgacatcgcggcatgcgtgcgtggcgatcgggccaatgcgggtacgtggaatgatcgttttggctttgaagtgtccagtgtgggcatcgaaagtatcgagttcaccgagcaatcacgtcaactcgtgcagcagttcgcctcgaataagatgaatgttgccgcatacgagggcgtttcccagcaagctggcaatatggctgcccagcagcgcattgcgcaaggcatccaagacaacggctttggcgatggtggcatgttgctgggcatgaatatggcacaagccatcaatcctatgacggccgccccggttcaagcgccggcgcctgcgccggcaccggaagccgctgctcccgcctctcacacggcatccatgtctgtggaagaacaagtcgaggcgatgaaaaaattgaaggaattggttgatatcggcattctctcccaagaagaatttgatgcaaaaaagcacgaaattctcggcctataaacggcgcattcatgcaactcgaaatagttgataatgaaggaaacgctggtgcgatatatcggcgaaaacaatggatgaatatatcattgaataagcagtaattatcaggatggttggattcacattgacgtggttccgaccatccgcagatctgcgactacaagggagagaataatgttgaacaacagggttcgtttcgggaacatgaagcgtgtcaatcgtgcggtttgggcgttgaccgtgattcttatgatggttctgggtcttgtgcttgctggatgctcggggtcttctgacggtgcggacggcaaggaggaatccacatattcgaaaattgtcgccatcgccaagaaagggcgttcgctggccgatgtgaaagacgagctcaaggatgccggtttttcctcctctgattatgaggtgaaaagcgacacggacaaaatggtgctcagagcttcgaactgggttgttcaatccgtggaagatggggacaagcctgttatcaatgttcgtaaagccagcgatatagcgcaggaggaagaagcgaagaaggtagctgaggagaagaaagcagctgaagaggcagccgccaagaaggcagctgaagaggcagccgccaagaaggcagctgaagaagaggctgcaagaaaggccgccgaagaacaggctgccgcgcaggccgaggcccagcggcaagctgaggaggccgctcgacaggcacaacagcaacagcaagcgcagcaaaatgtgcattatgcgaattgctctgaagtccgtgcggctggtgctgctccgttgtatcaagggcagcctggatacaacggcaagttggaccgcgatcacgatggcgtggcctgcgagtaacggattcgatatttcggcgactcagcgcttgttcgggccgccgtccgggaacatcaagtaagtgatgatgccggcggcggttccactggccaatgcgccggtgatgacggcgagagcctgcatcgccgtgctgagcgtgggcttgcccgttgcggcagtctttgaagccttcaatgtggcggcactgggcttgcgtttctcggcaatggcattgtcggcagcgttgccaccgtccgtattgactggggcattgtcggcaacggcctcgccgtcctgctcttgggcgcgccgttcgcgaatgcattgctcaatgggatcgtcgaccaaagtcttgatgatgcgtgccagatcgcggtcttcacgacgtgcgatctcggcgctgaacaccgtacgtaaagcgagatactgcagtttggtcatcgggcttttgccggtctccaagttagacaccgtctgtcgcgcgactcccagctcgtcggccagttgctgagtcgtccatccggctaccttgcgaatcggacccaggttctcctgaaacttatcaatccaccattgttcgatttcagacgccgccattacgcacctccttccacgctgtcaccagtgtacgttacctgtaccgaaatcaatccaaaaaacagtgttcatgtgaaattcactgcgtatttgcgctttcgccggcttaccgagattagccttagacaaggaataacagagtagaagcagaaggtatgcgcgtattcgatttcgacggaaccatctatgatggcgaaagcctgttcgacttgtacctgtattccgcccgccacgacccgaaagtgttccgctatatcgcccccgtgctgcggtacgcggtcaaatacaagcttggccgggccacgcttgaacaaatggaatacggcgtgggcaagatgaccgaaggctatctcacggaactgagccgatccaaacgggtggcgagcgtcgaacagctcgtggacgatttctgggaccgatattacgcacgtatcaagccttggtaccagcctgagtcggacgatgtgatcctcaccgcatccttcggtctgacggtgggggaggcctgccgcagactcggcgtgaggaatctcgtggccagcgaggtggatgtggagacgatgaaggtcacgtacctcaacttcaacaccaacaagaccaaacggttccgtgaactgtacggtccggacgccgtcatcgacgagttctacaccgactccaagttcgatcagccgatgatcgacatggcccggcatgcgttcatggtcaaggggaacaccattacgcaggtcaagtaggaaacagcagaaaacaacacaacgtaaccaataacgaaagaggaatccatatgagcatgccgctcgatctatacgtaatccggcatggcgaatccgaagcgaacgtcatcgtccaggcgggcgaacagggcgacaactccctgtatacgcaggacaacgtcaccgtacccgaccgctcctggagactcaccgccaccggacgcaagcaggccgactgcatcggacgctggctcgtcagccagcagcagctgttcgaccgttacatggtctcgccatacgtgcgcacccgcgaaaccgcggccaccatggccctgcccaaggccaaatgggaggagaaccgtgtgctgcgcgaacgttcttggggtgaaatcaacaccatcaccaaggacgaattcaaaaacaactacgcacgcaactggaacttcaagaataccgatccgctgtactggcgtccgccggcaggcgagtcgattgccgatgtggccgaggaccgtgtgcacaacatcctgacctcgctgagccgcaaatccgattcggaatccgtggtcatggtcacccacggcgacttcatgctcgccctgatgctcaccatcgaggatctggccgacgaggaattcctgcatcgcgccgactcggacgactggaagatcaccaactgcacctgcctgcactacacgcgccgcgacccggaaaccggccgcacctccaagcgtgtgcgctgggagcagaccgcccggcccgtgctcgacgagacgaccggccgctgggaggtcaaggtggagccgtggcgcgaattcaagcgcccgtacctgtccaatggcgatttggtggatgtggtgcaggccgtcgatccgcacctgctggagtattacggcaaatagcctttcccggaagagagacttcacaaaatcttcgtgagctagaatggcgcgtagtgcggctggttgtgaatgccgtgccccaagcgagagcgaggagagtagtaatgtccaatatcttccaatggcaattgcatggcgacggcaagacgctggcgcccggcgaggtcgtcgagcccgatgaacgtctgacttgggtgcgcaccgccggtatcggcgcacagcacgtcatcgccatgttcggtgccaccttcctggtgccgattctgacgggcttcgacccgtccaccaccctgttcttcacggctatgtccaccgcactgttcctgcttatcaacaggaacgtgctgccgagctatttgggctcgtccttcggcttcatcgcaccgatcaccgcggtcaccaccgccaacaagggcattgcggtcgccagcttcggcatcatggtcaccggtattctgctggccctgattggcgtgctcgtgcattacgccggctccaaatggatcgacatcatcatgccgcccgtggtcaacggcgcgattgtggccatcatcggtttcaatctggcaccttccgtgtggaccaacttccaagccgcgccggacaccgcactggttaccctgctggccgtgctgctcgtggccgtgctgttcaagggcttgctgggtcgcctcaacattttggtcggcgtaatcatcggctatgtatatgcctgcatccgcggccaggtcgacttctccgccatcggtgacgccgcatggatcggcttcccgaagttccacctgccgcaggccgatttttccatccttcccatgttcgtccctgttgtgctcgtgcttgtggctgagaacgtcggccatgtcaagtccgtggcccagatgaccggccgcgactacgacaaccagatcggcaccgccctcatggccgacggcctgggcaccacgctcgccggcttcggcggcggctccggcaccaccacctacggcgagaacatcggcgtgatggccgccaccaaggtgtactccaccgccgcctactggtgtgcagccgccttcgccctgatcctgagcctgtgcccgaagttcggcgccgtgatcaacacgatccccgccggagtgctcggcggcgtgaccacgctgctgtacggcatgatcggcatgatcggcatccgcatctgggttgagaacaaggtcaacttcgacaagccgctgaacatcatggtggcagccatcaccatgattattgccatcggccaattcgcgttcactgttggtggcatttccttcaacggcattgccattggcacgatcgtgattcttgtggcctaccacggcctgaaggccattggcaaggcaaccggcactatcgccaaagacgatccggatattttgtagtgtgttttagggctactgggccgtattgtggctcagcctttttgcacaatggctcctaccttcacgggtaggggccatttgcgtgttccatggggcggtgctcgccttacgtggtggtagaacccatggggcggtaattggcccatggggcggcaaacatcccatggggtggtaaaaccctcatggggcggtagacgaaaatggctttattctgcggtttcacaatttcttcaaaccgccccatgggcaagttgccgcctcatgggcgagttaccgcctcatgggcgagttaccgccccatggggtcatcagtaaagagtgggatgacagcgtggcgagcatcaagcaaagtagggggcttacgctaagctcggaaagcttgcgtaatttgcgtaacctttgacatgaaaggccactgtgccccgtaataatttcgatgatcgtgacgattccgctgatttccagatgaacgacagcgcggaatcccgcccccttacctttggcgaacttggcgtacccggaccgctggtgcgcgtacttgcggcagatgacaagaagaccgcattccccattcaggccgacaccctgcccgattcactggccggccgcgacattctcggccgagggcgcaccggctccggcaaaaccctcgccttctccattccgctggtcacccggcttggctcctatgattcgcttggcgaaatcgcgatggaggagttccgcaaggaaatcaagcgccgcaagaaggccagcttggaagagcgccgcgctgacgatttcctgccgcacccgcgcggcctggtgctggcccccacccgcgagctcgcgaaccagatcaacgacgtgctgatgccgctggcccacacgttcggcatgaacaccaccacggtgtacggcggcgtcaagtacatccaccagatccgcgatctgaaggccggcgccgatatcgtggtcgcctgcccgggccgccttgaggacctgctgcgccagcaggcgctcacgctctcgtccgtcgaagtcgtggtcatcgatgaggccgatgaaatggccgatatgggcttcctgccgccggtcaagcgactgcttgagcagatctcgcccgacgcccagcacatgctgttctccgccacgctcgatcacggcgtggatgaagtggtgaacaccttcctgcatgatcccaaggtgcacgaggtcgattcggccaccaccgaacctgacctgatgacccaccacgtgttcgagaccacgcgcggcgacaagcacgaactcgtgcgcgtgctcgcctcgggcgaaggtcgccgcatcctgttcacccgcaccaagttccaggccaagaagctcgccaagaatctgacgcagaacggcattccggccgccgagctgcacggcaacctgaaccagaaccagcgcgatcgcaacctcgccgcatttgattccggcgatgtgcgcgtcatggtggccactgacgtggccgcccgtggcatagacgtcggcggcgtggagcttgtggtgcaggtcgagccgccggctgacccgaagtcctttgtacaccgctccggtcgtaccgcccgcgccggcaaggcgggcgacgtggtcaccctcgtgctgcccgagcagcgccgcgagacgcgccgcttactgaaccaggccggcatcaaaaccaagatgatcgaagtgacccacgattcgcccgaagtgcttgagcttgtgggcgaccgcgccgagcgcgtggatggttggagcctcgacaagtcgcagcccgtcggcaacccgcgcaagggcaagaacaagggcgccaaaaatatggctggcgatgagtctggccgcggcagcaagcgtaagcatagccgcaatcgcaaccgtggcgagcagaacgttgccgag

SEQ ID NO: 1575 - DNA, 31403 bp, Unknown
  R221_24m  MAG No. k141_31397
gccattcgtcaccttcatgctgtcatgatttccgtggaaggccggggtgagcgctgcagaagcgcagacgatggccagtggggtctgttcgtccgtccgccatggacagtggccggccgaatacagcctcatgcctgtgggacggcacgcggatttggccggtttccgcgcggcgtcccgcaggaacgtgggatggtagagaaatcaatcgtttgacgttcgtggcgttccacactatcaaccgccagaaccgcgcaatcacgccaatccccgttacggaccataatcatcccccgggctctctgcgggacggcagacgaaaaaccgcgaaatccgcgcgtcgtcccgcacttcgcccggtccacgaacaggacaagcatcaccgatagaccgaacacacatctacagccgcgacaagaaccccaacagctagccgcccgccccggatatcgccgtccaatagtaaatcgagcccaaaacgcaaacccaaagcactgactcagataataaaactcggattttccaccacagacagcgagaaactctcccctataccaagtagcgtacgtgccaccttgctcgatagacgaacaatgagaagtatcggttaacgggcaagccgggcaggtcgatgggctctggcgcgggaacgaagacggcgtaccagcacgaatgggccggcaaacgtgatcgtatacaacacgacggcgaggaacacgctgagccatgcggtgaacatgcccaacggcatctcctctaccggagtggtctcggctatgcatgcaacgatctatcactccgatgttgtggtcagtatgcgcggcagttgttcgtcacggttgaggaaagaacgcgtttggcaacgaagtagcgtacgccggccttcctcagtgcgggtgtataccatggtgcaatgcgtcaggcagcggtccaactgtcggcgcagtatttcggcgtcctgctggcggcgggcaaatatggacgggcatgggaagcttacaccgtacgtgcgcacgccccattccttgccgatgatgacatatcgcggattgttgatgggcgcgagtagctccttcataacgccggcgaacagcacctgctcgcgccgcgaaccaccaatcagcatggcacgcaacgccgtgaatctgcgacgtgtctggcggatcgaggaagtcactcacctctttgcctaccgcgttggtttctaggcgctcaggttccgcagtcgccaaatgccagacattggccaccttatcggggtctgcggccacgctgcggttggcggccatgctgtatgcttcactgcatcagtgtaaggcatgaatcaataggttttgagccccagatcgatggtgagaatgatgccggcgattacggcggcgtcgcgcatgatgtttgcgggaatcttgcgggtgatgggcggggcgatgtacccgccgatgaagcagccgatgcacagcatgatggcggccggccaatcgaccgcgccttggatgatgaataccactgaggcgctgatgttcgcgcctgtgccgatcagggttttcaatgcattgatcttgtggaatgggccgattttggcggcatcaagcatggcgagagccagggtgccggcgcccgcgccgaagtagccggagtagatggcgactgccaccacgcccagccatacccaccaggaatcctggctcatgggctgcacgagttgttccggcgggcggtgaggtgcggtaggggtggttgcgcgcttggcggcatcagtggcatcggtggcttcagtggcttcgatgtgcttgagttgcgcggtggcatccgcggcggcctgcttggcctgcatgcggccgcgcggattgatggcgatgatcagcgagctcagcaaaatcagcactggtgcggcgaattcaaagacactcgggtcgagtttgagcaacagaaacgcaccggccaccccgccgaacgcgccaatgaccacatacgtaatggagcgtaccgcttggcctttgagttctttgcgcgcgcccatcacgccaccgatgcccgtgccgaccacgccaacggtgttagaagcgtttgccaatacaggcggaatgccgaacgcgagcaaggccgggtatgagaccagtgacgatgcgcctaccgcatagcccacgaatcctgcgccgattccggccaacagaatcagtagtaatgaagttatggaaaagcccgcaatcattccccgtatccttgtcgctcatcaaccggcacattgccggccttgagcgagaatacgctgttgaggattggttgcgggttttatgttggaatgtggacgtagctcctcgcggaagcgattccctcagtcgcctgaggcgacaactcccctcgcacccgaggggagccagaaggaaatcagagcgcttcgttgtattcgcgaaccttgagggtgcggtgggaggatgccacgttttcgacgatcagacgcttcagggcgttgtcggcggcaatgtgctcgtccagccaggcgtcaccgagcttgaccagcgtggcgggatcggcgtaacccgggtacaggccgttgagcagggcctcggccatgtggtaggtcttgttcgcccagatccagtcgacggcctcgaaataccgggcggcgaacggctcggccaggtcgtggcgcggggtggcggagaagccacgggccacggcttcgagctgggagttggtcagctcgtcgttgtggagtgcctgatcccaagcccattccttggcttgcgtcgtggccatggaggcgcgggcgccgtaggcgaactcgcggttttccgtggtctccttcttggcgagctgcgcgtccacgtcgtcgttggtcatctcgttgacggaggtgagcgcttggacgatggtccacgtgaagttgttgtcgatttcgaggccttcaagacgcacggtgccgtccagcagaccgtgtgcgttggcggcgaatgcggcatcgccctcctcgccatagcccaggtaggcggtggcgagctggaactgggtgtccgagccggcttcggcggcgttggccagggtccacagctcggcggccacgtggcgcagcacatcgtcgcggcgggctggcgccacgtagtggtgggcggtggtgctcatgcaggccagcgcgtaacggaaggtggtggattcggtttccgtggccagaagacgcagggtcatgtccacgaagcgttcggccgggaattcgccgtcacgggtcatatcccagaaggcgagccaggtcacggcgcgggccagggcatcgtcgaaacgatgcaggttggcttcggcgaatgcctgggattcggcgtcgaaacgaatcttggtgtaggtcaggtcatcgtcgttgaccagcacgaatgccgggcgcggcttgcctgccgcggcctcgacgatggtggtttcgccatccacgtcgagttcgaactgctcggtgcgcacgatcttgccggtttcggcgtcttcgttgtagaagccgacggccaggcgatgcggacgcagcaccgggtgttcggccggcgcgctctgggtgagcttcaattcggcgatggtgccgtccgcgtttacggtcaggccggtggcgatcgtgttgatgccggattcctccagccacttggcgctccaggccttgagatcgcggccggaggtcttctccagttcgctcagcaggtcggccagggtggcgttggagtaggcgtggcggttcaggtagttgtggataccttcgaagaactgcgtgcggcccacgtagaatgccagctgcttcagcacggaggcgcccttggcgtaggtgatgccgtcgaagttgacgtaggtgtcgttgaggtcgttgatcggggcgacgatcgggtgcgtggtgggcagctgatcctggcgcaacgcccagctcttctcaccggagcagaaggtggcccaggcgtcatgccattcggtggcttcggcagtggccagcgtggaggtgaattcggcgaaggactcgttgagccacaggtcgttccaccacctcatggtcacatagtcgccgaaccacatgtgggccagctcgtgcagcacggtcaccacgcggcgctcggccagcgcgtcggtcaccttggactcgaacacgtaggagtcacggatggtgaccatgccgatgttctccatagcgcccgcgttgtattcgggaacgtagatctggtcgaacttggcgtacgggtagggcacgccccaggtcttggcgtagaacgcgaagcccttcttggtgatgtcgaacaggtagtcgacgtccttcgcgaaggccttggccaacgactgtcggcagtactgggccatcggcacggtgcgaccgtcttcgttcaggtattcggtgtgccattcggcgtacgggccggcgcagatggcggtcaggtaggagctcatcaccggggtcggctcgaagtcccacagacgggtgctttcgttcggcttgtcgccgagggtgccgtcgagggtttcgcgcggatcgtcctcgatggtggcaaccggcatgttggaggtgacgatccagctggcgggagcgagcaccttgaaatcgaaggtggccttcaggtcaggctggtcgaacacggcgtagacgcggcgcgcgtccggcacctcgaactgggagtacaggtagatgttgccatcggacgggtcgaccgagcggtgcaggccctcgccggtgttggagtaacggcacttggcttcgacggtgacctcgttcttctccttgaggtcggtcagttcgatgcggttgtcctggaaggccacggctgggtccagggacttgccgttgaggtcgatggatgtcacttcgtcggcaatcaggtcgaggaaggtcgacgaaccaggcttcgcgttgaagcagatgagcgacttggaaccgaagttcttcgcgccgaccgtcaggtcaaggtcgacgtgataatgaatcggcgcttcgataacggccttacgttcttcggcttcaatacgagtgagattagaaccgggcatgacttcaattactccttacggtcgtccctggataatccggactacttggtttctacggtttcgacgtcctgggcgatgtcggccacgacgggcacgatcatcggcttgcggtgcagctggcgcgcaacccagctgccgagcgtgcggcgcatggtctgctgcagcttgtaggtgtcacgcgtgccctgcatcatctggtcgttgagctgttcgacgatctggtgacgcaccttgtcgaactcgctttcgtcctcggccacggcgttcaggtagatcttcgggccggtgacgacctcgtggttgtcggtgtcgaccaccacgaacgcggatacgaagccctcggtgccgagaatgcggcgcttttccagctcgtcatcggtcagctcgccgacggaatcgccatcgacgtacacgtaaccgcacggcacggagccgacgaccgcggccttgccgtgatacaggtcgaccacgtcgccgtcttcggccaagaccacgttctgcgggtccacgccggtcttgacggcgatcaggccgttggccaccaggtgacggttctcgccgtggatcggcatggcgcacttgggcttgacgatgttgtacatgtacagcagttcgccctcgttgcagtggccggacacatgcacggcggcgttgtcgcggttgacgaccttggcgccgagctgcacgagcttgttgatcaccttgtagacgccgtgctcattgcccggaatcagggagctggcgagaatcacggtgtcgaactcgttgatgtggatgtcgcggtggttgccgtcggcgatgcggccgagtgcggccatcggttcgccctgggaaccggtgcacatgaagacgagcttgtcgtcctgaatgtcgttggcctgcttcaggtccacgacggtgccttcggggatgtgcaggtagccgaggtcggcggcgatggacatgttgcgcaccatcgaacggccgacgaacacgaccttgcggccgtacttgtgggcggcgtccaccacctgctgcacacggtgcacgtgggaggagaagctggcgacgatgatcttgcgggtggcctgggcgaacgcttggtcaagggccgggccgatggaggtctcaggcttgacaaagccgggcacctcggcgttggtggagtccatcatcagcaggtccacgcccttttcgccgatcttgccgaattcgacgaggtcggtgatgcggtggtcgagcggcagctggtcgagcttgatatcgcccgtgtcgatcagggagccggccggggtcttgacgtagacggccagagcgtccgggatggagtgggtgacgttgacgaattcgaggtcgaaggggcccaccttgagcttctcacggccggcaacctcaaccttggtggggttctggtggtgttccttgcacttggcgtccacgaaggcgagggtcagcttggagccgatcagcgggatatccggacgcagcttgagcaggtagggcacgccgccgatgtggtcctcgtggccgtgggtgagcaccagggcgtcgaccttgtcgagacggttcttgatgtagctgaaatcgggcaggatgagatccacgcccggctgctcctcctcggggaagagcacgccgcagtcgatgagcagcaggtgaccgttgtattcgatcacgttcatgttgcggccgatttcacccaagccgccgagcggcgtgatgcgcatggagcccttgcggtacttcggcggggcgatcagcacggcatcctgctggggtgcggtggcctgccgggtggcgttgatcttacgggacggcgtacggctgttggatccgttggcgttgcggccgcgcgcggaaccgcgacggcgagaattcgtgttcttgcttgttttcttttgttcttgtgccataacctttttgggatttctgttgtggtgcctctgctctgtcatgcaggggcggcgggctggcaacccgtatgcagcgtttcgggcttacagcagtccggcagcgcgcatgccctcttcagccttgtcaagctgagtggcgtcgggaccgatgttcggcagacgcatggtggtggaggggataacgcccttgaccttgagcgcagccttggccatgacggcctgatagccgtcgccattcaacgcgtggacaaggggggcgagctggttggcgaggcgacgggcggtggtgatatcgccgcgatcgaatgcctggacaagctgctgcatggggttggaggcgacgtgggcaatcaccgaaatgatgccgacggcgccgatggagaggaacggcaggaacaggccgtcatcgccggaataccaggcgaggccggtgcgctgctgcttctccactgcggctgcaagatcgccggtggcgtccttgacagccttgacgtgttcaagttcggccagtcggtcgtaggtttcgaccttgaccttcaagccggtacggccgggaacatcgtagacgatgatcggcttttcggcggattcgtcgacggccttgtagtggccgacgataccgtcctgcgaggggcgggaatagtaaggcatgacgacgagcaccgcgtcggcgcccgcttcctgagtctgttcgaccatacgcacggtgtgtgcggtgtcgttggagccggcgccggaaatcaccggaacgtcgacgacctccttgacggccctgaccagctcgaccttctcatccatatgggtgacgggcgattcaccggtggtgccattgaccaccagaccatccgcgccatcggcgacgaggtatttggcgagcttctgcgcggcggcgaaatcgacgctgccgtcggatttcatcggggtgaccatagccggcagaatgcggccgaaaggtgctggctcaagaaggtgcatgtcatgctcgctcatagtgttcaccgtacttcccattgtggactcttacattacgtaccttgattgttgctgaatgcgtggcattatgaccggaaccggtggcaatgccgtgatgcgcgtcccggcgcgcttccctgcctgaaatgcgggggcgactactggtcgactgcgggtcgattacaggtcgaggaagtggtcgaggccgatggtcaggccagccggagcgtcgccggcgagcttgcgcacggcaagcaggacgccgggcatgaagctggtgcggtcgaagctgtcggcccgaatggtcagctgctcgccggcgttgccgaagagcacttcctcgtgggcgttgaggccgcgcagacgcacggcgtgcacgtggatgccgtcgaccacctggccgcgtgagccgccatcggtttcggtggcgtccggcacgggggcgagtcctgcggccttgcgcgcttcggcgatgccgtgggcggtgtgaatggcggtgccggagggggcgtccaccttggtggggtggtgcagttcgatgacttcggcggattcgaagtatttcgcggccttggttgcaaagtagtcggccagtacggcggagatcgcgaaattaggtgcgatgaagaccttctgggtttcgggcttcgggccgttggcgatggcggatttgacctgggcgagtttctcgtcggtccaaccggtggtgccgaccaccacgtccacgccttggccgatcagggtcagcacgttgttcaggctgacggacggcacggtgaattcgacgaccacatcggtgttgtcggtggtgacctgggtcaggtcgtcgccggcatccaatgcgagcgccagctgcgtatcctcggcgttgttcaccgcttcgaccacgtgcgagcccatgcggccctttgctccgaccaccgaaaccttgatcatgtcttcttccctgtctacccgtacctgcccggcaatgtacccggaacgttttccaatcggcaatcagcctatcaccgccaagccctcacgccaatatcccgtccacagaatcgagctccctctgatgagccgaaccgtgaagtcgagctccctctgatgagccgaaccgtgaagaaaacgccggaggcgtttttaggtgagggcgaacgacagtgagcaataattcagttggctgaaagccatcatctaattgcgttcgagctggccgcgaagcggactgagggagagacccccggcgaagccgccaaccatccatcaggcgtagcccgattccgtttcacccacgccgcttggccaaggcccatccggccaacgccaatggcacggacgccagcgtgaagatgaatggcagcatcatgcccacatgagggttggaggcgtcaagcacaatgccggccacggacgagccgatcgatgtgccgaccgtgcctgcggtggttacccagctcagtccttcggtcagggattccgccggcaccagatccttgacgatgaggttgccggtggcgaacgtcggcgagacggtcaggccggcgaggatttcgaagacgcccagcaggatgagattgtccattgacagccggaagaacacgtagccgacggtcagcagcgataggaacatcaccatatgcgcccaatgggagcctttgagtcggcaagagccgaacaccagcgcgccgatgcacgagccgaccgcgaacatcgccaattgcagaccgaggaagggctcaagtcccatggatttcatggtggcggtgatggacacgtcgaaggacgtgaagctcatattgaacacgatgaacacggcgagcaacggcagtacgccggcatagagcaatacgctcttgggcttggcgccgctgcgtttgagctggcgcagggtcagctggtcggcatcttcgcttgcagcagggctgccgtcatcgtgcgcggccacggtgacctgttccacgataaccggtggctgggtggatttcagcgagaagaatatggtgccgccgataccgcatgccacggtgggcacgaacagttgggataccgggtgcacggaggtggctagccaagccgccagaatcggccccagaataaagacgatctcgtcaatggcggcttccatggcgtaggccgtgttgagcagctgttcaccatcttccacaccgcgcaacgcataggaccagcgtgttcggaccaatgcgccgaatgagaactgcgtcagacccatgatgatggccaggacgaacagcagcggaatcggcacgcgcaccaacgccgcgaaggcgaaggcgagcatggccacgatctgcacggcgagcgcaagccggcccacgcgggcttggccgaaacggtcgaaggcgcgggcgtagaacggggtgacgcagctcatggccagcacataggcggcgctcatggtgccggcgatggtccaattgtcgtagagatggttgagcgccagaacgatgccgagactcatcatggagatcggcaatcgtgccaccgcgccggacaggcagaacgccttggctccgggcagcatgaacaggcgctggtagggcgagtgggcagcggacgacttcgaaaccgcgcgagtcgtggacacaataactccttactggtgcgttgtccggcacgtgcgcccgcccacacgtgccatccgagggtagcggttcccgggcaacgtcacgcggtgcgtttcaaccgcggaccggtacgtggccagtcgtcttcatcgtcggagatgccttgcgatgcataaggtctctccaccggtgaaggccgtccgatgctgtacaggtcatgagcctttgggctcagtcgttgtcagattgttcgggaatgccggagctcaactcggtaaggatttcctgtttggttttcgcgcgggcgtgaagctcgcgcaagccctcgtcgggctcactgacatagtagagagtggcgtcgatactgtccaattccacaccttcgaccgctgccagcagcagtcggtacatgtcgagctgggcaagtttgcgggtgatgtcgtctggcttggtgggccgacgaccggttttccagtcgaccacggtaaagcgtgcggtggtgctggacgggtcaagtccaccgatgaataccgcatcgagtttgccattgaccaggcccacgcccggcacgtccacgacgatggcacgctccgtccacgccgggatgcgcttggcccacgatgattcggccagtctgcgctgccacgccaccagcttggactcggtggcattgtcgctgcttatggaagtggcggatacggcggatacggattgttgagccgtgggctgtgggacagcgggctgccgtgtggatggcttgcggcattgccgctcccgttcggccaaatcggccaacatggcttcccgggaaacgaatcccgcatcctgacctgtatgcggcatgcttggttcggcttcatatgccagtaccgcttcatccggcttaccggcattgatgaattgctcggcccacgcatggaactgcgtgccggcctcggccgccggagacgatatgcgcggaatcgggcggataatgctacgccagtagaggcgctcctcccgttcgttcatgccacctacgcgggcttgcaggcttgtcacgttctggcgtcctgcagccagaacgcgttgcgccttggctttgactgcctcatcaagcgactggccgctggcggcatcggccatcaaatcggcgtcgtccaccagcaattgtgcccgttgcaggagtgggccggcgtcttggtgctgctcaagtgacgaggaatctgcggcgatgacatcgatgccgcgtgacagctgttcatgcaccgcgtcgctgagggtagccggccacggcaattcggcggcggcattcgtctgcgtaatcggcgtttgccacgcctcccccaccacggcgtcactgtatgccgcggcatgctctccgataaagaacccttcgggaggggcaatcgcttcgccttgcgccgagatcagcatgggcttcccggcattggcggcttgcagccgttccacacagtcctgagccgatatcgcatgttcacgggcttggagcgcgtcatgcacttcaagccagaaattggatggctgagcggcgcgagagcctttgggcaccactgacgggtcccgcccggattcgcccgtataggcgcaataggtcatcagggcatcttcccgcgcacgggtaagcgccacatacatcaatcgacgttcgtcggcatgcagccggcgcccatattcctccgcctgcgtcaaataccagccggatgcatccacttcttccacgccatcgccgaattcgcgcatggagccgaacacttcatcatcgataagctccacatcatccaaagccgccaacgatgcgatggggtcggcttccacatcggcatcatgggggaatcgcggcaaaataccggcatcggcgcgcataggcacgggcacggcggtggggttggtgagccaggagtcggcggtctcgtgatattcgggtgcggtccagtgaccttgctcggcgcctcccgtatggtgttcgtccagcacgatcttgagatggtcgccctgattgctggggaatccgccggcggtaagccccactaccgcaacggcatcccattccaaccctttggactggtgtacggtcatcagttccacatccaccggagcgtcggggagactggcggcttcatcctccaccgaagccagatgatccacccatgtgatgaacccatgcaacgagggagtttgctcagcggcaatctcttgcgtgtacgtatccaccaaatccacaatcgcatccataggcatatgcgccaaagcgggattggcgcggtgctgcggattatgcagcacaccggccaatacggtgtcgatgtcaagatccaacgcttctatgccggcgcgaatcacgtcgcccagtggccgcccgacggcatcatgcacctgacggagcatcaccgcggcccgggttatggcgttgcgcccgtgtgtgctcaaccgttcaagcagttttaccaggtcgccgcgtagcaatacgtctggcaggaataccgcattggccacctgatcgcggtactcacgcaccacagccgcccattcattcgctggtgtatccggttgggcaaggccggcctgcaccaatgcttggaagcgttgttccatgttctgttcttcagcaaaacgggccaacatggtcaaatccgctgcggacatggtgaatcgtggcgtggccagcaagcgcatcagcgatcccgtatcggtgtggtcggcggccacgtgcagcaacgccatcagatcgcggatttccggacgttccagcagcgcggaatagccgaccacgaatgtggtcaatccggcctgttccaatgccgcctgatattcgggcatatgtgatttggaccgaaacagcacggcgaccggcgctttctgttcgcccggcatctgttcctgttgttcggctgcggaacggtgccgtgcgatggccgtcttgcagaaacgcactacggcgtcgatctcctgcccggccgtggcgaagcccagtactcccaatgttccttcgggggcatcaggcatggggtcgagcgatgagacatcgacctcacgcatcaatgagctggagggacgcgacggattggagcgcaacggcagcgtgagattattggcggcttcgagcactatacggctgttgcgcctggtgacggacaacgggaatggcttgtatccggcaggcaggtggaaatcttgctggaacatacggaatgcaccagggctggcaccacgccatgcgtaaatcgactggaacggatcacccaccgcgttgacggcggacctccgtgacgcatccacatggaacagtgctgccagcagagcggcctgcgtggtggaggtgtcctgatattcgtcgagcagcacatggctgtacctgcggcgcgtgcgctctccgatggaggggaagcgctcgataagctgatacgcggcaatggtgaagtcggagaattcggccatattgcgttcccgcttggcttgggcataggcctccaccagctggagcagaatatcgcgtttgcgtgtggtctccagcagcgcaccgcaatgataggcgcagcgggcgtgcaaatgttcggcacggtcatcgagcttggcttgccagctggcgtcggtatctttcttcagtcgtttgatcttggggattttcggctcgtcctcgggcatgggttcgtctgcgacggcttgctgcaatcgattgatgaatgccgaatcccattgccgtacttgattgatcgcatcatcgaagctggtgcagccggcaccgatcatggcactgccaatggcatccgacaacgccagaacacggttcgccaaactggagaaggcgccaaaatcctcactgaacgccagatccatgtgactgtcgatgacttcggtggccagttgaagcgctccggctgcgctcaatggttgcgtgttctgatcgaatccgacaagcagtccatattggcgcacgatggtctggaagaaggcgtcatacgtgaaaatggccggcttgaggaatgcccgatcagacaccgtggcggtcgtagagcccgccatatcaccggccactgcggcggagacgcgttccagcagttcgcctgcggccttgcgtgtgaaggtcaggccaaggatgcgttcaggcgccacacctcgattgataagcgcgatgatgcgttgggtcatcgtaaaggttttgccggaaccggcaccggcaaccaccagtacgtcagcatcgactggcgcatcgatgatggcggcctgttccgcactgggagtgaacgtgctcatgcttgcctcgtttcgaaaatcgtgtcgatctggcccgcacaggcagggcagacgttcttcatacggcagaatccgatatgggtgtcttgcggatgggcctcgatgatggccgacctgctggccgccgcggcatagaatacgcgggcgatcatggtcagcgaccataacgtctgcgtaccggcgagcgcggcgaattgcgcccacgcttcggcactcacaccttcgggaggagtagccggatctatggcgggtatgtcgaagaaacggttggggtctttataccagtatcgtggcgtgaacggttcggcattcaacgaaccatcagtgaacagcggcggctggaaggcaccttccggggcgtagcttctggctggtgccgcattctgcccgacatggaacagcgcgctttggctgatatgcggcattgcggcaagtgccttggcaccgcgcggcccgtcttcggggaacacgaggccaagctgatagcacacgagctgcagatcattgaaaatctgtttgaccgtgggcgttctgcctgttttgtagtcaatgaggcgaatgcattcgccgccgtctgcgagtacgcgggtttccatacggtcgatgcgcccggacagtctcacggtcagatgctcgtccatgccttccggccaccctccgaccagtgctcccatcagacggaccagcatgttccgatcgatcgggtgcatgccgggcacggcattgtatgcgtcgagtatgtcacgcacatcgaatcgtgcggcaaactcccgttcgcattcggcaccggccaatgcgccaatgctgaagttgctggagttcttgccaagatacgtttccggatcggcgtcgctgcgcacaaagtaatcggcgatgttgcgcagggcatctgccgcggactcgtccttacgggtggcctcatagcggttccgggtgtcggctatggcattcggatcggggcgtttgctctgatagatggcattaagccgtgccgtgacagcctcgatgcggcgttccgtgccggccgtggagtccaagcccagtgtggccaacgtctgggcattgtgggaaagatggtccagcccttcctcgctgccttgctgtgcaaccgcatggatgagggttccgaagctggtggccacggagctggggcgaggaccggcgaaccggttctccagcatccagcacaccggacatgcccataggctgtcgaccgccgatggagacagggtgaccatgggtgcggcctgcgcatccgtcttgcctttccccgtttggataccgtcagactgtacaccgccagatgacgcgctgtcggatgaggcactgtcggatgaggcactgtcggatgaggcaccgccagatgacgcaccgccagatgacgcgctatccgattgggccggcgattccacgaacgcccagctctgcggatttgcggcgcgcacaccatgctccgacaggagtgtcaacgcaaccgcggcgtcctttgcggcagcctgctgcggttgagcagtggccagaaccgcgcgggcggcgctgaccaacccacgtgggtcggcgtccaatccggccagatcatattcggcggatcctgtatgcgcccccactgtggtgaaaggcgcctgttgccggttgcgcggatagtattccggcagatacccgaaaagaaagtccgaggggctcatgctgtcgttccataccgcgctgatcatgattcgccgtgcacgggtcagcgcgaccaggaaacccttcttctcgcccgacagcacagccgcgaaccgcggatcatgcccggttttgtcactttcttcaagcgctcccctcagcacgagctcggcaaggtcttcaccaccgaacatggtgttgcgcccggcgaggttcggccacacgtcttgctggaccaccggtatccacgcatatccccagtggcgtccggccgcgcctgccggcgtggtcaatgtcacagcgtcttccaccggccctatgtgggccaaggaatcggcctgcacttccatgccccgaacctgtgccatgaatgacgtgatgtctcggctggcggtggaatcatcggcgaactggaacaggcgcattgccgcgtccagccggtcattggccgtgcgcccctctgccgtgttgaataatgccgcacgctgccagaccggtgccagaccggtggcgttccaggcaacagacagtgcataacgcggctgtacgcgctggcttgccggcagccgctccaagccggaagcaacgctgcccaccagatgccacaggttcgcaaaagcgcgggcctgagggtcgttgccaagcaccgcatggatggatgcgagcgcagcctgcgccggcgcggcggcatcatcaacggcaagcatcacgtacagcgcgtcaacgccaaaggccaagtcatcgtcggacggttcaccgagtatttcgacagacactggcgacggaaccactgatgaggatgtttcacgacctgtttcacgccgtgtttcatggtatgtttcacgcaatgtttcccatgccgtcgtcagagaggtcagcatggcatcatccgtggcgagatgcgccagcgactccagcgcgctcatgaccgattcgatcggcgcaagccttgcgggacgcccttgaccgggtctgcccccggcactcaccaacgggccgttcatcaacgtggccactctagtccttatatatgccgcgcaggaagccaacgtcatctggcattccgccattccctcggcacgcaatcgggcaagctccacaagcgcgaacaatccctgcacgaaagtctcgtccttcaaaggacgggtgaccgacgaataccgcaccggcacgccatctcggcgcagtcgttcgccgaacagccgcacggcggcattgtcgtgggtgatgaccgccatgtcgttccaccgaatatgccggtcgagatgcgcccgcttgatgcgccagaccacatcatccagctcctcacgtgaggatcggtacaggccggcggtcaccgtgccgtccgactgataattcgctgcatcgactccgcccagcatggcggtcagcttgccgggacgctcggccggaggcagcggctcgtcttccggcgagggaatcgacagcgaaatacgagacgcgatcacatcagccatcgtcatgtgcgactgatcagcgccggtactgccgccaaccagctgttcttccttggctttcagccacccttccacggcacggcgcatcagatattccggatacgatccacggaaggtctgcaccgattcatccgggttgccgaccagcaccaacttgacgccggcattccccaactcctccaagaagcgcatgccggccagcgtggtgtcttgaacatcatccacaaccagcagccggggcaagcccaacgcctccatacgcataggccggtcggaatcatccgcgtgatcggcggcgaatgcctcatgcaccacacgagctcctgccaccagcaaatacgaggcatccaaacggtattgccccggatatgccgcgctttgggctgcaatatattcacggcgcaacgcgaaagccaaacgccattgcaccgacaatcgcgcgtcctccgtcacggcgtccaagagacgtggctcttcgtgaacgcctacaccgagctcgtccaatcgggccagcatatcgcgcaactggctgataaacgcatctgaaataccgcgagtgaacctatccgcgctggtcgagccgcctgccgacgtcggagacagcgaatccgacccttgttgcgagaggcttgattgtgcggaagcggccgagccgggcatctcgccggcaccggcatcgcgtatgagtttcgcccagtcatcctgggcaaagtagacgcgtagcaaatcacaggtgccgcaatcatctcccgctacggcatggcgcagatgcacggccatgacttgacgcagcaaagcatcctgttccgcaccgttcaacaatcgaggcgacggcaatccagttccctcgcgcgaagctgatatggcccggaatgccacggcacccagcgtggtgaccggcctggcctgcacggaaaacccgagctcacgaatcacccgattgcccaatgcgtcggcggccacacggccggatacggccatcaccgcctgcgtgccaccgtagcggcgcagccccgccatcaacaccgataaggcgaattcggttttgccgcttccaggcgtgccgacaatcagcctcgccgctccatcacggtcgatgccgtccagcactgttccaggttcaagtctcgtcatcatggctccagcctaaacccgaccgtcacagagggaaaaattttaccgaacccgacgaagaatcgtacccttgacggtatcctgtagaacgaatgcagggagagcgcattttccaaggagggagggaacagatggccaatattccgatgaggccgccgaagctgcccggatatgatttcgtccagatgttgggaagcggtgccaccgccacggtgtacctatataaccagcgtatgcccgcacgcccggtggcggtaaaggtcagcgccaaaacccttgacccacgggccgctgccctgttcaaccgcgaggccaacttcatggccaagctgtcatcccacccgtacattctgccggtatatggtgccggcgtcacctccgatggccatggctacattgtcatcgaatatgcgccgggcggcacctacaacagcatcatgaaggcccggtccatgacctgcgagcaggtactcgacctcggcatcaagctgtcaagcgcgctgttcaccgcgcatcgcagcaatatcatccatcacgacatcaagcccagcaacattctcatcacctcgcagggcttgcctgttctgggtgatttcggtatctccaccgatgtgtatgaccgtaccgaaaccggattctcgccgccgtgggcaccgcctgaagtgcttcagcatctgaccaatggttcggaagccgccgacatctattcactggcggccaccctgtacgccatgttcgtcggctgctcgccattccagcacgaatatcatccacgttcgcaatcggaactgatttcgctgatcgtcaatcagccattgcctcgcctcaaccgccccgacgtaccggccgatgtggaagcggtgctgcgccgggccctgaacaaggaccccgaccagcggtactactccgcgttggagttcgcacgtgccatgcagcgtgtgcaattcgcatatttcgggcatgccactcccgttaccgtggaagggatgccggcctaccccaaagacatcgagcgtcggcgccgggccacggaccagcgagatcagatcacccgttcgtcacggcgatgggtcaaaccggtgggtattaccgtcggtatacttgcggcgatcaccgcagcggcactgatattcgccttcgtggtcgttccccgcatggacagcgccaccggatcagataccaaacaggtggcgacgcccggcaccaaggatgatgacaacaaccgcaataatcaggatgacgtgattaccgataccgcgaacgcccagattccttccccggagaatctgaacggcacctatgcggcggatgggtcatccgtgacgttcacctggacgaatccagacccgcaaagcggtgatacctatgcgtgggccatagtgcagggcagcaataccgaccagagcgtgcaaaccgtcacaacgtcagatcccacggtgaccgtcaacgcgcaggaaggctcgcagacctgcattcaggtgtccattgtgcgcaagaaccgccagatgtccgtcagccccgccatcgcctgtgcggccaagccgcaagagtgatccgctcgccactgccgggcataccaccttggcattgcgtatcgcatcaggcatgcgaccggcagtggcgaattcaccaaatggacaacaggaacggcaggtattggaaccgtaaagcgttgtcattacactagcaaccagagaaaccagggttcagggagttcagatggccacatcgtcccagtcatacgatcgtcgccgacgcatcagcgcggctttgcgccgccttatgccctccggagggcatacgtggacggttcccgtaatcacgctcctgctgcttctgggacttgttgccggcgcggtgatcatgagcaccgtcacgcgccgccatgtgcaactggacgatggcaccgtgtgggtcacttcgctgaagaaccagaaggccgcacgattcaacgtaaagaacaaggaggccgacgccggcgtctcctcctccgccccacgattcgacatcgcgcagcataatggcgacaccatcctgaccgaaacgaccaaagcctccaccatcaaggcatccacggtcagcaccggtgtcaagactgacatcaaagccaacaccaccactgtggtcggcggggataccgtagccctgatcaacgagaagaccggcaatgtgtggaccggcttgtcggaaaaccttgattccgtggcccccaccacttccgatccgaaaatgaagctgggcgagggcgggcgcatcgtagtaacccacgatggcaaggtctacggataccgtccatccgacggtatggtgctgcgtcttgacaatcccagcagcgccaaggccaaaaccctcgaatcgctgaccgacggcaagcagcagaccgttgaaagctttaccgtcatcgggagcacgccggtaatcgcaaccggcaaaaccgtcatattcaagggcggccgcgtcgatgtcgacacgaccggcaccctcacccttcaggagcctcccaccgatgacgtacagtccgattgggtggccgcggcatcaccgagaggccttacgcttatcccgttgaagtccaatgccaaggcgaatttcatagccaacgggggcaaggcgaatccggcacgaccggtatcgtccaagggctgcgtgtactcggcttggagccagaaggccagcaactacattcgcgcctgctcccccgcggataccagcgtcaagccgcaaaccctcgaatccgtcaatactgcttccgaattggtgttccgcaccaaccatcgccttgtggtgctcaacgacacggttaacggcaatgtgtggaaccctgaggattccaccaaagtcatcaaaatacagtggaacaaaatacaggccgagcagaccgagaaagaacagcagaacaacgactcggccaacaaccaccacgacttctccaagacctgttccgcacaatccggccaaatcaaagccgaggatgatgaaatcggcgcacgagccggttcggaacagattctcgacgtgctgcgcaatgacgagcagaccgattgttccgtgctgaaaatcaccaaggttggcgcaccaaacaacaaagacgtcaccatttcgccgatttacgacggccggtatctgcaactcgatgcctccgccacatccgcaggcaccgttacctttacttacgatatttccgatggccgcggccagacctcttccgccacggtgaccgtaaccctgaatgatggaggcaaccacgctcccgtacagttcgacactcctcccgagatcgatgtggagcagggagccagttataccgccaatgcgctgagcagcttcaacgatccggatggagacccgctcactctggtctccgctgtggcccagaacaccgaccaggtgcaggtgtccacccgagccgacggccagcttacgttcaacaccggtgcgctggcgtcgggacgcgtgggcgtcgaggtcaccgtctccgacggcacggcgaccggcaccggcatggtgtatttctcggtcaagcccgcgaacaccttggccgcggtcatcgacccggtagcgaaaaccaccgttcccaacacggataccgtcgtcaagctgtcctcttacgtgcatggcacttccttgcagccggcacagctgactcaggtggatacgcccaacggcgcttcgacgaccaccaatgcggcggatatgtcgttgacgttcaaggccaccaatcccggcacctattatgtgccctacaccattactcaaggctcgattccggccaccggattggctcgcgtcgaggtacagcccgccaccggcgaggccgccaaaccggttgccgccaacgatgtcgccctgcttggcgcggataataccgccattgtggagccgctcaccaatgacgtcgatccgatgggcggcgtgctgtccgtcaccacggtgagcgcaccggccgactccggcatcaaggttggtctcgtcagccataagcgcgtgtatatcactgcgcgtcaggtgcccacgaaacccgtcgcccttacctacaccgtggccaacgcctccggaaccgccaagggcaccatcgtgttgcagccaccggctctgaccacctcgaattcagtgcccaaggccagcaatatcaatgcccaggtgcgcaccggcggcatcgtgtccgtggatgtgcttgaccatgtggcctactcggatggcaccacggtcaaactcaagaacaacctgcaatacgacaaggagacgttcaagggtctggccttcgtctctggagacacggtccgctaccaagcatccagcgagaccggcaacttccccatcacctatacggttgaagacaatctgggtaatgtggcttccgccaatatcaccattaccgtgcataagagcgacgcagcgagcaaggccgcgccaaccccgcatgacgccgaagcgcaggttgccgccggacagaaggtccgcatccccatcacactgaccggcatagacacggatggcgacgacgatcagctgttgggtctgggcaacaaggcacccacgctgggccgcatatccgaagtcggttccgactacttggtctatgaagcgtatccggattcgtccggcaccgacaccttctcctatgccgtggaggattggaccggtcagcgcgcacaggcgcagatccgcgtgggcgtattccaaggatcgtccgactccggcgtatacgccagggatgacgaaatcacgttgaggcccaatacggccgcaaccgtgccggtcgcgcagaacgacatctccggcgacaacaccaatctgaccgtcgacaagcatgtcgaggtccaaggtctcgacggggtgagcgcgaaagacaacatgatctccttcaccacgcccggcagcgccaccaccgcctatatcgcctacacggtcaaagacaaggccggcttgtccgatacggccaccctcacggtaaacgtggatccgaatgccgccatcgagccgcctaccgcctacgactatcgtgtgccgtccgccgccaccatcgataagaagtccgtggatgtggatgtttcccagtggatcgccaatccttccggcacagccaatgagctcaaggtcggcgtgcatccctccgccagcgctcacgctcacgtcaagggcggcgagcattcgaccaccatcaccgtcgacctgacgtcacaggcgcgagccgtgccttacacggtgaccaatacgaaatacaacatcacctccaccgcgttcatccaggtaccggcctatggtgtctttccgcccacgttgcgtcccaaggcaccggaattgaaggtcaattcgcgtgagaccattgaaatcaacatcaatgactatgttcgcgtcggtgccggcaaggaaccgtatatcgaaagcgctgattccgtcagcgccaccaaggcttccaactccgatttctacgtgaacgacaagaccctgaagttcactgcggcaaaagactacgcaggccccgcctccattacctttaccgctgtggatggcaagcagggatcggataagaccaagattatcaattccgcagtgatcactctccagatcacggtgataggccgcgatgtgccgccgcccacgttctcgtcctccactattgatgtcgaggcgggcgcggaccccaagaccgttgatctgacggcgctcacccatgcaccgtccggcgtgtatgacgacgagaagcaatacacgtattccggcggaagctcatcgtccgggcgaatcaccgctaacctgtcccgttccggcagcttgcaggtttccgccaccaaggatgccgctcctggcaccaccgcgtccattcccgtgcaaatcgcatacggcgcgggcaccgtgaatgccggtgtgaccgtgcgcgtagtgtcttccacccgtccgctggcacgcgtcggcgacaagacgctgaagatcaaggccggtgccagcgatgccgtgaacgtgcttaccggcgcgtacaatccgttccccgattcctcgctgaccgtcatcagctgcaaggcggatgacgccgccaaactcactatcgccggatgcgatgcctccggaaacgtcaccatcgccgtcgcatccgatccgggtgcttccacgaacaccgtgctcgtcaccgtgcaagacggcagcaagtccaaggatcgtgaagtcaccgcatcgattaccgtgtccgtgatcgacaagcccgagccgccactgctctcccccgtagccggggaaccgcaggacagcgcggtcagcctcacatggacgcccggtgccgccaatggcagcccgatcaccaactacaaggtcagttggaccggcgccgccaccggagagaaggattgcggtgccgtcacctcatgccaggtcacgggtctgaagaacggcaaaacctattccttcaccgtcgccgcgcgaaatgacgtcggttggtccaaaccatccaccgccgtcgaagccacaccggacaaggtgccgtccgctcccaccgatgttacggtcacaggtggcaataaaaccgccaaagtgacgtggaaagcgccgagcggtgatttcagcgccgtcgacaactattcagtgaccgtcaccggtgcaggtgctccgcagaccaaggaaaccggcaatacggccaccgagctgtcgtttacgttcaacaacaacgacatttccgatggcaccgccattacggcgaccgtcaaagcccataacaaaatcaattggagtgccgagtccgcagcatcgccgtcagagaagatctggggagacccggatgcgccgaacattgcgttgtcgaacaacgacaccacaggaacggcgaaagtcactctcggcaacaaccgcaatgccggctgccggcgaatttccttgggaggagacgtcaaggacaccatcgattgcagtgacggtgacgctacgttcgatatcaatgagaacgatttgaacacccgggaaatcaccgtaacggccaccgtggtgccgcagcgcgatgcttccgccggcacaggcaagagcaggtttgtcccgcagtacaaggtccagccgcccactgacgtctacaccaccggatccggcagtacatgcaccgtgcattggaccaagcaggggcatgcgcagtcctacaacgtgactgccgatggcatcgattccggtacagctactaaccggaactcactcgacttccgaatgagtccttgggccaaatgcaataccgcatcggtgcaacaggtgttcaacggcgctaccagcgatgccgccaccggaggcccgtacaatggcgctccttacacctatgagaagaaggctgtaatcaacaaaccgcaggagctgcgctggtcagacaacgctcacgtcattaacgtcaccggcggttcggttgaggtctatggcaagcaggccaccgtacaaatcatcatcaatggccaaccgttcacgtggaaccccggccagccattggacgtcaccgacttggccgtggccgccgatggcaactacacgtggagcgtcaaagtcaccggcgggccgggatactccggtctcgacaatacggcggacggcagcagcgtcgcgggcacacgcccctctgattcctcggaggggaccgagtcgctcaaatccggtaccgatgtcaccactttggccaagaacccttggattcttggtttcggtaataccccaatatcgtcaaccaccattcacaagcagtaggagaacatccatgagcgagaacatcgacgacgcgacgcagctgtctgacacgacccgtctgtctgacagcacgcagctatccgacgccacgcacttgtccgatgccacacatctggcatcggaaccgcacactggcaccaccccgaacaccgagacggcacagcaacccgttgcgttgcctaacctgccgcagcggccgtcacaagcgtcgtcagaaaagccgtctcctactactgatgccgcctccattcctgcgggcgatgacagcaccgtgctcaagccgcgcaaggacgcgacgccagccatcccgcagcaggtcggcatgccggcaaagaccagcacgcccaaagtcgcgcttccgcacttcggacgtaaatccggcaagcaggccgctactgcgaatgctgcccccgccacccagacctcccgtcaatggacgaccacaaccgccggcaagaccgcagcatccaacgccgaaaccgtggctggtcgcgggccggtagccaatcagcaggccgccgcgcaatcccagccgcagcgtcagtcgagcaaagccgcgcaagcagccgcatcggcactgcccgccagcatcaattccggactactgccccagcccacggctcaggtccgggatttccaacagtccttcaatgcgctggtcgagaatgtctccaaggtggttatcggcaagaccattcccatcaagcaatgcgtcaccgcactgatggtcggtggccatattctgcttgaagacaaccccggcaccggtaagacccagttggcccgaggcttggccaactccatttccaccggtttcaagcgtattcagttcacgcccgatctgctgccttcggatgtggtgggtgtgactttctacgatcagaagcgcggagaattcgagttccgcgagggcccgattttcgcctccatcgtgctggccgatgaaatcaaccgtgcatcgccgaagacgcagtccgcacttctggaggttatggaagagcagaaagtcaccgttgacggcgtcacccatgatgtaccgcagccgttcatcgtgatcgcaacccagaaccccatcgagcagctcggtacctataagctgcctgaggcgcagatggaccgcttccttatcaagacgtcgattggctacccgggccatgatgtgtccgtcgatatcctcaagcaggtcgatatcaccgaccgtgcgcagaccatttccccggtgctgagcggtgacgatgtcatgcggctgcgtcaggtggcctctgaaatctatgtggatgatgcgattcgtgaatacatcgtcaggctcgtcgaggcgacccgccacaacgagaagatcacagtcggctcctccatgcgtggcgctttggcgctgacccgatgcgcccgtatctgggccgcggccgatggccgtgcctacgtggtgccggatgacgtcaaggaccttgcagtggccgtgctcgcacaccgtatcacgctgactccggaagccaccttcgatggcgcgactccggaaagcctgatcgcacaggtgctcgaagacgttccctcccccaccatcggttcctgatagggcctggaaaggtatccgaccatggcatctacatccgccgcattacgccgtcgccggcgcgctgaacgcatgttcaagcgcgcggtaagacgcatcagacggttcttcgcatcctacgtctcgcccttgggctgggcggtaacgggcgcaggcatcgcatgtcttattgcgttcctgcctctgggctggtatgagctgctcgtattcggcatcgtggcgatggtgatgatgctcgcggcaatcgcgctttccctcggcaacacacgcttccacgcgtccatcgccgtatccgatcatcgcgtgaccgtgggagacaccatatccgttatcgtcggcatcgacaacaccggcagaacgccgacaaccacggcacgcggatatctgccaatcggcgatgcgcatgaacgattcaacatccccatgctggctcccgggcaatccaagcaaaccgatgtggagttccgtacggtatcgcgcgcaatactgcccatcggaccattgcgcatccgcaagggagacccgttcggcctggtgcgtcacgaaaaggagctggccgaccgcatcatcgtattcatccaccctcgtaccgtgcgtctcgataccttgaatgccggcgtgccccgcgatctggaaggccaaccatccggccagatcgtggatgatgatctcgacttctacggattgcgcgaatacgagccgggcgacgacgtgcgtaacgtccactggctgagctccgcgaaaaccggcacgttgatgattcgccaatatgaagccacgcgccgcaccgacacctcggtgaccatcagcgtgaacccggatgagtacgtcaacggcgaggaattcgagatggcggtgtccatccactcctccatcggcgtcaaatgcctgctgcaggatcgcccgctgttctgtcacgcgggcaacgcgcacggccagccgcgcaacgccatggagttcctcgacaacgccagtgccatagagcctgatcgtgaggacaatccgaatctcgccgagggcacgctgaagcacagtcctgatgcttcgttctattttttcactgttggatcgctgaaagacatcgagcaaatcaagcgcatgaccttggccttgccccgatcggccagctgcgtggtattgcaggccagcgccggcgccaatcgcggcatcagaagattcgccaacttcacattggccaccatcggcgaactcgatgatctcccactgatcatgggggtgctcgcatgaccttcgaccagtccagtatcaccaataccaataccgctgcgtacgccggatcgagcggcacatacaccggcacttcctccggcacgtacaccgggacctccaccaccaccggctcctgggccgactccacacattcggttatctggatgaccagaggcaatgtgcttcgcggcatgggcctcagtcgccagccgtggggcaaacgaatcgccagcctcgtactcatagcggcgatgatgttgctggcgcaagccaatctcatcgacgtgtacggcggcgtggccacttgggcgattgccgctgtaccggccaccttgctgggcgcgatcatcgctctggcgggcatgttgccggcgttgcgactgtggtggcaaatcgtgtttctggcgtttgcccaattcatcatcggcccggtggtaacgctgagttccactacgtcccattacgtgattcccaccttgaagaccttgagttcaggttgggaaatgacgtttggctcgttcaagtacattatttccgtcgatccgcctctgggcacgcaagacggcgtgctgatggcggtatggaccatcggcctgtggcttacgttcttcaccggcgtgtttgccattaatgccaacgcatggttgtctctggtgggagtgctgccccttgcggcggccgtggccgtatgtgctctgctgggtacggacagcggctggcaacgtgccatctgcggcattgcctttgccttgctgctgattatctggctgtcttggcgtcttgaactgctggaatgggggcgctggatatccgcgctgatcatcgtcgtgctcgctgccggccttgctttcgggggcacgttgctggtgccacaggaccgtttcgtgctgcgtgaccgctacgatccgccgttaagcccctacgattacaccagcccgctcagcggcatgcgatcctatatcaaggaccacaaaaaagacgtgttgctgaccgtccataatctgccggccggaacaccagtcaaacttgcggtgatggatcgattcgacggcacagtatggaacctgtccgattcttccgaagccacggactcctcgaattatcatcgcgtgggcaccacgatcaaggcggatgagcagggcgaatccttcactgcgaccttcaccgtcgatcagggattgaccgacacctggctgccgctggcgggagcggccactggcgtgagcttcgccaacgatgccgacaacggcaatgacacgttctactacaacacggataccgattccgccattattcccgtcggcacgcgcaagggactcacctataccgaatccggcatcatagcccacaagcccaccgataagcagatcagcagtgcggccgcggcccgcatcacgcagccttcagcccaggatgttcccgattcggccagcaaactggccacgtccattgccggcgggcagtcctcgggcggtgccgccgccacggccttggccgacacattgaaagactccggatggttctcacacggtctggaaggcgattatccttccgatgcaggccatggcaattaccgtatcaacaagctgctggcaggcacggccatggtgggtgattccgaacaatatgcctccgccatggcactgatggctcgtgagctgggactgccctcccgtgtggtcctgggattcctgccgaaaaacgaggatggcgaaatcaccgatgcccgcacggagaagacctcgggcaatggcaccaaaatcgaattcaccggcaacgatgtcaccgcttgggtggaaatcaaattgcagggcctgggatgggtggcgttctatccgacgcccaaggagaccaaggtgcctgatgaaaaccagaacctgacgccgccgaatccgcagacgctggtccggcaaccaccggtgccgttgaccga

SEQ ID NO: 1576 - DNA, 36994 bp, Unknown
  R221_24m  MAG No. k141_31788
gcctggttcctatcagcggtcatcgggcgtccccgttcccggcgacaacaccccccggatcatcgacgacagggcaggaaagtcataccggaaccggcgacccggccccgaccatcggggcctaccaaacatggtaatggggcaccgcgccttaatgagacgctacacgagcagtctcagcaactggtagagctgccacaggctacgcacgttgaagtgcgtgccgtcaaccgtggcgttcgcctcgccatcgcccacatggacgatcacggtgcgcccgttcacggtcagattaccgtgcatcgtgatatgattcatcttgcaaccttgttgattaaaggcgcaagccggtaatcaacgcaaaggcccgatgccgcaaacgtcgggccttttcttatcggctcacgccgattggcccgtcatatcaacggggacaccgcatgttacggcattacaaaccaatatatcagcaccccggtggcgatcaagaagacaggttccagaaaaagaaaaagggcctgggcatgttgcccaggcctcggttcgcggacagggcgagattcgaactcgcggagggttgcccctcaacggttttcaagaccgtctctttaggccgctcagacacctgtcctgatgcgcgttcacacgcgcaagtattcattatacagaagggagggatgttgatattcggcagtgcggtcggtcttggattcgcctgctggctattagcgatctctccctcagtcagctacgctgacagctcccccattaaagggagctaaagcacgatgagactcaggcctcccacttagtgggctcgatgacttccttgccgcccatgtaggcgcgcatggcctgcggaatctcgatggagccgtccttctgctggtggttctccatgatggcgaccagccaacgggtggtggccagcgtgccgttgagcgtggagaccggacgggtgccgccatcttccatacgctcgcggatgttcagacggcgagcctggtactcggtgcagttcgaggtggaggtgagctcgcggtagcggccctgggtcgggacccaggcctcgcagtcgaacttgcgggcggcggaggagccgaggtcgccggctgcggtgtcgatgatgcggtagggcacttcgaccttggcgagcatctcctgctccatggccagcaggtgctcgtgctccttgtaggagtcctcctgcttggcgtagacgaacatctccaccttgtcgaactggtggacgcggatgatgccggaagtgtccttgcctgcggcgccggcctcgcggcggtagcaggaggaccaaccgcagtagcgcagcgggccgttgccgaggtcgaggatctcgttctcgtgcatgccggcgagcgccacttcggaagtgccgaccaggtactggtcgtcgggctcgcgcagacggtagatctcgtcggcgtgggagttcaggaagccggtgccgcgcatgacctcggggcgcaccagcgtcggggtgatggccagcgtgaagccgtgctcctcggcctggtccacggccatggtgagcatggcgatctgcatacgggccacctggccacgcaggaagtagaagcgggagccgccgaccttgacgccgcggcgcatgtcgatgccggccacgccggtgccgagggtcaggtggtccttgggctcgaagccttcggccgcgaagtcgcgaatctggccgaccttcttgacgaccacgtagtcgtcctcgccgccttcgggagcttcgggctccacgatgttggagagcttccacatggcggtggtgtattcctcggcggcggaatcggccttggacttgtattcggagaccttctgggacagttccttggtctcggcgatgagcttggccttctcgtccgccggggcggaggcgaccttcttgccgatttccttctgctgggcgcgagcctcttcgaaggccttcagcgcctcacgacgtgcggtgtcggaggagagcacttcgtcgacgagttccacggactcgccgcgcttgcgctgggattccttgacgatatcggtgtgttcacggatgaattgaatatcaagcatgggcaccagactagccgcgtaagcagacaccgacaatggccgaatgcgcgggagtcacgcggaaatcacagggaagcccgggaaagtccgcggacgggtccacccggccaatttcgtcagatgagacgcgattgaaccataatcgcgccccacggggctgttgcgtgcaggaaatgttcacgtacggcgcaccatggccgcaaacgacctccccaccgataacaataggagccatgcctcagcctgccctcaccgtgtttctgatcatcgccgcaatcgccattgtggtggtgctcatcgccgtcatcgtcatcgccctgcgcgcgcagcgccgccgcaagctggctcagacgctggagaagcgccgggacgacgaggtgcagtacgccttcatcgtgaatccgtccaaaccgcaggccgaagcccgccggctgcatatccagaggttctgcgaggccaaggggctcaatcgcatccgcttctacgacacccagcttgacaaggacggcagggtctgcgcgcttgaggcgctggaggacggcgccgacgtggtgatcgcggtcggcggcgacggcacggtgcgcacggtggcgagcgccgtctccggcaccggccatgcgctgggcatcatccccatcggcaccggcaacctgtttgcccgcaatatgggcgttcccgtggacgatatcgacgccgcgctgaccgtggccacctcccacggctcccgcctggtggacatgggccgtctcaccctgctcgaccacccggaggacgaccacggccacgccttcctcatcatcgccggcatcggcttcgatgcggctatgatcgacgacaccaaccccgagctcaaggcgaacatcagctggctcgcctacttcgtgggcggcgtgaagaacctgttcgcgccgaagttccgcggcacgctgacagtcaccagcgccgacggctcgacccacaccatcaagaatctcgatttccgcacggtgatggccggcaactgcggccagattcccatgttctcgctgatgccggcggcatcctatgacgatggtctgctggacttcgaaatcatcgacaccaccggcggcatcctcggctgggccaacctgttcggcgacgtggtgcaccagacgatcatcggcaagcccgaacagaacccgctgtccacgaactcgaccatcgaacaggtccagggtgtcagtgccgaaatcacattggaaaagccggccaaagcgcaggtggacggtgacatgctgccggaaacccgccacatccgtttctcggtggatcaccgcgcgctgatcgtgcgcgtgcccgacgcctccgcgctggaaaagaccgcgcaggccgctgcttcaaatgccacctcgaatttcgccgaaatgaccggtacactcgagccgattcgctgattcgccaatccgctaatccgttactacgatgcgtggccggtgactcgggcgacatgcatcgccaaataagcgatttcgtcgtcgctgatatctgtgtcgaggcgcagttcgagcagggaggcgatggttcgcgcgcatcgcagcgcagcggggtaggactcacgaatcaccttcatcaccggtgccggctcgtccgtcagttgctggtgctggtggatgcgtacgaacagatagcgcaggtgggtgatgaaccggcccacgttcacggaactgcggtccaacgtgatgccgtagctgtggtcgatgatgtcaagcagttgctggatcacgcccgtcatcgtgtacgtataggacaggtcgccggtggcgaagccggcgttgaccagatgcatggcaagcgcggtggcctcgccgtccggcagcgtgacgtcgagccgtgcattgagcgatgcgagcatcgcacgcccctgcgcgtattcctgcgggtacaggttgctcacctcgccgagcagcgggtaggtgatgtcgatgccgcgccgcacccgctccaccgcattcgccacgtggtccgacagggccatgaccagcgtggtgctgccggtctcgcgctcccccagtccggtctcctgcatggattcgacgaccacgcggatgatttcgggcggaatgtccgccagcatctgcgccagatggtcagggtcgcgcccgtccgatggcacgaaggtgcgcacaactttcgactcgtcgaccgtctgccccggcttggcctggaaccccagtccgcggccggtgagaatcacctcaccgccgtcgccgcctttggcgagcacgacgttgttgttgaacactcgcagtatttccatggcatcctttcgcaacgtcattgttccacatcgatgatcgggctgccggctgatacggttttgcagtcgccgccgttgtcgtcgctgctaccgtcgccgatcaacggcgtgaccacggtcagttcagcggcgttgaccaccgtcaccaccaccacaacgctgtgcccggccgccgcgactttgccgaaatccacggtggccagtggctctcccgccgcgatccgctcgcctttgcccacggccacgacgaatccctcgccatccatattgacggtgtcaatgccgacatgaaccagcacttcgatgccgtcatcggttttaatgccgaaggcatggccggtccgggccacggttttcagcgtgccactgaccggtgccagcacggccgtctcgccggccgtctccggcacgacgcctacaccctcccccagcgcgcgggaggcgaacaccggatcgccagtcgcttccagattcatcaaccggccggcgaccggcgacaggatggcgttggagtcaggagtccgatcggaggcaggccgcgatggggaatcttccgcagactccgcatccgacgatgtcgcgccaatccctctcaccgcatcctgcgagcgtacgttctcgcccgccgagaccatctgcgcctccgtggcgcgcggcggcgtacggtacccgaacagcaccgtcagcaccatcgccattacaaacgcaacggcgatggacagcgcgtacacccacattctgtcaaacaccgaaatcgtcagcaacgaggagaaggcgaacgccgtagtcgtgacgccccggaccatctgaccggatggcagcacggacgggaacagccagccaagcaccgcgctggtcacgccgccggccgcgcagccggcgagcagccagcggtagacgcggcggtgatgcagatggatgccgtacaggctcagttccgaaacgccacccagcaatcccgcgagcaacgcccccaccgcggtctgccgcatggccgaatccttgccgcgtacggccagcacgagcacgccagcggtggcaccgaagcaggcaaagttccatacacccatcggaccttggacgaaatcgtagccgagcgcctgaatgttcatcagcatcagggcattcaacggccagtgcagaccgagcggcacgagaaacgggtagagcatcgggatgatgagcgcgaataggaacggcacgtgcgcgttaagccatgctgtggccgctcccagcccaccgccgagccatattcccagaggcccgatgaccagtatggtgagcgcaaaaacgacgaccagtgagaggaatggcacgaacaccagctgtacgctgtcgggaatgacgcgcttcaacccgtggtagaccacggcgagcacggcagccatgagcaacggcacgaagacgttgccgccgtagtcgttgagttgaatcggtatgccgaacgccgacacggtgcaggtttcggcgccgaatacggcgttggccgagcattgaatcgccccggagagggcgctggatacggacgtcccggacattccggacattccggacatcacgccagtaaactgcggggtcatcagcgcggccataatcgcgccgccgagccaggggtcgacgtccagtttcttggccgcattgtaggcgatcataatcggcagaacggtgaacacaccctcccaaatcgccttgagtagtatccagccggcggaggtctcgccgtcaggcacgatgccgagtgcaacgatcacgttgacgatggcgatgaccagcgaggcaccgagcagtacacccagaatcgggcggaacgagtcagacaggtagtcgaaaaacgcggcagcccaagcgcgggcggcactgccccactcgcggacggtacgaggcgtgaagtgacgggatgtattggatgggccgcaactttgttcggcgtcggtggcagtatcgcgcgatggtgcggcatcgtcggaaaggtacggcgcggactgcgcgggttgcgtgggctgtgtggattgcgctgactgcgcgggctgcgctgactgcgcgggctgcgctgactgcgcgggctgcgctggctgagtgggctgcattgactgagtgggttgcgttgactgcgacgctgactgcatcactgccgatggcaattgcgctgccggcatcaatcgcgccgtccgcagccgaacgatctgctcgtacaccgaggcgaccgctccgccgatgatgacctgataacgattgccggctcgcgggaatgcaccgaggactccggggatggattcaagaccgtgctggttgacatggccggcatcggccagttcgaagtgcagtcgcgtggcgcaatgggtcaggctggtaatgttcgcggggccgccgacggcatcgacgatgcgcgccgcaatcactgcaggcgttgcgttcgatgcgttcgccacggttcctccttgctgccgtatgccactgtgttccattatcggcgctgggtgccccaaaagcacggcaatgccggcaaagcatcgcgaaacggcaactatgcgctacggtgctccgcgatggtgtcccgccataatgttccgcgatgatgcttcgccacacccgttctccgtatttgccgcagcgcccattccgacatcattccaccatgcagaatcctgcaatcgttgtcaaaaatcatcgttttttgccgcctattcggagtgtcgcgactgcggaagtcgtattctatctttcacacacgttgcgtagcagggttgttactcaaaacgaggcaagacctggagcgacgtggaatttgcgtatcgtaatatgcgaattccacgttgttccaggtctttttttgttttcgggcgacttcagacaatcgaagcctgaccttgcacgcggcagaggggccacgcaacaggcgcggtccgtcaacggcgaaaggacaaggcaatgacgacgacaacggcatcacccgtatcgaaacagacggcatccgcggcgcaggaaaccagcgcaaccggtgcggcggccaccgcaatcgaaaccatcgaaaccggcgtggccggagtggcgggcgcggccacaaacgcggcagccaacgcaatcgaggacctcgaagccgccgaatcgcacggcttctccacgcgcttcccgctcaacagcgcattcatcttcaccttcggcgcgctcggcggcatgctgttcggtttcgacaccggcatcatctccggcgcctccccgcttatcgaatcggacttcggcctgagcgtctctcagaccggcttcatcacctcctcggtgctgatcggctcgtgcgcaggcgcgctgtcgatcggcgcactgtctgaccggttcggccgcaagaagctgctcatcgtctccgcgctgctgttcctgctcggctcaggcctgtgcgcctcctccaccggattcgcgatgatggtgtgcgcccgcatcatcctgggtctcgccgtcggcgcggcctccgccctgaccccggcgtacttggccgaactggcgccgaaggagcgtcgcggctcactgtccacgctgttccagctcatggtcaccttcggcattctgctggcctacgcctccaacctcggattcctgaaccacaacctcttcggcatccgcgactggcgctggatgctcggttcggcgctggtgccggccgccttgttgctgctcggcggcctgttgctgcccgaatccccgcgttatctggtgaacaagggcgacacccgcaacgccttcaaagtgcttacgctgattcgcaaggacgtggatcagacccaggtgcagattgagctggacgaaatcaaggccgtggccgcacaggacaccaagggtggtgtgcgcgaactgttccgtatcgctcgtccggcgctggtggccgccatcggtatcatgctgttccagcagctcgtgggcatcaactcggtgatctacttcctgccgcaggtgttcatcaagggcttcggcttccctgaaggcgacgcgatctgggtgtcggtgggcatcggcgtggtgaacttcgtgagcaccatcgtggccacgcttatcatggatcgtttcccgcgcaagggcatgctgatcttcggttccatcgtgatgaccgtttcgctcgcggtgctcgccgtgatgaacttcgtgggcgacgtggccgtactggcagtgccgacgatgattctcatcgctttctatatcctcggctttgcggtctcgtggggcccgatcgcctgggtgcttatcggcgagatcttcccgctgagcgtgcgcggcatcggctcatccttcggctcggcggcgaactggctgggcaacttcatcgtctcccagttcttcctcgtgctgctcgatgcgttcggcaacaatgtgggcggcccgttcgcgattttcggcgtgttctcggccctgtccatcccgttcgtgctgcgcttggtgcccgagaccaagggcaagtcgctggaggaaatcgagaaggaaatgaccaagcgctagacaaccggcacacgattcgcacaaaagttgacaactcttaacataagagtacccaaagtggcgaaaaacgtggcagaatagggaacatggtagcaaacaatgcgggtcagcccgccaccccagcagatctgattaatgtcgatgaggttatcggcaagtactatgacctcgtccccgatcccgaagtccccgagcagcgtgtcatcttcggcacctccggtcaccgcggatcgtccctgaagacctcgttcaacgaggcccacatcatcgccatctcccaggccatcgccgaataccgcaagaaggccggcgtcaccggcccgctgtacctcggctccgacacccacgcgctgtccggcccggccaagaagaccgccatcgaggtgctcgtcgccaacggcgtgcacgtgcgcgtcgactcccgtgacgacttcgtgcccaccccggtggtctcccaggccatcctgacccacaaccgtgcggtcgacggcacccagcgcttcgagggcgagggcctcgccgacggcatcgtcgtcacgccgtcccacaacccgcccaccgacggtggctttaagtacgaccccgtcaccggcggcccggccccggccgagaccaccaacgccatcgccgctcgcgccaacgagctgctcggcgacttcaagtccatcaagcgtgtgccctacgaggaggccatcaagtccgagtacgtcgagggcttcgacttccgcgagcactacgtggacgacctggagaacgtcatcgacttcgacgtgatccgcaactccggcgtgcgtctgggcatcgatccgctcggcggcgcttccgtgaactactggccgctcatcaacgagaagtacggcctgaacatcggcgtggtgcgtcctgaggtcgacccgacctggcgcttcatgaccatcgaccacgacggcaagattcgcatggacccgtcttccccgtacgccatgaagggcctggtcgacgagctcaacgccggcgcctgggacaagtacgatctggtcggcggcaccgacccggacgccgaccgtcacggcatcgtctgcccgaactggggcgtgatgaacccgaaccactacatcgccgtgtgcgtggagtacctgttcggcggcaaccgtccgggctggcctgagggcgcagccgtgggcaagacgctggtctcctcttccctgatcgaccgcgtggccgcatcgatcaacgcgaaggtcatcgaagtgccggtgggcttcaagtggttcgtggacccgctgttcagcggcgaagtcgccttcggcggcgaggagagctccggcatgagcttcctgcgcaaggatggccgcgtgtggaccaccgataaggatggtctgatccccgacctgctggccgccgagatcactgccaagaccggcaagaacccggcccagcttcaccaggagcaggtcgagcgcttcggcgagtcttggtacaagcgcgtcgacaccccgaccacactggagcagaaggccaagttcgcggcactgtccggcgacgacgtgaccgcctccaccctggctggcgaagacatcaccgccaagctgaccgaggcaccgggcaaccacgccaagatcggcggtctgaaggtcaccaccaaggacaactggttcgccgcccgcccctccggcaccgagaacatctacaaggtgtacgccgagtccttcgtctcccccgaggctctggacaaggtactcgacgaggccaccgtcgtggtcgacaaggccctgagcgagtgaaatcgctgcgttagtcgcgttcaccgcaaccaataaggctctgcattggattcatacaatccactgcagagcttttttagcgcatatgcagttcgcgaccactgaaacacgcaggtcaacggttctcctcatgcaccatgactgcattttctcaacatcactgcagggcaggacggccagatgaccgcgaaacgttcgactacctatattatgaccgagtttcccatcatcattgtggggtcacagcggccagatgaccgccgaagcgttcggtcggcttgcatcatggtcgagttttaacatcgttgtgggacgccacgacgaatttgcccattccagagctgccatcccacaaaagcgtgggacaacagctaagtcaatcgttttacatttcccccatcccacacactcaaactggaaaccccggaaagacgccattcctgccacacccgtcacagccattacccgaggggccgtgggacgccacgcaaaaatcggcaaaacatgcgtagcgtcccacacccattggcgcaaatccacactcaatgcaccgacaacacccccaatcgaccactatgacacatttccctccacaatcgaacactagtcattcacgaaatccatcactacgaggcatcgcaatcgaacggcatgcaatatcaagcacacaccacaacaacaggtcgtacaaatattgcctttacatcagtccgtttcggacattatggtcacagcaggctctgcgccaactcttcaagagacatggcaactacatgaaactcgaatacggcaccgcgcgaagcaagcgccctcgccacgttgaaagcgaattcagcacgagcgtcctcgttagcgatacttgccgccgtggcgacgaagaccagccatctccgcccgaccagcacaccccttttctcttggtcacggcgccattgagccttactcgtacgatgatgatcgccatcatattcaacagcgaccttgaactccggccatgctaagtccaacgttatgggagctccagatgcaaaagccgcatccggcaccacatagttcgcaaccggctgtggaatcccatgcgctaccagagagagtcgttcttctgattctttgggcgaatcagcaccaggtgatatcagaggcaatgctcgaacgcaggacgggcgccctctgaatcgggtaaattgctccacgaacttcaccagatcctgatagattgcagcagcatcacgatccttggccaatactggctgtttgctcgtagcagcgatgacggcatccccgagcacaatcagggactcaaaagaaacatacggggcaagttgagcccatacgtgaaacaggtccagcgcaaacacgtgttggttcatttccacattggcggctttagccgcatgtttccaaatatgcgtttgcagtggtgcatggcgtgtacgaaaccgcctgctcttaacgctggatacagtgtgcagcttggccgagtcgaggtcgcaatcggcgggaatcggtacggattgcagagcgagggaagtggtcatgccgaaaagcagcttcttgcccgcccgtttcgcttcctcagtgcagcgtgcgaccatgtcgcgtctgcgctgggcgaggctttcgctcatggtcggtgtcgctgcagaatcatgtgcaccactgttcggcgatgacgagtcgcgagaagtcgggtatttcgagtcagtagaaaatgatcccgcaaattcgggcggaacaaaaactgcctccgattcttccggaggctgatcgtatatagagcctggcagagctccatagttggtgatgccgtcggtcatgctgttcatgacaccaccatatgggtagtgggtgcggaaacggaagccgatccgaggtatgtggtcctagcttcacttacgcacattcattgtggataaccatgtggacacctcacttatacacatagtcatccacctcttcaaccccgatttgacacactaactgtatctgatatgattacagtatcataactgtacacatcatagttacagtatcgactcggtaaggaggtcgtttcatgaacggcgaccattcactggcagtgcacgcattggtctaccttgaccatcgcgccacacacctgcccagtcagatcctggccgagaacatatgcaccaatgcggcgcgcgtgcgcaaagtaatgcgaccgctcgcctcagccggactcatcgccactaaagagggtgctgaaggcgggtacgctctggcccggcccgccgccgaaatcactttgcgcgcggtagcggaagccaccggcaccacttttgtgaaagtgaactggacaccgggcgacgtacacgaggactgtctggtgtcatcttcaatgggcgcagtgatgaacgacatctatgccgggctcaaccgcacttgcctcgaacaactcgaacacaccaccatccacgacatcaccgaacagatattcagcgagcgcaaaggctaataatcccgcgcgtttcccctagccagcatcagtcgataacgcttcggcagtcaaagaagaaaacagacgccgcacggcacacaacacatcagcacaacgcactcttatcactcgaatacgtaaggaagtaaccatgtccatcagcacacccaatgccatcagcacacccagcacctcccccactatcaccaccgacgccctgatcattggattcggcaagggcggcaaaaccttggctgccaagctcagtgcagccggccgcaaggtcgtcgtcgccgaggcaagcgccgacatgtacggcggcacctgcatcaatatcggatgcttgccgtccaagtcactgattttgtccgccgaacaggcgcggcgggatggcgcgaacagtactcccgaaacccgcgaagcagcgttcgaggctgctatcaaggagaagcgccgcgtcacttcgatgctgcgcgacaagaactatcacaagctcgccgaccaagacaacatcaccgtaatcaccggccgcgctcacttcaccggccctcatagcgtggaaatcgccaccgctgagggcccggtcgccgtgaccgccagcaagatcttcatcaataccggtgccacgccgcgcattccggatattcccggtatccacactacgcccggcgtctacaccagcactggactgatggatctcgacgatatgccgcagcgactggtgattatcggttcaggattcattggacttgagtttgcctcgatgtttgccgatttcggcacggcggttaccgtgctgcagcacaatgccgagttcctgccgcgcgaggatgcggatgtggcggccgcgattcgcgcacagttggaagcgcagggcgtcaagttcctgttcaacgcggataccaaggccatcgcgcctgctgctgacggcggcgtcaggttgtccgttgcggtgaagggtatggctcgcggcgcatcgcaagcttgcgattccacccccgccggcaccgggaacgctcataccgatatcaccggtgccaccgacgccaccgacgccaccggcgccaccgacactacaacaaccaccagccccactagcaacccgaccgatcacgccacgatgtcacacgttcaaacgaaaccatcagacgatggcgagccgcggttcgccgagccggctgaagcccgattctgcctgaccaccgacgcggtactggtggccaccggacgtacgccgaacgtcgagggactgcatcttgaggcagctggcgtggagctcaccgaacgcggtgccgtgaaagtcgacgagcttctgcgcaccacagcagccgacatttgggctctgggcgatgtgaacggcggcccgcagcacacgtacatttcgctggatgactatcgcgtggtgtggtcgcagctcaatggttccgaccgtccgtacacggtgaaggaccgcaagcatgtgccgtcgagcacattcctcgccacgccttactcgcgcgtgggattgaatgagcgcgaggcgaaggcggctggattggattatgtggtcaagcgattgccggtggccgctgtgccgaaggcccaggtaatgcggcgaccggatggtctgatgaaggcgattgtggaacgcaatactggccgcattctgggtgcgatgctgctttccgtcgagtcgcacgaggtgatcaatatcgtcaagttggcgatggatcttgacgcgccggccagcacgttgcgcgatatggtgttcacgcatccgacgattgccgaggcactgaacgacttgttcgcgtagtttgtccgcatagcacgcccgcgcagcatgacccgcgtagcgcagcccgcaacagactcccctaatgcgcgcgaaggtcctcatcgacgtaaaccgatgaggaccttcgcgctgtcgtcatgatccgtacgtgacagcaatcacgtccgaaccagccgttacttcaagccgagcttacggtccagaatgtcggaggcatccaatcccaagcggcgtcggatgaaccagccaagaccgagcggcaggccgggagccaaggccatgccgcctggaccgagtgccacggttttggagttgcctgcgataagcatggtgcccttggatgcggccgtggccgtcgaaccatcgctgtccgcctctggtttgaggatttcgatgttgccgtcactggttttgtacagtcccttattctcattccagataccggatgcgccattgttgccggcctcacccgcagagaggaaatgtcttgtttttcttgtgagcgctcacctattcacgcgcgatggcatgtttttcaagcaaagtcaataggtgtgatgttattcacactcttcactacgttgttttgcctcgcactgggcaaccccacttcagcaagagattgcacaacttgcgttagggtggagaacatgactatcacagtatccacagatgggtccgcattagggaatccaaacgggccaatgggctgggcctgggccgatcatgagcagaacgccggcggcaagcccggccataagcacgacgaccatggttatgatgcgggcggcgcgaccaacggcaccaatcagattggtgagctgtgcgcagtgctggaagctttgcgagcgcacccgggccctgagccattgctcatcgaatcggattcgcagtacgccatcaattgctcgaccaagtgggtcaaaggctggaagaagaacggctggaaaaattcgcagaaaaagcctgtgaagaacaaagagcttattcaggcgatcgaccgtgagatctcacaacgccctggcccggtggatttccgatgggtcaaaggtcacgccggcaacgagggcaatgagttggtcgatgaactggcacgcacctatgcgggcgattgccgttcgggtgcgcgcgacggctatctgccgattgaaggctggcagtcgctactgggctccgaatacgcacatggcaccgatgtgcctccagacgtgcagttggtgctggatggcaaggcggatgcggcaagtttgcgcaagccggctgcggcgacggattcgacggatgccacaaggccagagaccaagtcttcgtcacccttagcgacacaatcagcgcaacctgtacaatcagcgcaccccgtacaccccgcaaagccaagcggactgacggtatccggtacgctgaccttctcccccgcgccgaaaacgagcccgtatttcaacgggcagccgatgccgatcaaaggcagcatcgaaatcgaaggctatgtggacggcgacggcaacctgaccatcgccaacgcaccattcgtacgacactaacacccaaacacacgaatatgtaccgcaatcggacacgatgacacaaaatcgctcattcgcgttaggataggagataaggcttcacgccgttgatccatgcggcggaggcaaggatggcaaaggagaaaccatggataaggcacagcaggatgcgctgaagaaggcggccggcatcgaagccgccaagctcgttgaaaacggcatgatcgcaggcctcggcactggttcgaccgtgaagttcctggtggacgagctcggccgccgtcatcaggaggaaggtcttgagttcactggcgtaaccacgtctcgccgcacgcaggtccaggctgaaagctacggcatcaagatcgtggacatcgacgacgtggaccacatcgacgtgaccattgacggcgccgacgaagtcgacaagaacttcaacggtatcaagggcggtggcgctgctctgctgtgggagaagatcgtggccaccaactccaaccagatcgtgtggattgtggacgagtccaaggttgtggacaccatcggcaagttcccgctgccggtcgaggtcattccgttcggcgctggccacgtcatcaagaagttcgaggaccgcggctacaagccggtgcttcgtcttgacgccgatggcaaggaagtgcgcaccgacgagaacaacttcgtggtggacctgcacctggagcgcatcgatcacccgcaggagctggccgaagacctcatcaacacggtcggcgtggtggagcacggcctgttcctcaacatggtcgacaaggtcatcgtcggcgacccgaacggcccgcgcgtgttgaccaacgccaacaagtgatcgtctcacatcactgaacttttccaagcccgcatctgtacatcgcaggtgcgggctttactgttgcccgaacaaggcaaaggagccaaaaagagaaaccccgcgaccataacgatcacggggtttctaatgccttgattgcaggtaagactacttacgctggtggcgggtcttacgcagcagtttgcggtgcttcttcttgctcatccgcttgcggcgcttcttgatgacagaacccatctgaagcctccatttcgattaatcgtaaaagttgcaacttgcaccataatacacgtgttgccagacagaggaaaccagtatgttgtcgatagtccgcatatgccctgaacgcagttggggcatccacatcagcaatgtggatgccccaacgttcataagtttgtgcagcagctgacagccgatactagatactacatcgggaacttctggtagaagcgatcgaccgcttccttggtgccggtagcttggaagaccacggtatcgttctgccagatggcagcggcgttcttgctgttggaggcatcggccttcaccacgtacgcgcccgtgacgttgccggaaaccttgacgttgccggatgccgactcatcgccggtctgcgcagcgaccaacgcatcgtactgggtcttggcattgtccgccgacgaccactgcgcggcgaccagcgtgacatccttggcggcatcaccagtggagtaggtcagagtgtactcctcgagcggcgatgcggaattccacgtcgtggaggcatccgccttggtacgcgcgtaattcagcacgctgtccggcatggccttcaacagctcactggcatcatccggcaaagctgtggcgtcgatggtcggcttgatcggctcggatgattcggttttctgctggctgttttgggtggtagtggaggtgccatcattcttctggatggcccaacccggccacacaaaggccgaaagcactgccaggataatcacaacagctgcggcaaccaccactgcaatcaacttgccatgggattgtgtggtcgaggagttctcactattagtcataccccgattctctcacagccgcgtgacgctagacggccgtaatcttagtcgttgtgcgcaagccgcgtgaaactcttgtgaacggtaaaaatttaccgtccgctggtgtttgggttagggtgagaccatggcgaaatcaagtgtgcagtatgtatgttccgaatgcggttggaacgggccgaagtggtacggccgttgccccgagtgtggtcagtggggcacggtcgaggaatttcacgaggctcggccggcggcaggctctcgcacggccgctcccggccgaacatcacgcacgcagtcggttacggttgccgacaacgccagatctgcagcccgtccgattaccgaagtgggcacggaaagcgtcgagcggctcggtaccgggttttccgaattcgaccgtgtgctcggcggtggcgtggtgccgggttcagtgacgctgatagcgggcgaaccgggtatcggcaagtcgacattgctgttgcagacggccggcaatatcgcgcgcgttgtggcgggagacagtacattccgaggagccggtcagcggtctgcccaacagtcgggccgggcgcagggcggcacatcaaacacggtgtcagtacagggcaacgcaccgtcggtacatgccaataccgtgctgtacatttccggcgaggaatcacaggcgcaggttcgtttgcgcgcttcccgcatcaacgcggtggagccgaacttgttactggcctccaccaccgatctgtccacagtattggggctgatcgaacagaacaagccggccttggccattgtggattcggcgcagaccatcgtctcgcaggaggtcgatggcatttccggcggttcgactcaggtgcgcgaagtggcaagcgcgctgatagataccgctaagacgcttgacattccggtatttctggttggtcatgtgaccaaggacggttcgattgcaggcccgcgcacattggagcatctggtcgatgtggtctgccaattcgaaggcgacagcgagaccgcgctgagaatgttgcgagcggtgaagaatcgttttggtccgaccgatgaagtcggctgtttcgacatgagcggtgagggcatcgaagaggtcaccgatcccgccggattgttcctgtctggagacggccctgatgcggccaacgcggcacccatggaaggcacctgtgtgacgttcacattggatgggcatcgcagtctgcctatcgaagtacaggctctggtcaccacgtcggtgctgcccacacctcgacgtgcggtcaatggcgtggaccccagccgtatcgccatgctggtcgcggtgctctaccgtcacagcaagctcaacctgctgtccaacgacctgtatatctccactattgccgggggccaggccaaggagcccggttccgatttggcgatagtggcggcactggcgagcgccgccacgtcaaaacccattgcgcgagccacgtgcgccattggcgagatttccctgaccggtcaggtgcgcccggtaccgcgtatggaatatcgccttcgcgaggccgcgcgccttggctttacgacggcagtcattcctccgctgcgcaagccggtgcatgtcgagggacttcggctggtggagtccaacacattgtccgacgccttagatgccttgggagtgcgtaaatagccctgagatatgcctcaggcggtaagacgcttggtctcttcgacgttgcgcttgagttcgtcaacgagttggtcgggaccatcaaacttgacctgcgggcgcaggaaaccgacgaattcaacgcgaaccttatggtcgtacagatcaatccactcatcggtgatgcaataggcctccaccacgcgttcgttgagtcctgttttctcgctgaaggtgggtttggtgccaatggagatggcggcaggccagcggttctcaccatctaccagccaaccggcatagacgccgtcgaccggaatgtagcctgcaatgtcggagccaagattggcggtggggaatccgatggtgcggccgcgctcctcaccgtgtaccacttcgccttcgatggcgtgcggagcacccagaatggcgttggcatcctggattcggccatgagccagcaggtagcgcacattggtggagctccaggcgcgcattgccttggcctggttcttcttgctccatgcgcggcgctcggccttggtggcattggccagcgggtcgacgggctctccccattcgctcggggcttccggcttgaaatcgcgcggaatgcgcacttcacccgggccacggtcatcgaccacatcaagttcgaatacaccggtggcggcggcaagattggcgatatgcttcacatcaccttctcgccccttgcccatggcggcatcctgcccgaggaccagcgtacgcatgcccagcttgccggtgagtctgccaaggaagaaaatgtatgacatggctgcgaaggccagcgtgtagtgcaccaccaacacatggtccacgccgaactgttccatgcggtgcagtcgatcatccacactggtcaaggcttcggcatccacgttctgcaccgcgggttcctcgccatggtgcgaggcggcccagccgtgcacgaatgcggggcgcgggtcaaacagaatcaccacggaaaaagcatcatgctggtgcgcgagttccaccacacgcttgatcaccgcctgatgtcccaagtgcatgccatcaaatgcgcccaatgtcaccacggccttcttgtcgttactgaacgagggccattcaatcgaaccttcggcgtcaggggtcaggtgcgtgatatccatcagtgtgctgttccttttatccgtgcgatgttattcatgcaatataggcgttgttgtgcgcggcctgtatcaagctgcacttttcaccgcgtctactttacgcgagggggaatacggtgaccggcttggcctgatgagcgttggcacgctcgataatcgccgccacatcatgcgtttgcggcacaatggcggcagtgggctcgctgattgtacgctcgatacggcggccgaagcgcaattcgctggcttcctcaggtgtgatgtcaagcgccggcatcgcgcctcgagcggcctgttccatggtgagggcatggtcaagcagccagttgcggcgctcgtcaccggcaagaccttcaggagtgttcaatacgcacttgttgcgcgtgacggtttgcccttcccgattagtgaacgtcttctgatcggtatgtgcggtgacggtatgggttcgcgtgtcaagcatcgcctcagaggcgataagtccgctggtatcgtccggcaacgcgaatcggccgactcgcgtacggcgcaaacgggtcaggtatccgccgacgccaagttcattgccgaggtcgcgggcgagcgcgcggatataggtgcccgatgaacagctgacccgcacgtcaatatcaagtgcgggaatcgttcccgtgttcgcgtcttcccgcaatggttcagcggcctgctcccctgctacgaatccgctgcggatatccagcacggtgaattcgctgatggtcaccaggcggggcttgagttccacatccttgccttcgcgagccaagtcgtaggcacgctggccgttgattttgatggcggagaacgtattgggtacttgttcgatatcgccggtgaaattggtggcgatggtgcgagtgagcaggttttgccatgaggcagttggtgacgccgttggttcgccgctctggccgccctcagtcagctgcgctgacagcgtttgccagcgggagcgggcttcatcatcgacaagcgcctcgccttcggcatcgtcggtagtggtgcgcaggccgaggcgtatggtggcctcgtaggttttgtcatgcgccacgatggcgttgagcagtcgcgtggcgtggccgaaggcgatgaccagcgtgccagtggccatggggtcaagggtgccggcgtgaccgaccttcttgatgtgcaacgcgccgcgcacggcggcgacggcgtcgaaactggtcacgccttgcggcttgtcgatgatgagtaggccgctgggtgttgtatgaagcacactactcctcgtcggactcgaactcatcgccctcggcttcggcctcgtcgtcgtgcttgtacggatcggcgtcgccggcgtactgggcggtggcgcgggcgcgggcgagttcttcgtcacgcttcttggccacggcgagaatgtcttcgatctcgtgagcctcgccgggcacttcatcgaacacgaattggagctgcggagtcaggcgcaggccagccttgtggcccaccagagaacgcaggtgacccttggcctgatcgagcgcctgctgggcgcgcttgcgttcgccttcctcgtggccttcgtggccgagctgggtccagtagaccttggcgatctgcagatcgttggtcacacgaacttcggtgacggtgatgctggcgagtcgcttgtcatgcagttcgcgctcaatggaggaggcgacgacacgctgaatcaaggccgcaatacgtgcggcgcgcgggttggttcctgccataggaatttccttttctagacttgagccccctctgacgaggggctgccgaacgcagtgaggctgggggagagaaaatcatggaactaccatgtctctcccccagtcagcctgcggctgacagcccactcgtcagagagggcttaacaatgactacttgcgctcgacttcctgcatctcgaaggtctcgatgatgtcgccgagttcaatgtcgttgaaggtgccgaggttgataccagcctcgtagccttccttgacggactgaacgtcgtccttgaagcgacgcagcgaggagatctcgaggtcgttgaccgtggccacgccgttgcgcaggatacggcacttcgtaccacgcttgacctcgccgtcctgcaccatgacgccggcgatgttgccgaacttggaggagcggaaaatctcgcggatctcggagtgagaggtgacgacctcttcgtattccggcttgagcatgcccttgagggatgcctcgatgtcttcgatcgcacggtagatgaccgagtagtacttgatctccacgccctcgcgctcggcgaggtccgccacctgacggttcgggcgcacgttgaagccgatgataacggccttgtcgaccgtggccaggttgacatcattctgggtgattgcaccgacgccgcggtggatgacctggatgccgacctcgtcggatacctcgatcttcatcaaggaatcctcgagcgcctcgaccgaaccggacgaatcgcccttgatgacaatattgagcatgtcgatctcggactcggcgaacttcttcttgaagtcctcgagggagacgaccttgcgacgcttggccagctgggcggcacgctcggtggcctgacgcttctcggcgatctggcgagcggcacgatcatcggaggcgaccaggaagaggtcaccggcggtcggcacggaggtcaagcccagcacctgaacaggtgtggacggaccggccgcttccatcggctgaccgttctcgtcgagcatggcacgcacgcggccgtacgaagtgccggccacgatggcatcgcccacgtggagcgtaccctgctgaaccagcacggtggccacggcaccacgacccttgtcgagtcgggcttcgacggtggcaccacgggcgtccatgtcggggttggcgcggaggtccagctcagcgtcagccgtgagcagcacggcttcgagcagcttgtcgacgtgcaggttctgcttggcggagatgtcgacgaacatggtgtcgccaccatactcttcagggaccaggccgaactcggtgagctggccgcggaccttctccgggttggcaccgggcacatcgatcttgttgacggccacgacgatcggcaccttggcggcctgagcgtggttgatggcctcaacggtctggggcatcacaccatcgtcggcggcgaccacgaggatcgcgacgtcggtgagctcggcaccacgggcacgcatggcggtgaacgcctcgtggccaggggtatcgaggaaggtgatcttgcgcggttcgccttcaaggttcacggtgacctggtaggcaccgatgcgctgggtaatgccgccggcctcacgtgcgatgacgttggtcttgcggatggtatccagcagtcgtgtcttaccgtggtcgacgtggcccatgacggtgacgaccggcgggcgaggcttgagatcctcgtcatcctgcagttcttcctcgtcaaggttgatgtcgaactgctggagcagttccttgtcttcctcttctgcggagacgagctggatgttccagccgatctcttcgcccagaatctggaaggtctcctcatccaaggactgggtggcggtagccatctgacccaggtggaagagcacggtgaccagcgcggcctggttgacgttgatcttctccgccagatcggccagggaagcgccctgacgcagacggatggtctgaccgttgccgttggggatgcgaacgccgccgatggtcggtgccttcagctcctcatactcatggcgctttgccaggcggttcttacgggccttcgaggacttaccgccctgacgtccgaatgcacctgcggcaccgccgcgaccgccgcgaccgccgccacgtgcgggaccgttgctcggtgcgccgccgccctggaagttattgccgccgccttggcccccacggaagccgccgcgtgcgccgccctgaccggcaccctgggagccgccgccctgacccggacggttgtggccccactggccgggacgaggaccgccctgaccaccttggcccggacgaccgccacggaagccgcggccttgcccctggccttggccgggacggcccggacgaccgccacgaccgctatcagcagtcggacgagccatcggatgcggacgcggaatatcacccggcgtcggggtgtgcataccctgcttgcgggagaacgggttgttgcccgggcgcgggccctgagcgtgcgggcgcggaatcgcgtttgaagcggcattgccgccattggcaccggcgccgccctgagcgtgcgggcgcggagccgaagcattgtcgcggttgttctgatgctgccccggctggccattgttcggacggccctggttgttacgacgatcgttgttacggcgatcgttcgggcgactctgacgaccgttctcgcggccttcgcgattatcgcgaccattctcacggttgtcgtgctgaccgtggcggccgggggtcggcatgccggggcgtgcgccgccctgcggacgcggtgtcggtgcgcccggagtcggagcctgctgatgtgccgaggcgggcgatgcctgacgtgcgggagcggccggagtcggtgcggaagatgaagtggaagccggggccgaaggtgcggccgggcggcgctgctgcacgggcttggcagcaggcttttgtacggaagatgcgggcttggaatcgcccttggcgttgtccttggcgaactctgccttcagacgccgggctaccggcggctcaatcgtagaagaagcggacttgacgaattctcccatgtccttaagcttctcaagcacggttttgctatcgacattcaaaaccttagccagttcgtatacgcgtggtttcgccactaattactcctattctgtgaccacgcgcgtgcatgggcgtggtcagttggtgatgacggcaagcctaccctgtctcatcgtgcgaccatgatcgtgttacctcgtctctggtgtgggcgatttcgcgcacactgcaccagcccacatacgccaatcaagcatactcatagcgctggatagcgtagacgcagcgagccgcgccattgctgacgcggctcgtatcaggaaataatgcgccctgaagatcattcgccttcgagcccggcggcctattcggcttccggagcagcagcctcggccgcagcctgggcggccttttcagcggcgaccttcttggcatgggcctcggcggattcgatgccgatcttccagccggtcagcttggctgccagtcgtgcgttctggccttccttgccgatggccagggatagctggtcgtcgtggatgaaggcgatggcggtcttgttcttctcgctgatcacctgtacgccggtggccacagccggggacagcgcggctgccacgaacttggccggatcgtcggagtagtcgacgatgtcgatcttctccgggccaaggttctccataacggcacgcacgcgagcgccgccggggccgatcagcgcacccttcgggttcacgccatcggtgttggccttgaccgcgatcttggtgcgggcgccggcctcacgagcgatggccatgatggacacggcaccggagaccagttccggcacttcacgctcgaacagcttgcggaccagctccgggtgggagcgggacaccacgatttccgggcccttgatgccacgggccacgttcaccacgtacacgcggatgcgttcgccgtggcggtaacgttcgccgggcacctgctcacggcgaggcagaatggcttcgacatcgcccatcgcgacatgcacgttggaggggtcggaagcatcctgttggatgatgccggtgatgagcttgcccttctgaccggagaacgcgccgaataccttctcatcttcggcgcggcggaacagctgggtgatgacctggcgtgcagtggcggcggcgagacggccgaagtcacgcggggtgtcgtcgtattcctcgcccagcttgggagcggggtgcgggtcgtcctcggtgggctcgaccgggatttcgtcggcggcccagacggtgaagttgccggaacgttcgtcaagctccacacgcgcgtgcctggcggcgtgcggagtcttgaggtaggcgaggcgcagggcctctgccagcgcatcatccagggttccggggtcgattccttgctcggcggcgagcttgtgtattcctgtcaggtccagttccatcgatccgtacctcctatgaagttatgtggcgcatggcctatgagtggtcacagttagctattagtgtaggtttccatgcagacacgcttctcttcaggacggtttacccggcgcttggcatccgcactatgcgcgagcgcgatgctgtgttcgctttcggcgtgttcgatgccgcgactggccggacgggccgaggcggaagctcaaatgagcccttgcgagaaagcgatgacgttggcggactacgccacccatccggctgaaggcacgccgttattagagcagtatgccaccggcctggccgctcccctgacttggattgacgttgccgggtattgttcgggtcgttttgccgagggaacgttacgtgacgcgcagaccaagcaatggctggcttttctggccgataaattcgggcagtccgcgcctgaggtgacgccggcgcgtcttgatggcgtcacgtccgccaacgttgaccgaccggtattggatgcgatggccgtggccgaggatcgcgccggattcgctatcgaggtcttggccgcacgaggacagaccgctggggctacgttggcgttgagcgatatgcataagaccgccgggcagcagctggtgtcgctggcgaacggcaattttgatgattccggcgcacagtccagttcttccggccagagcgacccccgccaaaaggtctatgccatcgaccaactactggccaaccccaccaccatcgccgacaaggcaagcggccagaccgtaccgaccgccgccgccatcgaaatggactgcgcccgcgcgcagatcaaggccgtgaccgaatcgaaatcttccaccgagagcgatacgctgctcatcctcgccgcactggccgccaagcacgcctacaccgcgttccaacttggctacccagcgactgacgccgcattgttcgagtagacacacactcctcacgaagccgatgcgaacttgttggaggctagtgggcaagtcgagttgaggcacgttccaccaatgtgaaatcggtggtgtacgtacgggccgggcctgagtatccttcgatgcggtcgataagtatgtcaacggcatgcttggcataatcgtcgtcggtacattggatatcttgcagttcgatgaggagcgggaatcaggagccgaataatgacgatgccggtggccccgacgggaaagaggaggaaaaccgtcggaaccaccggcatacgggtgctcagagcctatcgttcaacgttcacgacaccgaatcgggactcatcggcgcgatcacgccacccgttcccatacggaccataaatcgtcctgatgttgactccgacaggcaatgccgggcattcgttttcgccgttcgtaccccagttgacccagccggattgaggcctctgcacgatctggaacgccgaggacgcctccgaggtgatccagatcatgcaccggttggtattggtgtcgtattcggcgctgcaggcagacggcccggggaagatggtctcctcctcctgtgccgacacatcgaccgccccctcggggaactgccaaggacgggaggtctcatcagctgcgcggtgggcaagcgcccgcacatgcccgagcctctcatcgagccccttgggggtaagggcattttcccatcgcgagaacaaacgccagtagagatcccagtgagcgttctccagatccctgtcaagcagagtggagaaataggcgaaccttgatgtcgtttccgtccgctccgatagcacgttccgcacttcatccttgaggaagccggcgtaggggtcccctccgcggaaaggaacaggctggtaggtgtcgaatcggttgaagacaaggtttccttcgccgctttcgaactcgtcaccgaccgtgatacggttcacgacgcttctgccatcgacctccgtcacaaacgaatccacatggtagacacgatcgaagaaatcgacgttccagtagaacgtgaactcgatggagaaggtcttgccctgcagttcaggtcgaagaccatcagggatgcgcccctcaagcaggtaacggcgcatgacggggccgaactcgataagacggacatcggcgatggcatgttcgggcgggttgatcagaccgttttccggagtgaagaaagggccgtagaacccgccaatggcgttgttcccgctcttgagcagatcgaatccctcgtccttggtgaggaaatggcggatgccccatttggaggcgccctcgcccttgccggtgccacgacatagttcaatgtcgaaatatcccgtatcaaggtggcagaccgcatcgctttcgagcgtgttgtcgtcggcgacgatgcctccttcaaacgtctcccccgggtccgggtcatgtagggacaggacctctccgtcatgcggcaccagaatgccgatgaacgtcgtcgaggaaccgtcggaatcccccagcaccttctggaacggcgaagactgtcccaaatcggtggtaccgagaatcagatcggcctcaactttttccggcacggtcaccgtgaccggctgtggctttgtaggatggtggtggctattggtgatggtgaatcgtggatattcgtgcgtcattgtcgttctcctgtttcagttcgcagccttggcttgtgtggcacctatgcctttgaggaacccgaacgagaacgagttctccttgagaccatcgatgagcacggcgatgatgatgacgatgcccttgacaagctgctgggtgaagaacgggacattcatgagcacgaggccggtggtgagcacgccgaagatgatggcaccgatcagagtgcccgggatcttgcccttgccgcccatcagggaggtaccgcccaggacggccgctgcgatggcatccatctcataaccgtcgccggcagtcggctgcgcggagaccacacgcgccgcgaagatgcagccggcgagaccggcgcacagtcctgcaatcacatagacggatagcagtacgcccttgacattgatgccggcaagccttgcggcttcggcattgccgcccacggcgtagacatgcgagccatacttggttttgtcgagaacgatccacatgactacataaacgattatcatcacgatgaacggaatcggcacatggaacaggtatccgttgccgagggcgcggaagttcaaaccgttgtctacgatcggcagaccgccggtgatggtgtatgccaatcctcgcatgaaggtcatggtgccgagggtgacgatgaacgcggcgagattgcagtaggcgatcaggaatccgttgatcaagccgatgagcgcaccgatcaccatgccgagaaggatggcgagcagggggttgagcccctgctgggcggccagaacggcgatgcaaccgctgacggcgatggtcgaaccaacggacagatcgatgccggtggtaatgatgacgaatgtcatgcccgcggcaagaatcgcgctgatggagatggacctcgccacgttgaacaggttgctcaccgtgccgaagttcggggccttgatcagcatgaatacgaccagcaccagcaatacgaacggcatgccgaccttctcccaggtcgccgccaggctcatctttttcttttctttcattggaagctcctctttatcgttgcgctccgtcgcgcgtttcggaatcctcggattgcgccttcagcacgcccgttgcgtaccccatgactttctcctcggtagcttcatcctcggggatacaggcagcgatgcccccctgcctgacaacgaggattctgtcgctgatgcccagcacctcgggcagatcggaggagattacgagaatcgccttgccttgcgctgcctgggaactgatcagctcgtagatctcctgcttcgcgccaacgtcgacgccacgggtcggctcgtcaagaatcagcacgtcggagttcttcatcatccatcgggcgaacacggccttctgttggttgccgccggacaggttgatgatggaagtggtcaacagacgttgcgcgatgttgaccagtttcatcgattcctgcacatccttgcggatgcggtgcttctgaagcagacccagcctctcgtattcgcccagcgaagagacggagatgttgtcttcgacgcttctgacagggaagatgctctgcgttttcctgctttcgggaagatacgcgaccccatgaccgatggcggccttcggggatttgaacgacaccgccttgccacggagccggatctcaccggaatcatgcttgtctgctccgatgatcgctctggcgatttcggttctgccggcgcccaccagcccggacatgcccagcacctcgcccgcatgcacggtgaaggataccggcggagagtccggcgaaagcctgagattcttgatctcgagcacgccctcccccggatgacgcttgccatggtcgtaaagtttctcgactttgcgtcccaccatcttggcgacgatgtcattctggtcggcatgctcgatgtcggtggtcatcaccgtatgcccgtccctgagcacggtgattctgtcggcgagccgccacacctcctccatgcggtgggagatgtaaatcaggcccgtgcccttctcccgcagcatgttcaccagcgtgaagaggtgctccgattcggctcgggacagcgatgccgtgggttcgtcgaggatgaggatcctcgcgtcctgcgcgatggccttggcgatttcgaccatctgctgctcaccggtgcccagatcaccgaggaatgtgtccgggtcgatgtccgccttgatgacatcgagtttacgtacggcgtcctcccgcatgcgcttcttgtccagcagccccgacttctgcaacggttcgttgccgagtgcgaggttctgcgccaccgtcatggtgggcaccacattgagttcctgatggatgatggcgatgccgaggtcgtcggcctgcttcggcgtggagacgtctacctctttgccatcaatgagaatgcgtccggagtcccttttcagattgcccgaaaggatgttcatcatcgtcgattttccggcaccgttctcacccatgagggcaagcacctcatgttcataaaggtttaggttaatgttgtcgagtacgaccactccggaaaagctcttgacaatgttctcgagctgcaataggggcagcaactgaggcatgctcaccatcccttgtaatcgttgacgttctcacgagtgaccatgacactcggaatgagaatcgtggacttcttgggggtatcgcccttggcgaccttctgggcgtaggcgacggcctgcttgaccatctcgccggggttctgcgtggaggtccccacgaacggggagccggcgcgcttcagctcgtcgacgccttcgggacttccgtcgatgccggtcacgatgatttcatcggtcctgccggcctgctcgacggcgagcgcggcgcccagagcggacggatcgttcataccgaagatgccctgcacgtccttattggcggtgagcatgtcggtggtcacggacaggccggtggcacgatcgttcttggaggattgctgtccgacgaccttgatgtcaggatagtccttctccagggccgccttgcaacccttgatacggtcggtgatggtctggatcggggttccgtccacgataaggatgttgcccttgccgccgagctgctcggccaggtaagagcacgacagttcacccgcctgcacgccatcggtcgttacgaccgcatcagcgcccttcgcaggagtgtccacggcgaccacgatgatgccggcggccttggcacgctcgattgcgggcttcaaaccactctcatcgacggcggagacgatgatcagatcgaccttctgctgaatgaacgaggagatctggttgtcctgggtggccaaatcgagctgggcgtcctggacattgagcgttgcaccgatcttcttggcttgagccttggcttctttgtccatggcggtgaagaacgggttggacatatcctgcaccatcaggccgatgctcttgatttccgtgggcttggagacctcggcggcatcgttgtcgccattactcaccgcgctgcagccggacagcagcagcgacgctgcgagcagggtggaagcggcggaagcgatcttcttgatgttcatggttgttttctccattggaaatagctgtcttgcgttcggatgcggcctattgcccaccgcatccgcatgactccctgatcttcagggatgtctcgatcatgtcgtggatgggattcggcctcatcgtcgccccatccgggtttttattcacctcctcctttccttccatctgtccaagcaggtagttcgccgccttggcaccgatgaatcggctgtcttcggcgacaagtgttatcttcggcgataccaggtccgaccaggcgaagtcatcgaacgcgaccagcgccatatccccgggaatgtcgacggatttccgattaagagccgacatgacgcccaacaggatgggattgttgccggcgatgatcacatccggataataatcgttctggtcaagaaaacggatgacttcggtgcacgcttccacatcgttgttaccgcattccagcacgcgaatctccgccccacactcctcggcggcggccctcaggccgctctcgcgagcgaacctgctgttccaggtgtccggatagatggcaagcagccaacgatggaaatgatggagtttcagatgacgcccaagcttggcggcggcatccacgttgtcggtggctacatacgagaaaccatcttttatttcctcatcatcaccgtatccgggagtggaatcgacgaatacgacgggaatgttccagttcttcagctggttcctgctgtattcgctgagtcccaaggtggagatgatgccgccaggacggttctccacgacctgacgcaacagatacgcctcgttctccttgctgtaccggccgttgacggccatatcggcaatgaacaggctctccttcttgtcctgcaggacgctctcgatgccgtcgatcagatcgagataataggagttcgacattcccgcggtgagcagggtgatgaaccggtgcgtgcccgtgcgcaggtcacgcgcattgacgttggggatgtagcccacctcgttggctgtttcgcgcaccgatgcacgggtgctctcggatacaccgctgagaccgttaagagcgcgagaaaccgtataaacggacagtcccatccgctttgcgatatcggtgatagtaacgtcgtgtcgtttcatcattgaagtcctaaacgtttatgttctgatgtattcagaatacacacgacccaagacgttgtcaacacaggacatgcagacggactcaaaacgagtttattccaatggttcacaatgaactcggacggatatcccgaatccgtcacttgcctcattctgtctcattccgatgaggcacgaggtatcaggcatacccggacacttcgtatcccatcgggatgaggtgtcgattacaatcgacatccaccggcacggtcccgatatgccggacgcatatccgcgacagtcagatggcccctcacgccgtcacgtaatccacgtgcgcgaattcgggcactttgtaccacttgaccgggtagccggcgccgtaggcgcagaacacagaatcggacgtgttctccagattggcttccggatcgtacgcggcctcctcgatcacgcgccgttcgtcgtggcagggccggtagccgccgaacgaggcggagaagcgcccacggccgtgcgtatacgcgttcacgtccatcgcgtagtcgcgcatctcgctcaccggtgccccgcctgcgatgacggcgtattcgccgtcgtccgtaggcgggtcgaacgtgccggacattcgttgcacgtcggtcatggcgtgaacgacatgcaccaaaggctcgtcaaggcgcggcgcatgatccgcaggcgcatccgggagggccaaccgttcatgttcctcgacgaggggctcgcggcagccggcccagtgccgtccacgaacaacctcgtcgaatcatggaacgcgcgcctgcgcgacatgccgcgccgccaccgcggactgcggctggtcagacggctgaaggcgatctgctggtggtgccaccagcacacggaacggcccgaaagcgacgcgtggctcgcggccaacgcgatgaccgacgaacgactcgagcgcctctaccggcgggcatgggagagaagcccgcagagcatgcacgagacgttcggcattcccatgagacacggcaccggcatcgactggaacgagttccacaccagggtcgaatggcagtcgaacgactagaccgccggacatacattttggcctataaccccgaatacggacgttcgcatcaaaaacaaaaagggttccgggacaaaccccggaaccctaaaggcggataaggcgagattcgaactcgcggaggctttcacctcacacgctttcgaggcgtgctccttagaccgctcggacacttatccatgctgccaaaatggcaacttgttcattatgccacattctgccgacctggcaaatcggagtttcgctgagcaagtctcgagtgtatgccgcttgagacatgtcagatcacaatcccggaattcgcccgaagcgccggcattgcgtttacgcgccaagcactccgacaggaattacatacactccatcatcgcgttgatacgcgaactcgccgacccccaccaacaccgccaagaactccggttcacgggttcgcgcactcggatttctcagcagcttatctttcagtctgcatagatttgccgatgcctcagggactttatcctcactggacttaatttcgatgccgccccaccgtccatcggacaattcaataatggcatcacactccagaccggaatcgtcacgataataccgaaccggttctatcccaatatcgaggagagatctcgcatacaccaacagatcacggatgcatagattctcaaacagaaacccaaaagtctgccaatcgccgataagagcagcaggactcatgcccaacattgcggccgcaatggaaggatcggcaaaataccgacgcgccttggtctggagtcgctttggatcccgtgccggcgggacccagccctttatcggatcgatgacgaacatgttctcgaacatggccgtatacccggataccgttctctccgaaatgaaatcgtcaaggttttcttcagtaccgtacatatccttacgtaaggttttgaatgtcacagcttgactgatattgcgcgcaagcgaatccagcagacgacgagccacatcaggatccttgccttgcctgggcacactctcagtcagcgtgagtcgcatgtattcccgaatcagaatctgtgcgtcagatacaggcagagccaccgcctccggccatccacctcggcatacggcatccaacaacatttgtgtacttatctctgattttgcagcggcgaacttatgttcaaacagtccactgagacttaccgcacctgtcgagagtccggactcatataaagtcagaggattcatacggatacgtccgattcgtcccgcaccactatggttcggccgattctcattgagaggagtggatgaaccggtcagaatccactgacctttattcgcggaatcatcgtcgacgcgatgacggacttcatcccatatagctggagcgagttgccactcatccacgata

SEQ ID NO: 1577 - DNA, 5649 bp, Unknown
  R221_24m  MAG No. k141_32404
aatcgtgcggtgacctcattccaggagatcctggacatgatcgagtactacggcgagcatcgcggcgacatcgagcacgcgctcgacggcattgtcgtcaaggtcgatgacctgggcctgcagcgcgccctcggtgccacctcgcgcgcgccgcgctgggccatcgcctacaaatacccgcccgaagaggtcaacaccgaactgctcaacatcaccgtgcaggtggggcgtaccggccgtgtgacgccggtcgccgtgctcaaacctgtctacgtggccggctccaccgtggctcgtaccacgctgcacaacggatttgaagtcaaacgcaagggcatcctgatcggcgacaccgtggtggtgcgcaaggccggcgatgtgattcccgaactggtcggcccggtgcttgaacggcgcaaagggcgtgagggccagctgcgcgaattcgtcatgcccgagttctgcccttcatgcggcgcgaaactggcacccgccaaggagggtgacaaggacatccgctgcccgaatgtggaaagctgcccggcccagttgaccgagcgcgtgatttcgctggcctcacgcaaggcgttcgacatcgagcatctgggtgaacagtcggccatcgctctgaccaacccggaggagaaccggcctgattcggtggcgacctacgcgccgaacatcaccgaggttctggtcgcccccggcgaagagcccgaaccgtacgagccggtggaggggctggaattgccggccgcgcagaagccggtgttgtccaacgaatccgggttgttcgacctgaccgccgccgatctgcgcgacgtgcgcgtgtggcgtgaggccgcaatcgtcgaggtgcatgagacggtcggtgcgaacggtaagaagaaaaaggtgcgtaagcgtgtcggtggctctggcctgtggcatcaggtgcccgccttctggaccgcgcccacgccggccaagaagctcacggccaagcagttggccgaacgcgcgcaagaagaggccgcagtcgaatctgccggaacacagggaggtgccgccagcgagacgaccggcgcacctaccggggctgaggctccacttggtactatgccgggctttgccgcagcctcctatcccgagtatgacgtgccggccgacgcggtcatcgtgcgcgtggaccacaagaccacgcgcaccggcgtcacggatgtgccggtgatcattcggcccggcgaaaacacgcgcaagatgttcgacgaaatggacaaggcccgtcacgccgacctgtggcgtgtgctggtcgcgttgtcgattcgccggctcggtccgcctaccgcacgcctgatcgcctcggcgatgggctcgctggcagccatcgaaaacgccacgattgaagatctgacggccatcgacggggtgggcccggaaatcgccgaatcggtggtgaactggttcgccgccgcccgcgaacccggcgactggcgcggcgcgactttgcgtgcttggcaggccgccggcgtgggcgtcgacgaggccgagaccagttcgttgccgcagacgctggccggcaaaaccgtggtggtcaccggttctctggagggctattcgcgcgactccgccaaagaggcgattatcgagcgcggcggcaaggcggccggttcggtgagcaagaagaccgattacgtggtgatcggcgcgaacgccggctccaaggccaccaaggctgaggaactcggcatccccatgctgggcgaagcccaattcgcccagctcctagccaccggcaccatctaaaatagccccctcagacgcttcattaaccccctctgatgagggggctgtcagcctttaggctgactgggggagagaaaaagcgaatcccgccccagtgtgacttactccactccctctggcatgccgccgcatcacacgctagggtagaacaggccctaaaggaggatacggatttatgagcgacgcacgtcagatcgaagccgacatctacgaacgcctgagcaaggtcatcgaccccgagctcggtcgttcggtcaccgacctcggcatgattgccgctatcgaagccgcgcccgcatcgtcggacgccggcacttacgacgtcaccgtgcacgttgagctgacggttcccggatgcccactgagcgagaccatcaccaaccagatcaacggcgcggtcagctcctatccgggcgtacagctgctgcctcatatcgaagtcggttcaatgagtcgtgacaagctggccgatctggtcgccgacctcaaggccgaacgcaagcggaaccccttcagcaaaccgggcgtcaagacccgcatcttcgccatcgcctcgggcaagggcggcgtcggcaagtcttcggttaccgcgaacctggccgccacgtttgcggccctcggcttcgacacggccgccatcgacgcggacatctatggcttctcactgccgcgcctgttcggcgtgcacacgcagcccaccaatctgaacggtatgcttatgccggtcaccgcgtggggcgtgaaactgatctccatcggcatgttcgccggtgccgaccgggcgattctgtggcgcgggccgcgactgcagcgctccttggaacagttcctgtctgacgtatggtggggcgagccggacgtcctcttgctcgacttggctcccggcaccggcgacatggcgatttccgtggcccaggcgctgcccaacgccgaactcgtggtggtcaccaccccgcagccctctgcctccgacatcgccgtgcgctccggactcgtggccctgcaggtgccgatgaaggtgcgtggcgtggtggagaacatgagctactacgagcacaagggcgagaagctggagattttcggtgccggcggcggtcagcgcgtgtctgaacagttaagcgcggcgcttggctatgacgtgccgctgatggcccagctgccgctggaacccgaagtgcgcgagatcggcgaagcaggccgtcccgcggtgctggatgtcgatggcgccttgcgcacggatggcgtcggtcaggtctttcggggactggccgagcgtctgctggagcggtgctaaggggtgatggtccaggagcggtgccaatcggccaatagagaacggttctcttcgcgcctattcgccggtgtcgtacaatatcccctggcgtgctaacgaaaaccacatgaaaggagtagctgtgcccacttccgaacataaggccgacgacgcaacgcggcgtcttatcctgattcccgctccggtgacattggaatacacgcatggcacggctatgatcgggtccctggtgacgatcgagaaacgaattcccgaatatgccgccaccgaaggtgccgatgagacttgggaaacgctgccgattgagcagctgtccagcgagctcgagcgttactgcggcgtcaccgtccgtacgcgccgtgtccgtgcagccacaggtgaagacgacgccagcgccaatgccgccgaagatgcgcgagatgcgcgtgcgggtgcgccggcagcgatgaacggcaccgtcatatccctgggcctggattcacgattggcgcatgacgaatacacgctggatgtgttcgcctcagataccatcgccgtgcgtggcggcggcgaaagcgggctgcggtacggtctgcagacgctgcggcagatcatcgggcagacctcgcgtgccattccctgcctgcatatccaagacaagcccgcgttcgcggtgcgcgcctacagtctcgacgtgacacgcggacgagtgccgacgatggagttcctcacctggttcgtcgaccagctggccttatataaatacaatcagttccagctgtatgtcgagcatgccttcgcgttcgtcgagctcagcgaggcgtggcgtggcaccgatccgctcacggccgccgacatcacgtatctggacgagtactgcgcgcgtcgcggcatcgagttggtgccgtcgttggccacgttcgggcacatgtacatgaatctgcgcacccgtgagcatcgcgggctgggtgagttccccgaagacgccgaccgcccgttcagcttcatcgaacgcatggagcatcacacgctgaacgccgccgatcccaaggcccatgatttcgcctcgcgcctgattgaggaatacgcgccgctgttccgttcgaagtccttcaatatcggcggcgatgagacgttcgacttgggacgtggcaggtccgcgcaggacgcgccggaagccggccgcgatgaactgtatgccggtttcgtcagggatttgtgcgaaacgctcgtccgccatggtcggcagccgatgttgtgggcggacatcgcgctcgaaagcccgcgcacgatggatctgctgcccggcgacatcacgatgctcaactggatgtacgagccgcagatcgacgagagcaacatccagaccatcgccgcgcagggccgtcgccagttcgtgtgccccgcggtgcgggcttggagccggttcttccccgattatgcgggtgcctggctgaacacgtatcacatggcattggcgggtgtcaagtatggcgcggaaggcatggtggtcaccgattggggcgattacggccacgtcaacgatccgcgtctgagcgtgccgggcctgtgttatggcgctcagaacgcgtggaatccgattgagatcgatgcgcatgagatgaaccgtcggatctccgttctggtgtatggcgacgagtccggtcgcatcatggattgcctcgtccgcatcgactccgatggggtgtcattcccctgggaccttgccgtgcaggtgctggagctggaatacggttccggcaccggcatgctgaatacggatgtggcatcgtatgtggaacggtcgtgcgggggagagctcgtgtttgaccgtacgctgggatgcgccgatgcgcgccgccggctgctcctgcggaaccatgcccgactcgaacgacgccgggattgcgaccgggcgttgatcgattgcggcagtgcggttgttgcggtgctcgatggctcggcacgaggaggattgaacccggaactgctgtgggtgatgctggatgggcagcggttgttcaatagactgggcgaggaactgctggtactggctggcggcgaggacgcctgtgacaccaaggatgtgaccggccgtgcgctggatgcctcgcgccgcgcccgtcttgccgccgatctggagttgtggttcgaacggtaccgtgtgcagtggctgtccatcggccgctacgccgaattggcgcgtatcgcccatgtggtgtggtcgtttgcggacatattgcgtaggggagcgctatagggagctcacagaaattcggtcctgctgagaacaaggtgaggcttacgcgccgtcaaacgcacatggtgatttcaaaaaatggcgaattgctgccattcttgcacctgtgcgtttgatgggaaatgtgcgtatgcctcacattttttgcataaagcatgaaaatgtggcccgttgtctatttgaaagtgcgacaccctttagattggagattgtccagataaccagtgaaggggtgtcgcgccttggggcaagtgtattcgcacctgtcggaagaggaacggcggatcatccggatagagatcggcaacgggacgagcatacggcggatcgc

SEQ ID NO: 1578 - DNA, 8591 bp, Unknown
  R221_24m  MAG No. k141_35320
gatgctcggttcgttgaacaactgaagcgtgccgatcaccgagaagagcacggtcatcataatggatcccttaatctgcggaatctttaccgaccatgcgatacgcagctcggatgcgccatcgatacgagcggattcgtacagctcgttcggaataccgatcagtgcagaataataaatcagcatgttgtagccgagagaacaccaagtgcagatgtttgcgatggcgaacagcatgagcttttcagaaagcatgttcggcgcagtggccccgatcatagacgcaatctggccgacaaggccatacttgtcgccgtagatatatccccacatcagtgctgcgatgacgcctgggacggcataaggcaggaacagcaggattcgcggcactgcgatatggcggattctctgggaatccagaatgagcgccgccacaagggaaaggatcaaattgagaggaatctgaatcgccgcataaatcagcactcttctgaaaccgctccacagcgcttcatccttaaatgcagctatgaagttgtcgaagcctgcgaatgtggtgccgccaagaagggactgcttgaagaagctgagataaagcgcgtagaacatcgggatgatcatgccgaataggaagaccaccacgtatggaagacaatataacatgcctatgtactcgcgcttcggcttgcgcatcccggaagtatccggtttcgccgttgcatttgtcatagtttttctctttcttcttaacccgtctgaatgagcccgccaacaacatcgttgccattgccgtttcattcatcggtacgttcaatatacaaggttttacaaaaaagagcaaataaaacttcgttgcgcgtggcgaaattttctttatcttgtttttcgccttaaaagggctttattgcaacgatatgcacaaatcgtactcatcgaagaaacagcagccaatccatgtctacaacacccatttccgctatatagacagcaatacgccgataaaaaagctgttttagagtagcgaaaatttcgctactctatatataacgctttttttgcagcgtcgcatacgaaaagagaagagtcatggccacaatcaaaacaacaaacagaccgaaggtctccgacatcgcccaagcggcgggagtatcccccgctaccgtgtccaaggtcatcaacggccgtgatggagtctccgacgagacccgcgatagggtggaactgctcctcgaagaagccggattccgcaaaaaacttcccacaacaaaaaccatacggtcaatcgaactggtcgtcagcgaaatgaccaacaacggcaccgtggaaatggtcaaggagacagcttcatacgccagagattttggcctcggcatcaccgtaagctgcgccggaccggattccggagaatacgcaacaagaaacgaggccagcagctgcctccgtaacgccatcgaacgcaacccactaggcgtcatacttctcttatcgaatatctcatcggccgaggaatcgctgctgcagacgaggaacatcccatatgtaattgtcgatccggtcggccaggtctccgctgacgcattgggggtgggcattgataactggaccgggggaatgctcgccacgcaatatttcatatcattggggcatcgacgaatcgccgtcatcactggccctactaattcacagtcctcgcaggcgcgactgagcggatacatggcggcgctgcagaaaaacggcatcagcgcggatccacatctcatcaaggttggcgactacgtgtctgacaaggcatacaaggcggcatgcgatctcctggaaatgagggagcaggaccgaccgaccgccatcttcgcgttcaacgatctcggcgcgatcaacgtctatcgcgccgcccgacagcacggcatcagtctgcccgaacaattatcgatcatcggtttcgacgatgtctatcctgcggcaagcatgtgtccatccctgacgaccatcaggcagccattcgacctcatcgccagacaatgcatcaacctgattctcgaagcgcgggaaggaaaggtggaacagaattacttcatttttcccacgcagcttgtcgaacgcgaaagctgcgtatcgccagcacgtccgtaactcagcaacggaacacagaatcagcttccacgaagcacccatgcatatgcaatccgtctctggcacaagcatttacttctgtttaccagatgaaaatacaatatcgtgcgattacggggggcgcagccctagcctcagctggaggtcaggaaggtttcgttgcctcgggtgaagtcgaggacggcaccggcgagttggacctcgtctgccagttcggggtcggcagccagaagctgctcggcacgggtgcgggcgtcggcgatcatgtcggcgtccttgaccacgcgcaggagcttcaggctggacttgccgccggattgggcatcgccgagcacatcgccggcaccgcggaattccaagtcggcttgggcgatttcggcaccgtcgagcgagtggtgaatcacttcgagccgttgctcggccggggagccgggttccgcacgggaaacaaggaacgcccacgagttggtgccgccacgccccacgcggccgcgcagctgatgcaactgagagaggccgtatcggtcggcatcaaagatcacgatgcagctggcctgtttcacatccacaccgacttcgatcaccgtggtggacaccagaatcggagtctcgccgccggcaaaatcggccatgacctgggttttgacgtcatccttgtcgcggccggtcagagtcgcaaaccgaatgccttggaattgcgggagtttctgcaaccggtcggcgatttcggccaccgcatgcaatggcgggcgagccacggtttcgccgttttcgtcgaaggtttcgtaggggtcgtcgatgccgatggcgtcggccgccgcgcgcgttgcacggccgcccgcagctgtgcgggcactggaaccagatgctgcggcgcgtccgcgggcagaaccggctgctgccgaaacgccggaaccgccttcgttcccctcatcatccgcatcaatgcgcgggcacacgatataggcccgctcccccgcgtcgactcgcgcgcgaatgtgcgcgaacatacggcccatggtggcggcgtcggcctcattgaccaccacggtgcgaatcggtttgcggccgccaggcaattcggtgagccaggaaatatcgagatcgccaaaccaagtcatggcggcggtgcgcgggatgggcgtggcggtcatcaccaatagatgcggcgtggtgccgtcatcggttttggcgttgagactttcgcgctgttccacaccgaaccggtgctgctcgtcgattaccaccaaggccaagtgcggggcttggaaggtcttggaaaacgccgcgtgcgtggccacgataatgcccggctcgccactggacgccgcagcaagtgctttacgtcgcgcagcaagcttcatgccgcccgtcaacaacgtgactggaatcgctggcttgagttgctccaccatccggccaatggtttcggcatgctgctcggccagcacctgagtcggggcaacaagcacggcctgatagccggcgtctacggcttggagcatggcagcgagcgccactacggttttgccggagcccacctcgccttgcagcagacgctgcattggccagtcatgagccaaatcggcggcaatatcatgaataacctgctgctgccctgcagtgagggagaacggcagggatgcgatgaactgatcgcgcagactgtcggttaccaacgggcaagagtgagccgcggatttatgggcgtgcgacctggctttaagcagcgaggtctgcgaaacgaaagcctcctcatagcgcagggtttcgatggcctccttgaaccgggtcgtggaggccggatcatgaatggccaggaacgcctcagcccgatgcatgaggttcttggccttgcgcaccgattcgggcagcacatctggaatggattgggagagcgcctcagcaccggattcggcggtcgtgccggaattctcttccccgttttggacggcgatggtgtcggtcgtgggagccacaatgccggctgacccagcgccagcgagttgcccgtcaggcgtggatgacgtgcgggcccccatcatccacagcaatcccagaatcgtctcatgaatatgttcggacgagatacgcgaactggcgtgatataccgggcggggccggcagacgcgggtaagcgcctcttgcacggtatcggcgtcgtatttcagcgcggccccggaagaggcagccgcggccggcggatacgcggactgcacactggcatacggatcggtacttcccgcaaacgcaccattgccggatgccgcaccccgagcgtaaccctcaagccccgctcctgctccggccgacccgggcgcgacagtgaggatttcggggtgcgtgaattgcagctgccccatgtattcgctgggcataccggagaccaccacagacgtgccggcgcgcagccgcatgctgacccaatccacatacgatttacgatacgaaaagaacgtgagccgggccgtgctgccgggtacgcgacgcgaacgggcaaagtcggcgtcgtcaaccgtcgcctcgagtcggtagccgcggcgagcgttcatcggcaccacgcgcatgtctcgtatcacggcggcaaatgccatctgctggccgggtgcggcctcgcggatggcgcgaagcggcaccggttcggtgacgcggaagggatagtaggtcagggcgtcgccgacagtgacgattcccagcgatttgagcgcggacacgcgacgcttgttggtgaccagcgaagcgagagtggtgtccatagtgatgctcatattggcctattctattcgcacggcctctttaggccgcagaaacaacaaaacccgctgagccgaagctcaaacgggttttgctccacgttagtacgcgattcacgcggccacgcgctgaaccttgccggccttgaggcacttgacgcacacgcgcagacgagtgttctcgccatcaatcgtggtgcgtacagactgcaggttcgggcggaagctacgcttggtacgacggtgcgaatgggaaacggtgaaaccggtctgcggtcccttgccgcacactgcgcaacgagctgccatgatggactcccttaaccttgatgtgtcaagtctttcacgcattcgaccgccggtttcacccgacatgccgaacacacaacttcacaaatatatagcccaataccgacaaccgcaactcttgcgtgtatcatgggcgaacttcggcggttcatgcgcggttcgagcgtaacttgcgagtgggccatcagcggttcgcgagcggttcggcattggttcgccagcggtccgcaagtagttcgccagcagttcgccagcggcgaattacgctgcaaatcgtagcgtttacccgataaaacacgccggactgcctattccgcatccaacaaactctcatataatctcggtataagagacggcaagggacgaaggggtcctcgtgcaacttacgacgaaggaggctgtcatgttgaatctcaggcgaggtatcggcactcacgagcccagcgtgatttcactgggtcaagtctgggtggacattatgctcaatgtggacgaggtgccggcacagggcggattcgccgtggccgatcatccgaagccttccattggcggcagctatcgcgtgctgcaggcggccagccgcatgggcgtgccgaccgagcacgccggcattctgggcaacggcctgtgggcgcatttcatccgccagtcattccaggacaacggcatcacgcatatcggccaggatcgtcttgatgaggattccggtttccgcgtggtgctgagctccggcgcgccgaagaagacgttcatcgcttcctatggcgccgaggctcatggcgacgcggacacgttcaacacgctggagccgcagcccaaagacgtggtgcacatcagcggcaacacactgatggaccacacggccaccggcgtggacggattcctactcaaggccggtaccgacccggctgcacgcgactacacgctggtgatcaatcccaccaatacgttgcgtctggtcaatgaccacatgctcgaggatctggtgcttgcgcgcccggtctggtcctgcaaccgtcaggaggccatgacgctggccgagcgcctgggcgcgccgatcgacgacagcaaggtcaccatcggcggtggactcgacgacttcatgcaccagttgtgtgacggcttgggcactacactgcgcgcgccgctggtggtgcgtgtcggcgcccgcggcgcttggattcgtgagccaggtggcgagacgattcatatcgagggatacccgaccaaggccgtacacacccgttcggcgggcggttgccacaccggcgtgatgtgcgcgatgctggcaaagggccatagtctggccgaatcggtaaagatcgccaacgcggcggcatccatcgccatccagcgtagcctcaacggcgtgccgcaatgccccgattacgacgaggccatcgcgctgatcggcgaatagtttccggacgattgagtggatttcctcatctgggggaatccacgatcggctcccttcagtccgcttcgcggccagctcccctcagcgaggggagctatttttttgctctggctccccttagaaaggggcccggcattattcacccgccgttcaactttggcggttttctaccctagtccgcgcttctacgatagattgagttgaatactgtcgaggagtgcatatgactgatcccgcaaatgtccacgaaccggtgccgcaaagcgccaaactgaccgcccgcgagaagaagtggatcatctacgacgtcggcaactcggcattcgtgctgctgtccaccgccgtcatccccatttacgccaaatcgctgatgccggcggacggcaacatcgtgtccgcctggggctacgcgcaaaccattgcttccttggtcatcgcgctgctcatgccgttgctcggctccatcgccgacgtgcaaggcatgaaaatcaagttcttccttggcttcttcggcaccggcgtggtcacctgctgcgcaatggccctgcccctgacctggctgccgttcctggtcgtctacattctggcgaccatcggcctcaacggctcgctgacgttctatgattcgatgctcatcgacaccacctcgaacgagcgcatggacaaggtctcctcgcacggctacggctggggctacatcggctccaccgtgccgttcatcttctgcatcgcgctgattttcggcggcccgtcgctcttcgactggtccacggtggcttgcacgcgcgcctcgttcatcatcaccgccatctggtgggtggcgttcaccatcccgctgcttaccagctaccgccaggtgcactaccgtgccacccgcgaccagctgggcacggccgtgcgcggcacgttcagcgaactggcgggcacgttcggcaaaatcgtgaagaacaagccgttgtggatgttcatgatcgcgttcttcttctacatcgacgccgtgaacacggtgatttcgatgagtacctcctacggtgccgagcttggcatcgactccacccagctggtggtggcactgctcgtcacgcagttcgtggccttcccctgcgcgattctctacggccgtctggccggccggctcggctgcaaagtgatgatcactgcggcggtcgtggcatacatgtgcatcgtgctcttcgccgcgttcttcatgaaatcggccgtggagttctggattctggcgattctggtcggcatgttccaaggcggcatccaggcgctctcccgctcgtactacggcaagatcatccccaaggaccacgccaacgagtactacggcttctacgatatcttcggcaagaccgcctcgatcatcggcaccttcctggtggccaccaccacgtccctgaccggcaacgcctcgttcggcgtgctgtccatcgccgtcctgctcgttgtggcgctcgttttcctgctcctgcaaaaggacccgacgcgggagtgatttgccggccctcggcaactctgcgccgcgggcgacatctcgcaacccctgcaacgggccctaatagcaatggaccatcgccacttgatcacttacgctcgcgataatccttgatcagctgaatggcgacggccgcaacgccgcacagcacaccgccaatcggccacggcagccagaacatcgccccgtccgcggcgctcgacccgacggccgaccaatcaccgcgcaatgccgcagggttcaaaaacagcaggcacaagccagtcgccgtggctatcagcataatgatgccgcacaccgcgccggtcagtctggcatagaaatcctgttcgcccgcatgctccttgcggtcgtcctcggccgctttgttgtatgcgttgatattgagcagactgtatctcatgccgcagtagacaaacccgaaaacaccgggcgcacagagcagcagaaaaattgcgttgggccagccatcggagac

SEQ ID NO: 1579 - DNA, 24278 bp, Unknown
  R221_24m  MAG No. k141_35746
tcggcaccagcggatcatacggcttgcggataccgggtttccatgtggcggacagcgcacccatcgtacggccatggaagccgtgagtcattgcgagaatgcgtgcgggcttgccgccgatggaaggcagggcaccaggcagggtgcggccatacagcttggcgagcttgagggcagcttcattgccttcagcaccggagttgccgaagtagactttggagccttcaggtgcaccagccagcttgaccagtttggatgccaattcaatttgcggctcggacgcgaaatagttgctgatatgagccaccttggcagcctgatcggcaaccgctttgacccacttggggtgggcgtatccgagggaattgacggcgatgcctgccaggaaatcgaggtattcgttaccgtcaacatcccagatgtgggcaccttggccgtgatccatgacgcgcaacggcgtaccgaacacattcatgtggacctgagagtactctcccagccacttgctgtcttccgtacctagtttttcctcatgctcagtagccataagagctcctcatttccagtccttcatcgggcataaccatggtaccgatgcctgcggaggtgaatatctcgttcaaaatcgaatgcggcttgcgcccgtcgatgatatgggcttggggcacgccaccgtcgatggccctgacacaggcctccatcttgggtcgcataccggattccaggtccggcagcatatcgcgcaggttttccacaccgatccggccaatcagagaattcttgtccggccaatcggcgtacagaccatccacatcggtcaagataacaagcttgcgtgcgcccacagcggcagccaaagcggcggcggcggaatcggcgttcacgttgagcacttcagtggcatcttcttcgttcggagccacggaagagacgaccgggatacgaccggcggccaccagatcctcgactgccgaggcatcgacggaaaccacatcgccgaccaagccgatatcggtgggcttgccattgatgatgggcctgcgctgcatggccgagaacaggccgccgtcttcaccggacaggcctacggccagcgggccgtgcgcgttgatcaggccgaccagttcgcgtgacaccttgccggtcaggaccatgcgcaccacgtccatggcctcgggggtggtgaccctcaggccgcctttgaattcggatttgatgccgagggccttgagcatgtgggagatctgcgggccgccgccgtgcacgacgatcggatgcaggcccacctgacgcaggaagaccatgtcttcggcgaagcactgcttcagatggtcatcgaccatggcgttgccgccgtatttgacgacgatacgctggccggcgaactcctccagccaaggcagcgcttcaataagcacttctgccttctgatcggcgcgcaaatcggtgtgcacgtcgaaatggaacccaggtcccttcaattctgtagccaatttttctcttttctgcgacgccggcgacgctatcgccgccggctgctacaaacagcccactgggctgtttgcgttatatgcgacgccggcgacgctatcgctgccggctgctacaaacagcccactgggctgtttgtcagctttcgtagtcggcgttgatgtggacgtattcgtgggtgaggtcgtcggtccagacggtggcctcggcgtccgagccggtgttcaggtcgatgtcgatgtggacttcgcgcggggtcatgtcgacctcgctgcggtcgcggccggcgccgccgttctcgcagatgcgcacgccgttgacgtccacggtcaccttgttcgaatcgtaaggcgcgacttcaggcggcacagtgcccaaggagctgacgatgcggccccagttcggatcgttgccggagatggcgcacttgagcaggttcgaggcggcgacggcacgaccacaggcaagtgccgcgtcttcgctggtggcaccggtgacggtgatacggatgtcgtgggaggcaccttcgccgtcgccgatgatttggcgggacagggatgcgcaggcctcacgcaccagcttgttgaattcgtccttgtccggttcgacgccggaggcaccggaggcgagcagcaggaccgtgtcgttggtggacatgcagccgtccacgtcgatgcggttgaacgaatgttcggcggccacggcgagtgcggcctgcatctggccggcggagacgaccgcatcggtggtgatgacgcacagcatggtggccagctgcggggcaatcatgcccgagcccttgaccatgccgccgatcttccagccgttggagccggtcagttcgaccgttttcggcttggtgtcggtggtcatgatggcgtgggaggcgtcggcgccggcttcggcggtggcggcaagagcctcatgggcactcttggcaccagccagcacgttgtccaacggcagcagttcaccgatgagaccggtggagcagacagccacatcattcggttcggcgccgatgagaccggcgaccgtttccgcggtggtgacggactgggcgtaaccggcctcgccggtgcaggcgttggcaccgccggagttcagaatcacggccttgacgtgaccgtcggcgacgaccttacggctccactgcaccggggcggcacagaaacggttcgaggtgaacacgcctgcagccgcgtcgagcgggccgttgttgaccacgagggccaagtccttcttgccttcgacggatgaaataccagccgccacgccggcggcggagaaaccttgtgcaaatgtaacgctcacggtgctactccgatcttggtcaggcccgcgtcttccggcaggccgagtgcgatgttcagtgattggaccgcttgtccggcggtgccacggttgaggttgtctatggcggcaaaagcgtagatgcggccggccttgcggtcggcgacgacctgcaggtgggctgcgttggatccgatgatgttgccggtggcgggcagtgtgccctcgggcagcagcaccatgaagtcctggccttcataggccttggaccatacggcgcgaatctcctcatcgctcagcgccttggccttgtccgtcatgcgggcggacacggtggcgaggatgcctcgggacatgggggcgagaatcggcgtgaagccaagcgtgaattcgctggcttcagccgcgctcttgccggccgcgtgggcgaagttctgcagaatttcgggaatgtggcggtgcttgccgcccaccgaatacggcagggcggattgcagggcctcggcggcaagcaggttggtgcgcttgagattcttgccggcacccgagtatccgacgaccagatcggccacgatatcctgcgattcaaccagtccttcggcgatgccgggctggagggccagcgtggtggcggtgacgttgcagccagggcctgcgatgcgcttggtgccaggaagcgccgcgcgctggcgggtgtaggagccgtccgcggctttgccggtgatgagctcgggcatgccgtaggtccaatgctcatagaaatcgccgccgtagaactcatcccaagcggcctgctcttcgagacgatggtcggcgcccaaatccacaaccacggcattcggatcgagctgcgaggcgagcttgcccgaagcaccgtgcggcagtgcgaggatgataacgtcatgcccgttcagcacttcgggcgtggtatcttcgacgaccagattggccagttggggaatatgcggcatgtgcttggccatcgactcccccactgaggaatggcctgccacgcaggtgatgtcgaagtcggggtgcgcggccagaatgcgcagcgcttcaccgccggcatagcccgtggcaccggccacggccactgtatatttcgccatactcatctcttttcactgatgtgtcttgggatgagtatacgcgattatgcagactattgcatatttatgcagtgggtgtgttggtatgtgaacgctacttatgcggagatggagtcggaggaggagccggtgccgccggtgagttgctggagggcttcctggtagaggctcatggcgtcatagccattgaaggccatccagatgacggcgatggtgtacagcacgttgatcaccacggcggccacagccaaaccgaagcccttcatatggaaggtgcgcgtgcgccacattgccaccgcgcccatcagtgccgagagcactggcaccgggaagaacagggcgaggataaaggagatgatcgcatacgaatcccagtgcccgtagagtgggttctggtttggatcgttcaagtcgatgccgtggtaataatgcggctggtgaggctgaccgttcggctgttgaccatacgactgcccctgcatgcccgggtacccgcccggatatgcgcccggaccggactgttggccgccttgagcatacggccagccgcccgcctgctgattgccgggccacgccggctgctgaccgtacggctggccggcctgctgggattgcgccgcgccaccgttgatgccagcggctgcggcggaatccttcttggtatccggctcgggagcgccataaatatacgggttgtaattcggcccgtattggccagacatagcaccatattcaggctgctggtactgcccgtatttcggcttgtcctgctccggttggctcatgacgctcctcgattcggatgatcggttgggtcaggcgcgcagctgggcgccgatttcggcggcctcagccacgatggccttgcggatggcgtcgctgtcttcggcggacagcgtcttgctcggcgaacggaacaccaccgcataggccagggacttcttgccctcgcccacctgttcgccggtgaacacgtcgaacagttcgatggattcgaggttcgcgccggcggccttgcgaatcacgttctcaagctggcctgcggtcacggtctcgtccacggtgaaggccaaatcctgcttgaccggcgggaacgtggagatcggcttggcctggacgggcttgccggtcagcgtggcgaacagcgcggtgaggttcagctcgaaggccgcggaatgggccgggaagccgagcgcctcgttgacgcgcgggtgcagttcaccaacccagccggtgaagacgtcgcccaccatgacgcgggcgacgcggccggggtgccattggacgggcacatcgtcggcggcgggctggtcgagttcgattgcggcaccgatacggccggcgatgcggcgcacggcctcgacggcgtcggaccagtcgaccgggcgcttgccgcccatccagccatcgtcctcggccagaccggtcaggatgccggccacatggtcgggctgttcgggcagaccggcgtcaagcgcggcgagctgttcgtcggtggggcgcacgccgccgggcagtgccgggatggcgggcgcgttcggatcccacaggtagacgtggccgagctcatacagggacacgttttcgatgccgcggcggatgttgcgctgcacggtggtggccagggtcggcagaatctcgcgacgcaggtacggacggtcgccgtagagcgggttggcgatctcgacgctgaccttcttggtggcttccgggtcgaagccgaaggccttgtaatcgtcgtcgcccacgaacgggtagctcagcgattcgaccatgccgaactcggcgagctcgtccgccacgcgacggcgacgctgctggtccggggtcaggcccaccagaccctcgaccggtgccggcggcacggtgatcggaatctggtcgtagccgaccagtcgggcgatttcctcgaccaggtcgcacggctcgttcaagtccggacgccagctcggcgcggttacggcgaactcgccgttgccgccgccggccaccgtgcagccaatgtcggtcaggatgtcggagatgcggttgatgtccacgtcgaggccggccacgcgggccacttcggaggccttgaagtggatgaccttggcgcgcggcgtgttgttcacgtcgttcgggtgttcgctgggctcgccgttgccgtacttggccatgagctcggcggccatctgggtggcggcgggctgcagcgcggtgtcgacgccacgttcgaagcggcgggaggcctcggatggaatcttgtggcgacgggccgaacgggcgatggtcacctgatcgaagtgcgctgcctccagaagaatgttcttggtgtcagcggtcacttcgccatacaggccgcccatcacaccggcaaggccgaggatgcgcgagccgcgttcgccgttcggcgaatcggtgataagcagatcttcgacgctcaggtcatgttccttgccgtccagggtggtgagtttctcaccctcgttggcgcggcgcacgacaatcgggccttcgagcttgtcgaggtcgtaggcgtgcatcggctggccgaggtcaagcatcacgtagttggtcacgtccacggccaaggagatggagcgcatgccggcgcgaatcaggcggcggcgcatccagttgggcgtgtgggtgttgggattgaagtccttgacgatacgcgcgtagtagcggtcgcaaccgggcacgccgtgaatcggattgttatcgtcgatttcaacatcgatgtccaccggggtgccgggctggtagtcagcaggttccggggccttctcgttcagtgccacggccggatcggtgtaggcggcaccggtggagtggtggtattcgcgggccacgccacggtaggacagcgtgtagccacggtccggggtgatgttgatctcaagcagaggctggtcgaggtgcagcaggtgcatggcgtcctgaccaggcttcagagcctcatattcagcctcggagaagccgtactgacgcagcagaatgatgccattgtggttgtcgcccagacccagctcacgttcggaggcacacatgccgttggagatgtggccgtaggtcttgcgcggctcgatcttgaagtcgccgggcagcacggcaccgggcagggtgacgacgaccttttcgccggccttcatgttgggcgcgccgcagatgatgccgcgcggcaccttgttgccgtcttcgtcggtctcgttccattcgtcgccgcagtccacgtggcaccagttgatggtcttgccgttcttctgcggttcgggggtggcgtcgaccacgtagccgaccacaatcgggccggtcacctgggaggagtggatctcctcttcctcaagacccaccttgacaaggtccttggcgagctgttcgtaggtcaggccttcgggaacctcgacatggtccttgagccaatcgatatcgatcataggcatggctgaatcactcccccatcacaaactgttcggcgaaacgcacgtcaccttcgaccaggtcgtgcatgtcgttgatgtcgctgcgcagcaggagcgtgcgctccatgccgacgccgaaggcgaaaccggtgtagacgtccgggtcgacgccggcggacttcagcacgttcgggttcaccatgccgcagccgccccactcgagccagccggggccgcccttcttgtcggggaaccacaggtcgagctcggcgctcggctcggtgaacgggaagtagctcgggcgcaggcgcgtcttggcttcagggccgaacatggcgacggcgagcttgtccagcacgcccttcaggtcggccatggtcaggtgcttgtcgacggcgagggcttcgcactggtggaagaccggagtatgggtggcgtccagctcatcggtgcggaacacacggccgggggacgcgatgtacagcggcacgccacgggtcaggagggcacggacctgatcggaggaggtctgcgtacgcaccaccatgttggagccgacgaaaccggcggcgtccttggcttgattgcccttgacgtagaaggtgtcctgcatctggcgggccggatggtccgggccgaagttcagggagtcgaagttgtaccattcggcttcgatttccggaccggaggagatctgccagcccatggagatgaagaagtcctcgacgtcttccatcagcttgggcagcgggtgacgggcgcccagaggcttgcggttcaccggcagcgtcatgtccacggtttcagcggcgagtgcggccttctcggcggcttccttgagctcgacttccttggggccataggcacggccgaagtcggcgcgcagcttgcccatgagcttgccggcttccttcttctggtcgacgggcagggagccaatggccttgctggccttggtcatcgccgaatcggcacctgcgtacgttgtcttgatggccttgagctcctccaggttggaggcgttctggattttctcgatgcccttggcaacctcagcggtcacctggtcggcgtcgaacaccatttgttctgccacgagaaccctttcgtctgatgttttctcagcgtttcacagcgtttttaccggtttcacattctttcaacatgacccgacatagacagcgacatcaacatcaccgcggccgaggtgccgaggttcagcgattcggccttgccataaagcgggatggagacgatgcggccgcagcgcgtgaggatgtccggttccaaaccacgcgcctcattgccgaacaacacggctttcggagcctcgaccgccgccttgtccgccagtactgcgggcaggctttccggcttgcgttcttcggtgccgtatacgtcggcggcccagacgcccatattatggtcgcctgtccaggtgaagaattcgtcggtgctcatggcgagtaccggcagatggaacagggagcctgcggtggagcggatgaccttggggttcagcacgtccacgcagtcgtccacgaagattacggcgtcgcagccggccgcatcggccgcacggatcacggtgccggcgttgcccgggtcgcgcacctgccagaaggcggcgatctgcgggccccggccgttcttgccaagttcgacgtcatcggcaccggcgtgcatggactcggcattgccgacggccacgatgccctgggcgtccggactgatgcggtgcatcacgtcgccggtgcagtagtgcacataaatcgtggcatcctgcgaggttccgacgatcttctccaacgtggaggagatgatacgcggatgttccaacgcctgcgaaacctccacatagaggtcctgcaccacgtccggccgccaagtgacggcctcgcgcacggattgcgggccttcgataagaaaacggcccgaacgttcgcggcctttggcgcgggtcagatcggcgatgcggcgaacgcggtcggatttcggattatcaagaatctgggcgttgatgggcataaccactaccctactgccgggtcattacgtcagtcgtggctcgctcccgctggcggaggcatcgtaagcctttcagacaccttgaaaggcactgtgccagtctgtcgcctttcagacaccttgaaaggcgaagtgccaattcccggtgccgatggctacgcctatggaggccagcgggacagccagacagatgacgtagaagatccagtcgataggcttcagacgcgagatacgggcttgggagcgtggggcgctggagccgaagccgcgcgcttccatggcggtggcaagtttggtggcgcgccggatggagagcaccagcagtccgaacgcttgggagagggcacgggcgatggcgttaccgtcgccaaggccgcgcgaacgctgggacaagccaagtgcgcgccaatcttcctgcagcagcgtaaacatgcgcaatccagccaacccgccgtatacgaatcgcggtgagaagtgcagaatctcaaccaaaccgtccgccaaatcagtgggatcgaggcccagggccaggatcacgccgggtacggcaatggccgccaccctgatagccgtggcgatggccagattaacggatccctcactgatcacaatccagccaccctgccataggatctcgcccgaggtacggccgtagagaaacacggagataaaactgccggcggcggcgatccataccggccaggtcttacggcatacggtccacggagccacgccaccaatccacagcagcacgaattcgatgccgagcgccgtggatgcggataccacatccagactgatgaacatcggaacgcacagcaacagcgcaccgatgatgcgactgaccgcgttgatgcgcgctatgaaccatgagggcgatgaggctttgaccggctccacgcgcgtttcctgcgggctgacggttaccacgtcactcatgcctcgcctcctcgaacatcacgcgtcgtgcgcccagcgcatccaccagcgcctcatcgtgcgtcaccatgaccacgcacgagccttggtcgcggatggcggcgatcagcttgaccatttcattccacgtactgaaatcctgtccgaatgtcggttcgtccatcaccaacactttgggtgcggcggccagcatggaggccacggacagtcgccgcttctccccgccagacaaggtatacgggttggctttggcgaagcgcgtgagattcatctgctcaagcatgcggtcggcggtccgataagcctcgtcttggctctgccccatcgacttggggccgatggcgacttcgtcacgcacgaaattggcagcgaactggtgttcgggctcctggaacaccatgccgatacggcccagcagttccttgcttttccagtcaatcggctcacgcccggcatgcgcgggcttgaggttgtcggcgatgagcaccttgccggcgataggctcgagcagcccggccaaggtcagggccaaggtcgatttgcccgcgccgttcggacccatcagagccgttacttcgccgggatagaaattcagattgatgccaacgccaagagcggttccacggccaaagcttaagttctcagtgctgagcaccggcgcatcgtgcgcaggctcctgcttcggcgagtaatcgggaatcgcacggcccggcacccacgcgccaccggcggccaatacgtcgcccatctcggcgaacacctcgtccggcttgccgtcggcgatgaccgcacccgtgggcgaacttgcatcgggtcggccgagcacaatcacgcgatcgaccagatcgagccatacatcgatatgatgttcgaccacaaccatggtctgtccggtggcctcgatgacctttttgaccgcgtcatgcacttcgaccacgccttcggggtcgaggttggcggtcggttcgtccaacaacagcagaccgggcttcatagccagcacgccggccaacgcgagacgttggcgctgaccgccggacagatggcgggtggaccgatccagttcgagtccgccgagtcccaccatatccaatgattcgcgcactcgctgccaaatctcctcgcgcggcacgttgaggttctcgcagccgaaggccgcgtcatcgcccagtcgttcaagaatgatctgcgagtccgggtcctgaagcaccagtcccacgcggcctcgcgcctcgcgcgcatcgacgccatcgatggtgagcgagccctcctgctcgccttcctcatcgccgccaagtacgcctgcgagaccggccatcatcgtgcttttgcccgcccccgaagcaccgagcagcaacacacgttcacctggccggatggtgaaatcgacggcacgcaacgcgaagtccttacgcgtggcgtgccgccatccccagccgctggcctctaccgcagccggattaacctgcatcagacgcgcgccttgctgcggccggattcaaagcgttccagagcgccggtggcggcgagcgcacgagacaagtaccagaccaccacgccggcgatcacgacgccggagatgatggagccaaccagataccaagtgacgcgcaggccgttccagcccgggttggtggcccagtagtaggcccagcagcccacgccggcgagcgcaccggacaggatggtggtgccgatgttccacttcttccaggcgaagacggcgaaggcgatttcggcacccagaccctggaggatgccgacgatcagcgagccgccgacgccccactggttgcccagcgtaagctcgaggaaggcggcgagggtttcggcaaacagtgcggcaccgggcttgcgcacgatgattgcggcgagcgggccggcgaacagccagaatccgttgagcagaccctcgaaaccgggggtcacgccttcgaacagggccagcggggcggagcagacaatgtcccagccccagaaaatgacgccggatgcgacggcgatgattgcggcgacgacgatatcgacgacgcgccacttgtaattggctttggccacagcttcagtcatgaatgtgcctttcttctgctcgtacgcaggccgaacatacatggatatatgtacgcacatgatgcacatgttcgtggccacgcgcgggttggttcaggcacgggtgggtaagagcgacatttccgtgcgccggcattatccggtcacgttccatcggtcgagactatgaatctcctctcagccgcctaacggcagctcccgtgtcaactccccgactataaagcaagccgccgtcaaaggcaatagccacatccgtgacctacctgacggcagctcgccaccattaccgatgcggttcggttacttgccgagcttgtccagcagcaaagcctcggtgatcacgttgttcttgaggccgggcagggagatggactcattggggctgtgggcgttggccttcgggtcttcggggccggtgaccagcacctgagcgttggggaaaatgcgctgcagttcggggatgaacggaatggagccgccctcgcccttgttgatgggctcaacgccgaaggcctcggtcatggcttccagcgcgtctttggtggccacggcggtcgggtccatggcccagcccatgccgttttcgccgcgttcgacagtgaccttggcaccgaacggcgcgtgggattcgaggaatgcagccagtgcttcctgcgcttcttcagggcgctgggtgggcgcggtgcgcagcgacagacggaagcgggtctccggggcgatcacgttgaaggatccctcgaccgggtgggcgtcgaagccgatcacagtcacggacggcttggtccacaggcgtgaggccagcgaaccggtgccggcgaactcgtaaccggccactacgccggaatcctcgcgcacggtggtttcgtcaaggtcgcgttgcaaaccgccgattggctcttccgcggccacgccgggcacggccagatcgccgttctcgtcgtacatggaagcgatgagcatggcggccaacgtgttggagtcaagaatcgggccgccgtactgaccggagtgcaccgggtgctcaaggccctgcacggtcacgtccacgcaggtgttgccgcgcagcgaggtggtcaaagaaggaatgtccgccgaccagttgccggaatcggccacgataatcacgtcggcggcgaattcgtcgcggtgagcctcgatgaagggaatgaagcttggcgagcccatctcctcttcgccttcgatgaacactttgatattgacgttgaggtcgtcgcccaaagccttcagcgcaccggagtggatggcgatgccgccgccgtcatcggcggagccacggccgtaaagacggccgtcgatttcggtggccacgaacgggtcggtgttccactcggccgggtccggaacaggctgcacgtcgtgatgggcgtagagcagcacggtgggggcgtccggagaaacgatatgcgagccgatgacctcccatgcgcccggagtgccgtcgacattggaagcctggaccaccttggcatccacacccacgaggcgcagttcgtctgccacgaattcagcggagcgcttcatatgttcggcggtgatgcccttggcggaaatcgactgcagcgcaaccttttcggccagcaccttgacgatgcggttccaatcggtttcgacgcgcgaacgaatctcgtcagcggtgagcgttgccatgatggtcctcctttatatgtgtgtaagcggcgtcattgcaatggctgcgccagtatataagtgtctgaacgtcaccgtaacctcaaagcatgacatggaatccgtttaggaaaaaagaagaggcccaagttcccgttgagcaggccccgaagaagaccgccgatccttctgagaaaaaaggccgtcctaccccgaagatgaagcaggctcaggccgccggtatccgtccgctggttccggtggaccgcaaggccagcgccaaggccgccaaagcccgtctgcgtgagaaggagaacgccgagtacgaggcgatgcagaagggcgatatcaaccacatgcccaaggcggaacgcctgccttggcgtatctacatccgtgattatgtggatgcccgtttcaaccttggcgaatggttcatcccggtggccttcgcgattctgatcgtctccatgttcgtcacttctttgatgcagaaccagtgggcttccatcatcatgatggcgcttatgtacggttacctgattgccgtgatcatcgacgtatggctgatgtggcgcaagctcaaggccaagctcatcgccaagtacggcgaacagtccgtgtccaagggctcccgctccttctcctacgcttggagccgttcgattcagatgcgtcgttggaggcttcccaagccgcgttacccgaagcgcggtcactggccggcagactgatgtccatatatactctggctcccctcgttgaggggctgagccgtaaagaaaacagtccagtggactgtttttaggcgaagtggcggcgatagccgcatatggctccctagcatgggagccatacttatatgcaccaaggaggcaatcatgagcgaacagtttgatctggtcatcatcggggccggccccggcggctattccacagccctgcgcgccgccgaactcggcatgaaagtggcactcgtcgagcgtgacgccaccgtgggcggcacctgtctcaaccgtggctgcatcccctccaaggcgctcatcaccgccacccacaccatcgacaccgtgcaccgtgcggccgaactcggcgtcaacgcctcggtgaatggcatcgacttcggcacgctgcgcgactatcgcctgcgcgtggtcaagacgatggtgggaggactggccggactgctggcccatcgcggcatcaccgtgttccgagccaatgccgcgttccatgcggatgagatcgctccagcaacttccaaccacatcgtccacctcgttccctcccccgaccaaagcgacatcctcacctatcacaaggccgatgtccccgaacccagcggccccacgatggacctcacggccacgaacatcgtcatcgccaccggtgccaagccacacccattgcccggtaacccgttcgccggcgccctcatcgactccacacaggcgctggaagtcaacgaatttccctcttcggcggtgattatcggcgccggggccatcgcccttgaattcgcctcgatgtggaacgccgccggttcgaaggtgaccctgctgattcgcaaggaccgcgtgctctcagcctgggaccggagagccggcaccacgctgacccgtgagctcaaacgtcatggcgtgaacatcatcacccgcgccagcgtcacccatgtggacaccggcgcgaaccttggtgccaccgtgcactacacgcgcgaaggccaggacggcgaacagagcgtttggggcgaaatcgcccttgtcgccatcgggcgtgacccgatcaccgacccagcatggggcgtgacgattgatgaccacggacatgtcgccacggatgcgtacggtcgcaccgacaaaccgggcgtatgggcggtgggcgacgtgacggccggtcacgcactggcgcatcgtgcttttgagcaaggcatcgtcatcgcggagaccatcgccggactcaatcccaagccggtgaacgaagccgctgtgccgcagatcgtgttctccttccccgaagcggcgtcggtcgggctcaccgtcgaacaggcgcaggcgagagaggacctcgtcgaaatcaaggagaccaactatccgatgctggcgaacgcgcgcatgctgatgagcggcacggccggctcattgaccatcgtctccggctgcgacgcggccaacccggacaccccgcgcgtgctcggcgtgcacatggtctccccgatggcctccgacatcatcgccgaagccgaacagctggtcggcaaccatgtgccgctcgccgacgcagcccgcctcgttcacccgcatcccacattcagtgaaacgctcggcgaggcgctgctcaaggccgacggacgaccgttgcacacacgctgagaccaaccagcacaagcaagttcggaccagcgcacctgataagatattgcccagtgtgtttcgtcccaacaaaggaagaagtgatggcggaaaaggacgcgaagccgaagaagcagagcacaatcaagcagatcatccagatctacaagtacacggctaaggaagacaaggccctgccgtggcttgaggccggtgctttcctgctgcctgtagtcgtgatgatcatcatcggtctgattgtcaagtggacctggctgacctggatcttcaccatgattaccgccatcatgctcggcattctgctggccaccatgatgctcacccgccgcgcggatgcagtcggctacaagcagattgatggcaagcctggtgccgccatcggcgtgctgagcaacatgcagaaagccggctttgacttcccgcaggaaccggtgtggatcgacccgaagaccaaggatgccatctggcgcggcacttcgatgaacggcatctacctgatcggcgaaggcgaatacggtcgcgtcatgaaggcgatggatcgtcaggaacgcgatatcaagggcgtcaccgccggctcctccattccgatataccgcatcgccgtgggccacggccccaagcaggtgccgctggccaagctgcgtagcacggtgatcaagtccaagagctatgagcccacggaccacaagaacgcactgatcgccaagattcatccgcgccgtcgcttcctgctgaccaaggccgagatggaaacgctgaacgatcgtctgcgcacgctgcaggccaagaagggctatgccatccccaagggcatggatccgaaccgcccgcagaagatctcccgccgcgcgatgcgcggtcgctgatcggcagcacacaaccaaatcgcacagaagccccggaatccgttcaatcggttccggggcttcgtcatatgtctcataatcgcgtccacttacatccacctacgtcacctgtcaatacccactgtccacgttgcggacatctctacctactcccccgatagtctccgtttccattctgtaatgatgtttcgttgaaataacgcgcctgcgcgattgtcggccacagtcacgaaacattctcgtaacccaagtttcgagccggcgaaacgcgctattttacgatatataccgttatatctcatacgaaaggagcggtcccgtgaccgaactcaagtccaaggaagacgtcgaggcccttatcaacaaggaaggcatcgagtatgtctccgtccgtttcaccgatcttatcggcgttcagcagcacttcaccgtgccggctagcgaattcctgaaggacgctttcaccgacggcatgccgttcgatggttcctccgttcagggcttccaggccatcaacgagtccgacatgaagctggtcccggacgttgagacctctttcgttgacccgttccgcaagcacaagacccttgacgtggccttctccatcgtcgacccgctgaccgacgagccgtactcccgcgacccgcgtcaggtcgccggcaaggccgaggcctacctgaagtccaccggcatcgccgacaccgcatccttcgctcctgaggccgagttcttcatcttcgacaaggtgcgtttcgagaactccatgcagcgctccttctacgaggtcgactccatcgaagctccgtggaactccggcgttgactccgaagaggacggcaccccgaacatcggtttcaagaatcgcgtcaagaagggctacttcccggttccgccgattgaccacacccaggatctgcgcgacgatatggtcgccaacctgcagaaggtcggtctgatcctcgagcgttcccaccacgaggtcgccggcgctggccagcaggagatcaactaccgcttcaacaccctgcagcacgcaggcgatgacctgatgaagtacaagtacgtcgtccacgagaccgccgctctggccggcaaggctgcgaccttcatgccgaagccgatcgccgacgacaacggcactggtatgcactgccaccagtccctgtggaaggacggcaagccgctgttctacgacgagaagggctacgctggtctgtccgatctggctcgctggtacatcggcggtctgatcaagcactcctcctccgtgctggccttcaccaacccgtccctgaactcctaccaccgtctggtcccgggcttcgaggctccggtcaacctggtgtactccgctcgtaaccgttctgccgccatccgtattccgctggccggcacctccccggctgccaagcgcatcgagttccgcgctccggatccgtcctgcaacccgttcctggccttctccgctcagctgatggctggcctggacggcatcctgaaccacatcgagcctccggagccggtcgacaaggacctctacgagctgccgccggaagagcacgctggcatcaagcaggtgccaagctccctggccgaggctatggacgccctggaagaggaccacgacttcctcaccgccggcgacgtgttcaccgacgacctgatcgagacctggattggcctcaagcgcgacgagatcgaccaggctcgcctggccccgaccccgctcgagtacgagctctacttccacatctgagtttgagagcttagcaacgttgggatttcgccattgctcttctcttgtgggagtctaatgggagtcattcagcgtaactagaaagaacctcgtgaaattcgtttcacgaggttcttttttgtatgttgcgttgtatgttatgcgatgtgtgttgctcctggaatattccaagggcgggccgctacttagtctcccaacgctccttgagtacataggcggcggctttgggctgacggtcgcgagtgaagacgcccttcttgttgccgtcgacgcgcatgatgccttcaccggtttggaagtcgcagaggttccatacctgctcgcccaccactgcctcgaacatgtcgaacacttcgtgctgcatggtgaggtactcacactggtattcctcactccactgcacgcttggcagcttgtgcgcaccggcatcggtgtccgcaccgtattcggtgaacaggaatggcttgttgggttcggtgttcatccattggttcatctcgtcgatgaaggccttcttggctccgatgagctgatacccatcttgcacataccagccgtaataccggttcaggcagatgacatccgcgaactgatggcacttgtctttgcctccggcggccatcagcagattggtgtaggtcagcgggcgatgctgcggatcgagcgtgcgcgcgtaatcgaatatctccttgaaatacggcacggccgcctcggatgccgagtcgttggcggcgtcgatgaaattccaagcgccggaggtccccggcattcttttcgtcgaaggggacaattcagaacacaactgccgacacaatcgtcagggaggccagcgagaacagcgtgcttacgagcacgaagccgaccgcatactcgggcatgttgttcttgcgaccggtgaacatggcaatggtggtcatggtcggcagtccggcgatgaccgtaatcatcagcaccatgtcatgggtgatcggcagttgcggcaatgcgccggtcagcgcggtcagtagcgcgtagaaggcgagcgggaatgcgatcatcttggcgactaggccagcatagagttcgtagcgtttgaggacgccccaccacttggtcagcgcgaacaggccgcccaagtagattagcgacatcggcgtggccatattgccgatggtgtgcagcggcttcaggatgatgtccggcaccttgacgccgagcagaatcagaatcagggcgagcatcacgccgacgaaggcgggattgacgaatcgtttaagcaggccgaggacgctggtgcctggcgaggggcggacgacggccggagaaccaccgtttgcggcattgctcgccgaaccagcattgcccaccgaaccggcgccgttcaccgaaccgttcacgaccgcacctcgcgcgccaatcgcgttgccgccagtcgtttcgtcgaccggctcgcatagccatacgccgtacgtccagagcagcgtctggtcgatgatcgacatcagcgccacgtaaatcgcgccgttctgcggccaaagtgccataatcaacggaatgccgatgaatccggcgttgccgaaaataagcgacgcctgaaatacatggctacgcgaacctttgagccgcaacagttcggcgaccagccagaacaccaggatgagcagcgcgtacatcacggcggtcagcagcatcacgccccagttggcggcaagctgcgcgcggtccgcgccgtcgacggcgttcgagaacacaagcacggggatgagcacgttgagcagcagcgagcacatgccgtccaacgccgtctgaccgtagaatcgaagcctcacacatccatacccgaccatcagcatgatcagaaatccgactaactggccaatcatgacgccgaactgccccatgcacactcctctcgctcgcgttcccgtgcttttctgtcactggttcatataggcagccatctggacaggctcggcggcacacgcatcagtatgttcgataccaccacatgccaatccacttctcgttcaaccgttccccgtgctaatgcgccgccggccaccccgtgttgccggtgctgcgcgagcaccattacacgtattgcattccggtgatcagcgggcgcaacgtgtgggtcggcgcgaacgtgtcgattctgccgggagtgaccatcggcgacaattgcgtgattggcgccggttcggtcgtgacacattccatccccgccaactccgtcacctacggcgcgccctgcgaggtcgtgcgtgaaatcggcgacaaggaccgcgagtatttctacaaaaatcgcaagctcgacgtgtgggagtgagctttcgcgctactgctctttgagcttaaaacgctcactgaattggcggtcgcgccagtagtagacgtcgtcgcgttcgttgatttcgcgaattaccttgcacgggctgccataggcgaccgtgttggcggggatgtccttggtgaccagcgagttggcgccaatgaccgcgttgtccccgatggtgaccccgggcagcacggtgacattcgcgccgatccagacgttctcgccgatgtggactggcaacgaatactgggcaccctgatagcgcaggtccggacgcacgggatggccggtggctacaagcgtgacgttggggccgatcatggtgtgggatccgatgaagatctcaccatcgtccaccagcgtcaggttgaagttggcgtaacagcgctcgccccaataagtattgcagccccagttcgcatacaccgggcattcgaggtacagaccctcccccgccgcgccgaagaacgcctgcatgagttcggtacggcgcttcgggttggtcagcggcgtggcgttgagttcgagctggagatcacgctgggcggcctgcagatcaaaaaagccgtccacatcatccggcaggtagacctcgccagagaacataagcgccattttctcgcgcgtcgcatcatcgataatcggcttggcgatcggcttgtcttcggtcatcattggctcctgttcggcgttttggcgattgtgtcggtcgaactattctgtcacagactcgttttcgacacccagcatcgagcgcagccagtcaaggattcagatgtgcgattggcaccgtgcgggcctcacacttttcttattgagaacgattcgccgtgcagtcaagccctccatccacccaaaaaggactcgcttttggccgcgtcgtcgcggtaggccttgccgaactcgtcaatgagcccatggaattcctgcaaatccttgacactgaggttcgtatccagcaccacgggcgaataggccctgtggaatgccggatagccggccggcacgtcgaatccaaggaaggcgaacagccgccgcgcgtaggtatcggccacgaatgtgcggcgcgagaacacgtacagcatcagatcgtcggccgtctcgccgccaataccaaataatccaagcaactcggcccgtaattcggcatcggaaatagccgcggcaccctcgggcgcggccccgcaacgctccacataccaccaactcagcgactgtacggtcttggatttgttgacataaaagcctgacggtcgaatcagttcctgcaaacgctccggctccatggccaccagcttatggggttcgagcacaccctccgcgttcaacgccgcaagcgaacgattcacattgccccacgccgtattctgcgtcagcaccgcgcccaccataatctcgaacgtggtctccgccggccaccatccggtcgggccgagtgcgtcagccatggtgcggtacagcaattcgatgcgctccggcacaggccacttgtgtgcctggttggctttcatacgtttcatattctgcattcaggctccgtattagccatccgccattcatttattaggtcgattatgcgttcattaggtcacttgtgatgaacactgccttcaagaatggcttcattccaatgctcattatctcatgctaagcagggcaccgacctaatgaacgcataatcgacctaatgaacgcaacggtaaggaaaaactacagagattcagcgagatatgctcggtccacctggtctggaagtcgaaaatcttgatgacatctaccgcaattcgtgcaggattcgccgcatgaacgggatagtgactaggaatgtcagcacgtcggacaccgattgcgccatttccacgccgagcacgccgaacatcatcggcagaatcagtacgatcggtgccaaaaacagaccttgtcggcacagggccaggaatgaggcgatgccggtgcggcccatggtctgggtcatcatattgcccatcatgttgaagccgttgagaatcaccgtgcagcattggatgtgcagcgcggccacgcccaccgccaccacggccgggtcggagcggaagatctcgaccagttgcggcgcgaaaatccacagcaacaccgccaacgccacgagcacgcaggtggcgagccgcacgcagaaccagtacccttctttgacgcgcgcgaacaggccggcaccgtagttgtagccgcacaccggttggaagccttggccaagaccaacgatcaccgagttggcgcccagcataatgcgcatcacgatggccatgccggcgatggccgcatcgccgaacggattggcggcaatgttcacgcaggtcacggaaatcgaaccggcgccttggcggatcagcgagggcaggccaccgccggccacttcgcgcatgagcagcacatccggcctgcaattgcgcagggacagtttcatcacgccgaatttgcggctcattgtggtcagaatcgtgaagctcaccgtctggcagatggcggtggccaggccggcaccaaaaattccgaggtgcagcacgaagataaacaacggcgcgagcaggaaattcagcaatgcgcccgaaaccagcccgatcatgccgaacgccgattgcccttggtatcgcagcagtccgttgagcgcgaacgacccgcatacacagggtgcggcgaccaacaacggcgtcaggtattgcacggcgtatggggcgatcgtcgaggtcgatcccagcatgacgaccagtggccgcagggtcagcaatccgattgtggcaatcaccaaaccagagagcaccgcgcccgcgaagcccacggccagtagtcgggaggcgcgctcattgttctgtttgccgagttcgcggctcatcgagttgcccgcgccgttgccgaagaagaagccgagcgcctgcatcacggtcatgatggagaacgcgatgccgatggcaccggactgcgcggtgccgagctgaccaataaagaa

SEQ ID NO: 1580 - DNA, 11067 bp, Unknown
  R221_24m  MAG No. k141_36423
ggccacaccgaatccatcatcgccgaggattatgcggccatcgaggaattcgccaagcgcatcgactcggccgtggtcatggtcaacgcctccactcgcttcaccgatggcggcgtgtttggctttggtgctgagcttggcatttctacgcagaagatgcacgcacgcggtcccatgggattgcgggagatgaccaccaccaagtggatcggttacggaacaggccaggtgcgcgcatgaacgaggacggcaacatgaacactacggctgacacggcaaacaaggcaagcgaactgcggcccgacatcgacctcaacgatcccaagctcggcctgaagatcgcggccgaacggctcagcatcgtccgctatgtgttcctcgtgcagattgaggacggcatcgcctccgccgcccagcgtgcgtcgctcgaatacgcggacgccgtgctcatcggctggcccgagaccgattcacccgaagtcgtggacctcaacgatgcccagctcaagatcgtgcgcgaacacatggaactcatggaaggctacatcggcaaatacagccagatggagcacgacggcgacctcgacggcatgaccgacacgctcatccgcatcaccgagcgcgtggccgaggtccgccgcctctaccagccggacttcccgctgcccaccttcgccgagattcgtcgcgtggtccaagacgaatgggatgaagacatgggcaagatcgatcccaaggaagacaatccctccgccggcgaaatcgaagaggaaaccgaatcagccgatgacgccgccggcgagggcggccaggcatgagtggtgttaccggcagccacaaaacggctgcgtcagttcagtccgaaaaaacagtggaatccgccgagcccgccgaaatcattgccgtcacccaaggcgaaaccgaacggcgcatgtccgacctgtccgtaccggccggggccagcagccacggcaaaggcaggctttccgcacgcggcaactggcatacacgcctgcgcgtcggcatcatgggcggcacgttcgacccgatccacaacggccacttggtcgccgcctctgaagtcgcctgggtgtatgacctcgatgaggtgattttcgtgcccaccggccgacctgtgttcaagctggacaagcacgtcaccaacgccgaggatcggtatctgatgactgtgatcgccaccgcatccaaccccaaattcaccgtctcgcgtgtcgacatcgaccgtccgggcgtcacctacaccatcgacactctgcgcgatatccgcgcccaacatcccgacgccgagctgttcttcatcactggcgcagacgccgtggccgaaatcatgcagtggaaggacgccgacctcatgtgggacctcgctcacttcgtggccgtcacgcgccccggctactccagcccggacggcgtgaccttgcccgaaggcaaggtcgatacgcttgagatcccggccttggccatctcctcgaccgatgtacgccgccgcgccgaacacgacgagccggtctggtatctggtgcccgacggcgtggtgcaatacatcggcaagcatggtctgtattcgtacgaggactgacgattcgtacgaggactagtgtgcatttgtacgagggctggtgaggattagcgcgaatcagcgcgcatcaatcctcgccagtgcaaggatgaacggtcaggtcagtcccatcttgattttcaatgtcattacgcgagtcgccgccgccgtcaccttcgaagcgaaagccggatcggacttcgcccgttcgttgaggccgtccacaattggctttacataatccgtctgaccgatgcaggacatgtcgccgcccgcctcgacaagatttactcccaattggcttacatcgtagctgctcaacgcttcggcagatatcgaatccgaaatcaccacgcccgtgtacttcaggacgttgcgaatatgaccgtcgataatcgtagaagaaaacaccgccggattattcgggtcgatggattgatacgtggctgacgacatcatcaccattgcaggatcggccttggtaatcgcctggtcaaaggcacctgcctcggccccgtccaacgtggtggtcgtatccagaatgccttcggtggtgaagtcggtattgccgcttaccgcgcccaacccaggataatgtttgaccgccgcaccgacttgagcgtctcgcaaaccttcaataacggcgatgccatgttcggcgttgccggccgcatccaatccgaaatcacgatccagcgcgccaatcggagcatttgaggcacgattgccaaccactgtgccaagcaccggtgccaaatcgacatttatgccagcagtggctaattgcgaaccccacgtgcctgccgattgacgcaatgcgtcagcggacattgtgccctgctcaacggcactgggcattgtgtcgaaaccggtaccagtcagatgctgtacctgaccaccctcctgatcggtggcgatgatgagacgattgccggccggcgcatatccttggagttgcgcggtcgcggtcttgaccgtatcgacgccggtattccaattgccaatgagaatggccgagccaatgtgctcgtcggcgattgttgaagccaacgaggagggttcggaaccggcgaacaacggcaccatcactaactgtcccacacgttcctcaagcgtcatggcggataccgcacgttgggcttgtgccgccggatcgtcgttcttcttcggggaaggaacgtcggtgcgcggtaacgcactcgtctgggaggtctggggagtggtggtgttgccgtttgatgtggatttggcgaaccatccgacatgccatccgtagactgccacaccggccaacaccaccgccaaagcacatattgccgccacgattggaatgctcctgtgccgaagttggcgtgcggcgtgtgctgagggacgcatatgttgtggccgttgtctgtccataccggcaagcgtagaacagagcgtagaacaggatgttgcctcattctgtgctcagggcataaccgacctcccgccctttcgataggcttgagttatgtcttttaacgatcctttctcagtactgttcggcaatggcggcgattcacgacgcaacaatgcgaacaatgacgatccgatcatcctcgatgtcgaggccgatggggacggtccggcccacaacaccaacgctggcccctccgggtcatcccgccctccacgtggtccggccaatccgcgtatcacccgtaagccagcgtccggtggctcaggagccagccgtggcagcaagattctgatcggcgtggtgctggccttggccatcatcgtcggtctgttcttcggcctgtcccgattcatcaccgatctgatgtggtacggccagctcggcttccagtccgtggtctggacccagctcggggtgaaaatcggtctgtgggtggcctacgcgctgctcatggccctgaccggcttcgtttccgcctggctggccattcgagcacgccctgattcggccgacggttccaccattcgcattaacggcgatgtggtcgaggtcggcaaatccgtcagctcgaaaaccgctcgccgcgtggccgtggtgatttcgctgatcgtcggcgtcatcttcggttcccagtttaacgcgaactggagcgagattctgctcatgttcaacgcgcagtcgttcggcaccaccgatccgcagttcggtctggacaacggcttctacgtgttcgtgctgccgggcctgaagctcgtgctcgccgccgtggccatgctgctgggcgtgggccttgtgttttccgtggtcacgcatgtgctgatgggcggtatccgcattaccatgccggttaacggacgcggcctgttctccattaccaagcgttgccgtcgccagcttggcatctggctgatgctcaacatgttcgcttgggcagtgcgccagatgattggcgtcttcgaccagctcaccgtgcagggttcacgcatcaccggtgcctcctacaccgccgtacatgccaacatccccgtcaccttcatcatggccgtgctgaccgccatcctcggcgtggtgctgggcatctggctcatgcgctcccacacgctcgaaggccaggcgtccatcggcgtgcgcgcttccgccgcgctcaaggcctggcgtgtgccggtgacctccattgccgtcgtggtcgtggtgggtcttgtgctcaccgtggcatggccggtgctgttgcaacgcttccgcgtcaacccgaacgcacaggagatggaatccacctacatccagcgcaacatcgacgccacccgcgccgcctacggtcttgacaagctcaagaccgagcaatacaaggtgaccgacaagggtgagcagggcgctctggccaaggaggccgacaccaccgcgcagatccgtctgctcgacccgcaggtcgtcagccccacgttcaaacagttgcagcagtccaagcagtactacaccttcgccgacaccctggcggtcgacaagtacgagattgacggcgtctcccaggacaccgtgattgccgcccgcgagctcgatctggccggcaatgacaaccgcaactgggtcaatgaccacaccgtgtacacccacggttacggcgtggtggccgcctacggcaacaaggtgaccgccgacggccagcccgaattcttcgaatccggcatccccacccagggcaagctcaccgaatccgaaaagtacgagcctcgcatctacttctcgccgaacaccaccgaatactcgattgtcggtgcccctgaaggcacgcaggcttgggagttcgactacccgaccggttcggaaggtgctctgaccacgttcaagggcgacggcggcccttcggtcggcaacctgttctccaggattctctacgcgatccgcttcggctccgatcagattctcttctccgaccgtgtgaccagcgaatcgcagattctctacgatcgttcccccaaggagcgcgtggccaaggtggcaccgtacctgacgcttgacggccgcgtgtatccggccgtggtcgatggccgcgtcaagtggatcgtcgacggctacaccacctccgacgcctacccgtactcgcaaataaccgacctcggctccgccaccaaggattccaccaccgtctcttccgcaacggtctcgtccctgggctctcagaaggccaactacatccgcaactcggtcaaggccaccgtggacgcctacgacggttccgtggacctgtacgtgtgggatcaatccgatccggtgatcaaggcatgggagaagatcttccctggccagtaccaccagctctccgatatctccggcgacctgatgagccacatgcgctacccggaaagcctgttcaaggtacagcgcgagctgctctccaagtaccacgtgacctctgccagccagtactactcaggcgaagacttctggcagacgccggtcgatccgaccgaatcccagtcccagcaggaccaggacatcctgcagccgccgtactacctgaccttgcagaccggtggcaccgaggaaccggtgttctcgctgacctccacctacattccggctggccagtccacccgtgagatcctgaccggcttcctgtcggtcgactcggatgccggcaatgagaagggcaagataggctcgaactacggcaccatccgattgcaggagctgcccaaggattcgaacgtaccgggccccggccaggcgcagaacaacttcaacgccaacgccgatgtatccaaggaactgaacctgctgcaatccggcgacacgcaagtggtgcgcggcaacctgctcaccctgccgctcggtggcggactggtgtacgtgcagcccgtgtacgtcaagtcttcgggcgtgacttcattcccgttgctcaagaagacgctggtcgcattcggtgatcaggttggattcgcggatacgttggatgaggccttggatcaggtgttcggtggcaattccggtgcggccgcgggcgatgccgagaacgtgtccggtgaccaatctggttccgataccaatggtggtcagtccggcaccacggacggaaagtcggattccggctcgtcttccgaccgcagccccgaactccagcaggcgttgcacgatgccgcccaagccatgaaggacagccagtccgccatgaagaacggcgactggaccgcctacggcaaggcgcagcaggagcttgaagacgccctcaacaaggccatcgagctcgacaagtaacttggcttccctcagggtgaggggagctatcgccgaaggcgactgaagggagtcggttacctcaactgacatagcccgtccttatcataaggacgggctatttgcgtattcaaaggaacttcatgccatacaccttccatccggccgtcgaatccgacatccaagccatcaccgacatctacaacgctgcggtggtggcgggtggggccaccgccgacctcaccccgcgcaccctcgaccaacgccgcgcctgggtcgaatcccatacgccgccctacggcgtttttattgtggaatcggaagacggttcaatcatcggcttcggtgcgctctccgtgttctacgatcgtgccgggtatgacggcgtcaccgatttggcctattacatcgatccggcatggcaaggcaggggagtgggcacgttcatgcttgacaggctgctcaccgaggcgcgggcccgccacatgcgcaaggcctgtggcatcattttcgccgataacgtcggctccattgccctcatgcgccgcttcggcttcacccaattcggcctcatgcccgccgctgccaccgactccaccggcaccatgcgggacatgtcctactggtatttggacctgtaggcccgaggcggtttacccttgctctccatggattccggtgtcctataacactaaaaagttgtatcggatcagctcttttcctcgaacgccatatatcggacgcgcttatcccagataacggcaaactacgggacggcacgcgattttcgtccgttttgacgtggtatcccgcaatcacgtgggatgccacacacatcaaacgatgcacatagctcgcgtcccgcaactcttcctgcgaaatcattggaattctgccattcttatgattcggtgcagataacgtgcgataacgcttgcgggatgccacgccaagaacgcccaaaatccgctgccgtcccgcaatatgtcatccgattgcagggaagcgtcatctgtctgagctgtttcccttgcttggcgtcgtaaacgacaagttgttgattgccgctgcatgtttctcctatttgagaaccgaatgctacatactgagattttttccaaccggagttgatgttaaagtgacgccaagctgggacacgctgttcgtgtgcggcatcctgtgcaacgtgctcgtctgcctggccgtgcgcatcggattcgccgcgcgctccgtatccgacaaggtgctgggcatcctgctgccgatcgccggattcgtggcgatgggcttcgaacactgcgtggccaacatgttcttcctgccgatgggcctggtcgccaaaacgtttggtttcggcgccgacgcggcgggcgtcgcggcgctcgacgtgtcgggcatcctctataacctgtccgcagccacgctcggcaatatcctcggcggccctgttcgtggcgctggcctactggtacctcaacggcaaacagcgcgaaaaggtcgctggcggcaccgcctaatagacgcgattcactcgtccccatctcttgtaatactggtattacaaggaggtgcgatatgactatggccatggtgacggcgcgcgtcaatgccgaacggaagcgcgacgcggagaaagtgcttaagcgtaatgggcgcacctattcggacctgattcgtgatctgaccgactaccttgcggatacgggggaactgccggaattcgagcgtctgacgctctccctgattcaggagcgggagcgtaggaaaaagcaggagttgattcaacgtttcgccgaccggaatttgccggaggcggaaggcgatctttcggatgaggagattctcgcgcaggcacgtatggaacgatttgggggacgggatgaaactgctgtttgacacgaatattctgctcgatttgtgcaatgacaaacgagcgcctttccataaacaatgtgttgatttgctcatggaagccgttgcacagccaaacattgagatcatggcgccggtatcgtcattgaatgacgtgtattgcgtgttgcgcaagcattatggcgaggagcgggcggcgcgagacgatatcggtggactgatggaattgttcgacatccgtccacttatggaacgccatgcgtgtatgtcgtaccggtccgatgagcccgacttcgaggacgggctcatccgtgccgttgccgaggacaatgacgccgacgtcatcgtgactcgtgacgtcgaagcgtttcaccattcatcggtccgatcgatggatgccgagcaatgccgtgccctgctgcttgccgattccaaggcttgacggcggcgttgagtacaatcttgacggttgaatccggccgggcatgggccagtgcgcgaggcgaacgcgcgcatgacgtacggaacgtacagaacgtgcatacgggaatataggaagacggacgaggagtggattatggcatcggatttctggctgattgcgggactgggcaaccccggcaaaaaatatgaggacacgcggcacaacatgggcttcatgaccgccgacgtgctcgccgaacgttggacggtgaacttcgccgaccacaaaggtctggccatgctcggtaaaagcgtgatgaacctggacggccgcaccgtcaagttctttctggccaagccgctgacttatatgaatgattccggcaatgcggtggcttccattagcgcctattaccagatcgagcccgaccatatcgtggtgattcacgatgacatggacttggaattcggtcgtatcaaggtcaaggcaggcggctccgcagggggccacaacggcatcaagtcgattgaccgttccctcggcacgccgaaatacgcgcgtgtgcgcatgggcgtcggtcactccaagcgcggtgcgaacgcgcatgacaacacggtgaactgggtgctgggcggattcggtccggaccagcgcaagcagctgcccgaattcctggctgacggcgccgacgccgccgaggacatcatcttccgcggtcttgccaagacccaggagaagttcaatggccggtgaggcgacgcacccggacctgatcaacggctcactggtaggcatcctgtctgagctggaacaggacaagaccttccttagactcgccactggtgacatcgaggtttcggacgacatcgacaattccgttctggccggtgtttccgaaggcttgcgcccggctttggccgccgccatcgggcagggtgtgaccggcaaacccggcaagccggtcgtgctggtcgtggcctccggccgcgaagccgaagagaccgtgggctcgctgcgctcctggtatgacggcgacccggacgacatcgcccagctcgaagcctgggaaaccctgccgcacgagcgtctgagcccgcgcgcggacaccgtggccagccgcatggccgtgttccgcagactcaagcatccgagcgataccgatccgatgttcggcccgattcgcattctcgtcatgccgatccgctcgctcatccagccggtcgtccaaggactgggcgacgtcgagccgctcgtgttcaccgtgggggaggacctgcccctcgacgaagccgccaaacgtctgatcgaaaacgcctacacgcgcgtggacctggtcatggaccgtggcgagttcgcggtgcgcggaggcattctcgacgtgttcccgcccaccgcaccgcacccggtgcgtatcgaattcttcggcgacgaaattgacaccatcaaggaattccacgcctccgaccagcgtacctacggcgacggcctcaagaccatctgggccaccgcatgccgtgaactgcagctgaccgacgccgtgcgcgcccgcgccaaagccttggtcggttcgattcccaatgctggggacatgctcgaatccatcgccaacgccattccggtcgaaggcatggaatccctgatgcccgcgctcgtggaccatctggaaccggtgggctccatgttgcccaagcatgccgtgatcctcctgagcgacccggagaaactgcgccgttccgccgaagacttggcaaaaaccgcgaacgagttcctggccgccagctggcatgtggccgcctccggccacggctccggcgcgcccatcagcttcgacgaagccagcttccttgactatgcggaaaccatcagcgccctcgaatactccgaacatccggtgattcgcctcaccagtttcggcgtggacaccacgctgaccggccacgtgcagctcgacgcccagaacccggccgaattccgaggggatgaggccaaggcctcccaaggcatcgaaggcctgctcgatgccggcttccacgtcaccatcaccgccgctgcggccggcaccttggccaggctcaggcgcgcgatcaacactaccggcatcgccaatttcgacgtcatccgctctcaggccatcgacggcttcgtggacaaagccgccaaaatcgccctgctcaccgaacgcgacctgaccggccgcacttcagccgtggccgtggccaaaacgccgaaacgccggcgcaaggccatcgacttggtggaactcaaaaaaggcgattacgtggtgcacgagcagcacggcattggccggttcatcgaaatgcgccagcgcaccatcggcaccggcgccaacaaaaccactcgcgaatacctggtcatcgaatatgcgccgtccaagcgcggcgccccggcggacaaactgttcatccccaccgaccagctcgaccaggtcagcaaatacatcggtgccgaagcccccaagctcaacaagctcggcggctccgactgggcggccaccaa

SEQ ID NO: 1581 - DNA, 3030 bp, Unknown
  R221_24m  MAG No. k141_
gaggtcttgcaggccgctcaggcggcagttctgcacttcgtcggcgttggaatagtcggcgatgttcttggcgcaggtgtggaagtcgcccttggtgtatccgacggcggggaaattgccggcggagtcgtaggtgttgccggcggtgcccgagcccgacgtgacgtggcgttgcgagaccgggttcaacccgagtctgtccagaccgagcagcacccggccgtcgaacgcgctagactcggaaccaagccgcgcggttttcttcactttttcgatcacacaccgaataaaaccgcacggcccatacacacccaaatgcgaagggccagtaatatcgccaggcactggggactggcagcactccacccgacgattcatgcgaggaggacacatgggcaaggcagacatctaccaggtggcgaaggcggccggcgtatccatttccacggtgtcgcgcgcgttcacccgccccgagctcgtctcccagaagacgcggcacaaggtgctggaagtggccgacaagctcgatttcaacatctcccgctccgccacggcactgaagtccggccagacctaccgcgtggcgatgctgatgaacgaggagatcaccagctggttcaacacccagacgttcgccggcatcgaatcggtgatgcacccggccggctatgacatctccctgttccagcacatcgacaccgcggccaaccgacatgagttcttcaccgagctgcccatccggcgcaatgtggacgccgtgttcgtggcctcgtttgccatcgacccgcacgaggtggagcagctgcagcgcatccatgtgccgatcatcggcatcaatacgccgtcttccgagggctttgacgccaccatcagcatcgacgacgaaaaaggcatgtacacggccacgcagcatctcatcaacctcgggcaccggcacatcgtctacccctgctccgaggcggccgggctcgattcctcgatcgacgcgcgagcccgcggcttcatccgcgcctgcgaggacgccgagggccgccacgacatcaactggcaggtgctttcggtgccgcgcggcccggccttcgccgactccgcgctgtccgcgctgctggcgttggacaagttcccggacgccatctgctgccagatggatatgatggcgattccgctggtgctcaagctggagcggtacgggcaccgtacgccacgcgactactcgatcgtcggcttcgacgacagcccgtacgccgacaccatcaatctgaccactatgaggcaggacccgtatgcgatgggccgcacggcggccgaaaaagcgctcaaactcatcgccggcgagacgccggacaccccgcacgaggtgatcgaggcgcaactcgtgccgcgcagcaccgatatgccgtttggggagatggcgtaggggaggaatcggccaacggaatcggcccctggccgattccgagactacgccgccaccaacgcgccaaacaccagcagtaccgggtagatcacatagaacgcccacttggtccatggttgcttgaaaccctgctcgccgttgcggtagtgcaggaaggccacgccgatggcgggcgtgatgcacatcaccgcgcccagcagcccggcggtgaacatcatcgaattctcgcgtgcgttgaggaagtagaacaccatcacgaacgacagcgtgagcacgcccgtgtacagcacgcgctgatccacgcccacatgcagcagcagatcccacagcaggcccgcgataatgaccagcacagtcagcgtccagcggaaggcgccgtagtatttcttggccagccagtccaccagcgccagcacgaccagggcgatgagcagtccgaacaccgggttctgcacactcaggctgaagggcttgccggccatgatcaggtcgtatggcacctcgctgaccacggccacgacgagcagtcgcagcccgtacgcccatacgttatgcgtatgacggtagccgtcgaacaacagccacgaatagatcggcacggcgatccaggaagccgccgcgcacagtacaatcgcggtcagcgctgtcatgtcttggctcgggtcgtccaccagcgcaggcagtatcgcgacgctcgccacgttgagcgccatgaagatcgcgccgatcaccttgagacggaacacggacagtcccttgcgacggcgctgctcgccgcgccgcgtcttctccatttcgacttcgttcatgtgttcctccgttgttgtgatcattcgggctgtgggagttgtgtggcgccccggcggccactcccagtcggctttgccgacagcccccgccagcggggctttattgggctatgtcaggtattgcaatagttcagcataatcggggccggccagcgacaagacggcatgcgcactggcctgcgggtcgctggcgggcgaaatctcggtacgcagatagacgccggcaatgcccgccgacgctgcacccaggatatccgcacgttcgtcgttgccgaccatgaacacgcggtcaggcgtcagatgctcggcctcaagcgcccggcgaaagattgcgggtgatggtttgcgcacgcccacctcactggaaatgacgatgcgatcgaacgcccgatccaacccaagcgcggccagttccggccgcgtatagcaggattgcgcgttgctgacaagcacaacgcgctttcctgcgactcgcaatcgcgccagcagttccggcgcgcccggatacacccgcagcaggctggtactcgcctgccgaaacgtccatgccaacgattgtgccgtagcgtcgtcattccggcgctcccccgccaatgccgagtacaccggcagcaaaccgggctcggcccactcgccatgcgcgacgacggcggcatcgcgcatcggctgcgccaagatttcgaatcgccgccgaagctcggcgttgctggcatacgtcacaccacggtcggccaaggccgaacgcagcgcatcccaggcggcggccgccgcctcatcggcgtgaatatccaccaaagtgccgta
